United States Patent Application Publication US 2018/0305689 A1 - sequence listing, part 97

SEQ ID NO: 1389733 - RNA, 19 nt, Artificial Sequence
  Description of Artificial Sequence: Synthetic oligonucleotide
  Antisense strand to SEQ ID NO: 1389732
cuccugacuacacuauuuc

SEQ ID NO: 1389734 - RNA, 19 nt, Artificial Sequence
  Description of Artificial Sequence: Synthetic oligonucleotide
  Sense strand starting at position 1305 of SEQ ID NO: 1243027
ggccaagagaucugguaag

SEQ ID NO: 1389735 - RNA, 19 nt, Artificial Sequence
  Description of Artificial Sequence: Synthetic oligonucleotide
  Antisense strand to SEQ ID NO: 1389734
cuuaccagaucucuuggcc

SEQ ID NO: 1389736 - RNA, 19 nt, Artificial Sequence
  Description of Artificial Sequence: Synthetic oligonucleotide
  Sense strand starting at position 1311 of SEQ ID NO: 1243027
gagaucugguaagaacaaa

SEQ ID NO: 1389737 - RNA, 19 nt, Artificial Sequence
  Description of Artificial Sequence: Synthetic oligonucleotide
  Antisense strand to SEQ ID NO: 1389736
uuuguucuuaccagaucuc

SEQ ID NO: 1389738 - RNA, 19 nt, Artificial Sequence
  Description of Artificial Sequence: Synthetic oligonucleotide
  Sense strand starting at position 2522 of SEQ ID NO: 1243027
cgauccguagugagguuaa

SEQ ID NO: 1389739 - RNA, 19 nt, Artificial Sequence
  Description of Artificial Sequence: Synthetic oligonucleotide
  Antisense strand to SEQ ID NO: 1389738
uuaaccucacuacggaucg

SEQ ID NO: 1389740 - RNA, 19 nt, Artificial Sequence
  Description of Artificial Sequence: Synthetic oligonucleotide
  Sense strand starting at position 2588 of SEQ ID NO: 1243027
guggaccauugguucuuaa

SEQ ID NO: 1389741 - RNA, 19 nt, Artificial Sequence
  Description of Artificial Sequence: Synthetic oligonucleotide
  Antisense strand to SEQ ID NO: 1389740
uuaagaaccaaugguccac

SEQ ID NO: 1389742 - RNA, 19 nt, Artificial Sequence
  Description of Artificial Sequence: Synthetic oligonucleotide
  Sense strand starting at position 2603 of SEQ ID NO: 1243027
uuaaaccucgguuagugaa

SEQ ID NO: 1389743 - RNA, 19 nt, Artificial Sequence
  Description of Artificial Sequence: Synthetic oligonucleotide
  Antisense strand to SEQ ID NO: 1389742
uucacuaaccgagguuuaa

SEQ ID NO: 1389744 - RNA, 19 nt, Artificial Sequence
  Description of Artificial Sequence: Synthetic oligonucleotide
  Sense strand starting at position 2887 of SEQ ID NO: 1243027
caguauuuguuacuuaggu

SEQ ID NO: 1389745 - RNA, 19 nt, Artificial Sequence
  Description of Artificial Sequence: Synthetic oligonucleotide
  Antisense strand to SEQ ID NO: 1389744
accuaaguaacaaauacug

SEQ ID NO: 1389746 - RNA, 19 nt, Artificial Sequence
  Description of Artificial Sequence: Synthetic oligonucleotide
  Sense strand starting at position 2888 of SEQ ID NO: 1243027
aguauuuguuacuuagguu

SEQ ID NO: 1389747 - RNA, 19 nt, Artificial Sequence
  Description of Artificial Sequence: Synthetic oligonucleotide
  Antisense strand to SEQ ID NO: 1389746
aaccuaaguaacaaauacu

SEQ ID NO: 1389748 - RNA, 19 nt, Artificial Sequence
  Description of Artificial Sequence: Synthetic oligonucleotide
  Sense strand starting at position 2895 of SEQ ID NO: 1243027
guuacuuagguugggcaaa

SEQ ID NO: 1389749 - RNA, 19 nt, Artificial Sequence
  Description of Artificial Sequence: Synthetic oligonucleotide
  Antisense strand to SEQ ID NO: 1389748
uuugcccaaccuaaguaac

SEQ ID NO: 1389750 - RNA, 19 nt, Artificial Sequence
  Description of Artificial Sequence: Synthetic oligonucleotide
  Sense strand starting at position 2923 of SEQ ID NO: 1243027
uuaugacccugucugcaaa

SEQ ID NO: 1389751 - RNA, 19 nt, Artificial Sequence
  Description of Artificial Sequence: Synthetic oligonucleotide
  Antisense strand to SEQ ID NO: 1389750
uuugcagacagggucauaa

SEQ ID NO: 1389752 - RNA, 19 nt, Artificial Sequence
  Description of Artificial Sequence: Synthetic oligonucleotide
  Sense strand starting at position 2958 of SEQ ID NO: 1243027
caccuauuucgaugguguu

SEQ ID NO: 1389753 - RNA, 19 nt, Artificial Sequence
  Description of Artificial Sequence: Synthetic oligonucleotide
  Antisense strand to SEQ ID NO: 1389752
aacaccaucgaaauaggug

SEQ ID NO: 1389754 - RNA, 19 nt, Artificial Sequence
  Description of Artificial Sequence: Synthetic oligonucleotide
  Sense strand starting at position 2959 of SEQ ID NO: 1243027
accuauuucgaugguguua

SEQ ID NO: 1389755 - RNA, 19 nt, Artificial Sequence
  Description of Artificial Sequence: Synthetic oligonucleotide
  Antisense strand to SEQ ID NO: 1389754
uaacaccaucgaaauaggu

SEQ ID NO: 1389756 - RNA, 19 nt, Artificial Sequence
  Description of Artificial Sequence: Synthetic oligonucleotide
  Sense strand starting at position 3092 of SEQ ID NO: 1243027
acguaagcgcuaguucuua

SEQ ID NO: 1389757 - RNA, 19 nt, Artificial Sequence
  Description of Artificial Sequence: Synthetic oligonucleotide
  Antisense strand to SEQ ID NO: 1389756
uaagaacuagcgcuuacgu

SEQ ID NO: 1389758 - RNA, 19 nt, Artificial Sequence
  Description of Artificial Sequence: Synthetic oligonucleotide
  Sense strand starting at position 3094 of SEQ ID NO: 1243027
guaagcgcuaguucuuaau

SEQ ID NO: 1389759 - RNA, 19 nt, Artificial Sequence
  Description of Artificial Sequence: Synthetic oligonucleotide
  Antisense strand to SEQ ID NO: 1389758
auuaagaacuagcgcuuac

SEQ ID NO: 1389760 - RNA, 19 nt, Artificial Sequence
  Description of Artificial Sequence: Synthetic oligonucleotide
  Sense strand starting at position 3113 of SEQ ID NO: 1243027
gaauaauguugggugggau

SEQ ID NO: 1389761 - RNA, 19 nt, Artificial Sequence
  Description of Artificial Sequence: Synthetic oligonucleotide
  Antisense strand to SEQ ID NO: 1389760
aucccacccaacauuauuc

SEQ ID NO: 1389762 - RNA, 19 nt, Artificial Sequence
  Description of Artificial Sequence: Synthetic oligonucleotide
  Sense strand starting at position 3153 of SEQ ID NO: 1243027
accauaagcuccucaaggu

SEQ ID NO: 1389763 - RNA, 19 nt, Artificial Sequence
  Description of Artificial Sequence: Synthetic oligonucleotide
  Antisense strand to SEQ ID NO: 1389762
accuugaggagcuuauggu

SEQ ID NO: 1389764 - RNA, 19 nt, Artificial Sequence
  Description of Artificial Sequence: Synthetic oligonucleotide
  Sense strand starting at position 3211 of SEQ ID NO: 1243027
accuaagcugccugaaaca

SEQ ID NO: 1389765 - RNA, 19 nt, Artificial Sequence
  Description of Artificial Sequence: Synthetic oligonucleotide
  Antisense strand to SEQ ID NO: 1389764
uguuucaggcagcuuaggu

SEQ ID NO: 1389766 - RNA, 19 nt, Artificial Sequence
  Description of Artificial Sequence: Synthetic oligonucleotide
  Sense strand starting at position 3455 of SEQ ID NO: 1243027
augugauuagugcaauuga

SEQ ID NO: 1389767 - RNA, 19 nt, Artificial Sequence
  Description of Artificial Sequence: Synthetic oligonucleotide
  Antisense strand to SEQ ID NO: 1389766
ucaauugcacuaaucacau

SEQ ID NO: 1389768 - RNA, 19 nt, Artificial Sequence
  Description of Artificial Sequence: Synthetic oligonucleotide
  Sense strand starting at position 3653 of SEQ ID NO: 1243027
gucaucauuccuggcuaau

SEQ ID NO: 1389769 - RNA, 19 nt, Artificial Sequence
  Description of Artificial Sequence: Synthetic oligonucleotide
  Antisense strand to SEQ ID NO: 1389768
auuagccaggaaugaugac

SEQ ID NO: 1389770 - RNA, 19 nt, Artificial Sequence
  Description of Artificial Sequence: Synthetic oligonucleotide
  Sense strand starting at position 3859 of SEQ ID NO: 1243027
gauagugcaggucaguaaa

SEQ ID NO: 1389771 - RNA, 19 nt, Artificial Sequence
  Description of Artificial Sequence: Synthetic oligonucleotide
  Antisense strand to SEQ ID NO: 1389770
uuuacugaccugcacuauc

SEQ ID NO: 1389772 - RNA, 19 nt, Artificial Sequence
  Description of Artificial Sequence: Synthetic oligonucleotide
  Sense strand starting at position 3862 of SEQ ID NO: 1243027
agugcaggucaguaaaugu

SEQ ID NO: 1389773 - RNA, 19 nt, Artificial Sequence
  Description of Artificial Sequence: Synthetic oligonucleotide
  Antisense strand to SEQ ID NO: 1389772
acauuuacugaccugcacu

SEQ ID NO: 1389774 - RNA, 19 nt, Artificial Sequence
  Description of Artificial Sequence: Synthetic oligonucleotide
  Sense strand starting at position 3917 of SEQ ID NO: 1243027
augcgaugacucgaaagaa

SEQ ID NO: 1389775 - RNA, 19 nt, Artificial Sequence
  Description of Artificial Sequence: Synthetic oligonucleotide
  Antisense strand to SEQ ID NO: 1389774
uucuuucgagucaucgcau

SEQ ID NO: 1389776 - RNA, 19 nt, Artificial Sequence
  Description of Artificial Sequence: Synthetic oligonucleotide
  Sense strand starting at position 3961 of SEQ ID NO: 1243027
auaguagacucaguugaua

SEQ ID NO: 1389777 - RNA, 19 nt, Artificial Sequence
  Description of Artificial Sequence: Synthetic oligonucleotide
  Antisense strand to SEQ ID NO: 1389776
uaucaacugagucuacuau

SEQ ID NO: 1389778 - RNA, 19 nt, Artificial Sequence
  Description of Artificial Sequence: Synthetic oligonucleotide
  Sense strand starting at position 3963 of SEQ ID NO: 1243027
aguagacucaguugauaga

SEQ ID NO: 1389779 - RNA, 19 nt, Artificial Sequence
  Description of Artificial Sequence: Synthetic oligonucleotide
  Antisense strand to SEQ ID NO: 1389778
ucuaucaacugagucuacu

SEQ ID NO: 1389780 - RNA, 19 nt, Artificial Sequence
  Description of Artificial Sequence: Synthetic oligonucleotide
  Sense strand starting at position 3973 of SEQ ID NO: 1243027
guugauagaugcccuccaa

SEQ ID NO: 1389781 - RNA, 19 nt, Artificial Sequence
  Description of Artificial Sequence: Synthetic oligonucleotide
  Antisense strand to SEQ ID NO: 1389780
uuggagggcaucuaucaac

SEQ ID NO: 1389782 - RNA, 19 nt, Artificial Sequence
  Description of Artificial Sequence: Synthetic oligonucleotide
  Sense strand starting at position 234 of SEQ ID NO: 1243028
gcagaacucugccugauga

SEQ ID NO: 1389783 - RNA, 19 nt, Artificial Sequence
  Description of Artificial Sequence: Synthetic oligonucleotide
  Antisense strand to SEQ ID NO: 1389782
ucaucaggcagaguucugc

SEQ ID NO: 1389784 - RNA, 19 nt, Artificial Sequence
  Description of Artificial Sequence: Synthetic oligonucleotide
  Sense strand starting at position 238 of SEQ ID NO: 1243028
aacucugccugaugaagga

SEQ ID NO: 1389785 - RNA, 19 nt, Artificial Sequence
  Description of Artificial Sequence: Synthetic oligonucleotide
  Antisense strand to SEQ ID NO: 1389784
uccuucaucaggcagaguu

SEQ ID NO: 1389786 - RNA, 19 nt, Artificial Sequence
  Description of Artificial Sequence: Synthetic oligonucleotide
  Sense strand starting at position 321 of SEQ ID NO: 1243028
ggcuucagcuguugcuaga

SEQ ID NO: 1389787 - RNA, 19 nt, Artificial Sequence
  Description of Artificial Sequence: Synthetic oligonucleotide
  Antisense strand to SEQ ID NO: 1389786
ucuagcaacagcugaagcc

SEQ ID NO: 1389788 - RNA, 19 nt, Artificial Sequence
  Description of Artificial Sequence: Synthetic oligonucleotide
  Sense strand starting at position 345 of SEQ ID NO: 1243028
cuccauauaugaggacuuu

SEQ ID NO: 1389789 - RNA, 19 nt, Artificial Sequence
  Description of Artificial Sequence: Synthetic oligonucleotide
  Antisense strand to SEQ ID NO: 1389788
aaaguccucauauauggag

SEQ ID NO: 1389790 - RNA, 19 nt, Artificial Sequence
  Description of Artificial Sequence: Synthetic oligonucleotide
  Sense strand starting at position 750 of SEQ ID NO: 1243028
aagugagcuccugagcuuu

SEQ ID NO: 1389791 - RNA, 19 nt, Artificial Sequence
  Description of Artificial Sequence: Synthetic oligonucleotide
  Antisense strand to SEQ ID NO: 1389790
aaagcucaggagcucacuu

SEQ ID NO: 1389792 - RNA, 19 nt, Artificial Sequence
  Description of Artificial Sequence: Synthetic oligonucleotide
  Sense strand starting at position 829 of SEQ ID NO: 1243028
aaauaaguuguaugacaag

SEQ ID NO: 1389793 - RNA, 19 nt, Artificial Sequence
  Description of Artificial Sequence: Synthetic oligonucleotide
  Antisense strand to SEQ ID NO: 1389792
cuugucauacaacuuauuu

SEQ ID NO: 1389794 - RNA, 19 nt, Artificial Sequence
  Description of Artificial Sequence: Synthetic oligonucleotide
  Sense strand starting at position 903 of SEQ ID NO: 1243028
ccauacggguccuuugagu

SEQ ID NO: 1389795 - RNA, 19 nt, Artificial Sequence
  Description of Artificial Sequence: Synthetic oligonucleotide
  Antisense strand to SEQ ID NO: 1389794
acucaaaggacccguaugg

SEQ ID NO: 1389796 - RNA, 19 nt, Artificial Sequence
  Description of Artificial Sequence: Synthetic oligonucleotide
  Sense strand starting at position 2356 of SEQ ID NO: 1243028
cccggaauguccgaguuac

SEQ ID NO: 1389797 - RNA, 19 nt, Artificial Sequence
  Description of Artificial Sequence: Synthetic oligonucleotide
  Antisense strand to SEQ ID NO: 1389796
guaacucggacauuccggg

SEQ ID NO: 1389798 - RNA, 19 nt, Artificial Sequence
  Description of Artificial Sequence: Synthetic oligonucleotide
  Sense strand starting at position 2808 of SEQ ID NO: 1243028
cuccgaguccucugaucuc

SEQ ID NO: 1389799 - RNA, 19 nt, Artificial Sequence
  Description of Artificial Sequence: Synthetic oligonucleotide
  Antisense strand to SEQ ID NO: 1389798
gagaucagaggacucggag

SEQ ID NO: 1389800 - RNA, 19 nt, Artificial Sequence
  Description of Artificial Sequence: Synthetic oligonucleotide
  Sense strand starting at position 3066 of SEQ ID NO: 1243028
cggugucgauggagaagaa

SEQ ID NO: 1389801 - RNA, 19 nt, Artificial Sequence
  Description of Artificial Sequence: Synthetic oligonucleotide
  Antisense strand to SEQ ID NO: 1389800
uucuucuccaucgacaccg

SEQ ID NO: 1389802 - RNA, 19 nt, Artificial Sequence
  Description of Artificial Sequence: Synthetic oligonucleotide
  Sense strand starting at position 3169 of SEQ ID NO: 1243028
gcgagugugcucuggagga

SEQ ID NO: 1389803 - RNA, 19 nt, Artificial Sequence
  Description of Artificial Sequence: Synthetic oligonucleotide
  Antisense strand to SEQ ID NO: 1389802
uccuccagagcacacucgc

SEQ ID NO: 1389804 - RNA, 19 nt, Artificial Sequence
  Description of Artificial Sequence: Synthetic oligonucleotide
  Sense strand starting at position 3224 of SEQ ID NO: 1243028
uggacuugcugagacucua

SEQ ID NO: 1389805 - RNA, 19 nt, Artificial Sequence
  Description of Artificial Sequence: Synthetic oligonucleotide
  Antisense strand to SEQ ID NO: 1389804
uagagucucagcaagucca

SEQ ID NO: 1389806 - RNA, 19 nt, Artificial Sequence
  Description of Artificial Sequence: Synthetic oligonucleotide
  Sense strand starting at position 3506 of SEQ ID NO: 1243028
gccacagccaucugaggau

SEQ ID NO: 1389807 - RNA, 19 nt, Artificial Sequence
  Description of Artificial Sequence: Synthetic oligonucleotide
  Antisense strand to SEQ ID NO: 1389806
auccucagauggcuguggc

SEQ ID NO: 1389808 - RNA, 19 nt, Artificial Sequence
  Description of Artificial Sequence: Synthetic oligonucleotide
  Sense strand starting at position 3550 of SEQ ID NO: 1243028
uaaggacucugugcggaaa

SEQ ID NO: 1389809 - RNA, 19 nt, Artificial Sequence
  Description of Artificial Sequence: Synthetic oligonucleotide
  Antisense strand to SEQ ID NO: 1389808
uuuccgcacagaguccuua

SEQ ID NO: 1389810 - RNA, 19 nt, Artificial Sequence
  Description of Artificial Sequence: Synthetic oligonucleotide
  Sense strand starting at position 3765 of SEQ ID NO: 1243028
ggaguaucccugcggcaaa

SEQ ID NO: 1389811 - RNA, 19 nt, Artificial Sequence
  Description of Artificial Sequence: Synthetic oligonucleotide
  Antisense strand to SEQ ID NO: 1389810
uuugccgcagggauacucc

SEQ ID NO: 1389812 - RNA, 19 nt, Artificial Sequence
  Description of Artificial Sequence: Synthetic oligonucleotide
  Sense strand starting at position 3794 of SEQ ID NO: 1243028
aggucacucacggaaacuu

SEQ ID NO: 1389813 - RNA, 19 nt, Artificial Sequence
  Description of Artificial Sequence: Synthetic oligonucleotide
  Antisense strand to SEQ ID NO: 1389812
aaguuuccgugagugaccu

SEQ ID NO: 1389814 - RNA, 19 nt, Artificial Sequence
  Description of Artificial Sequence: Synthetic oligonucleotide
  Sense strand starting at position 3980 of SEQ ID NO: 1243028
ccagcuauuaagcguugga

SEQ ID NO: 1389815 - RNA, 19 nt, Artificial Sequence
  Description of Artificial Sequence: Synthetic oligonucleotide
  Antisense strand to SEQ ID NO: 1389814
uccaacgcuuaauagcugg

SEQ ID NO: 1389816 - RNA, 19 nt, Artificial Sequence
  Description of Artificial Sequence: Synthetic oligonucleotide
  Sense strand starting at position 3983 of SEQ ID NO: 1243028
gcuauuaagcguuggaacu

SEQ ID NO: 1389817 - RNA, 19 nt, Artificial Sequence
  Description of Artificial Sequence: Synthetic oligonucleotide
  Antisense strand to SEQ ID NO: 1389816
aguuccaacgcuuaauagc

SEQ ID NO: 1389818 - RNA, 19 nt, Artificial Sequence
  Description of Artificial Sequence: Synthetic oligonucleotide
  Sense strand starting at position 163 of SEQ ID NO: 1243029
gccugacucacuggagaag

SEQ ID NO: 1389819 - RNA, 19 nt, Artificial Sequence
  Description of Artificial Sequence: Synthetic oligonucleotide
  Antisense strand to SEQ ID NO: 1389818
cuucuccagugagucaggc

SEQ ID NO: 1389820 - RNA, 19 nt, Artificial Sequence
  Description of Artificial Sequence: Synthetic oligonucleotide
  Sense strand starting at position 678 of SEQ ID NO: 1243029
gggaucuucugggagucaa

SEQ ID NO: 1389821 - RNA, 19 nt, Artificial Sequence
  Description of Artificial Sequence: Synthetic oligonucleotide
  Antisense strand to SEQ ID NO: 1389820
uugacucccagaagauccc

SEQ ID NO: 1389822 - RNA, 19 nt, Artificial Sequence
  Description of Artificial Sequence: Synthetic oligonucleotide
  Sense strand starting at position 973 of SEQ ID NO: 1243029
ucgucaaggccucaaagaa

SEQ ID NO: 1389823 - RNA, 19 nt, Artificial Sequence
  Description of Artificial Sequence: Synthetic oligonucleotide
  Antisense strand to SEQ ID NO: 1389822
uucuuugaggccuugacga

SEQ ID NO: 1389824 - RNA, 19 nt, Artificial Sequence
  Description of Artificial Sequence: Synthetic oligonucleotide
  Sense strand starting at position 1206 of SEQ ID NO: 1243029
gauacaaacugguaaagga

SEQ ID NO: 1389825 - RNA, 19 nt, Artificial Sequence
  Description of Artificial Sequence: Synthetic oligonucleotide
  Antisense strand to SEQ ID NO: 1389824
uccuuuaccaguuuguauc

SEQ ID NO: 1389826 - RNA, 19 nt, Artificial Sequence
  Description of Artificial Sequence: Synthetic oligonucleotide
  Sense strand starting at position 1316 of SEQ ID NO: 1243029
ggcggacucaccuaucuga

SEQ ID NO: 1389827 - RNA, 19 nt, Artificial Sequence
  Description of Artificial Sequence: Synthetic oligonucleotide
  Antisense strand to SEQ ID NO: 1389826
ucagauaggugaguccgcc

SEQ ID NO: 1389828 - RNA, 19 nt, Artificial Sequence
  Description of Artificial Sequence: Synthetic oligonucleotide
  Sense strand starting at position 2237 of SEQ ID NO: 1243029
ggcccugacagugggaauu

SEQ ID NO: 1389829 - RNA, 19 nt, Artificial Sequence
  Description of Artificial Sequence: Synthetic oligonucleotide
  Antisense strand to SEQ ID NO: 1389828
aauucccacugucagggcc

SEQ ID NO: 1389830 - RNA, 19 nt, Artificial Sequence
  Description of Artificial Sequence: Synthetic oligonucleotide
  Sense strand starting at position 2356 of SEQ ID NO: 1243029
ccagcucacucggagaaga

SEQ ID NO: 1389831 - RNA, 19 nt, Artificial Sequence
  Description of Artificial Sequence: Synthetic oligonucleotide
  Antisense strand to SEQ ID NO: 1389830
ucuucuccgagugagcugg

SEQ ID NO: 1389832 - RNA, 19 nt, Artificial Sequence
  Description of Artificial Sequence: Synthetic oligonucleotide
  Sense strand starting at position 3310 of SEQ ID NO: 1243029
gggagucagccucauggau

SEQ ID NO: 1389833 - RNA, 19 nt, Artificial Sequence
  Description of Artificial Sequence: Synthetic oligonucleotide
  Antisense strand to SEQ ID NO: 1389832
auccaugaggcugacuccc

SEQ ID NO: 1389834 - RNA, 19 nt, Artificial Sequence
  Description of Artificial Sequence: Synthetic oligonucleotide
  Sense strand starting at position 3312 of SEQ ID NO: 1243029
gagucagccucauggauga

SEQ ID NO: 1389835 - RNA, 19 nt, Artificial Sequence
  Description of Artificial Sequence: Synthetic oligonucleotide
  Antisense strand to SEQ ID NO: 1389834
ucauccaugaggcugacuc

SEQ ID NO: 1389836 - RNA, 19 nt, Artificial Sequence
  Description of Artificial Sequence: Synthetic oligonucleotide
  Sense strand starting at position 3535 of SEQ ID NO: 1243029
gaggucuugucucaggaag

SEQ ID NO: 1389837 - RNA, 19 nt, Artificial Sequence
  Description of Artificial Sequence: Synthetic oligonucleotide
  Antisense strand to SEQ ID NO: 1389836
cuuccugagacaagaccuc

SEQ ID NO: 1389838 - RNA, 19 nt, Artificial Sequence
  Description of Artificial Sequence: Synthetic oligonucleotide
  Sense strand starting at position 3537 of SEQ ID NO: 1243029
ggucuugucucaggaagaa

SEQ ID NO: 1389839 - RNA, 19 nt, Artificial Sequence
  Description of Artificial Sequence: Synthetic oligonucleotide
  Antisense strand to SEQ ID NO: 1389838
uucuuccugagacaagacc

SEQ ID NO: 1389840 - RNA, 19 nt, Artificial Sequence
  Description of Artificial Sequence: Synthetic oligonucleotide
  Sense strand starting at position 3603 of SEQ ID NO: 1243029
ccuggccuuacugguagaa

SEQ ID NO: 1389841 - RNA, 19 nt, Artificial Sequence
  Description of Artificial Sequence: Synthetic oligonucleotide
  Antisense strand to SEQ ID NO: 1389840
uucuaccaguaaggccagg

SEQ ID NO: 1389842 - RNA, 19 nt, Artificial Sequence
  Description of Artificial Sequence: Synthetic oligonucleotide
  Sense strand starting at position 3605 of SEQ ID NO: 1243029
uggccuuacugguagaaau

SEQ ID NO: 1389843 - RNA, 19 nt, Artificial Sequence
  Description of Artificial Sequence: Synthetic oligonucleotide
  Antisense strand to SEQ ID NO: 1389842
auuucuaccaguaaggcca

SEQ ID NO: 1389844 - RNA, 19 nt, Artificial Sequence
  Description of Artificial Sequence: Synthetic oligonucleotide
  Sense strand starting at position 3607 of SEQ ID NO: 1243029
gccuuacugguagaaauau

SEQ ID NO: 1389845 - RNA, 19 nt, Artificial Sequence
  Description of Artificial Sequence: Synthetic oligonucleotide
  Antisense strand to SEQ ID NO: 1389844
auauuucuaccaguaaggc

SEQ ID NO: 1389846 - RNA, 19 nt, Artificial Sequence
  Description of Artificial Sequence: Synthetic oligonucleotide
  Sense strand starting at position 438 of SEQ ID NO: 1243030
gggaucuucugggagucaa

SEQ ID NO: 1389847 - RNA, 19 nt, Artificial Sequence
  Description of Artificial Sequence: Synthetic oligonucleotide
  Antisense strand to SEQ ID NO: 1389846
uugacucccagaagauccc

SEQ ID NO: 1389848 - RNA, 19 nt, Artificial Sequence
  Description of Artificial Sequence: Synthetic oligonucleotide
  Sense strand starting at position 733 of SEQ ID NO: 1243030
ucgucaaggccucaaagaa

SEQ ID NO: 1389849 - RNA, 19 nt, Artificial Sequence
  Description of Artificial Sequence: Synthetic oligonucleotide
  Antisense strand to SEQ ID NO: 1389848
uucuuugaggccuugacga

SEQ ID NO: 1389850 - RNA, 19 nt, Artificial Sequence
  Description of Artificial Sequence: Synthetic oligonucleotide
  Sense strand starting at position 966 of SEQ ID NO: 1243030
gauacaaacugguaaagga

SEQ ID NO: 1389851 - RNA, 19 nt, Artificial Sequence
  Description of Artificial Sequence: Synthetic oligonucleotide
  Antisense strand to SEQ ID NO: 1389850
uccuuuaccaguuuguauc

SEQ ID NO: 1389852 - RNA, 19 nt, Artificial Sequence
  Description of Artificial Sequence: Synthetic oligonucleotide
  Sense strand starting at position 1076 of SEQ ID NO: 1243030
ggcggacucaccuaucuga

SEQ ID NO: 1389853 - RNA, 19 nt, Artificial Sequence
  Description of Artificial Sequence: Synthetic oligonucleotide
  Antisense strand to SEQ ID NO: 1389852
ucagauaggugaguccgcc

SEQ ID NO: 1389854 - RNA, 19 nt, Artificial Sequence
  Description of Artificial Sequence: Synthetic oligonucleotide
  Sense strand starting at position 1997 of SEQ ID NO: 1243030
ggcccugacagugggaauu

SEQ ID NO: 1389855 - RNA, 19 nt, Artificial Sequence
  Description of Artificial Sequence: Synthetic oligonucleotide
  Antisense strand to SEQ ID NO: 1389854
aauucccacugucagggcc

SEQ ID NO: 1389856 - RNA, 19 nt, Artificial Sequence
  Description of Artificial Sequence: Synthetic oligonucleotide
  Sense strand starting at position 2116 of SEQ ID NO: 1243030
ccagcucacucggagaaga

SEQ ID NO: 1389857 - RNA, 19 nt, Artificial Sequence
  Description of Artificial Sequence: Synthetic oligonucleotide
  Antisense strand to SEQ ID NO: 1389856
ucuucuccgagugagcugg

SEQ ID NO: 1389858 - RNA, 19 nt, Artificial Sequence
  Description of Artificial Sequence: Synthetic oligonucleotide
  Sense strand starting at position 3070 of SEQ ID NO: 1243030
gggagucagccucauggau

SEQ ID NO: 1389859 - RNA, 19 nt, Artificial Sequence
  Description of Artificial Sequence: Synthetic oligonucleotide
  Antisense strand to SEQ ID NO: 1389858
auccaugaggcugacuccc

SEQ ID NO: 1389860 - RNA, 19 nt, Artificial Sequence
  Description of Artificial Sequence: Synthetic oligonucleotide
  Sense strand starting at position 3072 of SEQ ID NO: 1243030
gagucagccucauggauga

SEQ ID NO: 1389861 - RNA, 19 nt, Artificial Sequence
  Description of Artificial Sequence: Synthetic oligonucleotide
  Antisense strand to SEQ ID NO: 1389860
ucauccaugaggcugacuc

SEQ ID NO: 1389862 - RNA, 19 nt, Artificial Sequence
  Description of Artificial Sequence: Synthetic oligonucleotide
  Sense strand starting at position 3295 of SEQ ID NO: 1243030
gaggucuugucucaggaag

SEQ ID NO: 1389863 - RNA, 19 nt, Artificial Sequence
  Description of Artificial Sequence: Synthetic oligonucleotide
  Antisense strand to SEQ ID NO: 1389862
cuuccugagacaagaccuc

SEQ ID NO: 1389864 - RNA, 19 nt, Artificial Sequence
  Description of Artificial Sequence: Synthetic oligonucleotide
  Sense strand starting at position 3297 of SEQ ID NO: 1243030
ggucuugucucaggaagaa

SEQ ID NO: 1389865 - RNA, 19 nt, Artificial Sequence
  Description of Artificial Sequence: Synthetic oligonucleotide
  Antisense strand to SEQ ID NO: 1389864
uucuuccugagacaagacc

SEQ ID NO: 1389866 - RNA, 19 nt, Artificial Sequence
  Description of Artificial Sequence: Synthetic oligonucleotide
  Sense strand starting at position 3363 of SEQ ID NO: 1243030
ccuggccuuacugguagaa

SEQ ID NO: 1389867 - RNA, 19 nt, Artificial Sequence
  Description of Artificial Sequence: Synthetic oligonucleotide
  Antisense strand to SEQ ID NO: 1389866
uucuaccaguaaggccagg

SEQ ID NO: 1389868 - RNA, 19 nt, Artificial Sequence
  Description of Artificial Sequence: Synthetic oligonucleotide
  Sense strand starting at position 3365 of SEQ ID NO: 1243030
uggccuuacugguagaaau

SEQ ID NO: 1389869 - RNA, 19 nt, Artificial Sequence
  Description of Artificial Sequence: Synthetic oligonucleotide
  Antisense strand to SEQ ID NO: 1389868
auuucuaccaguaaggcca

SEQ ID NO: 1389870 - RNA, 19 nt, Artificial Sequence
  Description of Artificial Sequence: Synthetic oligonucleotide
  Sense strand starting at position 3367 of SEQ ID NO: 1243030
gccuuacugguagaaauau

SEQ ID NO: 1389871 - RNA, 19 nt, Artificial Sequence
  Description of Artificial Sequence: Synthetic oligonucleotide
  Antisense strand to SEQ ID NO: 1389870
auauuucuaccaguaaggc

SEQ ID NO: 1389872 - RNA, 19 nt, Artificial Sequence
  Description of Artificial Sequence: Synthetic oligonucleotide
  Sense strand starting at position 3772 of SEQ ID NO: 1243030
gggucugcuacagauguua

SEQ ID NO: 1389873 - RNA, 19 nt, Artificial Sequence
  Description of Artificial Sequence: Synthetic oligonucleotide
  Antisense strand to SEQ ID NO: 1389872
uaacaucuguagcagaccc

SEQ ID NO: 1389874 - RNA, 19 nt, Artificial Sequence
  Description of Artificial Sequence: Synthetic oligonucleotide
  Sense strand starting at position 3777 of SEQ ID NO: 1243030
ugcuacagauguuauuuau

SEQ ID NO: 1389875 - RNA, 19 nt, Artificial Sequence
  Description of Artificial Sequence: Synthetic oligonucleotide
  Antisense strand to SEQ ID NO: 1389874
auaaauaacaucuguagca

SEQ ID NO: 1389876 - RNA, 19 nt, Artificial Sequence
  Description of Artificial Sequence: Synthetic oligonucleotide
  Sense strand starting at position 3784 of SEQ ID NO: 1243030
gauguuauuuauugcagaa

SEQ ID NO: 1389877 - RNA, 19 nt, Artificial Sequence
  Description of Artificial Sequence: Synthetic oligonucleotide
  Antisense strand to SEQ ID NO: 1389876
uucugcaauaaauaacauc

SEQ ID NO: 1389878 - RNA, 19 nt, Artificial Sequence
  Description of Artificial Sequence: Synthetic oligonucleotide
  Sense strand starting at position 445 of SEQ ID NO: 1243031
gcgagcuugcgguaguacu

SEQ ID NO: 1389879 - RNA, 19 nt, Artificial Sequence
  Description of Artificial Sequence: Synthetic oligonucleotide
  Antisense strand to SEQ ID NO: 1389878
aguacuaccgcaagcucgc

SEQ ID NO: 1389880 - RNA, 19 nt, Artificial Sequence
  Description of Artificial Sequence: Synthetic oligonucleotide
  Sense strand starting at position 767 of SEQ ID NO: 1243031
ccagguacuccacagagua

SEQ ID NO: 1389881 - RNA, 19 nt, Artificial Sequence
  Description of Artificial Sequence: Synthetic oligonucleotide
  Antisense strand to SEQ ID NO: 1389880
uacucuguggaguaccugg

SEQ ID NO: 1389882 - RNA, 19 nt, Artificial Sequence
  Description of Artificial Sequence: Synthetic oligonucleotide
  Sense strand starting at position 779 of SEQ ID NO: 1243031
cagaguaggucuugccaaa

SEQ ID NO: 1389883 - RNA, 19 nt, Artificial Sequence
  Description of Artificial Sequence: Synthetic oligonucleotide
  Antisense strand to SEQ ID NO: 1389882
uuuggcaagaccuacucug

SEQ ID NO: 1389884 - RNA, 19 nt, Artificial Sequence
  Description of Artificial Sequence: Synthetic oligonucleotide
  Sense strand starting at position 936 of SEQ ID NO: 1243031
ggcuguaccugguguuauc

SEQ ID NO: 1389885 - RNA, 19 nt, Artificial Sequence
  Description of Artificial Sequence: Synthetic oligonucleotide
  Antisense strand to SEQ ID NO: 1389884
gauaacaccagguacagcc

SEQ ID NO: 1389886 - RNA, 19 nt, Artificial Sequence
  Description of Artificial Sequence: Synthetic oligonucleotide
  Sense strand starting at position 939 of SEQ ID NO: 1243031
uguaccugguguuaucgau

SEQ ID NO: 1389887 - RNA, 19 nt, Artificial Sequence
  Description of Artificial Sequence: Synthetic oligonucleotide
  Antisense strand to SEQ ID NO: 1389886
aucgauaacaccagguaca

SEQ ID NO: 1389888 - RNA, 19 nt, Artificial Sequence
  Description of Artificial Sequence: Synthetic oligonucleotide
  Sense strand starting at position 947 of SEQ ID NO: 1243031
guguuaucgauccagcagu

SEQ ID NO: 1389889 - RNA, 19 nt, Artificial Sequence
  Description of Artificial Sequence: Synthetic oligonucleotide
  Antisense strand to SEQ ID NO: 1389888
acugcuggaucgauaacac

SEQ ID NO: 1389890 - RNA, 19 nt, Artificial Sequence
  Description of Artificial Sequence: Synthetic oligonucleotide
  Sense strand starting at position 978 of SEQ ID NO: 1243031
guaggaacauguugagauc

SEQ ID NO: 1389891 - RNA, 19 nt, Artificial Sequence
  Description of Artificial Sequence: Synthetic oligonucleotide
  Antisense strand to SEQ ID NO: 1389890
gaucucaacauguuccuac

SEQ ID NO: 1389892 - RNA, 19 nt, Artificial Sequence
  Description of Artificial Sequence: Synthetic oligonucleotide
  Sense strand starting at position 1009 of SEQ ID NO: 1243031
gaagaaguccucugucuug

SEQ ID NO: 1389893 - RNA, 19 nt, Artificial Sequence
  Description of Artificial Sequence: Synthetic oligonucleotide
  Antisense strand to SEQ ID NO: 1389892
caagacagaggacuucuuc

SEQ ID NO: 1389894 - RNA, 19 nt, Artificial Sequence
  Description of Artificial Sequence: Synthetic oligonucleotide
  Sense strand starting at position 1373 of SEQ ID NO: 1243031
gcuccuuuauugccaaagu

SEQ ID NO: 1389895 - RNA, 19 nt, Artificial Sequence
  Description of Artificial Sequence: Synthetic oligonucleotide
  Antisense strand to SEQ ID NO: 1389894
acuuuggcaauaaaggagc

SEQ ID NO: 1389896 - RNA, 19 nt, Artificial Sequence
  Description of Artificial Sequence: Synthetic oligonucleotide
  Sense strand starting at position 1627 of SEQ ID NO: 1243031
ggguuagacaacugagagu

SEQ ID NO: 1389897 - RNA, 19 nt, Artificial Sequence
  Description of Artificial Sequence: Synthetic oligonucleotide
  Antisense strand to SEQ ID NO: 1389896
acucucaguugucuaaccc

SEQ ID NO: 1389898 - RNA, 19 nt, Artificial Sequence
  Description of Artificial Sequence: Synthetic oligonucleotide
  Sense strand starting at position 1667 of SEQ ID NO: 1243031
acgucauuccucuaaggga

SEQ ID NO: 1389899 - RNA, 19 nt, Artificial Sequence
  Description of Artificial Sequence: Synthetic oligonucleotide
  Antisense strand to SEQ ID NO: 1389898
ucccuuagaggaaugacgu

SEQ ID NO: 1389900 - RNA, 19 nt, Artificial Sequence
  Description of Artificial Sequence: Synthetic oligonucleotide
  Sense strand starting at position 1670 of SEQ ID NO: 1243031
ucauuccucuaagggacaa

SEQ ID NO: 1389901 - RNA, 19 nt, Artificial Sequence
  Description of Artificial Sequence: Synthetic oligonucleotide
  Antisense strand to SEQ ID NO: 1389900
uugucccuuagaggaauga

SEQ ID NO: 1389902 - RNA, 19 nt, Artificial Sequence
  Description of Artificial Sequence: Synthetic oligonucleotide
  Sense strand starting at position 1847 of SEQ ID NO: 1243031
ggccgugugugguuacuga

SEQ ID NO: 1389903 - RNA, 19 nt, Artificial Sequence
  Description of Artificial Sequence: Synthetic oligonucleotide
  Antisense strand to SEQ ID NO: 1389902
ucaguaaccacacacggcc

SEQ ID NO: 1389904 - RNA, 19 nt, Artificial Sequence
  Description of Artificial Sequence: Synthetic oligonucleotide
  Sense strand starting at position 1999 of SEQ ID NO: 1243031
ggugccuacugccagagaa

SEQ ID NO: 1389905 - RNA, 19 nt, Artificial Sequence
  Description of Artificial Sequence: Synthetic oligonucleotide
  Antisense strand to SEQ ID NO: 1389904
uucucuggcaguaggcacc

SEQ ID NO: 1389906 - RNA, 19 nt, Artificial Sequence
  Description of Artificial Sequence: Synthetic oligonucleotide
  Sense strand starting at position 2032 of SEQ ID NO: 1243031
guccuuaucugguguggga

SEQ ID NO: 1389907 - RNA, 19 nt, Artificial Sequence
  Description of Artificial Sequence: Synthetic oligonucleotide
  Antisense strand to SEQ ID NO: 1389906
ucccacaccagauaaggac

SEQ ID NO: 1389908 - RNA, 19 nt, Artificial Sequence
  Description of Artificial Sequence: Synthetic oligonucleotide
  Sense strand starting at position 2097 of SEQ ID NO: 1243031
ggguuguggccagagauug

SEQ ID NO: 1389909 - RNA, 19 nt, Artificial Sequence
  Description of Artificial Sequence: Synthetic oligonucleotide
  Antisense strand to SEQ ID NO: 1389908
caaucucuggccacaaccc

SEQ ID NO: 1389910 - RNA, 19 nt, Artificial Sequence
  Description of Artificial Sequence: Synthetic oligonucleotide
  Sense strand starting at position 2105 of SEQ ID NO: 1243031
gccagagauugccggaaag

SEQ ID NO: 1389911 - RNA, 19 nt, Artificial Sequence
  Description of Artificial Sequence: Synthetic oligonucleotide
  Antisense strand to SEQ ID NO: 1389910
cuuuccggcaaucucuggc

SEQ ID NO: 1389912 - RNA, 19 nt, Artificial Sequence
  Description of Artificial Sequence: Synthetic oligonucleotide
  Sense strand starting at position 2373 of SEQ ID NO: 1243031
cucugauggugacauccaa

SEQ ID NO: 1389913 - RNA, 19 nt, Artificial Sequence
  Description of Artificial Sequence: Synthetic oligonucleotide
  Antisense strand to SEQ ID NO: 1389912
uuggaugucaccaucagag

SEQ ID NO: 1389914 - RNA, 19 nt, Artificial Sequence
  Description of Artificial Sequence: Synthetic oligonucleotide
  Sense strand starting at position 2674 of SEQ ID NO: 1243031
gcuuguuauguccuggcca

SEQ ID NO: 1389915 - RNA, 19 nt, Artificial Sequence
  Description of Artificial Sequence: Synthetic oligonucleotide
  Antisense strand to SEQ ID NO: 1389914
uggccaggacauaacaagc

SEQ ID NO: 1389916 - RNA, 19 nt, Artificial Sequence
  Description of Artificial Sequence: Synthetic oligonucleotide
  Sense strand starting at position 2675 of SEQ ID NO: 1243031
cuuguuauguccuggccaa

SEQ ID NO: 1389917 - RNA, 19 nt, Artificial Sequence
  Description of Artificial Sequence: Synthetic oligonucleotide
  Antisense strand to SEQ ID NO: 1389916
uuggccaggacauaacaag

SEQ ID NO: 1389918 - RNA, 19 nt, Artificial Sequence
  Description of Artificial Sequence: Synthetic oligonucleotide
  Sense strand starting at position 2676 of SEQ ID NO: 1243031
uuguuauguccuggccaag

SEQ ID NO: 1389919 - RNA, 19 nt, Artificial Sequence
  Description of Artificial Sequence: Synthetic oligonucleotide
  Antisense strand to SEQ ID NO: 1389918
cuuggccaggacauaacaa

SEQ ID NO: 1389920 - RNA, 19 nt, Artificial Sequence
  Description of Artificial Sequence: Synthetic oligonucleotide
  Sense strand starting at position 3008 of SEQ ID NO: 1243031
caggcauguuuaggagaac

SEQ ID NO: 1389921 - RNA, 19 nt, Artificial Sequence
  Description of Artificial Sequence: Synthetic oligonucleotide
  Antisense strand to SEQ ID NO: 1389920
guucuccuaaacaugccug

SEQ ID NO: 1389922 - RNA, 19 nt, Artificial Sequence
  Description of Artificial Sequence: Synthetic oligonucleotide
  Sense strand starting at position 3038 of SEQ ID NO: 1243031
cgugggagcgcgugacaau

SEQ ID NO: 1389923 - RNA, 19 nt, Artificial Sequence
  Description of Artificial Sequence: Synthetic oligonucleotide
  Antisense strand to SEQ ID NO: 1389922
auugucacgcgcucccacg

SEQ ID NO: 1389924 - RNA, 19 nt, Artificial Sequence
  Description of Artificial Sequence: Synthetic oligonucleotide
  Sense strand starting at position 3098 of SEQ ID NO: 1243031
uggauuggucccuacacgu

SEQ ID NO: 1389925 - RNA, 19 nt, Artificial Sequence
  Description of Artificial Sequence: Synthetic oligonucleotide
  Antisense strand to SEQ ID NO: 1389924
acguguagggaccaaucca

SEQ ID NO: 1389926 - RNA, 19 nt, Artificial Sequence
  Description of Artificial Sequence: Synthetic oligonucleotide
  Sense strand starting at position 3267 of SEQ ID NO: 1243031
gcaccagcucccggaaauu

SEQ ID NO: 1389927 - RNA, 19 nt, Artificial Sequence
  Description of Artificial Sequence: Synthetic oligonucleotide
  Antisense strand to SEQ ID NO: 1389926
aauuuccgggagcuggugc

SEQ ID NO: 1389928 - RNA, 19 nt, Artificial Sequence
  Description of Artificial Sequence: Synthetic oligonucleotide
  Sense strand starting at position 3307 of SEQ ID NO: 1243031
ccaggucucagucauguac

SEQ ID NO: 1389929 - RNA, 19 nt, Artificial Sequence
  Description of Artificial Sequence: Synthetic oligonucleotide
  Antisense strand to SEQ ID NO: 1389928
guacaugacugagaccugg

SEQ ID NO: 1389930 - RNA, 19 nt, Artificial Sequence
  Description of Artificial Sequence: Synthetic oligonucleotide
  Sense strand starting at position 3311 of SEQ ID NO: 1243031
gucucagucauguacuugu

SEQ ID NO: 1389931 - RNA, 19 nt, Artificial Sequence
  Description of Artificial Sequence: Synthetic oligonucleotide
  Antisense strand to SEQ ID NO: 1389930
acaaguacaugacugagac

SEQ ID NO: 1389932 - RNA, 19 nt, Artificial Sequence
  Description of Artificial Sequence: Synthetic oligonucleotide
  Sense strand starting at position 3374 of SEQ ID NO: 1243031
ucaucuuccucguccgagu

SEQ ID NO: 1389933 - RNA, 19 nt, Artificial Sequence
  Description of Artificial Sequence: Synthetic oligonucleotide
  Antisense strand to SEQ ID NO: 1389932
acucggacgaggaagauga

SEQ ID NO: 1389934 - RNA, 19 nt, Artificial Sequence
  Description of Artificial Sequence: Synthetic oligonucleotide
  Sense strand starting at position 3457 of SEQ ID NO: 1243031
ggagauagccuugguccca

SEQ ID NO: 1389935 - RNA, 19 nt, Artificial Sequence
  Description of Artificial Sequence: Synthetic oligonucleotide
  Antisense strand to SEQ ID NO: 1389934
ugggaccaaggcuaucucc

SEQ ID NO: 1389936 - RNA, 19 nt, Artificial Sequence
  Description of Artificial Sequence: Synthetic oligonucleotide
  Sense strand starting at position 3458 of SEQ ID NO: 1243031
gagauagccuuggucccau

SEQ ID NO: 1389937 - RNA, 19 nt, Artificial Sequence
  Description of Artificial Sequence: Synthetic oligonucleotide
  Antisense strand to SEQ ID NO: 1389936
augggaccaaggcuaucuc

SEQ ID NO: 1389938 - RNA, 19 nt, Artificial Sequence
  Description of Artificial Sequence: Synthetic oligonucleotide
  Sense strand starting at position 3462 of SEQ ID NO: 1243031
uagccuuggucccauagga

SEQ ID NO: 1389939 - RNA, 19 nt, Artificial Sequence
  Description of Artificial Sequence: Synthetic oligonucleotide
  Antisense strand to SEQ ID NO: 1389938
uccuaugggaccaaggcua

SEQ ID NO: 1389940 - RNA, 19 nt, Artificial Sequence
  Description of Artificial Sequence: Synthetic oligonucleotide
  Sense strand starting at position 3514 of SEQ ID NO: 1243031
ccaccuugccuccgggaaa

SEQ ID NO: 1389941 - RNA, 19 nt, Artificial Sequence
  Description of Artificial Sequence: Synthetic oligonucleotide
  Antisense strand to SEQ ID NO: 1389940
uuucccggaggcaaggugg

SEQ ID NO: 1389942 - RNA, 19 nt, Artificial Sequence
  Description of Artificial Sequence: Synthetic oligonucleotide
  Sense strand starting at position 3515 of SEQ ID NO: 1243031
caccuugccuccgggaaau

SEQ ID NO: 1389943 - RNA, 19 nt, Artificial Sequence
  Description of Artificial Sequence: Synthetic oligonucleotide
  Antisense strand to SEQ ID NO: 1389942
auuucccggaggcaaggug

SEQ ID NO: 1389944 - RNA, 19 nt, Artificial Sequence
  Description of Artificial Sequence: Synthetic oligonucleotide
  Sense strand starting at position 3555 of SEQ ID NO: 1243031
ugcggugagucauucugau

SEQ ID NO: 1389945 - RNA, 19 nt, Artificial Sequence
  Description of Artificial Sequence: Synthetic oligonucleotide
  Antisense strand to SEQ ID NO: 1389944
aucagaaugacucaccgca

SEQ ID NO: 1389946 - RNA, 19 nt, Artificial Sequence
  Description of Artificial Sequence: Synthetic oligonucleotide
  Sense strand starting at position 3666 of SEQ ID NO: 1243031
cagucuuggucagucucau

SEQ ID NO: 1389947 - RNA, 19 nt, Artificial Sequence
  Description of Artificial Sequence: Synthetic oligonucleotide
  Antisense strand to SEQ ID NO: 1389946
augagacugaccaagacug

SEQ ID NO: 1389948 - RNA, 19 nt, Artificial Sequence
  Description of Artificial Sequence: Synthetic oligonucleotide
  Sense strand starting at position 3726 of SEQ ID NO: 1243031
gcucguagguguaugcaga

SEQ ID NO: 1389949 - RNA, 19 nt, Artificial Sequence
  Description of Artificial Sequence: Synthetic oligonucleotide
  Antisense strand to SEQ ID NO: 1389948
ucugcauacaccuacgagc

SEQ ID NO: 1389950 - RNA, 19 nt, Artificial Sequence
  Description of Artificial Sequence: Synthetic oligonucleotide
  Sense strand starting at position 3730 of SEQ ID NO: 1243031
guagguguaugcagagaug

SEQ ID NO: 1389951 - RNA, 19 nt, Artificial Sequence
  Description of Artificial Sequence: Synthetic oligonucleotide
  Antisense strand to SEQ ID NO: 1389950
caucucugcauacaccuac

SEQ ID NO: 1389952 - RNA, 19 nt, Artificial Sequence
  Description of Artificial Sequence: Synthetic oligonucleotide
  Sense strand starting at position 3733 of SEQ ID NO: 1243031
gguguaugcagagauguca

SEQ ID NO: 1389953 - RNA, 19 nt, Artificial Sequence
  Description of Artificial Sequence: Synthetic oligonucleotide
  Antisense strand to SEQ ID NO: 1389952
ugacaucucugcauacacc

SEQ ID NO: 1389954 - RNA, 19 nt, Artificial Sequence
  Description of Artificial Sequence: Synthetic oligonucleotide
  Sense strand starting at position 3741 of SEQ ID NO: 1243031
cagagaugucacuguuaug

SEQ ID NO: 1389955 - RNA, 19 nt, Artificial Sequence
  Description of Artificial Sequence: Synthetic oligonucleotide
  Antisense strand to SEQ ID NO: 1389954
cauaacagugacaucucug

SEQ ID NO: 1389956 - RNA, 19 nt, Artificial Sequence
  Description of Artificial Sequence: Synthetic oligonucleotide
  Sense strand starting at position 3910 of SEQ ID NO: 1243031
ggaugcuguugucauccau

SEQ ID NO: 1389957 - RNA, 19 nt, Artificial Sequence
  Description of Artificial Sequence: Synthetic oligonucleotide
  Antisense strand to SEQ ID NO: 1389956
auggaugacaacagcaucc

SEQ ID NO: 1389958 - RNA, 19 nt, Artificial Sequence
  Description of Artificial Sequence: Synthetic oligonucleotide
  Sense strand starting at position 117 of SEQ ID NO: 1243032
agacuuuaauacuugugua

SEQ ID NO: 1389959 - RNA, 19 nt, Artificial Sequence
  Description of Artificial Sequence: Synthetic oligonucleotide
  Antisense strand to SEQ ID NO: 1389958
uacacaaguauuaaagucu

SEQ ID NO: 1389960 - RNA, 19 nt, Artificial Sequence
  Description of Artificial Sequence: Synthetic oligonucleotide
  Sense strand starting at position 359 of SEQ ID NO: 1243032
gaauccaugcucugaaagu

SEQ ID NO: 1389961 - RNA, 19 nt, Artificial Sequence
  Description of Artificial Sequence: Synthetic oligonucleotide
  Antisense strand to SEQ ID NO: 1389960
acuuucagagcauggauuc

SEQ ID NO: 1389962 - RNA, 19 nt, Artificial Sequence
  Description of Artificial Sequence: Synthetic oligonucleotide
  Sense strand starting at position 917 of SEQ ID NO: 1243032
ccguauuugucagcacuca

SEQ ID NO: 1389963 - RNA, 19 nt, Artificial Sequence
  Description of Artificial Sequence: Synthetic oligonucleotide
  Antisense strand to SEQ ID NO: 1389962
ugagugcugacaaauacgg

SEQ ID NO: 1389964 - RNA, 19 nt, Artificial Sequence
  Description of Artificial Sequence: Synthetic oligonucleotide
  Sense strand starting at position 918 of SEQ ID NO: 1243032
cguauuugucagcacucaa

SEQ ID NO: 1389965 - RNA, 19 nt, Artificial Sequence
  Description of Artificial Sequence: Synthetic oligonucleotide
  Antisense strand to SEQ ID NO: 1389964
uugagugcugacaaauacg

SEQ ID NO: 1389966 - RNA, 19 nt, Artificial Sequence
  Description of Artificial Sequence: Synthetic oligonucleotide
  Sense strand starting at position 968 of SEQ ID NO: 1243032
guaauuauuugcuuccugu

SEQ ID NO: 1389967 - RNA, 19 nt, Artificial Sequence
  Description of Artificial Sequence: Synthetic oligonucleotide
  Antisense strand to SEQ ID NO: 1389966
acaggaagcaaauaauuac

SEQ ID NO: 1389968 - RNA, 19 nt, Artificial Sequence
  Description of Artificial Sequence: Synthetic oligonucleotide
  Sense strand starting at position 1245 of SEQ ID NO: 1243032
gcgguacuggcucugcaaa

SEQ ID NO: 1389969 - RNA, 19 nt, Artificial Sequence
  Description of Artificial Sequence: Synthetic oligonucleotide
  Antisense strand to SEQ ID NO: 1389968
uuugcagagccaguaccgc

SEQ ID NO: 1389970 - RNA, 19 nt, Artificial Sequence
  Description of Artificial Sequence: Synthetic oligonucleotide
  Sense strand starting at position 1252 of SEQ ID NO: 1243032
uggcucugcaaagagauau

SEQ ID NO: 1389971 - RNA, 19 nt, Artificial Sequence
  Description of Artificial Sequence: Synthetic oligonucleotide
  Antisense strand to SEQ ID NO: 1389970
auaucucuuugcagagcca

SEQ ID NO: 1389972 - RNA, 19 nt, Artificial Sequence
  Description of Artificial Sequence: Synthetic oligonucleotide
  Sense strand starting at position 1264 of SEQ ID NO: 1243032
gagauauuacuuggcucug

SEQ ID NO: 1389973 - RNA, 19 nt, Artificial Sequence
  Description of Artificial Sequence: Synthetic oligonucleotide
  Antisense strand to SEQ ID NO: 1389972
cagagccaaguaauaucuc

SEQ ID NO: 1389974 - RNA, 19 nt, Artificial Sequence
  Description of Artificial Sequence: Synthetic oligonucleotide
  Sense strand starting at position 1445 of SEQ ID NO: 1243032
agcguuuagcuccaagaag

SEQ ID NO: 1389975 - RNA, 19 nt, Artificial Sequence
  Description of Artificial Sequence: Synthetic oligonucleotide
  Antisense strand to SEQ ID NO: 1389974
cuucuuggagcuaaacgcu

SEQ ID NO: 1389976 - RNA, 19 nt, Artificial Sequence
  Description of Artificial Sequence: Synthetic oligonucleotide
  Sense strand starting at position 2078 of SEQ ID NO: 1243032
gaaguugcucauuggauaa

SEQ ID NO: 1389977 - RNA, 19 nt, Artificial Sequence
  Description of Artificial Sequence: Synthetic oligonucleotide
  Antisense strand to SEQ ID NO: 1389976
uuauccaaugagcaacuuc

SEQ ID NO: 1389978 - RNA, 19 nt, Artificial Sequence
  Description of Artificial Sequence: Synthetic oligonucleotide
  Sense strand starting at position 2082 of SEQ ID NO: 1243032
uugcucauuggauaauuau

SEQ ID NO: 1389979 - RNA, 19 nt, Artificial Sequence
  Description of Artificial Sequence: Synthetic oligonucleotide
  Antisense strand to SEQ ID NO: 1389978
auaauuauccaaugagcaa

SEQ ID NO: 1389980 - RNA, 19 nt, Artificial Sequence
  Description of Artificial Sequence: Synthetic oligonucleotide
  Sense strand starting at position 2111 of SEQ ID NO: 1243032
cccacauaacccggaaauu

SEQ ID NO: 1389981 - RNA, 19 nt, Artificial Sequence
  Description of Artificial Sequence: Synthetic oligonucleotide
  Antisense strand to SEQ ID NO: 1389980
aauuuccggguuauguggg

SEQ ID NO: 1389982 - RNA, 19 nt, Artificial Sequence
  Description of Artificial Sequence: Synthetic oligonucleotide
  Sense strand starting at position 2190 of SEQ ID NO: 1243032
agucuuaggugucuggaga

SEQ ID NO: 1389983 - RNA, 19 nt, Artificial Sequence
  Description of Artificial Sequence: Synthetic oligonucleotide
  Antisense strand to SEQ ID NO: 1389982
ucuccagacaccuaagacu

SEQ ID NO: 1389984 - RNA, 19 nt, Artificial Sequence
  Description of Artificial Sequence: Synthetic oligonucleotide
  Sense strand starting at position 2191 of SEQ ID NO: 1243032
gucuuaggugucuggagaa

SEQ ID NO: 1389985 - RNA, 19 nt, Artificial Sequence
  Description of Artificial Sequence: Synthetic oligonucleotide
  Antisense strand to SEQ ID NO: 1389984
uucuccagacaccuaagac

SEQ ID NO: 1389986 - RNA, 19 nt, Artificial Sequence
  Description of Artificial Sequence: Synthetic oligonucleotide
  Sense strand starting at position 2225 of SEQ ID NO: 1243032
cuugcuggucgcgaaauuu

SEQ ID NO: 1389987 - RNA, 19 nt, Artificial Sequence
  Description of Artificial Sequence: Synthetic oligonucleotide
  Antisense strand to SEQ ID NO: 1389986
aaauuucgcgaccagcaag

SEQ ID NO: 1389988 - RNA, 19 nt, Artificial Sequence
  Description of Artificial Sequence: Synthetic oligonucleotide
  Sense strand starting at position 2319 of SEQ ID NO: 1243032
agaagcaacauguguaagu

SEQ ID NO: 1389989 - RNA, 19 nt, Artificial Sequence
  Description of Artificial Sequence: Synthetic oligonucleotide
  Antisense strand to SEQ ID NO: 1389988
acuuacacauguugcuucu

SEQ ID NO: 1389990 - RNA, 19 nt, Artificial Sequence
  Description of Artificial Sequence: Synthetic oligonucleotide
  Sense strand starting at position 2561 of SEQ ID NO: 1243032
gaaacaccguuguuacuaa

SEQ ID NO: 1389991 - RNA, 19 nt, Artificial Sequence
  Description of Artificial Sequence: Synthetic oligonucleotide
  Antisense strand to SEQ ID NO: 1389990
uuaguaacaacgguguuuc

SEQ ID NO: 1389992 - RNA, 19 nt, Artificial Sequence
  Description of Artificial Sequence: Synthetic oligonucleotide
  Sense strand starting at position 2781 of SEQ ID NO: 1243032
aaauguagugagggaagua

SEQ ID NO: 1389993 - RNA, 19 nt, Artificial Sequence
  Description of Artificial Sequence: Synthetic oligonucleotide
  Antisense strand to SEQ ID NO: 1389992
uacuucccucacuacauuu

SEQ ID NO: 1389994 - RNA, 19 nt, Artificial Sequence
  Description of Artificial Sequence: Synthetic oligonucleotide
  Sense strand starting at position 2791 of SEQ ID NO: 1243032
agggaaguaguguguggaa

SEQ ID NO: 1389995 - RNA, 19 nt, Artificial Sequence
  Description of Artificial Sequence: Synthetic oligonucleotide
  Antisense strand to SEQ ID NO: 1389994
uuccacacacuacuucccu

SEQ ID NO: 1389996 - RNA, 19 nt, Artificial Sequence
  Description of Artificial Sequence: Synthetic oligonucleotide
  Sense strand starting at position 2792 of SEQ ID NO: 1243032
gggaaguaguguguggaaa

SEQ ID NO: 1389997 - RNA, 19 nt, Artificial Sequence
  Description of Artificial Sequence: Synthetic oligonucleotide
  Antisense strand to SEQ ID NO: 1389996
uuuccacacacuacuuccc

SEQ ID NO: 1389998 - RNA, 19 nt, Artificial Sequence
  Description of Artificial Sequence: Synthetic oligonucleotide
  Sense strand starting at position 2831 of SEQ ID NO: 1243032
uguagcagcgaucauaaau

SEQ ID NO: 1389999 - RNA, 19 nt, Artificial Sequence
  Description of Artificial Sequence: Synthetic oligonucleotide
  Antisense strand to SEQ ID NO: 1389998
auuuaugaucgcugcuaca

SEQ ID NO: 1390000 - RNA, 19 nt, Artificial Sequence
  Description of Artificial Sequence: Synthetic oligonucleotide
  Sense strand starting at position 2895 of SEQ ID NO: 1243032
acacgauguucagugaaag

SEQ ID NO: 1390001 - RNA, 19 nt, Artificial Sequence
  Description of Artificial Sequence: Synthetic oligonucleotide
  Antisense strand to SEQ ID NO: 1390000
cuuucacugaacaucgugu

SEQ ID NO: 1390002 - RNA, 19 nt, Artificial Sequence
  Description of Artificial Sequence: Synthetic oligonucleotide
  Sense strand starting at position 2965 of SEQ ID NO: 1243032
uguuuagagaaacguacau

SEQ ID NO: 1390003 - RNA, 19 nt, Artificial Sequence
  Description of Artificial Sequence: Synthetic oligonucleotide
  Antisense strand to SEQ ID NO: 1390002
auguacguuucucuaaaca

SEQ ID NO: 1390004 - RNA, 19 nt, Artificial Sequence
  Description of Artificial Sequence: Synthetic oligonucleotide
  Sense strand starting at position 3044 of SEQ ID NO: 1243032
ggauauuggugaucuuuag

SEQ ID NO: 1390005 - RNA, 19 nt, Artificial Sequence
  Description of Artificial Sequence: Synthetic oligonucleotide
  Antisense strand to SEQ ID NO: 1390004
cuaaagaucaccaauaucc

SEQ ID NO: 1390006 - RNA, 19 nt, Artificial Sequence
  Description of Artificial Sequence: Synthetic oligonucleotide
  Sense strand starting at position 3116 of SEQ ID NO: 1243032
auagacacauccucaguuu

SEQ ID NO: 1390007 - RNA, 19 nt, Artificial Sequence
  Description of Artificial Sequence: Synthetic oligonucleotide
  Antisense strand to SEQ ID NO: 1390006
aaacugaggaugugucuau

SEQ ID NO: 1390008 - RNA, 19 nt, Artificial Sequence
  Description of Artificial Sequence: Synthetic oligonucleotide
  Sense strand starting at position 3149 of SEQ ID NO: 1243032
gguucacgugugucuguuu

SEQ ID NO: 1390009 - RNA, 19 nt, Artificial Sequence
  Description of Artificial Sequence: Synthetic oligonucleotide
  Antisense strand to SEQ ID NO: 1390008
aaacagacacacgugaacc

SEQ ID NO: 1390010 - RNA, 19 nt, Artificial Sequence
  Description of Artificial Sequence: Synthetic oligonucleotide
  Sense strand starting at position 3266 of SEQ ID NO: 1243032
uuucuugcuggugaugaaa

SEQ ID NO: 1390011 - RNA, 19 nt, Artificial Sequence
  Description of Artificial Sequence: Synthetic oligonucleotide
  Antisense strand to SEQ ID NO: 1390010
uuucaucaccagcaagaaa

SEQ ID NO: 1390012 - RNA, 19 nt, Artificial Sequence
  Description of Artificial Sequence: Synthetic oligonucleotide
  Sense strand starting at position 3339 of SEQ ID NO: 1243032
gggcgauuggcagagaauc

SEQ ID NO: 1390013 - RNA, 19 nt, Artificial Sequence
  Description of Artificial Sequence: Synthetic oligonucleotide
  Antisense strand to SEQ ID NO: 1390012
gauucucugccaaucgccc

SEQ ID NO: 1390014 - RNA, 19 nt, Artificial Sequence
  Description of Artificial Sequence: Synthetic oligonucleotide
  Sense strand starting at position 3426 of SEQ ID NO: 1243032
gucuuuguauauuccauuu

SEQ ID NO: 1390015 - RNA, 19 nt, Artificial Sequence
  Description of Artificial Sequence: Synthetic oligonucleotide
  Antisense strand to SEQ ID NO: 1390014
aaauggaauauacaaagac

SEQ ID NO: 1390016 - RNA, 19 nt, Artificial Sequence
  Description of Artificial Sequence: Synthetic oligonucleotide
  Sense strand starting at position 3456 of SEQ ID NO: 1243032
aguuguuggaagcaggaaa

SEQ ID NO: 1390017 - RNA, 19 nt, Artificial Sequence
  Description of Artificial Sequence: Synthetic oligonucleotide
  Antisense strand to SEQ ID NO: 1390016
uuuccugcuuccaacaacu

SEQ ID NO: 1390018 - RNA, 19 nt, Artificial Sequence
  Description of Artificial Sequence: Synthetic oligonucleotide
  Sense strand starting at position 3483 of SEQ ID NO: 1243032
cuuuaagaacuuugaauug

SEQ ID NO: 1390019 - RNA, 19 nt, Artificial Sequence
  Description of Artificial Sequence: Synthetic oligonucleotide
  Antisense strand to SEQ ID NO: 1390018
caauucaaaguucuuaaag

SEQ ID NO: 1390020 - RNA, 19 nt, Artificial Sequence
  Description of Artificial Sequence: Synthetic oligonucleotide
  Sense strand starting at position 3602 of SEQ ID NO: 1243032
acaagaucucauugauagc

SEQ ID NO: 1390021 - RNA, 19 nt, Artificial Sequence
  Description of Artificial Sequence: Synthetic oligonucleotide
  Antisense strand to SEQ ID NO: 1390020
gcuaucaaugagaucuugu

SEQ ID NO: 1390022 - RNA, 19 nt, Artificial Sequence
  Description of Artificial Sequence: Synthetic oligonucleotide
  Sense strand starting at position 3608 of SEQ ID NO: 1243032
ucucauugauagccacagu

SEQ ID NO: 1390023 - RNA, 19 nt, Artificial Sequence
  Description of Artificial Sequence: Synthetic oligonucleotide
  Antisense strand to SEQ ID NO: 1390022
acuguggcuaucaaugaga

SEQ ID NO: 1390024 - RNA, 19 nt, Artificial Sequence
  Description of Artificial Sequence: Synthetic oligonucleotide
  Sense strand starting at position 3611 of SEQ ID NO: 1243032
cauugauagccacaguaga

SEQ ID NO: 1390025 - RNA, 19 nt, Artificial Sequence
  Description of Artificial Sequence: Synthetic oligonucleotide
  Antisense strand to SEQ ID NO: 1390024
ucuacuguggcuaucaaug

SEQ ID NO: 1390026 - RNA, 19 nt, Artificial Sequence
  Description of Artificial Sequence: Synthetic oligonucleotide
  Sense strand starting at position 3788 of SEQ ID NO: 1243032
gguguuaguggauaguaag

SEQ ID NO: 1390027 - RNA, 19 nt, Artificial Sequence
  Description of Artificial Sequence: Synthetic oligonucleotide
  Antisense strand to SEQ ID NO: 1390026
cuuacuauccacuaacacc

SEQ ID NO: 1390028 - RNA, 19 nt, Artificial Sequence
  Description of Artificial Sequence: Synthetic oligonucleotide
  Sense strand starting at position 3789 of SEQ ID NO: 1243032
guguuaguggauaguaagu

SEQ ID NO: 1390029 - RNA, 19 nt, Artificial Sequence
  Description of Artificial Sequence: Synthetic oligonucleotide
  Antisense strand to SEQ ID NO: 1390028
acuuacuauccacuaacac

SEQ ID NO: 1390030 - RNA, 19 nt, Artificial Sequence
  Description of Artificial Sequence: Synthetic oligonucleotide
  Sense strand starting at position 3794 of SEQ ID NO: 1243032
aguggauaguaaguguuaa

SEQ ID NO: 1390031 - RNA, 19 nt, Artificial Sequence
  Description of Artificial Sequence: Synthetic oligonucleotide
  Antisense strand to SEQ ID NO: 1390030
uuaacacuuacuauccacu

SEQ ID NO: 1390032 - RNA, 19 nt, Artificial Sequence
  Description of Artificial Sequence: Synthetic oligonucleotide
  Sense strand starting at position 3829 of SEQ ID NO: 1243032
guguuaaucccacaggucu

SEQ ID NO: 1390033 - RNA, 19 nt, Artificial Sequence
  Description of Artificial Sequence: Synthetic oligonucleotide
  Antisense strand to SEQ ID NO: 1390032
agaccugugggauuaacac

SEQ ID NO: 1390034 - RNA, 19 nt, Artificial Sequence
  Description of Artificial Sequence: Synthetic oligonucleotide
  Sense strand starting at position 3881 of SEQ ID NO: 1243032
ggaggcagauggguuuaua

SEQ ID NO: 1390035 - RNA, 19 nt, Artificial Sequence
  Description of Artificial Sequence: Synthetic oligonucleotide
  Antisense strand to SEQ ID NO: 1390034
uauaaacccaucugccucc

SEQ ID NO: 1390036 - RNA, 19 nt, Artificial Sequence
  Description of Artificial Sequence: Synthetic oligonucleotide
  Sense strand starting at position 3884 of SEQ ID NO: 1243032
ggcagauggguuuauacac

SEQ ID NO: 1390037 - RNA, 19 nt, Artificial Sequence
  Description of Artificial Sequence: Synthetic oligonucleotide
  Antisense strand to SEQ ID NO: 1390036
guguauaaacccaucugcc

SEQ ID NO: 1390038 - RNA, 19 nt, Artificial Sequence
  Description of Artificial Sequence: Synthetic oligonucleotide
  Sense strand starting at position 31 of SEQ ID NO: 1243033
ccaggaaagguucgcgagu

SEQ ID NO: 1390039 - RNA, 19 nt, Artificial Sequence
  Description of Artificial Sequence: Synthetic oligonucleotide
  Antisense strand to SEQ ID NO: 1390038
acucgcgaaccuuuccugg

SEQ ID NO: 1390040 - RNA, 19 nt, Artificial Sequence
  Description of Artificial Sequence: Synthetic oligonucleotide
  Sense strand starting at position 46 of SEQ ID NO: 1243033
gaguccuacccacgggaaa

SEQ ID NO: 1390041 - RNA, 19 nt, Artificial Sequence
  Description of Artificial Sequence: Synthetic oligonucleotide
  Antisense strand to SEQ ID NO: 1390040
uuucccguggguaggacuc

SEQ ID NO: 1390042 - RNA, 19 nt, Artificial Sequence
  Description of Artificial Sequence: Synthetic oligonucleotide
  Sense strand starting at position 95 of SEQ ID NO: 1243033
gagggcuuugcgggugaca

SEQ ID NO: 1390043 - RNA, 19 nt, Artificial Sequence
  Description of Artificial Sequence: Synthetic oligonucleotide
  Antisense strand to SEQ ID NO: 1390042
ugucacccgcaaagcccuc

SEQ ID NO: 1390044 - RNA, 19 nt, Artificial Sequence
  Description of Artificial Sequence: Synthetic oligonucleotide
  Sense strand starting at position 164 of SEQ ID NO: 1243033
guccauaugcgucagguua

SEQ ID NO: 1390045 - RNA, 19 nt, Artificial Sequence
  Description of Artificial Sequence: Synthetic oligonucleotide
  Antisense strand to SEQ ID NO: 1390044
uaaccugacgcauauggac

SEQ ID NO: 1390046 - RNA, 19 nt, Artificial Sequence
  Description of Artificial Sequence: Synthetic oligonucleotide
  Sense strand starting at position 166 of SEQ ID NO: 1243033
ccauaugcgucagguuaac

SEQ ID NO: 1390047 - RNA, 19 nt, Artificial Sequence
  Description of Artificial Sequence: Synthetic oligonucleotide
  Antisense strand to SEQ ID NO: 1390046
guuaaccugacgcauaugg

SEQ ID NO: 1390048 - RNA, 19 nt, Artificial Sequence
  Description of Artificial Sequence: Synthetic oligonucleotide
  Sense strand starting at position 1414 of SEQ ID NO: 1243033
gaacucagagcuugauaag

SEQ ID NO: 1390049 - RNA, 19 nt, Artificial Sequence
  Description of Artificial Sequence: Synthetic oligonucleotide
  Antisense strand to SEQ ID NO: 1390048
cuuaucaagcucugaguuc

SEQ ID NO: 1390050 - RNA, 19 nt, Artificial Sequence
  Description of Artificial Sequence: Synthetic oligonucleotide
  Sense strand starting at position 1417 of SEQ ID NO: 1243033
cucagagcuugauaaggga

SEQ ID NO: 1390051 - RNA, 19 nt, Artificial Sequence
  Description of Artificial Sequence: Synthetic oligonucleotide
  Antisense strand to SEQ ID NO: 1390050
ucccuuaucaagcucugag

SEQ ID NO: 1390052 - RNA, 19 nt, Artificial Sequence
  Description of Artificial Sequence: Synthetic oligonucleotide
  Sense strand starting at position 1420 of SEQ ID NO: 1243033
agagcuugauaagggaauu

SEQ ID NO: 1390053 - RNA, 19 nt, Artificial Sequence
  Description of Artificial Sequence: Synthetic oligonucleotide
  Antisense strand to SEQ ID NO: 1390052
aauucccuuaucaagcucu

SEQ ID NO: 1390054 - RNA, 19 nt, Artificial Sequence
  Description of Artificial Sequence: Synthetic oligonucleotide
  Sense strand starting at position 1531 of SEQ ID NO: 1243033
ggauguguuucuucccauu

SEQ ID NO: 1390055 - RNA, 19 nt, Artificial Sequence
  Description of Artificial Sequence: Synthetic oligonucleotide
  Antisense strand to SEQ ID NO: 1390054
aaugggaagaaacacaucc

SEQ ID NO: 1390056 - RNA, 19 nt, Artificial Sequence
  Description of Artificial Sequence: Synthetic oligonucleotide
  Sense strand starting at position 1798 of SEQ ID NO: 1243033
caggaaacuugggaucaga

SEQ ID NO: 1390057 - RNA, 19 nt, Artificial Sequence
  Description of Artificial Sequence: Synthetic oligonucleotide
  Antisense strand to SEQ ID NO: 1390056
ucugaucccaaguuuccug

SEQ ID NO: 1390058 - RNA, 19 nt, Artificial Sequence
  Description of Artificial Sequence: Synthetic oligonucleotide
  Sense strand starting at position 2126 of SEQ ID NO: 1243033
ggacgacacuucuaaagga

SEQ ID NO: 1390059 - RNA, 19 nt, Artificial Sequence
  Description of Artificial Sequence: Synthetic oligonucleotide
  Antisense strand to SEQ ID NO: 1390058
uccuuuagaagugucgucc

SEQ ID NO: 1390060 - RNA, 19 nt, Artificial Sequence
  Description of Artificial Sequence: Synthetic oligonucleotide
  Sense strand starting at position 2375 of SEQ ID NO: 1243033
gcauucugaucuuaagaca

SEQ ID NO: 1390061 - RNA, 19 nt, Artificial Sequence
  Description of Artificial Sequence: Synthetic oligonucleotide
  Antisense strand to SEQ ID NO: 1390060
ugucuuaagaucagaaugc

SEQ ID NO: 1390062 - RNA, 19 nt, Artificial Sequence
  Description of Artificial Sequence: Synthetic oligonucleotide
  Sense strand starting at position 2441 of SEQ ID NO: 1243033
cuagcaucaccugacagau

SEQ ID NO: 1390063 - RNA, 19 nt, Artificial Sequence
  Description of Artificial Sequence: Synthetic oligonucleotide
  Antisense strand to SEQ ID NO: 1390062
aucugucaggugaugcuag

SEQ ID NO: 1390064 - RNA, 19 nt, Artificial Sequence
  Description of Artificial Sequence: Synthetic oligonucleotide
  Sense strand starting at position 3374 of SEQ ID NO: 1243033
guuguuguauaccaagauu

SEQ ID NO: 1390065 - RNA, 19 nt, Artificial Sequence
  Description of Artificial Sequence: Synthetic oligonucleotide
  Antisense strand to SEQ ID NO: 1390064
aaucuugguauacaacaac

SEQ ID NO: 1390066 - RNA, 19 nt, Artificial Sequence
  Description of Artificial Sequence: Synthetic oligonucleotide
  Sense strand starting at position 3377 of SEQ ID NO: 1243033
guuguauaccaagauucca

SEQ ID NO: 1390067 - RNA, 19 nt, Artificial Sequence
  Description of Artificial Sequence: Synthetic oligonucleotide
  Antisense strand to SEQ ID NO: 1390066
uggaaucuugguauacaac

SEQ ID NO: 1390068 - RNA, 19 nt, Artificial Sequence
  Description of Artificial Sequence: Synthetic oligonucleotide
  Sense strand starting at position 3391 of SEQ ID NO: 1243033
uuccaagucuuuggauaau

SEQ ID NO: 1390069 - RNA, 19 nt, Artificial Sequence
  Description of Artificial Sequence: Synthetic oligonucleotide
  Antisense strand to SEQ ID NO: 1390068
auuauccaaagacuuggaa

SEQ ID NO: 1390070 - RNA, 19 nt, Artificial Sequence
  Description of Artificial Sequence: Synthetic oligonucleotide
  Sense strand starting at position 3803 of SEQ ID NO: 1243033
ugcuuauauugauuacugu

SEQ ID NO: 1390071 - RNA, 19 nt, Artificial Sequence
  Description of Artificial Sequence: Synthetic oligonucleotide
  Antisense strand to SEQ ID NO: 1390070
acaguaaucaauauaagca

SEQ ID NO: 1390072 - RNA, 19 nt, Artificial Sequence
  Description of Artificial Sequence: Synthetic oligonucleotide
  Sense strand starting at position 3892 of SEQ ID NO: 1243033
cagggaaugugucacaggu

SEQ ID NO: 1390073 - RNA, 19 nt, Artificial Sequence
  Description of Artificial Sequence: Synthetic oligonucleotide
  Antisense strand to SEQ ID NO: 1390072
accugugacacauucccug

SEQ ID NO: 1390074 - RNA, 19 nt, Artificial Sequence
  Description of Artificial Sequence: Synthetic oligonucleotide
  Sense strand starting at position 3894 of SEQ ID NO: 1243033
gggaaugugucacagguca

SEQ ID NO: 1390075 - RNA, 19 nt, Artificial Sequence
  Description of Artificial Sequence: Synthetic oligonucleotide
  Antisense strand to SEQ ID NO: 1390074
ugaccugugacacauuccc

SEQ ID NO: 1390076 - RNA, 19 nt, Artificial Sequence
  Description of Artificial Sequence: Synthetic oligonucleotide
  Sense strand starting at position 3896 of SEQ ID NO: 1243033
gaaugugucacaggucaug

SEQ ID NO: 1390077 - RNA, 19 nt, Artificial Sequence
  Description of Artificial Sequence: Synthetic oligonucleotide
  Antisense strand to SEQ ID NO: 1390076
caugaccugugacacauuc

SEQ ID NO: 1390078 - RNA, 19 nt, Artificial Sequence
  Description of Artificial Sequence: Synthetic oligonucleotide
  Sense strand starting at position 3908 of SEQ ID NO: 1243033
ggucauggucuucauguga

SEQ ID NO: 1390079 - RNA, 19 nt, Artificial Sequence
  Description of Artificial Sequence: Synthetic oligonucleotide
  Antisense strand to SEQ ID NO: 1390078
ucacaugaagaccaugacc

SEQ ID NO: 1390080 - RNA, 19 nt, Artificial Sequence
  Description of Artificial Sequence: Synthetic oligonucleotide
  Sense strand starting at position 3919 of SEQ ID NO: 1243033
ucaugugaguggugggaaa

SEQ ID NO: 1390081 - RNA, 19 nt, Artificial Sequence
  Description of Artificial Sequence: Synthetic oligonucleotide
  Antisense strand to SEQ ID NO: 1390080
uuucccaccacucacauga

SEQ ID NO: 1390082 - RNA, 19 nt, Artificial Sequence
  Description of Artificial Sequence: Synthetic oligonucleotide
  Sense strand starting at position 3921 of SEQ ID NO: 1243033
augugaguggugggaaauc

SEQ ID NO: 1390083 - RNA, 19 nt, Artificial Sequence
  Description of Artificial Sequence: Synthetic oligonucleotide
  Antisense strand to SEQ ID NO: 1390082
gauuucccaccacucacau

SEQ ID NO: 1390084 - RNA, 19 nt, Artificial Sequence
  Description of Artificial Sequence: Synthetic oligonucleotide
  Sense strand starting at position 3963 of SEQ ID NO: 1243033
augcuugccucaucagaag

SEQ ID NO: 1390085 - RNA, 19 nt, Artificial Sequence
  Description of Artificial Sequence: Synthetic oligonucleotide
  Antisense strand to SEQ ID NO: 1390084
cuucugaugaggcaagcau

SEQ ID NO: 1390086 - RNA, 19 nt, Artificial Sequence
  Description of Artificial Sequence: Synthetic oligonucleotide
  Sense strand starting at position 164 of SEQ ID NO: 1243034
acuagaauugcuugaacuc

SEQ ID NO: 1390087 - RNA, 19 nt, Artificial Sequence
  Description of Artificial Sequence: Synthetic oligonucleotide
  Antisense strand to SEQ ID NO: 1390086
gaguucaagcaauucuagu

SEQ ID NO: 1390088 - RNA, 19 nt, Artificial Sequence
  Description of Artificial Sequence: Synthetic oligonucleotide
  Sense strand starting at position 403 of SEQ ID NO: 1243034
gccuuaaaguaacaggaaa

SEQ ID NO: 1390089 - RNA, 19 nt, Artificial Sequence
  Description of Artificial Sequence: Synthetic oligonucleotide
  Antisense strand to SEQ ID NO: 1390088
uuuccuguuacuuuaaggc

SEQ ID NO: 1390090 - RNA, 19 nt, Artificial Sequence
  Description of Artificial Sequence: Synthetic oligonucleotide
  Sense strand starting at position 456 of SEQ ID NO: 1243034
uuaaauguuucuuagagag

SEQ ID NO: 1390091 - RNA, 19 nt, Artificial Sequence
  Description of Artificial Sequence: Synthetic oligonucleotide
  Antisense strand to SEQ ID NO: 1390090
cucucuaagaaacauuuaa

SEQ ID NO: 1390092 - RNA, 19 nt, Artificial Sequence
  Description of Artificial Sequence: Synthetic oligonucleotide
  Sense strand starting at position 458 of SEQ ID NO: 1243034
aaauguuucuuagagaguu

SEQ ID NO: 1390093 - RNA, 19 nt, Artificial Sequence
  Description of Artificial Sequence: Synthetic oligonucleotide
  Antisense strand to SEQ ID NO: 1390092
aacucucuaagaaacauuu

SEQ ID NO: 1390094 - RNA, 19 nt, Artificial Sequence
  Description of Artificial Sequence: Synthetic oligonucleotide
  Sense strand starting at position 460 of SEQ ID NO: 1243034
auguuucuuagagaguuug

SEQ ID NO: 1390095 - RNA, 19 nt, Artificial Sequence
  Description of Artificial Sequence: Synthetic oligonucleotide
  Antisense strand to SEQ ID NO: 1390094
caaacucucuaagaaacau

SEQ ID NO: 1390096 - RNA, 19 nt, Artificial Sequence
  Description of Artificial Sequence: Synthetic oligonucleotide
  Sense strand starting at position 483 of SEQ ID NO: 1243034
acauuuaguucccagagca

SEQ ID NO: 1390097 - RNA, 19 nt, Artificial Sequence
  Description of Artificial Sequence: Synthetic oligonucleotide
  Antisense strand to SEQ ID NO: 1390096
ugcucugggaacuaaaugu

SEQ ID NO: 1390098 - RNA, 19 nt, Artificial Sequence
  Description of Artificial Sequence: Synthetic oligonucleotide
  Sense strand starting at position 524 of SEQ ID NO: 1243034
aagugcaauauggguguua

SEQ ID NO: 1390099 - RNA, 19 nt, Artificial Sequence
  Description of Artificial Sequence: Synthetic oligonucleotide
  Antisense strand to SEQ ID NO: 1390098
uaacacccauauugcacuu

SEQ ID NO: 1390100 - RNA, 19 nt, Artificial Sequence
  Description of Artificial Sequence: Synthetic oligonucleotide
  Sense strand starting at position 526 of SEQ ID NO: 1243034
gugcaauauggguguuacu

SEQ ID NO: 1390101 - RNA, 19 nt, Artificial Sequence
  Description of Artificial Sequence: Synthetic oligonucleotide
  Antisense strand to SEQ ID NO: 1390100
aguaacacccauauugcac

SEQ ID NO: 1390102 - RNA, 19 nt, Artificial Sequence
  Description of Artificial Sequence: Synthetic oligonucleotide
  Sense strand starting at position 541 of SEQ ID NO: 1243034
uacucuaugccagguaaag

SEQ ID NO: 1390103 - RNA, 19 nt, Artificial Sequence
  Description of Artificial Sequence: Synthetic oligonucleotide
  Antisense strand to SEQ ID NO: 1390102
cuuuaccuggcauagagua

SEQ ID NO: 1390104 - RNA, 19 nt, Artificial Sequence
  Description of Artificial Sequence: Synthetic oligonucleotide
  Sense strand starting at position 642 of SEQ ID NO: 1243034
ucuguaggcaucuggguua

SEQ ID NO: 1390105 - RNA, 19 nt, Artificial Sequence
  Description of Artificial Sequence: Synthetic oligonucleotide
  Antisense strand to SEQ ID NO: 1390104
uaacccagaugccuacaga

SEQ ID NO: 1390106 - RNA, 19 nt, Artificial Sequence
  Description of Artificial Sequence: Synthetic oligonucleotide
  Sense strand starting at position 649 of SEQ ID NO: 1243034
gcaucuggguuaguccuaa

SEQ ID NO: 1390107 - RNA, 19 nt, Artificial Sequence
  Description of Artificial Sequence: Synthetic oligonucleotide
  Antisense strand to SEQ ID NO: 1390106
uuaggacuaacccagaugc

SEQ ID NO: 1390108 - RNA, 19 nt, Artificial Sequence
  Description of Artificial Sequence: Synthetic oligonucleotide
  Sense strand starting at position 653 of SEQ ID NO: 1243034
cuggguuaguccuaaauag

SEQ ID NO: 1390109 - RNA, 19 nt, Artificial Sequence
  Description of Artificial Sequence: Synthetic oligonucleotide
  Antisense strand to SEQ ID NO: 1390108
cuauuuaggacuaacccag

SEQ ID NO: 1390110 - RNA, 19 nt, Artificial Sequence
  Description of Artificial Sequence: Synthetic oligonucleotide
  Sense strand starting at position 785 of SEQ ID NO: 1243034
ucagacagucuuugaacca

SEQ ID NO: 1390111 - RNA, 19 nt, Artificial Sequence
  Description of Artificial Sequence: Synthetic oligonucleotide
  Antisense strand to SEQ ID NO: 1390110
ugguucaaagacugucuga

SEQ ID NO: 1390112 - RNA, 19 nt, Artificial Sequence
  Description of Artificial Sequence: Synthetic oligonucleotide
  Sense strand starting at position 831 of SEQ ID NO: 1243034
gaggcauccucuuugggaa

SEQ ID NO: 1390113 - RNA, 19 nt, Artificial Sequence
  Description of Artificial Sequence: Synthetic oligonucleotide
  Antisense strand to SEQ ID NO: 1390112
uucccaaagaggaugccuc

SEQ ID NO: 1390114 - RNA, 19 nt, Artificial Sequence
  Description of Artificial Sequence: Synthetic oligonucleotide
  Sense strand starting at position 1116 of SEQ ID NO: 1243034
gaggguauuugccuagcuu

SEQ ID NO: 1390115 - RNA, 19 nt, Artificial Sequence
  Description of Artificial Sequence: Synthetic oligonucleotide
  Antisense strand to SEQ ID NO: 1390114
aagcuaggcaaauacccuc

SEQ ID NO: 1390116 - RNA, 19 nt, Artificial Sequence
  Description of Artificial Sequence: Synthetic oligonucleotide
  Sense strand starting at position 1325 of SEQ ID NO: 1243034
cccgcuucgcucucugauu

SEQ ID NO: 1390117 - RNA, 19 nt, Artificial Sequence
  Description of Artificial Sequence: Synthetic oligonucleotide
  Antisense strand to SEQ ID NO: 1390116
aaucagagagcgaagcggg

SEQ ID NO: 1390118 - RNA, 19 nt, Artificial Sequence
  Description of Artificial Sequence: Synthetic oligonucleotide
  Sense strand starting at position 1326 of SEQ ID NO: 1243034
ccgcuucgcucucugauuu

SEQ ID NO: 1390119 - RNA, 19 nt, Artificial Sequence
  Description of Artificial Sequence: Synthetic oligonucleotide
  Antisense strand to SEQ ID NO: 1390118
aaaucagagagcgaagcgg

SEQ ID NO: 1390120 - RNA, 19 nt, Artificial Sequence
  Description of Artificial Sequence: Synthetic oligonucleotide
  Sense strand starting at position 1443 of SEQ ID NO: 1243034
gaagucaaauguuuggcaa

SEQ ID NO: 1390121 - RNA, 19 nt, Artificial Sequence
  Description of Artificial Sequence: Synthetic oligonucleotide
  Antisense strand to SEQ ID NO: 1390120
uugccaaacauuugacuuc

SEQ ID NO: 1390122 - RNA, 19 nt, Artificial Sequence
  Description of Artificial Sequence: Synthetic oligonucleotide
  Sense strand starting at position 1444 of SEQ ID NO: 1243034
aagucaaauguuuggcaaa

SEQ ID NO: 1390123 - RNA, 19 nt, Artificial Sequence
  Description of Artificial Sequence: Synthetic oligonucleotide
  Antisense strand to SEQ ID NO: 1390122
uuugccaaacauuugacuu

SEQ ID NO: 1390124 - RNA, 19 nt, Artificial Sequence
  Description of Artificial Sequence: Synthetic oligonucleotide
  Sense strand starting at position 1446 of SEQ ID NO: 1243034
gucaaauguuuggcaaaua

SEQ ID NO: 1390125 - RNA, 19 nt, Artificial Sequence
  Description of Artificial Sequence: Synthetic oligonucleotide
  Antisense strand to SEQ ID NO: 1390124
uauuugccaaacauuugac

SEQ ID NO: 1390126 - RNA, 19 nt, Artificial Sequence
  Description of Artificial Sequence: Synthetic oligonucleotide
  Sense strand starting at position 1447 of SEQ ID NO: 1243034
ucaaauguuuggcaaauag

SEQ ID NO: 1390127 - RNA, 19 nt, Artificial Sequence
  Description of Artificial Sequence: Synthetic oligonucleotide
  Antisense strand to SEQ ID NO: 1390126
cuauuugccaaacauuuga

SEQ ID NO: 1390128 - RNA, 19 nt, Artificial Sequence
  Description of Artificial Sequence: Synthetic oligonucleotide
  Sense strand starting at position 1543 of SEQ ID NO: 1243034
caaccugagucacuagaga

SEQ ID NO: 1390129 - RNA, 19 nt, Artificial Sequence
  Description of Artificial Sequence: Synthetic oligonucleotide
  Antisense strand to SEQ ID NO: 1390128
ucucuagugacucagguug

SEQ ID NO: 1390130 - RNA, 19 nt, Artificial Sequence
  Description of Artificial Sequence: Synthetic oligonucleotide
  Sense strand starting at position 2523 of SEQ ID NO: 1243034
cucggcuuccugucugcaa

SEQ ID NO: 1390131 - RNA, 19 nt, Artificial Sequence
  Description of Artificial Sequence: Synthetic oligonucleotide
  Antisense strand to SEQ ID NO: 1390130
uugcagacaggaagccgag

SEQ ID NO: 1390132 - RNA, 19 nt, Artificial Sequence
  Description of Artificial Sequence: Synthetic oligonucleotide
  Sense strand starting at position 2524 of SEQ ID NO: 1243034
ucggcuuccugucugcaaa

SEQ ID NO: 1390133 - RNA, 19 nt, Artificial Sequence
  Description of Artificial Sequence: Synthetic oligonucleotide
  Antisense strand to SEQ ID NO: 1390132
uuugcagacaggaagccga

SEQ ID NO: 1390134 - RNA, 19 nt, Artificial Sequence
  Description of Artificial Sequence: Synthetic oligonucleotide
  Sense strand starting at position 2555 of SEQ ID NO: 1243034
gcgguccugucuccuaaga

SEQ ID NO: 1390135 - RNA, 19 nt, Artificial Sequence
  Description of Artificial Sequence: Synthetic oligonucleotide
  Antisense strand to SEQ ID NO: 1390134
ucuuaggagacaggaccgc

SEQ ID NO: 1390136 - RNA, 19 nt, Artificial Sequence
  Description of Artificial Sequence: Synthetic oligonucleotide
  Sense strand starting at position 2589 of SEQ ID NO: 1243034
cugggaagaugguaaaguu

SEQ ID NO: 1390137 - RNA, 19 nt, Artificial Sequence
  Description of Artificial Sequence: Synthetic oligonucleotide
  Antisense strand to SEQ ID NO: 1390136
aacuuuaccaucuucccag

SEQ ID NO: 1390138 - RNA, 19 nt, Artificial Sequence
  Description of Artificial Sequence: Synthetic oligonucleotide
  Sense strand starting at position 2615 of SEQ ID NO: 1243034
caggauagguauuagguaa

SEQ ID NO: 1390139 - RNA, 19 nt, Artificial Sequence
  Description of Artificial Sequence: Synthetic oligonucleotide
  Antisense strand to SEQ ID NO: 1390138
uuaccuaauaccuauccug

SEQ ID NO: 1390140 - RNA, 19 nt, Artificial Sequence
  Description of Artificial Sequence: Synthetic oligonucleotide
  Sense strand starting at position 2689 of SEQ ID NO: 1243034
aggccuuucucagccauca

SEQ ID NO: 1390141 - RNA, 19 nt, Artificial Sequence
  Description of Artificial Sequence: Synthetic oligonucleotide
  Antisense strand to SEQ ID NO: 1390140
ugauggcugagaaaggccu

SEQ ID NO: 1390142 - RNA, 19 nt, Artificial Sequence
  Description of Artificial Sequence: Synthetic oligonucleotide
  Sense strand starting at position 2710 of SEQ ID NO: 1243034
gaaagcaagcucuggaaau

SEQ ID NO: 1390143 - RNA, 19 nt, Artificial Sequence
  Description of Artificial Sequence: Synthetic oligonucleotide
  Antisense strand to SEQ ID NO: 1390142
auuuccagagcuugcuuuc

SEQ ID NO: 1390144 - RNA, 19 nt, Artificial Sequence
  Description of Artificial Sequence: Synthetic oligonucleotide
  Sense strand starting at position 2831 of SEQ ID NO: 1243034
gcaggcucucugggaaauc

SEQ ID NO: 1390145 - RNA, 19 nt, Artificial Sequence
  Description of Artificial Sequence: Synthetic oligonucleotide
  Antisense strand to SEQ ID NO: 1390144
gauuucccagagagccugc

SEQ ID NO: 1390146 - RNA, 19 nt, Artificial Sequence
  Description of Artificial Sequence: Synthetic oligonucleotide
  Sense strand starting at position 2832 of SEQ ID NO: 1243034
caggcucucugggaaauca

SEQ ID NO: 1390147 - RNA, 19 nt, Artificial Sequence
  Description of Artificial Sequence: Synthetic oligonucleotide
  Antisense strand to SEQ ID NO: 1390146
ugauuucccagagagccug

SEQ ID NO: 1390148 - RNA, 19 nt, Artificial Sequence
  Description of Artificial Sequence: Synthetic oligonucleotide
  Sense strand starting at position 2842 of SEQ ID NO: 1243034
gggaaaucauuagagggaa

SEQ ID NO: 1390149 - RNA, 19 nt, Artificial Sequence
  Description of Artificial Sequence: Synthetic oligonucleotide
  Antisense strand to SEQ ID NO: 1390148
uucccucuaaugauuuccc

SEQ ID NO: 1390150 - RNA, 19 nt, Artificial Sequence
  Description of Artificial Sequence: Synthetic oligonucleotide
  Sense strand starting at position 2973 of SEQ ID NO: 1243034
uggcaaagaccuggaucuu

SEQ ID NO: 1390151 - RNA, 19 nt, Artificial Sequence
  Description of Artificial Sequence: Synthetic oligonucleotide
  Antisense strand to SEQ ID NO: 1390150
aagauccaggucuuugcca

SEQ ID NO: 1390152 - RNA, 19 nt, Artificial Sequence
  Description of Artificial Sequence: Synthetic oligonucleotide
  Sense strand starting at position 3018 of SEQ ID NO: 1243034
gccuuuacccgagguccua

SEQ ID NO: 1390153 - RNA, 19 nt, Artificial Sequence
  Description of Artificial Sequence: Synthetic oligonucleotide
  Antisense strand to SEQ ID NO: 1390152
uaggaccucggguaaaggc

SEQ ID NO: 1390154 - RNA, 19 nt, Artificial Sequence
  Description of Artificial Sequence: Synthetic oligonucleotide
  Sense strand starting at position 3202 of SEQ ID NO: 1243034
gagguucccauguagaugu

SEQ ID NO: 1390155 - RNA, 19 nt, Artificial Sequence
  Description of Artificial Sequence: Synthetic oligonucleotide
  Antisense strand to SEQ ID NO: 1390154
acaucuacaugggaaccuc

SEQ ID NO: 1390156 - RNA, 19 nt, Artificial Sequence
  Description of Artificial Sequence: Synthetic oligonucleotide
  Sense strand starting at position 3217 of SEQ ID NO: 1243034
auguuauuagugugggcaa

SEQ ID NO: 1390157 - RNA, 19 nt, Artificial Sequence
  Description of Artificial Sequence: Synthetic oligonucleotide
  Antisense strand to SEQ ID NO: 1390156
uugcccacacuaauaacau

SEQ ID NO: 1390158 - RNA, 19 nt, Artificial Sequence
  Description of Artificial Sequence: Synthetic oligonucleotide
  Sense strand starting at position 3219 of SEQ ID NO: 1243034
guuauuagugugggcaaca

SEQ ID NO: 1390159 - RNA, 19 nt, Artificial Sequence
  Description of Artificial Sequence: Synthetic oligonucleotide
  Antisense strand to SEQ ID NO: 1390158
uguugcccacacuaauaac

SEQ ID NO: 1390160 - RNA, 19 nt, Artificial Sequence
  Description of Artificial Sequence: Synthetic oligonucleotide
  Sense strand starting at position 3220 of SEQ ID NO: 1243034
uuauuagugugggcaacau

SEQ ID NO: 1390161 - RNA, 19 nt, Artificial Sequence
  Description of Artificial Sequence: Synthetic oligonucleotide
  Antisense strand to SEQ ID NO: 1390160
auguugcccacacuaauaa

SEQ ID NO: 1390162 - RNA, 19 nt, Artificial Sequence
  Description of Artificial Sequence: Synthetic oligonucleotide
  Sense strand starting at position 3491 of SEQ ID NO: 1243034
uguagugagcuauaaucga

SEQ ID NO: 1390163 - RNA, 19 nt, Artificial Sequence
  Description of Artificial Sequence: Synthetic oligonucleotide
  Antisense strand to SEQ ID NO: 1390162
ucgauuauagcucacuaca

SEQ ID NO: 1390164 - RNA, 19 nt, Artificial Sequence
  Description of Artificial Sequence: Synthetic oligonucleotide
  Sense strand starting at position 3706 of SEQ ID NO: 1243034
cuccauucucaggaugcaa

SEQ ID NO: 1390165 - RNA, 19 nt, Artificial Sequence
  Description of Artificial Sequence: Synthetic oligonucleotide
  Antisense strand to SEQ ID NO: 1390164
uugcauccugagaauggag

SEQ ID NO: 1390166 - RNA, 19 nt, Artificial Sequence
  Description of Artificial Sequence: Synthetic oligonucleotide
  Sense strand starting at position 24 of SEQ ID NO: 1243035
accucugagcagugaggau

SEQ ID NO: 1390167 - RNA, 19 nt, Artificial Sequence
  Description of Artificial Sequence: Synthetic oligonucleotide
  Antisense strand to SEQ ID NO: 1390166
auccucacugcucagaggu

SEQ ID NO: 1390168 - RNA, 19 nt, Artificial Sequence
  Description of Artificial Sequence: Synthetic oligonucleotide
  Sense strand starting at position 31 of SEQ ID NO: 1243035
agcagugaggauggguaau

SEQ ID NO: 1390169 - RNA, 19 nt, Artificial Sequence
  Description of Artificial Sequence: Synthetic oligonucleotide
  Antisense strand to SEQ ID NO: 1390168
auuacccauccucacugcu

SEQ ID NO: 1390170 - RNA, 19 nt, Artificial Sequence
  Description of Artificial Sequence: Synthetic oligonucleotide
  Sense strand starting at position 82 of SEQ ID NO: 1243035
aaauuaacuugggcuggaa

SEQ ID NO: 1390171 - RNA, 19 nt, Artificial Sequence
  Description of Artificial Sequence: Synthetic oligonucleotide
  Antisense strand to SEQ ID NO: 1390170
uuccagcccaaguuaauuu

SEQ ID NO: 1390172 - RNA, 19 nt, Artificial Sequence
  Description of Artificial Sequence: Synthetic oligonucleotide
  Sense strand starting at position 207 of SEQ ID NO: 1243035
ugaacuauguccucauguu

SEQ ID NO: 1390173 - RNA, 19 nt, Artificial Sequence
  Description of Artificial Sequence: Synthetic oligonucleotide
  Antisense strand to SEQ ID NO: 1390172
aacaugaggacauaguuca

SEQ ID NO: 1390174 - RNA, 19 nt, Artificial Sequence
  Description of Artificial Sequence: Synthetic oligonucleotide
  Sense strand starting at position 314 of SEQ ID NO: 1243035
uggaguuacaagggcauua

SEQ ID NO: 1390175 - RNA, 19 nt, Artificial Sequence
  Description of Artificial Sequence: Synthetic oligonucleotide
  Antisense strand to SEQ ID NO: 1390174
uaaugcccuuguaacucca

SEQ ID NO: 1390176 - RNA, 19 nt, Artificial Sequence
  Description of Artificial Sequence: Synthetic oligonucleotide
  Sense strand starting at position 357 of SEQ ID NO: 1243035
guguguuucuacuuucuac

SEQ ID NO: 1390177 - RNA, 19 nt, Artificial Sequence
  Description of Artificial Sequence: Synthetic oligonucleotide
  Antisense strand to SEQ ID NO: 1390176
guagaaaguagaaacacac

SEQ ID NO: 1390178 - RNA, 19 nt, Artificial Sequence
  Description of Artificial Sequence: Synthetic oligonucleotide
  Sense strand starting at position 368 of SEQ ID NO: 1243035
cuuucuacccauugcguaa

SEQ ID NO: 1390179 - RNA, 19 nt, Artificial Sequence
  Description of Artificial Sequence: Synthetic oligonucleotide
  Antisense strand to SEQ ID NO: 1390178
uuacgcaauggguagaaag

SEQ ID NO: 1390180 - RNA, 19 nt, Artificial Sequence
  Description of Artificial Sequence: Synthetic oligonucleotide
  Sense strand starting at position 437 of SEQ ID NO: 1243035
agcgcuuuauuucucaaca

SEQ ID NO: 1390181 - RNA, 19 nt, Artificial Sequence
  Description of Artificial Sequence: Synthetic oligonucleotide
  Antisense strand to SEQ ID NO: 1390180
uguugagaaauaaagcgcu

SEQ ID NO: 1390182 - RNA, 19 nt, Artificial Sequence
  Description of Artificial Sequence: Synthetic oligonucleotide
  Sense strand starting at position 438 of SEQ ID NO: 1243035
gcgcuuuauuucucaacag

SEQ ID NO: 1390183 - RNA, 19 nt, Artificial Sequence
  Description of Artificial Sequence: Synthetic oligonucleotide
  Antisense strand to SEQ ID NO: 1390182
cuguugagaaauaaagcgc

SEQ ID NO: 1390184 - RNA, 19 nt, Artificial Sequence
  Description of Artificial Sequence: Synthetic oligonucleotide
  Sense strand starting at position 741 of SEQ ID NO: 1243035
acuagaauugcuugaacuc

SEQ ID NO: 1390185 - RNA, 19 nt, Artificial Sequence
  Description of Artificial Sequence: Synthetic oligonucleotide
  Antisense strand to SEQ ID NO: 1390184
gaguucaagcaauucuagu

SEQ ID NO: 1390186 - RNA, 19 nt, Artificial Sequence
  Description of Artificial Sequence: Synthetic oligonucleotide
  Sense strand starting at position 980 of SEQ ID NO: 1243035
gccuuaaaguaacaggaaa

SEQ ID NO: 1390187 - RNA, 19 nt, Artificial Sequence
  Description of Artificial Sequence: Synthetic oligonucleotide
  Antisense strand to SEQ ID NO: 1390186
uuuccuguuacuuuaaggc

SEQ ID NO: 1390188 - RNA, 19 nt, Artificial Sequence
  Description of Artificial Sequence: Synthetic oligonucleotide
  Sense strand starting at position 1037 of SEQ ID NO: 1243035
auguuucuuagagaguuug

SEQ ID NO: 1390189 - RNA, 19 nt, Artificial Sequence
  Description of Artificial Sequence: Synthetic oligonucleotide
  Antisense strand to SEQ ID NO: 1390188
caaacucucuaagaaacau

SEQ ID NO: 1390190 - RNA, 19 nt, Artificial Sequence
  Description of Artificial Sequence: Synthetic oligonucleotide
  Sense strand starting at position 1060 of SEQ ID NO: 1243035
acauuuaguucccagagca

SEQ ID NO: 1390191 - RNA, 19 nt, Artificial Sequence
  Description of Artificial Sequence: Synthetic oligonucleotide
  Antisense strand to SEQ ID NO: 1390190
ugcucugggaacuaaaugu

SEQ ID NO: 1390192 - RNA, 19 nt, Artificial Sequence
  Description of Artificial Sequence: Synthetic oligonucleotide
  Sense strand starting at position 1101 of SEQ ID NO: 1243035
aagugcaauauggguguua

SEQ ID NO: 1390193 - RNA, 19 nt, Artificial Sequence
  Description of Artificial Sequence: Synthetic oligonucleotide
  Antisense strand to SEQ ID NO: 1390192
uaacacccauauugcacuu

SEQ ID NO: 1390194 - RNA, 19 nt, Artificial Sequence
  Description of Artificial Sequence: Synthetic oligonucleotide
  Sense strand starting at position 1103 of SEQ ID NO: 1243035
gugcaauauggguguuacu

SEQ ID NO: 1390195 - RNA, 19 nt, Artificial Sequence
  Description of Artificial Sequence: Synthetic oligonucleotide
  Antisense strand to SEQ ID NO: 1390194
aguaacacccauauugcac

SEQ ID NO: 1390196 - RNA, 19 nt, Artificial Sequence
  Description of Artificial Sequence: Synthetic oligonucleotide
  Sense strand starting at position 1118 of SEQ ID NO: 1243035
uacucuaugccagguaaag

SEQ ID NO: 1390197 - RNA, 19 nt, Artificial Sequence
  Description of Artificial Sequence: Synthetic oligonucleotide
  Antisense strand to SEQ ID NO: 1390196
cuuuaccuggcauagagua

SEQ ID NO: 1390198 - RNA, 19 nt, Artificial Sequence
  Description of Artificial Sequence: Synthetic oligonucleotide
  Sense strand starting at position 1219 of SEQ ID NO: 1243035
ucuguaggcaucuggguua

SEQ ID NO: 1390199 - RNA, 19 nt, Artificial Sequence
  Description of Artificial Sequence: Synthetic oligonucleotide
  Antisense strand to SEQ ID NO: 1390198
uaacccagaugccuacaga

SEQ ID NO: 1390200 - RNA, 19 nt, Artificial Sequence
  Description of Artificial Sequence: Synthetic oligonucleotide
  Sense strand starting at position 1226 of SEQ ID NO: 1243035
gcaucuggguuaguccuaa

SEQ ID NO: 1390201 - RNA, 19 nt, Artificial Sequence
  Description of Artificial Sequence: Synthetic oligonucleotide
  Antisense strand to SEQ ID NO: 1390200
uuaggacuaacccagaugc

SEQ ID NO: 1390202 - RNA, 19 nt, Artificial Sequence
  Description of Artificial Sequence: Synthetic oligonucleotide
  Sense strand starting at position 1362 of SEQ ID NO: 1243035
ucagacagucuuugaacca

SEQ ID NO: 1390203 - RNA, 19 nt, Artificial Sequence
  Description of Artificial Sequence: Synthetic oligonucleotide
  Antisense strand to SEQ ID NO: 1390202
ugguucaaagacugucuga

SEQ ID NO: 1390204 - RNA, 19 nt, Artificial Sequence
  Description of Artificial Sequence: Synthetic oligonucleotide
  Sense strand starting at position 1408 of SEQ ID NO: 1243035
gaggcauccucuuugggaa

SEQ ID NO: 1390205 - RNA, 19 nt, Artificial Sequence
  Description of Artificial Sequence: Synthetic oligonucleotide
  Antisense strand to SEQ ID NO: 1390204
uucccaaagaggaugccuc

SEQ ID NO: 1390206 - RNA, 19 nt, Artificial Sequence
  Description of Artificial Sequence: Synthetic oligonucleotide
  Sense strand starting at position 1693 of SEQ ID NO: 1243035
gaggguauuugccuagcuu

SEQ ID NO: 1390207 - RNA, 19 nt, Artificial Sequence
  Description of Artificial Sequence: Synthetic oligonucleotide
  Antisense strand to SEQ ID NO: 1390206
aagcuaggcaaauacccuc

SEQ ID NO: 1390208 - RNA, 19 nt, Artificial Sequence
  Description of Artificial Sequence: Synthetic oligonucleotide
  Sense strand starting at position 1902 of SEQ ID NO: 1243035
cccgcuucgcucucugauu

SEQ ID NO: 1390209 - RNA, 19 nt, Artificial Sequence
  Description of Artificial Sequence: Synthetic oligonucleotide
  Antisense strand to SEQ ID NO: 1390208
aaucagagagcgaagcggg

SEQ ID NO: 1390210 - RNA, 19 nt, Artificial Sequence
  Description of Artificial Sequence: Synthetic oligonucleotide
  Sense strand starting at position 1903 of SEQ ID NO: 1243035
ccgcuucgcucucugauuu

SEQ ID NO: 1390211 - RNA, 19 nt, Artificial Sequence
  Description of Artificial Sequence: Synthetic oligonucleotide
  Antisense strand to SEQ ID NO: 1390210
aaaucagagagcgaagcgg

SEQ ID NO: 1390212 - RNA, 19 nt, Artificial Sequence
  Description of Artificial Sequence: Synthetic oligonucleotide
  Sense strand starting at position 2020 of SEQ ID NO: 1243035
gaagucaaauguuuggcaa

SEQ ID NO: 1390213 - RNA, 19 nt, Artificial Sequence
  Description of Artificial Sequence: Synthetic oligonucleotide
  Antisense strand to SEQ ID NO: 1390212
uugccaaacauuugacuuc

SEQ ID NO: 1390214 - RNA, 19 nt, Artificial Sequence
  Description of Artificial Sequence: Synthetic oligonucleotide
  Sense strand starting at position 2021 of SEQ ID NO: 1243035
aagucaaauguuuggcaaa

SEQ ID NO: 1390215 - RNA, 19 nt, Artificial Sequence
  Description of Artificial Sequence: Synthetic oligonucleotide
  Antisense strand to SEQ ID NO: 1390214
uuugccaaacauuugacuu

SEQ ID NO: 1390216 - RNA, 19 nt, Artificial Sequence
  Description of Artificial Sequence: Synthetic oligonucleotide
  Sense strand starting at position 2023 of SEQ ID NO: 1243035
gucaaauguuuggcaaaua

SEQ ID NO: 1390217 - RNA, 19 nt, Artificial Sequence
  Description of Artificial Sequence: Synthetic oligonucleotide
  Antisense strand to SEQ ID NO: 1390216
uauuugccaaacauuugac

SEQ ID NO: 1390218 - RNA, 19 nt, Artificial Sequence
  Description of Artificial Sequence: Synthetic oligonucleotide
  Sense strand starting at position 2120 of SEQ ID NO: 1243035
caaccugagucacuagaga

SEQ ID NO: 1390219 - RNA, 19 nt, Artificial Sequence
  Description of Artificial Sequence: Synthetic oligonucleotide
  Antisense strand to SEQ ID NO: 1390218
ucucuagugacucagguug

SEQ ID NO: 1390220 - RNA, 19 nt, Artificial Sequence
  Description of Artificial Sequence: Synthetic oligonucleotide
  Sense strand starting at position 3100 of SEQ ID NO: 1243035
cucggcuuccugucugcaa

SEQ ID NO: 1390221 - RNA, 19 nt, Artificial Sequence
  Description of Artificial Sequence: Synthetic oligonucleotide
  Antisense strand to SEQ ID NO: 1390220
uugcagacaggaagccgag

SEQ ID NO: 1390222 - RNA, 19 nt, Artificial Sequence
  Description of Artificial Sequence: Synthetic oligonucleotide
  Sense strand starting at position 3166 of SEQ ID NO: 1243035
cugggaagaugguaaaguu

SEQ ID NO: 1390223 - RNA, 19 nt, Artificial Sequence
  Description of Artificial Sequence: Synthetic oligonucleotide
  Antisense strand to SEQ ID NO: 1390222
aacuuuaccaucuucccag

SEQ ID NO: 1390224 - RNA, 19 nt, Artificial Sequence
  Description of Artificial Sequence: Synthetic oligonucleotide
  Sense strand starting at position 3192 of SEQ ID NO: 1243035
caggauagguauuagguaa

SEQ ID NO: 1390225 - RNA, 19 nt, Artificial Sequence
  Description of Artificial Sequence: Synthetic oligonucleotide
  Antisense strand to SEQ ID NO: 1390224
uuaccuaauaccuauccug

SEQ ID NO: 1390226 - RNA, 19 nt, Artificial Sequence
  Description of Artificial Sequence: Synthetic oligonucleotide
  Sense strand starting at position 3266 of SEQ ID NO: 1243035
aggccuuucucagccauca

SEQ ID NO: 1390227 - RNA, 19 nt, Artificial Sequence
  Description of Artificial Sequence: Synthetic oligonucleotide
  Antisense strand to SEQ ID NO: 1390226
ugauggcugagaaaggccu

SEQ ID NO: 1390228 - RNA, 19 nt, Artificial Sequence
  Description of Artificial Sequence: Synthetic oligonucleotide
  Sense strand starting at position 3287 of SEQ ID NO: 1243035
gaaagcaagcucuggaaau

SEQ ID NO: 1390229 - RNA, 19 nt, Artificial Sequence
  Description of Artificial Sequence: Synthetic oligonucleotide
  Antisense strand to SEQ ID NO: 1390228
auuuccagagcuugcuuuc

SEQ ID NO: 1390230 - RNA, 19 nt, Artificial Sequence
  Description of Artificial Sequence: Synthetic oligonucleotide
  Sense strand starting at position 3408 of SEQ ID NO: 1243035
gcaggcucucugggaaauc

SEQ ID NO: 1390231 - RNA, 19 nt, Artificial Sequence
  Description of Artificial Sequence: Synthetic oligonucleotide
  Antisense strand to SEQ ID NO: 1390230
gauuucccagagagccugc

SEQ ID NO: 1390232 - RNA, 19 nt, Artificial Sequence
  Description of Artificial Sequence: Synthetic oligonucleotide
  Sense strand starting at position 3419 of SEQ ID NO: 1243035
gggaaaucauuagagggaa

SEQ ID NO: 1390233 - RNA, 19 nt, Artificial Sequence
  Description of Artificial Sequence: Synthetic oligonucleotide
  Antisense strand to SEQ ID NO: 1390232
uucccucuaaugauuuccc

SEQ ID NO: 1390234 - RNA, 19 nt, Artificial Sequence
  Description of Artificial Sequence: Synthetic oligonucleotide
  Sense strand starting at position 3550 of SEQ ID NO: 1243035
uggcaaagaccuggaucuu

SEQ ID NO: 1390235 - RNA, 19 nt, Artificial Sequence
  Description of Artificial Sequence: Synthetic oligonucleotide
  Antisense strand to SEQ ID NO: 1390234
aagauccaggucuuugcca

SEQ ID NO: 1390236 - RNA, 19 nt, Artificial Sequence
  Description of Artificial Sequence: Synthetic oligonucleotide
  Sense strand starting at position 3595 of SEQ ID NO: 1243035
gccuuuacccgagguccua

SEQ ID NO: 1390237 - RNA, 19 nt, Artificial Sequence
  Description of Artificial Sequence: Synthetic oligonucleotide
  Antisense strand to SEQ ID NO: 1390236
uaggaccucggguaaaggc

SEQ ID NO: 1390238 - RNA, 19 nt, Artificial Sequence
  Description of Artificial Sequence: Synthetic oligonucleotide
  Sense strand starting at position 3779 of SEQ ID NO: 1243035
gagguucccauguagaugu

SEQ ID NO: 1390239 - RNA, 19 nt, Artificial Sequence
  Description of Artificial Sequence: Synthetic oligonucleotide
  Antisense strand to SEQ ID NO: 1390238
acaucuacaugggaaccuc

SEQ ID NO: 1390240 - RNA, 19 nt, Artificial Sequence
  Description of Artificial Sequence: Synthetic oligonucleotide
  Sense strand starting at position 3794 of SEQ ID NO: 1243035
auguuauuagugugggcaa

SEQ ID NO: 1390241 - RNA, 19 nt, Artificial Sequence
  Description of Artificial Sequence: Synthetic oligonucleotide
  Antisense strand to SEQ ID NO: 1390240
uugcccacacuaauaacau

SEQ ID NO: 1390242 - RNA, 19 nt, Artificial Sequence
  Description of Artificial Sequence: Synthetic oligonucleotide
  Sense strand starting at position 3796 of SEQ ID NO: 1243035
guuauuagugugggcaaca

SEQ ID NO: 1390243 - RNA, 19 nt, Artificial Sequence
  Description of Artificial Sequence: Synthetic oligonucleotide
  Antisense strand to SEQ ID NO: 1390242
uguugcccacacuaauaac

SEQ ID NO: 1390244 - RNA, 19 nt, Artificial Sequence
  Description of Artificial Sequence: Synthetic oligonucleotide
  Sense strand starting at position 3797 of SEQ ID NO: 1243035
uuauuagugugggcaacau

SEQ ID NO: 1390245 - RNA, 19 nt, Artificial Sequence
  Description of Artificial Sequence: Synthetic oligonucleotide
  Antisense strand to SEQ ID NO: 1390244
auguugcccacacuaauaa

SEQ ID NO: 1390246 - RNA, 19 nt, Artificial Sequence
  Description of Artificial Sequence: Synthetic oligonucleotide
  Sense strand starting at position 3 of SEQ ID NO: 1243036
guuuaauacuguggaggga

SEQ ID NO: 1390247 - RNA, 19 nt, Artificial Sequence
  Description of Artificial Sequence: Synthetic oligonucleotide
  Antisense strand to SEQ ID NO: 1390246
ucccuccacaguauuaaac

SEQ ID NO: 1390248 - RNA, 19 nt, Artificial Sequence
  Description of Artificial Sequence: Synthetic oligonucleotide
  Sense strand starting at position 420 of SEQ ID NO: 1243036
caggaaaccuuguagugau

SEQ ID NO: 1390249 - RNA, 19 nt, Artificial Sequence
  Description of Artificial Sequence: Synthetic oligonucleotide
  Antisense strand to SEQ ID NO: 1390248
aucacuacaagguuuccug

SEQ ID NO: 1390250 - RNA, 19 nt, Artificial Sequence
  Description of Artificial Sequence: Synthetic oligonucleotide
  Sense strand starting at position 432 of SEQ ID NO: 1243036
uagugaugagcgcgucuca

SEQ ID NO: 1390251 - RNA, 19 nt, Artificial Sequence
  Description of Artificial Sequence: Synthetic oligonucleotide
  Antisense strand to SEQ ID NO: 1390250
ugagacgcgcucaucacua

SEQ ID NO: 1390252 - RNA, 19 nt, Artificial Sequence
  Description of Artificial Sequence: Synthetic oligonucleotide
  Sense strand starting at position 433 of SEQ ID NO: 1243036
agugaugagcgcgucucau

SEQ ID NO: 1390253 - RNA, 19 nt, Artificial Sequence
  Description of Artificial Sequence: Synthetic oligonucleotide
  Antisense strand to SEQ ID NO: 1390252
augagacgcgcucaucacu

SEQ ID NO: 1390254 - RNA, 19 nt, Artificial Sequence
  Description of Artificial Sequence: Synthetic oligonucleotide
  Sense strand starting at position 439 of SEQ ID NO: 1243036
gagcgcgucucaucacuuu

SEQ ID NO: 1390255 - RNA, 19 nt, Artificial Sequence
  Description of Artificial Sequence: Synthetic oligonucleotide
  Antisense strand to SEQ ID NO: 1390254
aaagugaugagacgcgcuc

SEQ ID NO: 1390256 - RNA, 19 nt, Artificial Sequence
  Description of Artificial Sequence: Synthetic oligonucleotide
  Sense strand starting at position 467 of SEQ ID NO: 1243036
gguggaaaguaucacacaa

SEQ ID NO: 1390257 - RNA, 19 nt, Artificial Sequence
  Description of Artificial Sequence: Synthetic oligonucleotide
  Antisense strand to SEQ ID NO: 1390256
uugugugauacuuuccacc

SEQ ID NO: 1390258 - RNA, 19 nt, Artificial Sequence
  Description of Artificial Sequence: Synthetic oligonucleotide
  Sense strand starting at position 469 of SEQ ID NO: 1243036
uggaaaguaucacacaaau

SEQ ID NO: 1390259 - RNA, 19 nt, Artificial Sequence
  Description of Artificial Sequence: Synthetic oligonucleotide
  Antisense strand to SEQ ID NO: 1390258
auuugugugauacuuucca

SEQ ID NO: 1390260 - RNA, 19 nt, Artificial Sequence
  Description of Artificial Sequence: Synthetic oligonucleotide
  Sense strand starting at position 575 of SEQ ID NO: 1243036
agaagaacuucugcaaccu

SEQ ID NO: 1390261 - RNA, 19 nt, Artificial Sequence
  Description of Artificial Sequence: Synthetic oligonucleotide
  Antisense strand to SEQ ID NO: 1390260
agguugcagaaguucuucu

SEQ ID NO: 1390262 - RNA, 19 nt, Artificial Sequence
  Description of Artificial Sequence: Synthetic oligonucleotide
  Sense strand starting at position 817 of SEQ ID NO: 1243036
acacguugggcuuaugaaa

SEQ ID NO: 1390263 - RNA, 19 nt, Artificial Sequence
  Description of Artificial Sequence: Synthetic oligonucleotide
  Antisense strand to SEQ ID NO: 1390262
uuucauaagcccaacgugu

SEQ ID NO: 1390264 - RNA, 19 nt, Artificial Sequence
  Description of Artificial Sequence: Synthetic oligonucleotide
  Sense strand starting at position 824 of SEQ ID NO: 1243036
gggcuuaugaaacauguau

SEQ ID NO: 1390265 - RNA, 19 nt, Artificial Sequence
  Description of Artificial Sequence: Synthetic oligonucleotide
  Antisense strand to SEQ ID NO: 1390264
auacauguuucauaagccc

SEQ ID NO: 1390266 - RNA, 19 nt, Artificial Sequence
  Description of Artificial Sequence: Synthetic oligonucleotide
  Sense strand starting at position 832 of SEQ ID NO: 1243036
gaaacauguauccguguga

SEQ ID NO: 1390267 - RNA, 19 nt, Artificial Sequence
  Description of Artificial Sequence: Synthetic oligonucleotide
  Antisense strand to SEQ ID NO: 1390266
ucacacggauacauguuuc

SEQ ID NO: 1390268 - RNA, 19 nt, Artificial Sequence
  Description of Artificial Sequence: Synthetic oligonucleotide
  Sense strand starting at position 833 of SEQ ID NO: 1243036
aaacauguauccgugugau

SEQ ID NO: 1390269 - RNA, 19 nt, Artificial Sequence
  Description of Artificial Sequence: Synthetic oligonucleotide
  Antisense strand to SEQ ID NO: 1390268
aucacacggauacauguuu

SEQ ID NO: 1390270 - RNA, 19 nt, Artificial Sequence
  Description of Artificial Sequence: Synthetic oligonucleotide
  Sense strand starting at position 836 of SEQ ID NO: 1243036
cauguauccgugugaucac

SEQ ID NO: 1390271 - RNA, 19 nt, Artificial Sequence
  Description of Artificial Sequence: Synthetic oligonucleotide
  Antisense strand to SEQ ID NO: 1390270
gugaucacacggauacaug

SEQ ID NO: 1390272 - RNA, 19 nt, Artificial Sequence
  Description of Artificial Sequence: Synthetic oligonucleotide
  Sense strand starting at position 837 of SEQ ID NO: 1243036
auguauccgugugaucaca

SEQ ID NO: 1390273 - RNA, 19 nt, Artificial Sequence
  Description of Artificial Sequence: Synthetic oligonucleotide
  Antisense strand to SEQ ID NO: 1390272
ugugaucacacggauacau

SEQ ID NO: 1390274 - RNA, 19 nt, Artificial Sequence
  Description of Artificial Sequence: Synthetic oligonucleotide
  Sense strand starting at position 839 of SEQ ID NO: 1243036
guauccgugugaucacaug

SEQ ID NO: 1390275 - RNA, 19 nt, Artificial Sequence
  Description of Artificial Sequence: Synthetic oligonucleotide
  Antisense strand to SEQ ID NO: 1390274
caugugaucacacggauac

SEQ ID NO: 1390276 - RNA, 19 nt, Artificial Sequence
  Description of Artificial Sequence: Synthetic oligonucleotide
  Sense strand starting at position 849 of SEQ ID NO: 1243036
gaucacaugucaccgugau

SEQ ID NO: 1390277 - RNA, 19 nt, Artificial Sequence
  Description of Artificial Sequence: Synthetic oligonucleotide
  Antisense strand to SEQ ID NO: 1390276
aucacggugacaugugauc

SEQ ID NO: 1390278 - RNA, 19 nt, Artificial Sequence
  Description of Artificial Sequence: Synthetic oligonucleotide
  Sense strand starting at position 850 of SEQ ID NO: 1243036
aucacaugucaccgugauc

SEQ ID NO: 1390279 - RNA, 19 nt, Artificial Sequence
  Description of Artificial Sequence: Synthetic oligonucleotide
  Antisense strand to SEQ ID NO: 1390278
gaucacggugacaugugau

SEQ ID NO: 1390280 - RNA, 19 nt, Artificial Sequence
  Description of Artificial Sequence: Synthetic oligonucleotide
  Sense strand starting at position 853 of SEQ ID NO: 1243036
acaugucaccgugaucaca

SEQ ID NO: 1390281 - RNA, 19 nt, Artificial Sequence
  Description of Artificial Sequence: Synthetic oligonucleotide
  Antisense strand to SEQ ID NO: 1390280
ugugaucacggugacaugu

SEQ ID NO: 1390282 - RNA, 19 nt, Artificial Sequence
  Description of Artificial Sequence: Synthetic oligonucleotide
  Sense strand starting at position 855 of SEQ ID NO: 1243036
augucaccgugaucacaga

SEQ ID NO: 1390283 - RNA, 19 nt, Artificial Sequence
  Description of Artificial Sequence: Synthetic oligonucleotide
  Antisense strand to SEQ ID NO: 1390282
ucugugaucacggugacau

SEQ ID NO: 1390284 - RNA, 19 nt, Artificial Sequence
  Description of Artificial Sequence: Synthetic oligonucleotide
  Sense strand starting at position 887 of SEQ ID NO: 1243036
aaaccaguucuggguugua

SEQ ID NO: 1390285 - RNA, 19 nt, Artificial Sequence
  Description of Artificial Sequence: Synthetic oligonucleotide
  Antisense strand to SEQ ID NO: 1390284
uacaacccagaacugguuu

SEQ ID NO: 1390286 - RNA, 19 nt, Artificial Sequence
  Description of Artificial Sequence: Synthetic oligonucleotide
  Sense strand starting at position 1138 of SEQ ID NO: 1243036
gggaaucuucccgaacgca

SEQ ID NO: 1390287 - RNA, 19 nt, Artificial Sequence
  Description of Artificial Sequence: Synthetic oligonucleotide
  Antisense strand to SEQ ID NO: 1390286
ugcguucgggaagauuccc

SEQ ID NO: 1390288 - RNA, 19 nt, Artificial Sequence
  Description of Artificial Sequence: Synthetic oligonucleotide
  Sense strand starting at position 1157 of SEQ ID NO: 1243036
gacugagcuagucgagaac

SEQ ID NO: 1390289 - RNA, 19 nt, Artificial Sequence
  Description of Artificial Sequence: Synthetic oligonucleotide
  Antisense strand to SEQ ID NO: 1390288
guucucgacuagcucaguc

SEQ ID NO: 1390290 - RNA, 19 nt, Artificial Sequence
  Description of Artificial Sequence: Synthetic oligonucleotide
  Sense strand starting at position 1160 of SEQ ID NO: 1243036
ugagcuagucgagaacacu

SEQ ID NO: 1390291 - RNA, 19 nt, Artificial Sequence
  Description of Artificial Sequence: Synthetic oligonucleotide
  Antisense strand to SEQ ID NO: 1390290
aguguucucgacuagcuca

SEQ ID NO: 1390292 - RNA, 19 nt, Artificial Sequence
  Description of Artificial Sequence: Synthetic oligonucleotide
  Sense strand starting at position 1163 of SEQ ID NO: 1243036
gcuagucgagaacacuaaa

SEQ ID NO: 1390293 - RNA, 19 nt, Artificial Sequence
  Description of Artificial Sequence: Synthetic oligonucleotide
  Antisense strand to SEQ ID NO: 1390292
uuuaguguucucgacuagc

SEQ ID NO: 1390294 - RNA, 19 nt, Artificial Sequence
  Description of Artificial Sequence: Synthetic oligonucleotide
  Sense strand starting at position 2770 of SEQ ID NO: 1243036
aggcauuccuuagaggaaa

SEQ ID NO: 1390295 - RNA, 19 nt, Artificial Sequence
  Description of Artificial Sequence: Synthetic oligonucleotide
  Antisense strand to SEQ ID NO: 1390294
uuuccucuaaggaaugccu

SEQ ID NO: 1390296 - RNA, 19 nt, Artificial Sequence
  Description of Artificial Sequence: Synthetic oligonucleotide
  Sense strand starting at position 2772 of SEQ ID NO: 1243036
gcauuccuuagaggaaaga

SEQ ID NO: 1390297 - RNA, 19 nt, Artificial Sequence
  Description of Artificial Sequence: Synthetic oligonucleotide
  Antisense strand to SEQ ID NO: 1390296
ucuuuccucuaaggaaugc

SEQ ID NO: 1390298 - RNA, 19 nt, Artificial Sequence
  Description of Artificial Sequence: Synthetic oligonucleotide
  Sense strand starting at position 2862 of SEQ ID NO: 1243036
agugcagauuucuccuuau

SEQ ID NO: 1390299 - RNA, 19 nt, Artificial Sequence
  Description of Artificial Sequence: Synthetic oligonucleotide
  Antisense strand to SEQ ID NO: 1390298
auaaggagaaaucugcacu

SEQ ID NO: 1390300 - RNA, 19 nt, Artificial Sequence
  Description of Artificial Sequence: Synthetic oligonucleotide
  Sense strand starting at position 2887 of SEQ ID NO: 1243036
gucagcacucuuuacguau

SEQ ID NO: 1390301 - RNA, 19 nt, Artificial Sequence
  Description of Artificial Sequence: Synthetic oligonucleotide
  Antisense strand to SEQ ID NO: 1390300
auacguaaagagugcugac

SEQ ID NO: 1390302 - RNA, 19 nt, Artificial Sequence
  Description of Artificial Sequence: Synthetic oligonucleotide
  Sense strand starting at position 2890 of SEQ ID NO: 1243036
agcacucuuuacguaugaa

SEQ ID NO: 1390303 - RNA, 19 nt, Artificial Sequence
  Description of Artificial Sequence: Synthetic oligonucleotide
  Antisense strand to SEQ ID NO: 1390302
uucauacguaaagagugcu

SEQ ID NO: 1390304 - RNA, 19 nt, Artificial Sequence
  Description of Artificial Sequence: Synthetic oligonucleotide
  Sense strand starting at position 3025 of SEQ ID NO: 1243036
gccacuggguuggucaaau

SEQ ID NO: 1390305 - RNA, 19 nt, Artificial Sequence
  Description of Artificial Sequence: Synthetic oligonucleotide
  Antisense strand to SEQ ID NO: 1390304
auuugaccaacccaguggc

SEQ ID NO: 1390306 - RNA, 19 nt, Artificial Sequence
  Description of Artificial Sequence: Synthetic oligonucleotide
  Sense strand starting at position 3036 of SEQ ID NO: 1243036
ggucaaaugacccgucuuu

SEQ ID NO: 1390307 - RNA, 19 nt, Artificial Sequence
  Description of Artificial Sequence: Synthetic oligonucleotide
  Antisense strand to SEQ ID NO: 1390306
aaagacgggucauuugacc

SEQ ID NO: 1390308 - RNA, 19 nt, Artificial Sequence
  Description of Artificial Sequence: Synthetic oligonucleotide
  Sense strand starting at position 3048 of SEQ ID NO: 1243036
cgucuuuauugcuuguuua

SEQ ID NO: 1390309 - RNA, 19 nt, Artificial Sequence
  Description of Artificial Sequence: Synthetic oligonucleotide
  Antisense strand to SEQ ID NO: 1390308
uaaacaagcaauaaagacg

SEQ ID NO: 1390310 - RNA, 19 nt, Artificial Sequence
  Description of Artificial Sequence: Synthetic oligonucleotide
  Sense strand starting at position 3049 of SEQ ID NO: 1243036
gucuuuauugcuuguuuaa

SEQ ID NO: 1390311 - RNA, 19 nt, Artificial Sequence
  Description of Artificial Sequence: Synthetic oligonucleotide
  Antisense strand to SEQ ID NO: 1390310
uuaaacaagcaauaaagac

SEQ ID NO: 1390312 - RNA, 19 nt, Artificial Sequence
  Description of Artificial Sequence: Synthetic oligonucleotide
  Sense strand starting at position 3216 of SEQ ID NO: 1243036
guagcauacguguacaucu

SEQ ID NO: 1390313 - RNA, 19 nt, Artificial Sequence
  Description of Artificial Sequence: Synthetic oligonucleotide
  Antisense strand to SEQ ID NO: 1390312
agauguacacguaugcuac

SEQ ID NO: 1390314 - RNA, 19 nt, Artificial Sequence
  Description of Artificial Sequence: Synthetic oligonucleotide
  Sense strand starting at position 3218 of SEQ ID NO: 1243036
agcauacguguacaucuua

SEQ ID NO: 1390315 - RNA, 19 nt, Artificial Sequence
  Description of Artificial Sequence: Synthetic oligonucleotide
  Antisense strand to SEQ ID NO: 1390314
uaagauguacacguaugcu

SEQ ID NO: 1390316 - RNA, 19 nt, Artificial Sequence
  Description of Artificial Sequence: Synthetic oligonucleotide
  Sense strand starting at position 3223 of SEQ ID NO: 1243036
acguguacaucuuaugguu

SEQ ID NO: 1390317 - RNA, 19 nt, Artificial Sequence
  Description of Artificial Sequence: Synthetic oligonucleotide
  Antisense strand to SEQ ID NO: 1390316
aaccauaagauguacacgu

SEQ ID NO: 1390318 - RNA, 19 nt, Artificial Sequence
  Description of Artificial Sequence: Synthetic oligonucleotide
  Sense strand starting at position 3303 of SEQ ID NO: 1243036
augggacccuguuaaagau

SEQ ID NO: 1390319 - RNA, 19 nt, Artificial Sequence
  Description of Artificial Sequence: Synthetic oligonucleotide
  Antisense strand to SEQ ID NO: 1390318
aucuuuaacagggucccau

SEQ ID NO: 1390320 - RNA, 19 nt, Artificial Sequence
  Description of Artificial Sequence: Synthetic oligonucleotide
  Sense strand starting at position 3759 of SEQ ID NO: 1243036
gggcauugugcagagcaga

SEQ ID NO: 1390321 - RNA, 19 nt, Artificial Sequence
  Description of Artificial Sequence: Synthetic oligonucleotide
  Antisense strand to SEQ ID NO: 1390320
ucugcucugcacaaugccc

SEQ ID NO: 1390322 - RNA, 19 nt, Artificial Sequence
  Description of Artificial Sequence: Synthetic oligonucleotide
  Sense strand starting at position 3876 of SEQ ID NO: 1243036
ucucucugagcucaaguuu

SEQ ID NO: 1390323 - RNA, 19 nt, Artificial Sequence
  Description of Artificial Sequence: Synthetic oligonucleotide
  Antisense strand to SEQ ID NO: 1390322
aaacuugagcucagagaga

SEQ ID NO: 1390324 - RNA, 19 nt, Artificial Sequence
  Description of Artificial Sequence: Synthetic oligonucleotide
  Sense strand starting at position 3900 of SEQ ID NO: 1243036
agggucugcucucuugaga

SEQ ID NO: 1390325 - RNA, 19 nt, Artificial Sequence
  Description of Artificial Sequence: Synthetic oligonucleotide
  Antisense strand to SEQ ID NO: 1390324
ucucaagagagcagacccu

SEQ ID NO: 1390326 - RNA, 19 nt, Artificial Sequence
  Description of Artificial Sequence: Synthetic oligonucleotide
  Sense strand starting at position 216 of SEQ ID NO: 1243037
gccagaagccgcgguucua

SEQ ID NO: 1390327 - RNA, 19 nt, Artificial Sequence
  Description of Artificial Sequence: Synthetic oligonucleotide
  Antisense strand to SEQ ID NO: 1390326
uagaaccgcggcuucuggc

SEQ ID NO: 1390328 - RNA, 19 nt, Artificial Sequence
  Description of Artificial Sequence: Synthetic oligonucleotide
  Sense strand starting at position 2017 of SEQ ID NO: 1243037
gugcguuuccucuccugga

SEQ ID NO: 1390329 - RNA, 19 nt, Artificial Sequence
  Description of Artificial Sequence: Synthetic oligonucleotide
  Antisense strand to SEQ ID NO: 1390328
uccaggagaggaaacgcac

SEQ ID NO: 1390330 - RNA, 19 nt, Artificial Sequence
  Description of Artificial Sequence: Synthetic oligonucleotide
  Sense strand starting at position 2131 of SEQ ID NO: 1243037
ucaaguuucugagagguug

SEQ ID NO: 1390331 - RNA, 19 nt, Artificial Sequence
  Description of Artificial Sequence: Synthetic oligonucleotide
  Antisense strand to SEQ ID NO: 1390330
caaccucucagaaacuuga

SEQ ID NO: 1390332 - RNA, 19 nt, Artificial Sequence
  Description of Artificial Sequence: Synthetic oligonucleotide
  Sense strand starting at position 2580 of SEQ ID NO: 1243037
guggccuccacccgagauu

SEQ ID NO: 1390333 - RNA, 19 nt, Artificial Sequence
  Description of Artificial Sequence: Synthetic oligonucleotide
  Antisense strand to SEQ ID NO: 1390332
aaucucggguggaggccac

SEQ ID NO: 1390334 - RNA, 19 nt, Artificial Sequence
  Description of Artificial Sequence: Synthetic oligonucleotide
  Sense strand starting at position 2699 of SEQ ID NO: 1243037
ggaaguucacaugaguggu

SEQ ID NO: 1390335 - RNA, 19 nt, Artificial Sequence
  Description of Artificial Sequence: Synthetic oligonucleotide
  Antisense strand to SEQ ID NO: 1390334
accacucaugugaacuucc

SEQ ID NO: 1390336 - RNA, 19 nt, Artificial Sequence
  Description of Artificial Sequence: Synthetic oligonucleotide
  Sense strand starting at position 2864 of SEQ ID NO: 1243037
gcccgcuaucugcguaauu

SEQ ID NO: 1390337 - RNA, 19 nt, Artificial Sequence
  Description of Artificial Sequence: Synthetic oligonucleotide
  Antisense strand to SEQ ID NO: 1390336
aauuacgcagauagcgggc

SEQ ID NO: 1390338 - RNA, 19 nt, Artificial Sequence
  Description of Artificial Sequence: Synthetic oligonucleotide
  Sense strand starting at position 2865 of SEQ ID NO: 1243037
cccgcuaucugcguaauuc

SEQ ID NO: 1390339 - RNA, 19 nt, Artificial Sequence
  Description of Artificial Sequence: Synthetic oligonucleotide
  Antisense strand to SEQ ID NO: 1390338
gaauuacgcagauagcggg

SEQ ID NO: 1390340 - RNA, 19 nt, Artificial Sequence
  Description of Artificial Sequence: Synthetic oligonucleotide
  Sense strand starting at position 2896 of SEQ ID NO: 1243037
caggaaaucucucugguuu

SEQ ID NO: 1390341 - RNA, 19 nt, Artificial Sequence
  Description of Artificial Sequence: Synthetic oligonucleotide
  Antisense strand to SEQ ID NO: 1390340
aaaccagagagauuuccug

SEQ ID NO: 1390342 - RNA, 19 nt, Artificial Sequence
  Description of Artificial Sequence: Synthetic oligonucleotide
  Sense strand starting at position 2897 of SEQ ID NO: 1243037
aggaaaucucucugguuug

SEQ ID NO: 1390343 - RNA, 19 nt, Artificial Sequence
  Description of Artificial Sequence: Synthetic oligonucleotide
  Antisense strand to SEQ ID NO: 1390342
caaaccagagagauuuccu

SEQ ID NO: 1390344 - RNA, 19 nt, Artificial Sequence
  Description of Artificial Sequence: Synthetic oligonucleotide
  Sense strand starting at position 2908 of SEQ ID NO: 1243037
cugguuuggcuccacguau

SEQ ID NO: 1390345 - RNA, 19 nt, Artificial Sequence
  Description of Artificial Sequence: Synthetic oligonucleotide
  Antisense strand to SEQ ID NO: 1390344
auacguggagccaaaccag

SEQ ID NO: 1390346 - RNA, 19 nt, Artificial Sequence
  Description of Artificial Sequence: Synthetic oligonucleotide
  Sense strand starting at position 3233 of SEQ ID NO: 1243037
gaaggauggugcuugaauu

SEQ ID NO: 1390347 - RNA, 19 nt, Artificial Sequence
  Description of Artificial Sequence: Synthetic oligonucleotide
  Antisense strand to SEQ ID NO: 1390346
aauucaagcaccauccuuc

SEQ ID NO: 1390348 - RNA, 19 nt, Artificial Sequence
  Description of Artificial Sequence: Synthetic oligonucleotide
  Sense strand starting at position 3234 of SEQ ID NO: 1243037
aaggauggugcuugaauua

SEQ ID NO: 1390349 - RNA, 19 nt, Artificial Sequence
  Description of Artificial Sequence: Synthetic oligonucleotide
  Antisense strand to SEQ ID NO: 1390348
uaauucaagcaccauccuu

SEQ ID NO: 1390350 - RNA, 19 nt, Artificial Sequence
  Description of Artificial Sequence: Synthetic oligonucleotide
  Sense strand starting at position 3246 of SEQ ID NO: 1243037
ugaauuaaguggcucugaa

SEQ ID NO: 1390351 - RNA, 19 nt, Artificial Sequence
  Description of Artificial Sequence: Synthetic oligonucleotide
  Antisense strand to SEQ ID NO: 1390350
uucagagccacuuaauuca

SEQ ID NO: 1390352 - RNA, 19 nt, Artificial Sequence
  Description of Artificial Sequence: Synthetic oligonucleotide
  Sense strand starting at position 3357 of SEQ ID NO: 1243037
cuagcagggccuuguuauu

SEQ ID NO: 1390353 - RNA, 19 nt, Artificial Sequence
  Description of Artificial Sequence: Synthetic oligonucleotide
  Antisense strand to SEQ ID NO: 1390352
aauaacaaggcccugcuag

SEQ ID NO: 1390354 - RNA, 19 nt, Artificial Sequence
  Description of Artificial Sequence: Synthetic oligonucleotide
  Sense strand starting at position 3495 of SEQ ID NO: 1243037
ggucuuagagccuacaaca

SEQ ID NO: 1390355 - RNA, 19 nt, Artificial Sequence
  Description of Artificial Sequence: Synthetic oligonucleotide
  Antisense strand to SEQ ID NO: 1390354
uguuguaggcucuaagacc

SEQ ID NO: 1390356 - RNA, 19 nt, Artificial Sequence
  Description of Artificial Sequence: Synthetic oligonucleotide
  Sense strand starting at position 3748 of SEQ ID NO: 1243037
gggccacauucuuagagca

SEQ ID NO: 1390357 - RNA, 19 nt, Artificial Sequence
  Description of Artificial Sequence: Synthetic oligonucleotide
  Antisense strand to SEQ ID NO: 1390356
ugcucuaagaauguggccc

SEQ ID NO: 1390358 - RNA, 19 nt, Artificial Sequence
  Description of Artificial Sequence: Synthetic oligonucleotide
  Sense strand starting at position 144 of SEQ ID NO: 1243038
agaggcauuagcugucuua

SEQ ID NO: 1390359 - RNA, 19 nt, Artificial Sequence
  Description of Artificial Sequence: Synthetic oligonucleotide
  Antisense strand to SEQ ID NO: 1390358
uaagacagcuaaugccucu

SEQ ID NO: 1390360 - RNA, 19 nt, Artificial Sequence
  Description of Artificial Sequence: Synthetic oligonucleotide
  Sense strand starting at position 147 of SEQ ID NO: 1243038
ggcauuagcugucuuagac

SEQ ID NO: 1390361 - RNA, 19 nt, Artificial Sequence
  Description of Artificial Sequence: Synthetic oligonucleotide
  Antisense strand to SEQ ID NO: 1390360
gucuaagacagcuaaugcc

SEQ ID NO: 1390362 - RNA, 19 nt, Artificial Sequence
  Description of Artificial Sequence: Synthetic oligonucleotide
  Sense strand starting at position 275 of SEQ ID NO: 1243038
gucuuuaucugacucuauc

SEQ ID NO: 1390363 - RNA, 19 nt, Artificial Sequence
  Description of Artificial Sequence: Synthetic oligonucleotide
  Antisense strand to SEQ ID NO: 1390362
gauagagucagauaaagac

SEQ ID NO: 1390364 - RNA, 19 nt, Artificial Sequence
  Description of Artificial Sequence: Synthetic oligonucleotide
  Sense strand starting at position 278 of SEQ ID NO: 1243038
uuuaucugacucuaucgua

SEQ ID NO: 1390365 - RNA, 19 nt, Artificial Sequence
  Description of Artificial Sequence: Synthetic oligonucleotide
  Antisense strand to SEQ ID NO: 1390364
uacgauagagucagauaaa

SEQ ID NO: 1390366 - RNA, 19 nt, Artificial Sequence
  Description of Artificial Sequence: Synthetic oligonucleotide
  Sense strand starting at position 534 of SEQ ID NO: 1243038
cuuauacauugugcuguua

SEQ ID NO: 1390367 - RNA, 19 nt, Artificial Sequence
  Description of Artificial Sequence: Synthetic oligonucleotide
  Antisense strand to SEQ ID NO: 1390366
uaacagcacaauguauaag

SEQ ID NO: 1390368 - RNA, 19 nt, Artificial Sequence
  Description of Artificial Sequence: Synthetic oligonucleotide
  Sense strand starting at position 567 of SEQ ID NO: 1243038
ucgcgacucuuccuaagaa

SEQ ID NO: 1390369 - RNA, 19 nt, Artificial Sequence
  Description of Artificial Sequence: Synthetic oligonucleotide
  Antisense strand to SEQ ID NO: 1390368
uucuuaggaagagucgcga

SEQ ID NO: 1390370 - RNA, 19 nt, Artificial Sequence
  Description of Artificial Sequence: Synthetic oligonucleotide
  Sense strand starting at position 632 of SEQ ID NO: 1243038
cucuaugugucccugagac

SEQ ID NO: 1390371 - RNA, 19 nt, Artificial Sequence
  Description of Artificial Sequence: Synthetic oligonucleotide
  Antisense strand to SEQ ID NO: 1390370
gucucagggacacauagag

SEQ ID NO: 1390372 - RNA, 19 nt, Artificial Sequence
  Description of Artificial Sequence: Synthetic oligonucleotide
  Sense strand starting at position 634 of SEQ ID NO: 1243038
cuaugugucccugagacag

SEQ ID NO: 1390373 - RNA, 19 nt, Artificial Sequence
  Description of Artificial Sequence: Synthetic oligonucleotide
  Antisense strand to SEQ ID NO: 1390372
cugucucagggacacauag

SEQ ID NO: 1390374 - RNA, 19 nt, Artificial Sequence
  Description of Artificial Sequence: Synthetic oligonucleotide
  Sense strand starting at position 650 of SEQ ID NO: 1243038
caggaugcuggcugugaaa

SEQ ID NO: 1390375 - RNA, 19 nt, Artificial Sequence
  Description of Artificial Sequence: Synthetic oligonucleotide
  Antisense strand to SEQ ID NO: 1390374
uuucacagccagcauccug

SEQ ID NO: 1390376 - RNA, 19 nt, Artificial Sequence
  Description of Artificial Sequence: Synthetic oligonucleotide
  Sense strand starting at position 743 of SEQ ID NO: 1243038
uuucuuaaggucugucaca

SEQ ID NO: 1390377 - RNA, 19 nt, Artificial Sequence
  Description of Artificial Sequence: Synthetic oligonucleotide
  Antisense strand to SEQ ID NO: 1390376
ugugacagaccuuaagaaa

SEQ ID NO: 1390378 - RNA, 19 nt, Artificial Sequence
  Description of Artificial Sequence: Synthetic oligonucleotide
  Sense strand starting at position 744 of SEQ ID NO: 1243038
uucuuaaggucugucacau

SEQ ID NO: 1390379 - RNA, 19 nt, Artificial Sequence
  Description of Artificial Sequence: Synthetic oligonucleotide
  Antisense strand to SEQ ID NO: 1390378
augugacagaccuuaagaa

SEQ ID NO: 1390380 - RNA, 19 nt, Artificial Sequence
  Description of Artificial Sequence: Synthetic oligonucleotide
  Sense strand starting at position 1568 of SEQ ID NO: 1243038
augagaaccuuucugagca

SEQ ID NO: 1390381 - RNA, 19 nt, Artificial Sequence
  Description of Artificial Sequence: Synthetic oligonucleotide
  Antisense strand to SEQ ID NO: 1390380
ugcucagaaagguucucau

SEQ ID NO: 1390382 - RNA, 19 nt, Artificial Sequence
  Description of Artificial Sequence: Synthetic oligonucleotide
  Sense strand starting at position 1610 of SEQ ID NO: 1243038
gcccuuagcaggugaacuu

SEQ ID NO: 1390383 - RNA, 19 nt, Artificial Sequence
  Description of Artificial Sequence: Synthetic oligonucleotide
  Antisense strand to SEQ ID NO: 1390382
aaguucaccugcuaagggc

SEQ ID NO: 1390384 - RNA, 19 nt, Artificial Sequence
  Description of Artificial Sequence: Synthetic oligonucleotide
  Sense strand starting at position 1661 of SEQ ID NO: 1243038
ggccacgcccucgauauua

SEQ ID NO: 1390385 - RNA, 19 nt, Artificial Sequence
  Description of Artificial Sequence: Synthetic oligonucleotide
  Antisense strand to SEQ ID NO: 1390384
uaauaucgagggcguggcc

SEQ ID NO: 1390386 - RNA, 19 nt, Artificial Sequence
  Description of Artificial Sequence: Synthetic oligonucleotide
  Sense strand starting at position 1676 of SEQ ID NO: 1243038
auuacuuauggcugggaaa

SEQ ID NO: 1390387 - RNA, 19 nt, Artificial Sequence
  Description of Artificial Sequence: Synthetic oligonucleotide
  Antisense strand to SEQ ID NO: 1390386
uuucccagccauaaguaau

SEQ ID NO: 1390388 - RNA, 19 nt, Artificial Sequence
  Description of Artificial Sequence: Synthetic oligonucleotide
  Sense strand starting at position 1677 of SEQ ID NO: 1243038
uuacuuauggcugggaaag

SEQ ID NO: 1390389 - RNA, 19 nt, Artificial Sequence
  Description of Artificial Sequence: Synthetic oligonucleotide
  Antisense strand to SEQ ID NO: 1390388
cuuucccagccauaaguaa

SEQ ID NO: 1390390 - RNA, 19 nt, Artificial Sequence
  Description of Artificial Sequence: Synthetic oligonucleotide
  Sense strand starting at position 1724 of SEQ ID NO: 1243038
gaaugugucagccagguga

SEQ ID NO: 1390391 - RNA, 19 nt, Artificial Sequence
  Description of Artificial Sequence: Synthetic oligonucleotide
  Antisense strand to SEQ ID NO: 1390390
ucaccuggcugacacauuc

SEQ ID NO: 1390392 - RNA, 19 nt, Artificial Sequence
  Description of Artificial Sequence: Synthetic oligonucleotide
  Sense strand starting at position 1757 of SEQ ID NO: 1243038
caacgccuccuguauagau

SEQ ID NO: 1390393 - RNA, 19 nt, Artificial Sequence
  Description of Artificial Sequence: Synthetic oligonucleotide
  Antisense strand to SEQ ID NO: 1390392
aucuauacaggaggcguug

SEQ ID NO: 1390394 - RNA, 19 nt, Artificial Sequence
  Description of Artificial Sequence: Synthetic oligonucleotide
  Sense strand starting at position 1819 of SEQ ID NO: 1243038
gaggacauguuagagacaa

SEQ ID NO: 1390395 - RNA, 19 nt, Artificial Sequence
  Description of Artificial Sequence: Synthetic oligonucleotide
  Antisense strand to SEQ ID NO: 1390394
uugucucuaacauguccuc

SEQ ID NO: 1390396 - RNA, 19 nt, Artificial Sequence
  Description of Artificial Sequence: Synthetic oligonucleotide
  Sense strand starting at position 1841 of SEQ ID NO: 1243038
agaggauccggucagucau

SEQ ID NO: 1390397 - RNA, 19 nt, Artificial Sequence
  Description of Artificial Sequence: Synthetic oligonucleotide
  Antisense strand to SEQ ID NO: 1390396
augacugaccggauccucu

SEQ ID NO: 1390398 - RNA, 19 nt, Artificial Sequence
  Description of Artificial Sequence: Synthetic oligonucleotide
  Sense strand starting at position 1878 of SEQ ID NO: 1243038
acagauugguaucuuacag

SEQ ID NO: 1390399 - RNA, 19 nt, Artificial Sequence
  Description of Artificial Sequence: Synthetic oligonucleotide
  Antisense strand to SEQ ID NO: 1390398
cuguaagauaccaaucugu

SEQ ID NO: 1390400 - RNA, 19 nt, Artificial Sequence
  Description of Artificial Sequence: Synthetic oligonucleotide
  Sense strand starting at position 1882 of SEQ ID NO: 1243038
auugguaucuuacagagaa

SEQ ID NO: 1390401 - RNA, 19 nt, Artificial Sequence
  Description of Artificial Sequence: Synthetic oligonucleotide
  Antisense strand to SEQ ID NO: 1390400
uucucuguaagauaccaau

SEQ ID NO: 1390402 - RNA, 19 nt, Artificial Sequence
  Description of Artificial Sequence: Synthetic oligonucleotide
  Sense strand starting at position 1905 of SEQ ID NO: 1243038
uagggaggcuucucuagga

SEQ ID NO: 1390403 - RNA, 19 nt, Artificial Sequence
  Description of Artificial Sequence: Synthetic oligonucleotide
  Antisense strand to SEQ ID NO: 1390402
uccuagagaagccucccua

SEQ ID NO: 1390404 - RNA, 19 nt, Artificial Sequence
  Description of Artificial Sequence: Synthetic oligonucleotide
  Sense strand starting at position 1929 of SEQ ID NO: 1243038
guguguagucacgcugcca

SEQ ID NO: 1390405 - RNA, 19 nt, Artificial Sequence
  Description of Artificial Sequence: Synthetic oligonucleotide
  Antisense strand to SEQ ID NO: 1390404
uggcagcgugacuacacac

SEQ ID NO: 1390406 - RNA, 19 nt, Artificial Sequence
  Description of Artificial Sequence: Synthetic oligonucleotide
  Sense strand starting at position 1972 of SEQ ID NO: 1243038
ucaucacuacccugugaag

SEQ ID NO: 1390407 - RNA, 19 nt, Artificial Sequence
  Description of Artificial Sequence: Synthetic oligonucleotide
  Antisense strand to SEQ ID NO: 1390406
cuucacaggguagugauga

SEQ ID NO: 1390408 - RNA, 19 nt, Artificial Sequence
  Description of Artificial Sequence: Synthetic oligonucleotide
  Sense strand starting at position 2136 of SEQ ID NO: 1243038
acaucugucggcugguaca

SEQ ID NO: 1390409 - RNA, 19 nt, Artificial Sequence
  Description of Artificial Sequence: Synthetic oligonucleotide
  Antisense strand to SEQ ID NO: 1390408
uguaccagccgacagaugu

SEQ ID NO: 1390410 - RNA, 19 nt, Artificial Sequence
  Description of Artificial Sequence: Synthetic oligonucleotide
  Sense strand starting at position 2215 of SEQ ID NO: 1243038
agauuaaucuaagagauag

SEQ ID NO: 1390411 - RNA, 19 nt, Artificial Sequence
  Description of Artificial Sequence: Synthetic oligonucleotide
  Antisense strand to SEQ ID NO: 1390410
cuaucucuuagauuaaucu

SEQ ID NO: 1390412 - RNA, 19 nt, Artificial Sequence
  Description of Artificial Sequence: Synthetic oligonucleotide
  Sense strand starting at position 3154 of SEQ ID NO: 1243038
agaaaucuuagguagucga

SEQ ID NO: 1390413 - RNA, 19 nt, Artificial Sequence
  Description of Artificial Sequence: Synthetic oligonucleotide
  Antisense strand to SEQ ID NO: 1390412
ucgacuaccuaagauuucu

SEQ ID NO: 1390414 - RNA, 19 nt, Artificial Sequence
  Description of Artificial Sequence: Synthetic oligonucleotide
  Sense strand starting at position 3157 of SEQ ID NO: 1243038
aaucuuagguagucgaaag

SEQ ID NO: 1390415 - RNA, 19 nt, Artificial Sequence
  Description of Artificial Sequence: Synthetic oligonucleotide
  Antisense strand to SEQ ID NO: 1390414
cuuucgacuaccuaagauu

SEQ ID NO: 1390416 - RNA, 19 nt, Artificial Sequence
  Description of Artificial Sequence: Synthetic oligonucleotide
  Sense strand starting at position 3158 of SEQ ID NO: 1243038
aucuuagguagucgaaagu

SEQ ID NO: 1390417 - RNA, 19 nt, Artificial Sequence
  Description of Artificial Sequence: Synthetic oligonucleotide
  Antisense strand to SEQ ID NO: 1390416
acuuucgacuaccuaagau

SEQ ID NO: 1390418 - RNA, 19 nt, Artificial Sequence
  Description of Artificial Sequence: Synthetic oligonucleotide
  Sense strand starting at position 3216 of SEQ ID NO: 1243038
agauuaaucuggguggugu

SEQ ID NO: 1390419 - RNA, 19 nt, Artificial Sequence
  Description of Artificial Sequence: Synthetic oligonucleotide
  Antisense strand to SEQ ID NO: 1390418
acaccacccagauuaaucu

SEQ ID NO: 1390420 - RNA, 19 nt, Artificial Sequence
  Description of Artificial Sequence: Synthetic oligonucleotide
  Sense strand starting at position 3217 of SEQ ID NO: 1243038
gauuaaucugggugguguc

SEQ ID NO: 1390421 - RNA, 19 nt, Artificial Sequence
  Description of Artificial Sequence: Synthetic oligonucleotide
  Antisense strand to SEQ ID NO: 1390420
gacaccacccagauuaauc

SEQ ID NO: 1390422 - RNA, 19 nt, Artificial Sequence
  Description of Artificial Sequence: Synthetic oligonucleotide
  Sense strand starting at position 3632 of SEQ ID NO: 1243038
auaugacacguauguaugu

SEQ ID NO: 1390423 - RNA, 19 nt, Artificial Sequence
  Description of Artificial Sequence: Synthetic oligonucleotide
  Antisense strand to SEQ ID NO: 1390422
acauacauacgugucauau

SEQ ID NO: 1390424 - RNA, 19 nt, Artificial Sequence
  Description of Artificial Sequence: Synthetic oligonucleotide
  Sense strand starting at position 3634 of SEQ ID NO: 1243038
augacacguauguauguau

SEQ ID NO: 1390425 - RNA, 19 nt, Artificial Sequence
  Description of Artificial Sequence: Synthetic oligonucleotide
  Antisense strand to SEQ ID NO: 1390424
auacauacauacgugucau

SEQ ID NO: 1390426 - RNA, 19 nt, Artificial Sequence
  Description of Artificial Sequence: Synthetic oligonucleotide
  Sense strand starting at position 3760 of SEQ ID NO: 1243038
ccggccuagguauauaauu

SEQ ID NO: 1390427 - RNA, 19 nt, Artificial Sequence
  Description of Artificial Sequence: Synthetic oligonucleotide
  Antisense strand to SEQ ID NO: 1390426
aauuauauaccuaggccgg

SEQ ID NO: 1390428 - RNA, 19 nt, Artificial Sequence
  Description of Artificial Sequence: Synthetic oligonucleotide
  Sense strand starting at position 3851 of SEQ ID NO: 1243038
ugcucaucuucucuguaua

SEQ ID NO: 1390429 - RNA, 19 nt, Artificial Sequence
  Description of Artificial Sequence: Synthetic oligonucleotide
  Antisense strand to SEQ ID NO: 1390428
uauacagagaagaugagca

SEQ ID NO: 1390430 - RNA, 19 nt, Artificial Sequence
  Description of Artificial Sequence: Synthetic oligonucleotide
  Sense strand starting at position 3852 of SEQ ID NO: 1243038
gcucaucuucucuguauag

SEQ ID NO: 1390431 - RNA, 19 nt, Artificial Sequence
  Description of Artificial Sequence: Synthetic oligonucleotide
  Antisense strand to SEQ ID NO: 1390430
cuauacagagaagaugagc

SEQ ID NO: 1390432 - RNA, 19 nt, Artificial Sequence
  Description of Artificial Sequence: Synthetic oligonucleotide
  Sense strand starting at position 3853 of SEQ ID NO: 1243038
cucaucuucucuguauagu

SEQ ID NO: 1390433 - RNA, 19 nt, Artificial Sequence
  Description of Artificial Sequence: Synthetic oligonucleotide
  Antisense strand to SEQ ID NO: 1390432
acuauacagagaagaugag

SEQ ID NO: 1390434 - RNA, 19 nt, Artificial Sequence
  Description of Artificial Sequence: Synthetic oligonucleotide
  Sense strand starting at position 3854 of SEQ ID NO: 1243038
ucaucuucucuguauaguu

SEQ ID NO: 1390435 - RNA, 19 nt, Artificial Sequence
  Description of Artificial Sequence: Synthetic oligonucleotide
  Antisense strand to SEQ ID NO: 1390434
aacuauacagagaagauga

SEQ ID NO: 1390436 - RNA, 19 nt, Artificial Sequence
  Description of Artificial Sequence: Synthetic oligonucleotide
  Sense strand starting at position 3895 of SEQ ID NO: 1243038
ugaagcgagcaugaucuua

SEQ ID NO: 1390437 - RNA, 19 nt, Artificial Sequence
  Description of Artificial Sequence: Synthetic oligonucleotide
  Antisense strand to SEQ ID NO: 1390436
uaagaucaugcucgcuuca

SEQ ID NO: 1390438 - RNA, 19 nt, Artificial Sequence
  Description of Artificial Sequence: Synthetic oligonucleotide
  Sense strand starting at position 509 of SEQ ID NO: 1243039
augaguguguuccugucuu

SEQ ID NO: 1390439 - RNA, 19 nt, Artificial Sequence
  Description of Artificial Sequence: Synthetic oligonucleotide
  Antisense strand to SEQ ID NO: 1390438
aagacaggaacacacucau

SEQ ID NO: 1390440 - RNA, 19 nt, Artificial Sequence
  Description of Artificial Sequence: Synthetic oligonucleotide
  Sense strand starting at position 513 of SEQ ID NO: 1243039
guguguuccugucuuugga

SEQ ID NO: 1390441 - RNA, 19 nt, Artificial Sequence
  Description of Artificial Sequence: Synthetic oligonucleotide
  Antisense strand to SEQ ID NO: 1390440
uccaaagacaggaacacac

SEQ ID NO: 1390442 - RNA, 19 nt, Artificial Sequence
  Description of Artificial Sequence: Synthetic oligonucleotide
  Sense strand starting at position 515 of SEQ ID NO: 1243039
guguuccugucuuuggaau

SEQ ID NO: 1390443 - RNA, 19 nt, Artificial Sequence
  Description of Artificial Sequence: Synthetic oligonucleotide
  Antisense strand to SEQ ID NO: 1390442
auuccaaagacaggaacac

SEQ ID NO: 1390444 - RNA, 19 nt, Artificial Sequence
  Description of Artificial Sequence: Synthetic oligonucleotide
  Sense strand starting at position 516 of SEQ ID NO: 1243039
uguuccugucuuuggaauu

SEQ ID NO: 1390445 - RNA, 19 nt, Artificial Sequence
  Description of Artificial Sequence: Synthetic oligonucleotide
  Antisense strand to SEQ ID NO: 1390444
aauuccaaagacaggaaca

SEQ ID NO: 1390446 - RNA, 19 nt, Artificial Sequence
  Description of Artificial Sequence: Synthetic oligonucleotide
  Sense strand starting at position 528 of SEQ ID NO: 1243039
uggaauuggagcugggauu

SEQ ID NO: 1390447 - RNA, 19 nt, Artificial Sequence
  Description of Artificial Sequence: Synthetic oligonucleotide
  Antisense strand to SEQ ID NO: 1390446
aaucccagcuccaauucca

SEQ ID NO: 1390448 - RNA, 19 nt, Artificial Sequence
  Description of Artificial Sequence: Synthetic oligonucleotide
  Sense strand starting at position 543 of SEQ ID NO: 1243039
gauugaagguucugggaga

SEQ ID NO: 1390449 - RNA, 19 nt, Artificial Sequence
  Description of Artificial Sequence: Synthetic oligonucleotide
  Antisense strand to SEQ ID NO: 1390448
ucucccagaaccuucaauc

SEQ ID NO: 1390450 - RNA, 19 nt, Artificial Sequence
  Description of Artificial Sequence: Synthetic oligonucleotide
  Sense strand starting at position 556 of SEQ ID NO: 1243039
gggagagcuucccuugaag

SEQ ID NO: 1390451 - RNA, 19 nt, Artificial Sequence
  Description of Artificial Sequence: Synthetic oligonucleotide
  Antisense strand to SEQ ID NO: 1390450
cuucaagggaagcucuccc

SEQ ID NO: 1390452 - RNA, 19 nt, Artificial Sequence
  Description of Artificial Sequence: Synthetic oligonucleotide
  Sense strand starting at position 690 of SEQ ID NO: 1243039
uugggcaccauucgauauu

SEQ ID NO: 1390453 - RNA, 19 nt, Artificial Sequence
  Description of Artificial Sequence: Synthetic oligonucleotide
  Antisense strand to SEQ ID NO: 1390452
aauaucgaauggugcccaa

SEQ ID NO: 1390454 - RNA, 19 nt, Artificial Sequence
  Description of Artificial Sequence: Synthetic oligonucleotide
  Sense strand starting at position 730 of SEQ ID NO: 1243039
agugguugguggaguuauu

SEQ ID NO: 1390455 - RNA, 19 nt, Artificial Sequence
  Description of Artificial Sequence: Synthetic oligonucleotide
  Antisense strand to SEQ ID NO: 1390454
aauaacuccaccaaccacu

SEQ ID NO: 1390456 - RNA, 19 nt, Artificial Sequence
  Description of Artificial Sequence: Synthetic oligonucleotide
  Sense strand starting at position 739 of SEQ ID NO: 1243039
uggaguuauuaacuuacau

SEQ ID NO: 1390457 - RNA, 19 nt, Artificial Sequence
  Description of Artificial Sequence: Synthetic oligonucleotide
  Antisense strand to SEQ ID NO: 1390456
auguaaguuaauaacucca

SEQ ID NO: 1390458 - RNA, 19 nt, Artificial Sequence
  Description of Artificial Sequence: Synthetic oligonucleotide
  Sense strand starting at position 767 of SEQ ID NO: 1243039
agcauuugcccaggacgua

SEQ ID NO: 1390459 - RNA, 19 nt, Artificial Sequence
  Description of Artificial Sequence: Synthetic oligonucleotide
  Antisense strand to SEQ ID NO: 1390458
uacguccugggcaaaugcu

SEQ ID NO: 1390460 - RNA, 19 nt, Artificial Sequence
  Description of Artificial Sequence: Synthetic oligonucleotide
  Sense strand starting at position 784 of SEQ ID NO: 1243039
uacguaaaggccuguucua

SEQ ID NO: 1390461 - RNA, 19 nt, Artificial Sequence
  Description of Artificial Sequence: Synthetic oligonucleotide
  Antisense strand to SEQ ID NO: 1390460
uagaacaggccuuuacgua

SEQ ID NO: 1390462 - RNA, 19 nt, Artificial Sequence
  Description of Artificial Sequence: Synthetic oligonucleotide
  Sense strand starting at position 831 of SEQ ID NO: 1243039
uuugaaguguucucuuucu

SEQ ID NO: 1390463 - RNA, 19 nt, Artificial Sequence
  Description of Artificial Sequence: Synthetic oligonucleotide
  Antisense strand to SEQ ID NO: 1390462
agaaagagaacacuucaaa

SEQ ID NO: 1390464 - RNA, 19 nt, Artificial Sequence
  Description of Artificial Sequence: Synthetic oligonucleotide
  Sense strand starting at position 841 of SEQ ID NO: 1243039
ucucuuucucucugggagu

SEQ ID NO: 1390465 - RNA, 19 nt, Artificial Sequence
  Description of Artificial Sequence: Synthetic oligonucleotide
  Antisense strand to SEQ ID NO: 1390464
acucccagagagaaagaga

SEQ ID NO: 1390466 - RNA, 19 nt, Artificial Sequence
  Description of Artificial Sequence: Synthetic oligonucleotide
  Sense strand starting at position 855 of SEQ ID NO: 1243039
ggagucuucggaggguaau

SEQ ID NO: 1390467 - RNA, 19 nt, Artificial Sequence
  Description of Artificial Sequence: Synthetic oligonucleotide
  Antisense strand to SEQ ID NO: 1390466
auuacccuccgaagacucc

SEQ ID NO: 1390468 - RNA, 19 nt, Artificial Sequence
  Description of Artificial Sequence: Synthetic oligonucleotide
  Sense strand starting at position 856 of SEQ ID NO: 1243039
gagucuucggaggguaaug

SEQ ID NO: 1390469 - RNA, 19 nt, Artificial Sequence
  Description of Artificial Sequence: Synthetic oligonucleotide
  Antisense strand to SEQ ID NO: 1390468
cauuacccuccgaagacuc

SEQ ID NO: 1390470 - RNA, 19 nt, Artificial Sequence
  Description of Artificial Sequence: Synthetic oligonucleotide
  Sense strand starting at position 866 of SEQ ID NO: 1243039
aggguaauguugucacauc

SEQ ID NO: 1390471 - RNA, 19 nt, Artificial Sequence
  Description of Artificial Sequence: Synthetic oligonucleotide
  Antisense strand to SEQ ID NO: 1390470
gaugugacaacauuacccu

SEQ ID NO: 1390472 - RNA, 19 nt, Artificial Sequence
  Description of Artificial Sequence: Synthetic oligonucleotide
  Sense strand starting at position 897 of SEQ ID NO: 1243039
gagacucacccagguguaa

SEQ ID NO: 1390473 - RNA, 19 nt, Artificial Sequence
  Description of Artificial Sequence: Synthetic oligonucleotide
  Antisense strand to SEQ ID NO: 1390472
uuacaccugggugagucuc

SEQ ID NO: 1390474 - RNA, 19 nt, Artificial Sequence
  Description of Artificial Sequence: Synthetic oligonucleotide
  Sense strand starting at position 1133 of SEQ ID NO: 1243039
gcaaacuagagacgugaaa

SEQ ID NO: 1390475 - RNA, 19 nt, Artificial Sequence
  Description of Artificial Sequence: Synthetic oligonucleotide
  Antisense strand to SEQ ID NO: 1390474
uuucacgucucuaguuugc

SEQ ID NO: 1390476 - RNA, 19 nt, Artificial Sequence
  Description of Artificial Sequence: Synthetic oligonucleotide
  Sense strand starting at position 1155 of SEQ ID NO: 1243039
cugagaucaugaggagaaa

SEQ ID NO: 1390477 - RNA, 19 nt, Artificial Sequence
  Description of Artificial Sequence: Synthetic oligonucleotide
  Antisense strand to SEQ ID NO: 1390476
uuucuccucaugaucucag

SEQ ID NO: 1390478 - RNA, 19 nt, Artificial Sequence
  Description of Artificial Sequence: Synthetic oligonucleotide
  Sense strand starting at position 1384 of SEQ ID NO: 1243039
cccuuuauugaaggugaau

SEQ ID NO: 1390479 - RNA, 19 nt, Artificial Sequence
  Description of Artificial Sequence: Synthetic oligonucleotide
  Antisense strand to SEQ ID NO: 1390478
auucaccuucaauaaaggg

SEQ ID NO: 1390480 - RNA, 19 nt, Artificial Sequence
  Description of Artificial Sequence: Synthetic oligonucleotide
  Sense strand starting at position 1443 of SEQ ID NO: 1243039
aagauuaguugugucauua

SEQ ID NO: 1390481 - RNA, 19 nt, Artificial Sequence
  Description of Artificial Sequence: Synthetic oligonucleotide
  Antisense strand to SEQ ID NO: 1390480
uaaugacacaacuaaucuu

SEQ ID NO: 1390482 - RNA, 19 nt, Artificial Sequence
  Description of Artificial Sequence: Synthetic oligonucleotide
  Sense strand starting at position 1447 of SEQ ID NO: 1243039
uuaguugugucauuacaag

SEQ ID NO: 1390483 - RNA, 19 nt, Artificial Sequence
  Description of Artificial Sequence: Synthetic oligonucleotide
  Antisense strand to SEQ ID NO: 1390482
cuuguaaugacacaacuaa

SEQ ID NO: 1390484 - RNA, 19 nt, Artificial Sequence
  Description of Artificial Sequence: Synthetic oligonucleotide
  Sense strand starting at position 1480 of SEQ ID NO: 1243039
guccuucucagguguuagu

SEQ ID NO: 1390485 - RNA, 19 nt, Artificial Sequence
  Description of Artificial Sequence: Synthetic oligonucleotide
  Antisense strand to SEQ ID NO: 1390484
acuaacaccugagaaggac

SEQ ID NO: 1390486 - RNA, 19 nt, Artificial Sequence
  Description of Artificial Sequence: Synthetic oligonucleotide
  Sense strand starting at position 1489 of SEQ ID NO: 1243039
agguguuagugugcagaac

SEQ ID NO: 1390487 - RNA, 19 nt, Artificial Sequence
  Description of Artificial Sequence: Synthetic oligonucleotide
  Antisense strand to SEQ ID NO: 1390486
guucugcacacuaacaccu

SEQ ID NO: 1390488 - RNA, 19 nt, Artificial Sequence
  Description of Artificial Sequence: Synthetic oligonucleotide
  Sense strand starting at position 1490 of SEQ ID NO: 1243039
gguguuagugugcagaaca

SEQ ID NO: 1390489 - RNA, 19 nt, Artificial Sequence
  Description of Artificial Sequence: Synthetic oligonucleotide
  Antisense strand to SEQ ID NO: 1390488
uguucugcacacuaacacc

SEQ ID NO: 1390490 - RNA, 19 nt, Artificial Sequence
  Description of Artificial Sequence: Synthetic oligonucleotide
  Sense strand starting at position 1847 of SEQ ID NO: 1243039
gcucuugucagcugaagag

SEQ ID NO: 1390491 - RNA, 19 nt, Artificial Sequence
  Description of Artificial Sequence: Synthetic oligonucleotide
  Antisense strand to SEQ ID NO: 1390490
cucuucagcugacaagagc

SEQ ID NO: 1390492 - RNA, 19 nt, Artificial Sequence
  Description of Artificial Sequence: Synthetic oligonucleotide
  Sense strand starting at position 2144 of SEQ ID NO: 1243039
ccuccugagugcucuugaa

SEQ ID NO: 1390493 - RNA, 19 nt, Artificial Sequence
  Description of Artificial Sequence: Synthetic oligonucleotide
  Antisense strand to SEQ ID NO: 1390492
uucaagagcacucaggagg

SEQ ID NO: 1390494 - RNA, 19 nt, Artificial Sequence
  Description of Artificial Sequence: Synthetic oligonucleotide
  Sense strand starting at position 2705 of SEQ ID NO: 1243039
gccugaggcguguuucagu

SEQ ID NO: 1390495 - RNA, 19 nt, Artificial Sequence
  Description of Artificial Sequence: Synthetic oligonucleotide
  Antisense strand to SEQ ID NO: 1390494
acugaaacacgccucaggc

SEQ ID NO: 1390496 - RNA, 19 nt, Artificial Sequence
  Description of Artificial Sequence: Synthetic oligonucleotide
  Sense strand starting at position 2731 of SEQ ID NO: 1243039
ugauucaagggucgugagu

SEQ ID NO: 1390497 - RNA, 19 nt, Artificial Sequence
  Description of Artificial Sequence: Synthetic oligonucleotide
  Antisense strand to SEQ ID NO: 1390496
acucacgacccuugaauca

SEQ ID NO: 1390498 - RNA, 19 nt, Artificial Sequence
  Description of Artificial Sequence: Synthetic oligonucleotide
  Sense strand starting at position 2755 of SEQ ID NO: 1243039
auagacuuugccugauaac

SEQ ID NO: 1390499 - RNA, 19 nt, Artificial Sequence
  Description of Artificial Sequence: Synthetic oligonucleotide
  Antisense strand to SEQ ID NO: 1390498
guuaucaggcaaagucuau

SEQ ID NO: 1390500 - RNA, 19 nt, Artificial Sequence
  Description of Artificial Sequence: Synthetic oligonucleotide
  Sense strand starting at position 2764 of SEQ ID NO: 1243039
gccugauaacuuggaaaug

SEQ ID NO: 1390501 - RNA, 19 nt, Artificial Sequence
  Description of Artificial Sequence: Synthetic oligonucleotide
  Antisense strand to SEQ ID NO: 1390500
cauuuccaaguuaucaggc

SEQ ID NO: 1390502 - RNA, 19 nt, Artificial Sequence
  Description of Artificial Sequence: Synthetic oligonucleotide
  Sense strand starting at position 2765 of SEQ ID NO: 1243039
ccugauaacuuggaaauga

SEQ ID NO: 1390503 - RNA, 19 nt, Artificial Sequence
  Description of Artificial Sequence: Synthetic oligonucleotide
  Antisense strand to SEQ ID NO: 1390502
ucauuuccaaguuaucagg

SEQ ID NO: 1390504 - RNA, 19 nt, Artificial Sequence
  Description of Artificial Sequence: Synthetic oligonucleotide
  Sense strand starting at position 2927 of SEQ ID NO: 1243039
ugcggaacugucuaaagag

SEQ ID NO: 1390505 - RNA, 19 nt, Artificial Sequence
  Description of Artificial Sequence: Synthetic oligonucleotide
  Antisense strand to SEQ ID NO: 1390504
cucuuuagacaguuccgca

SEQ ID NO: 1390506 - RNA, 19 nt, Artificial Sequence
  Description of Artificial Sequence: Synthetic oligonucleotide
  Sense strand starting at position 3260 of SEQ ID NO: 1243039
uggcaagucuuggaacaga

SEQ ID NO: 1390507 - RNA, 19 nt, Artificial Sequence
  Description of Artificial Sequence: Synthetic oligonucleotide
  Antisense strand to SEQ ID NO: 1390506
ucuguuccaagacuugcca

SEQ ID NO: 1390508 - RNA, 19 nt, Artificial Sequence
  Description of Artificial Sequence: Synthetic oligonucleotide
  Sense strand starting at position 3382 of SEQ ID NO: 1243039
gguguagccugggcuagau

SEQ ID NO: 1390509 - RNA, 19 nt, Artificial Sequence
  Description of Artificial Sequence: Synthetic oligonucleotide
  Antisense strand to SEQ ID NO: 1390508
aucuagcccaggcuacacc

SEQ ID NO: 1390510 - RNA, 19 nt, Artificial Sequence
  Description of Artificial Sequence: Synthetic oligonucleotide
  Sense strand starting at position 3613 of SEQ ID NO: 1243039
uggucuuagcugucaucgu

SEQ ID NO: 1390511 - RNA, 19 nt, Artificial Sequence
  Description of Artificial Sequence: Synthetic oligonucleotide
  Antisense strand to SEQ ID NO: 1390510
acgaugacagcuaagacca

SEQ ID NO: 1390512 - RNA, 19 nt, Artificial Sequence
  Description of Artificial Sequence: Synthetic oligonucleotide
  Sense strand starting at position 3642 of SEQ ID NO: 1243039
ggagaaacgucuccagaaa

SEQ ID NO: 1390513 - RNA, 19 nt, Artificial Sequence
  Description of Artificial Sequence: Synthetic oligonucleotide
  Antisense strand to SEQ ID NO: 1390512
uuucuggagacguuucucc

SEQ ID NO: 1390514 - RNA, 19 nt, Artificial Sequence
  Description of Artificial Sequence: Synthetic oligonucleotide
  Sense strand starting at position 3709 of SEQ ID NO: 1243039
ugugaugcaggccgugaaa

SEQ ID NO: 1390515 - RNA, 19 nt, Artificial Sequence
  Description of Artificial Sequence: Synthetic oligonucleotide
  Antisense strand to SEQ ID NO: 1390514
uuucacggccugcaucaca

SEQ ID NO: 1390516 - RNA, 19 nt, Artificial Sequence
  Description of Artificial Sequence: Synthetic oligonucleotide
  Sense strand starting at position 3853 of SEQ ID NO: 1243039
ucaggagugaagugauaag

SEQ ID NO: 1390517 - RNA, 19 nt, Artificial Sequence
  Description of Artificial Sequence: Synthetic oligonucleotide
  Antisense strand to SEQ ID NO: 1390516
cuuaucacuucacuccuga

SEQ ID NO: 1390518 - RNA, 19 nt, Artificial Sequence
  Description of Artificial Sequence: Synthetic oligonucleotide
  Sense strand starting at position 43 of SEQ ID NO: 1243040
uccugugcuuccuguauua

SEQ ID NO: 1390519 - RNA, 19 nt, Artificial Sequence
  Description of Artificial Sequence: Synthetic oligonucleotide
  Antisense strand to SEQ ID NO: 1390518
uaauacaggaagcacagga

SEQ ID NO: 1390520 - RNA, 19 nt, Artificial Sequence
  Description of Artificial Sequence: Synthetic oligonucleotide
  Sense strand starting at position 53 of SEQ ID NO: 1243040
ccuguauuacgguacugau

SEQ ID NO: 1390521 - RNA, 19 nt, Artificial Sequence
  Description of Artificial Sequence: Synthetic oligonucleotide
  Antisense strand to SEQ ID NO: 1390520
aucaguaccguaauacagg

SEQ ID NO: 1390522 - RNA, 19 nt, Artificial Sequence
  Description of Artificial Sequence: Synthetic oligonucleotide
  Sense strand starting at position 66 of SEQ ID NO: 1243040
acugaugaacugcauucua

SEQ ID NO: 1390523 - RNA, 19 nt, Artificial Sequence
  Description of Artificial Sequence: Synthetic oligonucleotide
  Antisense strand to SEQ ID NO: 1390522
uagaaugcaguucaucagu

SEQ ID NO: 1390524 - RNA, 19 nt, Artificial Sequence
  Description of Artificial Sequence: Synthetic oligonucleotide
  Sense strand starting at position 192 of SEQ ID NO: 1243040
gguauucagugacugguca

SEQ ID NO: 1390525 - RNA, 19 nt, Artificial Sequence
  Description of Artificial Sequence: Synthetic oligonucleotide
  Antisense strand to SEQ ID NO: 1390524
ugaccagucacugaauacc

SEQ ID NO: 1390526 - RNA, 19 nt, Artificial Sequence
  Description of Artificial Sequence: Synthetic oligonucleotide
  Sense strand starting at position 200 of SEQ ID NO: 1243040
gugacuggucaauguagau

SEQ ID NO: 1390527 - RNA, 19 nt, Artificial Sequence
  Description of Artificial Sequence: Synthetic oligonucleotide
  Antisense strand to SEQ ID NO: 1390526
aucuacauugaccagucac

SEQ ID NO: 1390528 - RNA, 19 nt, Artificial Sequence
  Description of Artificial Sequence: Synthetic oligonucleotide
  Sense strand starting at position 213 of SEQ ID NO: 1243040
guagauagaucagauacau

SEQ ID NO: 1390529 - RNA, 19 nt, Artificial Sequence
  Description of Artificial Sequence: Synthetic oligonucleotide
  Antisense strand to SEQ ID NO: 1390528
auguaucugaucuaucuac

SEQ ID NO: 1390530 - RNA, 19 nt, Artificial Sequence
  Description of Artificial Sequence: Synthetic oligonucleotide
  Sense strand starting at position 450 of SEQ ID NO: 1243040
accugugggcgauagucaa

SEQ ID NO: 1390531 - RNA, 19 nt, Artificial Sequence
  Description of Artificial Sequence: Synthetic oligonucleotide
  Antisense strand to SEQ ID NO: 1390530
uugacuaucgcccacaggu

SEQ ID NO: 1390532 - RNA, 19 nt, Artificial Sequence
  Description of Artificial Sequence: Synthetic oligonucleotide
  Sense strand starting at position 456 of SEQ ID NO: 1243040
gggcgauagucaagguacu

SEQ ID NO: 1390533 - RNA, 19 nt, Artificial Sequence
  Description of Artificial Sequence: Synthetic oligonucleotide
  Antisense strand to SEQ ID NO: 1390532
aguaccuugacuaucgccc

SEQ ID NO: 1390534 - RNA, 19 nt, Artificial Sequence
  Description of Artificial Sequence: Synthetic oligonucleotide
  Sense strand starting at position 457 of SEQ ID NO: 1243040
ggcgauagucaagguacuu

SEQ ID NO: 1390535 - RNA, 19 nt, Artificial Sequence
  Description of Artificial Sequence: Synthetic oligonucleotide
  Antisense strand to SEQ ID NO: 1390534
aaguaccuugacuaucgcc

SEQ ID NO: 1390536 - RNA, 19 nt, Artificial Sequence
  Description of Artificial Sequence: Synthetic oligonucleotide
  Sense strand starting at position 499 of SEQ ID NO: 1243040
ggccuugcuugcucagacu

SEQ ID NO: 1390537 - RNA, 19 nt, Artificial Sequence
  Description of Artificial Sequence: Synthetic oligonucleotide
  Antisense strand to SEQ ID NO: 1390536
agucugagcaagcaaggcc

SEQ ID NO: 1390538 - RNA, 19 nt, Artificial Sequence
  Description of Artificial Sequence: Synthetic oligonucleotide
  Sense strand starting at position 529 of SEQ ID NO: 1243040
agagcauucuguucucaug

SEQ ID NO: 1390539 - RNA, 19 nt, Artificial Sequence
  Description of Artificial Sequence: Synthetic oligonucleotide
  Antisense strand to SEQ ID NO: 1390538
caugagaacagaaugcucu

SEQ ID NO: 1390540 - RNA, 19 nt, Artificial Sequence
  Description of Artificial Sequence: Synthetic oligonucleotide
  Sense strand starting at position 562 of SEQ ID NO: 1243040
ucaggaauguugccuuacu

SEQ ID NO: 1390541 - RNA, 19 nt, Artificial Sequence
  Description of Artificial Sequence: Synthetic oligonucleotide
  Antisense strand to SEQ ID NO: 1390540
aguaaggcaacauuccuga

SEQ ID NO: 1390542 - RNA, 19 nt, Artificial Sequence
  Description of Artificial Sequence: Synthetic oligonucleotide
  Sense strand starting at position 646 of SEQ ID NO: 1243040
gcuugagguucugagucuu

SEQ ID NO: 1390543 - RNA, 19 nt, Artificial Sequence
  Description of Artificial Sequence: Synthetic oligonucleotide
  Antisense strand to SEQ ID NO: 1390542
aagacucagaaccucaagc

SEQ ID NO: 1390544 - RNA, 19 nt, Artificial Sequence
  Description of Artificial Sequence: Synthetic oligonucleotide
  Sense strand starting at position 652 of SEQ ID NO: 1243040
gguucugagucuuugaaag

SEQ ID NO: 1390545 - RNA, 19 nt, Artificial Sequence
  Description of Artificial Sequence: Synthetic oligonucleotide
  Antisense strand to SEQ ID NO: 1390544
cuuucaaagacucagaacc

SEQ ID NO: 1390546 - RNA, 19 nt, Artificial Sequence
  Description of Artificial Sequence: Synthetic oligonucleotide
  Sense strand starting at position 654 of SEQ ID NO: 1243040
uucugagucuuugaaagca

SEQ ID NO: 1390547 - RNA, 19 nt, Artificial Sequence
  Description of Artificial Sequence: Synthetic oligonucleotide
  Antisense strand to SEQ ID NO: 1390546
ugcuuucaaagacucagaa

SEQ ID NO: 1390548 - RNA, 19 nt, Artificial Sequence
  Description of Artificial Sequence: Synthetic oligonucleotide
  Sense strand starting at position 687 of SEQ ID NO: 1243040
aggcauuaucuguauuauu

SEQ ID NO: 1390549 - RNA, 19 nt, Artificial Sequence
  Description of Artificial Sequence: Synthetic oligonucleotide
  Antisense strand to SEQ ID NO: 1390548
aauaauacagauaaugccu

SEQ ID NO: 1390550 - RNA, 19 nt, Artificial Sequence
  Description of Artificial Sequence: Synthetic oligonucleotide
  Sense strand starting at position 774 of SEQ ID NO: 1243040
cuugaaagcugcuaugaau

SEQ ID NO: 1390551 - RNA, 19 nt, Artificial Sequence
  Description of Artificial Sequence: Synthetic oligonucleotide
  Antisense strand to SEQ ID NO: 1390550
auucauagcagcuuucaag

SEQ ID NO: 1390552 - RNA, 19 nt, Artificial Sequence
  Description of Artificial Sequence: Synthetic oligonucleotide
  Sense strand starting at position 783 of SEQ ID NO: 1243040
ugcuaugaaucuguuauuu

SEQ ID NO: 1390553 - RNA, 19 nt, Artificial Sequence
  Description of Artificial Sequence: Synthetic oligonucleotide
  Antisense strand to SEQ ID NO: 1390552
aaauaacagauucauagca

SEQ ID NO: 1390554 - RNA, 19 nt, Artificial Sequence
  Description of Artificial Sequence: Synthetic oligonucleotide
  Sense strand starting at position 855 of SEQ ID NO: 1243040
cccugaguauuauagaugu

SEQ ID NO: 1390555 - RNA, 19 nt, Artificial Sequence
  Description of Artificial Sequence: Synthetic oligonucleotide
  Antisense strand to SEQ ID NO: 1390554
acaucuauaauacucaggg

SEQ ID NO: 1390556 - RNA, 19 nt, Artificial Sequence
  Description of Artificial Sequence: Synthetic oligonucleotide
  Sense strand starting at position 862 of SEQ ID NO: 1243040
uauuauagaugucagagag

SEQ ID NO: 1390557 - RNA, 19 nt, Artificial Sequence
  Description of Artificial Sequence: Synthetic oligonucleotide
  Antisense strand to SEQ ID NO: 1390556
cucucugacaucuauaaua

SEQ ID NO: 1390558 - RNA, 19 nt, Artificial Sequence
  Description of Artificial Sequence: Synthetic oligonucleotide
  Sense strand starting at position 1105 of SEQ ID NO: 1243040
agacuaguacacugagucu

SEQ ID NO: 1390559 - RNA, 19 nt, Artificial Sequence
  Description of Artificial Sequence: Synthetic oligonucleotide
  Antisense strand to SEQ ID NO: 1390558
agacucaguguacuagucu

SEQ ID NO: 1390560 - RNA, 19 nt, Artificial Sequence
  Description of Artificial Sequence: Synthetic oligonucleotide
  Sense strand starting at position 1108 of SEQ ID NO: 1243040
cuaguacacugagucuaaa

SEQ ID NO: 1390561 - RNA, 19 nt, Artificial Sequence
  Description of Artificial Sequence: Synthetic oligonucleotide
  Antisense strand to SEQ ID NO: 1390560
uuuagacucaguguacuag

SEQ ID NO: 1390562 - RNA, 19 nt, Artificial Sequence
  Description of Artificial Sequence: Synthetic oligonucleotide
  Sense strand starting at position 1345 of SEQ ID NO: 1243040
aaagaaugaugugugccaa

SEQ ID NO: 1390563 - RNA, 19 nt, Artificial Sequence
  Description of Artificial Sequence: Synthetic oligonucleotide
  Antisense strand to SEQ ID NO: 1390562
uuggcacacaucauucuuu

SEQ ID NO: 1390564 - RNA, 19 nt, Artificial Sequence
  Description of Artificial Sequence: Synthetic oligonucleotide
  Sense strand starting at position 1349 of SEQ ID NO: 1243040
aaugaugugugccaagaag

SEQ ID NO: 1390565 - RNA, 19 nt, Artificial Sequence
  Description of Artificial Sequence: Synthetic oligonucleotide
  Antisense strand to SEQ ID NO: 1390564
cuucuuggcacacaucauu

SEQ ID NO: 1390566 - RNA, 19 nt, Artificial Sequence
  Description of Artificial Sequence: Synthetic oligonucleotide
  Sense strand starting at position 1475 of SEQ ID NO: 1243040
gggcucuuaccuggcuaua

SEQ ID NO: 1390567 - RNA, 19 nt, Artificial Sequence
  Description of Artificial Sequence: Synthetic oligonucleotide
  Antisense strand to SEQ ID NO: 1390566
uauagccagguaagagccc

SEQ ID NO: 1390568 - RNA, 19 nt, Artificial Sequence
  Description of Artificial Sequence: Synthetic oligonucleotide
  Sense strand starting at position 2057 of SEQ ID NO: 1243040
cgcggaugcucauacagaa

SEQ ID NO: 1390569 - RNA, 19 nt, Artificial Sequence
  Description of Artificial Sequence: Synthetic oligonucleotide
  Antisense strand to SEQ ID NO: 1390568
uucuguaugagcauccgcg

SEQ ID NO: 1390570 - RNA, 19 nt, Artificial Sequence
  Description of Artificial Sequence: Synthetic oligonucleotide
  Sense strand starting at position 57 of SEQ ID NO: 1243041
cucuuuccgcucugaggaa

SEQ ID NO: 1390571 - RNA, 19 nt, Artificial Sequence
  Description of Artificial Sequence: Synthetic oligonucleotide
  Antisense strand to SEQ ID NO: 1390570
uuccucagagcggaaagag

SEQ ID NO: 1390572 - RNA, 19 nt, Artificial Sequence
  Description of Artificial Sequence: Synthetic oligonucleotide
  Sense strand starting at position 223 of SEQ ID NO: 1243041
gcccuauucccagaaggca

SEQ ID NO: 1390573 - RNA, 19 nt, Artificial Sequence
  Description of Artificial Sequence: Synthetic oligonucleotide
  Antisense strand to SEQ ID NO: 1390572
ugccuucugggaauagggc

SEQ ID NO: 1390574 - RNA, 19 nt, Artificial Sequence
  Description of Artificial Sequence: Synthetic oligonucleotide
  Sense strand starting at position 679 of SEQ ID NO: 1243041
gugauucucuggccucaau

SEQ ID NO: 1390575 - RNA, 19 nt, Artificial Sequence
  Description of Artificial Sequence: Synthetic oligonucleotide
  Antisense strand to SEQ ID NO: 1390574
auugaggccagagaaucac

SEQ ID NO: 1390576 - RNA, 19 nt, Artificial Sequence
  Description of Artificial Sequence: Synthetic oligonucleotide
  Sense strand starting at position 1347 of SEQ ID NO: 1243041
uguacacugucaccauaaa

SEQ ID NO: 1390577 - RNA, 19 nt, Artificial Sequence
  Description of Artificial Sequence: Synthetic oligonucleotide
  Antisense strand to SEQ ID NO: 1390576
uuuauggugacaguguaca

SEQ ID NO: 1390578 - RNA, 19 nt, Artificial Sequence
  Description of Artificial Sequence: Synthetic oligonucleotide
  Sense strand starting at position 1466 of SEQ ID NO: 1243041
aguggaguuccuuggagaa

SEQ ID NO: 1390579 - RNA, 19 nt, Artificial Sequence
  Description of Artificial Sequence: Synthetic oligonucleotide
  Antisense strand to SEQ ID NO: 1390578
uucuccaaggaacuccacu

SEQ ID NO: 1390580 - RNA, 19 nt, Artificial Sequence
  Description of Artificial Sequence: Synthetic oligonucleotide
  Sense strand starting at position 1686 of SEQ ID NO: 1243041
gaggaagucugaccaaggu

SEQ ID NO: 1390581 - RNA, 19 nt, Artificial Sequence
  Description of Artificial Sequence: Synthetic oligonucleotide
  Antisense strand to SEQ ID NO: 1390580
accuuggucagacuuccuc

SEQ ID NO: 1390582 - RNA, 19 nt, Artificial Sequence
  Description of Artificial Sequence: Synthetic oligonucleotide
  Sense strand starting at position 2155 of SEQ ID NO: 1243041
ggcgaugacucagcacuga

SEQ ID NO: 1390583 - RNA, 19 nt, Artificial Sequence
  Description of Artificial Sequence: Synthetic oligonucleotide
  Antisense strand to SEQ ID NO: 1390582
ucagugcugagucaucgcc

SEQ ID NO: 1390584 - RNA, 19 nt, Artificial Sequence
  Description of Artificial Sequence: Synthetic oligonucleotide
  Sense strand starting at position 2168 of SEQ ID NO: 1243041
cacugagagcugugggagu

SEQ ID NO: 1390585 - RNA, 19 nt, Artificial Sequence
  Description of Artificial Sequence: Synthetic oligonucleotide
  Antisense strand to SEQ ID NO: 1390584
acucccacagcucucagug

SEQ ID NO: 1390586 - RNA, 19 nt, Artificial Sequence
  Description of Artificial Sequence: Synthetic oligonucleotide
  Sense strand starting at position 2179 of SEQ ID NO: 1243041
gugggagucuaguuaauca

SEQ ID NO: 1390587 - RNA, 19 nt, Artificial Sequence
  Description of Artificial Sequence: Synthetic oligonucleotide
  Antisense strand to SEQ ID NO: 1390586
ugauuaacuagacucccac

SEQ ID NO: 1390588 - RNA, 19 nt, Artificial Sequence
  Description of Artificial Sequence: Synthetic oligonucleotide
  Sense strand starting at position 2190 of SEQ ID NO: 1243041
guuaaucagcagcgucaaa

SEQ ID NO: 1390589 - RNA, 19 nt, Artificial Sequence
  Description of Artificial Sequence: Synthetic oligonucleotide
  Antisense strand to SEQ ID NO: 1390588
uuugacgcugcugauuaac

SEQ ID NO: 1390590 - RNA, 19 nt, Artificial Sequence
  Description of Artificial Sequence: Synthetic oligonucleotide
  Sense strand starting at position 2212 of SEQ ID NO: 1243041
uccuguugcuguuugcaaa

SEQ ID NO: 1390591 - RNA, 19 nt, Artificial Sequence
  Description of Artificial Sequence: Synthetic oligonucleotide
  Antisense strand to SEQ ID NO: 1390590
uuugcaaacagcaacagga

SEQ ID NO: 1390592 - RNA, 19 nt, Artificial Sequence
  Description of Artificial Sequence: Synthetic oligonucleotide
  Sense strand starting at position 2447 of SEQ ID NO: 1243041
cccaguaguagcugauuga

SEQ ID NO: 1390593 - RNA, 19 nt, Artificial Sequence
  Description of Artificial Sequence: Synthetic oligonucleotide
  Antisense strand to SEQ ID NO: 1390592
ucaaucagcuacuacuggg

SEQ ID NO: 1390594 - RNA, 19 nt, Artificial Sequence
  Description of Artificial Sequence: Synthetic oligonucleotide
  Sense strand starting at position 2450 of SEQ ID NO: 1243041
aguaguagcugauugacuu

SEQ ID NO: 1390595 - RNA, 19 nt, Artificial Sequence
  Description of Artificial Sequence: Synthetic oligonucleotide
  Antisense strand to SEQ ID NO: 1390594
aagucaaucagcuacuacu

SEQ ID NO: 1390596 - RNA, 19 nt, Artificial Sequence
  Description of Artificial Sequence: Synthetic oligonucleotide
  Sense strand starting at position 2451 of SEQ ID NO: 1243041
guaguagcugauugacuua

SEQ ID NO: 1390597 - RNA, 19 nt, Artificial Sequence
  Description of Artificial Sequence: Synthetic oligonucleotide
  Antisense strand to SEQ ID NO: 1390596
uaagucaaucagcuacuac

SEQ ID NO: 1390598 - RNA, 19 nt, Artificial Sequence
  Description of Artificial Sequence: Synthetic oligonucleotide
  Sense strand starting at position 2498 of SEQ ID NO: 1243041
gugugagagcaggaaucau

SEQ ID NO: 1390599 - RNA, 19 nt, Artificial Sequence
  Description of Artificial Sequence: Synthetic oligonucleotide
  Antisense strand to SEQ ID NO: 1390598
augauuccugcucucacac

SEQ ID NO: 1390600 - RNA, 19 nt, Artificial Sequence
  Description of Artificial Sequence: Synthetic oligonucleotide
  Sense strand starting at position 2529 of SEQ ID NO: 1243041
agaugagacucauccgucu

SEQ ID NO: 1390601 - RNA, 19 nt, Artificial Sequence
  Description of Artificial Sequence: Synthetic oligonucleotide
  Antisense strand to SEQ ID NO: 1390600
agacggaugagucucaucu

SEQ ID NO: 1390602 - RNA, 19 nt, Artificial Sequence
  Description of Artificial Sequence: Synthetic oligonucleotide
  Sense strand starting at position 2535 of SEQ ID NO: 1243041
gacucauccgucuaggaug

SEQ ID NO: 1390603 - RNA, 19 nt, Artificial Sequence
  Description of Artificial Sequence: Synthetic oligonucleotide
  Antisense strand to SEQ ID NO: 1390602
cauccuagacggaugaguc

SEQ ID NO: 1390604 - RNA, 19 nt, Artificial Sequence
  Description of Artificial Sequence: Synthetic oligonucleotide
  Sense strand starting at position 2605 of SEQ ID NO: 1243041
aagaucucugagggcuuaa

SEQ ID NO: 1390605 - RNA, 19 nt, Artificial Sequence
  Description of Artificial Sequence: Synthetic oligonucleotide
  Antisense strand to SEQ ID NO: 1390604
uuaagcccucagagaucuu

SEQ ID NO: 1390606 - RNA, 19 nt, Artificial Sequence
  Description of Artificial Sequence: Synthetic oligonucleotide
  Sense strand starting at position 2744 of SEQ ID NO: 1243041
acagccaucgcucagauau

SEQ ID NO: 1390607 - RNA, 19 nt, Artificial Sequence
  Description of Artificial Sequence: Synthetic oligonucleotide
  Antisense strand to SEQ ID NO: 1390606
auaucugagcgauggcugu

SEQ ID NO: 1390608 - RNA, 19 nt, Artificial Sequence
  Description of Artificial Sequence: Synthetic oligonucleotide
  Sense strand starting at position 2751 of SEQ ID NO: 1243041
ucgcucagauaucuuuaua

SEQ ID NO: 1390609 - RNA, 19 nt, Artificial Sequence
  Description of Artificial Sequence: Synthetic oligonucleotide
  Antisense strand to SEQ ID NO: 1390608
uauaaagauaucugagcga

SEQ ID NO: 1390610 - RNA, 19 nt, Artificial Sequence
  Description of Artificial Sequence: Synthetic oligonucleotide
  Sense strand starting at position 2803 of SEQ ID NO: 1243041
gcgagaauuccagauccaa

SEQ ID NO: 1390611 - RNA, 19 nt, Artificial Sequence
  Description of Artificial Sequence: Synthetic oligonucleotide
  Antisense strand to SEQ ID NO: 1390610
uuggaucuggaauucucgc

SEQ ID NO: 1390612 - RNA, 19 nt, Artificial Sequence
  Description of Artificial Sequence: Synthetic oligonucleotide
  Sense strand starting at position 2828 of SEQ ID NO: 1243041
aacuguaaauuagcgugaa

SEQ ID NO: 1390613 - RNA, 19 nt, Artificial Sequence
  Description of Artificial Sequence: Synthetic oligonucleotide
  Antisense strand to SEQ ID NO: 1390612
uucacgcuaauuuacaguu

SEQ ID NO: 1390614 - RNA, 19 nt, Artificial Sequence
  Description of Artificial Sequence: Synthetic oligonucleotide
  Sense strand starting at position 2870 of SEQ ID NO: 1243041
ugccaacgacaguguaaau

SEQ ID NO: 1390615 - RNA, 19 nt, Artificial Sequence
  Description of Artificial Sequence: Synthetic oligonucleotide
  Antisense strand to SEQ ID NO: 1390614
auuuacacugucguuggca

SEQ ID NO: 1390616 - RNA, 19 nt, Artificial Sequence
  Description of Artificial Sequence: Synthetic oligonucleotide
  Sense strand starting at position 2910 of SEQ ID NO: 1243041
gcaaucuggcaacauguuu

SEQ ID NO: 1390617 - RNA, 19 nt, Artificial Sequence
  Description of Artificial Sequence: Synthetic oligonucleotide
  Antisense strand to SEQ ID NO: 1390616
aaacauguugccagauugc

SEQ ID NO: 1390618 - RNA, 19 nt, Artificial Sequence
  Description of Artificial Sequence: Synthetic oligonucleotide
  Sense strand starting at position 2915 of SEQ ID NO: 1243041
cuggcaacauguuuagaaa

SEQ ID NO: 1390619 - RNA, 19 nt, Artificial Sequence
  Description of Artificial Sequence: Synthetic oligonucleotide
  Antisense strand to SEQ ID NO: 1390618
uuucuaaacauguugccag

SEQ ID NO: 1390620 - RNA, 19 nt, Artificial Sequence
  Description of Artificial Sequence: Synthetic oligonucleotide
  Sense strand starting at position 3134 of SEQ ID NO: 1243041
acaggcucucaguggaaua

SEQ ID NO: 1390621 - RNA, 19 nt, Artificial Sequence
  Description of Artificial Sequence: Synthetic oligonucleotide
  Antisense strand to SEQ ID NO: 1390620
uauuccacugagagccugu

SEQ ID NO: 1390622 - RNA, 19 nt, Artificial Sequence
  Description of Artificial Sequence: Synthetic oligonucleotide
  Sense strand starting at position 3136 of SEQ ID NO: 1243041
aggcucucaguggaauauu

SEQ ID NO: 1390623 - RNA, 19 nt, Artificial Sequence
  Description of Artificial Sequence: Synthetic oligonucleotide
  Antisense strand to SEQ ID NO: 1390622
aauauuccacugagagccu

SEQ ID NO: 1390624 - RNA, 19 nt, Artificial Sequence
  Description of Artificial Sequence: Synthetic oligonucleotide
  Sense strand starting at position 3406 of SEQ ID NO: 1243041
gaaugugaccuuggcuuua

SEQ ID NO: 1390625 - RNA, 19 nt, Artificial Sequence
  Description of Artificial Sequence: Synthetic oligonucleotide
  Antisense strand to SEQ ID NO: 1390624
uaaagccaaggucacauuc

SEQ ID NO: 1390626 - RNA, 19 nt, Artificial Sequence
  Description of Artificial Sequence: Synthetic oligonucleotide
  Sense strand starting at position 3411 of SEQ ID NO: 1243041
ugaccuuggcuuuauccua

SEQ ID NO: 1390627 - RNA, 19 nt, Artificial Sequence
  Description of Artificial Sequence: Synthetic oligonucleotide
  Antisense strand to SEQ ID NO: 1390626
uaggauaaagccaagguca

SEQ ID NO: 1390628 - RNA, 19 nt, Artificial Sequence
  Description of Artificial Sequence: Synthetic oligonucleotide
  Sense strand starting at position 3418 of SEQ ID NO: 1243041
ggcuuuauccuaugauguc

SEQ ID NO: 1390629 - RNA, 19 nt, Artificial Sequence
  Description of Artificial Sequence: Synthetic oligonucleotide
  Antisense strand to SEQ ID NO: 1390628
gacaucauaggauaaagcc

SEQ ID NO: 1390630 - RNA, 19 nt, Artificial Sequence
  Description of Artificial Sequence: Synthetic oligonucleotide
  Sense strand starting at position 3425 of SEQ ID NO: 1243041
uccuaugaugucugcacuu

SEQ ID NO: 1390631 - RNA, 19 nt, Artificial Sequence
  Description of Artificial Sequence: Synthetic oligonucleotide
  Antisense strand to SEQ ID NO: 1390630
aagugcagacaucauagga

SEQ ID NO: 1390632 - RNA, 19 nt, Artificial Sequence
  Description of Artificial Sequence: Synthetic oligonucleotide
  Sense strand starting at position 3697 of SEQ ID NO: 1243041
ugcagcuuguguuugcaga

SEQ ID NO: 1390633 - RNA, 19 nt, Artificial Sequence
  Description of Artificial Sequence: Synthetic oligonucleotide
  Antisense strand to SEQ ID NO: 1390632
ucugcaaacacaagcugca

SEQ ID NO: 1390634 - RNA, 19 nt, Artificial Sequence
  Description of Artificial Sequence: Synthetic oligonucleotide
  Sense strand starting at position 3698 of SEQ ID NO: 1243041
gcagcuuguguuugcagaa

SEQ ID NO: 1390635 - RNA, 19 nt, Artificial Sequence
  Description of Artificial Sequence: Synthetic oligonucleotide
  Antisense strand to SEQ ID NO: 1390634
uucugcaaacacaagcugc

SEQ ID NO: 1390636 - RNA, 19 nt, Artificial Sequence
  Description of Artificial Sequence: Synthetic oligonucleotide
  Sense strand starting at position 3699 of SEQ ID NO: 1243041
cagcuuguguuugcagaaa

SEQ ID NO: 1390637 - RNA, 19 nt, Artificial Sequence
  Description of Artificial Sequence: Synthetic oligonucleotide
  Antisense strand to SEQ ID NO: 1390636
uuucugcaaacacaagcug

SEQ ID NO: 1390638 - RNA, 19 nt, Artificial Sequence
  Description of Artificial Sequence: Synthetic oligonucleotide
  Sense strand starting at position 3717 of SEQ ID NO: 1243041
augccaauugugugccaga

SEQ ID NO: 1390639 - RNA, 19 nt, Artificial Sequence
  Description of Artificial Sequence: Synthetic oligonucleotide
  Antisense strand to SEQ ID NO: 1390638
ucuggcacacaauuggcau

SEQ ID NO: 1390640 - RNA, 19 nt, Artificial Sequence
  Description of Artificial Sequence: Synthetic oligonucleotide
  Sense strand starting at position 3718 of SEQ ID NO: 1243041
ugccaauugugugccagau

SEQ ID NO: 1390641 - RNA, 19 nt, Artificial Sequence
  Description of Artificial Sequence: Synthetic oligonucleotide
  Antisense strand to SEQ ID NO: 1390640
aucuggcacacaauuggca

SEQ ID NO: 1390642 - RNA, 19 nt, Artificial Sequence
  Description of Artificial Sequence: Synthetic oligonucleotide
  Sense strand starting at position 3750 of SEQ ID NO: 1243041
ugcuaugugcuugcuccaa

SEQ ID NO: 1390643 - RNA, 19 nt, Artificial Sequence
  Description of Artificial Sequence: Synthetic oligonucleotide
  Antisense strand to SEQ ID NO: 1390642
uuggagcaagcacauagca

SEQ ID NO: 1390644 - RNA, 19 nt, Artificial Sequence
  Description of Artificial Sequence: Synthetic oligonucleotide
  Sense strand starting at position 3754 of SEQ ID NO: 1243041
augugcuugcuccaauuua

SEQ ID NO: 1390645 - RNA, 19 nt, Artificial Sequence
  Description of Artificial Sequence: Synthetic oligonucleotide
  Antisense strand to SEQ ID NO: 1390644
uaaauuggagcaagcacau

SEQ ID NO: 1390646 - RNA, 19 nt, Artificial Sequence
  Description of Artificial Sequence: Synthetic oligonucleotide
  Sense strand starting at position 3779 of SEQ ID NO: 1243041
accauaacucaauggguua

SEQ ID NO: 1390647 - RNA, 19 nt, Artificial Sequence
  Description of Artificial Sequence: Synthetic oligonucleotide
  Antisense strand to SEQ ID NO: 1390646
uaacccauugaguuauggu

SEQ ID NO: 1390648 - RNA, 19 nt, Artificial Sequence
  Description of Artificial Sequence: Synthetic oligonucleotide
  Sense strand starting at position 3857 of SEQ ID NO: 1243041
gccagugaaugagcucaaa

SEQ ID NO: 1390649 - RNA, 19 nt, Artificial Sequence
  Description of Artificial Sequence: Synthetic oligonucleotide
  Antisense strand to SEQ ID NO: 1390648
uuugagcucauucacuggc

SEQ ID NO: 1390650 - RNA, 19 nt, Artificial Sequence
  Description of Artificial Sequence: Synthetic oligonucleotide
  Sense strand starting at position 287 of SEQ ID NO: 1243042
ucaugcgaagcauauuaaa

SEQ ID NO: 1390651 - RNA, 19 nt, Artificial Sequence
  Description of Artificial Sequence: Synthetic oligonucleotide
  Antisense strand to SEQ ID NO: 1390650
uuuaauaugcuucgcauga

SEQ ID NO: 1390652 - RNA, 19 nt, Artificial Sequence
  Description of Artificial Sequence: Synthetic oligonucleotide
  Sense strand starting at position 470 of SEQ ID NO: 1243042
cucuuucuuccaggugauc

SEQ ID NO: 1390653 - RNA, 19 nt, Artificial Sequence
  Description of Artificial Sequence: Synthetic oligonucleotide
  Antisense strand to SEQ ID NO: 1390652
gaucaccuggaagaaagag

SEQ ID NO: 1390654 - RNA, 19 nt, Artificial Sequence
  Description of Artificial Sequence: Synthetic oligonucleotide
  Sense strand starting at position 785 of SEQ ID NO: 1243042
aucaaaguuccugguaaga

SEQ ID NO: 1390655 - RNA, 19 nt, Artificial Sequence
  Description of Artificial Sequence: Synthetic oligonucleotide
  Antisense strand to SEQ ID NO: 1390654
ucuuaccaggaacuuugau

SEQ ID NO: 1390656 - RNA, 19 nt, Artificial Sequence
  Description of Artificial Sequence: Synthetic oligonucleotide
  Sense strand starting at position 794 of SEQ ID NO: 1243042
ccugguaagaaagguuuga

SEQ ID NO: 1390657 - RNA, 19 nt, Artificial Sequence
  Description of Artificial Sequence: Synthetic oligonucleotide
  Antisense strand to SEQ ID NO: 1390656
ucaaaccuuucuuaccagg

SEQ ID NO: 1390658 - RNA, 19 nt, Artificial Sequence
  Description of Artificial Sequence: Synthetic oligonucleotide
  Sense strand starting at position 814 of SEQ ID NO: 1243042
ugcuacugucaguaauauu

SEQ ID NO: 1390659 - RNA, 19 nt, Artificial Sequence
  Description of Artificial Sequence: Synthetic oligonucleotide
  Antisense strand to SEQ ID NO: 1390658
aauauuacugacaguagca

SEQ ID NO: 1390660 - RNA, 19 nt, Artificial Sequence
  Description of Artificial Sequence: Synthetic oligonucleotide
  Sense strand starting at position 861 of SEQ ID NO: 1243042
guuuaaauccagugacuuu

SEQ ID NO: 1390661 - RNA, 19 nt, Artificial Sequence
  Description of Artificial Sequence: Synthetic oligonucleotide
  Antisense strand to SEQ ID NO: 1390660
aaagucacuggauuuaaac

SEQ ID NO: 1390662 - RNA, 19 nt, Artificial Sequence
  Description of Artificial Sequence: Synthetic oligonucleotide
  Sense strand starting at position 879 of SEQ ID NO: 1243042
uccucuggcuaucuugaga

SEQ ID NO: 1390663 - RNA, 19 nt, Artificial Sequence
  Description of Artificial Sequence: Synthetic oligonucleotide
  Antisense strand to SEQ ID NO: 1390662
ucucaagauagccagagga

SEQ ID NO: 1390664 - RNA, 19 nt, Artificial Sequence
  Description of Artificial Sequence: Synthetic oligonucleotide
  Sense strand starting at position 892 of SEQ ID NO: 1243042
uugagaagaucugauagga

SEQ ID NO: 1390665 - RNA, 19 nt, Artificial Sequence
  Description of Artificial Sequence: Synthetic oligonucleotide
  Antisense strand to SEQ ID NO: 1390664
uccuaucagaucuucucaa

SEQ ID NO: 1390666 - RNA, 19 nt, Artificial Sequence
  Description of Artificial Sequence: Synthetic oligonucleotide
  Sense strand starting at position 897 of SEQ ID NO: 1243042
aagaucugauaggagagua

SEQ ID NO: 1390667 - RNA, 19 nt, Artificial Sequence
  Description of Artificial Sequence: Synthetic oligonucleotide
  Antisense strand to SEQ ID NO: 1390666
uacucuccuaucagaucuu

SEQ ID NO: 1390668 - RNA, 19 nt, Artificial Sequence
  Description of Artificial Sequence: Synthetic oligonucleotide
  Sense strand starting at position 905 of SEQ ID NO: 1243042
auaggagaguaucuaacuu

SEQ ID NO: 1390669 - RNA, 19 nt, Artificial Sequence
  Description of Artificial Sequence: Synthetic oligonucleotide
  Antisense strand to SEQ ID NO: 1390668
aaguuagauacucuccuau

SEQ ID NO: 1390670 - RNA, 19 nt, Artificial Sequence
  Description of Artificial Sequence: Synthetic oligonucleotide
  Sense strand starting at position 1240 of SEQ ID NO: 1243042
acuguaugucuauauuacu

SEQ ID NO: 1390671 - RNA, 19 nt, Artificial Sequence
  Description of Artificial Sequence: Synthetic oligonucleotide
  Antisense strand to SEQ ID NO: 1390670
aguaauauagacauacagu

SEQ ID NO: 1390672 - RNA, 19 nt, Artificial Sequence
  Description of Artificial Sequence: Synthetic oligonucleotide
  Sense strand starting at position 1284 of SEQ ID NO: 1243042
aauaguuacuaggugaaau

SEQ ID NO: 1390673 - RNA, 19 nt, Artificial Sequence
  Description of Artificial Sequence: Synthetic oligonucleotide
  Antisense strand to SEQ ID NO: 1390672
auuucaccuaguaacuauu

SEQ ID NO: 1390674 - RNA, 19 nt, Artificial Sequence
  Description of Artificial Sequence: Synthetic oligonucleotide
  Sense strand starting at position 1736 of SEQ ID NO: 1243042
uguuccaauuugcugauau

SEQ ID NO: 1390675 - RNA, 19 nt, Artificial Sequence
  Description of Artificial Sequence: Synthetic oligonucleotide
  Antisense strand to SEQ ID NO: 1390674
auaucagcaaauuggaaca

SEQ ID NO: 1390676 - RNA, 19 nt, Artificial Sequence
  Description of Artificial Sequence: Synthetic oligonucleotide
  Sense strand starting at position 1802 of SEQ ID NO: 1243042
agcucaaauuugcuugagu

SEQ ID NO: 1390677 - RNA, 19 nt, Artificial Sequence
  Description of Artificial Sequence: Synthetic oligonucleotide
  Antisense strand to SEQ ID NO: 1390676
acucaagcaaauuugagcu

SEQ ID NO: 1390678 - RNA, 19 nt, Artificial Sequence
  Description of Artificial Sequence: Synthetic oligonucleotide
  Sense strand starting at position 1803 of SEQ ID NO: 1243042
gcucaaauuugcuugaguu

SEQ ID NO: 1390679 - RNA, 19 nt, Artificial Sequence
  Description of Artificial Sequence: Synthetic oligonucleotide
  Antisense strand to SEQ ID NO: 1390678
aacucaagcaaauuugagc

SEQ ID NO: 1390680 - RNA, 19 nt, Artificial Sequence
  Description of Artificial Sequence: Synthetic oligonucleotide
  Sense strand starting at position 1804 of SEQ ID NO: 1243042
cucaaauuugcuugaguuu

SEQ ID NO: 1390681 - RNA, 19 nt, Artificial Sequence
  Description of Artificial Sequence: Synthetic oligonucleotide
  Antisense strand to SEQ ID NO: 1390680
aaacucaagcaaauuugag

SEQ ID NO: 1390682 - RNA, 19 nt, Artificial Sequence
  Description of Artificial Sequence: Synthetic oligonucleotide
  Sense strand starting at position 1880 of SEQ ID NO: 1243042
uccuguaaaucuucuaggu

SEQ ID NO: 1390683 - RNA, 19 nt, Artificial Sequence
  Description of Artificial Sequence: Synthetic oligonucleotide
  Antisense strand to SEQ ID NO: 1390682
accuagaagauuuacagga

SEQ ID NO: 1390684 - RNA, 19 nt, Artificial Sequence
  Description of Artificial Sequence: Synthetic oligonucleotide
  Sense strand starting at position 2186 of SEQ ID NO: 1243042
gaauccuauugggaggaau

SEQ ID NO: 1390685 - RNA, 19 nt, Artificial Sequence
  Description of Artificial Sequence: Synthetic oligonucleotide
  Antisense strand to SEQ ID NO: 1390684
auuccucccaauaggauuc

SEQ ID NO: 1390686 - RNA, 19 nt, Artificial Sequence
  Description of Artificial Sequence: Synthetic oligonucleotide
  Sense strand starting at position 2373 of SEQ ID NO: 1243042
ucaaguauuugugaaucag

SEQ ID NO: 1390687 - RNA, 19 nt, Artificial Sequence
  Description of Artificial Sequence: Synthetic oligonucleotide
  Antisense strand to SEQ ID NO: 1390686
cugauucacaaauacuuga

SEQ ID NO: 1390688 - RNA, 19 nt, Artificial Sequence
  Description of Artificial Sequence: Synthetic oligonucleotide
  Sense strand starting at position 2423 of SEQ ID NO: 1243042
aaaucuguuugcuuggaga

SEQ ID NO: 1390689 - RNA, 19 nt, Artificial Sequence
  Description of Artificial Sequence: Synthetic oligonucleotide
  Antisense strand to SEQ ID NO: 1390688
ucuccaagcaaacagauuu

SEQ ID NO: 1390690 - RNA, 19 nt, Artificial Sequence
  Description of Artificial Sequence: Synthetic oligonucleotide
  Sense strand starting at position 2425 of SEQ ID NO: 1243042
aucuguuugcuuggagaua

SEQ ID NO: 1390691 - RNA, 19 nt, Artificial Sequence
  Description of Artificial Sequence: Synthetic oligonucleotide
  Antisense strand to SEQ ID NO: 1390690
uaucuccaagcaaacagau

SEQ ID NO: 1390692 - RNA, 19 nt, Artificial Sequence
  Description of Artificial Sequence: Synthetic oligonucleotide
  Sense strand starting at position 2680 of SEQ ID NO: 1243042
cuugguaggccugaggaau

SEQ ID NO: 1390693 - RNA, 19 nt, Artificial Sequence
  Description of Artificial Sequence: Synthetic oligonucleotide
  Antisense strand to SEQ ID NO: 1390692
auuccucaggccuaccaag

SEQ ID NO: 1390694 - RNA, 19 nt, Artificial Sequence
  Description of Artificial Sequence: Synthetic oligonucleotide
  Sense strand starting at position 2782 of SEQ ID NO: 1243042
aggguaagaguuugccauu

SEQ ID NO: 1390695 - RNA, 19 nt, Artificial Sequence
  Description of Artificial Sequence: Synthetic oligonucleotide
  Antisense strand to SEQ ID NO: 1390694
aauggcaaacucuuacccu

SEQ ID NO: 1390696 - RNA, 19 nt, Artificial Sequence
  Description of Artificial Sequence: Synthetic oligonucleotide
  Sense strand starting at position 3163 of SEQ ID NO: 1243042
cagaguauagguggguaga

SEQ ID NO: 1390697 - RNA, 19 nt, Artificial Sequence
  Description of Artificial Sequence: Synthetic oligonucleotide
  Antisense strand to SEQ ID NO: 1390696
ucuacccaccuauacucug

SEQ ID NO: 1390698 - RNA, 19 nt, Artificial Sequence
  Description of Artificial Sequence: Synthetic oligonucleotide
  Sense strand starting at position 3164 of SEQ ID NO: 1243042
agaguauagguggguagaa

SEQ ID NO: 1390699 - RNA, 19 nt, Artificial Sequence
  Description of Artificial Sequence: Synthetic oligonucleotide
  Antisense strand to SEQ ID NO: 1390698
uucuacccaccuauacucu

SEQ ID NO: 1390700 - RNA, 19 nt, Artificial Sequence
  Description of Artificial Sequence: Synthetic oligonucleotide
  Sense strand starting at position 3209 of SEQ ID NO: 1243042
gugaauuugcgaugcugag

SEQ ID NO: 1390701 - RNA, 19 nt, Artificial Sequence
  Description of Artificial Sequence: Synthetic oligonucleotide
  Antisense strand to SEQ ID NO: 1390700
cucagcaucgcaaauucac

SEQ ID NO: 1390702 - RNA, 19 nt, Artificial Sequence
  Description of Artificial Sequence: Synthetic oligonucleotide
  Sense strand starting at position 3218 of SEQ ID NO: 1243042
cgaugcugagaguaccaaa

SEQ ID NO: 1390703 - RNA, 19 nt, Artificial Sequence
  Description of Artificial Sequence: Synthetic oligonucleotide
  Antisense strand to SEQ ID NO: 1390702
uuugguacucucagcaucg

SEQ ID NO: 1390704 - RNA, 19 nt, Artificial Sequence
  Description of Artificial Sequence: Synthetic oligonucleotide
  Sense strand starting at position 3343 of SEQ ID NO: 1243042
gagguuggaguuugaaaua

SEQ ID NO: 1390705 - RNA, 19 nt, Artificial Sequence
  Description of Artificial Sequence: Synthetic oligonucleotide
  Antisense strand to SEQ ID NO: 1390704
uauuucaaacuccaaccuc

SEQ ID NO: 1390706 - RNA, 19 nt, Artificial Sequence
  Description of Artificial Sequence: Synthetic oligonucleotide
  Sense strand starting at position 3523 of SEQ ID NO: 1243042
gguaaauacugagugcuuu

SEQ ID NO: 1390707 - RNA, 19 nt, Artificial Sequence
  Description of Artificial Sequence: Synthetic oligonucleotide
  Antisense strand to SEQ ID NO: 1390706
aaagcacucaguauuuacc

SEQ ID NO: 1390708 - RNA, 19 nt, Artificial Sequence
  Description of Artificial Sequence: Synthetic oligonucleotide
  Sense strand starting at position 3524 of SEQ ID NO: 1243042
guaaauacugagugcuuua

SEQ ID NO: 1390709 - RNA, 19 nt, Artificial Sequence
  Description of Artificial Sequence: Synthetic oligonucleotide
  Antisense strand to SEQ ID NO: 1390708
uaaagcacucaguauuuac

SEQ ID NO: 1390710 - RNA, 19 nt, Artificial Sequence
  Description of Artificial Sequence: Synthetic oligonucleotide
  Sense strand starting at position 3527 of SEQ ID NO: 1243042
aauacugagugcuuuagga

SEQ ID NO: 1390711 - RNA, 19 nt, Artificial Sequence
  Description of Artificial Sequence: Synthetic oligonucleotide
  Antisense strand to SEQ ID NO: 1390710
uccuaaagcacucaguauu

SEQ ID NO: 1390712 - RNA, 19 nt, Artificial Sequence
  Description of Artificial Sequence: Synthetic oligonucleotide
  Sense strand starting at position 3529 of SEQ ID NO: 1243042
uacugagugcuuuaggagu

SEQ ID NO: 1390713 - RNA, 19 nt, Artificial Sequence
  Description of Artificial Sequence: Synthetic oligonucleotide
  Antisense strand to SEQ ID NO: 1390712
acuccuaaagcacucagua

SEQ ID NO: 1390714 - RNA, 19 nt, Artificial Sequence
  Description of Artificial Sequence: Synthetic oligonucleotide
  Sense strand starting at position 3535 of SEQ ID NO: 1243042
gugcuuuaggaguacauag

SEQ ID NO: 1390715 - RNA, 19 nt, Artificial Sequence
  Description of Artificial Sequence: Synthetic oligonucleotide
  Antisense strand to SEQ ID NO: 1390714
cuauguacuccuaaagcac

SEQ ID NO: 1390716 - RNA, 19 nt, Artificial Sequence
  Description of Artificial Sequence: Synthetic oligonucleotide
  Sense strand starting at position 3587 of SEQ ID NO: 1243042
ggguauggcggcaguaaua

SEQ ID NO: 1390717 - RNA, 19 nt, Artificial Sequence
  Description of Artificial Sequence: Synthetic oligonucleotide
  Antisense strand to SEQ ID NO: 1390716
uauuacugccgccauaccc

SEQ ID NO: 1390718 - RNA, 19 nt, Artificial Sequence
  Description of Artificial Sequence: Synthetic oligonucleotide
  Sense strand starting at position 3619 of SEQ ID NO: 1243042
gcuucuaggcguuaauaac

SEQ ID NO: 1390719 - RNA, 19 nt, Artificial Sequence
  Description of Artificial Sequence: Synthetic oligonucleotide
  Antisense strand to SEQ ID NO: 1390718
guuauuaacgccuagaagc

SEQ ID NO: 1390720 - RNA, 19 nt, Artificial Sequence
  Description of Artificial Sequence: Synthetic oligonucleotide
  Sense strand starting at position 3627 of SEQ ID NO: 1243042
gcguuaauaacugagguua

SEQ ID NO: 1390721 - RNA, 19 nt, Artificial Sequence
  Description of Artificial Sequence: Synthetic oligonucleotide
  Antisense strand to SEQ ID NO: 1390720
uaaccucaguuauuaacgc

SEQ ID NO: 1390722 - RNA, 19 nt, Artificial Sequence
  Description of Artificial Sequence: Synthetic oligonucleotide
  Sense strand starting at position 3639 of SEQ ID NO: 1243042
gagguuauuugguggauuu

SEQ ID NO: 1390723 - RNA, 19 nt, Artificial Sequence
  Description of Artificial Sequence: Synthetic oligonucleotide
  Antisense strand to SEQ ID NO: 1390722
aaauccaccaaauaaccuc

SEQ ID NO: 1390724 - RNA, 19 nt, Artificial Sequence
  Description of Artificial Sequence: Synthetic oligonucleotide
  Sense strand starting at position 3671 of SEQ ID NO: 1243042
cugagagagccauacugua

SEQ ID NO: 1390725 - RNA, 19 nt, Artificial Sequence
  Description of Artificial Sequence: Synthetic oligonucleotide
  Antisense strand to SEQ ID NO: 1390724
uacaguauggcucucucag

SEQ ID NO: 1390726 - RNA, 19 nt, Artificial Sequence
  Description of Artificial Sequence: Synthetic oligonucleotide
  Sense strand starting at position 3713 of SEQ ID NO: 1243042
ugugauagccuaggaaagu

SEQ ID NO: 1390727 - RNA, 19 nt, Artificial Sequence
  Description of Artificial Sequence: Synthetic oligonucleotide
  Antisense strand to SEQ ID NO: 1390726
acuuuccuaggcuaucaca

SEQ ID NO: 1390728 - RNA, 19 nt, Artificial Sequence
  Description of Artificial Sequence: Synthetic oligonucleotide
  Sense strand starting at position 3949 of SEQ ID NO: 1243042
gggcuauggcuguccgcaa

SEQ ID NO: 1390729 - RNA, 19 nt, Artificial Sequence
  Description of Artificial Sequence: Synthetic oligonucleotide
  Antisense strand to SEQ ID NO: 1390728
uugcggacagccauagccc

SEQ ID NO: 1390730 - RNA, 19 nt, Artificial Sequence
  Description of Artificial Sequence: Synthetic oligonucleotide
  Sense strand starting at position 428 of SEQ ID NO: 1243043
ggcggugcuccuucucaau

SEQ ID NO: 1390731 - RNA, 19 nt, Artificial Sequence
  Description of Artificial Sequence: Synthetic oligonucleotide
  Antisense strand to SEQ ID NO: 1390730
auugagaaggagcaccgcc

SEQ ID NO: 1390732 - RNA, 19 nt, Artificial Sequence
  Description of Artificial Sequence: Synthetic oligonucleotide
  Sense strand starting at position 556 of SEQ ID NO: 1243043
acuccuugcuucgcagaca

SEQ ID NO: 1390733 - RNA, 19 nt, Artificial Sequence
  Description of Artificial Sequence: Synthetic oligonucleotide
  Antisense strand to SEQ ID NO: 1390732
ugucugcgaagcaaggagu

SEQ ID NO: 1390734 - RNA, 19 nt, Artificial Sequence
  Description of Artificial Sequence: Synthetic oligonucleotide
  Sense strand starting at position 1318 of SEQ ID NO: 1243043
ccuccaagguccugggauu

SEQ ID NO: 1390735 - RNA, 19 nt, Artificial Sequence
  Description of Artificial Sequence: Synthetic oligonucleotide
  Antisense strand to SEQ ID NO: 1390734
aaucccaggaccuuggagg

SEQ ID NO: 1390736 - RNA, 19 nt, Artificial Sequence
  Description of Artificial Sequence: Synthetic oligonucleotide
  Sense strand starting at position 1515 of SEQ ID NO: 1243043
gggaucaccugcucaucaa

SEQ ID NO: 1390737 - RNA, 19 nt, Artificial Sequence
  Description of Artificial Sequence: Synthetic oligonucleotide
  Antisense strand to SEQ ID NO: 1390736
uugaugagcaggugauccc

SEQ ID NO: 1390738 - RNA, 19 nt, Artificial Sequence
  Description of Artificial Sequence: Synthetic oligonucleotide
  Sense strand starting at position 1516 of SEQ ID NO: 1243043
ggaucaccugcucaucaaa

SEQ ID NO: 1390739 - RNA, 19 nt, Artificial Sequence
  Description of Artificial Sequence: Synthetic oligonucleotide
  Antisense strand to SEQ ID NO: 1390738
uuugaugagcaggugaucc

SEQ ID NO: 1390740 - RNA, 19 nt, Artificial Sequence
  Description of Artificial Sequence: Synthetic oligonucleotide
  Sense strand starting at position 1585 of SEQ ID NO: 1243043
gccugagguguccaaacau

SEQ ID NO: 1390741 - RNA, 19 nt, Artificial Sequence
  Description of Artificial Sequence: Synthetic oligonucleotide
  Antisense strand to SEQ ID NO: 1390740
auguuuggacaccucaggc

SEQ ID NO: 1390742 - RNA, 19 nt, Artificial Sequence
  Description of Artificial Sequence: Synthetic oligonucleotide
  Sense strand starting at position 1594 of SEQ ID NO: 1243043
guccaaacaucguggaguu

SEQ ID NO: 1390743 - RNA, 19 nt, Artificial Sequence
  Description of Artificial Sequence: Synthetic oligonucleotide
  Antisense strand to SEQ ID NO: 1390742
aacuccacgauguuuggac

SEQ ID NO: 1390744 - RNA, 19 nt, Artificial Sequence
  Description of Artificial Sequence: Synthetic oligonucleotide
  Sense strand starting at position 1685 of SEQ ID NO: 1243043
gcccguguucugagggcua

SEQ ID NO: 1390745 - RNA, 19 nt, Artificial Sequence
  Description of Artificial Sequence: Synthetic oligonucleotide
  Antisense strand to SEQ ID NO: 1390744
uagcccucagaacacgggc

SEQ ID NO: 1390746 - RNA, 19 nt, Artificial Sequence
  Description of Artificial Sequence: Synthetic oligonucleotide
  Sense strand starting at position 1690 of SEQ ID NO: 1243043
uguucugagggcuaagaca

SEQ ID NO: 1390747 - RNA, 19 nt, Artificial Sequence
  Description of Artificial Sequence: Synthetic oligonucleotide
  Antisense strand to SEQ ID NO: 1390746
ugucuuagcccucagaaca

SEQ ID NO: 1390748 - RNA, 19 nt, Artificial Sequence
  Description of Artificial Sequence: Synthetic oligonucleotide
  Sense strand starting at position 1766 of SEQ ID NO: 1243043
acgguugaagagugggaaa

SEQ ID NO: 1390749 - RNA, 19 nt, Artificial Sequence
  Description of Artificial Sequence: Synthetic oligonucleotide
  Antisense strand to SEQ ID NO: 1390748
uuucccacucuucaaccgu

SEQ ID NO: 1390750 - RNA, 19 nt, Artificial Sequence
  Description of Artificial Sequence: Synthetic oligonucleotide
  Sense strand starting at position 2038 of SEQ ID NO: 1243043
gggaguuuaugacaucaca

SEQ ID NO: 1390751 - RNA, 19 nt, Artificial Sequence
  Description of Artificial Sequence: Synthetic oligonucleotide
  Antisense strand to SEQ ID NO: 1390750
ugugaugucauaaacuccc

SEQ ID NO: 1390752 - RNA, 19 nt, Artificial Sequence
  Description of Artificial Sequence: Synthetic oligonucleotide
  Sense strand starting at position 2474 of SEQ ID NO: 1243043
uccacagguuuccaagaga

SEQ ID NO: 1390753 - RNA, 19 nt, Artificial Sequence
  Description of Artificial Sequence: Synthetic oligonucleotide
  Antisense strand to SEQ ID NO: 1390752
ucucuuggaaaccugugga

SEQ ID NO: 1390754 - RNA, 19 nt, Artificial Sequence
  Description of Artificial Sequence: Synthetic oligonucleotide
  Sense strand starting at position 2564 of SEQ ID NO: 1243043
uuuacaaguuugccugaga

SEQ ID NO: 1390755 - RNA, 19 nt, Artificial Sequence
  Description of Artificial Sequence: Synthetic oligonucleotide
  Antisense strand to SEQ ID NO: 1390754
ucucaggcaaacuuguaaa

SEQ ID NO: 1390756 - RNA, 19 nt, Artificial Sequence
  Description of Artificial Sequence: Synthetic oligonucleotide
  Sense strand starting at position 2565 of SEQ ID NO: 1243043
uuacaaguuugccugagac

SEQ ID NO: 1390757 - RNA, 19 nt, Artificial Sequence
  Description of Artificial Sequence: Synthetic oligonucleotide
  Antisense strand to SEQ ID NO: 1390756
gucucaggcaaacuuguaa

SEQ ID NO: 1390758 - RNA, 19 nt, Artificial Sequence
  Description of Artificial Sequence: Synthetic oligonucleotide
  Sense strand starting at position 2567 of SEQ ID NO: 1243043
acaaguuugccugagacca

SEQ ID NO: 1390759 - RNA, 19 nt, Artificial Sequence
  Description of Artificial Sequence: Synthetic oligonucleotide
  Antisense strand to SEQ ID NO: 1390758
uggucucaggcaaacuugu

SEQ ID NO: 1390760 - RNA, 19 nt, Artificial Sequence
  Description of Artificial Sequence: Synthetic oligonucleotide
  Sense strand starting at position 2569 of SEQ ID NO: 1243043
aaguuugccugagaccauu

SEQ ID NO: 1390761 - RNA, 19 nt, Artificial Sequence
  Description of Artificial Sequence: Synthetic oligonucleotide
  Antisense strand to SEQ ID NO: 1390760
aauggucucaggcaaacuu

SEQ ID NO: 1390762 - RNA, 19 nt, Artificial Sequence
  Description of Artificial Sequence: Synthetic oligonucleotide
  Sense strand starting at position 2593 of SEQ ID NO: 1243043
ggucauucaggugaucaug

SEQ ID NO: 1390763 - RNA, 19 nt, Artificial Sequence
  Description of Artificial Sequence: Synthetic oligonucleotide
  Antisense strand to SEQ ID NO: 1390762
caugaucaccugaaugacc

SEQ ID NO: 1390764 - RNA, 19 nt, Artificial Sequence
  Description of Artificial Sequence: Synthetic oligonucleotide
  Sense strand starting at position 3272 of SEQ ID NO: 1243043
uacaucuuguuacuggaga

SEQ ID NO: 1390765 - RNA, 19 nt, Artificial Sequence
  Description of Artificial Sequence: Synthetic oligonucleotide
  Antisense strand to SEQ ID NO: 1390764
ucuccaguaacaagaugua

SEQ ID NO: 1390766 - RNA, 19 nt, Artificial Sequence
  Description of Artificial Sequence: Synthetic oligonucleotide
  Sense strand starting at position 3273 of SEQ ID NO: 1243043
acaucuuguuacuggagaa

SEQ ID NO: 1390767 - RNA, 19 nt, Artificial Sequence
  Description of Artificial Sequence: Synthetic oligonucleotide
  Antisense strand to SEQ ID NO: 1390766
uucuccaguaacaagaugu

SEQ ID NO: 1390768 - RNA, 19 nt, Artificial Sequence
  Description of Artificial Sequence: Synthetic oligonucleotide
  Sense strand starting at position 3410 of SEQ ID NO: 1243043
auugaagaguugccacuuu

SEQ ID NO: 1390769 - RNA, 19 nt, Artificial Sequence
  Description of Artificial Sequence: Synthetic oligonucleotide
  Antisense strand to SEQ ID NO: 1390768
aaaguggcaacucuucaau

SEQ ID NO: 1390770 - RNA, 19 nt, Artificial Sequence
  Description of Artificial Sequence: Synthetic oligonucleotide
  Sense strand starting at position 3421 of SEQ ID NO: 1243043
gccacuuuauaccuaggau

SEQ ID NO: 1390771 - RNA, 19 nt, Artificial Sequence
  Description of Artificial Sequence: Synthetic oligonucleotide
  Antisense strand to SEQ ID NO: 1390770
auccuagguauaaaguggc

SEQ ID NO: 1390772 - RNA, 19 nt, Artificial Sequence
  Description of Artificial Sequence: Synthetic oligonucleotide
  Sense strand starting at position 3425 of SEQ ID NO: 1243043
cuuuauaccuaggauagag

SEQ ID NO: 1390773 - RNA, 19 nt, Artificial Sequence
  Description of Artificial Sequence: Synthetic oligonucleotide
  Antisense strand to SEQ ID NO: 1390772
cucuauccuagguauaaag

SEQ ID NO: 1390774 - RNA, 19 nt, Artificial Sequence
  Description of Artificial Sequence: Synthetic oligonucleotide
  Sense strand starting at position 3497 of SEQ ID NO: 1243043
ucagcauucuccugguaag

SEQ ID NO: 1390775 - RNA, 19 nt, Artificial Sequence
  Description of Artificial Sequence: Synthetic oligonucleotide
  Antisense strand to SEQ ID NO: 1390774
cuuaccaggagaaugcuga

SEQ ID NO: 1390776 - RNA, 19 nt, Artificial Sequence
  Description of Artificial Sequence: Synthetic oligonucleotide
  Sense strand starting at position 3500 of SEQ ID NO: 1243043
gcauucuccugguaagguu

SEQ ID NO: 1390777 - RNA, 19 nt, Artificial Sequence
  Description of Artificial Sequence: Synthetic oligonucleotide
  Antisense strand to SEQ ID NO: 1390776
aaccuuaccaggagaaugc

SEQ ID NO: 1390778 - RNA, 19 nt, Artificial Sequence
  Description of Artificial Sequence: Synthetic oligonucleotide
  Sense strand starting at position 3518 of SEQ ID NO: 1243043
ugauuagcucucggaagcu

SEQ ID NO: 1390779 - RNA, 19 nt, Artificial Sequence
  Description of Artificial Sequence: Synthetic oligonucleotide
  Antisense strand to SEQ ID NO: 1390778
agcuuccgagagcuaauca

SEQ ID NO: 1390780 - RNA, 19 nt, Artificial Sequence
  Description of Artificial Sequence: Synthetic oligonucleotide
  Sense strand starting at position 3530 of SEQ ID NO: 1243043
ggaagcugagcauauguuu

SEQ ID NO: 1390781 - RNA, 19 nt, Artificial Sequence
  Description of Artificial Sequence: Synthetic oligonucleotide
  Antisense strand to SEQ ID NO: 1390780
aaacauaugcucagcuucc

SEQ ID NO: 1390782 - RNA, 19 nt, Artificial Sequence
  Description of Artificial Sequence: Synthetic oligonucleotide
  Sense strand starting at position 3533 of SEQ ID NO: 1243043
agcugagcauauguuuaaa

SEQ ID NO: 1390783 - RNA, 19 nt, Artificial Sequence
  Description of Artificial Sequence: Synthetic oligonucleotide
  Antisense strand to SEQ ID NO: 1390782
uuuaaacauaugcucagcu

SEQ ID NO: 1390784 - RNA, 19 nt, Artificial Sequence
  Description of Artificial Sequence: Synthetic oligonucleotide
  Sense strand starting at position 3582 of SEQ ID NO: 1243043
auaguugcaucucagucua

SEQ ID NO: 1390785 - RNA, 19 nt, Artificial Sequence
  Description of Artificial Sequence: Synthetic oligonucleotide
  Antisense strand to SEQ ID NO: 1390784
uagacugagaugcaacuau

SEQ ID NO: 1390786 - RNA, 19 nt, Artificial Sequence
  Description of Artificial Sequence: Synthetic oligonucleotide
  Sense strand starting at position 3584 of SEQ ID NO: 1243043
aguugcaucucagucuaua

SEQ ID NO: 1390787 - RNA, 19 nt, Artificial Sequence
  Description of Artificial Sequence: Synthetic oligonucleotide
  Antisense strand to SEQ ID NO: 1390786
uauagacugagaugcaacu

SEQ ID NO: 1390788 - RNA, 19 nt, Artificial Sequence
  Description of Artificial Sequence: Synthetic oligonucleotide
  Sense strand starting at position 3670 of SEQ ID NO: 1243043
ugcagcauaucguaacaau

SEQ ID NO: 1390789 - RNA, 19 nt, Artificial Sequence
  Description of Artificial Sequence: Synthetic oligonucleotide
  Antisense strand to SEQ ID NO: 1390788
auuguuacgauaugcugca

SEQ ID NO: 1390790 - RNA, 19 nt, Artificial Sequence
  Description of Artificial Sequence: Synthetic oligonucleotide
  Sense strand starting at position 3679 of SEQ ID NO: 1243043
ucguaacaauuggauggua

SEQ ID NO: 1390791 - RNA, 19 nt, Artificial Sequence
  Description of Artificial Sequence: Synthetic oligonucleotide
  Antisense strand to SEQ ID NO: 1390790
uaccauccaauuguuacga

SEQ ID NO: 1390792 - RNA, 19 nt, Artificial Sequence
  Description of Artificial Sequence: Synthetic oligonucleotide
  Sense strand starting at position 3681 of SEQ ID NO: 1243043
guaacaauuggaugguaca

SEQ ID NO: 1390793 - RNA, 19 nt, Artificial Sequence
  Description of Artificial Sequence: Synthetic oligonucleotide
  Antisense strand to SEQ ID NO: 1390792
uguaccauccaauuguuac

SEQ ID NO: 1390794 - RNA, 19 nt, Artificial Sequence
  Description of Artificial Sequence: Synthetic oligonucleotide
  Sense strand starting at position 3682 of SEQ ID NO: 1243043
uaacaauuggaugguacau

SEQ ID NO: 1390795 - RNA, 19 nt, Artificial Sequence
  Description of Artificial Sequence: Synthetic oligonucleotide
  Antisense strand to SEQ ID NO: 1390794
auguaccauccaauuguua

SEQ ID NO: 1390796 - RNA, 19 nt, Artificial Sequence
  Description of Artificial Sequence: Synthetic oligonucleotide
  Sense strand starting at position 3684 of SEQ ID NO: 1243043
acaauuggaugguacauaa

SEQ ID NO: 1390797 - RNA, 19 nt, Artificial Sequence
  Description of Artificial Sequence: Synthetic oligonucleotide
  Antisense strand to SEQ ID NO: 1390796
uuauguaccauccaauugu

SEQ ID NO: 1390798 - RNA, 19 nt, Artificial Sequence
  Description of Artificial Sequence: Synthetic oligonucleotide
  Sense strand starting at position 3733 of SEQ ID NO: 1243043
guccucuauuaucccagua

SEQ ID NO: 1390799 - RNA, 19 nt, Artificial Sequence
  Description of Artificial Sequence: Synthetic oligonucleotide
  Antisense strand to SEQ ID NO: 1390798
uacugggauaauagaggac

SEQ ID NO: 1390800 - RNA, 19 nt, Artificial Sequence
  Description of Artificial Sequence: Synthetic oligonucleotide
  Sense strand starting at position 3738 of SEQ ID NO: 1243043
cuauuaucccaguacugca

SEQ ID NO: 1390801 - RNA, 19 nt, Artificial Sequence
  Description of Artificial Sequence: Synthetic oligonucleotide
  Antisense strand to SEQ ID NO: 1390800
ugcaguacugggauaauag

SEQ ID NO: 1390802 - RNA, 19 nt, Artificial Sequence
  Description of Artificial Sequence: Synthetic oligonucleotide
  Sense strand starting at position 3879 of SEQ ID NO: 1243043
gcugaaggcuaagaaguaa

SEQ ID NO: 1390803 - RNA, 19 nt, Artificial Sequence
  Description of Artificial Sequence: Synthetic oligonucleotide
  Antisense strand to SEQ ID NO: 1390802
uuacuucuuagccuucagc

SEQ ID NO: 1390804 - RNA, 19 nt, Artificial Sequence
  Description of Artificial Sequence: Synthetic oligonucleotide
  Sense strand starting at position 3961 of SEQ ID NO: 1243043
gggugcagcucugcuuaca

SEQ ID NO: 1390805 - RNA, 19 nt, Artificial Sequence
  Description of Artificial Sequence: Synthetic oligonucleotide
  Antisense strand to SEQ ID NO: 1390804
uguaagcagagcugcaccc

SEQ ID NO: 1390806 - RNA, 19 nt, Artificial Sequence
  Description of Artificial Sequence: Synthetic oligonucleotide
  Sense strand starting at position 3962 of SEQ ID NO: 1243043
ggugcagcucugcuuacau

SEQ ID NO: 1390807 - RNA, 19 nt, Artificial Sequence
  Description of Artificial Sequence: Synthetic oligonucleotide
  Antisense strand to SEQ ID NO: 1390806
auguaagcagagcugcacc

SEQ ID NO: 1390808 - RNA, 19 nt, Artificial Sequence
  Description of Artificial Sequence: Synthetic oligonucleotide
  Sense strand starting at position 333 of SEQ ID NO: 1243044
gagggugagccaugagaau

SEQ ID NO: 1390809 - RNA, 19 nt, Artificial Sequence
  Description of Artificial Sequence: Synthetic oligonucleotide
  Antisense strand to SEQ ID NO: 1390808
auucucauggcucacccuc

SEQ ID NO: 1390810 - RNA, 19 nt, Artificial Sequence
  Description of Artificial Sequence: Synthetic oligonucleotide
  Sense strand starting at position 494 of SEQ ID NO: 1243044
uuaagaucaugggugugaa

SEQ ID NO: 1390811 - RNA, 19 nt, Artificial Sequence
  Description of Artificial Sequence: Synthetic oligonucleotide
  Antisense strand to SEQ ID NO: 1390810
uucacacccaugaucuuaa

SEQ ID NO: 1390812 - RNA, 19 nt, Artificial Sequence
  Description of Artificial Sequence: Synthetic oligonucleotide
  Sense strand starting at position 495 of SEQ ID NO: 1243044
uaagaucaugggugugaaa

SEQ ID NO: 1390813 - RNA, 19 nt, Artificial Sequence
  Description of Artificial Sequence: Synthetic oligonucleotide
  Antisense strand to SEQ ID NO: 1390812
uuucacacccaugaucuua

SEQ ID NO: 1390814 - RNA, 19 nt, Artificial Sequence
  Description of Artificial Sequence: Synthetic oligonucleotide
  Sense strand starting at position 497 of SEQ ID NO: 1243044
agaucaugggugugaaaca

SEQ ID NO: 1390815 - RNA, 19 nt, Artificial Sequence
  Description of Artificial Sequence: Synthetic oligonucleotide
  Antisense strand to SEQ ID NO: 1390814
uguuucacacccaugaucu

SEQ ID NO: 1390816 - RNA, 19 nt, Artificial Sequence
  Description of Artificial Sequence: Synthetic oligonucleotide
  Sense strand starting at position 545 of SEQ ID NO: 1243044
uagguaguccuuuagagcu

SEQ ID NO: 1390817 - RNA, 19 nt, Artificial Sequence
  Description of Artificial Sequence: Synthetic oligonucleotide
  Antisense strand to SEQ ID NO: 1390816
agcucuaaaggacuaccua

SEQ ID NO: 1390818 - RNA, 19 nt, Artificial Sequence
  Description of Artificial Sequence: Synthetic oligonucleotide
  Sense strand starting at position 793 of SEQ ID NO: 1243044
aggugaaguuaauugcuca

SEQ ID NO: 1390819 - RNA, 19 nt, Artificial Sequence
  Description of Artificial Sequence: Synthetic oligonucleotide
  Antisense strand to SEQ ID NO: 1390818
ugagcaauuaacuucaccu

SEQ ID NO: 1390820 - RNA, 19 nt, Artificial Sequence
  Description of Artificial Sequence: Synthetic oligonucleotide
  Sense strand starting at position 794 of SEQ ID NO: 1243044
ggugaaguuaauugcucaa

SEQ ID NO: 1390821 - RNA, 19 nt, Artificial Sequence
  Description of Artificial Sequence: Synthetic oligonucleotide
  Antisense strand to SEQ ID NO: 1390820
uugagcaauuaacuucacc

SEQ ID NO: 1390822 - RNA, 19 nt, Artificial Sequence
  Description of Artificial Sequence: Synthetic oligonucleotide
  Sense strand starting at position 814 of SEQ ID NO: 1243044
gucacauagcaaggaguua

SEQ ID NO: 1390823 - RNA, 19 nt, Artificial Sequence
  Description of Artificial Sequence: Synthetic oligonucleotide
  Antisense strand to SEQ ID NO: 1390822
uaacuccuugcuaugugac

SEQ ID NO: 1390824 - RNA, 19 nt, Artificial Sequence
  Description of Artificial Sequence: Synthetic oligonucleotide
  Sense strand starting at position 1125 of SEQ ID NO: 1243044
caggaucugucacuguguu

SEQ ID NO: 1390825 - RNA, 19 nt, Artificial Sequence
  Description of Artificial Sequence: Synthetic oligonucleotide
  Antisense strand to SEQ ID NO: 1390824
aacacagugacagauccug

SEQ ID NO: 1390826 - RNA, 19 nt, Artificial Sequence
  Description of Artificial Sequence: Synthetic oligonucleotide
  Sense strand starting at position 1211 of SEQ ID NO: 1243044
caaguagugucaguagaag

SEQ ID NO: 1390827 - RNA, 19 nt, Artificial Sequence
  Description of Artificial Sequence: Synthetic oligonucleotide
  Antisense strand to SEQ ID NO: 1390826
cuucuacugacacuacuug

SEQ ID NO: 1390828 - RNA, 19 nt, Artificial Sequence
  Description of Artificial Sequence: Synthetic oligonucleotide
  Sense strand starting at position 1222 of SEQ ID NO: 1243044
aguagaagguagcuguuau

SEQ ID NO: 1390829 - RNA, 19 nt, Artificial Sequence
  Description of Artificial Sequence: Synthetic oligonucleotide
  Antisense strand to SEQ ID NO: 1390828
auaacagcuaccuucuacu

SEQ ID NO: 1390830 - RNA, 19 nt, Artificial Sequence
  Description of Artificial Sequence: Synthetic oligonucleotide
  Sense strand starting at position 1292 of SEQ ID NO: 1243044
ucuagaaaguuugcgaaga

SEQ ID NO: 1390831 - RNA, 19 nt, Artificial Sequence
  Description of Artificial Sequence: Synthetic oligonucleotide
  Antisense strand to SEQ ID NO: 1390830
ucuucgcaaacuuucuaga

SEQ ID NO: 1390832 - RNA, 19 nt, Artificial Sequence
  Description of Artificial Sequence: Synthetic oligonucleotide
  Sense strand starting at position 1313 of SEQ ID NO: 1243044
uggcaaagguguuugaaag

SEQ ID NO: 1390833 - RNA, 19 nt, Artificial Sequence
  Description of Artificial Sequence: Synthetic oligonucleotide
  Antisense strand to SEQ ID NO: 1390832
cuuucaaacaccuuugcca

SEQ ID NO: 1390834 - RNA, 19 nt, Artificial Sequence
  Description of Artificial Sequence: Synthetic oligonucleotide
  Sense strand starting at position 1430 of SEQ ID NO: 1243044
cuuacugggugaucuguaa

SEQ ID NO: 1390835 - RNA, 19 nt, Artificial Sequence
  Description of Artificial Sequence: Synthetic oligonucleotide
  Antisense strand to SEQ ID NO: 1390834
uuacagaucacccaguaag

SEQ ID NO: 1390836 - RNA, 19 nt, Artificial Sequence
  Description of Artificial Sequence: Synthetic oligonucleotide
  Sense strand starting at position 1645 of SEQ ID NO: 1243044
acugucucucgcgagaaga

SEQ ID NO: 1390837 - RNA, 19 nt, Artificial Sequence
  Description of Artificial Sequence: Synthetic oligonucleotide
  Antisense strand to SEQ ID NO: 1390836
ucuucucgcgagagacagu

SEQ ID NO: 1390838 - RNA, 19 nt, Artificial Sequence
  Description of Artificial Sequence: Synthetic oligonucleotide
  Sense strand starting at position 2781 of SEQ ID NO: 1243044
cggaguagggagugaauca

SEQ ID NO: 1390839 - RNA, 19 nt, Artificial Sequence
  Description of Artificial Sequence: Synthetic oligonucleotide
  Antisense strand to SEQ ID NO: 1390838
ugauucacucccuacuccg

SEQ ID NO: 1390840 - RNA, 19 nt, Artificial Sequence
  Description of Artificial Sequence: Synthetic oligonucleotide
  Sense strand starting at position 2805 of SEQ ID NO: 1243044
ggcacugugguuuaggaau

SEQ ID NO: 1390841 - RNA, 19 nt, Artificial Sequence
  Description of Artificial Sequence: Synthetic oligonucleotide
  Antisense strand to SEQ ID NO: 1390840
auuccuaaaccacagugcc

SEQ ID NO: 1390842 - RNA, 19 nt, Artificial Sequence
  Description of Artificial Sequence: Synthetic oligonucleotide
  Sense strand starting at position 2974 of SEQ ID NO: 1243044
ggcgcagguaugggauaua

SEQ ID NO: 1390843 - RNA, 19 nt, Artificial Sequence
  Description of Artificial Sequence: Synthetic oligonucleotide
  Antisense strand to SEQ ID NO: 1390842
uauaucccauaccugcgcc

SEQ ID NO: 1390844 - RNA, 19 nt, Artificial Sequence
  Description of Artificial Sequence: Synthetic oligonucleotide
  Sense strand starting at position 3003 of SEQ ID NO: 1243044
cccugaauccugggcggau

SEQ ID NO: 1390845 - RNA, 19 nt, Artificial Sequence
  Description of Artificial Sequence: Synthetic oligonucleotide
  Antisense strand to SEQ ID NO: 1390844
auccgcccaggauucaggg

SEQ ID NO: 1390846 - RNA, 19 nt, Artificial Sequence
  Description of Artificial Sequence: Synthetic oligonucleotide
  Sense strand starting at position 3004 of SEQ ID NO: 1243044
ccugaauccugggcggauu

SEQ ID NO: 1390847 - RNA, 19 nt, Artificial Sequence
  Description of Artificial Sequence: Synthetic oligonucleotide
  Antisense strand to SEQ ID NO: 1390846
aauccgcccaggauucagg

SEQ ID NO: 1390848 - RNA, 19 nt, Artificial Sequence
  Description of Artificial Sequence: Synthetic oligonucleotide
  Sense strand starting at position 3044 of SEQ ID NO: 1243044
uugacucuucccgggaguu

SEQ ID NO: 1390849 - RNA, 19 nt, Artificial Sequence
  Description of Artificial Sequence: Synthetic oligonucleotide
  Antisense strand to SEQ ID NO: 1390848
aacucccgggaagagucaa

SEQ ID NO: 1390850 - RNA, 19 nt, Artificial Sequence
  Description of Artificial Sequence: Synthetic oligonucleotide
  Sense strand starting at position 3045 of SEQ ID NO: 1243044
ugacucuucccgggaguuc

SEQ ID NO: 1390851 - RNA, 19 nt, Artificial Sequence
  Description of Artificial Sequence: Synthetic oligonucleotide
  Antisense strand to SEQ ID NO: 1390850
gaacucccgggaagaguca

SEQ ID NO: 1390852 - RNA, 19 nt, Artificial Sequence
  Description of Artificial Sequence: Synthetic oligonucleotide
  Sense strand starting at position 3123 of SEQ ID NO: 1243044
ugagguucuggaugugaca

SEQ ID NO: 1390853 - RNA, 19 nt, Artificial Sequence
  Description of Artificial Sequence: Synthetic oligonucleotide
  Antisense strand to SEQ ID NO: 1390852
ugucacauccagaaccuca

SEQ ID NO: 1390854 - RNA, 19 nt, Artificial Sequence
  Description of Artificial Sequence: Synthetic oligonucleotide
  Sense strand starting at position 3347 of SEQ ID NO: 1243044
uuuaacugauuuggguaua

SEQ ID NO: 1390855 - RNA, 19 nt, Artificial Sequence
  Description of Artificial Sequence: Synthetic oligonucleotide
  Antisense strand to SEQ ID NO: 1390854
uauacccaaaucaguuaaa

SEQ ID NO: 1390856 - RNA, 19 nt, Artificial Sequence
  Description of Artificial Sequence: Synthetic oligonucleotide
  Sense strand starting at position 3348 of SEQ ID NO: 1243044
uuaacugauuuggguauau

SEQ ID NO: 1390857 - RNA, 19 nt, Artificial Sequence
  Description of Artificial Sequence: Synthetic oligonucleotide
  Antisense strand to SEQ ID NO: 1390856
auauacccaaaucaguuaa

SEQ ID NO: 1390858 - RNA, 19 nt, Artificial Sequence
  Description of Artificial Sequence: Synthetic oligonucleotide
  Sense strand starting at position 3388 of SEQ ID NO: 1243044
aguaaauaauacgcuuuga

SEQ ID NO: 1390859 - RNA, 19 nt, Artificial Sequence
  Description of Artificial Sequence: Synthetic oligonucleotide
  Antisense strand to SEQ ID NO: 1390858
ucaaagcguauuauuuacu

SEQ ID NO: 1390860 - RNA, 19 nt, Artificial Sequence
  Description of Artificial Sequence: Synthetic oligonucleotide
  Sense strand starting at position 3532 of SEQ ID NO: 1243044
ggagaaauguuugagauaa

SEQ ID NO: 1390861 - RNA, 19 nt, Artificial Sequence
  Description of Artificial Sequence: Synthetic oligonucleotide
  Antisense strand to SEQ ID NO: 1390860
uuaucucaaacauuucucc

SEQ ID NO: 1390862 - RNA, 19 nt, Artificial Sequence
  Description of Artificial Sequence: Synthetic oligonucleotide
  Sense strand starting at position 3534 of SEQ ID NO: 1243044
agaaauguuugagauaaag

SEQ ID NO: 1390863 - RNA, 19 nt, Artificial Sequence
  Description of Artificial Sequence: Synthetic oligonucleotide
  Antisense strand to SEQ ID NO: 1390862
cuuuaucucaaacauuucu

SEQ ID NO: 1390864 - RNA, 19 nt, Artificial Sequence
  Description of Artificial Sequence: Synthetic oligonucleotide
  Sense strand starting at position 3550 of SEQ ID NO: 1243044
aagcaauuauagguccgua

SEQ ID NO: 1390865 - RNA, 19 nt, Artificial Sequence
  Description of Artificial Sequence: Synthetic oligonucleotide
  Antisense strand to SEQ ID NO: 1390864
uacggaccuauaauugcuu

SEQ ID NO: 1390866 - RNA, 19 nt, Artificial Sequence
  Description of Artificial Sequence: Synthetic oligonucleotide
  Sense strand starting at position 3553 of SEQ ID NO: 1243044
caauuauagguccguauug

SEQ ID NO: 1390867 - RNA, 19 nt, Artificial Sequence
  Description of Artificial Sequence: Synthetic oligonucleotide
  Antisense strand to SEQ ID NO: 1390866
caauacggaccuauaauug

SEQ ID NO: 1390868 - RNA, 19 nt, Artificial Sequence
  Description of Artificial Sequence: Synthetic oligonucleotide
  Sense strand starting at position 3585 of SEQ ID NO: 1243044
uagagaagcaugggaaugu

SEQ ID NO: 1390869 - RNA, 19 nt, Artificial Sequence
  Description of Artificial Sequence: Synthetic oligonucleotide
  Antisense strand to SEQ ID NO: 1390868
acauucccaugcuucucua

SEQ ID NO: 1390870 - RNA, 19 nt, Artificial Sequence
  Description of Artificial Sequence: Synthetic oligonucleotide
  Sense strand starting at position 3687 of SEQ ID NO: 1243044
uggcucuaccaggaagagu

SEQ ID NO: 1390871 - RNA, 19 nt, Artificial Sequence
  Description of Artificial Sequence: Synthetic oligonucleotide
  Antisense strand to SEQ ID NO: 1390870
acucuuccugguagagcca

SEQ ID NO: 1390872 - RNA, 19 nt, Artificial Sequence
  Description of Artificial Sequence: Synthetic oligonucleotide
  Sense strand starting at position 3770 of SEQ ID NO: 1243044
uguaaccuuccgcaaauca

SEQ ID NO: 1390873 - RNA, 19 nt, Artificial Sequence
  Description of Artificial Sequence: Synthetic oligonucleotide
  Antisense strand to SEQ ID NO: 1390872
ugauuugcggaagguuaca

SEQ ID NO: 1390874 - RNA, 19 nt, Artificial Sequence
  Description of Artificial Sequence: Synthetic oligonucleotide
  Sense strand starting at position 3791 of SEQ ID NO: 1243044
aggucuuaacuucguaacu

SEQ ID NO: 1390875 - RNA, 19 nt, Artificial Sequence
  Description of Artificial Sequence: Synthetic oligonucleotide
  Antisense strand to SEQ ID NO: 1390874
aguuacgaaguuaagaccu

SEQ ID NO: 1390876 - RNA, 19 nt, Artificial Sequence
  Description of Artificial Sequence: Synthetic oligonucleotide
  Sense strand starting at position 3825 of SEQ ID NO: 1243044
auuagaauguaagcuacau

SEQ ID NO: 1390877 - RNA, 19 nt, Artificial Sequence
  Description of Artificial Sequence: Synthetic oligonucleotide
  Antisense strand to SEQ ID NO: 1390876
auguagcuuacauucuaau

SEQ ID NO: 1390878 - RNA, 19 nt, Artificial Sequence
  Description of Artificial Sequence: Synthetic oligonucleotide
  Sense strand starting at position 3850 of SEQ ID NO: 1243044
cgggaauccuuucugcaug

SEQ ID NO: 1390879 - RNA, 19 nt, Artificial Sequence
  Description of Artificial Sequence: Synthetic oligonucleotide
  Antisense strand to SEQ ID NO: 1390878
caugcagaaaggauucccg

SEQ ID NO: 1390880 - RNA, 19 nt, Artificial Sequence
  Description of Artificial Sequence: Synthetic oligonucleotide
  Sense strand starting at position 3867 of SEQ ID NO: 1243044
uggcuauauccguugugug

SEQ ID NO: 1390881 - RNA, 19 nt, Artificial Sequence
  Description of Artificial Sequence: Synthetic oligonucleotide
  Antisense strand to SEQ ID NO: 1390880
cacacaacggauauagcca

SEQ ID NO: 1390882 - RNA, 19 nt, Artificial Sequence
  Description of Artificial Sequence: Synthetic oligonucleotide
  Sense strand starting at position 3869 of SEQ ID NO: 1243044
gcuauauccguugugugua

SEQ ID NO: 1390883 - RNA, 19 nt, Artificial Sequence
  Description of Artificial Sequence: Synthetic oligonucleotide
  Antisense strand to SEQ ID NO: 1390882
uacacacaacggauauagc

SEQ ID NO: 1390884 - RNA, 19 nt, Artificial Sequence
  Description of Artificial Sequence: Synthetic oligonucleotide
  Sense strand starting at position 3894 of SEQ ID NO: 1243044
agucaauauuuguuaugcu

SEQ ID NO: 1390885 - RNA, 19 nt, Artificial Sequence
  Description of Artificial Sequence: Synthetic oligonucleotide
  Antisense strand to SEQ ID NO: 1390884
agcauaacaaauauugacu

SEQ ID NO: 1390886 - RNA, 19 nt, Artificial Sequence
  Description of Artificial Sequence: Synthetic oligonucleotide
  Sense strand starting at position 3898 of SEQ ID NO: 1243044
aauauuuguuaugcuguga

SEQ ID NO: 1390887 - RNA, 19 nt, Artificial Sequence
  Description of Artificial Sequence: Synthetic oligonucleotide
  Antisense strand to SEQ ID NO: 1390886
ucacagcauaacaaauauu

SEQ ID NO: 1390888 - RNA, 19 nt, Artificial Sequence
  Description of Artificial Sequence: Synthetic oligonucleotide
  Sense strand starting at position 156 of SEQ ID NO: 1243045
uuuaguucucaguaaaugg

SEQ ID NO: 1390889 - RNA, 19 nt, Artificial Sequence
  Description of Artificial Sequence: Synthetic oligonucleotide
  Antisense strand to SEQ ID NO: 1390888
ccauuuacugagaacuaaa

SEQ ID NO: 1390890 - RNA, 19 nt, Artificial Sequence
  Description of Artificial Sequence: Synthetic oligonucleotide
  Sense strand starting at position 163 of SEQ ID NO: 1243045
cucaguaaaugguaaggau

SEQ ID NO: 1390891 - RNA, 19 nt, Artificial Sequence
  Description of Artificial Sequence: Synthetic oligonucleotide
  Antisense strand to SEQ ID NO: 1390890
auccuuaccauuuacugag

SEQ ID NO: 1390892 - RNA, 19 nt, Artificial Sequence
  Description of Artificial Sequence: Synthetic oligonucleotide
  Sense strand starting at position 166 of SEQ ID NO: 1243045
aguaaaugguaaggaugau

SEQ ID NO: 1390893 - RNA, 19 nt, Artificial Sequence
  Description of Artificial Sequence: Synthetic oligonucleotide
  Antisense strand to SEQ ID NO: 1390892
aucauccuuaccauuuacu

SEQ ID NO: 1390894 - RNA, 19 nt, Artificial Sequence
  Description of Artificial Sequence: Synthetic oligonucleotide
  Sense strand starting at position 175 of SEQ ID NO: 1243045
uaaggaugauagggauaau

SEQ ID NO: 1390895 - RNA, 19 nt, Artificial Sequence
  Description of Artificial Sequence: Synthetic oligonucleotide
  Antisense strand to SEQ ID NO: 1390894
auuaucccuaucauccuua

SEQ ID NO: 1390896 - RNA, 19 nt, Artificial Sequence
  Description of Artificial Sequence: Synthetic oligonucleotide
  Sense strand starting at position 245 of SEQ ID NO: 1243045
ccgguuucguguuagauaa

SEQ ID NO: 1390897 - RNA, 19 nt, Artificial Sequence
  Description of Artificial Sequence: Synthetic oligonucleotide
  Antisense strand to SEQ ID NO: 1390896
uuaucuaacacgaaaccgg

SEQ ID NO: 1390898 - RNA, 19 nt, Artificial Sequence
  Description of Artificial Sequence: Synthetic oligonucleotide
  Sense strand starting at position 247 of SEQ ID NO: 1243045
gguuucguguuagauaauc

SEQ ID NO: 1390899 - RNA, 19 nt, Artificial Sequence
  Description of Artificial Sequence: Synthetic oligonucleotide
  Antisense strand to SEQ ID NO: 1390898
gauuaucuaacacgaaacc

SEQ ID NO: 1390900 - RNA, 19 nt, Artificial Sequence
  Description of Artificial Sequence: Synthetic oligonucleotide
  Sense strand starting at position 359 of SEQ ID NO: 1243045
cuaggacccucguaugcaa

SEQ ID NO: 1390901 - RNA, 19 nt, Artificial Sequence
  Description of Artificial Sequence: Synthetic oligonucleotide
  Antisense strand to SEQ ID NO: 1390900
uugcauacgaggguccuag

SEQ ID NO: 1390902 - RNA, 19 nt, Artificial Sequence
  Description of Artificial Sequence: Synthetic oligonucleotide
  Sense strand starting at position 395 of SEQ ID NO: 1243045
acaauagguuuggcacauu

SEQ ID NO: 1390903 - RNA, 19 nt, Artificial Sequence
  Description of Artificial Sequence: Synthetic oligonucleotide
  Antisense strand to SEQ ID NO: 1390902
aaugugccaaaccuauugu

SEQ ID NO: 1390904 - RNA, 19 nt, Artificial Sequence
  Description of Artificial Sequence: Synthetic oligonucleotide
  Sense strand starting at position 404 of SEQ ID NO: 1243045
uuggcacauuccuaugaga

SEQ ID NO: 1390905 - RNA, 19 nt, Artificial Sequence
  Description of Artificial Sequence: Synthetic oligonucleotide
  Antisense strand to SEQ ID NO: 1390904
ucucauaggaaugugccaa

SEQ ID NO: 1390906 - RNA, 19 nt, Artificial Sequence
  Description of Artificial Sequence: Synthetic oligonucleotide
  Sense strand starting at position 406 of SEQ ID NO: 1243045
ggcacauuccuaugagaau

SEQ ID NO: 1390907 - RNA, 19 nt, Artificial Sequence
  Description of Artificial Sequence: Synthetic oligonucleotide
  Antisense strand to SEQ ID NO: 1390906
auucucauaggaaugugcc

SEQ ID NO: 1390908 - RNA, 19 nt, Artificial Sequence
  Description of Artificial Sequence: Synthetic oligonucleotide
  Sense strand starting at position 407 of SEQ ID NO: 1243045
gcacauuccuaugagaauc

SEQ ID NO: 1390909 - RNA, 19 nt, Artificial Sequence
  Description of Artificial Sequence: Synthetic oligonucleotide
  Antisense strand to SEQ ID NO: 1390908
gauucucauaggaaugugc

SEQ ID NO: 1390910 - RNA, 19 nt, Artificial Sequence
  Description of Artificial Sequence: Synthetic oligonucleotide
  Sense strand starting at position 635 of SEQ ID NO: 1243045
ccaggauaucgaugaacau

SEQ ID NO: 1390911 - RNA, 19 nt, Artificial Sequence
  Description of Artificial Sequence: Synthetic oligonucleotide
  Antisense strand to SEQ ID NO: 1390910
auguucaucgauauccugg

SEQ ID NO: 1390912 - RNA, 19 nt, Artificial Sequence
  Description of Artificial Sequence: Synthetic oligonucleotide
  Sense strand starting at position 644 of SEQ ID NO: 1243045
cgaugaacauuccuauuau

SEQ ID NO: 1390913 - RNA, 19 nt, Artificial Sequence
  Description of Artificial Sequence: Synthetic oligonucleotide
  Antisense strand to SEQ ID NO: 1390912
auaauaggaauguucaucg

SEQ ID NO: 1390914 - RNA, 19 nt, Artificial Sequence
  Description of Artificial Sequence: Synthetic oligonucleotide
  Sense strand starting at position 867 of SEQ ID NO: 1243045
cgugauuucuuucuuguug

SEQ ID NO: 1390915 - RNA, 19 nt, Artificial Sequence
  Description of Artificial Sequence: Synthetic oligonucleotide
  Antisense strand to SEQ ID NO: 1390914
caacaagaaagaaaucacg

SEQ ID NO: 1390916 - RNA, 19 nt, Artificial Sequence
  Description of Artificial Sequence: Synthetic oligonucleotide
  Sense strand starting at position 868 of SEQ ID NO: 1243045
gugauuucuuucuuguugu

SEQ ID NO: 1390917 - RNA, 19 nt, Artificial Sequence
  Description of Artificial Sequence: Synthetic oligonucleotide
  Antisense strand to SEQ ID NO: 1390916
acaacaagaaagaaaucac

SEQ ID NO: 1390918 - RNA, 19 nt, Artificial Sequence
  Description of Artificial Sequence: Synthetic oligonucleotide
  Sense strand starting at position 1172 of SEQ ID NO: 1243045
caaugacagccuuguugca

SEQ ID NO: 1390919 - RNA, 19 nt, Artificial Sequence
  Description of Artificial Sequence: Synthetic oligonucleotide
  Antisense strand to SEQ ID NO: 1390918
ugcaacaaggcugucauug

SEQ ID NO: 1390920 - RNA, 19 nt, Artificial Sequence
  Description of Artificial Sequence: Synthetic oligonucleotide
  Sense strand starting at position 1188 of SEQ ID NO: 1243045
gcaggaaggugguauuaca

SEQ ID NO: 1390921 - RNA, 19 nt, Artificial Sequence
  Description of Artificial Sequence: Synthetic oligonucleotide
  Antisense strand to SEQ ID NO: 1390920
uguaauaccaccuuccugc

SEQ ID NO: 1390922 - RNA, 19 nt, Artificial Sequence
  Description of Artificial Sequence: Synthetic oligonucleotide
  Sense strand starting at position 1486 of SEQ ID NO: 1243045
gcuccauggcuguggagaa

SEQ ID NO: 1390923 - RNA, 19 nt, Artificial Sequence
  Description of Artificial Sequence: Synthetic oligonucleotide
  Antisense strand to SEQ ID NO: 1390922
uucuccacagccauggagc

SEQ ID NO: 1390924 - RNA, 19 nt, Artificial Sequence
  Description of Artificial Sequence: Synthetic oligonucleotide
  Sense strand starting at position 1487 of SEQ ID NO: 1243045
cuccauggcuguggagaaa

SEQ ID NO: 1390925 - RNA, 19 nt, Artificial Sequence
  Description of Artificial Sequence: Synthetic oligonucleotide
  Antisense strand to SEQ ID NO: 1390924
uuucuccacagccauggag

SEQ ID NO: 1390926 - RNA, 19 nt, Artificial Sequence
  Description of Artificial Sequence: Synthetic oligonucleotide
  Sense strand starting at position 2035 of SEQ ID NO: 1243045
cgcgguacucgagggaguu

SEQ ID NO: 1390927 - RNA, 19 nt, Artificial Sequence
  Description of Artificial Sequence: Synthetic oligonucleotide
  Antisense strand to SEQ ID NO: 1390926
aacucccucgaguaccgcg

SEQ ID NO: 1390928 - RNA, 19 nt, Artificial Sequence
  Description of Artificial Sequence: Synthetic oligonucleotide
  Sense strand starting at position 2384 of SEQ ID NO: 1243045
cacugaaucugucaaggug

SEQ ID NO: 1390929 - RNA, 19 nt, Artificial Sequence
  Description of Artificial Sequence: Synthetic oligonucleotide
  Antisense strand to SEQ ID NO: 1390928
caccuugacagauucagug

SEQ ID NO: 1390930 - RNA, 19 nt, Artificial Sequence
  Description of Artificial Sequence: Synthetic oligonucleotide
  Sense strand starting at position 2411 of SEQ ID NO: 1243045
guucgaaaugcucguuccu

SEQ ID NO: 1390931 - RNA, 19 nt, Artificial Sequence
  Description of Artificial Sequence: Synthetic oligonucleotide
  Antisense strand to SEQ ID NO: 1390930
aggaacgagcauuucgaac

SEQ ID NO: 1390932 - RNA, 19 nt, Artificial Sequence
  Description of Artificial Sequence: Synthetic oligonucleotide
  Sense strand starting at position 2423 of SEQ ID NO: 1243045
cguuccucggugcuguaaa

SEQ ID NO: 1390933 - RNA, 19 nt, Artificial Sequence
  Description of Artificial Sequence: Synthetic oligonucleotide
  Antisense strand to SEQ ID NO: 1390932
uuuacagcaccgaggaacg

SEQ ID NO: 1390934 - RNA, 19 nt, Artificial Sequence
  Description of Artificial Sequence: Synthetic oligonucleotide
  Sense strand starting at position 2630 of SEQ ID NO: 1243045
cuguauuugucccgacuga

SEQ ID NO: 1390935 - RNA, 19 nt, Artificial Sequence
  Description of Artificial Sequence: Synthetic oligonucleotide
  Antisense strand to SEQ ID NO: 1390934
ucagucgggacaaauacag

SEQ ID NO: 1390936 - RNA, 19 nt, Artificial Sequence
  Description of Artificial Sequence: Synthetic oligonucleotide
  Sense strand starting at position 2641 of SEQ ID NO: 1243045
ccgacugacuagcaacaua

SEQ ID NO: 1390937 - RNA, 19 nt, Artificial Sequence
  Description of Artificial Sequence: Synthetic oligonucleotide
  Antisense strand to SEQ ID NO: 1390936
uauguugcuagucagucgg

SEQ ID NO: 1390938 - RNA, 19 nt, Artificial Sequence
  Description of Artificial Sequence: Synthetic oligonucleotide
  Sense strand starting at position 2770 of SEQ ID NO: 1243045
gaccuaauguuugauugga

SEQ ID NO: 1390939 - RNA, 19 nt, Artificial Sequence
  Description of Artificial Sequence: Synthetic oligonucleotide
  Antisense strand to SEQ ID NO: 1390938
uccaaucaaacauuagguc

SEQ ID NO: 1390940 - RNA, 19 nt, Artificial Sequence
  Description of Artificial Sequence: Synthetic oligonucleotide
  Sense strand starting at position 2778 of SEQ ID NO: 1243045
guuugauuggaccaguaua

SEQ ID NO: 1390941 - RNA, 19 nt, Artificial Sequence
  Description of Artificial Sequence: Synthetic oligonucleotide
  Antisense strand to SEQ ID NO: 1390940
uauacugguccaaucaaac

SEQ ID NO: 1390942 - RNA, 19 nt, Artificial Sequence
  Description of Artificial Sequence: Synthetic oligonucleotide
  Sense strand starting at position 3330 of SEQ ID NO: 1243045
auuauuguguccucccuga

SEQ ID NO: 1390943 - RNA, 19 nt, Artificial Sequence
  Description of Artificial Sequence: Synthetic oligonucleotide
  Antisense strand to SEQ ID NO: 1390942
ucagggaggacacaauaau

SEQ ID NO: 1390944 - RNA, 19 nt, Artificial Sequence
  Description of Artificial Sequence: Synthetic oligonucleotide
  Sense strand starting at position 3351 of SEQ ID NO: 1243045
ccuggaugcgcugugcaua

SEQ ID NO: 1390945 - RNA, 19 nt, Artificial Sequence
  Description of Artificial Sequence: Synthetic oligonucleotide
  Antisense strand to SEQ ID NO: 1390944
uaugcacagcgcauccagg

SEQ ID NO: 1390946 - RNA, 19 nt, Artificial Sequence
  Description of Artificial Sequence: Synthetic oligonucleotide
  Sense strand starting at position 3361 of SEQ ID NO: 1243045
cugugcauauuucugauua

SEQ ID NO: 1390947 - RNA, 19 nt, Artificial Sequence
  Description of Artificial Sequence: Synthetic oligonucleotide
  Antisense strand to SEQ ID NO: 1390946
uaaucagaaauaugcacag

SEQ ID NO: 1390948 - RNA, 19 nt, Artificial Sequence
  Description of Artificial Sequence: Synthetic oligonucleotide
  Sense strand starting at position 3362 of SEQ ID NO: 1243045
ugugcauauuucugauuac

SEQ ID NO: 1390949 - RNA, 19 nt, Artificial Sequence
  Description of Artificial Sequence: Synthetic oligonucleotide
  Antisense strand to SEQ ID NO: 1390948
guaaucagaaauaugcaca

SEQ ID NO: 1390950 - RNA, 19 nt, Artificial Sequence
  Description of Artificial Sequence: Synthetic oligonucleotide
  Sense strand starting at position 3363 of SEQ ID NO: 1243045
gugcauauuucugauuacu

SEQ ID NO: 1390951 - RNA, 19 nt, Artificial Sequence
  Description of Artificial Sequence: Synthetic oligonucleotide
  Antisense strand to SEQ ID NO: 1390950
aguaaucagaaauaugcac

SEQ ID NO: 1390952 - RNA, 19 nt, Artificial Sequence
  Description of Artificial Sequence: Synthetic oligonucleotide
  Sense strand starting at position 3449 of SEQ ID NO: 1243045
aagcuauguucuuuggcaa

SEQ ID NO: 1390953 - RNA, 19 nt, Artificial Sequence
  Description of Artificial Sequence: Synthetic oligonucleotide
  Antisense strand to SEQ ID NO: 1390952
uugccaaagaacauagcuu

SEQ ID NO: 1390954 - RNA, 19 nt, Artificial Sequence
  Description of Artificial Sequence: Synthetic oligonucleotide
  Sense strand starting at position 3450 of SEQ ID NO: 1243045
agcuauguucuuuggcaaa

SEQ ID NO: 1390955 - RNA, 19 nt, Artificial Sequence
  Description of Artificial Sequence: Synthetic oligonucleotide
  Antisense strand to SEQ ID NO: 1390954
uuugccaaagaacauagcu

SEQ ID NO: 1390956 - RNA, 19 nt, Artificial Sequence
  Description of Artificial Sequence: Synthetic oligonucleotide
  Sense strand starting at position 3452 of SEQ ID NO: 1243045
cuauguucuuuggcaaauu

SEQ ID NO: 1390957 - RNA, 19 nt, Artificial Sequence
  Description of Artificial Sequence: Synthetic oligonucleotide
  Antisense strand to SEQ ID NO: 1390956
aauuugccaaagaacauag

SEQ ID NO: 1390958 - RNA, 19 nt, Artificial Sequence
  Description of Artificial Sequence: Synthetic oligonucleotide
  Sense strand starting at position 3519 of SEQ ID NO: 1243045
cuacuacacuuguugagga

SEQ ID NO: 1390959 - RNA, 19 nt, Artificial Sequence
  Description of Artificial Sequence: Synthetic oligonucleotide
  Antisense strand to SEQ ID NO: 1390958
uccucaacaaguguaguag

SEQ ID NO: 1390960 - RNA, 19 nt, Artificial Sequence
  Description of Artificial Sequence: Synthetic oligonucleotide
  Sense strand starting at position 3520 of SEQ ID NO: 1243045
uacuacacuuguugaggau

SEQ ID NO: 1390961 - RNA, 19 nt, Artificial Sequence
  Description of Artificial Sequence: Synthetic oligonucleotide
  Antisense strand to SEQ ID NO: 1390960
auccucaacaaguguagua

SEQ ID NO: 1390962 - RNA, 19 nt, Artificial Sequence
  Description of Artificial Sequence: Synthetic oligonucleotide
  Sense strand starting at position 3523 of SEQ ID NO: 1243045
uacacuuguugaggauuaa

SEQ ID NO: 1390963 - RNA, 19 nt, Artificial Sequence
  Description of Artificial Sequence: Synthetic oligonucleotide
  Antisense strand to SEQ ID NO: 1390962
uuaauccucaacaagugua

SEQ ID NO: 1390964 - RNA, 19 nt, Artificial Sequence
  Description of Artificial Sequence: Synthetic oligonucleotide
  Sense strand starting at position 3545 of SEQ ID NO: 1243045
aggccaucaucuuaguuua

SEQ ID NO: 1390965 - RNA, 19 nt, Artificial Sequence
  Description of Artificial Sequence: Synthetic oligonucleotide
  Antisense strand to SEQ ID NO: 1390964
uaaacuaagaugauggccu

SEQ ID NO: 1390966 - RNA, 19 nt, Artificial Sequence
  Description of Artificial Sequence: Synthetic oligonucleotide
  Sense strand starting at position 3660 of SEQ ID NO: 1243045
ggaggugucugccuaguua

SEQ ID NO: 1390967 - RNA, 19 nt, Artificial Sequence
  Description of Artificial Sequence: Synthetic oligonucleotide
  Antisense strand to SEQ ID NO: 1390966
uaacuaggcagacaccucc

SEQ ID NO: 1390968 - RNA, 19 nt, Artificial Sequence
  Description of Artificial Sequence: Synthetic oligonucleotide
  Sense strand starting at position 62 of SEQ ID NO: 1243046
guaccagucuccuuugaga

SEQ ID NO: 1390969 - RNA, 19 nt, Artificial Sequence
  Description of Artificial Sequence: Synthetic oligonucleotide
  Antisense strand to SEQ ID NO: 1390968
ucucaaaggagacugguac

SEQ ID NO: 1390970 - RNA, 19 nt, Artificial Sequence
  Description of Artificial Sequence: Synthetic oligonucleotide
  Sense strand starting at position 64 of SEQ ID NO: 1243046
accagucuccuuugagaau

SEQ ID NO: 1390971 - RNA, 19 nt, Artificial Sequence
  Description of Artificial Sequence: Synthetic oligonucleotide
  Antisense strand to SEQ ID NO: 1390970
auucucaaaggagacuggu

SEQ ID NO: 1390972 - RNA, 19 nt, Artificial Sequence
  Description of Artificial Sequence: Synthetic oligonucleotide
  Sense strand starting at position 91 of SEQ ID NO: 1243046
agcaaaggauucuccuaaa

SEQ ID NO: 1390973 - RNA, 19 nt, Artificial Sequence
  Description of Artificial Sequence: Synthetic oligonucleotide
  Antisense strand to SEQ ID NO: 1390972
uuuaggagaauccuuugcu

SEQ ID NO: 1390974 - RNA, 19 nt, Artificial Sequence
  Description of Artificial Sequence: Synthetic oligonucleotide
  Sense strand starting at position 114 of SEQ ID NO: 1243046
uguacauagucacaagauu

SEQ ID NO: 1390975 - RNA, 19 nt, Artificial Sequence
  Description of Artificial Sequence: Synthetic oligonucleotide
  Antisense strand to SEQ ID NO: 1390974
aaucuugugacuauguaca

SEQ ID NO: 1390976 - RNA, 19 nt, Artificial Sequence
  Description of Artificial Sequence: Synthetic oligonucleotide
  Sense strand starting at position 151 of SEQ ID NO: 1243046
uguccaacccuccggaaau

SEQ ID NO: 1390977 - RNA, 19 nt, Artificial Sequence
  Description of Artificial Sequence: Synthetic oligonucleotide
  Antisense strand to SEQ ID NO: 1390976
auuuccggaggguuggaca

SEQ ID NO: 1390978 - RNA, 19 nt, Artificial Sequence
  Description of Artificial Sequence: Synthetic oligonucleotide
  Sense strand starting at position 204 of SEQ ID NO: 1243046
agggauaacugccaggaaa

SEQ ID NO: 1390979 - RNA, 19 nt, Artificial Sequence
  Description of Artificial Sequence: Synthetic oligonucleotide
  Antisense strand to SEQ ID NO: 1390978
uuuccuggcaguuaucccu

SEQ ID NO: 1390980 - RNA, 19 nt, Artificial Sequence
  Description of Artificial Sequence: Synthetic oligonucleotide
  Sense strand starting at position 254 of SEQ ID NO: 1243046
ccaguagaguuaggaauag

SEQ ID NO: 1390981 - RNA, 19 nt, Artificial Sequence
  Description of Artificial Sequence: Synthetic oligonucleotide
  Antisense strand to SEQ ID NO: 1390980
cuauuccuaacucuacugg

SEQ ID NO: 1390982 - RNA, 19 nt, Artificial Sequence
  Description of Artificial Sequence: Synthetic oligonucleotide
  Sense strand starting at position 280 of SEQ ID NO: 1243046
gugcuuggcaggugaguuu

SEQ ID NO: 1390983 - RNA, 19 nt, Artificial Sequence
  Description of Artificial Sequence: Synthetic oligonucleotide
  Antisense strand to SEQ ID NO: 1390982
aaacucaccugccaagcac

SEQ ID NO: 1390984 - RNA, 19 nt, Artificial Sequence
  Description of Artificial Sequence: Synthetic oligonucleotide
  Sense strand starting at position 295 of SEQ ID NO: 1243046
guuugaagauacuuguuga

SEQ ID NO: 1390985 - RNA, 19 nt, Artificial Sequence
  Description of Artificial Sequence: Synthetic oligonucleotide
  Antisense strand to SEQ ID NO: 1390984
ucaacaaguaucuucaaac

SEQ ID NO: 1390986 - RNA, 19 nt, Artificial Sequence
  Description of Artificial Sequence: Synthetic oligonucleotide
  Sense strand starting at position 302 of SEQ ID NO: 1243046
gauacuuguugagagcaua

SEQ ID NO: 1390987 - RNA, 19 nt, Artificial Sequence
  Description of Artificial Sequence: Synthetic oligonucleotide
  Antisense strand to SEQ ID NO: 1390986
uaugcucucaacaaguauc

SEQ ID NO: 1390988 - RNA, 19 nt, Artificial Sequence
  Description of Artificial Sequence: Synthetic oligonucleotide
  Sense strand starting at position 762 of SEQ ID NO: 1243046
ugcugucaguuuccaaauu

SEQ ID NO: 1390989 - RNA, 19 nt, Artificial Sequence
  Description of Artificial Sequence: Synthetic oligonucleotide
  Antisense strand to SEQ ID NO: 1390988
aauuuggaaacugacagca

SEQ ID NO: 1390990 - RNA, 19 nt, Artificial Sequence
  Description of Artificial Sequence: Synthetic oligonucleotide
  Sense strand starting at position 839 of SEQ ID NO: 1243046
gguacugggcaauauagua

SEQ ID NO: 1390991 - RNA, 19 nt, Artificial Sequence
  Description of Artificial Sequence: Synthetic oligonucleotide
  Antisense strand to SEQ ID NO: 1390990
uacuauauugcccaguacc

SEQ ID NO: 1390992 - RNA, 19 nt, Artificial Sequence
  Description of Artificial Sequence: Synthetic oligonucleotide
  Sense strand starting at position 867 of SEQ ID NO: 1243046
gggccuaagaaauguuaug

SEQ ID NO: 1390993 - RNA, 19 nt, Artificial Sequence
  Description of Artificial Sequence: Synthetic oligonucleotide
  Antisense strand to SEQ ID NO: 1390992
cauaacauuucuuaggccc

SEQ ID NO: 1390994 - RNA, 19 nt, Artificial Sequence
  Description of Artificial Sequence: Synthetic oligonucleotide
  Sense strand starting at position 901 of SEQ ID NO: 1243046
gugagaagcuaggaaaguu

SEQ ID NO: 1390995 - RNA, 19 nt, Artificial Sequence
  Description of Artificial Sequence: Synthetic oligonucleotide
  Antisense strand to SEQ ID NO: 1390994
aacuuuccuagcuucucac

SEQ ID NO: 1390996 - RNA, 19 nt, Artificial Sequence
  Description of Artificial Sequence: Synthetic oligonucleotide
  Sense strand starting at position 1030 of SEQ ID NO: 1243046
ccacaaauagugcaguuua

SEQ ID NO: 1390997 - RNA, 19 nt, Artificial Sequence
  Description of Artificial Sequence: Synthetic oligonucleotide
  Antisense strand to SEQ ID NO: 1390996
uaaacugcacuauuugugg

SEQ ID NO: 1390998 - RNA, 19 nt, Artificial Sequence
  Description of Artificial Sequence: Synthetic oligonucleotide
  Sense strand starting at position 1035 of SEQ ID NO: 1243046
aauagugcaguuuaggaau

SEQ ID NO: 1390999 - RNA, 19 nt, Artificial Sequence
  Description of Artificial Sequence: Synthetic oligonucleotide
  Antisense strand to SEQ ID NO: 1390998
auuccuaaacugcacuauu

SEQ ID NO: 1391000 - RNA, 19 nt, Artificial Sequence
  Description of Artificial Sequence: Synthetic oligonucleotide
  Sense strand starting at position 1038 of SEQ ID NO: 1243046
agugcaguuuaggaaugaa

SEQ ID NO: 1391001 - RNA, 19 nt, Artificial Sequence
  Description of Artificial Sequence: Synthetic oligonucleotide
  Antisense strand to SEQ ID NO: 1391000
uucauuccuaaacugcacu

SEQ ID NO: 1391002 - RNA, 19 nt, Artificial Sequence
  Description of Artificial Sequence: Synthetic oligonucleotide
  Sense strand starting at position 1041 of SEQ ID NO: 1243046
gcaguuuaggaaugaaaca

SEQ ID NO: 1391003 - RNA, 19 nt, Artificial Sequence
  Description of Artificial Sequence: Synthetic oligonucleotide
  Antisense strand to SEQ ID NO: 1391002
uguuucauuccuaaacugc

SEQ ID NO: 1391004 - RNA, 19 nt, Artificial Sequence
  Description of Artificial Sequence: Synthetic oligonucleotide
  Sense strand starting at position 1082 of SEQ ID NO: 1243046
cagagaaugccucagcgga

SEQ ID NO: 1391005 - RNA, 19 nt, Artificial Sequence
  Description of Artificial Sequence: Synthetic oligonucleotide
  Antisense strand to SEQ ID NO: 1391004
uccgcugaggcauucucug

SEQ ID NO: 1391006 - RNA, 19 nt, Artificial Sequence
  Description of Artificial Sequence: Synthetic oligonucleotide
  Sense strand starting at position 1084 of SEQ ID NO: 1243046
gagaaugccucagcggaca

SEQ ID NO: 1391007 - RNA, 19 nt, Artificial Sequence
  Description of Artificial Sequence: Synthetic oligonucleotide
  Antisense strand to SEQ ID NO: 1391006
uguccgcugaggcauucuc

SEQ ID NO: 1391008 - RNA, 19 nt, Artificial Sequence
  Description of Artificial Sequence: Synthetic oligonucleotide
  Sense strand starting at position 1292 of SEQ ID NO: 1243046
uuaaauuauccagaacggu

SEQ ID NO: 1391009 - RNA, 19 nt, Artificial Sequence
  Description of Artificial Sequence: Synthetic oligonucleotide
  Antisense strand to SEQ ID NO: 1391008
accguucuggauaauuuaa

SEQ ID NO: 1391010 - RNA, 19 nt, Artificial Sequence
  Description of Artificial Sequence: Synthetic oligonucleotide
  Sense strand starting at position 1321 of SEQ ID NO: 1243046
guaguuucaccagguguca

SEQ ID NO: 1391011 - RNA, 19 nt, Artificial Sequence
  Description of Artificial Sequence: Synthetic oligonucleotide
  Antisense strand to SEQ ID NO: 1391010
ugacaccuggugaaacuac

SEQ ID NO: 1391012 - RNA, 19 nt, Artificial Sequence
  Description of Artificial Sequence: Synthetic oligonucleotide
  Sense strand starting at position 2011 of SEQ ID NO: 1243046
gcgaccuucgccucacuua

SEQ ID NO: 1391013 - RNA, 19 nt, Artificial Sequence
  Description of Artificial Sequence: Synthetic oligonucleotide
  Antisense strand to SEQ ID NO: 1391012
uaagugaggcgaaggucgc

SEQ ID NO: 1391014 - RNA, 19 nt, Artificial Sequence
  Description of Artificial Sequence: Synthetic oligonucleotide
  Sense strand starting at position 2030 of SEQ ID NO: 1243046
cagaguauauuuggaagga

SEQ ID NO: 1391015 - RNA, 19 nt, Artificial Sequence
  Description of Artificial Sequence: Synthetic oligonucleotide
  Antisense strand to SEQ ID NO: 1391014
uccuuccaaauauacucug

SEQ ID NO: 1391016 - RNA, 19 nt, Artificial Sequence
  Description of Artificial Sequence: Synthetic oligonucleotide
  Sense strand starting at position 2031 of SEQ ID NO: 1243046
agaguauauuuggaaggau

SEQ ID NO: 1391017 - RNA, 19 nt, Artificial Sequence
  Description of Artificial Sequence: Synthetic oligonucleotide
  Antisense strand to SEQ ID NO: 1391016
auccuuccaaauauacucu

SEQ ID NO: 1391018 - RNA, 19 nt, Artificial Sequence
  Description of Artificial Sequence: Synthetic oligonucleotide
  Sense strand starting at position 2043 of SEQ ID NO: 1243046
gaaggaugaucuuauuuga

SEQ ID NO: 1391019 - RNA, 19 nt, Artificial Sequence
  Description of Artificial Sequence: Synthetic oligonucleotide
  Antisense strand to SEQ ID NO: 1391018
ucaaauaagaucauccuuc

SEQ ID NO: 1391020 - RNA, 19 nt, Artificial Sequence
  Description of Artificial Sequence: Synthetic oligonucleotide
  Sense strand starting at position 2063 of SEQ ID NO: 1243046
uuguauauacuugaagugu

SEQ ID NO: 1391021 - RNA, 19 nt, Artificial Sequence
  Description of Artificial Sequence: Synthetic oligonucleotide
  Antisense strand to SEQ ID NO: 1391020
acacuucaaguauauacaa

SEQ ID NO: 1391022 - RNA, 19 nt, Artificial Sequence
  Description of Artificial Sequence: Synthetic oligonucleotide
  Sense strand starting at position 2104 of SEQ ID NO: 1243046
uuacauauacuugaagugu

SEQ ID NO: 1391023 - RNA, 19 nt, Artificial Sequence
  Description of Artificial Sequence: Synthetic oligonucleotide
  Antisense strand to SEQ ID NO: 1391022
acacuucaaguauauguaa

SEQ ID NO: 1391024 - RNA, 19 nt, Artificial Sequence
  Description of Artificial Sequence: Synthetic oligonucleotide
  Sense strand starting at position 2485 of SEQ ID NO: 1243046
acagcagaguuccuauaua

SEQ ID NO: 1391025 - RNA, 19 nt, Artificial Sequence
  Description of Artificial Sequence: Synthetic oligonucleotide
  Antisense strand to SEQ ID NO: 1391024
uauauaggaacucugcugu

SEQ ID NO: 1391026 - RNA, 19 nt, Artificial Sequence
  Description of Artificial Sequence: Synthetic oligonucleotide
  Sense strand starting at position 2509 of SEQ ID NO: 1243046
cacccaguuucgucuguua

SEQ ID NO: 1391027 - RNA, 19 nt, Artificial Sequence
  Description of Artificial Sequence: Synthetic oligonucleotide
  Antisense strand to SEQ ID NO: 1391026
uaacagacgaaacugggug

SEQ ID NO: 1391028 - RNA, 19 nt, Artificial Sequence
  Description of Artificial Sequence: Synthetic oligonucleotide
  Sense strand starting at position 2511 of SEQ ID NO: 1243046
cccaguuucgucuguuauc

SEQ ID NO: 1391029 - RNA, 19 nt, Artificial Sequence
  Description of Artificial Sequence: Synthetic oligonucleotide
  Antisense strand to SEQ ID NO: 1391028
gauaacagacgaaacuggg

SEQ ID NO: 1391030 - RNA, 19 nt, Artificial Sequence
  Description of Artificial Sequence: Synthetic oligonucleotide
  Sense strand starting at position 2512 of SEQ ID NO: 1243046
ccaguuucgucuguuauca

SEQ ID NO: 1391031 - RNA, 19 nt, Artificial Sequence
  Description of Artificial Sequence: Synthetic oligonucleotide
  Antisense strand to SEQ ID NO: 1391030
ugauaacagacgaaacugg

SEQ ID NO: 1391032 - RNA, 19 nt, Artificial Sequence
  Description of Artificial Sequence: Synthetic oligonucleotide
  Sense strand starting at position 2702 of SEQ ID NO: 1243046
gaaaucuccuagguguucu

SEQ ID NO: 1391033 - RNA, 19 nt, Artificial Sequence
  Description of Artificial Sequence: Synthetic oligonucleotide
  Antisense strand to SEQ ID NO: 1391032
agaacaccuaggagauuuc

SEQ ID NO: 1391034 - RNA, 19 nt, Artificial Sequence
  Description of Artificial Sequence: Synthetic oligonucleotide
  Sense strand starting at position 2706 of SEQ ID NO: 1243046
ucuccuagguguucucuaa

SEQ ID NO: 1391035 - RNA, 19 nt, Artificial Sequence
  Description of Artificial Sequence: Synthetic oligonucleotide
  Antisense strand to SEQ ID NO: 1391034
uuagagaacaccuaggaga

SEQ ID NO: 1391036 - RNA, 19 nt, Artificial Sequence
  Description of Artificial Sequence: Synthetic oligonucleotide
  Sense strand starting at position 2710 of SEQ ID NO: 1243046
cuagguguucucuaaucug

SEQ ID NO: 1391037 - RNA, 19 nt, Artificial Sequence
  Description of Artificial Sequence: Synthetic oligonucleotide
  Antisense strand to SEQ ID NO: 1391036
cagauuagagaacaccuag

SEQ ID NO: 1391038 - RNA, 19 nt, Artificial Sequence
  Description of Artificial Sequence: Synthetic oligonucleotide
  Sense strand starting at position 2716 of SEQ ID NO: 1243046
guucucuaaucuguggcaa

SEQ ID NO: 1391039 - RNA, 19 nt, Artificial Sequence
  Description of Artificial Sequence: Synthetic oligonucleotide
  Antisense strand to SEQ ID NO: 1391038
uugccacagauuagagaac

SEQ ID NO: 1391040 - RNA, 19 nt, Artificial Sequence
  Description of Artificial Sequence: Synthetic oligonucleotide
  Sense strand starting at position 2727 of SEQ ID NO: 1243046
uguggcaaguccucaauuu

SEQ ID NO: 1391041 - RNA, 19 nt, Artificial Sequence
  Description of Artificial Sequence: Synthetic oligonucleotide
  Antisense strand to SEQ ID NO: 1391040
aaauugaggacuugccaca

SEQ ID NO: 1391042 - RNA, 19 nt, Artificial Sequence
  Description of Artificial Sequence: Synthetic oligonucleotide
  Sense strand starting at position 3369 of SEQ ID NO: 1243046
cggucuuugcgauaguuug

SEQ ID NO: 1391043 - RNA, 19 nt, Artificial Sequence
  Description of Artificial Sequence: Synthetic oligonucleotide
  Antisense strand to SEQ ID NO: 1391042
caaacuaucgcaaagaccg

SEQ ID NO: 1391044 - RNA, 19 nt, Artificial Sequence
  Description of Artificial Sequence: Synthetic oligonucleotide
  Sense strand starting at position 3547 of SEQ ID NO: 1243046
gcgaauagugccgcaguaa

SEQ ID NO: 1391045 - RNA, 19 nt, Artificial Sequence
  Description of Artificial Sequence: Synthetic oligonucleotide
  Antisense strand to SEQ ID NO: 1391044
uuacugcggcacuauucgc

SEQ ID NO: 1391046 - RNA, 19 nt, Artificial Sequence
  Description of Artificial Sequence: Synthetic oligonucleotide
  Sense strand starting at position 3548 of SEQ ID NO: 1243046
cgaauagugccgcaguaag

SEQ ID NO: 1391047 - RNA, 19 nt, Artificial Sequence
  Description of Artificial Sequence: Synthetic oligonucleotide
  Antisense strand to SEQ ID NO: 1391046
cuuacugcggcacuauucg

SEQ ID NO: 1391048 - RNA, 19 nt, Artificial Sequence
  Description of Artificial Sequence: Synthetic oligonucleotide
  Sense strand starting at position 14 of SEQ ID NO: 1243047
gagaguuauuuggaagaga

SEQ ID NO: 1391049 - RNA, 19 nt, Artificial Sequence
  Description of Artificial Sequence: Synthetic oligonucleotide
  Antisense strand to SEQ ID NO: 1391048
ucucuuccaaauaacucuc

SEQ ID NO: 1391050 - RNA, 19 nt, Artificial Sequence
  Description of Artificial Sequence: Synthetic oligonucleotide
  Sense strand starting at position 137 of SEQ ID NO: 1243047
agucaaauagaugggcaua

SEQ ID NO: 1391051 - RNA, 19 nt, Artificial Sequence
  Description of Artificial Sequence: Synthetic oligonucleotide
  Antisense strand to SEQ ID NO: 1391050
uaugcccaucuauuugacu

SEQ ID NO: 1391052 - RNA, 19 nt, Artificial Sequence
  Description of Artificial Sequence: Synthetic oligonucleotide
  Sense strand starting at position 138 of SEQ ID NO: 1243047
gucaaauagaugggcauau

SEQ ID NO: 1391053 - RNA, 19 nt, Artificial Sequence
  Description of Artificial Sequence: Synthetic oligonucleotide
  Antisense strand to SEQ ID NO: 1391052
auaugcccaucuauuugac

SEQ ID NO: 1391054 - RNA, 19 nt, Artificial Sequence
  Description of Artificial Sequence: Synthetic oligonucleotide
  Sense strand starting at position 139 of SEQ ID NO: 1243047
ucaaauagaugggcauauu

SEQ ID NO: 1391055 - RNA, 19 nt, Artificial Sequence
  Description of Artificial Sequence: Synthetic oligonucleotide
  Antisense strand to SEQ ID NO: 1391054
aauaugcccaucuauuuga

SEQ ID NO: 1391056 - RNA, 19 nt, Artificial Sequence
  Description of Artificial Sequence: Synthetic oligonucleotide
  Sense strand starting at position 201 of SEQ ID NO: 1243047
ugaacaauggucuauguau

SEQ ID NO: 1391057 - RNA, 19 nt, Artificial Sequence
  Description of Artificial Sequence: Synthetic oligonucleotide
  Antisense strand to SEQ ID NO: 1391056
auacauagaccauuguuca

SEQ ID NO: 1391058 - RNA, 19 nt, Artificial Sequence
  Description of Artificial Sequence: Synthetic oligonucleotide
  Sense strand starting at position 314 of SEQ ID NO: 1243047
gcaguauuacuacauucuu

SEQ ID NO: 1391059 - RNA, 19 nt, Artificial Sequence
  Description of Artificial Sequence: Synthetic oligonucleotide
  Antisense strand to SEQ ID NO: 1391058
aagaauguaguaauacugc

SEQ ID NO: 1391060 - RNA, 19 nt, Artificial Sequence
  Description of Artificial Sequence: Synthetic oligonucleotide
  Sense strand starting at position 404 of SEQ ID NO: 1243047
uguuuagcucugcacuuaa

SEQ ID NO: 1391061 - RNA, 19 nt, Artificial Sequence
  Description of Artificial Sequence: Synthetic oligonucleotide
  Antisense strand to SEQ ID NO: 1391060
uuaagugcagagcuaaaca

SEQ ID NO: 1391062 - RNA, 19 nt, Artificial Sequence
  Description of Artificial Sequence: Synthetic oligonucleotide
  Sense strand starting at position 437 of SEQ ID NO: 1243047
agaggacaauggucuuagu

SEQ ID NO: 1391063 - RNA, 19 nt, Artificial Sequence
  Description of Artificial Sequence: Synthetic oligonucleotide
  Antisense strand to SEQ ID NO: 1391062
acuaagaccauuguccucu

SEQ ID NO: 1391064 - RNA, 19 nt, Artificial Sequence
  Description of Artificial Sequence: Synthetic oligonucleotide
  Sense strand starting at position 445 of SEQ ID NO: 1243047
auggucuuagugcauacaa

SEQ ID NO: 1391065 - RNA, 19 nt, Artificial Sequence
  Description of Artificial Sequence: Synthetic oligonucleotide
  Antisense strand to SEQ ID NO: 1391064
uuguaugcacuaagaccau

SEQ ID NO: 1391066 - RNA, 19 nt, Artificial Sequence
  Description of Artificial Sequence: Synthetic oligonucleotide
  Sense strand starting at position 458 of SEQ ID NO: 1243047
auacaagcugauugcaaau

SEQ ID NO: 1391067 - RNA, 19 nt, Artificial Sequence
  Description of Artificial Sequence: Synthetic oligonucleotide
  Antisense strand to SEQ ID NO: 1391066
auuugcaaucagcuuguau

SEQ ID NO: 1391068 - RNA, 19 nt, Artificial Sequence
  Description of Artificial Sequence: Synthetic oligonucleotide
  Sense strand starting at position 493 of SEQ ID NO: 1243047
uccaaaguaaugugugaga

SEQ ID NO: 1391069 - RNA, 19 nt, Artificial Sequence
  Description of Artificial Sequence: Synthetic oligonucleotide
  Antisense strand to SEQ ID NO: 1391068
ucucacacauuacuuugga

SEQ ID NO: 1391070 - RNA, 19 nt, Artificial Sequence
  Description of Artificial Sequence: Synthetic oligonucleotide
  Sense strand starting at position 495 of SEQ ID NO: 1243047
caaaguaaugugugagaug

SEQ ID NO: 1391071 - RNA, 19 nt, Artificial Sequence
  Description of Artificial Sequence: Synthetic oligonucleotide
  Antisense strand to SEQ ID NO: 1391070
caucucacacauuacuuug

SEQ ID NO: 1391072 - RNA, 19 nt, Artificial Sequence
  Description of Artificial Sequence: Synthetic oligonucleotide
  Sense strand starting at position 500 of SEQ ID NO: 1243047
uaaugugugagauggacau

SEQ ID NO: 1391073 - RNA, 19 nt, Artificial Sequence
  Description of Artificial Sequence: Synthetic oligonucleotide
  Antisense strand to SEQ ID NO: 1391072
auguccaucucacacauua

SEQ ID NO: 1391074 - RNA, 19 nt, Artificial Sequence
  Description of Artificial Sequence: Synthetic oligonucleotide
  Sense strand starting at position 568 of SEQ ID NO: 1243047
ggacaaaugugguuagcag

SEQ ID NO: 1391075 - RNA, 19 nt, Artificial Sequence
  Description of Artificial Sequence: Synthetic oligonucleotide
  Antisense strand to SEQ ID NO: 1391074
cugcuaaccacauuugucc

SEQ ID NO: 1391076 - RNA, 19 nt, Artificial Sequence
  Description of Artificial Sequence: Synthetic oligonucleotide
  Sense strand starting at position 590 of SEQ ID NO: 1243047
cuaucuuguucucugauca

SEQ ID NO: 1391077 - RNA, 19 nt, Artificial Sequence
  Description of Artificial Sequence: Synthetic oligonucleotide
  Antisense strand to SEQ ID NO: 1391076
ugaucagagaacaagauag

SEQ ID NO: 1391078 - RNA, 19 nt, Artificial Sequence
  Description of Artificial Sequence: Synthetic oligonucleotide
  Sense strand starting at position 639 of SEQ ID NO: 1243047
ugcaacugccaaugguaaa

SEQ ID NO: 1391079 - RNA, 19 nt, Artificial Sequence
  Description of Artificial Sequence: Synthetic oligonucleotide
  Antisense strand to SEQ ID NO: 1391078
uuuaccauuggcaguugca

SEQ ID NO: 1391080 - RNA, 19 nt, Artificial Sequence
  Description of Artificial Sequence: Synthetic oligonucleotide
  Sense strand starting at position 689 of SEQ ID NO: 1243047
ggaaacuuccuuugugcau

SEQ ID NO: 1391081 - RNA, 19 nt, Artificial Sequence
  Description of Artificial Sequence: Synthetic oligonucleotide
  Antisense strand to SEQ ID NO: 1391080
augcacaaaggaaguuucc

SEQ ID NO: 1391082 - RNA, 19 nt, Artificial Sequence
  Description of Artificial Sequence: Synthetic oligonucleotide
  Sense strand starting at position 695 of SEQ ID NO: 1243047
uuccuuugugcauaacagu

SEQ ID NO: 1391083 - RNA, 19 nt, Artificial Sequence
  Description of Artificial Sequence: Synthetic oligonucleotide
  Antisense strand to SEQ ID NO: 1391082
acuguuaugcacaaaggaa

SEQ ID NO: 1391084 - RNA, 19 nt, Artificial Sequence
  Description of Artificial Sequence: Synthetic oligonucleotide
  Sense strand starting at position 1023 of SEQ ID NO: 1243047
ucuacucucccguaguaga

SEQ ID NO: 1391085 - RNA, 19 nt, Artificial Sequence
  Description of Artificial Sequence: Synthetic oligonucleotide
  Antisense strand to SEQ ID NO: 1391084
ucuacuacgggagaguaga

SEQ ID NO: 1391086 - RNA, 19 nt, Artificial Sequence
  Description of Artificial Sequence: Synthetic oligonucleotide
  Sense strand starting at position 1319 of SEQ ID NO: 1243047
gcucuuucuuccucugaug

SEQ ID NO: 1391087 - RNA, 19 nt, Artificial Sequence
  Description of Artificial Sequence: Synthetic oligonucleotide
  Antisense strand to SEQ ID NO: 1391086
caucagaggaagaaagagc

SEQ ID NO: 1391088 - RNA, 19 nt, Artificial Sequence
  Description of Artificial Sequence: Synthetic oligonucleotide
  Sense strand starting at position 2232 of SEQ ID NO: 1243047
cucgguugccuuccguaaa

SEQ ID NO: 1391089 - RNA, 19 nt, Artificial Sequence
  Description of Artificial Sequence: Synthetic oligonucleotide
  Antisense strand to SEQ ID NO: 1391088
uuuacggaaggcaaccgag

SEQ ID NO: 1391090 - RNA, 19 nt, Artificial Sequence
  Description of Artificial Sequence: Synthetic oligonucleotide
  Sense strand starting at position 2291 of SEQ ID NO: 1243047
caguaaugccauugagcaa

SEQ ID NO: 1391091 - RNA, 19 nt, Artificial Sequence
  Description of Artificial Sequence: Synthetic oligonucleotide
  Antisense strand to SEQ ID NO: 1391090
uugcucaauggcauuacug

SEQ ID NO: 1391092 - RNA, 19 nt, Artificial Sequence
  Description of Artificial Sequence: Synthetic oligonucleotide
  Sense strand starting at position 2328 of SEQ ID NO: 1243047
uccauuaagugagcuaaua

SEQ ID NO: 1391093 - RNA, 19 nt, Artificial Sequence
  Description of Artificial Sequence: Synthetic oligonucleotide
  Antisense strand to SEQ ID NO: 1391092
uauuagcucacuuaaugga

SEQ ID NO: 1391094 - RNA, 19 nt, Artificial Sequence
  Description of Artificial Sequence: Synthetic oligonucleotide
  Sense strand starting at position 2356 of SEQ ID NO: 1243047
ccaugauggcacuaggagu

SEQ ID NO: 1391095 - RNA, 19 nt, Artificial Sequence
  Description of Artificial Sequence: Synthetic oligonucleotide
  Antisense strand to SEQ ID NO: 1391094
acuccuagugccaucaugg

SEQ ID NO: 1391096 - RNA, 19 nt, Artificial Sequence
  Description of Artificial Sequence: Synthetic oligonucleotide
  Sense strand starting at position 2362 of SEQ ID NO: 1243047
uggcacuaggaguggaauu

SEQ ID NO: 1391097 - RNA, 19 nt, Artificial Sequence
  Description of Artificial Sequence: Synthetic oligonucleotide
  Antisense strand to SEQ ID NO: 1391096
aauuccacuccuagugcca

SEQ ID NO: 1391098 - RNA, 19 nt, Artificial Sequence
  Description of Artificial Sequence: Synthetic oligonucleotide
  Sense strand starting at position 2511 of SEQ ID NO: 1243047
gggaaauguauugggcugu

SEQ ID NO: 1391099 - RNA, 19 nt, Artificial Sequence
  Description of Artificial Sequence: Synthetic oligonucleotide
  Antisense strand to SEQ ID NO: 1391098
acagcccaauacauuuccc

SEQ ID NO: 1391100 - RNA, 19 nt, Artificial Sequence
  Description of Artificial Sequence: Synthetic oligonucleotide
  Sense strand starting at position 2636 of SEQ ID NO: 1243047
cccugaguggcugagaguu

SEQ ID NO: 1391101 - RNA, 19 nt, Artificial Sequence
  Description of Artificial Sequence: Synthetic oligonucleotide
  Antisense strand to SEQ ID NO: 1391100
aacucucagccacucaggg

SEQ ID NO: 1391102 - RNA, 19 nt, Artificial Sequence
  Description of Artificial Sequence: Synthetic oligonucleotide
  Sense strand starting at position 2642 of SEQ ID NO: 1243047
guggcugagaguuaaagga

SEQ ID NO: 1391103 - RNA, 19 nt, Artificial Sequence
  Description of Artificial Sequence: Synthetic oligonucleotide
  Antisense strand to SEQ ID NO: 1391102
uccuuuaacucucagccac

SEQ ID NO: 1391104 - RNA, 19 nt, Artificial Sequence
  Description of Artificial Sequence: Synthetic oligonucleotide
  Sense strand starting at position 2808 of SEQ ID NO: 1243047
ggccuugagucagucacuu

SEQ ID NO: 1391105 - RNA, 19 nt, Artificial Sequence
  Description of Artificial Sequence: Synthetic oligonucleotide
  Antisense strand to SEQ ID NO: 1391104
aagugacugacucaaggcc

SEQ ID NO: 1391106 - RNA, 19 nt, Artificial Sequence
  Description of Artificial Sequence: Synthetic oligonucleotide
  Sense strand starting at position 2837 of SEQ ID NO: 1243047
ugcuuccuugucuaggaau

SEQ ID NO: 1391107 - RNA, 19 nt, Artificial Sequence
  Description of Artificial Sequence: Synthetic oligonucleotide
  Antisense strand to SEQ ID NO: 1391106
auuccuagacaaggaagca

SEQ ID NO: 1391108 - RNA, 19 nt, Artificial Sequence
  Description of Artificial Sequence: Synthetic oligonucleotide
  Sense strand starting at position 2845 of SEQ ID NO: 1243047
ugucuaggaaugggagauu

SEQ ID NO: 1391109 - RNA, 19 nt, Artificial Sequence
  Description of Artificial Sequence: Synthetic oligonucleotide
  Antisense strand to SEQ ID NO: 1391108
aaucucccauuccuagaca

SEQ ID NO: 1391110 - RNA, 19 nt, Artificial Sequence
  Description of Artificial Sequence: Synthetic oligonucleotide
  Sense strand starting at position 2910 of SEQ ID NO: 1243047
auguguaguguucauagag

SEQ ID NO: 1391111 - RNA, 19 nt, Artificial Sequence
  Description of Artificial Sequence: Synthetic oligonucleotide
  Antisense strand to SEQ ID NO: 1391110
cucuaugaacacuacacau

SEQ ID NO: 1391112 - RNA, 19 nt, Artificial Sequence
  Description of Artificial Sequence: Synthetic oligonucleotide
  Sense strand starting at position 3000 of SEQ ID NO: 1243047
agggaacauuaauaacagu

SEQ ID NO: 1391113 - RNA, 19 nt, Artificial Sequence
  Description of Artificial Sequence: Synthetic oligonucleotide
  Antisense strand to SEQ ID NO: 1391112
acuguuauuaauguucccu

SEQ ID NO: 1391114 - RNA, 19 nt, Artificial Sequence
  Description of Artificial Sequence: Synthetic oligonucleotide
  Sense strand starting at position 3019 of SEQ ID NO: 1243047
gcauuacagccaugauaga

SEQ ID NO: 1391115 - RNA, 19 nt, Artificial Sequence
  Description of Artificial Sequence: Synthetic oligonucleotide
  Antisense strand to SEQ ID NO: 1391114
ucuaucauggcuguaaugc

SEQ ID NO: 1391116 - RNA, 19 nt, Artificial Sequence
  Description of Artificial Sequence: Synthetic oligonucleotide
  Sense strand starting at position 3072 of SEQ ID NO: 1243047
cuggcagacccuugagacu

SEQ ID NO: 1391117 - RNA, 19 nt, Artificial Sequence
  Description of Artificial Sequence: Synthetic oligonucleotide
  Antisense strand to SEQ ID NO: 1391116
agucucaagggucugccag

SEQ ID NO: 1391118 - RNA, 19 nt, Artificial Sequence
  Description of Artificial Sequence: Synthetic oligonucleotide
  Sense strand starting at position 3081 of SEQ ID NO: 1243047
ccuugagacucuuuagcca

SEQ ID NO: 1391119 - RNA, 19 nt, Artificial Sequence
  Description of Artificial Sequence: Synthetic oligonucleotide
  Antisense strand to SEQ ID NO: 1391118
uggcuaaagagucucaagg

SEQ ID NO: 1391120 - RNA, 19 nt, Artificial Sequence
  Description of Artificial Sequence: Synthetic oligonucleotide
  Sense strand starting at position 3084 of SEQ ID NO: 1243047
ugagacucuuuagccagau

SEQ ID NO: 1391121 - RNA, 19 nt, Artificial Sequence
  Description of Artificial Sequence: Synthetic oligonucleotide
  Antisense strand to SEQ ID NO: 1391120
aucuggcuaaagagucuca

SEQ ID NO: 1391122 - RNA, 19 nt, Artificial Sequence
  Description of Artificial Sequence: Synthetic oligonucleotide
  Sense strand starting at position 3085 of SEQ ID NO: 1243047
gagacucuuuagccagaua

SEQ ID NO: 1391123 - RNA, 19 nt, Artificial Sequence
  Description of Artificial Sequence: Synthetic oligonucleotide
  Antisense strand to SEQ ID NO: 1391122
uaucuggcuaaagagucuc

SEQ ID NO: 1391124 - RNA, 19 nt, Artificial Sequence
  Description of Artificial Sequence: Synthetic oligonucleotide
  Sense strand starting at position 3109 of SEQ ID NO: 1243047
acagaaagaugucuuucca

SEQ ID NO: 1391125 - RNA, 19 nt, Artificial Sequence
  Description of Artificial Sequence: Synthetic oligonucleotide
  Antisense strand to SEQ ID NO: 1391124
uggaaagacaucuuucugu

SEQ ID NO: 1391126 - RNA, 19 nt, Artificial Sequence
  Description of Artificial Sequence: Synthetic oligonucleotide
  Sense strand starting at position 3846 of SEQ ID NO: 1243047
ggaggucaccuguagaguu

SEQ ID NO: 1391127 - RNA, 19 nt, Artificial Sequence
  Description of Artificial Sequence: Synthetic oligonucleotide
  Antisense strand to SEQ ID NO: 1391126
aacucuacaggugaccucc

SEQ ID NO: 1391128 - RNA, 19 nt, Artificial Sequence
  Description of Artificial Sequence: Synthetic oligonucleotide
  Sense strand starting at position 36 of SEQ ID NO: 1243048
acugaugugugaccuuaaa

SEQ ID NO: 1391129 - RNA, 19 nt, Artificial Sequence
  Description of Artificial Sequence: Synthetic oligonucleotide
  Antisense strand to SEQ ID NO: 1391128
uuuaaggucacacaucagu

SEQ ID NO: 1391130 - RNA, 19 nt, Artificial Sequence
  Description of Artificial Sequence: Synthetic oligonucleotide
  Sense strand starting at position 59 of SEQ ID NO: 1243048
guacuugaccucugggagu

SEQ ID NO: 1391131 - RNA, 19 nt, Artificial Sequence
  Description of Artificial Sequence: Synthetic oligonucleotide
  Antisense strand to SEQ ID NO: 1391130
acucccagaggucaaguac

SEQ ID NO: 1391132 - RNA, 19 nt, Artificial Sequence
  Description of Artificial Sequence: Synthetic oligonucleotide
  Sense strand starting at position 61 of SEQ ID NO: 1243048
acuugaccucugggaguuu

SEQ ID NO: 1391133 - RNA, 19 nt, Artificial Sequence
  Description of Artificial Sequence: Synthetic oligonucleotide
  Antisense strand to SEQ ID NO: 1391132
aaacucccagaggucaagu

SEQ ID NO: 1391134 - RNA, 19 nt, Artificial Sequence
  Description of Artificial Sequence: Synthetic oligonucleotide
  Sense strand starting at position 166 of SEQ ID NO: 1243048
gugugugacaacuagaugu

SEQ ID NO: 1391135 - RNA, 19 nt, Artificial Sequence
  Description of Artificial Sequence: Synthetic oligonucleotide
  Antisense strand to SEQ ID NO: 1391134
acaucuaguugucacacac

SEQ ID NO: 1391136 - RNA, 19 nt, Artificial Sequence
  Description of Artificial Sequence: Synthetic oligonucleotide
  Sense strand starting at position 187 of SEQ ID NO: 1243048
cauaaaugguugcuggauu

SEQ ID NO: 1391137 - RNA, 19 nt, Artificial Sequence
  Description of Artificial Sequence: Synthetic oligonucleotide
  Antisense strand to SEQ ID NO: 1391136
aauccagcaaccauuuaug

SEQ ID NO: 1391138 - RNA, 19 nt, Artificial Sequence
  Description of Artificial Sequence: Synthetic oligonucleotide
  Sense strand starting at position 465 of SEQ ID NO: 1243048
gccucugugccugauugga

SEQ ID NO: 1391139 - RNA, 19 nt, Artificial Sequence
  Description of Artificial Sequence: Synthetic oligonucleotide
  Antisense strand to SEQ ID NO: 1391138
uccaaucaggcacagaggc

SEQ ID NO: 1391140 - RNA, 19 nt, Artificial Sequence
  Description of Artificial Sequence: Synthetic oligonucleotide
  Sense strand starting at position 667 of SEQ ID NO: 1243048
cagugcuuacuggauuaaa

SEQ ID NO: 1391141 - RNA, 19 nt, Artificial Sequence
  Description of Artificial Sequence: Synthetic oligonucleotide
  Antisense strand to SEQ ID NO: 1391140
uuuaauccaguaagcacug

SEQ ID NO: 1391142 - RNA, 19 nt, Artificial Sequence
  Description of Artificial Sequence: Synthetic oligonucleotide
  Sense strand starting at position 670 of SEQ ID NO: 1243048
ugcuuacuggauuaaauua

SEQ ID NO: 1391143 - RNA, 19 nt, Artificial Sequence
  Description of Artificial Sequence: Synthetic oligonucleotide
  Antisense strand to SEQ ID NO: 1391142
uaauuuaauccaguaagca

SEQ ID NO: 1391144 - RNA, 19 nt, Artificial Sequence
  Description of Artificial Sequence: Synthetic oligonucleotide
  Sense strand starting at position 724 of SEQ ID NO: 1243048
ccaagaguaugcucaggga

SEQ ID NO: 1391145 - RNA, 19 nt, Artificial Sequence
  Description of Artificial Sequence: Synthetic oligonucleotide
  Antisense strand to SEQ ID NO: 1391144
ucccugagcauacucuugg

SEQ ID NO: 1391146 - RNA, 19 nt, Artificial Sequence
  Description of Artificial Sequence: Synthetic oligonucleotide
  Sense strand starting at position 889 of SEQ ID NO: 1243048
ccuguuugagcugaguuaa

SEQ ID NO: 1391147 - RNA, 19 nt, Artificial Sequence
  Description of Artificial Sequence: Synthetic oligonucleotide
  Antisense strand to SEQ ID NO: 1391146
uuaacucagcucaaacagg

SEQ ID NO: 1391148 - RNA, 19 nt, Artificial Sequence
  Description of Artificial Sequence: Synthetic oligonucleotide
  Sense strand starting at position 901 of SEQ ID NO: 1243048
gaguuaagacaguggccau

SEQ ID NO: 1391149 - RNA, 19 nt, Artificial Sequence
  Description of Artificial Sequence: Synthetic oligonucleotide
  Antisense strand to SEQ ID NO: 1391148
auggccacugucuuaacuc

SEQ ID NO: 1391150 - RNA, 19 nt, Artificial Sequence
  Description of Artificial Sequence: Synthetic oligonucleotide
  Sense strand starting at position 1033 of SEQ ID NO: 1243048
ggccuuucuagagggacaa

SEQ ID NO: 1391151 - RNA, 19 nt, Artificial Sequence
  Description of Artificial Sequence: Synthetic oligonucleotide
  Antisense strand to SEQ ID NO: 1391150
uugucccucuagaaaggcc

SEQ ID NO: 1391152 - RNA, 19 nt, Artificial Sequence
  Description of Artificial Sequence: Synthetic oligonucleotide
  Sense strand starting at position 1115 of SEQ ID NO: 1243048
gauaaugauuggucacuca

SEQ ID NO: 1391153 - RNA, 19 nt, Artificial Sequence
  Description of Artificial Sequence: Synthetic oligonucleotide
  Antisense strand to SEQ ID NO: 1391152
ugagugaccaaucauuauc

SEQ ID NO: 1391154 - RNA, 19 nt, Artificial Sequence
  Description of Artificial Sequence: Synthetic oligonucleotide
  Sense strand starting at position 1242 of SEQ ID NO: 1243048
gcaucauuccaggaccgau

SEQ ID NO: 1391155 - RNA, 19 nt, Artificial Sequence
  Description of Artificial Sequence: Synthetic oligonucleotide
  Antisense strand to SEQ ID NO: 1391154
aucgguccuggaaugaugc

SEQ ID NO: 1391156 - RNA, 19 nt, Artificial Sequence
  Description of Artificial Sequence: Synthetic oligonucleotide
  Sense strand starting at position 1273 of SEQ ID NO: 1243048
ccuguuucccaugggcaga

SEQ ID NO: 1391157 - RNA, 19 nt, Artificial Sequence
  Description of Artificial Sequence: Synthetic oligonucleotide
  Antisense strand to SEQ ID NO: 1391156
ucugcccaugggaaacagg

SEQ ID NO: 1391158 - RNA, 19 nt, Artificial Sequence
  Description of Artificial Sequence: Synthetic oligonucleotide
  Sense strand starting at position 1363 of SEQ ID NO: 1243048
cuguuaucucccuggcaga

SEQ ID NO: 1391159 - RNA, 19 nt, Artificial Sequence
  Description of Artificial Sequence: Synthetic oligonucleotide
  Antisense strand to SEQ ID NO: 1391158
ucugccagggagauaacag

SEQ ID NO: 1391160 - RNA, 19 nt, Artificial Sequence
  Description of Artificial Sequence: Synthetic oligonucleotide
  Sense strand starting at position 1364 of SEQ ID NO: 1243048
uguuaucucccuggcagau

SEQ ID NO: 1391161 - RNA, 19 nt, Artificial Sequence
  Description of Artificial Sequence: Synthetic oligonucleotide
  Antisense strand to SEQ ID NO: 1391160
aucugccagggagauaaca

SEQ ID NO: 1391162 - RNA, 19 nt, Artificial Sequence
  Description of Artificial Sequence: Synthetic oligonucleotide
  Sense strand starting at position 1482 of SEQ ID NO: 1243048
acaggccuauccuuguuaa

SEQ ID NO: 1391163 - RNA, 19 nt, Artificial Sequence
  Description of Artificial Sequence: Synthetic oligonucleotide
  Antisense strand to SEQ ID NO: 1391162
uuaacaaggauaggccugu

SEQ ID NO: 1391164 - RNA, 19 nt, Artificial Sequence
  Description of Artificial Sequence: Synthetic oligonucleotide
  Sense strand starting at position 1485 of SEQ ID NO: 1243048
ggccuauccuuguuaaagg

SEQ ID NO: 1391165 - RNA, 19 nt, Artificial Sequence
  Description of Artificial Sequence: Synthetic oligonucleotide
  Antisense strand to SEQ ID NO: 1391164
ccuuuaacaaggauaggcc

SEQ ID NO: 1391166 - RNA, 19 nt, Artificial Sequence
  Description of Artificial Sequence: Synthetic oligonucleotide
  Sense strand starting at position 1506 of SEQ ID NO: 1243048
cucagagaucauugcaguu

SEQ ID NO: 1391167 - RNA, 19 nt, Artificial Sequence
  Description of Artificial Sequence: Synthetic oligonucleotide
  Antisense strand to SEQ ID NO: 1391166
aacugcaaugaucucugag

SEQ ID NO: 1391168 - RNA, 19 nt, Artificial Sequence
  Description of Artificial Sequence: Synthetic oligonucleotide
  Sense strand starting at position 1590 of SEQ ID NO: 1243048
gagagaucaucccaaggga

SEQ ID NO: 1391169 - RNA, 19 nt, Artificial Sequence
  Description of Artificial Sequence: Synthetic oligonucleotide
  Antisense strand to SEQ ID NO: 1391168
ucccuugggaugaucucuc

SEQ ID NO: 1391170 - RNA, 19 nt, Artificial Sequence
  Description of Artificial Sequence: Synthetic oligonucleotide
  Sense strand starting at position 1716 of SEQ ID NO: 1243048
gggccuguucucgcggaga

SEQ ID NO: 1391171 - RNA, 19 nt, Artificial Sequence
  Description of Artificial Sequence: Synthetic oligonucleotide
  Antisense strand to SEQ ID NO: 1391170
ucuccgcgagaacaggccc

SEQ ID NO: 1391172 - RNA, 19 nt, Artificial Sequence
  Description of Artificial Sequence: Synthetic oligonucleotide
  Sense strand starting at position 1719 of SEQ ID NO: 1243048
ccuguucucgcggagauga

SEQ ID NO: 1391173 - RNA, 19 nt, Artificial Sequence
  Description of Artificial Sequence: Synthetic oligonucleotide
  Antisense strand to SEQ ID NO: 1391172
ucaucuccgcgagaacagg

SEQ ID NO: 1391174 - RNA, 19 nt, Artificial Sequence
  Description of Artificial Sequence: Synthetic oligonucleotide
  Sense strand starting at position 2089 of SEQ ID NO: 1243048
agaccuauuuccgucgcaa

SEQ ID NO: 1391175 - RNA, 19 nt, Artificial Sequence
  Description of Artificial Sequence: Synthetic oligonucleotide
  Antisense strand to SEQ ID NO: 1391174
uugcgacggaaauaggucu

SEQ ID NO: 1391176 - RNA, 19 nt, Artificial Sequence
  Description of Artificial Sequence: Synthetic oligonucleotide
  Sense strand starting at position 2543 of SEQ ID NO: 1243048
aagagucguuagccuaaag

SEQ ID NO: 1391177 - RNA, 19 nt, Artificial Sequence
  Description of Artificial Sequence: Synthetic oligonucleotide
  Antisense strand to SEQ ID NO: 1391176
cuuuaggcuaacgacucuu

SEQ ID NO: 1391178 - RNA, 19 nt, Artificial Sequence
  Description of Artificial Sequence: Synthetic oligonucleotide
  Sense strand starting at position 2585 of SEQ ID NO: 1243048
gcgguauuagcuuaggauu

SEQ ID NO: 1391179 - RNA, 19 nt, Artificial Sequence
  Description of Artificial Sequence: Synthetic oligonucleotide
  Antisense strand to SEQ ID NO: 1391178
aauccuaagcuaauaccgc

SEQ ID NO: 1391180 - RNA, 19 nt, Artificial Sequence
  Description of Artificial Sequence: Synthetic oligonucleotide
  Sense strand starting at position 2603 of SEQ ID NO: 1243048
ugaauuguuccagggcgag

SEQ ID NO: 1391181 - RNA, 19 nt, Artificial Sequence
  Description of Artificial Sequence: Synthetic oligonucleotide
  Antisense strand to SEQ ID NO: 1391180
cucgcccuggaacaauuca

SEQ ID NO: 1391182 - RNA, 19 nt, Artificial Sequence
  Description of Artificial Sequence: Synthetic oligonucleotide
  Sense strand starting at position 2618 of SEQ ID NO: 1243048
cgagcaagaggcgauugau

SEQ ID NO: 1391183 - RNA, 19 nt, Artificial Sequence
  Description of Artificial Sequence: Synthetic oligonucleotide
  Antisense strand to SEQ ID NO: 1391182
aucaaucgccucuugcucg

SEQ ID NO: 1391184 - RNA, 19 nt, Artificial Sequence
  Description of Artificial Sequence: Synthetic oligonucleotide
  Sense strand starting at position 2754 of SEQ ID NO: 1243048
gauggagcucuauagcuca

SEQ ID NO: 1391185 - RNA, 19 nt, Artificial Sequence
  Description of Artificial Sequence: Synthetic oligonucleotide
  Antisense strand to SEQ ID NO: 1391184
ugagcuauagagcuccauc

SEQ ID NO: 1391186 - RNA, 19 nt, Artificial Sequence
  Description of Artificial Sequence: Synthetic oligonucleotide
  Sense strand starting at position 3111 of SEQ ID NO: 1243048
gcgugagucguagcugaau

SEQ ID NO: 1391187 - RNA, 19 nt, Artificial Sequence
  Description of Artificial Sequence: Synthetic oligonucleotide
  Antisense strand to SEQ ID NO: 1391186
auucagcuacgacucacgc

SEQ ID NO: 1391188 - RNA, 19 nt, Artificial Sequence
  Description of Artificial Sequence: Synthetic oligonucleotide
  Sense strand starting at position 3113 of SEQ ID NO: 1243048
gugagucguagcugaauuu

SEQ ID NO: 1391189 - RNA, 19 nt, Artificial Sequence
  Description of Artificial Sequence: Synthetic oligonucleotide
  Antisense strand to SEQ ID NO: 1391188
aaauucagcuacgacucac

SEQ ID NO: 1391190 - RNA, 19 nt, Artificial Sequence
  Description of Artificial Sequence: Synthetic oligonucleotide
  Sense strand starting at position 3122 of SEQ ID NO: 1243048
agcugaauuugagagcucu

SEQ ID NO: 1391191 - RNA, 19 nt, Artificial Sequence
  Description of Artificial Sequence: Synthetic oligonucleotide
  Antisense strand to SEQ ID NO: 1391190
agagcucucaaauucagcu

SEQ ID NO: 1391192 - RNA, 19 nt, Artificial Sequence
  Description of Artificial Sequence: Synthetic oligonucleotide
  Sense strand starting at position 3273 of SEQ ID NO: 1243048
ggccuaauucuuggucaga

SEQ ID NO: 1391193 - RNA, 19 nt, Artificial Sequence
  Description of Artificial Sequence: Synthetic oligonucleotide
  Antisense strand to SEQ ID NO: 1391192
ucugaccaagaauuaggcc

SEQ ID NO: 1391194 - RNA, 19 nt, Artificial Sequence
  Description of Artificial Sequence: Synthetic oligonucleotide
  Sense strand starting at position 3274 of SEQ ID NO: 1243048
gccuaauucuuggucagag

SEQ ID NO: 1391195 - RNA, 19 nt, Artificial Sequence
  Description of Artificial Sequence: Synthetic oligonucleotide
  Antisense strand to SEQ ID NO: 1391194
cucugaccaagaauuaggc

SEQ ID NO: 1391196 - RNA, 19 nt, Artificial Sequence
  Description of Artificial Sequence: Synthetic oligonucleotide
  Sense strand starting at position 3275 of SEQ ID NO: 1243048
ccuaauucuuggucagagu

SEQ ID NO: 1391197 - RNA, 19 nt, Artificial Sequence
  Description of Artificial Sequence: Synthetic oligonucleotide
  Antisense strand to SEQ ID NO: 1391196
acucugaccaagaauuagg

SEQ ID NO: 1391198 - RNA, 19 nt, Artificial Sequence
  Description of Artificial Sequence: Synthetic oligonucleotide
  Sense strand starting at position 3276 of SEQ ID NO: 1243048
cuaauucuuggucagaguu

SEQ ID NO: 1391199 - RNA, 19 nt, Artificial Sequence
  Description of Artificial Sequence: Synthetic oligonucleotide
  Antisense strand to SEQ ID NO: 1391198
aacucugaccaagaauuag

SEQ ID NO: 1391200 - RNA, 19 nt, Artificial Sequence
  Description of Artificial Sequence: Synthetic oligonucleotide
  Sense strand starting at position 3295 of SEQ ID NO: 1243048
gagggagacccaugguuug

SEQ ID NO: 1391201 - RNA, 19 nt, Artificial Sequence
  Description of Artificial Sequence: Synthetic oligonucleotide
  Antisense strand to SEQ ID NO: 1391200
caaaccaugggucucccuc

SEQ ID NO: 1391202 - RNA, 19 nt, Artificial Sequence
  Description of Artificial Sequence: Synthetic oligonucleotide
  Sense strand starting at position 3415 of SEQ ID NO: 1243048
ggguaaguaucuccauccu

SEQ ID NO: 1391203 - RNA, 19 nt, Artificial Sequence
  Description of Artificial Sequence: Synthetic oligonucleotide
  Antisense strand to SEQ ID NO: 1391202
aggauggagauacuuaccc

SEQ ID NO: 1391204 - RNA, 19 nt, Artificial Sequence
  Description of Artificial Sequence: Synthetic oligonucleotide
  Sense strand starting at position 3466 of SEQ ID NO: 1243048
ggccuuugauacccucauu

SEQ ID NO: 1391205 - RNA, 19 nt, Artificial Sequence
  Description of Artificial Sequence: Synthetic oligonucleotide
  Antisense strand to SEQ ID NO: 1391204
aaugaggguaucaaaggcc

SEQ ID NO: 1391206 - RNA, 19 nt, Artificial Sequence
  Description of Artificial Sequence: Synthetic oligonucleotide
  Sense strand starting at position 3703 of SEQ ID NO: 1243048
agcuacuuguaacuugaaa

SEQ ID NO: 1391207 - RNA, 19 nt, Artificial Sequence
  Description of Artificial Sequence: Synthetic oligonucleotide
  Antisense strand to SEQ ID NO: 1391206
uuucaaguuacaaguagcu

SEQ ID NO: 1391208 - RNA, 19 nt, Artificial Sequence
  Description of Artificial Sequence: Synthetic oligonucleotide
  Sense strand starting at position 82 of SEQ ID NO: 1243049
gugcaucuaccugauaaca

SEQ ID NO: 1391209 - RNA, 19 nt, Artificial Sequence
  Description of Artificial Sequence: Synthetic oligonucleotide
  Antisense strand to SEQ ID NO: 1391208
uguuaucagguagaugcac

SEQ ID NO: 1391210 - RNA, 19 nt, Artificial Sequence
  Description of Artificial Sequence: Synthetic oligonucleotide
  Sense strand starting at position 134 of SEQ ID NO: 1243049
cccagauacagguguaaug

SEQ ID NO: 1391211 - RNA, 19 nt, Artificial Sequence
  Description of Artificial Sequence: Synthetic oligonucleotide
  Antisense strand to SEQ ID NO: 1391210
cauuacaccuguaucuggg

SEQ ID NO: 1391212 - RNA, 19 nt, Artificial Sequence
  Description of Artificial Sequence: Synthetic oligonucleotide
  Sense strand starting at position 216 of SEQ ID NO: 1243049
acugaugugugaccuuaaa

SEQ ID NO: 1391213 - RNA, 19 nt, Artificial Sequence
  Description of Artificial Sequence: Synthetic oligonucleotide
  Antisense strand to SEQ ID NO: 1391212
uuuaaggucacacaucagu

SEQ ID NO: 1391214 - RNA, 19 nt, Artificial Sequence
  Description of Artificial Sequence: Synthetic oligonucleotide
  Sense strand starting at position 239 of SEQ ID NO: 1243049
guacuugaccucugggagu

SEQ ID NO: 1391215 - RNA, 19 nt, Artificial Sequence
  Description of Artificial Sequence: Synthetic oligonucleotide
  Antisense strand to SEQ ID NO: 1391214
acucccagaggucaaguac

SEQ ID NO: 1391216 - RNA, 19 nt, Artificial Sequence
  Description of Artificial Sequence: Synthetic oligonucleotide
  Sense strand starting at position 241 of SEQ ID NO: 1243049
acuugaccucugggaguuu

SEQ ID NO: 1391217 - RNA, 19 nt, Artificial Sequence
  Description of Artificial Sequence: Synthetic oligonucleotide
  Antisense strand to SEQ ID NO: 1391216
aaacucccagaggucaagu

SEQ ID NO: 1391218 - RNA, 19 nt, Artificial Sequence
  Description of Artificial Sequence: Synthetic oligonucleotide
  Sense strand starting at position 346 of SEQ ID NO: 1243049
gugugugacaacuagaugu

SEQ ID NO: 1391219 - RNA, 19 nt, Artificial Sequence
  Description of Artificial Sequence: Synthetic oligonucleotide
  Antisense strand to SEQ ID NO: 1391218
acaucuaguugucacacac

SEQ ID NO: 1391220 - RNA, 19 nt, Artificial Sequence
  Description of Artificial Sequence: Synthetic oligonucleotide
  Sense strand starting at position 367 of SEQ ID NO: 1243049
cauaaaugguugcuggauu

SEQ ID NO: 1391221 - RNA, 19 nt, Artificial Sequence
  Description of Artificial Sequence: Synthetic oligonucleotide
  Antisense strand to SEQ ID NO: 1391220
aauccagcaaccauuuaug

SEQ ID NO: 1391222 - RNA, 19 nt, Artificial Sequence
  Description of Artificial Sequence: Synthetic oligonucleotide
  Sense strand starting at position 645 of SEQ ID NO: 1243049
gccucugugccugauugga

SEQ ID NO: 1391223 - RNA, 19 nt, Artificial Sequence
  Description of Artificial Sequence: Synthetic oligonucleotide
  Antisense strand to SEQ ID NO: 1391222
uccaaucaggcacagaggc

SEQ ID NO: 1391224 - RNA, 19 nt, Artificial Sequence
  Description of Artificial Sequence: Synthetic oligonucleotide
  Sense strand starting at position 847 of SEQ ID NO: 1243049
cagugcuuacuggauuaaa

SEQ ID NO: 1391225 - RNA, 19 nt, Artificial Sequence
  Description of Artificial Sequence: Synthetic oligonucleotide
  Antisense strand to SEQ ID NO: 1391224
uuuaauccaguaagcacug

SEQ ID NO: 1391226 - RNA, 19 nt, Artificial Sequence
  Description of Artificial Sequence: Synthetic oligonucleotide
  Sense strand starting at position 850 of SEQ ID NO: 1243049
ugcuuacuggauuaaauua

SEQ ID NO: 1391227 - RNA, 19 nt, Artificial Sequence
  Description of Artificial Sequence: Synthetic oligonucleotide
  Antisense strand to SEQ ID NO: 1391226
uaauuuaauccaguaagca

SEQ ID NO: 1391228 - RNA, 19 nt, Artificial Sequence
  Description of Artificial Sequence: Synthetic oligonucleotide
  Sense strand starting at position 904 of SEQ ID NO: 1243049
ccaagaguaugcucaggga

SEQ ID NO: 1391229 - RNA, 19 nt, Artificial Sequence
  Description of Artificial Sequence: Synthetic oligonucleotide
  Antisense strand to SEQ ID NO: 1391228
ucccugagcauacucuugg

SEQ ID NO: 1391230 - RNA, 19 nt, Artificial Sequence
  Description of Artificial Sequence: Synthetic oligonucleotide
  Sense strand starting at position 1069 of SEQ ID NO: 1243049
ccuguuugagcugaguuaa

SEQ ID NO: 1391231 - RNA, 19 nt, Artificial Sequence
  Description of Artificial Sequence: Synthetic oligonucleotide
  Antisense strand to SEQ ID NO: 1391230
uuaacucagcucaaacagg

SEQ ID NO: 1391232 - RNA, 19 nt, Artificial Sequence
  Description of Artificial Sequence: Synthetic oligonucleotide
  Sense strand starting at position 1081 of SEQ ID NO: 1243049
gaguuaagacaguggccau

SEQ ID NO: 1391233 - RNA, 19 nt, Artificial Sequence
  Description of Artificial Sequence: Synthetic oligonucleotide
  Antisense strand to SEQ ID NO: 1391232
auggccacugucuuaacuc

SEQ ID NO: 1391234 - RNA, 19 nt, Artificial Sequence
  Description of Artificial Sequence: Synthetic oligonucleotide
  Sense strand starting at position 1213 of SEQ ID NO: 1243049
ggccuuucuagagggacaa

SEQ ID NO: 1391235 - RNA, 19 nt, Artificial Sequence
  Description of Artificial Sequence: Synthetic oligonucleotide
  Antisense strand to SEQ ID NO: 1391234
uugucccucuagaaaggcc

SEQ ID NO: 1391236 - RNA, 19 nt, Artificial Sequence
  Description of Artificial Sequence: Synthetic oligonucleotide
  Sense strand starting at position 1295 of SEQ ID NO: 1243049
gauaaugauuggucacuca

SEQ ID NO: 1391237 - RNA, 19 nt, Artificial Sequence
  Description of Artificial Sequence: Synthetic oligonucleotide
  Antisense strand to SEQ ID NO: 1391236
ugagugaccaaucauuauc

SEQ ID NO: 1391238 - RNA, 19 nt, Artificial Sequence
  Description of Artificial Sequence: Synthetic oligonucleotide
  Sense strand starting at position 1422 of SEQ ID NO: 1243049
gcaucauuccaggaccgau

SEQ ID NO: 1391239 - RNA, 19 nt, Artificial Sequence
  Description of Artificial Sequence: Synthetic oligonucleotide
  Antisense strand to SEQ ID NO: 1391238
aucgguccuggaaugaugc

SEQ ID NO: 1391240 - RNA, 19 nt, Artificial Sequence
  Description of Artificial Sequence: Synthetic oligonucleotide
  Sense strand starting at position 1453 of SEQ ID NO: 1243049
ccuguuucccaugggcaga

SEQ ID NO: 1391241 - RNA, 19 nt, Artificial Sequence
  Description of Artificial Sequence: Synthetic oligonucleotide
  Antisense strand to SEQ ID NO: 1391240
ucugcccaugggaaacagg

SEQ ID NO: 1391242 - RNA, 19 nt, Artificial Sequence
  Description of Artificial Sequence: Synthetic oligonucleotide
  Sense strand starting at position 1543 of SEQ ID NO: 1243049
cuguuaucucccuggcaga

SEQ ID NO: 1391243 - RNA, 19 nt, Artificial Sequence
  Description of Artificial Sequence: Synthetic oligonucleotide
  Antisense strand to SEQ ID NO: 1391242
ucugccagggagauaacag

SEQ ID NO: 1391244 - RNA, 19 nt, Artificial Sequence
  Description of Artificial Sequence: Synthetic oligonucleotide
  Sense strand starting at position 1662 of SEQ ID NO: 1243049
acaggccuauccuuguuaa

SEQ ID NO: 1391245 - RNA, 19 nt, Artificial Sequence
  Description of Artificial Sequence: Synthetic oligonucleotide
  Antisense strand to SEQ ID NO: 1391244
uuaacaaggauaggccugu

SEQ ID NO: 1391246 - RNA, 19 nt, Artificial Sequence
  Description of Artificial Sequence: Synthetic oligonucleotide
  Sense strand starting at position 1665 of SEQ ID NO: 1243049
ggccuauccuuguuaaagg

SEQ ID NO: 1391247 - RNA, 19 nt, Artificial Sequence
  Description of Artificial Sequence: Synthetic oligonucleotide
  Antisense strand to SEQ ID NO: 1391246
ccuuuaacaaggauaggcc

SEQ ID NO: 1391248 - RNA, 19 nt, Artificial Sequence
  Description of Artificial Sequence: Synthetic oligonucleotide
  Sense strand starting at position 1686 of SEQ ID NO: 1243049
cucagagaucauugcaguu

SEQ ID NO: 1391249 - RNA, 19 nt, Artificial Sequence
  Description of Artificial Sequence: Synthetic oligonucleotide
  Antisense strand to SEQ ID NO: 1391248
aacugcaaugaucucugag

SEQ ID NO: 1391250 - RNA, 19 nt, Artificial Sequence
  Description of Artificial Sequence: Synthetic oligonucleotide
  Sense strand starting at position 1770 of SEQ ID NO: 1243049
gagagaucaucccaaggga

SEQ ID NO: 1391251 - RNA, 19 nt, Artificial Sequence
  Description of Artificial Sequence: Synthetic oligonucleotide
  Antisense strand to SEQ ID NO: 1391250
ucccuugggaugaucucuc

SEQ ID NO: 1391252 - RNA, 19 nt, Artificial Sequence
  Description of Artificial Sequence: Synthetic oligonucleotide
  Sense strand starting at position 1896 of SEQ ID NO: 1243049
gggccuguucucgcggaga

SEQ ID NO: 1391253 - RNA, 19 nt, Artificial Sequence
  Description of Artificial Sequence: Synthetic oligonucleotide
  Antisense strand to SEQ ID NO: 1391252
ucuccgcgagaacaggccc

SEQ ID NO: 1391254 - RNA, 19 nt, Artificial Sequence
  Description of Artificial Sequence: Synthetic oligonucleotide
  Sense strand starting at position 1899 of SEQ ID NO: 1243049
ccuguucucgcggagauga

SEQ ID NO: 1391255 - RNA, 19 nt, Artificial Sequence
  Description of Artificial Sequence: Synthetic oligonucleotide
  Antisense strand to SEQ ID NO: 1391254
ucaucuccgcgagaacagg

SEQ ID NO: 1391256 - RNA, 19 nt, Artificial Sequence
  Description of Artificial Sequence: Synthetic oligonucleotide
  Sense strand starting at position 2269 of SEQ ID NO: 1243049
agaccuauuuccgucgcaa

SEQ ID NO: 1391257 - RNA, 19 nt, Artificial Sequence
  Description of Artificial Sequence: Synthetic oligonucleotide
  Antisense strand to SEQ ID NO: 1391256
uugcgacggaaauaggucu

SEQ ID NO: 1391258 - RNA, 19 nt, Artificial Sequence
  Description of Artificial Sequence: Synthetic oligonucleotide
  Sense strand starting at position 2723 of SEQ ID NO: 1243049
aagagucguuagccuaaag

SEQ ID NO: 1391259 - RNA, 19 nt, Artificial Sequence
  Description of Artificial Sequence: Synthetic oligonucleotide
  Antisense strand to SEQ ID NO: 1391258
cuuuaggcuaacgacucuu

SEQ ID NO: 1391260 - RNA, 19 nt, Artificial Sequence
  Description of Artificial Sequence: Synthetic oligonucleotide
  Sense strand starting at position 2765 of SEQ ID NO: 1243049
gcgguauuagcuuaggauu

SEQ ID NO: 1391261 - RNA, 19 nt, Artificial Sequence
  Description of Artificial Sequence: Synthetic oligonucleotide
  Antisense strand to SEQ ID NO: 1391260
aauccuaagcuaauaccgc

SEQ ID NO: 1391262 - RNA, 19 nt, Artificial Sequence
  Description of Artificial Sequence: Synthetic oligonucleotide
  Sense strand starting at position 2783 of SEQ ID NO: 1243049
ugaauuguuccagggcgag

SEQ ID NO: 1391263 - RNA, 19 nt, Artificial Sequence
  Description of Artificial Sequence: Synthetic oligonucleotide
  Antisense strand to SEQ ID NO: 1391262
cucgcccuggaacaauuca

SEQ ID NO: 1391264 - RNA, 19 nt, Artificial Sequence
  Description of Artificial Sequence: Synthetic oligonucleotide
  Sense strand starting at position 2798 of SEQ ID NO: 1243049
cgagcaagaggcgauugau

SEQ ID NO: 1391265 - RNA, 19 nt, Artificial Sequence
  Description of Artificial Sequence: Synthetic oligonucleotide
  Antisense strand to SEQ ID NO: 1391264
aucaaucgccucuugcucg

SEQ ID NO: 1391266 - RNA, 19 nt, Artificial Sequence
  Description of Artificial Sequence: Synthetic oligonucleotide
  Sense strand starting at position 2934 of SEQ ID NO: 1243049
gauggagcucuauagcuca

SEQ ID NO: 1391267 - RNA, 19 nt, Artificial Sequence
  Description of Artificial Sequence: Synthetic oligonucleotide
  Antisense strand to SEQ ID NO: 1391266
ugagcuauagagcuccauc

SEQ ID NO: 1391268 - RNA, 19 nt, Artificial Sequence
  Description of Artificial Sequence: Synthetic oligonucleotide
  Sense strand starting at position 3291 of SEQ ID NO: 1243049
gcgugagucguagcugaau

SEQ ID NO: 1391269 - RNA, 19 nt, Artificial Sequence
  Description of Artificial Sequence: Synthetic oligonucleotide
  Antisense strand to SEQ ID NO: 1391268
auucagcuacgacucacgc

SEQ ID NO: 1391270 - RNA, 19 nt, Artificial Sequence
  Description of Artificial Sequence: Synthetic oligonucleotide
  Sense strand starting at position 3293 of SEQ ID NO: 1243049
gugagucguagcugaauuu

SEQ ID NO: 1391271 - RNA, 19 nt, Artificial Sequence
  Description of Artificial Sequence: Synthetic oligonucleotide
  Antisense strand to SEQ ID NO: 1391270
aaauucagcuacgacucac

SEQ ID NO: 1391272 - RNA, 19 nt, Artificial Sequence
  Description of Artificial Sequence: Synthetic oligonucleotide
  Sense strand starting at position 3453 of SEQ ID NO: 1243049
ggccuaauucuuggucaga

SEQ ID NO: 1391273 - RNA, 19 nt, Artificial Sequence
  Description of Artificial Sequence: Synthetic oligonucleotide
  Antisense strand to SEQ ID NO: 1391272
ucugaccaagaauuaggcc

SEQ ID NO: 1391274 - RNA, 19 nt, Artificial Sequence
  Description of Artificial Sequence: Synthetic oligonucleotide
  Sense strand starting at position 3454 of SEQ ID NO: 1243049
gccuaauucuuggucagag

SEQ ID NO: 1391275 - RNA, 19 nt, Artificial Sequence
  Description of Artificial Sequence: Synthetic oligonucleotide
  Antisense strand to SEQ ID NO: 1391274
cucugaccaagaauuaggc

SEQ ID NO: 1391276 - RNA, 19 nt, Artificial Sequence
  Description of Artificial Sequence: Synthetic oligonucleotide
  Sense strand starting at position 3455 of SEQ ID NO: 1243049
ccuaauucuuggucagagu

SEQ ID NO: 1391277 - RNA, 19 nt, Artificial Sequence
  Description of Artificial Sequence: Synthetic oligonucleotide
  Antisense strand to SEQ ID NO: 1391276
acucugaccaagaauuagg

SEQ ID NO: 1391278 - RNA, 19 nt, Artificial Sequence
  Description of Artificial Sequence: Synthetic oligonucleotide
  Sense strand starting at position 3456 of SEQ ID NO: 1243049
cuaauucuuggucagaguu

SEQ ID NO: 1391279 - RNA, 19 nt, Artificial Sequence
  Description of Artificial Sequence: Synthetic oligonucleotide
  Antisense strand to SEQ ID NO: 1391278
aacucugaccaagaauuag

SEQ ID NO: 1391280 - RNA, 19 nt, Artificial Sequence
  Description of Artificial Sequence: Synthetic oligonucleotide
  Sense strand starting at position 3475 of SEQ ID NO: 1243049
gagggagacccaugguuug

SEQ ID NO: 1391281 - RNA, 19 nt, Artificial Sequence
  Description of Artificial Sequence: Synthetic oligonucleotide
  Antisense strand to SEQ ID NO: 1391280
caaaccaugggucucccuc

SEQ ID NO: 1391282 - RNA, 19 nt, Artificial Sequence
  Description of Artificial Sequence: Synthetic oligonucleotide
  Sense strand starting at position 3595 of SEQ ID NO: 1243049
ggguaaguaucuccauccu

SEQ ID NO: 1391283 - RNA, 19 nt, Artificial Sequence
  Description of Artificial Sequence: Synthetic oligonucleotide
  Antisense strand to SEQ ID NO: 1391282
aggauggagauacuuaccc

SEQ ID NO: 1391284 - RNA, 19 nt, Artificial Sequence
  Description of Artificial Sequence: Synthetic oligonucleotide
  Sense strand starting at position 3646 of SEQ ID NO: 1243049
ggccuuugauacccucauu

SEQ ID NO: 1391285 - RNA, 19 nt, Artificial Sequence
  Description of Artificial Sequence: Synthetic oligonucleotide
  Antisense strand to SEQ ID NO: 1391284
aaugaggguaucaaaggcc

SEQ ID NO: 1391286 - RNA, 19 nt, Artificial Sequence
  Description of Artificial Sequence: Synthetic oligonucleotide
  Sense strand starting at position 3883 of SEQ ID NO: 1243049
agcuacuuguaacuugaaa

SEQ ID NO: 1391287 - RNA, 19 nt, Artificial Sequence
  Description of Artificial Sequence: Synthetic oligonucleotide
  Antisense strand to SEQ ID NO: 1391286
uuucaaguuacaaguagcu

SEQ ID NO: 1391288 - RNA, 19 nt, Artificial Sequence
  Description of Artificial Sequence: Synthetic oligonucleotide
  Sense strand starting at position 92 of SEQ ID NO: 1243050
caggguacuugaguaacau

SEQ ID NO: 1391289 - RNA, 19 nt, Artificial Sequence
  Description of Artificial Sequence: Synthetic oligonucleotide
  Antisense strand to SEQ ID NO: 1391288
auguuacucaaguacccug

SEQ ID NO: 1391290 - RNA, 19 nt, Artificial Sequence
  Description of Artificial Sequence: Synthetic oligonucleotide
  Sense strand starting at position 320 of SEQ ID NO: 1243050
gugacuauuccaugcaaag

SEQ ID NO: 1391291 - RNA, 19 nt, Artificial Sequence
  Description of Artificial Sequence: Synthetic oligonucleotide
  Antisense strand to SEQ ID NO: 1391290
cuuugcauggaauagucac

SEQ ID NO: 1391292 - RNA, 19 nt, Artificial Sequence
  Description of Artificial Sequence: Synthetic oligonucleotide
  Sense strand starting at position 450 of SEQ ID NO: 1243050
aggcaaagucacugggaaa

SEQ ID NO: 1391293 - RNA, 19 nt, Artificial Sequence
  Description of Artificial Sequence: Synthetic oligonucleotide
  Antisense strand to SEQ ID NO: 1391292
uuucccagugacuuugccu

SEQ ID NO: 1391294 - RNA, 19 nt, Artificial Sequence
  Description of Artificial Sequence: Synthetic oligonucleotide
  Sense strand starting at position 451 of SEQ ID NO: 1243050
ggcaaagucacugggaaag

SEQ ID NO: 1391295 - RNA, 19 nt, Artificial Sequence
  Description of Artificial Sequence: Synthetic oligonucleotide
  Antisense strand to SEQ ID NO: 1391294
cuuucccagugacuuugcc

SEQ ID NO: 1391296 - RNA, 19 nt, Artificial Sequence
  Description of Artificial Sequence: Synthetic oligonucleotide
  Sense strand starting at position 540 of SEQ ID NO: 1243050
cuguauuccagacacgguu

SEQ ID NO: 1391297 - RNA, 19 nt, Artificial Sequence
  Description of Artificial Sequence: Synthetic oligonucleotide
  Antisense strand to SEQ ID NO: 1391296
aaccgugucuggaauacag

SEQ ID NO: 1391298 - RNA, 19 nt, Artificial Sequence
  Description of Artificial Sequence: Synthetic oligonucleotide
  Sense strand starting at position 555 of SEQ ID NO: 1243050
gguucuagcaacugggaua

SEQ ID NO: 1391299 - RNA, 19 nt, Artificial Sequence
  Description of Artificial Sequence: Synthetic oligonucleotide
  Antisense strand to SEQ ID NO: 1391298
uaucccaguugcuagaacc

SEQ ID NO: 1391300 - RNA, 19 nt, Artificial Sequence
  Description of Artificial Sequence: Synthetic oligonucleotide
  Sense strand starting at position 915 of SEQ ID NO: 1243050
augaauguuucuuucugaa

SEQ ID NO: 1391301 - RNA, 19 nt, Artificial Sequence
  Description of Artificial Sequence: Synthetic oligonucleotide
  Antisense strand to SEQ ID NO: 1391300
uucagaaagaaacauucau

SEQ ID NO: 1391302 - RNA, 19 nt, Artificial Sequence
  Description of Artificial Sequence: Synthetic oligonucleotide
  Sense strand starting at position 917 of SEQ ID NO: 1243050
gaauguuucuuucugaaug

SEQ ID NO: 1391303 - RNA, 19 nt, Artificial Sequence
  Description of Artificial Sequence: Synthetic oligonucleotide
  Antisense strand to SEQ ID NO: 1391302
cauucagaaagaaacauuc

SEQ ID NO: 1391304 - RNA, 19 nt, Artificial Sequence
  Description of Artificial Sequence: Synthetic oligonucleotide
  Sense strand starting at position 923 of SEQ ID NO: 1243050
uucuuucugaaugguagga

SEQ ID NO: 1391305 - RNA, 19 nt, Artificial Sequence
  Description of Artificial Sequence: Synthetic oligonucleotide
  Antisense strand to SEQ ID NO: 1391304
uccuaccauucagaaagaa

SEQ ID NO: 1391306 - RNA, 19 nt, Artificial Sequence
  Description of Artificial Sequence: Synthetic oligonucleotide
  Sense strand starting at position 1007 of SEQ ID NO: 1243050
uguauuaccuuugucauca

SEQ ID NO: 1391307 - RNA, 19 nt, Artificial Sequence
  Description of Artificial Sequence: Synthetic oligonucleotide
  Antisense strand to SEQ ID NO: 1391306
ugaugacaaagguaauaca

SEQ ID NO: 1391308 - RNA, 19 nt, Artificial Sequence
  Description of Artificial Sequence: Synthetic oligonucleotide
  Sense strand starting at position 1008 of SEQ ID NO: 1243050
guauuaccuuugucaucag

SEQ ID NO: 1391309 - RNA, 19 nt, Artificial Sequence
  Description of Artificial Sequence: Synthetic oligonucleotide
  Antisense strand to SEQ ID NO: 1391308
cugaugacaaagguaauac

SEQ ID NO: 1391310 - RNA, 19 nt, Artificial Sequence
  Description of Artificial Sequence: Synthetic oligonucleotide
  Sense strand starting at position 1033 of SEQ ID NO: 1243050
ugcugauauuaucuauaug

SEQ ID NO: 1391311 - RNA, 19 nt, Artificial Sequence
  Description of Artificial Sequence: Synthetic oligonucleotide
  Antisense strand to SEQ ID NO: 1391310
cauauagauaauaucagca

SEQ ID NO: 1391312 - RNA, 19 nt, Artificial Sequence
  Description of Artificial Sequence: Synthetic oligonucleotide
  Sense strand starting at position 1043 of SEQ ID NO: 1243050
aucuauaugugucuauagu

SEQ ID NO: 1391313 - RNA, 19 nt, Artificial Sequence
  Description of Artificial Sequence: Synthetic oligonucleotide
  Antisense strand to SEQ ID NO: 1391312
acuauagacacauauagau

SEQ ID NO: 1391314 - RNA, 19 nt, Artificial Sequence
  Description of Artificial Sequence: Synthetic oligonucleotide
  Sense strand starting at position 1044 of SEQ ID NO: 1243050
ucuauaugugucuauagua

SEQ ID NO: 1391315 - RNA, 19 nt, Artificial Sequence
  Description of Artificial Sequence: Synthetic oligonucleotide
  Antisense strand to SEQ ID NO: 1391314
uacuauagacacauauaga

SEQ ID NO: 1391316 - RNA, 19 nt, Artificial Sequence
  Description of Artificial Sequence: Synthetic oligonucleotide
  Sense strand starting at position 1051 of SEQ ID NO: 1243050
gugucuauaguacaaggau

SEQ ID NO: 1391317 - RNA, 19 nt, Artificial Sequence
  Description of Artificial Sequence: Synthetic oligonucleotide
  Antisense strand to SEQ ID NO: 1391316
auccuuguacuauagacac

SEQ ID NO: 1391318 - RNA, 19 nt, Artificial Sequence
  Description of Artificial Sequence: Synthetic oligonucleotide
  Sense strand starting at position 1108 of SEQ ID NO: 1243050
cucucaauuguaggauaug

SEQ ID NO: 1391319 - RNA, 19 nt, Artificial Sequence
  Description of Artificial Sequence: Synthetic oligonucleotide
  Antisense strand to SEQ ID NO: 1391318
cauauccuacaauugagag

SEQ ID NO: 1391320 - RNA, 19 nt, Artificial Sequence
  Description of Artificial Sequence: Synthetic oligonucleotide
  Sense strand starting at position 1239 of SEQ ID NO: 1243050
guagaagauaaugguaacu

SEQ ID NO: 1391321 - RNA, 19 nt, Artificial Sequence
  Description of Artificial Sequence: Synthetic oligonucleotide
  Antisense strand to SEQ ID NO: 1391320
aguuaccauuaucuucuac

SEQ ID NO: 1391322 - RNA, 19 nt, Artificial Sequence
  Description of Artificial Sequence: Synthetic oligonucleotide
  Sense strand starting at position 1395 of SEQ ID NO: 1243050
augguaauguaauccuaau

SEQ ID NO: 1391323 - RNA, 19 nt, Artificial Sequence
  Description of Artificial Sequence: Synthetic oligonucleotide
  Antisense strand to SEQ ID NO: 1391322
auuaggauuacauuaccau

SEQ ID NO: 1391324 - RNA, 19 nt, Artificial Sequence
  Description of Artificial Sequence: Synthetic oligonucleotide
  Sense strand starting at position 1451 of SEQ ID NO: 1243050
cugagaaagaguugguaag

SEQ ID NO: 1391325 - RNA, 19 nt, Artificial Sequence
  Description of Artificial Sequence: Synthetic oligonucleotide
  Antisense strand to SEQ ID NO: 1391324
cuuaccaacucuuucucag

SEQ ID NO: 1391326 - RNA, 19 nt, Artificial Sequence
  Description of Artificial Sequence: Synthetic oligonucleotide
  Sense strand starting at position 1588 of SEQ ID NO: 1243050
gccagauuaucaucccaga

SEQ ID NO: 1391327 - RNA, 19 nt, Artificial Sequence
  Description of Artificial Sequence: Synthetic oligonucleotide
  Antisense strand to SEQ ID NO: 1391326
ucugggaugauaaucuggc

SEQ ID NO: 1391328 - RNA, 19 nt, Artificial Sequence
  Description of Artificial Sequence: Synthetic oligonucleotide
  Sense strand starting at position 1604 of SEQ ID NO: 1243050
agauaaaucucaguuugca

SEQ ID NO: 1391329 - RNA, 19 nt, Artificial Sequence
  Description of Artificial Sequence: Synthetic oligonucleotide
  Antisense strand to SEQ ID NO: 1391328
ugcaaacugagauuuaucu

SEQ ID NO: 1391330 - RNA, 19 nt, Artificial Sequence
  Description of Artificial Sequence: Synthetic oligonucleotide
  Sense strand starting at position 1647 of SEQ ID NO: 1243050
ugaggauucuuacaauuug

SEQ ID NO: 1391331 - RNA, 19 nt, Artificial Sequence
  Description of Artificial Sequence: Synthetic oligonucleotide
  Antisense strand to SEQ ID NO: 1391330
caaauuguaagaauccuca

SEQ ID NO: 1391332 - RNA, 19 nt, Artificial Sequence
  Description of Artificial Sequence: Synthetic oligonucleotide
  Sense strand starting at position 1654 of SEQ ID NO: 1243050
ucuuacaauuugugggaaa

SEQ ID NO: 1391333 - RNA, 19 nt, Artificial Sequence
  Description of Artificial Sequence: Synthetic oligonucleotide
  Antisense strand to SEQ ID NO: 1391332
uuucccacaaauuguaaga

SEQ ID NO: 1391334 - RNA, 19 nt, Artificial Sequence
  Description of Artificial Sequence: Synthetic oligonucleotide
  Sense strand starting at position 1655 of SEQ ID NO: 1243050
cuuacaauuugugggaaau

SEQ ID NO: 1391335 - RNA, 19 nt, Artificial Sequence
  Description of Artificial Sequence: Synthetic oligonucleotide
  Antisense strand to SEQ ID NO: 1391334
auuucccacaaauuguaag

SEQ ID NO: 1391336 - RNA, 19 nt, Artificial Sequence
  Description of Artificial Sequence: Synthetic oligonucleotide
  Sense strand starting at position 2129 of SEQ ID NO: 1243050
uaauguuagggcugaaagu

SEQ ID NO: 1391337 - RNA, 19 nt, Artificial Sequence
  Description of Artificial Sequence: Synthetic oligonucleotide
  Antisense strand to SEQ ID NO: 1391336
acuuucagcccuaacauua

SEQ ID NO: 1391338 - RNA, 19 nt, Artificial Sequence
  Description of Artificial Sequence: Synthetic oligonucleotide
  Sense strand starting at position 2146 of SEQ ID NO: 1243050
gucauaccauugucugaaa

SEQ ID NO: 1391339 - RNA, 19 nt, Artificial Sequence
  Description of Artificial Sequence: Synthetic oligonucleotide
  Antisense strand to SEQ ID NO: 1391338
uuucagacaaugguaugac

SEQ ID NO: 1391340 - RNA, 19 nt, Artificial Sequence
  Description of Artificial Sequence: Synthetic oligonucleotide
  Sense strand starting at position 2161 of SEQ ID NO: 1243050
gaaagaguuuacuuaguuu

SEQ ID NO: 1391341 - RNA, 19 nt, Artificial Sequence
  Description of Artificial Sequence: Synthetic oligonucleotide
  Antisense strand to SEQ ID NO: 1391340
aaacuaaguaaacucuuuc

SEQ ID NO: 1391342 - RNA, 19 nt, Artificial Sequence
  Description of Artificial Sequence: Synthetic oligonucleotide
  Sense strand starting at position 2193 of SEQ ID NO: 1243050
uucccagggccaugugaaa

SEQ ID NO: 1391343 - RNA, 19 nt, Artificial Sequence
  Description of Artificial Sequence: Synthetic oligonucleotide
  Antisense strand to SEQ ID NO: 1391342
uuucacauggcccugggaa

SEQ ID NO: 1391344 - RNA, 19 nt, Artificial Sequence
  Description of Artificial Sequence: Synthetic oligonucleotide
  Sense strand starting at position 2866 of SEQ ID NO: 1243050
aaguaagauucuguggaca

SEQ ID NO: 1391345 - RNA, 19 nt, Artificial Sequence
  Description of Artificial Sequence: Synthetic oligonucleotide
  Antisense strand to SEQ ID NO: 1391344
uguccacagaaucuuacuu

SEQ ID NO: 1391346 - RNA, 19 nt, Artificial Sequence
  Description of Artificial Sequence: Synthetic oligonucleotide
  Sense strand starting at position 3121 of SEQ ID NO: 1243050
uaugaaauggcauauuggu

SEQ ID NO: 1391347 - RNA, 19 nt, Artificial Sequence
  Description of Artificial Sequence: Synthetic oligonucleotide
  Antisense strand to SEQ ID NO: 1391346
accaauaugccauuucaua

SEQ ID NO: 1391348 - RNA, 19 nt, Artificial Sequence
  Description of Artificial Sequence: Synthetic oligonucleotide
  Sense strand starting at position 3126 of SEQ ID NO: 1243050
aauggcauauugguaaaga

SEQ ID NO: 1391349 - RNA, 19 nt, Artificial Sequence
  Description of Artificial Sequence: Synthetic oligonucleotide
  Antisense strand to SEQ ID NO: 1391348
ucuuuaccaauaugccauu

SEQ ID NO: 1391350 - RNA, 19 nt, Artificial Sequence
  Description of Artificial Sequence: Synthetic oligonucleotide
  Sense strand starting at position 3192 of SEQ ID NO: 1243050
uuaaacauguuauccaagu

SEQ ID NO: 1391351 - RNA, 19 nt, Artificial Sequence
  Description of Artificial Sequence: Synthetic oligonucleotide
  Antisense strand to SEQ ID NO: 1391350
acuuggauaacauguuuaa

SEQ ID NO: 1391352 - RNA, 19 nt, Artificial Sequence
  Description of Artificial Sequence: Synthetic oligonucleotide
  Sense strand starting at position 3239 of SEQ ID NO: 1243050
ucacuuaacuuguccgaaa

SEQ ID NO: 1391353 - RNA, 19 nt, Artificial Sequence
  Description of Artificial Sequence: Synthetic oligonucleotide
  Antisense strand to SEQ ID NO: 1391352
uuucggacaaguuaaguga

SEQ ID NO: 1391354 - RNA, 19 nt, Artificial Sequence
  Description of Artificial Sequence: Synthetic oligonucleotide
  Sense strand starting at position 3288 of SEQ ID NO: 1243050
uguuccauacguuaaauaa

SEQ ID NO: 1391355 - RNA, 19 nt, Artificial Sequence
  Description of Artificial Sequence: Synthetic oligonucleotide
  Antisense strand to SEQ ID NO: 1391354
uuauuuaacguauggaaca

SEQ ID NO: 1391356 - RNA, 19 nt, Artificial Sequence
  Description of Artificial Sequence: Synthetic oligonucleotide
  Sense strand starting at position 3598 of SEQ ID NO: 1243050
uguuguguuguguucucau

SEQ ID NO: 1391357 - RNA, 19 nt, Artificial Sequence
  Description of Artificial Sequence: Synthetic oligonucleotide
  Antisense strand to SEQ ID NO: 1391356
augagaacacaacacaaca

SEQ ID NO: 1391358 - RNA, 19 nt, Artificial Sequence
  Description of Artificial Sequence: Synthetic oligonucleotide
  Sense strand starting at position 3617 of SEQ ID NO: 1243050
aucucagugccucacuuau

SEQ ID NO: 1391359 - RNA, 19 nt, Artificial Sequence
  Description of Artificial Sequence: Synthetic oligonucleotide
  Antisense strand to SEQ ID NO: 1391358
auaagugaggcacugagau

SEQ ID NO: 1391360 - RNA, 19 nt, Artificial Sequence
  Description of Artificial Sequence: Synthetic oligonucleotide
  Sense strand starting at position 3644 of SEQ ID NO: 1243050
aggacuauuuagggaaaca

SEQ ID NO: 1391361 - RNA, 19 nt, Artificial Sequence
  Description of Artificial Sequence: Synthetic oligonucleotide
  Antisense strand to SEQ ID NO: 1391360
uguuucccuaaauaguccu

SEQ ID NO: 1391362 - RNA, 19 nt, Artificial Sequence
  Description of Artificial Sequence: Synthetic oligonucleotide
  Sense strand starting at position 3758 of SEQ ID NO: 1243050
uuuaaucaaucagucaguu

SEQ ID NO: 1391363 - RNA, 19 nt, Artificial Sequence
  Description of Artificial Sequence: Synthetic oligonucleotide
  Antisense strand to SEQ ID NO: 1391362
aacugacugauugauuaaa

SEQ ID NO: 1391364 - RNA, 19 nt, Artificial Sequence
  Description of Artificial Sequence: Synthetic oligonucleotide
  Sense strand starting at position 3775 of SEQ ID NO: 1243050
uucuccuuugcagaaaugu

SEQ ID NO: 1391365 - RNA, 19 nt, Artificial Sequence
  Description of Artificial Sequence: Synthetic oligonucleotide
  Antisense strand to SEQ ID NO: 1391364
acauuucugcaaaggagaa

SEQ ID NO: 1391366 - RNA, 19 nt, Artificial Sequence
  Description of Artificial Sequence: Synthetic oligonucleotide
  Sense strand starting at position 3784 of SEQ ID NO: 1243050
gcagaaauguucuuccuug

SEQ ID NO: 1391367 - RNA, 19 nt, Artificial Sequence
  Description of Artificial Sequence: Synthetic oligonucleotide
  Antisense strand to SEQ ID NO: 1391366
caaggaagaacauuucugc

SEQ ID NO: 1391368 - RNA, 19 nt, Artificial Sequence
  Description of Artificial Sequence: Synthetic oligonucleotide
  Sense strand starting at position 35 of SEQ ID NO: 1243051
aggugagguauacgugaaa

SEQ ID NO: 1391369 - RNA, 19 nt, Artificial Sequence
  Description of Artificial Sequence: Synthetic oligonucleotide
  Antisense strand to SEQ ID NO: 1391368
uuucacguauaccucaccu

SEQ ID NO: 1391370 - RNA, 19 nt, Artificial Sequence
  Description of Artificial Sequence: Synthetic oligonucleotide
  Sense strand starting at position 36 of SEQ ID NO: 1243051
ggugagguauacgugaaag

SEQ ID NO: 1391371 - RNA, 19 nt, Artificial Sequence
  Description of Artificial Sequence: Synthetic oligonucleotide
  Antisense strand to SEQ ID NO: 1391370
cuuucacguauaccucacc

SEQ ID NO: 1391372 - RNA, 19 nt, Artificial Sequence
  Description of Artificial Sequence: Synthetic oligonucleotide
  Sense strand starting at position 48 of SEQ ID NO: 1243051
gugaaagaagcuuggccau

SEQ ID NO: 1391373 - RNA, 19 nt, Artificial Sequence
  Description of Artificial Sequence: Synthetic oligonucleotide
  Antisense strand to SEQ ID NO: 1391372
auggccaagcuucuuucac

SEQ ID NO: 1391374 - RNA, 19 nt, Artificial Sequence
  Description of Artificial Sequence: Synthetic oligonucleotide
  Sense strand starting at position 50 of SEQ ID NO: 1243051
gaaagaagcuuggccauga

SEQ ID NO: 1391375 - RNA, 19 nt, Artificial Sequence
  Description of Artificial Sequence: Synthetic oligonucleotide
  Antisense strand to SEQ ID NO: 1391374
ucauggccaagcuucuuuc

SEQ ID NO: 1391376 - RNA, 19 nt, Artificial Sequence
  Description of Artificial Sequence: Synthetic oligonucleotide
  Sense strand starting at position 51 of SEQ ID NO: 1243051
aaagaagcuuggccaugaa

SEQ ID NO: 1391377 - RNA, 19 nt, Artificial Sequence
  Description of Artificial Sequence: Synthetic oligonucleotide
  Antisense strand to SEQ ID NO: 1391376
uucauggccaagcuucuuu

SEQ ID NO: 1391378 - RNA, 19 nt, Artificial Sequence
  Description of Artificial Sequence: Synthetic oligonucleotide
  Sense strand starting at position 54 of SEQ ID NO: 1243051
gaagcuuggccaugaauug

SEQ ID NO: 1391379 - RNA, 19 nt, Artificial Sequence
  Description of Artificial Sequence: Synthetic oligonucleotide
  Antisense strand to SEQ ID NO: 1391378
caauucauggccaagcuuc

SEQ ID NO: 1391380 - RNA, 19 nt, Artificial Sequence
  Description of Artificial Sequence: Synthetic oligonucleotide
  Sense strand starting at position 55 of SEQ ID NO: 1243051
aagcuuggccaugaauuga

SEQ ID NO: 1391381 - RNA, 19 nt, Artificial Sequence
  Description of Artificial Sequence: Synthetic oligonucleotide
  Antisense strand to SEQ ID NO: 1391380
ucaauucauggccaagcuu

SEQ ID NO: 1391382 - RNA, 19 nt, Artificial Sequence
  Description of Artificial Sequence: Synthetic oligonucleotide
  Sense strand starting at position 177 of SEQ ID NO: 1243051
augcuuauauauguagaga

SEQ ID NO: 1391383 - RNA, 19 nt, Artificial Sequence
  Description of Artificial Sequence: Synthetic oligonucleotide
  Antisense strand to SEQ ID NO: 1391382
ucucuacauauauaagcau

SEQ ID NO: 1391384 - RNA, 19 nt, Artificial Sequence
  Description of Artificial Sequence: Synthetic oligonucleotide
  Sense strand starting at position 230 of SEQ ID NO: 1243051
aguaauugccuuuaggaag

SEQ ID NO: 1391385 - RNA, 19 nt, Artificial Sequence
  Description of Artificial Sequence: Synthetic oligonucleotide
  Antisense strand to SEQ ID NO: 1391384
cuuccuaaaggcaauuacu

SEQ ID NO: 1391386 - RNA, 19 nt, Artificial Sequence
  Description of Artificial Sequence: Synthetic oligonucleotide
  Sense strand starting at position 727 of SEQ ID NO: 1243051
accgacaugcucuaguaua

SEQ ID NO: 1391387 - RNA, 19 nt, Artificial Sequence
  Description of Artificial Sequence: Synthetic oligonucleotide
  Antisense strand to SEQ ID NO: 1391386
uauacuagagcaugucggu

SEQ ID NO: 1391388 - RNA, 19 nt, Artificial Sequence
  Description of Artificial Sequence: Synthetic oligonucleotide
  Sense strand starting at position 996 of SEQ ID NO: 1243051
ucagccugucaauagcauu

SEQ ID NO: 1391389 - RNA, 19 nt, Artificial Sequence
  Description of Artificial Sequence: Synthetic oligonucleotide
  Antisense strand to SEQ ID NO: 1391388
aaugcuauugacaggcuga

SEQ ID NO: 1391390 - RNA, 19 nt, Artificial Sequence
  Description of Artificial Sequence: Synthetic oligonucleotide
  Sense strand starting at position 1024 of SEQ ID NO: 1243051
uggccauugcuugcucgau

SEQ ID NO: 1391391 - RNA, 19 nt, Artificial Sequence
  Description of Artificial Sequence: Synthetic oligonucleotide
  Antisense strand to SEQ ID NO: 1391390
aucgagcaagcaauggcca

SEQ ID NO: 1391392 - RNA, 19 nt, Artificial Sequence
  Description of Artificial Sequence: Synthetic oligonucleotide
  Sense strand starting at position 1110 of SEQ ID NO: 1243051
uuccaagguugagucuuaa

SEQ ID NO: 1391393 - RNA, 19 nt, Artificial Sequence
  Description of Artificial Sequence: Synthetic oligonucleotide
  Antisense strand to SEQ ID NO: 1391392
uuaagacucaaccuuggaa

SEQ ID NO: 1391394 - RNA, 19 nt, Artificial Sequence
  Description of Artificial Sequence: Synthetic oligonucleotide
  Sense strand starting at position 1289 of SEQ ID NO: 1243051
cuuacacuuggaugucuaa

SEQ ID NO: 1391395 - RNA, 19 nt, Artificial Sequence
  Description of Artificial Sequence: Synthetic oligonucleotide
  Antisense strand to SEQ ID NO: 1391394
uuagacauccaaguguaag

SEQ ID NO: 1391396 - RNA, 19 nt, Artificial Sequence
  Description of Artificial Sequence: Synthetic oligonucleotide
  Sense strand starting at position 2194 of SEQ ID NO: 1243051
gccgcuguggccaaggauu

SEQ ID NO: 1391397 - RNA, 19 nt, Artificial Sequence
  Description of Artificial Sequence: Synthetic oligonucleotide
  Antisense strand to SEQ ID NO: 1391396
aauccuuggccacagcggc

SEQ ID NO: 1391398 - RNA, 19 nt, Artificial Sequence
  Description of Artificial Sequence: Synthetic oligonucleotide
  Sense strand starting at position 2312 of SEQ ID NO: 1243051
acgcucugucuugagggau

SEQ ID NO: 1391399 - RNA, 19 nt, Artificial Sequence
  Description of Artificial Sequence: Synthetic oligonucleotide
  Antisense strand to SEQ ID NO: 1391398
aucccucaagacagagcgu

SEQ ID NO: 1391400 - RNA, 19 nt, Artificial Sequence
  Description of Artificial Sequence: Synthetic oligonucleotide
  Sense strand starting at position 2315 of SEQ ID NO: 1243051
cucugucuugagggaugaa

SEQ ID NO: 1391401 - RNA, 19 nt, Artificial Sequence
  Description of Artificial Sequence: Synthetic oligonucleotide
  Antisense strand to SEQ ID NO: 1391400
uucaucccucaagacagag

SEQ ID NO: 1391402 - RNA, 19 nt, Artificial Sequence
  Description of Artificial Sequence: Synthetic oligonucleotide
  Sense strand starting at position 2318 of SEQ ID NO: 1243051
ugucuugagggaugaagug

SEQ ID NO: 1391403 - RNA, 19 nt, Artificial Sequence
  Description of Artificial Sequence: Synthetic oligonucleotide
  Antisense strand to SEQ ID NO: 1391402
cacuucaucccucaagaca

SEQ ID NO: 1391404 - RNA, 19 nt, Artificial Sequence
  Description of Artificial Sequence: Synthetic oligonucleotide
  Sense strand starting at position 2467 of SEQ ID NO: 1243051
agauccaaaucugaaggau

SEQ ID NO: 1391405 - RNA, 19 nt, Artificial Sequence
  Description of Artificial Sequence: Synthetic oligonucleotide
  Antisense strand to SEQ ID NO: 1391404
auccuucagauuuggaucu

SEQ ID NO: 1391406 - RNA, 19 nt, Artificial Sequence
  Description of Artificial Sequence: Synthetic oligonucleotide
  Sense strand starting at position 2566 of SEQ ID NO: 1243051
ggguccugucuuuagagca

SEQ ID NO: 1391407 - RNA, 19 nt, Artificial Sequence
  Description of Artificial Sequence: Synthetic oligonucleotide
  Antisense strand to SEQ ID NO: 1391406
ugcucuaaagacaggaccc

SEQ ID NO: 1391408 - RNA, 19 nt, Artificial Sequence
  Description of Artificial Sequence: Synthetic oligonucleotide
  Sense strand starting at position 2592 of SEQ ID NO: 1243051
guucuagcucuagaaauug

SEQ ID NO: 1391409 - RNA, 19 nt, Artificial Sequence
  Description of Artificial Sequence: Synthetic oligonucleotide
  Antisense strand to SEQ ID NO: 1391408
caauuucuagagcuagaac

SEQ ID NO: 1391410 - RNA, 19 nt, Artificial Sequence
  Description of Artificial Sequence: Synthetic oligonucleotide
  Sense strand starting at position 2967 of SEQ ID NO: 1243051
gaaggaucagcgugggaaa

SEQ ID NO: 1391411 - RNA, 19 nt, Artificial Sequence
  Description of Artificial Sequence: Synthetic oligonucleotide
  Antisense strand to SEQ ID NO: 1391410
uuucccacgcugauccuuc

SEQ ID NO: 1391412 - RNA, 19 nt, Artificial Sequence
  Description of Artificial Sequence: Synthetic oligonucleotide
  Sense strand starting at position 2986 of SEQ ID NO: 1243051
gagagaagcucuuuguaau

SEQ ID NO: 1391413 - RNA, 19 nt, Artificial Sequence
  Description of Artificial Sequence: Synthetic oligonucleotide
  Antisense strand to SEQ ID NO: 1391412
auuacaaagagcuucucuc

SEQ ID NO: 1391414 - RNA, 19 nt, Artificial Sequence
  Description of Artificial Sequence: Synthetic oligonucleotide
  Sense strand starting at position 2987 of SEQ ID NO: 1243051
agagaagcucuuuguaaug

SEQ ID NO: 1391415 - RNA, 19 nt, Artificial Sequence
  Description of Artificial Sequence: Synthetic oligonucleotide
  Antisense strand to SEQ ID NO: 1391414
cauuacaaagagcuucucu

SEQ ID NO: 1391416 - RNA, 19 nt, Artificial Sequence
  Description of Artificial Sequence: Synthetic oligonucleotide
  Sense strand starting at position 3154 of SEQ ID NO: 1243051
cugaguagucuuugggaaa

SEQ ID NO: 1391417 - RNA, 19 nt, Artificial Sequence
  Description of Artificial Sequence: Synthetic oligonucleotide
  Antisense strand to SEQ ID NO: 1391416
uuucccaaagacuacucag

SEQ ID NO: 1391418 - RNA, 19 nt, Artificial Sequence
  Description of Artificial Sequence: Synthetic oligonucleotide
  Sense strand starting at position 3230 of SEQ ID NO: 1243051
guggaugggacauguaugu

SEQ ID NO: 1391419 - RNA, 19 nt, Artificial Sequence
  Description of Artificial Sequence: Synthetic oligonucleotide
  Antisense strand to SEQ ID NO: 1391418
acauacaugucccauccac

SEQ ID NO: 1391420 - RNA, 19 nt, Artificial Sequence
  Description of Artificial Sequence: Synthetic oligonucleotide
  Sense strand starting at position 3234 of SEQ ID NO: 1243051
augggacauguauguaaga

SEQ ID NO: 1391421 - RNA, 19 nt, Artificial Sequence
  Description of Artificial Sequence: Synthetic oligonucleotide
  Antisense strand to SEQ ID NO: 1391420
ucuuacauacaugucccau

SEQ ID NO: 1391422 - RNA, 19 nt, Artificial Sequence
  Description of Artificial Sequence: Synthetic oligonucleotide
  Sense strand starting at position 3235 of SEQ ID NO: 1243051
ugggacauguauguaagaa

SEQ ID NO: 1391423 - RNA, 19 nt, Artificial Sequence
  Description of Artificial Sequence: Synthetic oligonucleotide
  Antisense strand to SEQ ID NO: 1391422
uucuuacauacauguccca

SEQ ID NO: 1391424 - RNA, 19 nt, Artificial Sequence
  Description of Artificial Sequence: Synthetic oligonucleotide
  Sense strand starting at position 3794 of SEQ ID NO: 1243051
agcagaaucaaggguccuu

SEQ ID NO: 1391425 - RNA, 19 nt, Artificial Sequence
  Description of Artificial Sequence: Synthetic oligonucleotide
  Antisense strand to SEQ ID NO: 1391424
aaggacccuugauucugcu

SEQ ID NO: 1391426 - RNA, 19 nt, Artificial Sequence
  Description of Artificial Sequence: Synthetic oligonucleotide
  Sense strand starting at position 3803 of SEQ ID NO: 1243051
aaggguccuuccuugcaua

SEQ ID NO: 1391427 - RNA, 19 nt, Artificial Sequence
  Description of Artificial Sequence: Synthetic oligonucleotide
  Antisense strand to SEQ ID NO: 1391426
uaugcaaggaaggacccuu

SEQ ID NO: 1391428 - RNA, 19 nt, Artificial Sequence
  Description of Artificial Sequence: Synthetic oligonucleotide
  Sense strand starting at position 3826 of SEQ ID NO: 1243051
ugcuuucuggucuauguga

SEQ ID NO: 1391429 - RNA, 19 nt, Artificial Sequence
  Description of Artificial Sequence: Synthetic oligonucleotide
  Antisense strand to SEQ ID NO: 1391428
ucacauagaccagaaagca

SEQ ID NO: 1391430 - RNA, 19 nt, Artificial Sequence
  Description of Artificial Sequence: Synthetic oligonucleotide
  Sense strand starting at position 3828 of SEQ ID NO: 1243051
cuuucuggucuaugugaga

SEQ ID NO: 1391431 - RNA, 19 nt, Artificial Sequence
  Description of Artificial Sequence: Synthetic oligonucleotide
  Antisense strand to SEQ ID NO: 1391430
ucucacauagaccagaaag

SEQ ID NO: 1391432 - RNA, 19 nt, Artificial Sequence
  Description of Artificial Sequence: Synthetic oligonucleotide
  Sense strand starting at position 3839 of SEQ ID NO: 1243051
augugagacccuuagucac

SEQ ID NO: 1391433 - RNA, 19 nt, Artificial Sequence
  Description of Artificial Sequence: Synthetic oligonucleotide
  Antisense strand to SEQ ID NO: 1391432
gugacuaagggucucacau

SEQ ID NO: 1391434 - RNA, 19 nt, Artificial Sequence
  Description of Artificial Sequence: Synthetic oligonucleotide
  Sense strand starting at position 3925 of SEQ ID NO: 1243051
uuagaauucuagguuagcu

SEQ ID NO: 1391435 - RNA, 19 nt, Artificial Sequence
  Description of Artificial Sequence: Synthetic oligonucleotide
  Antisense strand to SEQ ID NO: 1391434
agcuaaccuagaauucuaa

SEQ ID NO: 1391436 - RNA, 19 nt, Artificial Sequence
  Description of Artificial Sequence: Synthetic oligonucleotide
  Sense strand starting at position 3927 of SEQ ID NO: 1243051
agaauucuagguuagcuca

SEQ ID NO: 1391437 - RNA, 19 nt, Artificial Sequence
  Description of Artificial Sequence: Synthetic oligonucleotide
  Antisense strand to SEQ ID NO: 1391436
ugagcuaaccuagaauucu

SEQ ID NO: 1391438 - RNA, 19 nt, Artificial Sequence
  Description of Artificial Sequence: Synthetic oligonucleotide
  Sense strand starting at position 3930 of SEQ ID NO: 1243051
auucuagguuagcucauua

SEQ ID NO: 1391439 - RNA, 19 nt, Artificial Sequence
  Description of Artificial Sequence: Synthetic oligonucleotide
  Antisense strand to SEQ ID NO: 1391438
uaaugagcuaaccuagaau

SEQ ID NO: 1391440 - RNA, 19 nt, Artificial Sequence
  Description of Artificial Sequence: Synthetic oligonucleotide
  Sense strand starting at position 3934 of SEQ ID NO: 1243051
uagguuagcucauuagauu

SEQ ID NO: 1391441 - RNA, 19 nt, Artificial Sequence
  Description of Artificial Sequence: Synthetic oligonucleotide
  Antisense strand to SEQ ID NO: 1391440
aaucuaaugagcuaaccua

SEQ ID NO: 1391442 - RNA, 19 nt, Artificial Sequence
  Description of Artificial Sequence: Synthetic oligonucleotide
  Sense strand starting at position 3935 of SEQ ID NO: 1243051
agguuagcucauuagauug

SEQ ID NO: 1391443 - RNA, 19 nt, Artificial Sequence
  Description of Artificial Sequence: Synthetic oligonucleotide
  Antisense strand to SEQ ID NO: 1391442
caaucuaaugagcuaaccu

SEQ ID NO: 1391444 - RNA, 19 nt, Artificial Sequence
  Description of Artificial Sequence: Synthetic oligonucleotide
  Sense strand starting at position 3940 of SEQ ID NO: 1243051
agcucauuagauugacuuu

SEQ ID NO: 1391445 - RNA, 19 nt, Artificial Sequence
  Description of Artificial Sequence: Synthetic oligonucleotide
  Antisense strand to SEQ ID NO: 1391444
aaagucaaucuaaugagcu

SEQ ID NO: 1391446 - RNA, 19 nt, Artificial Sequence
  Description of Artificial Sequence: Synthetic oligonucleotide
  Sense strand starting at position 3967 of SEQ ID NO: 1243051
ugcuucugucaguuaugca

SEQ ID NO: 1391447 - RNA, 19 nt, Artificial Sequence
  Description of Artificial Sequence: Synthetic oligonucleotide
  Antisense strand to SEQ ID NO: 1391446
ugcauaacugacagaagca

SEQ ID NO: 1391448 - RNA, 19 nt, Artificial Sequence
  Description of Artificial Sequence: Synthetic oligonucleotide
  Sense strand starting at position 70 of SEQ ID NO: 1243052
uaguuauaucauggagaau

SEQ ID NO: 1391449 - RNA, 19 nt, Artificial Sequence
  Description of Artificial Sequence: Synthetic oligonucleotide
  Antisense strand to SEQ ID NO: 1391448
auucuccaugauauaacua

SEQ ID NO: 1391450 - RNA, 19 nt, Artificial Sequence
  Description of Artificial Sequence: Synthetic oligonucleotide
  Sense strand starting at position 217 of SEQ ID NO: 1243052
aucagagguccaugaacca

SEQ ID NO: 1391451 - RNA, 19 nt, Artificial Sequence
  Description of Artificial Sequence: Synthetic oligonucleotide
  Antisense strand to SEQ ID NO: 1391450
ugguucauggaccucugau

SEQ ID NO: 1391452 - RNA, 19 nt, Artificial Sequence
  Description of Artificial Sequence: Synthetic oligonucleotide
  Sense strand starting at position 245 of SEQ ID NO: 1243052
acuuauagagcugguaauu

SEQ ID NO: 1391453 - RNA, 19 nt, Artificial Sequence
  Description of Artificial Sequence: Synthetic oligonucleotide
  Antisense strand to SEQ ID NO: 1391452
aauuaccagcucuauaagu

SEQ ID NO: 1391454 - RNA, 19 nt, Artificial Sequence
  Description of Artificial Sequence: Synthetic oligonucleotide
  Sense strand starting at position 361 of SEQ ID NO: 1243052
aacucuaucgaagacuguu

SEQ ID NO: 1391455 - RNA, 19 nt, Artificial Sequence
  Description of Artificial Sequence: Synthetic oligonucleotide
  Antisense strand to SEQ ID NO: 1391454
aacagucuucgauagaguu

SEQ ID NO: 1391456 - RNA, 19 nt, Artificial Sequence
  Description of Artificial Sequence: Synthetic oligonucleotide
  Sense strand starting at position 364 of SEQ ID NO: 1243052
ucuaucgaagacuguuaaa

SEQ ID NO: 1391457 - RNA, 19 nt, Artificial Sequence
  Description of Artificial Sequence: Synthetic oligonucleotide
  Antisense strand to SEQ ID NO: 1391456
uuuaacagucuucgauaga

SEQ ID NO: 1391458 - RNA, 19 nt, Artificial Sequence
  Description of Artificial Sequence: Synthetic oligonucleotide
  Sense strand starting at position 489 of SEQ ID NO: 1243052
ggaacuagguuagucaaua

SEQ ID NO: 1391459 - RNA, 19 nt, Artificial Sequence
  Description of Artificial Sequence: Synthetic oligonucleotide
  Antisense strand to SEQ ID NO: 1391458
uauugacuaaccuaguucc

SEQ ID NO: 1391460 - RNA, 19 nt, Artificial Sequence
  Description of Artificial Sequence: Synthetic oligonucleotide
  Sense strand starting at position 490 of SEQ ID NO: 1243052
gaacuagguuagucaauac

SEQ ID NO: 1391461 - RNA, 19 nt, Artificial Sequence
  Description of Artificial Sequence: Synthetic oligonucleotide
  Antisense strand to SEQ ID NO: 1391460
guauugacuaaccuaguuc

SEQ ID NO: 1391462 - RNA, 19 nt, Artificial Sequence
  Description of Artificial Sequence: Synthetic oligonucleotide
  Sense strand starting at position 553 of SEQ ID NO: 1243052
agaccucagcugcagaauu

SEQ ID NO: 1391463 - RNA, 19 nt, Artificial Sequence
  Description of Artificial Sequence: Synthetic oligonucleotide
  Antisense strand to SEQ ID NO: 1391462
aauucugcagcugaggucu

SEQ ID NO: 1391464 - RNA, 19 nt, Artificial Sequence
  Description of Artificial Sequence: Synthetic oligonucleotide
  Sense strand starting at position 661 of SEQ ID NO: 1243052
gguaaagugguaugugaca

SEQ ID NO: 1391465 - RNA, 19 nt, Artificial Sequence
  Description of Artificial Sequence: Synthetic oligonucleotide
  Antisense strand to SEQ ID NO: 1391464
ugucacauaccacuuuacc

SEQ ID NO: 1391466 - RNA, 19 nt, Artificial Sequence
  Description of Artificial Sequence: Synthetic oligonucleotide
  Sense strand starting at position 666 of SEQ ID NO: 1243052
agugguaugugacaaauuu

SEQ ID NO: 1391467 - RNA, 19 nt, Artificial Sequence
  Description of Artificial Sequence: Synthetic oligonucleotide
  Antisense strand to SEQ ID NO: 1391466
aaauuugucacauaccacu

SEQ ID NO: 1391468 - RNA, 19 nt, Artificial Sequence
  Description of Artificial Sequence: Synthetic oligonucleotide
  Sense strand starting at position 687 of SEQ ID NO: 1243052
aagcuagucuguguauaca

SEQ ID NO: 1391469 - RNA, 19 nt, Artificial Sequence
  Description of Artificial Sequence: Synthetic oligonucleotide
  Antisense strand to SEQ ID NO: 1391468
uguauacacagacuagcuu

SEQ ID NO: 1391470 - RNA, 19 nt, Artificial Sequence
  Description of Artificial Sequence: Synthetic oligonucleotide
  Sense strand starting at position 690 of SEQ ID NO: 1243052
cuagucuguguauacaaca

SEQ ID NO: 1391471 - RNA, 19 nt, Artificial Sequence
  Description of Artificial Sequence: Synthetic oligonucleotide
  Antisense strand to SEQ ID NO: 1391470
uguuguauacacagacuag

SEQ ID NO: 1391472 - RNA, 19 nt, Artificial Sequence
  Description of Artificial Sequence: Synthetic oligonucleotide
  Sense strand starting at position 751 of SEQ ID NO: 1243052
gcaagcauccaggauuaau

SEQ ID NO: 1391473 - RNA, 19 nt, Artificial Sequence
  Description of Artificial Sequence: Synthetic oligonucleotide
  Antisense strand to SEQ ID NO: 1391472
auuaauccuggaugcuugc

SEQ ID NO: 1391474 - RNA, 19 nt, Artificial Sequence
  Description of Artificial Sequence: Synthetic oligonucleotide
  Sense strand starting at position 754 of SEQ ID NO: 1243052
agcauccaggauuaaugua

SEQ ID NO: 1391475 - RNA, 19 nt, Artificial Sequence
  Description of Artificial Sequence: Synthetic oligonucleotide
  Antisense strand to SEQ ID NO: 1391474
uacauuaauccuggaugcu

SEQ ID NO: 1391476 - RNA, 19 nt, Artificial Sequence
  Description of Artificial Sequence: Synthetic oligonucleotide
  Sense strand starting at position 850 of SEQ ID NO: 1243052
guuauaacagcuuagaaau

SEQ ID NO: 1391477 - RNA, 19 nt, Artificial Sequence
  Description of Artificial Sequence: Synthetic oligonucleotide
  Antisense strand to SEQ ID NO: 1391476
auuucuaagcuguuauaac

SEQ ID NO: 1391478 - RNA, 19 nt, Artificial Sequence
  Description of Artificial Sequence: Synthetic oligonucleotide
  Sense strand starting at position 860 of SEQ ID NO: 1243052
cuuagaaauugguugugac

SEQ ID NO: 1391479 - RNA, 19 nt, Artificial Sequence
  Description of Artificial Sequence: Synthetic oligonucleotide
  Antisense strand to SEQ ID NO: 1391478
gucacaaccaauuucuaag

SEQ ID NO: 1391480 - RNA, 19 nt, Artificial Sequence
  Description of Artificial Sequence: Synthetic oligonucleotide
  Sense strand starting at position 861 of SEQ ID NO: 1243052
uuagaaauugguugugacu

SEQ ID NO: 1391481 - RNA, 19 nt, Artificial Sequence
  Description of Artificial Sequence: Synthetic oligonucleotide
  Antisense strand to SEQ ID NO: 1391480
agucacaaccaauuucuaa

SEQ ID NO: 1391482 - RNA, 19 nt, Artificial Sequence
  Description of Artificial Sequence: Synthetic oligonucleotide
  Sense strand starting at position 875 of SEQ ID NO: 1243052
ugacucacggcucgaugaa

SEQ ID NO: 1391483 - RNA, 19 nt, Artificial Sequence
  Description of Artificial Sequence: Synthetic oligonucleotide
  Antisense strand to SEQ ID NO: 1391482
uucaucgagccgugaguca

SEQ ID NO: 1391484 - RNA, 19 nt, Artificial Sequence
  Description of Artificial Sequence: Synthetic oligonucleotide
  Sense strand starting at position 905 of SEQ ID NO: 1243052
cugcaacucccuugcagau

SEQ ID NO: 1391485 - RNA, 19 nt, Artificial Sequence
  Description of Artificial Sequence: Synthetic oligonucleotide
  Antisense strand to SEQ ID NO: 1391484
aucugcaagggaguugcag

SEQ ID NO: 1391486 - RNA, 19 nt, Artificial Sequence
  Description of Artificial Sequence: Synthetic oligonucleotide
  Sense strand starting at position 912 of SEQ ID NO: 1243052
ucccuugcagauugaugua

SEQ ID NO: 1391487 - RNA, 19 nt, Artificial Sequence
  Description of Artificial Sequence: Synthetic oligonucleotide
  Antisense strand to SEQ ID NO: 1391486
uacaucaaucugcaaggga

SEQ ID NO: 1391488 - RNA, 19 nt, Artificial Sequence
  Description of Artificial Sequence: Synthetic oligonucleotide
  Sense strand starting at position 921 of SEQ ID NO: 1243052
gauugauguaggcaggcaa

SEQ ID NO: 1391489 - RNA, 19 nt, Artificial Sequence
  Description of Artificial Sequence: Synthetic oligonucleotide
  Antisense strand to SEQ ID NO: 1391488
uugccugccuacaucaauc

SEQ ID NO: 1391490 - RNA, 19 nt, Artificial Sequence
  Description of Artificial Sequence: Synthetic oligonucleotide
  Sense strand starting at position 925 of SEQ ID NO: 1243052
gauguaggcaggcaaagau

SEQ ID NO: 1391491 - RNA, 19 nt, Artificial Sequence
  Description of Artificial Sequence: Synthetic oligonucleotide
  Antisense strand to SEQ ID NO: 1391490
aucuuugccugccuacauc

SEQ ID NO: 1391492 - RNA, 19 nt, Artificial Sequence
  Description of Artificial Sequence: Synthetic oligonucleotide
  Sense strand starting at position 1088 of SEQ ID NO: 1243052
ucugcacagcccugagaau

SEQ ID NO: 1391493 - RNA, 19 nt, Artificial Sequence
  Description of Artificial Sequence: Synthetic oligonucleotide
  Antisense strand to SEQ ID NO: 1391492
auucucagggcugugcaga

SEQ ID NO: 1391494 - RNA, 19 nt, Artificial Sequence
  Description of Artificial Sequence: Synthetic oligonucleotide
  Sense strand starting at position 1327 of SEQ ID NO: 1243052
ggcagaaacccacguuaga

SEQ ID NO: 1391495 - RNA, 19 nt, Artificial Sequence
  Description of Artificial Sequence: Synthetic oligonucleotide
  Antisense strand to SEQ ID NO: 1391494
ucuaacguggguuucugcc

SEQ ID NO: 1391496 - RNA, 19 nt, Artificial Sequence
  Description of Artificial Sequence: Synthetic oligonucleotide
  Sense strand starting at position 2098 of SEQ ID NO: 1243052
cugaguggucgcaaguugu

SEQ ID NO: 1391497 - RNA, 19 nt, Artificial Sequence
  Description of Artificial Sequence: Synthetic oligonucleotide
  Antisense strand to SEQ ID NO: 1391496
acaacuugcgaccacucag

SEQ ID NO: 1391498 - RNA, 19 nt, Artificial Sequence
  Description of Artificial Sequence: Synthetic oligonucleotide
  Sense strand starting at position 2227 of SEQ ID NO: 1243052
acaagaugaauccgugcuu

SEQ ID NO: 1391499 - RNA, 19 nt, Artificial Sequence
  Description of Artificial Sequence: Synthetic oligonucleotide
  Antisense strand to SEQ ID NO: 1391498
aagcacggauucaucuugu

SEQ ID NO: 1391500 - RNA, 19 nt, Artificial Sequence
  Description of Artificial Sequence: Synthetic oligonucleotide
  Sense strand starting at position 2228 of SEQ ID NO: 1243052
caagaugaauccgugcuuu

SEQ ID NO: 1391501 - RNA, 19 nt, Artificial Sequence
  Description of Artificial Sequence: Synthetic oligonucleotide
  Antisense strand to SEQ ID NO: 1391500
aaagcacggauucaucuug

SEQ ID NO: 1391502 - RNA, 19 nt, Artificial Sequence
  Description of Artificial Sequence: Synthetic oligonucleotide
  Sense strand starting at position 2246 of SEQ ID NO: 1243052
uuucuaagcuagccaugaa

SEQ ID NO: 1391503 - RNA, 19 nt, Artificial Sequence
  Description of Artificial Sequence: Synthetic oligonucleotide
  Antisense strand to SEQ ID NO: 1391502
uucauggcuagcuuagaaa

SEQ ID NO: 1391504 - RNA, 19 nt, Artificial Sequence
  Description of Artificial Sequence: Synthetic oligonucleotide
  Sense strand starting at position 2258 of SEQ ID NO: 1243052
ccaugaaaccgugagcaua

SEQ ID NO: 1391505 - RNA, 19 nt, Artificial Sequence
  Description of Artificial Sequence: Synthetic oligonucleotide
  Antisense strand to SEQ ID NO: 1391504
uaugcucacgguuucaugg

SEQ ID NO: 1391506 - RNA, 19 nt, Artificial Sequence
  Description of Artificial Sequence: Synthetic oligonucleotide
  Sense strand starting at position 2260 of SEQ ID NO: 1243052
augaaaccgugagcauauu

SEQ ID NO: 1391507 - RNA, 19 nt, Artificial Sequence
  Description of Artificial Sequence: Synthetic oligonucleotide
  Antisense strand to SEQ ID NO: 1391506
aauaugcucacgguuucau

SEQ ID NO: 1391508 - RNA, 19 nt, Artificial Sequence
  Description of Artificial Sequence: Synthetic oligonucleotide
  Sense strand starting at position 2261 of SEQ ID NO: 1243052
ugaaaccgugagcauauua

SEQ ID NO: 1391509 - RNA, 19 nt, Artificial Sequence
  Description of Artificial Sequence: Synthetic oligonucleotide
  Antisense strand to SEQ ID NO: 1391508
uaauaugcucacgguuuca

SEQ ID NO: 1391510 - RNA, 19 nt, Artificial Sequence
  Description of Artificial Sequence: Synthetic oligonucleotide
  Sense strand starting at position 2310 of SEQ ID NO: 1243052
cugugaaaugaggguucua

SEQ ID NO: 1391511 - RNA, 19 nt, Artificial Sequence
  Description of Artificial Sequence: Synthetic oligonucleotide
  Antisense strand to SEQ ID NO: 1391510
uagaacccucauuucacag

SEQ ID NO: 1391512 - RNA, 19 nt, Artificial Sequence
  Description of Artificial Sequence: Synthetic oligonucleotide
  Sense strand starting at position 2506 of SEQ ID NO: 1243052
cggcaaaguauugggauua

SEQ ID NO: 1391513 - RNA, 19 nt, Artificial Sequence
  Description of Artificial Sequence: Synthetic oligonucleotide
  Antisense strand to SEQ ID NO: 1391512
uaaucccaauacuuugccg

SEQ ID NO: 1391514 - RNA, 19 nt, Artificial Sequence
  Description of Artificial Sequence: Synthetic oligonucleotide
  Sense strand starting at position 2540 of SEQ ID NO: 1243052
acguuuggccaucagucau

SEQ ID NO: 1391515 - RNA, 19 nt, Artificial Sequence
  Description of Artificial Sequence: Synthetic oligonucleotide
  Antisense strand to SEQ ID NO: 1391514
augacugauggccaaacgu

SEQ ID NO: 1391516 - RNA, 19 nt, Artificial Sequence
  Description of Artificial Sequence: Synthetic oligonucleotide
  Sense strand starting at position 2618 of SEQ ID NO: 1243052
ucuacugucccagggacua

SEQ ID NO: 1391517 - RNA, 19 nt, Artificial Sequence
  Description of Artificial Sequence: Synthetic oligonucleotide
  Antisense strand to SEQ ID NO: 1391516
uagucccugggacaguaga

SEQ ID NO: 1391518 - RNA, 19 nt, Artificial Sequence
  Description of Artificial Sequence: Synthetic oligonucleotide
  Sense strand starting at position 2643 of SEQ ID NO: 1243052
aggcauauguaagcaguua

SEQ ID NO: 1391519 - RNA, 19 nt, Artificial Sequence
  Description of Artificial Sequence: Synthetic oligonucleotide
  Antisense strand to SEQ ID NO: 1391518
uaacugcuuacauaugccu

SEQ ID NO: 1391520 - RNA, 19 nt, Artificial Sequence
  Description of Artificial Sequence: Synthetic oligonucleotide
  Sense strand starting at position 2644 of SEQ ID NO: 1243052
ggcauauguaagcaguuau

SEQ ID NO: 1391521 - RNA, 19 nt, Artificial Sequence
  Description of Artificial Sequence: Synthetic oligonucleotide
  Antisense strand to SEQ ID NO: 1391520
auaacugcuuacauaugcc

SEQ ID NO: 1391522 - RNA, 19 nt, Artificial Sequence
  Description of Artificial Sequence: Synthetic oligonucleotide
  Sense strand starting at position 2676 of SEQ ID NO: 1243052
agaauuauagcaugcacuu

SEQ ID NO: 1391523 - RNA, 19 nt, Artificial Sequence
  Description of Artificial Sequence: Synthetic oligonucleotide
  Antisense strand to SEQ ID NO: 1391522
aagugcaugcuauaauucu

SEQ ID NO: 1391524 - RNA, 19 nt, Artificial Sequence
  Description of Artificial Sequence: Synthetic oligonucleotide
  Sense strand starting at position 3079 of SEQ ID NO: 1243052
uuugaauguuaaguagaga

SEQ ID NO: 1391525 - RNA, 19 nt, Artificial Sequence
  Description of Artificial Sequence: Synthetic oligonucleotide
  Antisense strand to SEQ ID NO: 1391524
ucucuacuuaacauucaaa

SEQ ID NO: 1391526 - RNA, 19 nt, Artificial Sequence
  Description of Artificial Sequence: Synthetic oligonucleotide
  Sense strand starting at position 3450 of SEQ ID NO: 1243052
gccaucauucccgacuaac

SEQ ID NO: 1391527 - RNA, 19 nt, Artificial Sequence
  Description of Artificial Sequence: Synthetic oligonucleotide
  Antisense strand to SEQ ID NO: 1391526
guuagucgggaaugauggc

SEQ ID NO: 1391528 - RNA, 19 nt, Artificial Sequence
  Description of Artificial Sequence: Synthetic oligonucleotide
  Sense strand starting at position 236 of SEQ ID NO: 1243053
cuucuuaggugaucuggga

SEQ ID NO: 1391529 - RNA, 19 nt, Artificial Sequence
  Description of Artificial Sequence: Synthetic oligonucleotide
  Antisense strand to SEQ ID NO: 1391528
ucccagaucaccuaagaag

SEQ ID NO: 1391530 - RNA, 19 nt, Artificial Sequence
  Description of Artificial Sequence: Synthetic oligonucleotide
  Sense strand starting at position 303 of SEQ ID NO: 1243053
cgacuuguauaucuaacuu

SEQ ID NO: 1391531 - RNA, 19 nt, Artificial Sequence
  Description of Artificial Sequence: Synthetic oligonucleotide
  Antisense strand to SEQ ID NO: 1391530
aaguuagauauacaagucg

SEQ ID NO: 1391532 - RNA, 19 nt, Artificial Sequence
  Description of Artificial Sequence: Synthetic oligonucleotide
  Sense strand starting at position 417 of SEQ ID NO: 1243053
ggaguuaaccuugguuccu

SEQ ID NO: 1391533 - RNA, 19 nt, Artificial Sequence
  Description of Artificial Sequence: Synthetic oligonucleotide
  Antisense strand to SEQ ID NO: 1391532
aggaaccaagguuaacucc

SEQ ID NO: 1391534 - RNA, 19 nt, Artificial Sequence
  Description of Artificial Sequence: Synthetic oligonucleotide
  Sense strand starting at position 496 of SEQ ID NO: 1243053
auauaugcugaauggaauu

SEQ ID NO: 1391535 - RNA, 19 nt, Artificial Sequence
  Description of Artificial Sequence: Synthetic oligonucleotide
  Antisense strand to SEQ ID NO: 1391534
aauuccauucagcauauau

SEQ ID NO: 1391536 - RNA, 19 nt, Artificial Sequence
  Description of Artificial Sequence: Synthetic oligonucleotide
  Sense strand starting at position 642 of SEQ ID NO: 1243053
gauucuccugaguagcaga

SEQ ID NO: 1391537 - RNA, 19 nt, Artificial Sequence
  Description of Artificial Sequence: Synthetic oligonucleotide
  Antisense strand to SEQ ID NO: 1391536
ucugcuacucaggagaauc

SEQ ID NO: 1391538 - RNA, 19 nt, Artificial Sequence
  Description of Artificial Sequence: Synthetic oligonucleotide
  Sense strand starting at position 1273 of SEQ ID NO: 1243053
gcugauaccuucuuuauug

SEQ ID NO: 1391539 - RNA, 19 nt, Artificial Sequence
  Description of Artificial Sequence: Synthetic oligonucleotide
  Antisense strand to SEQ ID NO: 1391538
caauaaagaagguaucagc

SEQ ID NO: 1391540 - RNA, 19 nt, Artificial Sequence
  Description of Artificial Sequence: Synthetic oligonucleotide
  Sense strand starting at position 1955 of SEQ ID NO: 1243053
gggagucucgacugacuga

SEQ ID NO: 1391541 - RNA, 19 nt, Artificial Sequence
  Description of Artificial Sequence: Synthetic oligonucleotide
  Antisense strand to SEQ ID NO: 1391540
ucagucagucgagacuccc

SEQ ID NO: 1391542 - RNA, 19 nt, Artificial Sequence
  Description of Artificial Sequence: Synthetic oligonucleotide
  Sense strand starting at position 2869 of SEQ ID NO: 1243053
auuaacagcccuggaauua

SEQ ID NO: 1391543 - RNA, 19 nt, Artificial Sequence
  Description of Artificial Sequence: Synthetic oligonucleotide
  Antisense strand to SEQ ID NO: 1391542
uaauuccagggcuguuaau

SEQ ID NO: 1391544 - RNA, 19 nt, Artificial Sequence
  Description of Artificial Sequence: Synthetic oligonucleotide
  Sense strand starting at position 2916 of SEQ ID NO: 1243053
gcaccuuugcuauaaacga

SEQ ID NO: 1391545 - RNA, 19 nt, Artificial Sequence
  Description of Artificial Sequence: Synthetic oligonucleotide
  Antisense strand to SEQ ID NO: 1391544
ucguuuauagcaaaggugc

SEQ ID NO: 1391546 - RNA, 19 nt, Artificial Sequence
  Description of Artificial Sequence: Synthetic oligonucleotide
  Sense strand starting at position 2923 of SEQ ID NO: 1243053
ugcuauaaacgauaaccau

SEQ ID NO: 1391547 - RNA, 19 nt, Artificial Sequence
  Description of Artificial Sequence: Synthetic oligonucleotide
  Antisense strand to SEQ ID NO: 1391546
augguuaucguuuauagca

SEQ ID NO: 1391548 - RNA, 19 nt, Artificial Sequence
  Description of Artificial Sequence: Synthetic oligonucleotide
  Sense strand starting at position 2973 of SEQ ID NO: 1243053
gccuguauccucuauagga

SEQ ID NO: 1391549 - RNA, 19 nt, Artificial Sequence
  Description of Artificial Sequence: Synthetic oligonucleotide
  Antisense strand to SEQ ID NO: 1391548
uccuauagaggauacaggc

SEQ ID NO: 1391550 - RNA, 19 nt, Artificial Sequence
  Description of Artificial Sequence: Synthetic oligonucleotide
  Sense strand starting at position 3001 of SEQ ID NO: 1243053
gggugacaaauguauuguu

SEQ ID NO: 1391551 - RNA, 19 nt, Artificial Sequence
  Description of Artificial Sequence: Synthetic oligonucleotide
  Antisense strand to SEQ ID NO: 1391550
aacaauacauuugucaccc

SEQ ID NO: 1391552 - RNA, 19 nt, Artificial Sequence
  Description of Artificial Sequence: Synthetic oligonucleotide
  Sense strand starting at position 3200 of SEQ ID NO: 1243053
cccagaucuuaacuguaag

SEQ ID NO: 1391553 - RNA, 19 nt, Artificial Sequence
  Description of Artificial Sequence: Synthetic oligonucleotide
  Antisense strand to SEQ ID NO: 1391552
cuuacaguuaagaucuggg

SEQ ID NO: 1391554 - RNA, 19 nt, Artificial Sequence
  Description of Artificial Sequence: Synthetic oligonucleotide
  Sense strand starting at position 3203 of SEQ ID NO: 1243053
agaucuuaacuguaagcuu

SEQ ID NO: 1391555 - RNA, 19 nt, Artificial Sequence
  Description of Artificial Sequence: Synthetic oligonucleotide
  Antisense strand to SEQ ID NO: 1391554
aagcuuacaguuaagaucu

SEQ ID NO: 1391556 - RNA, 19 nt, Artificial Sequence
  Description of Artificial Sequence: Synthetic oligonucleotide
  Sense strand starting at position 3299 of SEQ ID NO: 1243053
acuggaauuccagagccuu

SEQ ID NO: 1391557 - RNA, 19 nt, Artificial Sequence
  Description of Artificial Sequence: Synthetic oligonucleotide
  Antisense strand to SEQ ID NO: 1391556
aaggcucuggaauuccagu

SEQ ID NO: 1391558 - RNA, 19 nt, Artificial Sequence
  Description of Artificial Sequence: Synthetic oligonucleotide
  Sense strand starting at position 3335 of SEQ ID NO: 1243053
ggcaucauagcccaggaau

SEQ ID NO: 1391559 - RNA, 19 nt, Artificial Sequence
  Description of Artificial Sequence: Synthetic oligonucleotide
  Antisense strand to SEQ ID NO: 1391558
auuccugggcuaugaugcc

SEQ ID NO: 1391560 - RNA, 19 nt, Artificial Sequence
  Description of Artificial Sequence: Synthetic oligonucleotide
  Sense strand starting at position 3357 of SEQ ID NO: 1243053
ggucucuugcucgaaauac

SEQ ID NO: 1391561 - RNA, 19 nt, Artificial Sequence
  Description of Artificial Sequence: Synthetic oligonucleotide
  Antisense strand to SEQ ID NO: 1391560
guauuucgagcaagagacc

SEQ ID NO: 1391562 - RNA, 19 nt, Artificial Sequence
  Description of Artificial Sequence: Synthetic oligonucleotide
  Sense strand starting at position 3366 of SEQ ID NO: 1243053
cucgaaauacuuuaugugu

SEQ ID NO: 1391563 - RNA, 19 nt, Artificial Sequence
  Description of Artificial Sequence: Synthetic oligonucleotide
  Antisense strand to SEQ ID NO: 1391562
acacauaaaguauuucgag

SEQ ID NO: 1391564 - RNA, 19 nt, Artificial Sequence
  Description of Artificial Sequence: Synthetic oligonucleotide
  Sense strand starting at position 3369 of SEQ ID NO: 1243053
gaaauacuuuaugugugag

SEQ ID NO: 1391565 - RNA, 19 nt, Artificial Sequence
  Description of Artificial Sequence: Synthetic oligonucleotide
  Antisense strand to SEQ ID NO: 1391564
cucacacauaaaguauuuc

SEQ ID NO: 1391566 - RNA, 19 nt, Artificial Sequence
  Description of Artificial Sequence: Synthetic oligonucleotide
  Sense strand starting at position 3371 of SEQ ID NO: 1243053
aauacuuuaugugugagga

SEQ ID NO: 1391567 - RNA, 19 nt, Artificial Sequence
  Description of Artificial Sequence: Synthetic oligonucleotide
  Antisense strand to SEQ ID NO: 1391566
uccucacacauaaaguauu

SEQ ID NO: 1391568 - RNA, 19 nt, Artificial Sequence
  Description of Artificial Sequence: Synthetic oligonucleotide
  Sense strand starting at position 3372 of SEQ ID NO: 1243053
auacuuuaugugugaggaa

SEQ ID NO: 1391569 - RNA, 19 nt, Artificial Sequence
  Description of Artificial Sequence: Synthetic oligonucleotide
  Antisense strand to SEQ ID NO: 1391568
uuccucacacauaaaguau

SEQ ID NO: 1391570 - RNA, 19 nt, Artificial Sequence
  Description of Artificial Sequence: Synthetic oligonucleotide
  Sense strand starting at position 3435 of SEQ ID NO: 1243053
ucuggauuucuguguuucu

SEQ ID NO: 1391571 - RNA, 19 nt, Artificial Sequence
  Description of Artificial Sequence: Synthetic oligonucleotide
  Antisense strand to SEQ ID NO: 1391570
agaaacacagaaauccaga

SEQ ID NO: 1391572 - RNA, 19 nt, Artificial Sequence
  Description of Artificial Sequence: Synthetic oligonucleotide
  Sense strand starting at position 3551 of SEQ ID NO: 1243053
auuuaugugugacacacaa

SEQ ID NO: 1391573 - RNA, 19 nt, Artificial Sequence
  Description of Artificial Sequence: Synthetic oligonucleotide
  Antisense strand to SEQ ID NO: 1391572
uugugugucacacauaaau

SEQ ID NO: 1391574 - RNA, 19 nt, Artificial Sequence
  Description of Artificial Sequence: Synthetic oligonucleotide
  Sense strand starting at position 3646 of SEQ ID NO: 1243053
gagacagugugaucuguuu

SEQ ID NO: 1391575 - RNA, 19 nt, Artificial Sequence
  Description of Artificial Sequence: Synthetic oligonucleotide
  Antisense strand to SEQ ID NO: 1391574
aaacagaucacacugucuc

SEQ ID NO: 1391576 - RNA, 19 nt, Artificial Sequence
  Description of Artificial Sequence: Synthetic oligonucleotide
  Sense strand starting at position 3648 of SEQ ID NO: 1243053
gacagugugaucuguuuag

SEQ ID NO: 1391577 - RNA, 19 nt, Artificial Sequence
  Description of Artificial Sequence: Synthetic oligonucleotide
  Antisense strand to SEQ ID NO: 1391576
cuaaacagaucacacuguc

SEQ ID NO: 1391578 - RNA, 19 nt, Artificial Sequence
  Description of Artificial Sequence: Synthetic oligonucleotide
  Sense strand starting at position 3670 of SEQ ID NO: 1243053
ugguuuaagggcgaauaca

SEQ ID NO: 1391579 - RNA, 19 nt, Artificial Sequence
  Description of Artificial Sequence: Synthetic oligonucleotide
  Antisense strand to SEQ ID NO: 1391578
uguauucgcccuuaaacca

SEQ ID NO: 1391580 - RNA, 19 nt, Artificial Sequence
  Description of Artificial Sequence: Synthetic oligonucleotide
  Sense strand starting at position 3690 of SEQ ID NO: 1243053
accaauaacggaugugaaa

SEQ ID NO: 1391581 - RNA, 19 nt, Artificial Sequence
  Description of Artificial Sequence: Synthetic oligonucleotide
  Antisense strand to SEQ ID NO: 1391580
uuucacauccguuauuggu

SEQ ID NO: 1391582 - RNA, 19 nt, Artificial Sequence
  Description of Artificial Sequence: Synthetic oligonucleotide
  Sense strand starting at position 3735 of SEQ ID NO: 1243053
gaaggccucuuuguugaua

SEQ ID NO: 1391583 - RNA, 19 nt, Artificial Sequence
  Description of Artificial Sequence: Synthetic oligonucleotide
  Antisense strand to SEQ ID NO: 1391582
uaucaacaaagaggccuuc

SEQ ID NO: 1391584 - RNA, 19 nt, Artificial Sequence
  Description of Artificial Sequence: Synthetic oligonucleotide
  Sense strand starting at position 3736 of SEQ ID NO: 1243053
aaggccucuuuguugauau

SEQ ID NO: 1391585 - RNA, 19 nt, Artificial Sequence
  Description of Artificial Sequence: Synthetic oligonucleotide
  Antisense strand to SEQ ID NO: 1391584
auaucaacaaagaggccuu

SEQ ID NO: 1391586 - RNA, 19 nt, Artificial Sequence
  Description of Artificial Sequence: Synthetic oligonucleotide
  Sense strand starting at position 3802 of SEQ ID NO: 1243053
cagauaucagagugaagug

SEQ ID NO: 1391587 - RNA, 19 nt, Artificial Sequence
  Description of Artificial Sequence: Synthetic oligonucleotide
  Antisense strand to SEQ ID NO: 1391586
cacuucacucugauaucug

SEQ ID NO: 1391588 - RNA, 19 nt, Artificial Sequence
  Description of Artificial Sequence: Synthetic oligonucleotide
  Sense strand starting at position 3803 of SEQ ID NO: 1243053
agauaucagagugaagugu

SEQ ID NO: 1391589 - RNA, 19 nt, Artificial Sequence
  Description of Artificial Sequence: Synthetic oligonucleotide
  Antisense strand to SEQ ID NO: 1391588
acacuucacucugauaucu

SEQ ID NO: 1391590 - RNA, 19 nt, Artificial Sequence
  Description of Artificial Sequence: Synthetic oligonucleotide
  Sense strand starting at position 3840 of SEQ ID NO: 1243053
guugauacauucuucggaa

SEQ ID NO: 1391591 - RNA, 19 nt, Artificial Sequence
  Description of Artificial Sequence: Synthetic oligonucleotide
  Antisense strand to SEQ ID NO: 1391590
uuccgaagaauguaucaac

SEQ ID NO: 1391592 - RNA, 19 nt, Artificial Sequence
  Description of Artificial Sequence: Synthetic oligonucleotide
  Sense strand starting at position 3842 of SEQ ID NO: 1243053
ugauacauucuucggaaau

SEQ ID NO: 1391593 - RNA, 19 nt, Artificial Sequence
  Description of Artificial Sequence: Synthetic oligonucleotide
  Antisense strand to SEQ ID NO: 1391592
auuuccgaagaauguauca

SEQ ID NO: 1391594 - RNA, 19 nt, Artificial Sequence
  Description of Artificial Sequence: Synthetic oligonucleotide
  Sense strand starting at position 3888 of SEQ ID NO: 1243053
gaagaacuuuaagagauag

SEQ ID NO: 1391595 - RNA, 19 nt, Artificial Sequence
  Description of Artificial Sequence: Synthetic oligonucleotide
  Antisense strand to SEQ ID NO: 1391594
cuaucucuuaaaguucuuc

SEQ ID NO: 1391596 - RNA, 19 nt, Artificial Sequence
  Description of Artificial Sequence: Synthetic oligonucleotide
  Sense strand starting at position 3898 of SEQ ID NO: 1243053
aagagauagugccuacauu

SEQ ID NO: 1391597 - RNA, 19 nt, Artificial Sequence
  Description of Artificial Sequence: Synthetic oligonucleotide
  Antisense strand to SEQ ID NO: 1391596
aauguaggcacuaucucuu

SEQ ID NO: 1391598 - RNA, 19 nt, Artificial Sequence
  Description of Artificial Sequence: Synthetic oligonucleotide
  Sense strand starting at position 3917 of SEQ ID NO: 1243053
uucggaguccuuugauuag

SEQ ID NO: 1391599 - RNA, 19 nt, Artificial Sequence
  Description of Artificial Sequence: Synthetic oligonucleotide
  Antisense strand to SEQ ID NO: 1391598
cuaaucaaaggacuccgaa

SEQ ID NO: 1391600 - RNA, 19 nt, Artificial Sequence
  Description of Artificial Sequence: Synthetic oligonucleotide
  Sense strand starting at position 3920 of SEQ ID NO: 1243053
ggaguccuuugauuagaaa

SEQ ID NO: 1391601 - RNA, 19 nt, Artificial Sequence
  Description of Artificial Sequence: Synthetic oligonucleotide
  Antisense strand to SEQ ID NO: 1391600
uuucuaaucaaaggacucc

SEQ ID NO: 1391602 - RNA, 19 nt, Artificial Sequence
  Description of Artificial Sequence: Synthetic oligonucleotide
  Sense strand starting at position 3958 of SEQ ID NO: 1243053
uucuguaacugagcuugau

SEQ ID NO: 1391603 - RNA, 19 nt, Artificial Sequence
  Description of Artificial Sequence: Synthetic oligonucleotide
  Antisense strand to SEQ ID NO: 1391602
aucaagcucaguuacagaa

SEQ ID NO: 1391604 - RNA, 19 nt, Artificial Sequence
  Description of Artificial Sequence: Synthetic oligonucleotide
  Sense strand starting at position 3961 of SEQ ID NO: 1243053
uguaacugagcuugauaug

SEQ ID NO: 1391605 - RNA, 19 nt, Artificial Sequence
  Description of Artificial Sequence: Synthetic oligonucleotide
  Antisense strand to SEQ ID NO: 1391604
cauaucaagcucaguuaca

SEQ ID NO: 1391606 - RNA, 19 nt, Artificial Sequence
  Description of Artificial Sequence: Synthetic oligonucleotide
  Sense strand starting at position 3978 of SEQ ID NO: 1243053
ugcauagugcuaggaagau

SEQ ID NO: 1391607 - RNA, 19 nt, Artificial Sequence
  Description of Artificial Sequence: Synthetic oligonucleotide
  Antisense strand to SEQ ID NO: 1391606
aucuuccuagcacuaugca

SEQ ID NO: 1391608 - RNA, 19 nt, Artificial Sequence
  Description of Artificial Sequence: Synthetic oligonucleotide
  Sense strand starting at position 39 of SEQ ID NO: 1243054
gagcuuuauccauggccac

SEQ ID NO: 1391609 - RNA, 19 nt, Artificial Sequence
  Description of Artificial Sequence: Synthetic oligonucleotide
  Antisense strand to SEQ ID NO: 1391608
guggccauggauaaagcuc

SEQ ID NO: 1391610 - RNA, 19 nt, Artificial Sequence
  Description of Artificial Sequence: Synthetic oligonucleotide
  Sense strand starting at position 40 of SEQ ID NO: 1243054
agcuuuauccauggccacu

SEQ ID NO: 1391611 - RNA, 19 nt, Artificial Sequence
  Description of Artificial Sequence: Synthetic oligonucleotide
  Antisense strand to SEQ ID NO: 1391610
aguggccauggauaaagcu

SEQ ID NO: 1391612 - RNA, 19 nt, Artificial Sequence
  Description of Artificial Sequence: Synthetic oligonucleotide
  Sense strand starting at position 130 of SEQ ID NO: 1243054
uauuguggaacugaucgua

SEQ ID NO: 1391613 - RNA, 19 nt, Artificial Sequence
  Description of Artificial Sequence: Synthetic oligonucleotide
  Antisense strand to SEQ ID NO: 1391612
uacgaucaguuccacaaua

SEQ ID NO: 1391614 - RNA, 19 nt, Artificial Sequence
  Description of Artificial Sequence: Synthetic oligonucleotide
  Sense strand starting at position 209 of SEQ ID NO: 1243054
gauuguauggcugauaccu

SEQ ID NO: 1391615 - RNA, 19 nt, Artificial Sequence
  Description of Artificial Sequence: Synthetic oligonucleotide
  Antisense strand to SEQ ID NO: 1391614
agguaucagccauacaauc

SEQ ID NO: 1391616 - RNA, 19 nt, Artificial Sequence
  Description of Artificial Sequence: Synthetic oligonucleotide
  Sense strand starting at position 674 of SEQ ID NO: 1243054
cuucuuaggugaucuggga

SEQ ID NO: 1391617 - RNA, 19 nt, Artificial Sequence
  Description of Artificial Sequence: Synthetic oligonucleotide
  Antisense strand to SEQ ID NO: 1391616
ucccagaucaccuaagaag

SEQ ID NO: 1391618 - RNA, 19 nt, Artificial Sequence
  Description of Artificial Sequence: Synthetic oligonucleotide
  Sense strand starting at position 741 of SEQ ID NO: 1243054
cgacuuguauaucuaacuu

SEQ ID NO: 1391619 - RNA, 19 nt, Artificial Sequence
  Description of Artificial Sequence: Synthetic oligonucleotide
  Antisense strand to SEQ ID NO: 1391618
aaguuagauauacaagucg

SEQ ID NO: 1391620 - RNA, 19 nt, Artificial Sequence
  Description of Artificial Sequence: Synthetic oligonucleotide
  Sense strand starting at position 855 of SEQ ID NO: 1243054
ggaguuaaccuugguuccu

SEQ ID NO: 1391621 - RNA, 19 nt, Artificial Sequence
  Description of Artificial Sequence: Synthetic oligonucleotide
  Antisense strand to SEQ ID NO: 1391620
aggaaccaagguuaacucc

SEQ ID NO: 1391622 - RNA, 19 nt, Artificial Sequence
  Description of Artificial Sequence: Synthetic oligonucleotide
  Sense strand starting at position 934 of SEQ ID NO: 1243054
auauaugcugaauggaauu

SEQ ID NO: 1391623 - RNA, 19 nt, Artificial Sequence
  Description of Artificial Sequence: Synthetic oligonucleotide
  Antisense strand to SEQ ID NO: 1391622
aauuccauucagcauauau

SEQ ID NO: 1391624 - RNA, 19 nt, Artificial Sequence
  Description of Artificial Sequence: Synthetic oligonucleotide
  Sense strand starting at position 1080 of SEQ ID NO: 1243054
gauucuccugaguagcaga

SEQ ID NO: 1391625 - RNA, 19 nt, Artificial Sequence
  Description of Artificial Sequence: Synthetic oligonucleotide
  Antisense strand to SEQ ID NO: 1391624
ucugcuacucaggagaauc

SEQ ID NO: 1391626 - RNA, 19 nt, Artificial Sequence
  Description of Artificial Sequence: Synthetic oligonucleotide
  Sense strand starting at position 1291 of SEQ ID NO: 1243054
uuugucuuacagugcaaca

SEQ ID NO: 1391627 - RNA, 19 nt, Artificial Sequence
  Description of Artificial Sequence: Synthetic oligonucleotide
  Antisense strand to SEQ ID NO: 1391626
uguugcacuguaagacaaa

SEQ ID NO: 1391628 - RNA, 19 nt, Artificial Sequence
  Description of Artificial Sequence: Synthetic oligonucleotide
  Sense strand starting at position 1302 of SEQ ID NO: 1243054
gugcaacagucuccuaaca

SEQ ID NO: 1391629 - RNA, 19 nt, Artificial Sequence
  Description of Artificial Sequence: Synthetic oligonucleotide
  Antisense strand to SEQ ID NO: 1391628
uguuaggagacuguugcac

SEQ ID NO: 1391630 - RNA, 19 nt, Artificial Sequence
  Description of Artificial Sequence: Synthetic oligonucleotide
  Sense strand starting at position 1711 of SEQ ID NO: 1243054
gcugauaccuucuuuauug

SEQ ID NO: 1391631 - RNA, 19 nt, Artificial Sequence
  Description of Artificial Sequence: Synthetic oligonucleotide
  Antisense strand to SEQ ID NO: 1391630
caauaaagaagguaucagc

SEQ ID NO: 1391632 - RNA, 19 nt, Artificial Sequence
  Description of Artificial Sequence: Synthetic oligonucleotide
  Sense strand starting at position 2393 of SEQ ID NO: 1243054
gggagucucgacugacuga

SEQ ID NO: 1391633 - RNA, 19 nt, Artificial Sequence
  Description of Artificial Sequence: Synthetic oligonucleotide
  Antisense strand to SEQ ID NO: 1391632
ucagucagucgagacuccc

SEQ ID NO: 1391634 - RNA, 19 nt, Artificial Sequence
  Description of Artificial Sequence: Synthetic oligonucleotide
  Sense strand starting at position 3307 of SEQ ID NO: 1243054
auuaacagcccuggaauua

SEQ ID NO: 1391635 - RNA, 19 nt, Artificial Sequence
  Description of Artificial Sequence: Synthetic oligonucleotide
  Antisense strand to SEQ ID NO: 1391634
uaauuccagggcuguuaau

SEQ ID NO: 1391636 - RNA, 19 nt, Artificial Sequence
  Description of Artificial Sequence: Synthetic oligonucleotide
  Sense strand starting at position 3350 of SEQ ID NO: 1243054
uugugcaccuuugcuauaa

SEQ ID NO: 1391637 - RNA, 19 nt, Artificial Sequence
  Description of Artificial Sequence: Synthetic oligonucleotide
  Antisense strand to SEQ ID NO: 1391636
uuauagcaaaggugcacaa

SEQ ID NO: 1391638 - RNA, 19 nt, Artificial Sequence
  Description of Artificial Sequence: Synthetic oligonucleotide
  Sense strand starting at position 3351 of SEQ ID NO: 1243054
ugugcaccuuugcuauaaa

SEQ ID NO: 1391639 - RNA, 19 nt, Artificial Sequence
  Description of Artificial Sequence: Synthetic oligonucleotide
  Antisense strand to SEQ ID NO: 1391638
uuuauagcaaaggugcaca

SEQ ID NO: 1391640 - RNA, 19 nt, Artificial Sequence
  Description of Artificial Sequence: Synthetic oligonucleotide
  Sense strand starting at position 3354 of SEQ ID NO: 1243054
gcaccuuugcuauaaacga

SEQ ID NO: 1391641 - RNA, 19 nt, Artificial Sequence
  Description of Artificial Sequence: Synthetic oligonucleotide
  Antisense strand to SEQ ID NO: 1391640
ucguuuauagcaaaggugc

SEQ ID NO: 1391642 - RNA, 19 nt, Artificial Sequence
  Description of Artificial Sequence: Synthetic oligonucleotide
  Sense strand starting at position 3361 of SEQ ID NO: 1243054
ugcuauaaacgauaaccau

SEQ ID NO: 1391643 - RNA, 19 nt, Artificial Sequence
  Description of Artificial Sequence: Synthetic oligonucleotide
  Antisense strand to SEQ ID NO: 1391642
augguuaucguuuauagca

SEQ ID NO: 1391644 - RNA, 19 nt, Artificial Sequence
  Description of Artificial Sequence: Synthetic oligonucleotide
  Sense strand starting at position 3375 of SEQ ID NO: 1243054
accaucuguguccgaggua

SEQ ID NO: 1391645 - RNA, 19 nt, Artificial Sequence
  Description of Artificial Sequence: Synthetic oligonucleotide
  Antisense strand to SEQ ID NO: 1391644
uaccucggacacagauggu

SEQ ID NO: 1391646 - RNA, 19 nt, Artificial Sequence
  Description of Artificial Sequence: Synthetic oligonucleotide
  Sense strand starting at position 3378 of SEQ ID NO: 1243054
aucuguguccgagguaaug

SEQ ID NO: 1391647 - RNA, 19 nt, Artificial Sequence
  Description of Artificial Sequence: Synthetic oligonucleotide
  Antisense strand to SEQ ID NO: 1391646
cauuaccucggacacagau

SEQ ID NO: 1391648 - RNA, 19 nt, Artificial Sequence
  Description of Artificial Sequence: Synthetic oligonucleotide
  Sense strand starting at position 3411 of SEQ ID NO: 1243054
gccuguauccucuauagga

SEQ ID NO: 1391649 - RNA, 19 nt, Artificial Sequence
  Description of Artificial Sequence: Synthetic oligonucleotide
  Antisense strand to SEQ ID NO: 1391648
uccuauagaggauacaggc

SEQ ID NO: 1391650 - RNA, 19 nt, Artificial Sequence
  Description of Artificial Sequence: Synthetic oligonucleotide
  Sense strand starting at position 3439 of SEQ ID NO: 1243054
gggugacaaauguauuguu

SEQ ID NO: 1391651 - RNA, 19 nt, Artificial Sequence
  Description of Artificial Sequence: Synthetic oligonucleotide
  Antisense strand to SEQ ID NO: 1391650
aacaauacauuugucaccc

SEQ ID NO: 1391652 - RNA, 19 nt, Artificial Sequence
  Description of Artificial Sequence: Synthetic oligonucleotide
  Sense strand starting at position 3452 of SEQ ID NO: 1243054
auuguuuguuccuccacca

SEQ ID NO: 1391653 - RNA, 19 nt, Artificial Sequence
  Description of Artificial Sequence: Synthetic oligonucleotide
  Antisense strand to SEQ ID NO: 1391652
ugguggaggaacaaacaau

SEQ ID NO: 1391654 - RNA, 19 nt, Artificial Sequence
  Description of Artificial Sequence: Synthetic oligonucleotide
  Sense strand starting at position 3524 of SEQ ID NO: 1243054
acuuuaauucucuguggcu

SEQ ID NO: 1391655 - RNA, 19 nt, Artificial Sequence
  Description of Artificial Sequence: Synthetic oligonucleotide
  Antisense strand to SEQ ID NO: 1391654
agccacagagaauuaaagu

SEQ ID NO: 1391656 - RNA, 19 nt, Artificial Sequence
  Description of Artificial Sequence: Synthetic oligonucleotide
  Sense strand starting at position 3526 of SEQ ID NO: 1243054
uuuaauucucuguggcuga

SEQ ID NO: 1391657 - RNA, 19 nt, Artificial Sequence
  Description of Artificial Sequence: Synthetic oligonucleotide
  Antisense strand to SEQ ID NO: 1391656
ucagccacagagaauuaaa

SEQ ID NO: 1391658 - RNA, 19 nt, Artificial Sequence
  Description of Artificial Sequence: Synthetic oligonucleotide
  Sense strand starting at position 3638 of SEQ ID NO: 1243054
cccagaucuuaacuguaag

SEQ ID NO: 1391659 - RNA, 19 nt, Artificial Sequence
  Description of Artificial Sequence: Synthetic oligonucleotide
  Antisense strand to SEQ ID NO: 1391658
cuuacaguuaagaucuggg

SEQ ID NO: 1391660 - RNA, 19 nt, Artificial Sequence
  Description of Artificial Sequence: Synthetic oligonucleotide
  Sense strand starting at position 3641 of SEQ ID NO: 1243054
agaucuuaacuguaagcuu

SEQ ID NO: 1391661 - RNA, 19 nt, Artificial Sequence
  Description of Artificial Sequence: Synthetic oligonucleotide
  Antisense strand to SEQ ID NO: 1391660
aagcuuacaguuaagaucu

SEQ ID NO: 1391662 - RNA, 19 nt, Artificial Sequence
  Description of Artificial Sequence: Synthetic oligonucleotide
  Sense strand starting at position 3649 of SEQ ID NO: 1243054
acuguaagcuuuguaauac

SEQ ID NO: 1391663 - RNA, 19 nt, Artificial Sequence
  Description of Artificial Sequence: Synthetic oligonucleotide
  Antisense strand to SEQ ID NO: 1391662
guauuacaaagcuuacagu

SEQ ID NO: 1391664 - RNA, 19 nt, Artificial Sequence
  Description of Artificial Sequence: Synthetic oligonucleotide
  Sense strand starting at position 3737 of SEQ ID NO: 1243054
acuggaauuccagagccuu

SEQ ID NO: 1391665 - RNA, 19 nt, Artificial Sequence
  Description of Artificial Sequence: Synthetic oligonucleotide
  Antisense strand to SEQ ID NO: 1391664
aaggcucuggaauuccagu

SEQ ID NO: 1391666 - RNA, 19 nt, Artificial Sequence
  Description of Artificial Sequence: Synthetic oligonucleotide
  Sense strand starting at position 3773 of SEQ ID NO: 1243054
ggcaucauagcccaggaau

SEQ ID NO: 1391667 - RNA, 19 nt, Artificial Sequence
  Description of Artificial Sequence: Synthetic oligonucleotide
  Antisense strand to SEQ ID NO: 1391666
auuccugggcuaugaugcc

SEQ ID NO: 1391668 - RNA, 19 nt, Artificial Sequence
  Description of Artificial Sequence: Synthetic oligonucleotide
  Sense strand starting at position 3792 of SEQ ID NO: 1243054
caaggucucuugcucgaaa

SEQ ID NO: 1391669 - RNA, 19 nt, Artificial Sequence
  Description of Artificial Sequence: Synthetic oligonucleotide
  Antisense strand to SEQ ID NO: 1391668
uuucgagcaagagaccuug

SEQ ID NO: 1391670 - RNA, 19 nt, Artificial Sequence
  Description of Artificial Sequence: Synthetic oligonucleotide
  Sense strand starting at position 3793 of SEQ ID NO: 1243054
aaggucucuugcucgaaau

SEQ ID NO: 1391671 - RNA, 19 nt, Artificial Sequence
  Description of Artificial Sequence: Synthetic oligonucleotide
  Antisense strand to SEQ ID NO: 1391670
auuucgagcaagagaccuu

SEQ ID NO: 1391672 - RNA, 19 nt, Artificial Sequence
  Description of Artificial Sequence: Synthetic oligonucleotide
  Sense strand starting at position 3794 of SEQ ID NO: 1243054
aggucucuugcucgaaaua

SEQ ID NO: 1391673 - RNA, 19 nt, Artificial Sequence
  Description of Artificial Sequence: Synthetic oligonucleotide
  Antisense strand to SEQ ID NO: 1391672
uauuucgagcaagagaccu

SEQ ID NO: 1391674 - RNA, 19 nt, Artificial Sequence
  Description of Artificial Sequence: Synthetic oligonucleotide
  Sense strand starting at position 3795 of SEQ ID NO: 1243054
ggucucuugcucgaaauac

SEQ ID NO: 1391675 - RNA, 19 nt, Artificial Sequence
  Description of Artificial Sequence: Synthetic oligonucleotide
  Antisense strand to SEQ ID NO: 1391674
guauuucgagcaagagacc

SEQ ID NO: 1391676 - RNA, 19 nt, Artificial Sequence
  Description of Artificial Sequence: Synthetic oligonucleotide
  Sense strand starting at position 3804 of SEQ ID NO: 1243054
cucgaaauacuuuaugugu

SEQ ID NO: 1391677 - RNA, 19 nt, Artificial Sequence
  Description of Artificial Sequence: Synthetic oligonucleotide
  Antisense strand to SEQ ID NO: 1391676
acacauaaaguauuucgag

SEQ ID NO: 1391678 - RNA, 19 nt, Artificial Sequence
  Description of Artificial Sequence: Synthetic oligonucleotide
  Sense strand starting at position 3807 of SEQ ID NO: 1243054
gaaauacuuuaugugugag

SEQ ID NO: 1391679 - RNA, 19 nt, Artificial Sequence
  Description of Artificial Sequence: Synthetic oligonucleotide
  Antisense strand to SEQ ID NO: 1391678
cucacacauaaaguauuuc

SEQ ID NO: 1391680 - RNA, 19 nt, Artificial Sequence
  Description of Artificial Sequence: Synthetic oligonucleotide
  Sense strand starting at position 3809 of SEQ ID NO: 1243054
aauacuuuaugugugagga

SEQ ID NO: 1391681 - RNA, 19 nt, Artificial Sequence
  Description of Artificial Sequence: Synthetic oligonucleotide
  Antisense strand to SEQ ID NO: 1391680
uccucacacauaaaguauu

SEQ ID NO: 1391682 - RNA, 19 nt, Artificial Sequence
  Description of Artificial Sequence: Synthetic oligonucleotide
  Sense strand starting at position 3810 of SEQ ID NO: 1243054
auacuuuaugugugaggaa

SEQ ID NO: 1391683 - RNA, 19 nt, Artificial Sequence
  Description of Artificial Sequence: Synthetic oligonucleotide
  Antisense strand to SEQ ID NO: 1391682
uuccucacacauaaaguau

SEQ ID NO: 1391684 - RNA, 19 nt, Artificial Sequence
  Description of Artificial Sequence: Synthetic oligonucleotide
  Sense strand starting at position 3863 of SEQ ID NO: 1243054
cuaggcuaauucuggauuu

SEQ ID NO: 1391685 - RNA, 19 nt, Artificial Sequence
  Description of Artificial Sequence: Synthetic oligonucleotide
  Antisense strand to SEQ ID NO: 1391684
aaauccagaauuagccuag

SEQ ID NO: 1391686 - RNA, 19 nt, Artificial Sequence
  Description of Artificial Sequence: Synthetic oligonucleotide
  Sense strand starting at position 3873 of SEQ ID NO: 1243054
ucuggauuucuguguuucu

SEQ ID NO: 1391687 - RNA, 19 nt, Artificial Sequence
  Description of Artificial Sequence: Synthetic oligonucleotide
  Antisense strand to SEQ ID NO: 1391686
agaaacacagaaauccaga

SEQ ID NO: 1391688 - RNA, 19 nt, Artificial Sequence
  Description of Artificial Sequence: Synthetic oligonucleotide
  Sense strand starting at position 49 of SEQ ID NO: 1243055
ggaguuaaccuugguuccu

SEQ ID NO: 1391689 - RNA, 19 nt, Artificial Sequence
  Description of Artificial Sequence: Synthetic oligonucleotide
  Antisense strand to SEQ ID NO: 1391688
aggaaccaagguuaacucc

SEQ ID NO: 1391690 - RNA, 19 nt, Artificial Sequence
  Description of Artificial Sequence: Synthetic oligonucleotide
  Sense strand starting at position 128 of SEQ ID NO: 1243055
auauaugcugaauggaauu

SEQ ID NO: 1391691 - RNA, 19 nt, Artificial Sequence
  Description of Artificial Sequence: Synthetic oligonucleotide
  Antisense strand to SEQ ID NO: 1391690
aauuccauucagcauauau

SEQ ID NO: 1391692 - RNA, 19 nt, Artificial Sequence
  Description of Artificial Sequence: Synthetic oligonucleotide
  Sense strand starting at position 274 of SEQ ID NO: 1243055
gauucuccugaguagcaga

SEQ ID NO: 1391693 - RNA, 19 nt, Artificial Sequence
  Description of Artificial Sequence: Synthetic oligonucleotide
  Antisense strand to SEQ ID NO: 1391692
ucugcuacucaggagaauc

SEQ ID NO: 1391694 - RNA, 19 nt, Artificial Sequence
  Description of Artificial Sequence: Synthetic oligonucleotide
  Sense strand starting at position 905 of SEQ ID NO: 1243055
gcugauaccuucuuuauug

SEQ ID NO: 1391695 - RNA, 19 nt, Artificial Sequence
  Description of Artificial Sequence: Synthetic oligonucleotide
  Antisense strand to SEQ ID NO: 1391694
caauaaagaagguaucagc

SEQ ID NO: 1391696 - RNA, 19 nt, Artificial Sequence
  Description of Artificial Sequence: Synthetic oligonucleotide
  Sense strand starting at position 1587 of SEQ ID NO: 1243055
gggagucucgacugacuga

SEQ ID NO: 1391697 - RNA, 19 nt, Artificial Sequence
  Description of Artificial Sequence: Synthetic oligonucleotide
  Antisense strand to SEQ ID NO: 1391696
ucagucagucgagacuccc

SEQ ID NO: 1391698 - RNA, 19 nt, Artificial Sequence
  Description of Artificial Sequence: Synthetic oligonucleotide
  Sense strand starting at position 2501 of SEQ ID NO: 1243055
auuaacagcccuggaauua

SEQ ID NO: 1391699 - RNA, 19 nt, Artificial Sequence
  Description of Artificial Sequence: Synthetic oligonucleotide
  Antisense strand to SEQ ID NO: 1391698
uaauuccagggcuguuaau

SEQ ID NO: 1391700 - RNA, 19 nt, Artificial Sequence
  Description of Artificial Sequence: Synthetic oligonucleotide
  Sense strand starting at position 2548 of SEQ ID NO: 1243055
gcaccuuugcuauaaacga

SEQ ID NO: 1391701 - RNA, 19 nt, Artificial Sequence
  Description of Artificial Sequence: Synthetic oligonucleotide
  Antisense strand to SEQ ID NO: 1391700
ucguuuauagcaaaggugc

SEQ ID NO: 1391702 - RNA, 19 nt, Artificial Sequence
  Description of Artificial Sequence: Synthetic oligonucleotide
  Sense strand starting at position 2555 of SEQ ID NO: 1243055
ugcuauaaacgauaaccau

SEQ ID NO: 1391703 - RNA, 19 nt, Artificial Sequence
  Description of Artificial Sequence: Synthetic oligonucleotide
  Antisense strand to SEQ ID NO: 1391702
augguuaucguuuauagca

SEQ ID NO: 1391704 - RNA, 19 nt, Artificial Sequence
  Description of Artificial Sequence: Synthetic oligonucleotide
  Sense strand starting at position 2605 of SEQ ID NO: 1243055
gccuguauccucuauagga

SEQ ID NO: 1391705 - RNA, 19 nt, Artificial Sequence
  Description of Artificial Sequence: Synthetic oligonucleotide
  Antisense strand to SEQ ID NO: 1391704
uccuauagaggauacaggc

SEQ ID NO: 1391706 - RNA, 19 nt, Artificial Sequence
  Description of Artificial Sequence: Synthetic oligonucleotide
  Sense strand starting at position 2633 of SEQ ID NO: 1243055
gggugacaaauguauuguu

SEQ ID NO: 1391707 - RNA, 19 nt, Artificial Sequence
  Description of Artificial Sequence: Synthetic oligonucleotide
  Antisense strand to SEQ ID NO: 1391706
aacaauacauuugucaccc

SEQ ID NO: 1391708 - RNA, 19 nt, Artificial Sequence
  Description of Artificial Sequence: Synthetic oligonucleotide
  Sense strand starting at position 2832 of SEQ ID NO: 1243055
cccagaucuuaacuguaag

SEQ ID NO: 1391709 - RNA, 19 nt, Artificial Sequence
  Description of Artificial Sequence: Synthetic oligonucleotide
  Antisense strand to SEQ ID NO: 1391708
cuuacaguuaagaucuggg

SEQ ID NO: 1391710 - RNA, 19 nt, Artificial Sequence
  Description of Artificial Sequence: Synthetic oligonucleotide
  Sense strand starting at position 2835 of SEQ ID NO: 1243055
agaucuuaacuguaagcuu

SEQ ID NO: 1391711 - RNA, 19 nt, Artificial Sequence
  Description of Artificial Sequence: Synthetic oligonucleotide
  Antisense strand to SEQ ID NO: 1391710
aagcuuacaguuaagaucu

SEQ ID NO: 1391712 - RNA, 19 nt, Artificial Sequence
  Description of Artificial Sequence: Synthetic oligonucleotide
  Sense strand starting at position 2931 of SEQ ID NO: 1243055
acuggaauuccagagccuu

SEQ ID NO: 1391713 - RNA, 19 nt, Artificial Sequence
  Description of Artificial Sequence: Synthetic oligonucleotide
  Antisense strand to SEQ ID NO: 1391712
aaggcucuggaauuccagu

SEQ ID NO: 1391714 - RNA, 19 nt, Artificial Sequence
  Description of Artificial Sequence: Synthetic oligonucleotide
  Sense strand starting at position 2967 of SEQ ID NO: 1243055
ggcaucauagcccaggaau

SEQ ID NO: 1391715 - RNA, 19 nt, Artificial Sequence
  Description of Artificial Sequence: Synthetic oligonucleotide
  Antisense strand to SEQ ID NO: 1391714
auuccugggcuaugaugcc

SEQ ID NO: 1391716 - RNA, 19 nt, Artificial Sequence
  Description of Artificial Sequence: Synthetic oligonucleotide
  Sense strand starting at position 2989 of SEQ ID NO: 1243055
ggucucuugcucgaaauac

SEQ ID NO: 1391717 - RNA, 19 nt, Artificial Sequence
  Description of Artificial Sequence: Synthetic oligonucleotide
  Antisense strand to SEQ ID NO: 1391716
guauuucgagcaagagacc

SEQ ID NO: 1391718 - RNA, 19 nt, Artificial Sequence
  Description of Artificial Sequence: Synthetic oligonucleotide
  Sense strand starting at position 2998 of SEQ ID NO: 1243055
cucgaaauacuuuaugugu

SEQ ID NO: 1391719 - RNA, 19 nt, Artificial Sequence
  Description of Artificial Sequence: Synthetic oligonucleotide
  Antisense strand to SEQ ID NO: 1391718
acacauaaaguauuucgag

SEQ ID NO: 1391720 - RNA, 19 nt, Artificial Sequence
  Description of Artificial Sequence: Synthetic oligonucleotide
  Sense strand starting at position 3001 of SEQ ID NO: 1243055
gaaauacuuuaugugugag

SEQ ID NO: 1391721 - RNA, 19 nt, Artificial Sequence
  Description of Artificial Sequence: Synthetic oligonucleotide
  Antisense strand to SEQ ID NO: 1391720
cucacacauaaaguauuuc

SEQ ID NO: 1391722 - RNA, 19 nt, Artificial Sequence
  Description of Artificial Sequence: Synthetic oligonucleotide
  Sense strand starting at position 3003 of SEQ ID NO: 1243055
aauacuuuaugugugagga

SEQ ID NO: 1391723 - RNA, 19 nt, Artificial Sequence
  Description of Artificial Sequence: Synthetic oligonucleotide
  Antisense strand to SEQ ID NO: 1391722
uccucacacauaaaguauu

SEQ ID NO: 1391724 - RNA, 19 nt, Artificial Sequence
  Description of Artificial Sequence: Synthetic oligonucleotide
  Sense strand starting at position 3004 of SEQ ID NO: 1243055
auacuuuaugugugaggaa

SEQ ID NO: 1391725 - RNA, 19 nt, Artificial Sequence
  Description of Artificial Sequence: Synthetic oligonucleotide
  Antisense strand to SEQ ID NO: 1391724
uuccucacacauaaaguau

SEQ ID NO: 1391726 - RNA, 19 nt, Artificial Sequence
  Description of Artificial Sequence: Synthetic oligonucleotide
  Sense strand starting at position 3067 of SEQ ID NO: 1243055
ucuggauuucuguguuucu

SEQ ID NO: 1391727 - RNA, 19 nt, Artificial Sequence
  Description of Artificial Sequence: Synthetic oligonucleotide
  Antisense strand to SEQ ID NO: 1391726
agaaacacagaaauccaga

SEQ ID NO: 1391728 - RNA, 19 nt, Artificial Sequence
  Description of Artificial Sequence: Synthetic oligonucleotide
  Sense strand starting at position 3183 of SEQ ID NO: 1243055
auuuaugugugacacacaa

SEQ ID NO: 1391729 - RNA, 19 nt, Artificial Sequence
  Description of Artificial Sequence: Synthetic oligonucleotide
  Antisense strand to SEQ ID NO: 1391728
uugugugucacacauaaau

SEQ ID NO: 1391730 - RNA, 19 nt, Artificial Sequence
  Description of Artificial Sequence: Synthetic oligonucleotide
  Sense strand starting at position 3278 of SEQ ID NO: 1243055
gagacagugugaucuguuu

SEQ ID NO: 1391731 - RNA, 19 nt, Artificial Sequence
  Description of Artificial Sequence: Synthetic oligonucleotide
  Antisense strand to SEQ ID NO: 1391730
aaacagaucacacugucuc

SEQ ID NO: 1391732 - RNA, 19 nt, Artificial Sequence
  Description of Artificial Sequence: Synthetic oligonucleotide
  Sense strand starting at position 3302 of SEQ ID NO: 1243055
ugguuuaagggcgaauaca

SEQ ID NO: 1391733 - RNA, 19 nt, Artificial Sequence
  Description of Artificial Sequence: Synthetic oligonucleotide
  Antisense strand to SEQ ID NO: 1391732
uguauucgcccuuaaacca

SEQ ID NO: 1391734 - RNA, 19 nt, Artificial Sequence
  Description of Artificial Sequence: Synthetic oligonucleotide
  Sense strand starting at position 3322 of SEQ ID NO: 1243055
accaauaacggaugugaaa

SEQ ID NO: 1391735 - RNA, 19 nt, Artificial Sequence
  Description of Artificial Sequence: Synthetic oligonucleotide
  Antisense strand to SEQ ID NO: 1391734
uuucacauccguuauuggu

SEQ ID NO: 1391736 - RNA, 19 nt, Artificial Sequence
  Description of Artificial Sequence: Synthetic oligonucleotide
  Sense strand starting at position 3367 of SEQ ID NO: 1243055
gaaggccucuuuguugaua

SEQ ID NO: 1391737 - RNA, 19 nt, Artificial Sequence
  Description of Artificial Sequence: Synthetic oligonucleotide
  Antisense strand to SEQ ID NO: 1391736
uaucaacaaagaggccuuc

SEQ ID NO: 1391738 - RNA, 19 nt, Artificial Sequence
  Description of Artificial Sequence: Synthetic oligonucleotide
  Sense strand starting at position 3434 of SEQ ID NO: 1243055
cagauaucagagugaagug

SEQ ID NO: 1391739 - RNA, 19 nt, Artificial Sequence
  Description of Artificial Sequence: Synthetic oligonucleotide
  Antisense strand to SEQ ID NO: 1391738
cacuucacucugauaucug

SEQ ID NO: 1391740 - RNA, 19 nt, Artificial Sequence
  Description of Artificial Sequence: Synthetic oligonucleotide
  Sense strand starting at position 3435 of SEQ ID NO: 1243055
agauaucagagugaagugu

SEQ ID NO: 1391741 - RNA, 19 nt, Artificial Sequence
  Description of Artificial Sequence: Synthetic oligonucleotide
  Antisense strand to SEQ ID NO: 1391740
acacuucacucugauaucu

SEQ ID NO: 1391742 - RNA, 19 nt, Artificial Sequence
  Description of Artificial Sequence: Synthetic oligonucleotide
  Sense strand starting at position 3472 of SEQ ID NO: 1243055
guugauacauucuucggaa

SEQ ID NO: 1391743 - RNA, 19 nt, Artificial Sequence
  Description of Artificial Sequence: Synthetic oligonucleotide
  Antisense strand to SEQ ID NO: 1391742
uuccgaagaauguaucaac

SEQ ID NO: 1391744 - RNA, 19 nt, Artificial Sequence
  Description of Artificial Sequence: Synthetic oligonucleotide
  Sense strand starting at position 3474 of SEQ ID NO: 1243055
ugauacauucuucggaaau

SEQ ID NO: 1391745 - RNA, 19 nt, Artificial Sequence
  Description of Artificial Sequence: Synthetic oligonucleotide
  Antisense strand to SEQ ID NO: 1391744
auuuccgaagaauguauca

SEQ ID NO: 1391746 - RNA, 19 nt, Artificial Sequence
  Description of Artificial Sequence: Synthetic oligonucleotide
  Sense strand starting at position 3520 of SEQ ID NO: 1243055
gaagaacuuuaagagauag

SEQ ID NO: 1391747 - RNA, 19 nt, Artificial Sequence
  Description of Artificial Sequence: Synthetic oligonucleotide
  Antisense strand to SEQ ID NO: 1391746
cuaucucuuaaaguucuuc

SEQ ID NO: 1391748 - RNA, 19 nt, Artificial Sequence
  Description of Artificial Sequence: Synthetic oligonucleotide
  Sense strand starting at position 3530 of SEQ ID NO: 1243055
aagagauagugccuacauu

SEQ ID NO: 1391749 - RNA, 19 nt, Artificial Sequence
  Description of Artificial Sequence: Synthetic oligonucleotide
  Antisense strand to SEQ ID NO: 1391748
aauguaggcacuaucucuu

SEQ ID NO: 1391750 - RNA, 19 nt, Artificial Sequence
  Description of Artificial Sequence: Synthetic oligonucleotide
  Sense strand starting at position 3552 of SEQ ID NO: 1243055
ggaguccuuugauuagaaa

SEQ ID NO: 1391751 - RNA, 19 nt, Artificial Sequence
  Description of Artificial Sequence: Synthetic oligonucleotide
  Antisense strand to SEQ ID NO: 1391750
uuucuaaucaaaggacucc

SEQ ID NO: 1391752 - RNA, 19 nt, Artificial Sequence
  Description of Artificial Sequence: Synthetic oligonucleotide
  Sense strand starting at position 3593 of SEQ ID NO: 1243055
uguaacugagcuugauaug

SEQ ID NO: 1391753 - RNA, 19 nt, Artificial Sequence
  Description of Artificial Sequence: Synthetic oligonucleotide
  Antisense strand to SEQ ID NO: 1391752
cauaucaagcucaguuaca

SEQ ID NO: 1391754 - RNA, 19 nt, Artificial Sequence
  Description of Artificial Sequence: Synthetic oligonucleotide
  Sense strand starting at position 3610 of SEQ ID NO: 1243055
ugcauagugcuaggaagau

SEQ ID NO: 1391755 - RNA, 19 nt, Artificial Sequence
  Description of Artificial Sequence: Synthetic oligonucleotide
  Antisense strand to SEQ ID NO: 1391754
aucuuccuagcacuaugca

SEQ ID NO: 1391756 - RNA, 19 nt, Artificial Sequence
  Description of Artificial Sequence: Synthetic oligonucleotide
  Sense strand starting at position 3689 of SEQ ID NO: 1243055
ugauuauaccaguaacagc

SEQ ID NO: 1391757 - RNA, 19 nt, Artificial Sequence
  Description of Artificial Sequence: Synthetic oligonucleotide
  Antisense strand to SEQ ID NO: 1391756
gcuguuacugguauaauca

SEQ ID NO: 1391758 - RNA, 19 nt, Artificial Sequence
  Description of Artificial Sequence: Synthetic oligonucleotide
  Sense strand starting at position 3706 of SEQ ID NO: 1243055
gcguguuuagauguuucac

SEQ ID NO: 1391759 - RNA, 19 nt, Artificial Sequence
  Description of Artificial Sequence: Synthetic oligonucleotide
  Antisense strand to SEQ ID NO: 1391758
gugaaacaucuaaacacgc

SEQ ID NO: 1391760 - RNA, 19 nt, Artificial Sequence
  Description of Artificial Sequence: Synthetic oligonucleotide
  Sense strand starting at position 3743 of SEQ ID NO: 1243055
ugacuacuguucucacuuu

SEQ ID NO: 1391761 - RNA, 19 nt, Artificial Sequence
  Description of Artificial Sequence: Synthetic oligonucleotide
  Antisense strand to SEQ ID NO: 1391760
aaagugagaacaguaguca

SEQ ID NO: 1391762 - RNA, 19 nt, Artificial Sequence
  Description of Artificial Sequence: Synthetic oligonucleotide
  Sense strand starting at position 3772 of SEQ ID NO: 1243055
gaaccuaguuugccauuga

SEQ ID NO: 1391763 - RNA, 19 nt, Artificial Sequence
  Description of Artificial Sequence: Synthetic oligonucleotide
  Antisense strand to SEQ ID NO: 1391762
ucaauggcaaacuagguuc

SEQ ID NO: 1391764 - RNA, 19 nt, Artificial Sequence
  Description of Artificial Sequence: Synthetic oligonucleotide
  Sense strand starting at position 3974 of SEQ ID NO: 1243055
uugaucaagcgcugaagaa

SEQ ID NO: 1391765 - RNA, 19 nt, Artificial Sequence
  Description of Artificial Sequence: Synthetic oligonucleotide
  Antisense strand to SEQ ID NO: 1391764
uucuucagcgcuugaucaa

SEQ ID NO: 1391766 - RNA, 19 nt, Artificial Sequence
  Description of Artificial Sequence: Synthetic oligonucleotide
  Sense strand starting at position 3975 of SEQ ID NO: 1243055
ugaucaagcgcugaagaaa

SEQ ID NO: 1391767 - RNA, 19 nt, Artificial Sequence
  Description of Artificial Sequence: Synthetic oligonucleotide
  Antisense strand to SEQ ID NO: 1391766
uuucuucagcgcuugauca

SEQ ID NO: 1391768 - RNA, 19 nt, Artificial Sequence
  Description of Artificial Sequence: Synthetic oligonucleotide
  Sense strand starting at position 1157 of SEQ ID NO: 1243056
gggagucucgacugacuga

SEQ ID NO: 1391769 - RNA, 19 nt, Artificial Sequence
  Description of Artificial Sequence: Synthetic oligonucleotide
  Antisense strand to SEQ ID NO: 1391768
ucagucagucgagacuccc

SEQ ID NO: 1391770 - RNA, 19 nt, Artificial Sequence
  Description of Artificial Sequence: Synthetic oligonucleotide
  Sense strand starting at position 2071 of SEQ ID NO: 1243056
auuaacagcccuggaauua

SEQ ID NO: 1391771 - RNA, 19 nt, Artificial Sequence
  Description of Artificial Sequence: Synthetic oligonucleotide
  Antisense strand to SEQ ID NO: 1391770
uaauuccagggcuguuaau

SEQ ID NO: 1391772 - RNA, 19 nt, Artificial Sequence
  Description of Artificial Sequence: Synthetic oligonucleotide
  Sense strand starting at position 2118 of SEQ ID NO: 1243056
gcaccuuugcuauaaacga

SEQ ID NO: 1391773 - RNA, 19 nt, Artificial Sequence
  Description of Artificial Sequence: Synthetic oligonucleotide
  Antisense strand to SEQ ID NO: 1391772
ucguuuauagcaaaggugc

SEQ ID NO: 1391774 - RNA, 19 nt, Artificial Sequence
  Description of Artificial Sequence: Synthetic oligonucleotide
  Sense strand starting at position 2125 of SEQ ID NO: 1243056
ugcuauaaacgauaaccau

SEQ ID NO: 1391775 - RNA, 19 nt, Artificial Sequence
  Description of Artificial Sequence: Synthetic oligonucleotide
  Antisense strand to SEQ ID NO: 1391774
augguuaucguuuauagca

SEQ ID NO: 1391776 - RNA, 19 nt, Artificial Sequence
  Description of Artificial Sequence: Synthetic oligonucleotide
  Sense strand starting at position 2175 of SEQ ID NO: 1243056
gccuguauccucuauagga

SEQ ID NO: 1391777 - RNA, 19 nt, Artificial Sequence
  Description of Artificial Sequence: Synthetic oligonucleotide
  Antisense strand to SEQ ID NO: 1391776
uccuauagaggauacaggc

SEQ ID NO: 1391778 - RNA, 19 nt, Artificial Sequence
  Description of Artificial Sequence: Synthetic oligonucleotide
  Sense strand starting at position 2203 of SEQ ID NO: 1243056
gggugacaaauguauuguu

SEQ ID NO: 1391779 - RNA, 19 nt, Artificial Sequence
  Description of Artificial Sequence: Synthetic oligonucleotide
  Antisense strand to SEQ ID NO: 1391778
aacaauacauuugucaccc

SEQ ID NO: 1391780 - RNA, 19 nt, Artificial Sequence
  Description of Artificial Sequence: Synthetic oligonucleotide
  Sense strand starting at position 2402 of SEQ ID NO: 1243056
cccagaucuuaacuguaag

SEQ ID NO: 1391781 - RNA, 19 nt, Artificial Sequence
  Description of Artificial Sequence: Synthetic oligonucleotide
  Antisense strand to SEQ ID NO: 1391780
cuuacaguuaagaucuggg

SEQ ID NO: 1391782 - RNA, 19 nt, Artificial Sequence
  Description of Artificial Sequence: Synthetic oligonucleotide
  Sense strand starting at position 2405 of SEQ ID NO: 1243056
agaucuuaacuguaagcuu

SEQ ID NO: 1391783 - RNA, 19 nt, Artificial Sequence
  Description of Artificial Sequence: Synthetic oligonucleotide
  Antisense strand to SEQ ID NO: 1391782
aagcuuacaguuaagaucu

SEQ ID NO: 1391784 - RNA, 19 nt, Artificial Sequence
  Description of Artificial Sequence: Synthetic oligonucleotide
  Sense strand starting at position 2501 of SEQ ID NO: 1243056
acuggaauuccagagccuu

SEQ ID NO: 1391785 - RNA, 19 nt, Artificial Sequence
  Description of Artificial Sequence: Synthetic oligonucleotide
  Antisense strand to SEQ ID NO: 1391784
aaggcucuggaauuccagu

SEQ ID NO: 1391786 - RNA, 19 nt, Artificial Sequence
  Description of Artificial Sequence: Synthetic oligonucleotide
  Sense strand starting at position 2537 of SEQ ID NO: 1243056
ggcaucauagcccaggaau

SEQ ID NO: 1391787 - RNA, 19 nt, Artificial Sequence
  Description of Artificial Sequence: Synthetic oligonucleotide
  Antisense strand to SEQ ID NO: 1391786
auuccugggcuaugaugcc

SEQ ID NO: 1391788 - RNA, 19 nt, Artificial Sequence
  Description of Artificial Sequence: Synthetic oligonucleotide
  Sense strand starting at position 2568 of SEQ ID NO: 1243056
cucgaaauacuuuaugugu

SEQ ID NO: 1391789 - RNA, 19 nt, Artificial Sequence
  Description of Artificial Sequence: Synthetic oligonucleotide
  Antisense strand to SEQ ID NO: 1391788
acacauaaaguauuucgag

SEQ ID NO: 1391790 - RNA, 19 nt, Artificial Sequence
  Description of Artificial Sequence: Synthetic oligonucleotide
  Sense strand starting at position 2571 of SEQ ID NO: 1243056
gaaauacuuuaugugugag

SEQ ID NO: 1391791 - RNA, 19 nt, Artificial Sequence
  Description of Artificial Sequence: Synthetic oligonucleotide
  Antisense strand to SEQ ID NO: 1391790
cucacacauaaaguauuuc

SEQ ID NO: 1391792 - RNA, 19 nt, Artificial Sequence
  Description of Artificial Sequence: Synthetic oligonucleotide
  Sense strand starting at position 2573 of SEQ ID NO: 1243056
aauacuuuaugugugagga

SEQ ID NO: 1391793 - RNA, 19 nt, Artificial Sequence
  Description of Artificial Sequence: Synthetic oligonucleotide
  Antisense strand to SEQ ID NO: 1391792
uccucacacauaaaguauu

SEQ ID NO: 1391794 - RNA, 19 nt, Artificial Sequence
  Description of Artificial Sequence: Synthetic oligonucleotide
  Sense strand starting at position 2574 of SEQ ID NO: 1243056
auacuuuaugugugaggaa

SEQ ID NO: 1391795 - RNA, 19 nt, Artificial Sequence
  Description of Artificial Sequence: Synthetic oligonucleotide
  Antisense strand to SEQ ID NO: 1391794
uuccucacacauaaaguau

SEQ ID NO: 1391796 - RNA, 19 nt, Artificial Sequence
  Description of Artificial Sequence: Synthetic oligonucleotide
  Sense strand starting at position 2637 of SEQ ID NO: 1243056
ucuggauuucuguguuucu

SEQ ID NO: 1391797 - RNA, 19 nt, Artificial Sequence
  Description of Artificial Sequence: Synthetic oligonucleotide
  Antisense strand to SEQ ID NO: 1391796
agaaacacagaaauccaga

SEQ ID NO: 1391798 - RNA, 19 nt, Artificial Sequence
  Description of Artificial Sequence: Synthetic oligonucleotide
  Sense strand starting at position 2872 of SEQ ID NO: 1243056
ugguuuaagggcgaauaca

SEQ ID NO: 1391799 - RNA, 19 nt, Artificial Sequence
  Description of Artificial Sequence: Synthetic oligonucleotide
  Antisense strand to SEQ ID NO: 1391798
uguauucgcccuuaaacca

SEQ ID NO: 1391800 - RNA, 19 nt, Artificial Sequence
  Description of Artificial Sequence: Synthetic oligonucleotide
  Sense strand starting at position 2892 of SEQ ID NO: 1243056
accaauaacggaugugaaa

SEQ ID NO: 1391801 - RNA, 19 nt, Artificial Sequence
  Description of Artificial Sequence: Synthetic oligonucleotide
  Antisense strand to SEQ ID NO: 1391800
uuucacauccguuauuggu

SEQ ID NO: 1391802 - RNA, 19 nt, Artificial Sequence
  Description of Artificial Sequence: Synthetic oligonucleotide
  Sense strand starting at position 3004 of SEQ ID NO: 1243056
cagauaucagagugaagug

SEQ ID NO: 1391803 - RNA, 19 nt, Artificial Sequence
  Description of Artificial Sequence: Synthetic oligonucleotide
  Antisense strand to SEQ ID NO: 1391802
cacuucacucugauaucug

SEQ ID NO: 1391804 - RNA, 19 nt, Artificial Sequence
  Description of Artificial Sequence: Synthetic oligonucleotide
  Sense strand starting at position 3005 of SEQ ID NO: 1243056
agauaucagagugaagugu

SEQ ID NO: 1391805 - RNA, 19 nt, Artificial Sequence
  Description of Artificial Sequence: Synthetic oligonucleotide
  Antisense strand to SEQ ID NO: 1391804
acacuucacucugauaucu

SEQ ID NO: 1391806 - RNA, 19 nt, Artificial Sequence
  Description of Artificial Sequence: Synthetic oligonucleotide
  Sense strand starting at position 3042 of SEQ ID NO: 1243056
guugauacauucuucggaa

SEQ ID NO: 1391807 - RNA, 19 nt, Artificial Sequence
  Description of Artificial Sequence: Synthetic oligonucleotide
  Antisense strand to SEQ ID NO: 1391806
uuccgaagaauguaucaac

SEQ ID NO: 1391808 - RNA, 19 nt, Artificial Sequence
  Description of Artificial Sequence: Synthetic oligonucleotide
  Sense strand starting at position 3044 of SEQ ID NO: 1243056
ugauacauucuucggaaau

SEQ ID NO: 1391809 - RNA, 19 nt, Artificial Sequence
  Description of Artificial Sequence: Synthetic oligonucleotide
  Antisense strand to SEQ ID NO: 1391808
auuuccgaagaauguauca

SEQ ID NO: 1391810 - RNA, 19 nt, Artificial Sequence
  Description of Artificial Sequence: Synthetic oligonucleotide
  Sense strand starting at position 3090 of SEQ ID NO: 1243056
gaagaacuuuaagagauag

SEQ ID NO: 1391811 - RNA, 19 nt, Artificial Sequence
  Description of Artificial Sequence: Synthetic oligonucleotide
  Antisense strand to SEQ ID NO: 1391810
cuaucucuuaaaguucuuc

SEQ ID NO: 1391812 - RNA, 19 nt, Artificial Sequence
  Description of Artificial Sequence: Synthetic oligonucleotide
  Sense strand starting at position 3100 of SEQ ID NO: 1243056
aagagauagugccuacauu

SEQ ID NO: 1391813 - RNA, 19 nt, Artificial Sequence
  Description of Artificial Sequence: Synthetic oligonucleotide
  Antisense strand to SEQ ID NO: 1391812
aauguaggcacuaucucuu

SEQ ID NO: 1391814 - RNA, 19 nt, Artificial Sequence
  Description of Artificial Sequence: Synthetic oligonucleotide
  Sense strand starting at position 3122 of SEQ ID NO: 1243056
ggaguccuuugauuagaaa

SEQ ID NO: 1391815 - RNA, 19 nt, Artificial Sequence
  Description of Artificial Sequence: Synthetic oligonucleotide
  Antisense strand to SEQ ID NO: 1391814
uuucuaaucaaaggacucc

SEQ ID NO: 1391816 - RNA, 19 nt, Artificial Sequence
  Description of Artificial Sequence: Synthetic oligonucleotide
  Sense strand starting at position 3163 of SEQ ID NO: 1243056
uguaacugagcuugauaug

SEQ ID NO: 1391817 - RNA, 19 nt, Artificial Sequence
  Description of Artificial Sequence: Synthetic oligonucleotide
  Antisense strand to SEQ ID NO: 1391816
cauaucaagcucaguuaca

SEQ ID NO: 1391818 - RNA, 19 nt, Artificial Sequence
  Description of Artificial Sequence: Synthetic oligonucleotide
  Sense strand starting at position 3259 of SEQ ID NO: 1243056
ugauuauaccaguaacagc

SEQ ID NO: 1391819 - RNA, 19 nt, Artificial Sequence
  Description of Artificial Sequence: Synthetic oligonucleotide
  Antisense strand to SEQ ID NO: 1391818
gcuguuacugguauaauca

SEQ ID NO: 1391820 - RNA, 19 nt, Artificial Sequence
  Description of Artificial Sequence: Synthetic oligonucleotide
  Sense strand starting at position 3276 of SEQ ID NO: 1243056
gcguguuuagauguuucac

SEQ ID NO: 1391821 - RNA, 19 nt, Artificial Sequence
  Description of Artificial Sequence: Synthetic oligonucleotide
  Antisense strand to SEQ ID NO: 1391820
gugaaacaucuaaacacgc

SEQ ID NO: 1391822 - RNA, 19 nt, Artificial Sequence
  Description of Artificial Sequence: Synthetic oligonucleotide
  Sense strand starting at position 3545 of SEQ ID NO: 1243056
ugaucaagcgcugaagaaa

SEQ ID NO: 1391823 - RNA, 19 nt, Artificial Sequence
  Description of Artificial Sequence: Synthetic oligonucleotide
  Antisense strand to SEQ ID NO: 1391822
uuucuucagcgcuugauca

SEQ ID NO: 1391824 - RNA, 19 nt, Artificial Sequence
  Description of Artificial Sequence: Synthetic oligonucleotide
  Sense strand starting at position 3564 of SEQ ID NO: 1243056
auaagagugaugugauuga

SEQ ID NO: 1391825 - RNA, 19 nt, Artificial Sequence
  Description of Artificial Sequence: Synthetic oligonucleotide
  Antisense strand to SEQ ID NO: 1391824
ucaaucacaucacucuuau

SEQ ID NO: 1391826 - RNA, 19 nt, Artificial Sequence
  Description of Artificial Sequence: Synthetic oligonucleotide
  Sense strand starting at position 3568 of SEQ ID NO: 1243056
gagugaugugauugaaagu

SEQ ID NO: 1391827 - RNA, 19 nt, Artificial Sequence
  Description of Artificial Sequence: Synthetic oligonucleotide
  Antisense strand to SEQ ID NO: 1391826
acuuucaaucacaucacuc

SEQ ID NO: 1391828 - RNA, 19 nt, Artificial Sequence
  Description of Artificial Sequence: Synthetic oligonucleotide
  Sense strand starting at position 3569 of SEQ ID NO: 1243056
agugaugugauugaaagug

SEQ ID NO: 1391829 - RNA, 19 nt, Artificial Sequence
  Description of Artificial Sequence: Synthetic oligonucleotide
  Antisense strand to SEQ ID NO: 1391828
cacuuucaaucacaucacu

SEQ ID NO: 1391830 - RNA, 19 nt, Artificial Sequence
  Description of Artificial Sequence: Synthetic oligonucleotide
  Sense strand starting at position 3577 of SEQ ID NO: 1243056
gauugaaagugucuuaacu

SEQ ID NO: 1391831 - RNA, 19 nt, Artificial Sequence
  Description of Artificial Sequence: Synthetic oligonucleotide
  Antisense strand to SEQ ID NO: 1391830
aguuaagacacuuucaauc

SEQ ID NO: 1391832 - RNA, 19 nt, Artificial Sequence
  Description of Artificial Sequence: Synthetic oligonucleotide
  Sense strand starting at position 3718 of SEQ ID NO: 1243056
ugcagaaacuggcuggaau

SEQ ID NO: 1391833 - RNA, 19 nt, Artificial Sequence
  Description of Artificial Sequence: Synthetic oligonucleotide
  Antisense strand to SEQ ID NO: 1391832
auuccagccaguuucugca

SEQ ID NO: 1391834 - RNA, 19 nt, Artificial Sequence
  Description of Artificial Sequence: Synthetic oligonucleotide
  Sense strand starting at position 3729 of SEQ ID NO: 1243056
gcuggaaugcgcuugucaa

SEQ ID NO: 1391835 - RNA, 19 nt, Artificial Sequence
  Description of Artificial Sequence: Synthetic oligonucleotide
  Antisense strand to SEQ ID NO: 1391834
uugacaagcgcauuccagc

SEQ ID NO: 1391836 - RNA, 19 nt, Artificial Sequence
  Description of Artificial Sequence: Synthetic oligonucleotide
  Sense strand starting at position 3742 of SEQ ID NO: 1243056
ugucaaguuccagggaaug

SEQ ID NO: 1391837 - RNA, 19 nt, Artificial Sequence
  Description of Artificial Sequence: Synthetic oligonucleotide
  Antisense strand to SEQ ID NO: 1391836
cauucccuggaacuugaca

SEQ ID NO: 1391838 - RNA, 19 nt, Artificial Sequence
  Description of Artificial Sequence: Synthetic oligonucleotide
  Sense strand starting at position 3800 of SEQ ID NO: 1243056
ggauggguugggugaguaa

SEQ ID NO: 1391839 - RNA, 19 nt, Artificial Sequence
  Description of Artificial Sequence: Synthetic oligonucleotide
  Antisense strand to SEQ ID NO: 1391838
uuacucacccaacccaucc

SEQ ID NO: 1391840 - RNA, 19 nt, Artificial Sequence
  Description of Artificial Sequence: Synthetic oligonucleotide
  Sense strand starting at position 3811 of SEQ ID NO: 1243056
gugaguaauagccagagcu

SEQ ID NO: 1391841 - RNA, 19 nt, Artificial Sequence
  Description of Artificial Sequence: Synthetic oligonucleotide
  Antisense strand to SEQ ID NO: 1391840
agcucuggcuauuacucac

SEQ ID NO: 1391842 - RNA, 19 nt, Artificial Sequence
  Description of Artificial Sequence: Synthetic oligonucleotide
  Sense strand starting at position 3813 of SEQ ID NO: 1243056
gaguaauagccagagcuua

SEQ ID NO: 1391843 - RNA, 19 nt, Artificial Sequence
  Description of Artificial Sequence: Synthetic oligonucleotide
  Antisense strand to SEQ ID NO: 1391842
uaagcucuggcuauuacuc

SEQ ID NO: 1391844 - RNA, 19 nt, Artificial Sequence
  Description of Artificial Sequence: Synthetic oligonucleotide
  Sense strand starting at position 3818 of SEQ ID NO: 1243056
auagccagagcuuagugaa

SEQ ID NO: 1391845 - RNA, 19 nt, Artificial Sequence
  Description of Artificial Sequence: Synthetic oligonucleotide
  Antisense strand to SEQ ID NO: 1391844
uucacuaagcucuggcuau

SEQ ID NO: 1391846 - RNA, 19 nt, Artificial Sequence
  Description of Artificial Sequence: Synthetic oligonucleotide
  Sense strand starting at position 3858 of SEQ ID NO: 1243056
aggucagagagguggauau

SEQ ID NO: 1391847 - RNA, 19 nt, Artificial Sequence
  Description of Artificial Sequence: Synthetic oligonucleotide
  Antisense strand to SEQ ID NO: 1391846
auauccaccucucugaccu

SEQ ID NO: 1391848 - RNA, 19 nt, Artificial Sequence
  Description of Artificial Sequence: Synthetic oligonucleotide
  Sense strand starting at position 43 of SEQ ID NO: 1243057
ucgcgugucagacucacau

SEQ ID NO: 1391849 - RNA, 19 nt, Artificial Sequence
  Description of Artificial Sequence: Synthetic oligonucleotide
  Antisense strand to SEQ ID NO: 1391848
augugagucugacacgcga

SEQ ID NO: 1391850 - RNA, 19 nt, Artificial Sequence
  Description of Artificial Sequence: Synthetic oligonucleotide
  Sense strand starting at position 45 of SEQ ID NO: 1243057
gcgugucagacucacauga

SEQ ID NO: 1391851 - RNA, 19 nt, Artificial Sequence
  Description of Artificial Sequence: Synthetic oligonucleotide
  Antisense strand to SEQ ID NO: 1391850
ucaugugagucugacacgc

SEQ ID NO: 1391852 - RNA, 19 nt, Artificial Sequence
  Description of Artificial Sequence: Synthetic oligonucleotide
  Sense strand starting at position 47 of SEQ ID NO: 1243057
gugucagacucacaugaaa

SEQ ID NO: 1391853 - RNA, 19 nt, Artificial Sequence
  Description of Artificial Sequence: Synthetic oligonucleotide
  Antisense strand to SEQ ID NO: 1391852
uuucaugugagucugacac

SEQ ID NO: 1391854 - RNA, 19 nt, Artificial Sequence
  Description of Artificial Sequence: Synthetic oligonucleotide
  Sense strand starting at position 174 of SEQ ID NO: 1243057
gagaucuccugcuugaggu

SEQ ID NO: 1391855 - RNA, 19 nt, Artificial Sequence
  Description of Artificial Sequence: Synthetic oligonucleotide
  Antisense strand to SEQ ID NO: 1391854
accucaagcaggagaucuc

SEQ ID NO: 1391856 - RNA, 19 nt, Artificial Sequence
  Description of Artificial Sequence: Synthetic oligonucleotide
  Sense strand starting at position 891 of SEQ ID NO: 1243057
ccggucauccaguaguagu

SEQ ID NO: 1391857 - RNA, 19 nt, Artificial Sequence
  Description of Artificial Sequence: Synthetic oligonucleotide
  Antisense strand to SEQ ID NO: 1391856
acuacuacuggaugaccgg

SEQ ID NO: 1391858 - RNA, 19 nt, Artificial Sequence
  Description of Artificial Sequence: Synthetic oligonucleotide
  Sense strand starting at position 1148 of SEQ ID NO: 1243057
ggaguugcucauugccagu

SEQ ID NO: 1391859 - RNA, 19 nt, Artificial Sequence
  Description of Artificial Sequence: Synthetic oligonucleotide
  Antisense strand to SEQ ID NO: 1391858
acuggcaaugagcaacucc

SEQ ID NO: 1391860 - RNA, 19 nt, Artificial Sequence
  Description of Artificial Sequence: Synthetic oligonucleotide
  Sense strand starting at position 1582 of SEQ ID NO: 1243057
gcgcgcuuugcauaaggaa

SEQ ID NO: 1391861 - RNA, 19 nt, Artificial Sequence
  Description of Artificial Sequence: Synthetic oligonucleotide
  Antisense strand to SEQ ID NO: 1391860
uuccuuaugcaaagcgcgc

SEQ ID NO: 1391862 - RNA, 19 nt, Artificial Sequence
  Description of Artificial Sequence: Synthetic oligonucleotide
  Sense strand starting at position 1739 of SEQ ID NO: 1243057
cugcuuggcucucuuuauu

SEQ ID NO: 1391863 - RNA, 19 nt, Artificial Sequence
  Description of Artificial Sequence: Synthetic oligonucleotide
  Antisense strand to SEQ ID NO: 1391862
aauaaagagagccaagcag

SEQ ID NO: 1391864 - RNA, 19 nt, Artificial Sequence
  Description of Artificial Sequence: Synthetic oligonucleotide
  Sense strand starting at position 1789 of SEQ ID NO: 1243057
gcucucuaccucugugcaa

SEQ ID NO: 1391865 - RNA, 19 nt, Artificial Sequence
  Description of Artificial Sequence: Synthetic oligonucleotide
  Antisense strand to SEQ ID NO: 1391864
uugcacagagguagagagc

SEQ ID NO: 1391866 - RNA, 19 nt, Artificial Sequence
  Description of Artificial Sequence: Synthetic oligonucleotide
  Sense strand starting at position 1851 of SEQ ID NO: 1243057
ggaguuuaguucuuucuug

SEQ ID NO: 1391867 - RNA, 19 nt, Artificial Sequence
  Description of Artificial Sequence: Synthetic oligonucleotide
  Antisense strand to SEQ ID NO: 1391866
caagaaagaacuaaacucc

SEQ ID NO: 1391868 - RNA, 19 nt, Artificial Sequence
  Description of Artificial Sequence: Synthetic oligonucleotide
  Sense strand starting at position 1960 of SEQ ID NO: 1243057
ccgagcuacagcuagaaga

SEQ ID NO: 1391869 - RNA, 19 nt, Artificial Sequence
  Description of Artificial Sequence: Synthetic oligonucleotide
  Antisense strand to SEQ ID NO: 1391868
ucuucuagcuguagcucgg

SEQ ID NO: 1391870 - RNA, 19 nt, Artificial Sequence
  Description of Artificial Sequence: Synthetic oligonucleotide
  Sense strand starting at position 2008 of SEQ ID NO: 1243057
gcaagaagaguuuaaagca

SEQ ID NO: 1391871 - RNA, 19 nt, Artificial Sequence
  Description of Artificial Sequence: Synthetic oligonucleotide
  Antisense strand to SEQ ID NO: 1391870
ugcuuuaaacucuucuugc

SEQ ID NO: 1391872 - RNA, 19 nt, Artificial Sequence
  Description of Artificial Sequence: Synthetic oligonucleotide
  Sense strand starting at position 2050 of SEQ ID NO: 1243057
ugacgucagguccaaauga

SEQ ID NO: 1391873 - RNA, 19 nt, Artificial Sequence
  Description of Artificial Sequence: Synthetic oligonucleotide
  Antisense strand to SEQ ID NO: 1391872
ucauuuggaccugacguca

SEQ ID NO: 1391874 - RNA, 19 nt, Artificial Sequence
  Description of Artificial Sequence: Synthetic oligonucleotide
  Sense strand starting at position 2066 of SEQ ID NO: 1243057
ugagaaauugacuggcacu

SEQ ID NO: 1391875 - RNA, 19 nt, Artificial Sequence
  Description of Artificial Sequence: Synthetic oligonucleotide
  Antisense strand to SEQ ID NO: 1391874
agugccagucaauuucuca

SEQ ID NO: 1391876 - RNA, 19 nt, Artificial Sequence
  Description of Artificial Sequence: Synthetic oligonucleotide
  Sense strand starting at position 2113 of SEQ ID NO: 1243057
ccgcgauuagcauaauagu

SEQ ID NO: 1391877 - RNA, 19 nt, Artificial Sequence
  Description of Artificial Sequence: Synthetic oligonucleotide
  Antisense strand to SEQ ID NO: 1391876
acuauuaugcuaaucgcgg

SEQ ID NO: 1391878 - RNA, 19 nt, Artificial Sequence
  Description of Artificial Sequence: Synthetic oligonucleotide
  Sense strand starting at position 2251 of SEQ ID NO: 1243057
gcgcaaaguuugguguaag

SEQ ID NO: 1391879 - RNA, 19 nt, Artificial Sequence
  Description of Artificial Sequence: Synthetic oligonucleotide
  Antisense strand to SEQ ID NO: 1391878
cuuacaccaaacuuugcgc

SEQ ID NO: 1391880 - RNA, 19 nt, Artificial Sequence
  Description of Artificial Sequence: Synthetic oligonucleotide
  Sense strand starting at position 2384 of SEQ ID NO: 1243057
ggcucacucggcugggauu

SEQ ID NO: 1391881 - RNA, 19 nt, Artificial Sequence
  Description of Artificial Sequence: Synthetic oligonucleotide
  Antisense strand to SEQ ID NO: 1391880
aaucccagccgagugagcc

SEQ ID NO: 1391882 - RNA, 19 nt, Artificial Sequence
  Description of Artificial Sequence: Synthetic oligonucleotide
  Sense strand starting at position 2713 of SEQ ID NO: 1243057
cucucuuuacaacgaggua

SEQ ID NO: 1391883 - RNA, 19 nt, Artificial Sequence
  Description of Artificial Sequence: Synthetic oligonucleotide
  Antisense strand to SEQ ID NO: 1391882
uaccucguuguaaagagag

SEQ ID NO: 1391884 - RNA, 19 nt, Artificial Sequence
  Description of Artificial Sequence: Synthetic oligonucleotide
  Sense strand starting at position 2806 of SEQ ID NO: 1243057
gcgccuaugcgagauaacu

SEQ ID NO: 1391885 - RNA, 19 nt, Artificial Sequence
  Description of Artificial Sequence: Synthetic oligonucleotide
  Antisense strand to SEQ ID NO: 1391884
aguuaucucgcauaggcgc

SEQ ID NO: 1391886 - RNA, 19 nt, Artificial Sequence
  Description of Artificial Sequence: Synthetic oligonucleotide
  Sense strand starting at position 2882 of SEQ ID NO: 1243057
gaguuuggccuuugagacu

SEQ ID NO: 1391887 - RNA, 19 nt, Artificial Sequence
  Description of Artificial Sequence: Synthetic oligonucleotide
  Antisense strand to SEQ ID NO: 1391886
agucucaaaggccaaacuc

SEQ ID NO: 1391888 - RNA, 19 nt, Artificial Sequence
  Description of Artificial Sequence: Synthetic oligonucleotide
  Sense strand starting at position 2978 of SEQ ID NO: 1243057
uacgaaaucugaccucugu

SEQ ID NO: 1391889 - RNA, 19 nt, Artificial Sequence
  Description of Artificial Sequence: Synthetic oligonucleotide
  Antisense strand to SEQ ID NO: 1391888
acagaggucagauuucgua

SEQ ID NO: 1391890 - RNA, 19 nt, Artificial Sequence
  Description of Artificial Sequence: Synthetic oligonucleotide
  Sense strand starting at position 3038 of SEQ ID NO: 1243057
uuaauuauuucggacuuga

SEQ ID NO: 1391891 - RNA, 19 nt, Artificial Sequence
  Description of Artificial Sequence: Synthetic oligonucleotide
  Antisense strand to SEQ ID NO: 1391890
ucaaguccgaaauaauuaa

SEQ ID NO: 1391892 - RNA, 19 nt, Artificial Sequence
  Description of Artificial Sequence: Synthetic oligonucleotide
  Sense strand starting at position 3104 of SEQ ID NO: 1243057
cuacccucgaaggguuaaa

SEQ ID NO: 1391893 - RNA, 19 nt, Artificial Sequence
  Description of Artificial Sequence: Synthetic oligonucleotide
  Antisense strand to SEQ ID NO: 1391892
uuuaacccuucgaggguag

SEQ ID NO: 1391894 - RNA, 19 nt, Artificial Sequence
  Description of Artificial Sequence: Synthetic oligonucleotide
  Sense strand starting at position 3418 of SEQ ID NO: 1243057
agaaguugggacuguugau

SEQ ID NO: 1391895 - RNA, 19 nt, Artificial Sequence
  Description of Artificial Sequence: Synthetic oligonucleotide
  Antisense strand to SEQ ID NO: 1391894
aucaacagucccaacuucu

SEQ ID NO: 1391896 - RNA, 19 nt, Artificial Sequence
  Description of Artificial Sequence: Synthetic oligonucleotide
  Sense strand starting at position 3569 of SEQ ID NO: 1243057
gaaacuauuguuggagcga

SEQ ID NO: 1391897 - RNA, 19 nt, Artificial Sequence
  Description of Artificial Sequence: Synthetic oligonucleotide
  Antisense strand to SEQ ID NO: 1391896
ucgcuccaacaauaguuuc

SEQ ID NO: 1391898 - RNA, 19 nt, Artificial Sequence
  Description of Artificial Sequence: Synthetic oligonucleotide
  Sense strand starting at position 3609 of SEQ ID NO: 1243057
gccaccuuucggcaaaggu

SEQ ID NO: 1391899 - RNA, 19 nt, Artificial Sequence
  Description of Artificial Sequence: Synthetic oligonucleotide
  Antisense strand to SEQ ID NO: 1391898
accuuugccgaaagguggc

SEQ ID NO: 1391900 - RNA, 19 nt, Artificial Sequence
  Description of Artificial Sequence: Synthetic oligonucleotide
  Sense strand starting at position 3618 of SEQ ID NO: 1243057
cggcaaaggucaguugaaa

SEQ ID NO: 1391901 - RNA, 19 nt, Artificial Sequence
  Description of Artificial Sequence: Synthetic oligonucleotide
  Antisense strand to SEQ ID NO: 1391900
uuucaacugaccuuugccg

SEQ ID NO: 1391902 - RNA, 19 nt, Artificial Sequence
  Description of Artificial Sequence: Synthetic oligonucleotide
  Sense strand starting at position 3629 of SEQ ID NO: 1243057
aguugaaauugauccgugu

SEQ ID NO: 1391903 - RNA, 19 nt, Artificial Sequence
  Description of Artificial Sequence: Synthetic oligonucleotide
  Antisense strand to SEQ ID NO: 1391902
acacggaucaauuucaacu

SEQ ID NO: 1391904 - RNA, 19 nt, Artificial Sequence
  Description of Artificial Sequence: Synthetic oligonucleotide
  Sense strand starting at position 3632 of SEQ ID NO: 1243057
ugaaauugauccgugucca

SEQ ID NO: 1391905 - RNA, 19 nt, Artificial Sequence
  Description of Artificial Sequence: Synthetic oligonucleotide
  Antisense strand to SEQ ID NO: 1391904
uggacacggaucaauuuca

SEQ ID NO: 1391906 - RNA, 19 nt, Artificial Sequence
  Description of Artificial Sequence: Synthetic oligonucleotide
  Sense strand starting at position 3633 of SEQ ID NO: 1243057
gaaauugauccguguccag

SEQ ID NO: 1391907 - RNA, 19 nt, Artificial Sequence
  Description of Artificial Sequence: Synthetic oligonucleotide
  Antisense strand to SEQ ID NO: 1391906
cuggacacggaucaauuuc

SEQ ID NO: 1391908 - RNA, 19 nt, Artificial Sequence
  Description of Artificial Sequence: Synthetic oligonucleotide
  Sense strand starting at position 3708 of SEQ ID NO: 1243057
acacaaaguuaguuugacu

SEQ ID NO: 1391909 - RNA, 19 nt, Artificial Sequence
  Description of Artificial Sequence: Synthetic oligonucleotide
  Antisense strand to SEQ ID NO: 1391908
agucaaacuaacuuugugu

SEQ ID NO: 1391910 - RNA, 19 nt, Artificial Sequence
  Description of Artificial Sequence: Synthetic oligonucleotide
  Sense strand starting at position 3711 of SEQ ID NO: 1243057
caaaguuaguuugacugaa

SEQ ID NO: 1391911 - RNA, 19 nt, Artificial Sequence
  Description of Artificial Sequence: Synthetic oligonucleotide
  Antisense strand to SEQ ID NO: 1391910
uucagucaaacuaacuuug

SEQ ID NO: 1391912 - RNA, 19 nt, Artificial Sequence
  Description of Artificial Sequence: Synthetic oligonucleotide
  Sense strand starting at position 3713 of SEQ ID NO: 1243057
aaguuaguuugacugaagu

SEQ ID NO: 1391913 - RNA, 19 nt, Artificial Sequence
  Description of Artificial Sequence: Synthetic oligonucleotide
  Antisense strand to SEQ ID NO: 1391912
acuucagucaaacuaacuu

SEQ ID NO: 1391914 - RNA, 19 nt, Artificial Sequence
  Description of Artificial Sequence: Synthetic oligonucleotide
  Sense strand starting at position 3762 of SEQ ID NO: 1243057
gaagaaagugcuggcagau

SEQ ID NO: 1391915 - RNA, 19 nt, Artificial Sequence
  Description of Artificial Sequence: Synthetic oligonucleotide
  Antisense strand to SEQ ID NO: 1391914
aucugccagcacuuucuuc

SEQ ID NO: 1391916 - RNA, 19 nt, Artificial Sequence
  Description of Artificial Sequence: Synthetic oligonucleotide
  Sense strand starting at position 3801 of SEQ ID NO: 1243057
uccucuucuccuugauugu

SEQ ID NO: 1391917 - RNA, 19 nt, Artificial Sequence
  Description of Artificial Sequence: Synthetic oligonucleotide
  Antisense strand to SEQ ID NO: 1391916
acaaucaaggagaagagga

SEQ ID NO: 1391918 - RNA, 19 nt, Artificial Sequence
  Description of Artificial Sequence: Synthetic oligonucleotide
  Sense strand starting at position 3807 of SEQ ID NO: 1243057
ucuccuugauuguugacaa

SEQ ID NO: 1391919 - RNA, 19 nt, Artificial Sequence
  Description of Artificial Sequence: Synthetic oligonucleotide
  Antisense strand to SEQ ID NO: 1391918
uugucaacaaucaaggaga

SEQ ID NO: 1391920 - RNA, 19 nt, Artificial Sequence
  Description of Artificial Sequence: Synthetic oligonucleotide
  Sense strand starting at position 3811 of SEQ ID NO: 1243057
cuugauuguugacaaagag

SEQ ID NO: 1391921 - RNA, 19 nt, Artificial Sequence
  Description of Artificial Sequence: Synthetic oligonucleotide
  Antisense strand to SEQ ID NO: 1391920
cucuuugucaacaaucaag

SEQ ID NO: 1391922 - RNA, 19 nt, Artificial Sequence
  Description of Artificial Sequence: Synthetic oligonucleotide
  Sense strand starting at position 3866 of SEQ ID NO: 1243057
ggcugagaccuuugcaaga

SEQ ID NO: 1391923 - RNA, 19 nt, Artificial Sequence
  Description of Artificial Sequence: Synthetic oligonucleotide
  Antisense strand to SEQ ID NO: 1391922
ucuugcaaaggucucagcc

SEQ ID NO: 1391924 - RNA, 19 nt, Artificial Sequence
  Description of Artificial Sequence: Synthetic oligonucleotide
  Sense strand starting at position 3944 of SEQ ID NO: 1243057
gcuuuauggcaauaucaau

SEQ ID NO: 1391925 - RNA, 19 nt, Artificial Sequence
  Description of Artificial Sequence: Synthetic oligonucleotide
  Antisense strand to SEQ ID NO: 1391924
auugauauugccauaaagc

SEQ ID NO: 1391926 - RNA, 19 nt, Artificial Sequence
  Description of Artificial Sequence: Synthetic oligonucleotide
  Sense strand starting at position 3964 of SEQ ID NO: 1243057
ggauuaaaguuacuuguaa

SEQ ID NO: 1391927 - RNA, 19 nt, Artificial Sequence
  Description of Artificial Sequence: Synthetic oligonucleotide
  Antisense strand to SEQ ID NO: 1391926
uuacaaguaacuuuaaucc

SEQ ID NO: 1391928 - RNA, 19 nt, Artificial Sequence
  Description of Artificial Sequence: Synthetic oligonucleotide
  Sense strand starting at position 137 of SEQ ID NO: 1243058
ggaaauuccuuguucggau

SEQ ID NO: 1391929 - RNA, 19 nt, Artificial Sequence
  Description of Artificial Sequence: Synthetic oligonucleotide
  Antisense strand to SEQ ID NO: 1391928
auccgaacaaggaauuucc

SEQ ID NO: 1391930 - RNA, 19 nt, Artificial Sequence
  Description of Artificial Sequence: Synthetic oligonucleotide
  Sense strand starting at position 138 of SEQ ID NO: 1243058
gaaauuccuuguucggaug

SEQ ID NO: 1391931 - RNA, 19 nt, Artificial Sequence
  Description of Artificial Sequence: Synthetic oligonucleotide
  Antisense strand to SEQ ID NO: 1391930
cauccgaacaaggaauuuc

SEQ ID NO: 1391932 - RNA, 19 nt, Artificial Sequence
  Description of Artificial Sequence: Synthetic oligonucleotide
  Sense strand starting at position 187 of SEQ ID NO: 1243058
ccacucuucgcagagacuu

SEQ ID NO: 1391933 - RNA, 19 nt, Artificial Sequence
  Description of Artificial Sequence: Synthetic oligonucleotide
  Antisense strand to SEQ ID NO: 1391932
aagucucugcgaagagugg

SEQ ID NO: 1391934 - RNA, 19 nt, Artificial Sequence
  Description of Artificial Sequence: Synthetic oligonucleotide
  Sense strand starting at position 246 of SEQ ID NO: 1243058
acuauaguuucuguuauga

SEQ ID NO: 1391935 - RNA, 19 nt, Artificial Sequence
  Description of Artificial Sequence: Synthetic oligonucleotide
  Antisense strand to SEQ ID NO: 1391934
ucauaacagaaacuauagu

SEQ ID NO: 1391936 - RNA, 19 nt, Artificial Sequence
  Description of Artificial Sequence: Synthetic oligonucleotide
  Sense strand starting at position 284 of SEQ ID NO: 1243058
acauaaauguucccaguua

SEQ ID NO: 1391937 - RNA, 19 nt, Artificial Sequence
  Description of Artificial Sequence: Synthetic oligonucleotide
  Antisense strand to SEQ ID NO: 1391936
uaacugggaacauuuaugu

SEQ ID NO: 1391938 - RNA, 19 nt, Artificial Sequence
  Description of Artificial Sequence: Synthetic oligonucleotide
  Sense strand starting at position 554 of SEQ ID NO: 1243058
gcacguguaagucuugcua

SEQ ID NO: 1391939 - RNA, 19 nt, Artificial Sequence
  Description of Artificial Sequence: Synthetic oligonucleotide
  Antisense strand to SEQ ID NO: 1391938
uagcaagacuuacacgugc

SEQ ID NO: 1391940 - RNA, 19 nt, Artificial Sequence
  Description of Artificial Sequence: Synthetic oligonucleotide
  Sense strand starting at position 604 of SEQ ID NO: 1243058
aagauaugcuuggcaagcu

SEQ ID NO: 1391941 - RNA, 19 nt, Artificial Sequence
  Description of Artificial Sequence: Synthetic oligonucleotide
  Antisense strand to SEQ ID NO: 1391940
agcuugccaagcauaucuu

SEQ ID NO: 1391942 - RNA, 19 nt, Artificial Sequence
  Description of Artificial Sequence: Synthetic oligonucleotide
  Sense strand starting at position 646 of SEQ ID NO: 1243058
guuucucaggcauaagaaa

SEQ ID NO: 1391943 - RNA, 19 nt, Artificial Sequence
  Description of Artificial Sequence: Synthetic oligonucleotide
  Antisense strand to SEQ ID NO: 1391942
uuucuuaugccugagaaac

SEQ ID NO: 1391944 - RNA, 19 nt, Artificial Sequence
  Description of Artificial Sequence: Synthetic oligonucleotide
  Sense strand starting at position 724 of SEQ ID NO: 1243058
cuuucuagacuccgggaaa

SEQ ID NO: 1391945 - RNA, 19 nt, Artificial Sequence
  Description of Artificial Sequence: Synthetic oligonucleotide
  Antisense strand to SEQ ID NO: 1391944
uuucccggagucuagaaag

SEQ ID NO: 1391946 - RNA, 19 nt, Artificial Sequence
  Description of Artificial Sequence: Synthetic oligonucleotide
  Sense strand starting at position 894 of SEQ ID NO: 1243058
ucuugcucaagcgggaaau

SEQ ID NO: 1391947 - RNA, 19 nt, Artificial Sequence
  Description of Artificial Sequence: Synthetic oligonucleotide
  Antisense strand to SEQ ID NO: 1391946
auuucccgcuugagcaaga

SEQ ID NO: 1391948 - RNA, 19 nt, Artificial Sequence
  Description of Artificial Sequence: Synthetic oligonucleotide
  Sense strand starting at position 895 of SEQ ID NO: 1243058
cuugcucaagcgggaaaua

SEQ ID NO: 1391949 - RNA, 19 nt, Artificial Sequence
  Description of Artificial Sequence: Synthetic oligonucleotide
  Antisense strand to SEQ ID NO: 1391948
uauuucccgcuugagcaag

SEQ ID NO: 1391950 - RNA, 19 nt, Artificial Sequence
  Description of Artificial Sequence: Synthetic oligonucleotide
  Sense strand starting at position 896 of SEQ ID NO: 1243058
uugcucaagcgggaaauaa

SEQ ID NO: 1391951 - RNA, 19 nt, Artificial Sequence
  Description of Artificial Sequence: Synthetic oligonucleotide
  Antisense strand to SEQ ID NO: 1391950
uuauuucccgcuugagcaa

SEQ ID NO: 1391952 - RNA, 19 nt, Artificial Sequence
  Description of Artificial Sequence: Synthetic oligonucleotide
  Sense strand starting at position 906 of SEQ ID NO: 1243058
gggaaauaaucacuucgca

SEQ ID NO: 1391953 - RNA, 19 nt, Artificial Sequence
  Description of Artificial Sequence: Synthetic oligonucleotide
  Antisense strand to SEQ ID NO: 1391952
ugcgaagugauuauuuccc

SEQ ID NO: 1391954 - RNA, 19 nt, Artificial Sequence
  Description of Artificial Sequence: Synthetic oligonucleotide
  Sense strand starting at position 923 of SEQ ID NO: 1243058
caucaucugcguggaguaa

SEQ ID NO: 1391955 - RNA, 19 nt, Artificial Sequence
  Description of Artificial Sequence: Synthetic oligonucleotide
  Antisense strand to SEQ ID NO: 1391954
uuacuccacgcagaugaug

SEQ ID NO: 1391956 - RNA, 19 nt, Artificial Sequence
  Description of Artificial Sequence: Synthetic oligonucleotide
  Sense strand starting at position 924 of SEQ ID NO: 1243058
aucaucugcguggaguaaa

SEQ ID NO: 1391957 - RNA, 19 nt, Artificial Sequence
  Description of Artificial Sequence: Synthetic oligonucleotide
  Antisense strand to SEQ ID NO: 1391956
uuuacuccacgcagaugau

SEQ ID NO: 1391958 - RNA, 19 nt, Artificial Sequence
  Description of Artificial Sequence: Synthetic oligonucleotide
  Sense strand starting at position 927 of SEQ ID NO: 1243058
aucugcguggaguaaauau

SEQ ID NO: 1391959 - RNA, 19 nt, Artificial Sequence
  Description of Artificial Sequence: Synthetic oligonucleotide
  Antisense strand to SEQ ID NO: 1391958
auauuuacuccacgcagau

SEQ ID NO: 1391960 - RNA, 19 nt, Artificial Sequence
  Description of Artificial Sequence: Synthetic oligonucleotide
  Sense strand starting at position 940 of SEQ ID NO: 1243058
aaauauugugauggugaca

SEQ ID NO: 1391961 - RNA, 19 nt, Artificial Sequence
  Description of Artificial Sequence: Synthetic oligonucleotide
  Antisense strand to SEQ ID NO: 1391960
ugucaccaucacaauauuu

SEQ ID NO: 1391962 - RNA, 19 nt, Artificial Sequence
  Description of Artificial Sequence: Synthetic oligonucleotide
  Sense strand starting at position 1020 of SEQ ID NO: 1243058
aagggauguauucgguauu

SEQ ID NO: 1391963 - RNA, 19 nt, Artificial Sequence
  Description of Artificial Sequence: Synthetic oligonucleotide
  Antisense strand to SEQ ID NO: 1391962
aauaccgaauacaucccuu

SEQ ID NO: 1391964 - RNA, 19 nt, Artificial Sequence
  Description of Artificial Sequence: Synthetic oligonucleotide
  Sense strand starting at position 1023 of SEQ ID NO: 1243058
ggauguauucgguauuccu

SEQ ID NO: 1391965 - RNA, 19 nt, Artificial Sequence
  Description of Artificial Sequence: Synthetic oligonucleotide
  Antisense strand to SEQ ID NO: 1391964
aggaauaccgaauacaucc

SEQ ID NO: 1391966 - RNA, 19 nt, Artificial Sequence
  Description of Artificial Sequence: Synthetic oligonucleotide
  Sense strand starting at position 1051 of SEQ ID NO: 1243058
gugagaacguaaucgcaaa

SEQ ID NO: 1391967 - RNA, 19 nt, Artificial Sequence
  Description of Artificial Sequence: Synthetic oligonucleotide
  Antisense strand to SEQ ID NO: 1391966
uuugcgauuacguucucac

SEQ ID NO: 1391968 - RNA, 19 nt, Artificial Sequence
  Description of Artificial Sequence: Synthetic oligonucleotide
  Sense strand starting at position 1188 of SEQ ID NO: 1243058
ggcacugaggucuguaaga

SEQ ID NO: 1391969 - RNA, 19 nt, Artificial Sequence
  Description of Artificial Sequence: Synthetic oligonucleotide
  Antisense strand to SEQ ID NO: 1391968
ucuuacagaccucagugcc

SEQ ID NO: 1391970 - RNA, 19 nt, Artificial Sequence
  Description of Artificial Sequence: Synthetic oligonucleotide
  Sense strand starting at position 2588 of SEQ ID NO: 1243058
ucuccugguggcuguaaga

SEQ ID NO: 1391971 - RNA, 19 nt, Artificial Sequence
  Description of Artificial Sequence: Synthetic oligonucleotide
  Antisense strand to SEQ ID NO: 1391970
ucuuacagccaccaggaga

SEQ ID NO: 1391972 - RNA, 19 nt, Artificial Sequence
  Description of Artificial Sequence: Synthetic oligonucleotide
  Sense strand starting at position 2690 of SEQ ID NO: 1243058
ccacuaaacucgcuggaca

SEQ ID NO: 1391973 - RNA, 19 nt, Artificial Sequence
  Description of Artificial Sequence: Synthetic oligonucleotide
  Antisense strand to SEQ ID NO: 1391972
uguccagcgaguuuagugg

SEQ ID NO: 1391974 - RNA, 19 nt, Artificial Sequence
  Description of Artificial Sequence: Synthetic oligonucleotide
  Sense strand starting at position 2734 of SEQ ID NO: 1243058
gucucagacucaucuguga

SEQ ID NO: 1391975 - RNA, 19 nt, Artificial Sequence
  Description of Artificial Sequence: Synthetic oligonucleotide
  Antisense strand to SEQ ID NO: 1391974
ucacagaugagucugagac

SEQ ID NO: 1391976 - RNA, 19 nt, Artificial Sequence
  Description of Artificial Sequence: Synthetic oligonucleotide
  Sense strand starting at position 2737 of SEQ ID NO: 1243058
ucagacucaucugugaaag

SEQ ID NO: 1391977 - RNA, 19 nt, Artificial Sequence
  Description of Artificial Sequence: Synthetic oligonucleotide
  Antisense strand to SEQ ID NO: 1391976
cuuucacagaugagucuga

SEQ ID NO: 1391978 - RNA, 19 nt, Artificial Sequence
  Description of Artificial Sequence: Synthetic oligonucleotide
  Sense strand starting at position 2757 of SEQ ID NO: 1243058
gcagucauauuugaggacu

SEQ ID NO: 1391979 - RNA, 19 nt, Artificial Sequence
  Description of Artificial Sequence: Synthetic oligonucleotide
  Antisense strand to SEQ ID NO: 1391978
aguccucaaauaugacugc

SEQ ID NO: 1391980 - RNA, 19 nt, Artificial Sequence
  Description of Artificial Sequence: Synthetic oligonucleotide
  Sense strand starting at position 2793 of SEQ ID NO: 1243058
cguaaaccaccaugcgaua

SEQ ID NO: 1391981 - RNA, 19 nt, Artificial Sequence
  Description of Artificial Sequence: Synthetic oligonucleotide
  Antisense strand to SEQ ID NO: 1391980
uaucgcauggugguuuacg

SEQ ID NO: 1391982 - RNA, 19 nt, Artificial Sequence
  Description of Artificial Sequence: Synthetic oligonucleotide
  Sense strand starting at position 2804 of SEQ ID NO: 1243058
augcgauauuugguugcua

SEQ ID NO: 1391983 - RNA, 19 nt, Artificial Sequence
  Description of Artificial Sequence: Synthetic oligonucleotide
  Antisense strand to SEQ ID NO: 1391982
uagcaaccaaauaucgcau

SEQ ID NO: 1391984 - RNA, 19 nt, Artificial Sequence
  Description of Artificial Sequence: Synthetic oligonucleotide
  Sense strand starting at position 2805 of SEQ ID NO: 1243058
ugcgauauuugguugcuau

SEQ ID NO: 1391985 - RNA, 19 nt, Artificial Sequence
  Description of Artificial Sequence: Synthetic oligonucleotide
  Antisense strand to SEQ ID NO: 1391984
auagcaaccaaauaucgca

SEQ ID NO: 1391986 - RNA, 19 nt, Artificial Sequence
  Description of Artificial Sequence: Synthetic oligonucleotide
  Sense strand starting at position 2806 of SEQ ID NO: 1243058
gcgauauuugguugcuauu

SEQ ID NO: 1391987 - RNA, 19 nt, Artificial Sequence
  Description of Artificial Sequence: Synthetic oligonucleotide
  Antisense strand to SEQ ID NO: 1391986
aauagcaaccaaauaucgc

SEQ ID NO: 1391988 - RNA, 19 nt, Artificial Sequence
  Description of Artificial Sequence: Synthetic oligonucleotide
  Sense strand starting at position 2844 of SEQ ID NO: 1243058
caaugugucucuguaggaa

SEQ ID NO: 1391989 - RNA, 19 nt, Artificial Sequence
  Description of Artificial Sequence: Synthetic oligonucleotide
  Antisense strand to SEQ ID NO: 1391988
uuccuacagagacacauug

SEQ ID NO: 1391990 - RNA, 19 nt, Artificial Sequence
  Description of Artificial Sequence: Synthetic oligonucleotide
  Sense strand starting at position 3152 of SEQ ID NO: 1243058
aucuaauacuuugaaagag

SEQ ID NO: 1391991 - RNA, 19 nt, Artificial Sequence
  Description of Artificial Sequence: Synthetic oligonucleotide
  Antisense strand to SEQ ID NO: 1391990
cucuuucaaaguauuagau

SEQ ID NO: 1391992 - RNA, 19 nt, Artificial Sequence
  Description of Artificial Sequence: Synthetic oligonucleotide
  Sense strand starting at position 3786 of SEQ ID NO: 1243058
ugggauuucuucuagagaa

SEQ ID NO: 1391993 - RNA, 19 nt, Artificial Sequence
  Description of Artificial Sequence: Synthetic oligonucleotide
  Antisense strand to SEQ ID NO: 1391992
uucucuagaagaaauccca

SEQ ID NO: 1391994 - RNA, 19 nt, Artificial Sequence
  Description of Artificial Sequence: Synthetic oligonucleotide
  Sense strand starting at position 3814 of SEQ ID NO: 1243058
ugucauagauccuuguaua

SEQ ID NO: 1391995 - RNA, 19 nt, Artificial Sequence
  Description of Artificial Sequence: Synthetic oligonucleotide
  Antisense strand to SEQ ID NO: 1391994
uauacaaggaucuaugaca

SEQ ID NO: 1391996 - RNA, 19 nt, Artificial Sequence
  Description of Artificial Sequence: Synthetic oligonucleotide
  Sense strand starting at position 3815 of SEQ ID NO: 1243058
gucauagauccuuguauaa

SEQ ID NO: 1391997 - RNA, 19 nt, Artificial Sequence
  Description of Artificial Sequence: Synthetic oligonucleotide
  Antisense strand to SEQ ID NO: 1391996
uuauacaaggaucuaugac

SEQ ID NO: 1391998 - RNA, 19 nt, Artificial Sequence
  Description of Artificial Sequence: Synthetic oligonucleotide
  Sense strand starting at position 3848 of SEQ ID NO: 1243058
ccaucagaagaaugacguu

SEQ ID NO: 1391999 - RNA, 19 nt, Artificial Sequence
  Description of Artificial Sequence: Synthetic oligonucleotide
  Antisense strand to SEQ ID NO: 1391998
aacgucauucuucugaugg

SEQ ID NO: 1392000 - RNA, 19 nt, Artificial Sequence
  Description of Artificial Sequence: Synthetic oligonucleotide
  Sense strand starting at position 3854 of SEQ ID NO: 1243058
gaagaaugacguuaguugu

SEQ ID NO: 1392001 - RNA, 19 nt, Artificial Sequence
  Description of Artificial Sequence: Synthetic oligonucleotide
  Antisense strand to SEQ ID NO: 1392000
acaacuaacgucauucuuc

SEQ ID NO: 1392002 - RNA, 19 nt, Artificial Sequence
  Description of Artificial Sequence: Synthetic oligonucleotide
  Sense strand starting at position 3862 of SEQ ID NO: 1243058
acguuaguuguaguucuuu

SEQ ID NO: 1392003 - RNA, 19 nt, Artificial Sequence
  Description of Artificial Sequence: Synthetic oligonucleotide
  Antisense strand to SEQ ID NO: 1392002
aaagaacuacaacuaacgu

SEQ ID NO: 1392004 - RNA, 19 nt, Artificial Sequence
  Description of Artificial Sequence: Synthetic oligonucleotide
  Sense strand starting at position 3867 of SEQ ID NO: 1243058
aguuguaguucuuuauuac

SEQ ID NO: 1392005 - RNA, 19 nt, Artificial Sequence
  Description of Artificial Sequence: Synthetic oligonucleotide
  Antisense strand to SEQ ID NO: 1392004
guaauaaagaacuacaacu

SEQ ID NO: 1392006 - RNA, 19 nt, Artificial Sequence
  Description of Artificial Sequence: Synthetic oligonucleotide
  Sense strand starting at position 3868 of SEQ ID NO: 1243058
guuguaguucuuuauuaca

SEQ ID NO: 1392007 - RNA, 19 nt, Artificial Sequence
  Description of Artificial Sequence: Synthetic oligonucleotide
  Antisense strand to SEQ ID NO: 1392006
uguaauaaagaacuacaac

SEQ ID NO: 1392008 - RNA, 19 nt, Artificial Sequence
  Description of Artificial Sequence: Synthetic oligonucleotide
  Sense strand starting at position 168 of SEQ ID NO: 1243059
auuccuuagcaagaaguga

SEQ ID NO: 1392009 - RNA, 19 nt, Artificial Sequence
  Description of Artificial Sequence: Synthetic oligonucleotide
  Antisense strand to SEQ ID NO: 1392008
ucacuucuugcuaaggaau

SEQ ID NO: 1392010 - RNA, 19 nt, Artificial Sequence
  Description of Artificial Sequence: Synthetic oligonucleotide
  Sense strand starting at position 295 of SEQ ID NO: 1243059
ccacuugcucgaggccaua

SEQ ID NO: 1392011 - RNA, 19 nt, Artificial Sequence
  Description of Artificial Sequence: Synthetic oligonucleotide
  Antisense strand to SEQ ID NO: 1392010
uauggccucgagcaagugg

SEQ ID NO: 1392012 - RNA, 19 nt, Artificial Sequence
  Description of Artificial Sequence: Synthetic oligonucleotide
  Sense strand starting at position 549 of SEQ ID NO: 1243059
gaaugucucggaugccgau

SEQ ID NO: 1392013 - RNA, 19 nt, Artificial Sequence
  Description of Artificial Sequence: Synthetic oligonucleotide
  Antisense strand to SEQ ID NO: 1392012
aucggcauccgagacauuc

SEQ ID NO: 1392014 - RNA, 19 nt, Artificial Sequence
  Description of Artificial Sequence: Synthetic oligonucleotide
  Sense strand starting at position 555 of SEQ ID NO: 1243059
cucggaugccgaugacauu

SEQ ID NO: 1392015 - RNA, 19 nt, Artificial Sequence
  Description of Artificial Sequence: Synthetic oligonucleotide
  Antisense strand to SEQ ID NO: 1392014
aaugucaucggcauccgag

SEQ ID NO: 1392016 - RNA, 19 nt, Artificial Sequence
  Description of Artificial Sequence: Synthetic oligonucleotide
  Sense strand starting at position 567 of SEQ ID NO: 1243059
ugacauucucauggcggaa

SEQ ID NO: 1392017 - RNA, 19 nt, Artificial Sequence
  Description of Artificial Sequence: Synthetic oligonucleotide
  Antisense strand to SEQ ID NO: 1392016
uuccgccaugagaauguca

SEQ ID NO: 1392018 - RNA, 19 nt, Artificial Sequence
  Description of Artificial Sequence: Synthetic oligonucleotide
  Sense strand starting at position 798 of SEQ ID NO: 1243059
gcuggcucuggucaaauca

SEQ ID NO: 1392019 - RNA, 19 nt, Artificial Sequence
  Description of Artificial Sequence: Synthetic oligonucleotide
  Antisense strand to SEQ ID NO: 1392018
ugauuugaccagagccagc

SEQ ID NO: 1392020 - RNA, 19 nt, Artificial Sequence
  Description of Artificial Sequence: Synthetic oligonucleotide
  Sense strand starting at position 889 of SEQ ID NO: 1243059
gcccuucggugacuuuaca

SEQ ID NO: 1392021 - RNA, 19 nt, Artificial Sequence
  Description of Artificial Sequence: Synthetic oligonucleotide
  Antisense strand to SEQ ID NO: 1392020
uguaaagucaccgaagggc

SEQ ID NO: 1392022 - RNA, 19 nt, Artificial Sequence
  Description of Artificial Sequence: Synthetic oligonucleotide
  Sense strand starting at position 2251 of SEQ ID NO: 1243059
ccgggaucacccuagguua

SEQ ID NO: 1392023 - RNA, 19 nt, Artificial Sequence
  Description of Artificial Sequence: Synthetic oligonucleotide
  Antisense strand to SEQ ID NO: 1392022
uaaccuagggugaucccgg

SEQ ID NO: 1392024 - RNA, 19 nt, Artificial Sequence
  Description of Artificial Sequence: Synthetic oligonucleotide
  Sense strand starting at position 2253 of SEQ ID NO: 1243059
gggaucacccuagguuaaa

SEQ ID NO: 1392025 - RNA, 19 nt, Artificial Sequence
  Description of Artificial Sequence: Synthetic oligonucleotide
  Antisense strand to SEQ ID NO: 1392024
uuuaaccuagggugauccc

SEQ ID NO: 1392026 - RNA, 19 nt, Artificial Sequence
  Description of Artificial Sequence: Synthetic oligonucleotide
  Sense strand starting at position 2305 of SEQ ID NO: 1243059
gauggagaaucugagaguu

SEQ ID NO: 1392027 - RNA, 19 nt, Artificial Sequence
  Description of Artificial Sequence: Synthetic oligonucleotide
  Antisense strand to SEQ ID NO: 1392026
aacucucagauucuccauc

SEQ ID NO: 1392028 - RNA, 19 nt, Artificial Sequence
  Description of Artificial Sequence: Synthetic oligonucleotide
  Sense strand starting at position 2307 of SEQ ID NO: 1243059
uggagaaucugagaguuag

SEQ ID NO: 1392029 - RNA, 19 nt, Artificial Sequence
  Description of Artificial Sequence: Synthetic oligonucleotide
  Antisense strand to SEQ ID NO: 1392028
cuaacucucagauucucca

SEQ ID NO: 1392030 - RNA, 19 nt, Artificial Sequence
  Description of Artificial Sequence: Synthetic oligonucleotide
  Sense strand starting at position 2311 of SEQ ID NO: 1243059
gaaucugagaguuagguuu

SEQ ID NO: 1392031 - RNA, 19 nt, Artificial Sequence
  Description of Artificial Sequence: Synthetic oligonucleotide
  Antisense strand to SEQ ID NO: 1392030
aaaccuaacucucagauuc

SEQ ID NO: 1392032 - RNA, 19 nt, Artificial Sequence
  Description of Artificial Sequence: Synthetic oligonucleotide
  Sense strand starting at position 2319 of SEQ ID NO: 1243059
gaguuagguuuacuaacuu

SEQ ID NO: 1392033 - RNA, 19 nt, Artificial Sequence
  Description of Artificial Sequence: Synthetic oligonucleotide
  Antisense strand to SEQ ID NO: 1392032
aaguuaguaaaccuaacuc

SEQ ID NO: 1392034 - RNA, 19 nt, Artificial Sequence
  Description of Artificial Sequence: Synthetic oligonucleotide
  Sense strand starting at position 2325 of SEQ ID NO: 1243059
gguuuacuaacuuggguaa

SEQ ID NO: 1392035 - RNA, 19 nt, Artificial Sequence
  Description of Artificial Sequence: Synthetic oligonucleotide
  Antisense strand to SEQ ID NO: 1392034
uuacccaaguuaguaaacc

SEQ ID NO: 1392036 - RNA, 19 nt, Artificial Sequence
  Description of Artificial Sequence: Synthetic oligonucleotide
  Sense strand starting at position 2337 of SEQ ID NO: 1243059
uggguaaggucacuaguag

SEQ ID NO: 1392037 - RNA, 19 nt, Artificial Sequence
  Description of Artificial Sequence: Synthetic oligonucleotide
  Antisense strand to SEQ ID NO: 1392036
cuacuagugaccuuaccca

SEQ ID NO: 1392038 - RNA, 19 nt, Artificial Sequence
  Description of Artificial Sequence: Synthetic oligonucleotide
  Sense strand starting at position 2338 of SEQ ID NO: 1243059
ggguaaggucacuaguagu

SEQ ID NO: 1392039 - RNA, 19 nt, Artificial Sequence
  Description of Artificial Sequence: Synthetic oligonucleotide
  Antisense strand to SEQ ID NO: 1392038
acuacuagugaccuuaccc

SEQ ID NO: 1392040 - RNA, 19 nt, Artificial Sequence
  Description of Artificial Sequence: Synthetic oligonucleotide
  Sense strand starting at position 2351 of SEQ ID NO: 1243059
aguagugacagcugagacu

SEQ ID NO: 1392041 - RNA, 19 nt, Artificial Sequence
  Description of Artificial Sequence: Synthetic oligonucleotide
  Antisense strand to SEQ ID NO: 1392040
agucucagcugucacuacu

SEQ ID NO: 1392042 - RNA, 19 nt, Artificial Sequence
  Description of Artificial Sequence: Synthetic oligonucleotide
  Sense strand starting at position 2416 of SEQ ID NO: 1243059
cucagaguccuagacuguu

SEQ ID NO: 1392043 - RNA, 19 nt, Artificial Sequence
  Description of Artificial Sequence: Synthetic oligonucleotide
  Antisense strand to SEQ ID NO: 1392042
aacagucuaggacucugag

SEQ ID NO: 1392044 - RNA, 19 nt, Artificial Sequence
  Description of Artificial Sequence: Synthetic oligonucleotide
  Sense strand starting at position 3000 of SEQ ID NO: 1243059
agcauaacuuguccagcau

SEQ ID NO: 1392045 - RNA, 19 nt, Artificial Sequence
  Description of Artificial Sequence: Synthetic oligonucleotide
  Antisense strand to SEQ ID NO: 1392044
augcuggacaaguuaugcu

SEQ ID NO: 1392046 - RNA, 19 nt, Artificial Sequence
  Description of Artificial Sequence: Synthetic oligonucleotide
  Sense strand starting at position 3001 of SEQ ID NO: 1243059
gcauaacuuguccagcaug

SEQ ID NO: 1392047 - RNA, 19 nt, Artificial Sequence
  Description of Artificial Sequence: Synthetic oligonucleotide
  Antisense strand to SEQ ID NO: 1392046
caugcuggacaaguuaugc

SEQ ID NO: 1392048 - RNA, 19 nt, Artificial Sequence
  Description of Artificial Sequence: Synthetic oligonucleotide
  Sense strand starting at position 3039 of SEQ ID NO: 1243059
gagguuucagccuggagag

SEQ ID NO: 1392049 - RNA, 19 nt, Artificial Sequence
  Description of Artificial Sequence: Synthetic oligonucleotide
  Antisense strand to SEQ ID NO: 1392048
cucuccaggcugaaaccuc

SEQ ID NO: 1392050 - RNA, 19 nt, Artificial Sequence
  Description of Artificial Sequence: Synthetic oligonucleotide
  Sense strand starting at position 3087 of SEQ ID NO: 1243059
ggauucuggcaaggaguuu

SEQ ID NO: 1392051 - RNA, 19 nt, Artificial Sequence
  Description of Artificial Sequence: Synthetic oligonucleotide
  Antisense strand to SEQ ID NO: 1392050
aaacuccuugccagaaucc

SEQ ID NO: 1392052 - RNA, 19 nt, Artificial Sequence
  Description of Artificial Sequence: Synthetic oligonucleotide
  Sense strand starting at position 3103 of SEQ ID NO: 1243059
uuuggauguuacucaguaa

SEQ ID NO: 1392053 - RNA, 19 nt, Artificial Sequence
  Description of Artificial Sequence: Synthetic oligonucleotide
  Antisense strand to SEQ ID NO: 1392052
uuacugaguaacauccaaa

SEQ ID NO: 1392054 - RNA, 19 nt, Artificial Sequence
  Description of Artificial Sequence: Synthetic oligonucleotide
  Sense strand starting at position 3104 of SEQ ID NO: 1243059
uuggauguuacucaguaag

SEQ ID NO: 1392055 - RNA, 19 nt, Artificial Sequence
  Description of Artificial Sequence: Synthetic oligonucleotide
  Antisense strand to SEQ ID NO: 1392054
cuuacugaguaacauccaa

SEQ ID NO: 1392056 - RNA, 19 nt, Artificial Sequence
  Description of Artificial Sequence: Synthetic oligonucleotide
  Sense strand starting at position 3106 of SEQ ID NO: 1243059
ggauguuacucaguaagca

SEQ ID NO: 1392057 - RNA, 19 nt, Artificial Sequence
  Description of Artificial Sequence: Synthetic oligonucleotide
  Antisense strand to SEQ ID NO: 1392056
ugcuuacugaguaacaucc

SEQ ID NO: 1392058 - RNA, 19 nt, Artificial Sequence
  Description of Artificial Sequence: Synthetic oligonucleotide
  Sense strand starting at position 3107 of SEQ ID NO: 1243059
gauguuacucaguaagcag

SEQ ID NO: 1392059 - RNA, 19 nt, Artificial Sequence
  Description of Artificial Sequence: Synthetic oligonucleotide
  Antisense strand to SEQ ID NO: 1392058
cugcuuacugaguaacauc

SEQ ID NO: 1392060 - RNA, 19 nt, Artificial Sequence
  Description of Artificial Sequence: Synthetic oligonucleotide
  Sense strand starting at position 3158 of SEQ ID NO: 1243059
uuugcaacugcgggagaau

SEQ ID NO: 1392061 - RNA, 19 nt, Artificial Sequence
  Description of Artificial Sequence: Synthetic oligonucleotide
  Antisense strand to SEQ ID NO: 1392060
auucucccgcaguugcaaa

SEQ ID NO: 1392062 - RNA, 19 nt, Artificial Sequence
  Description of Artificial Sequence: Synthetic oligonucleotide
  Sense strand starting at position 3159 of SEQ ID NO: 1243059
uugcaacugcgggagaaua

SEQ ID NO: 1392063 - RNA, 19 nt, Artificial Sequence
  Description of Artificial Sequence: Synthetic oligonucleotide
  Antisense strand to SEQ ID NO: 1392062
uauucucccgcaguugcaa

SEQ ID NO: 1392064 - RNA, 19 nt, Artificial Sequence
  Description of Artificial Sequence: Synthetic oligonucleotide
  Sense strand starting at position 3161 of SEQ ID NO: 1243059
gcaacugcgggagaauaua

SEQ ID NO: 1392065 - RNA, 19 nt, Artificial Sequence
  Description of Artificial Sequence: Synthetic oligonucleotide
  Antisense strand to SEQ ID NO: 1392064
uauauucucccgcaguugc

SEQ ID NO: 1392066 - RNA, 19 nt, Artificial Sequence
  Description of Artificial Sequence: Synthetic oligonucleotide
  Sense strand starting at position 3225 of SEQ ID NO: 1243059
gcugagugggagugaguuu

SEQ ID NO: 1392067 - RNA, 19 nt, Artificial Sequence
  Description of Artificial Sequence: Synthetic oligonucleotide
  Antisense strand to SEQ ID NO: 1392066
aaacucacucccacucagc

SEQ ID NO: 1392068 - RNA, 19 nt, Artificial Sequence
  Description of Artificial Sequence: Synthetic oligonucleotide
  Sense strand starting at position 3232 of SEQ ID NO: 1243059
gggagugaguuucccagca

SEQ ID NO: 1392069 - RNA, 19 nt, Artificial Sequence
  Description of Artificial Sequence: Synthetic oligonucleotide
  Antisense strand to SEQ ID NO: 1392068
ugcugggaaacucacuccc

SEQ ID NO: 1392070 - RNA, 19 nt, Artificial Sequence
  Description of Artificial Sequence: Synthetic oligonucleotide
  Sense strand starting at position 3237 of SEQ ID NO: 1243059
ugaguuucccagcauagga

SEQ ID NO: 1392071 - RNA, 19 nt, Artificial Sequence
  Description of Artificial Sequence: Synthetic oligonucleotide
  Antisense strand to SEQ ID NO: 1392070
uccuaugcugggaaacuca

SEQ ID NO: 1392072 - RNA, 19 nt, Artificial Sequence
  Description of Artificial Sequence: Synthetic oligonucleotide
  Sense strand starting at position 3250 of SEQ ID NO: 1243059
auaggaaaggcugguguau

SEQ ID NO: 1392073 - RNA, 19 nt, Artificial Sequence
  Description of Artificial Sequence: Synthetic oligonucleotide
  Antisense strand to SEQ ID NO: 1392072
auacaccagccuuuccuau

SEQ ID NO: 1392074 - RNA, 19 nt, Artificial Sequence
  Description of Artificial Sequence: Synthetic oligonucleotide
  Sense strand starting at position 3296 of SEQ ID NO: 1243059
gcuggaagcucaguuagag

SEQ ID NO: 1392075 - RNA, 19 nt, Artificial Sequence
  Description of Artificial Sequence: Synthetic oligonucleotide
  Antisense strand to SEQ ID NO: 1392074
cucuaacugagcuuccagc

SEQ ID NO: 1392076 - RNA, 19 nt, Artificial Sequence
  Description of Artificial Sequence: Synthetic oligonucleotide
  Sense strand starting at position 3305 of SEQ ID NO: 1243059
ucaguuagagugugacuga

SEQ ID NO: 1392077 - RNA, 19 nt, Artificial Sequence
  Description of Artificial Sequence: Synthetic oligonucleotide
  Antisense strand to SEQ ID NO: 1392076
ucagucacacucuaacuga

SEQ ID NO: 1392078 - RNA, 19 nt, Artificial Sequence
  Description of Artificial Sequence: Synthetic oligonucleotide
  Sense strand starting at position 3308 of SEQ ID NO: 1243059
guuagagugugacugagau

SEQ ID NO: 1392079 - RNA, 19 nt, Artificial Sequence
  Description of Artificial Sequence: Synthetic oligonucleotide
  Antisense strand to SEQ ID NO: 1392078
aucucagucacacucuaac

SEQ ID NO: 1392080 - RNA, 19 nt, Artificial Sequence
  Description of Artificial Sequence: Synthetic oligonucleotide
  Sense strand starting at position 3348 of SEQ ID NO: 1243059
ggcauuuccuuggaggacu

SEQ ID NO: 1392081 - RNA, 19 nt, Artificial Sequence
  Description of Artificial Sequence: Synthetic oligonucleotide
  Antisense strand to SEQ ID NO: 1392080
aguccuccaaggaaaugcc

SEQ ID NO: 1392082 - RNA, 19 nt, Artificial Sequence
  Description of Artificial Sequence: Synthetic oligonucleotide
  Sense strand starting at position 3787 of SEQ ID NO: 1243059
ugaaguagauacuauuaac

SEQ ID NO: 1392083 - RNA, 19 nt, Artificial Sequence
  Description of Artificial Sequence: Synthetic oligonucleotide
  Antisense strand to SEQ ID NO: 1392082
guuaauaguaucuacuuca

SEQ ID NO: 1392084 - RNA, 19 nt, Artificial Sequence
  Description of Artificial Sequence: Synthetic oligonucleotide
  Sense strand starting at position 3838 of SEQ ID NO: 1243059
guggcucaccucugugauu

SEQ ID NO: 1392085 - RNA, 19 nt, Artificial Sequence
  Description of Artificial Sequence: Synthetic oligonucleotide
  Antisense strand to SEQ ID NO: 1392084
aaucacagaggugagccac

SEQ ID NO: 1392086 - RNA, 19 nt, Artificial Sequence
  Description of Artificial Sequence: Synthetic oligonucleotide
  Sense strand starting at position 3972 of SEQ ID NO: 1243059
gguggcaugcguccguaau

SEQ ID NO: 1392087 - RNA, 19 nt, Artificial Sequence
  Description of Artificial Sequence: Synthetic oligonucleotide
  Antisense strand to SEQ ID NO: 1392086
auuacggacgcaugccacc

SEQ ID NO: 1392088 - RNA, 19 nt, Artificial Sequence
  Description of Artificial Sequence: Synthetic oligonucleotide
  Sense strand starting at position 40 of SEQ ID NO: 1243060
uccacuucucaggacaagu

SEQ ID NO: 1392089 - RNA, 19 nt, Artificial Sequence
  Description of Artificial Sequence: Synthetic oligonucleotide
  Antisense strand to SEQ ID NO: 1392088
acuuguccugagaagugga

SEQ ID NO: 1392090 - RNA, 19 nt, Artificial Sequence
  Description of Artificial Sequence: Synthetic oligonucleotide
  Sense strand starting at position 51 of SEQ ID NO: 1243060
ggacaaguuuccuucccag

SEQ ID NO: 1392091 - RNA, 19 nt, Artificial Sequence
  Description of Artificial Sequence: Synthetic oligonucleotide
  Antisense strand to SEQ ID NO: 1392090
cugggaaggaaacuugucc

SEQ ID NO: 1392092 - RNA, 19 nt, Artificial Sequence
  Description of Artificial Sequence: Synthetic oligonucleotide
  Sense strand starting at position 126 of SEQ ID NO: 1243060
gguugagagcuuuaacuca

SEQ ID NO: 1392093 - RNA, 19 nt, Artificial Sequence
  Description of Artificial Sequence: Synthetic oligonucleotide
  Antisense strand to SEQ ID NO: 1392092
ugaguuaaagcucucaacc

SEQ ID NO: 1392094 - RNA, 19 nt, Artificial Sequence
  Description of Artificial Sequence: Synthetic oligonucleotide
  Sense strand starting at position 351 of SEQ ID NO: 1243060
uaaagucaagaauguguua

SEQ ID NO: 1392095 - RNA, 19 nt, Artificial Sequence
  Description of Artificial Sequence: Synthetic oligonucleotide
  Antisense strand to SEQ ID NO: 1392094
uaacacauucuugacuuua

SEQ ID NO: 1392096 - RNA, 19 nt, Artificial Sequence
  Description of Artificial Sequence: Synthetic oligonucleotide
  Sense strand starting at position 362 of SEQ ID NO: 1243060
auguguuaagccgaauuaa

SEQ ID NO: 1392097 - RNA, 19 nt, Artificial Sequence
  Description of Artificial Sequence: Synthetic oligonucleotide
  Antisense strand to SEQ ID NO: 1392096
uuaauucggcuuaacacau

SEQ ID NO: 1392098 - RNA, 19 nt, Artificial Sequence
  Description of Artificial Sequence: Synthetic oligonucleotide
  Sense strand starting at position 446 of SEQ ID NO: 1243060
cuccuagaaugagagaauu

SEQ ID NO: 1392099 - RNA, 19 nt, Artificial Sequence
  Description of Artificial Sequence: Synthetic oligonucleotide
  Antisense strand to SEQ ID NO: 1392098
aauucucucauucuaggag

SEQ ID NO: 1392100 - RNA, 19 nt, Artificial Sequence
  Description of Artificial Sequence: Synthetic oligonucleotide
  Sense strand starting at position 456 of SEQ ID NO: 1243060
gagagaauuucugggcuug

SEQ ID NO: 1392101 - RNA, 19 nt, Artificial Sequence
  Description of Artificial Sequence: Synthetic oligonucleotide
  Antisense strand to SEQ ID NO: 1392100
caagcccagaaauucucuc

SEQ ID NO: 1392102 - RNA, 19 nt, Artificial Sequence
  Description of Artificial Sequence: Synthetic oligonucleotide
  Sense strand starting at position 577 of SEQ ID NO: 1243060
ugaaccuguuucugacaaa

SEQ ID NO: 1392103 - RNA, 19 nt, Artificial Sequence
  Description of Artificial Sequence: Synthetic oligonucleotide
  Antisense strand to SEQ ID NO: 1392102
uuugucagaaacagguuca

SEQ ID NO: 1392104 - RNA, 19 nt, Artificial Sequence
  Description of Artificial Sequence: Synthetic oligonucleotide
  Sense strand starting at position 578 of SEQ ID NO: 1243060
gaaccuguuucugacaaag

SEQ ID NO: 1392105 - RNA, 19 nt, Artificial Sequence
  Description of Artificial Sequence: Synthetic oligonucleotide
  Antisense strand to SEQ ID NO: 1392104
cuuugucagaaacagguuc

SEQ ID NO: 1392106 - RNA, 19 nt, Artificial Sequence
  Description of Artificial Sequence: Synthetic oligonucleotide
  Sense strand starting at position 625 of SEQ ID NO: 1243060
ggccgagcucaguaucuga

SEQ ID NO: 1392107 - RNA, 19 nt, Artificial Sequence
  Description of Artificial Sequence: Synthetic oligonucleotide
  Antisense strand to SEQ ID NO: 1392106
ucagauacugagcucggcc

SEQ ID NO: 1392108 - RNA, 19 nt, Artificial Sequence
  Description of Artificial Sequence: Synthetic oligonucleotide
  Sense strand starting at position 633 of SEQ ID NO: 1243060
ucaguaucugacggugaau

SEQ ID NO: 1392109 - RNA, 19 nt, Artificial Sequence
  Description of Artificial Sequence: Synthetic oligonucleotide
  Antisense strand to SEQ ID NO: 1392108
auucaccgucagauacuga

SEQ ID NO: 1392110 - RNA, 19 nt, Artificial Sequence
  Description of Artificial Sequence: Synthetic oligonucleotide
  Sense strand starting at position 635 of SEQ ID NO: 1243060
aguaucugacggugaauga

SEQ ID NO: 1392111 - RNA, 19 nt, Artificial Sequence
  Description of Artificial Sequence: Synthetic oligonucleotide
  Antisense strand to SEQ ID NO: 1392110
ucauucaccgucagauacu

SEQ ID NO: 1392112 - RNA, 19 nt, Artificial Sequence
  Description of Artificial Sequence: Synthetic oligonucleotide
  Sense strand starting at position 636 of SEQ ID NO: 1243060
guaucugacggugaaugaa

SEQ ID NO: 1392113 - RNA, 19 nt, Artificial Sequence
  Description of Artificial Sequence: Synthetic oligonucleotide
  Antisense strand to SEQ ID NO: 1392112
uucauucaccgucagauac

SEQ ID NO: 1392114 - RNA, 19 nt, Artificial Sequence
  Description of Artificial Sequence: Synthetic oligonucleotide
  Sense strand starting at position 644 of SEQ ID NO: 1243060
cggugaaugaaugaagcua

SEQ ID NO: 1392115 - RNA, 19 nt, Artificial Sequence
  Description of Artificial Sequence: Synthetic oligonucleotide
  Antisense strand to SEQ ID NO: 1392114
uagcuucauucauucaccg

SEQ ID NO: 1392116 - RNA, 19 nt, Artificial Sequence
  Description of Artificial Sequence: Synthetic oligonucleotide
  Sense strand starting at position 707 of SEQ ID NO: 1243060
acaagcgauuuccagguua

SEQ ID NO: 1392117 - RNA, 19 nt, Artificial Sequence
  Description of Artificial Sequence: Synthetic oligonucleotide
  Antisense strand to SEQ ID NO: 1392116
uaaccuggaaaucgcuugu

SEQ ID NO: 1392118 - RNA, 19 nt, Artificial Sequence
  Description of Artificial Sequence: Synthetic oligonucleotide
  Sense strand starting at position 766 of SEQ ID NO: 1243060
acuguuaacuccucagaag

SEQ ID NO: 1392119 - RNA, 19 nt, Artificial Sequence
  Description of Artificial Sequence: Synthetic oligonucleotide
  Antisense strand to SEQ ID NO: 1392118
cuucugaggaguuaacagu

SEQ ID NO: 1392120 - RNA, 19 nt, Artificial Sequence
  Description of Artificial Sequence: Synthetic oligonucleotide
  Sense strand starting at position 819 of SEQ ID NO: 1243060
cuaacaaucucgccaagca

SEQ ID NO: 1392121 - RNA, 19 nt, Artificial Sequence
  Description of Artificial Sequence: Synthetic oligonucleotide
  Antisense strand to SEQ ID NO: 1392120
ugcuuggcgagauuguuag

SEQ ID NO: 1392122 - RNA, 19 nt, Artificial Sequence
  Description of Artificial Sequence: Synthetic oligonucleotide
  Sense strand starting at position 867 of SEQ ID NO: 1243060
cagaaacucgaguguuccu

SEQ ID NO: 1392123 - RNA, 19 nt, Artificial Sequence
  Description of Artificial Sequence: Synthetic oligonucleotide
  Antisense strand to SEQ ID NO: 1392122
aggaacacucgaguuucug

SEQ ID NO: 1392124 - RNA, 19 nt, Artificial Sequence
  Description of Artificial Sequence: Synthetic oligonucleotide
  Sense strand starting at position 877 of SEQ ID NO: 1243060
aguguuccuucugcugaca

SEQ ID NO: 1392125 - RNA, 19 nt, Artificial Sequence
  Description of Artificial Sequence: Synthetic oligonucleotide
  Antisense strand to SEQ ID NO: 1392124
ugucagcagaaggaacacu

SEQ ID NO: 1392126 - RNA, 19 nt, Artificial Sequence
  Description of Artificial Sequence: Synthetic oligonucleotide
  Sense strand starting at position 914 of SEQ ID NO: 1243060
ggccuuguucuguguuuac

SEQ ID NO: 1392127 - RNA, 19 nt, Artificial Sequence
  Description of Artificial Sequence: Synthetic oligonucleotide
  Antisense strand to SEQ ID NO: 1392126
guaaacacagaacaaggcc

SEQ ID NO: 1392128 - RNA, 19 nt, Artificial Sequence
  Description of Artificial Sequence: Synthetic oligonucleotide
  Sense strand starting at position 918 of SEQ ID NO: 1243060
uuguucuguguuuacauca

SEQ ID NO: 1392129 - RNA, 19 nt, Artificial Sequence
  Description of Artificial Sequence: Synthetic oligonucleotide
  Antisense strand to SEQ ID NO: 1392128
ugauguaaacacagaacaa

SEQ ID NO: 1392130 - RNA, 19 nt, Artificial Sequence
  Description of Artificial Sequence: Synthetic oligonucleotide
  Sense strand starting at position 1140 of SEQ ID NO: 1243060
gcaauugucaugcagaggu

SEQ ID NO: 1392131 - RNA, 19 nt, Artificial Sequence
  Description of Artificial Sequence: Synthetic oligonucleotide
  Antisense strand to SEQ ID NO: 1392130
accucugcaugacaauugc

SEQ ID NO: 1392132 - RNA, 19 nt, Artificial Sequence
  Description of Artificial Sequence: Synthetic oligonucleotide
  Sense strand starting at position 1171 of SEQ ID NO: 1243060
gagagugaggccuggcuuu

SEQ ID NO: 1392133 - RNA, 19 nt, Artificial Sequence
  Description of Artificial Sequence: Synthetic oligonucleotide
  Antisense strand to SEQ ID NO: 1392132
aaagccaggccucacucuc

SEQ ID NO: 1392134 - RNA, 19 nt, Artificial Sequence
  Description of Artificial Sequence: Synthetic oligonucleotide
  Sense strand starting at position 2121 of SEQ ID NO: 1243060
ggccgugacgucagaggaa

SEQ ID NO: 1392135 - RNA, 19 nt, Artificial Sequence
  Description of Artificial Sequence: Synthetic oligonucleotide
  Antisense strand to SEQ ID NO: 1392134
uuccucugacgucacggcc

SEQ ID NO: 1392136 - RNA, 19 nt, Artificial Sequence
  Description of Artificial Sequence: Synthetic oligonucleotide
  Sense strand starting at position 2305 of SEQ ID NO: 1243060
gcacacuucggcggacuua

SEQ ID NO: 1392137 - RNA, 19 nt, Artificial Sequence
  Description of Artificial Sequence: Synthetic oligonucleotide
  Antisense strand to SEQ ID NO: 1392136
uaaguccgccgaagugugc

SEQ ID NO: 1392138 - RNA, 19 nt, Artificial Sequence
  Description of Artificial Sequence: Synthetic oligonucleotide
  Sense strand starting at position 2865 of SEQ ID NO: 1243060
gugcaaucuguuuaaccca

SEQ ID NO: 1392139 - RNA, 19 nt, Artificial Sequence
  Description of Artificial Sequence: Synthetic oligonucleotide
  Antisense strand to SEQ ID NO: 1392138
uggguuaaacagauugcac

SEQ ID NO: 1392140 - RNA, 19 nt, Artificial Sequence
  Description of Artificial Sequence: Synthetic oligonucleotide
  Sense strand starting at position 2880 of SEQ ID NO: 1243060
cccauccacuggguuauua

SEQ ID NO: 1392141 - RNA, 19 nt, Artificial Sequence
  Description of Artificial Sequence: Synthetic oligonucleotide
  Antisense strand to SEQ ID NO: 1392140
uaauaacccaguggauggg

SEQ ID NO: 1392142 - RNA, 19 nt, Artificial Sequence
  Description of Artificial Sequence: Synthetic oligonucleotide
  Sense strand starting at position 3302 of SEQ ID NO: 1243060
uugggugugccucauaacu

SEQ ID NO: 1392143 - RNA, 19 nt, Artificial Sequence
  Description of Artificial Sequence: Synthetic oligonucleotide
  Antisense strand to SEQ ID NO: 1392142
aguuaugaggcacacccaa

SEQ ID NO: 1392144 - RNA, 19 nt, Artificial Sequence
  Description of Artificial Sequence: Synthetic oligonucleotide
  Sense strand starting at position 3344 of SEQ ID NO: 1243060
ucugauucugcaugucauc

SEQ ID NO: 1392145 - RNA, 19 nt, Artificial Sequence
  Description of Artificial Sequence: Synthetic oligonucleotide
  Antisense strand to SEQ ID NO: 1392144
gaugacaugcagaaucaga

SEQ ID NO: 1392146 - RNA, 19 nt, Artificial Sequence
  Description of Artificial Sequence: Synthetic oligonucleotide
  Sense strand starting at position 3353 of SEQ ID NO: 1243060
gcaugucauccugguugac

SEQ ID NO: 1392147 - RNA, 19 nt, Artificial Sequence
  Description of Artificial Sequence: Synthetic oligonucleotide
  Antisense strand to SEQ ID NO: 1392146
gucaaccaggaugacaugc

SEQ ID NO: 1392148 - RNA, 19 nt, Artificial Sequence
  Description of Artificial Sequence: Synthetic oligonucleotide
  Sense strand starting at position 3436 of SEQ ID NO: 1243060
guacuugaggccugaacuu

SEQ ID NO: 1392149 - RNA, 19 nt, Artificial Sequence
  Description of Artificial Sequence: Synthetic oligonucleotide
  Antisense strand to SEQ ID NO: 1392148
aaguucaggccucaaguac

SEQ ID NO: 1392150 - RNA, 19 nt, Artificial Sequence
  Description of Artificial Sequence: Synthetic oligonucleotide
  Sense strand starting at position 3458 of SEQ ID NO: 1243060
auguguugcuccguaagau

SEQ ID NO: 1392151 - RNA, 19 nt, Artificial Sequence
  Description of Artificial Sequence: Synthetic oligonucleotide
  Antisense strand to SEQ ID NO: 1392150
aucuuacggagcaacacau

SEQ ID NO: 1392152 - RNA, 19 nt, Artificial Sequence
  Description of Artificial Sequence: Synthetic oligonucleotide
  Sense strand starting at position 3459 of SEQ ID NO: 1243060
uguguugcuccguaagauu

SEQ ID NO: 1392153 - RNA, 19 nt, Artificial Sequence
  Description of Artificial Sequence: Synthetic oligonucleotide
  Antisense strand to SEQ ID NO: 1392152
aaucuuacggagcaacaca

SEQ ID NO: 1392154 - RNA, 19 nt, Artificial Sequence
  Description of Artificial Sequence: Synthetic oligonucleotide
  Sense strand starting at position 3467 of SEQ ID NO: 1243060
uccguaagauuugcacuuu

SEQ ID NO: 1392155 - RNA, 19 nt, Artificial Sequence
  Description of Artificial Sequence: Synthetic oligonucleotide
  Antisense strand to SEQ ID NO: 1392154
aaagugcaaaucuuacgga

SEQ ID NO: 1392156 - RNA, 19 nt, Artificial Sequence
  Description of Artificial Sequence: Synthetic oligonucleotide
  Sense strand starting at position 3468 of SEQ ID NO: 1243060
ccguaagauuugcacuuua

SEQ ID NO: 1392157 - RNA, 19 nt, Artificial Sequence
  Description of Artificial Sequence: Synthetic oligonucleotide
  Antisense strand to SEQ ID NO: 1392156
uaaagugcaaaucuuacgg

SEQ ID NO: 1392158 - RNA, 19 nt, Artificial Sequence
  Description of Artificial Sequence: Synthetic oligonucleotide
  Sense strand starting at position 3550 of SEQ ID NO: 1243060
uauugugaauccugaugaa

SEQ ID NO: 1392159 - RNA, 19 nt, Artificial Sequence
  Description of Artificial Sequence: Synthetic oligonucleotide
  Antisense strand to SEQ ID NO: 1392158
uucaucaggauucacaaua

SEQ ID NO: 1392160 - RNA, 19 nt, Artificial Sequence
  Description of Artificial Sequence: Synthetic oligonucleotide
  Sense strand starting at position 3553 of SEQ ID NO: 1243060
ugugaauccugaugaaacc

SEQ ID NO: 1392161 - RNA, 19 nt, Artificial Sequence
  Description of Artificial Sequence: Synthetic oligonucleotide
  Antisense strand to SEQ ID NO: 1392160
gguuucaucaggauucaca

SEQ ID NO: 1392162 - RNA, 19 nt, Artificial Sequence
  Description of Artificial Sequence: Synthetic oligonucleotide
  Sense strand starting at position 3578 of SEQ ID NO: 1243060
gugacuauuuaaugcuaau

SEQ ID NO: 1392163 - RNA, 19 nt, Artificial Sequence
  Description of Artificial Sequence: Synthetic oligonucleotide
  Antisense strand to SEQ ID NO: 1392162
auuagcauuaaauagucac

SEQ ID NO: 1392164 - RNA, 19 nt, Artificial Sequence
  Description of Artificial Sequence: Synthetic oligonucleotide
  Sense strand starting at position 3626 of SEQ ID NO: 1243060
cugcaaugcucaucaguuc

SEQ ID NO: 1392165 - RNA, 19 nt, Artificial Sequence
  Description of Artificial Sequence: Synthetic oligonucleotide
  Antisense strand to SEQ ID NO: 1392164
gaacugaugagcauugcag

SEQ ID NO: 1392166 - RNA, 19 nt, Artificial Sequence
  Description of Artificial Sequence: Synthetic oligonucleotide
  Sense strand starting at position 3661 of SEQ ID NO: 1243060
aucugauugcaccgaaaca

SEQ ID NO: 1392167 - RNA, 19 nt, Artificial Sequence
  Description of Artificial Sequence: Synthetic oligonucleotide
  Antisense strand to SEQ ID NO: 1392166
uguuucggugcaaucagau

SEQ ID NO: 1392168 - RNA, 19 nt, Artificial Sequence
  Description of Artificial Sequence: Synthetic oligonucleotide
  Sense strand starting at position 12 of SEQ ID NO: 1243061
cgaagcuuugacuguaucu

SEQ ID NO: 1392169 - RNA, 19 nt, Artificial Sequence
  Description of Artificial Sequence: Synthetic oligonucleotide
  Antisense strand to SEQ ID NO: 1392168
agauacagucaaagcuucg

SEQ ID NO: 1392170 - RNA, 19 nt, Artificial Sequence
  Description of Artificial Sequence: Synthetic oligonucleotide
  Sense strand starting at position 42 of SEQ ID NO: 1243061
uuguuaugcuaguuaguuu

SEQ ID NO: 1392171 - RNA, 19 nt, Artificial Sequence
  Description of Artificial Sequence: Synthetic oligonucleotide
  Antisense strand to SEQ ID NO: 1392170
aaacuaacuagcauaacaa

SEQ ID NO: 1392172 - RNA, 19 nt, Artificial Sequence
  Description of Artificial Sequence: Synthetic oligonucleotide
  Sense strand starting at position 281 of SEQ ID NO: 1243061
gggcacauuaucuggguau

SEQ ID NO: 1392173 - RNA, 19 nt, Artificial Sequence
  Description of Artificial Sequence: Synthetic oligonucleotide
  Antisense strand to SEQ ID NO: 1392172
auacccagauaaugugccc

SEQ ID NO: 1392174 - RNA, 19 nt, Artificial Sequence
  Description of Artificial Sequence: Synthetic oligonucleotide
  Sense strand starting at position 283 of SEQ ID NO: 1243061
gcacauuaucuggguauuc

SEQ ID NO: 1392175 - RNA, 19 nt, Artificial Sequence
  Description of Artificial Sequence: Synthetic oligonucleotide
  Antisense strand to SEQ ID NO: 1392174
gaauacccagauaaugugc

SEQ ID NO: 1392176 - RNA, 19 nt, Artificial Sequence
  Description of Artificial Sequence: Synthetic oligonucleotide
  Sense strand starting at position 390 of SEQ ID NO: 1243061
cucacagagucuuccagua

SEQ ID NO: 1392177 - RNA, 19 nt, Artificial Sequence
  Description of Artificial Sequence: Synthetic oligonucleotide
  Antisense strand to SEQ ID NO: 1392176
uacuggaagacucugugag

SEQ ID NO: 1392178 - RNA, 19 nt, Artificial Sequence
  Description of Artificial Sequence: Synthetic oligonucleotide
  Sense strand starting at position 503 of SEQ ID NO: 1243061
agccgugggauucgaauga

SEQ ID NO: 1392179 - RNA, 19 nt, Artificial Sequence
  Description of Artificial Sequence: Synthetic oligonucleotide
  Antisense strand to SEQ ID NO: 1392178
ucauucgaaucccacggcu

SEQ ID NO: 1392180 - RNA, 19 nt, Artificial Sequence
  Description of Artificial Sequence: Synthetic oligonucleotide
  Sense strand starting at position 507 of SEQ ID NO: 1243061
gugggauucgaaugacgcu

SEQ ID NO: 1392181 - RNA, 19 nt, Artificial Sequence
  Description of Artificial Sequence: Synthetic oligonucleotide
  Antisense strand to SEQ ID NO: 1392180
agcgucauucgaaucccac

SEQ ID NO: 1392182 - RNA, 19 nt, Artificial Sequence
  Description of Artificial Sequence: Synthetic oligonucleotide
  Sense strand starting at position 516 of SEQ ID NO: 1243061
gaaugacgcugccuagaga

SEQ ID NO: 1392183 - RNA, 19 nt, Artificial Sequence
  Description of Artificial Sequence: Synthetic oligonucleotide
  Antisense strand to SEQ ID NO: 1392182
ucucuaggcagcgucauuc

SEQ ID NO: 1392184 - RNA, 19 nt, Artificial Sequence
  Description of Artificial Sequence: Synthetic oligonucleotide
  Sense strand starting at position 531 of SEQ ID NO: 1243061
gagagaccucacuggcaaa

SEQ ID NO: 1392185 - RNA, 19 nt, Artificial Sequence
  Description of Artificial Sequence: Synthetic oligonucleotide
  Antisense strand to SEQ ID NO: 1392184
uuugccagugaggucucuc

SEQ ID NO: 1392186 - RNA, 19 nt, Artificial Sequence
  Description of Artificial Sequence: Synthetic oligonucleotide
  Sense strand starting at position 591 of SEQ ID NO: 1243061
uagacuuuguucuuugguu

SEQ ID NO: 1392187 - RNA, 19 nt, Artificial Sequence
  Description of Artificial Sequence: Synthetic oligonucleotide
  Antisense strand to SEQ ID NO: 1392186
aaccaaagaacaaagucua

SEQ ID NO: 1392188 - RNA, 19 nt, Artificial Sequence
  Description of Artificial Sequence: Synthetic oligonucleotide
  Sense strand starting at position 592 of SEQ ID NO: 1243061
agacuuuguucuuugguua

SEQ ID NO: 1392189 - RNA, 19 nt, Artificial Sequence
  Description of Artificial Sequence: Synthetic oligonucleotide
  Antisense strand to SEQ ID NO: 1392188
uaaccaaagaacaaagucu

SEQ ID NO: 1392190 - RNA, 19 nt, Artificial Sequence
  Description of Artificial Sequence: Synthetic oligonucleotide
  Sense strand starting at position 593 of SEQ ID NO: 1243061
gacuuuguucuuugguuaa

SEQ ID NO: 1392191 - RNA, 19 nt, Artificial Sequence
  Description of Artificial Sequence: Synthetic oligonucleotide
  Antisense strand to SEQ ID NO: 1392190
uuaaccaaagaacaaaguc

SEQ ID NO: 1392192 - RNA, 19 nt, Artificial Sequence
  Description of Artificial Sequence: Synthetic oligonucleotide
  Sense strand starting at position 1090 of SEQ ID NO: 1243061
ggcgcaguccugugaccau

SEQ ID NO: 1392193 - RNA, 19 nt, Artificial Sequence
  Description of Artificial Sequence: Synthetic oligonucleotide
  Antisense strand to SEQ ID NO: 1392192
auggucacaggacugcgcc

SEQ ID NO: 1392194 - RNA, 19 nt, Artificial Sequence
  Description of Artificial Sequence: Synthetic oligonucleotide
  Sense strand starting at position 2283 of SEQ ID NO: 1243061
gauuuaccuucccagaggu

SEQ ID NO: 1392195 - RNA, 19 nt, Artificial Sequence
  Description of Artificial Sequence: Synthetic oligonucleotide
  Antisense strand to SEQ ID NO: 1392194
accucugggaagguaaauc

SEQ ID NO: 1392196 - RNA, 19 nt, Artificial Sequence
  Description of Artificial Sequence: Synthetic oligonucleotide
  Sense strand starting at position 3040 of SEQ ID NO: 1243061
uuauaacaccuauguugua

SEQ ID NO: 1392197 - RNA, 19 nt, Artificial Sequence
  Description of Artificial Sequence: Synthetic oligonucleotide
  Antisense strand to SEQ ID NO: 1392196
uacaacauagguguuauaa

SEQ ID NO: 1392198 - RNA, 19 nt, Artificial Sequence
  Description of Artificial Sequence: Synthetic oligonucleotide
  Sense strand starting at position 3084 of SEQ ID NO: 1243061
cacaauaguccugggcuua

SEQ ID NO: 1392199 - RNA, 19 nt, Artificial Sequence
  Description of Artificial Sequence: Synthetic oligonucleotide
  Antisense strand to SEQ ID NO: 1392198
uaagcccaggacuauugug

SEQ ID NO: 1392200 - RNA, 19 nt, Artificial Sequence
  Description of Artificial Sequence: Synthetic oligonucleotide
  Sense strand starting at position 3089 of SEQ ID NO: 1243061
uaguccugggcuuacaaau

SEQ ID NO: 1392201 - RNA, 19 nt, Artificial Sequence
  Description of Artificial Sequence: Synthetic oligonucleotide
  Antisense strand to SEQ ID NO: 1392200
auuuguaagcccaggacua

SEQ ID NO: 1392202 - RNA, 19 nt, Artificial Sequence
  Description of Artificial Sequence: Synthetic oligonucleotide
  Sense strand starting at position 3268 of SEQ ID NO: 1243061
auuugcuugcagggugauu

SEQ ID NO: 1392203 - RNA, 19 nt, Artificial Sequence
  Description of Artificial Sequence: Synthetic oligonucleotide
  Antisense strand to SEQ ID NO: 1392202
aaucacccugcaagcaaau

SEQ ID NO: 1392204 - RNA, 19 nt, Artificial Sequence
  Description of Artificial Sequence: Synthetic oligonucleotide
  Sense strand starting at position 3287 of SEQ ID NO: 1243061
gcauucuagugugucagga

SEQ ID NO: 1392205 - RNA, 19 nt, Artificial Sequence
  Description of Artificial Sequence: Synthetic oligonucleotide
  Antisense strand to SEQ ID NO: 1392204
uccugacacacuagaaugc

SEQ ID NO: 1392206 - RNA, 19 nt, Artificial Sequence
  Description of Artificial Sequence: Synthetic oligonucleotide
  Sense strand starting at position 3289 of SEQ ID NO: 1243061
auucuagugugucaggaaa

SEQ ID NO: 1392207 - RNA, 19 nt, Artificial Sequence
  Description of Artificial Sequence: Synthetic oligonucleotide
  Antisense strand to SEQ ID NO: 1392206
uuuccugacacacuagaau

SEQ ID NO: 1392208 - RNA, 19 nt, Artificial Sequence
  Description of Artificial Sequence: Synthetic oligonucleotide
  Sense strand starting at position 3327 of SEQ ID NO: 1243061
caaagaagacagugucuaa

SEQ ID NO: 1392209 - RNA, 19 nt, Artificial Sequence
  Description of Artificial Sequence: Synthetic oligonucleotide
  Antisense strand to SEQ ID NO: 1392208
uuagacacugucuucuuug

SEQ ID NO: 1392210 - RNA, 19 nt, Artificial Sequence
  Description of Artificial Sequence: Synthetic oligonucleotide
  Sense strand starting at position 3331 of SEQ ID NO: 1243061
gaagacagugucuaaaguu

SEQ ID NO: 1392211 - RNA, 19 nt, Artificial Sequence
  Description of Artificial Sequence: Synthetic oligonucleotide
  Antisense strand to SEQ ID NO: 1392210
aacuuuagacacugucuuc

SEQ ID NO: 1392212 - RNA, 19 nt, Artificial Sequence
  Description of Artificial Sequence: Synthetic oligonucleotide
  Sense strand starting at position 3341 of SEQ ID NO: 1243061
ucuaaaguuuaaugggaag

SEQ ID NO: 1392213 - RNA, 19 nt, Artificial Sequence
  Description of Artificial Sequence: Synthetic oligonucleotide
  Antisense strand to SEQ ID NO: 1392212
cuucccauuaaacuuuaga

SEQ ID NO: 1392214 - RNA, 19 nt, Artificial Sequence
  Description of Artificial Sequence: Synthetic oligonucleotide
  Sense strand starting at position 3357 of SEQ ID NO: 1243061
aagggcagguuuccucaua

SEQ ID NO: 1392215 - RNA, 19 nt, Artificial Sequence
  Description of Artificial Sequence: Synthetic oligonucleotide
  Antisense strand to SEQ ID NO: 1392214
uaugaggaaaccugcccuu

SEQ ID NO: 1392216 - RNA, 19 nt, Artificial Sequence
  Description of Artificial Sequence: Synthetic oligonucleotide
  Sense strand starting at position 3358 of SEQ ID NO: 1243061
agggcagguuuccucauau

SEQ ID NO: 1392217 - RNA, 19 nt, Artificial Sequence
  Description of Artificial Sequence: Synthetic oligonucleotide
  Antisense strand to SEQ ID NO: 1392216
auaugaggaaaccugcccu

SEQ ID NO: 1392218 - RNA, 19 nt, Artificial Sequence
  Description of Artificial Sequence: Synthetic oligonucleotide
  Sense strand starting at position 3385 of SEQ ID NO: 1243061
gaagaugucguuugaauug

SEQ ID NO: 1392219 - RNA, 19 nt, Artificial Sequence
  Description of Artificial Sequence: Synthetic oligonucleotide
  Antisense strand to SEQ ID NO: 1392218
caauucaaacgacaucuuc

SEQ ID NO: 1392220 - RNA, 19 nt, Artificial Sequence
  Description of Artificial Sequence: Synthetic oligonucleotide
  Sense strand starting at position 3390 of SEQ ID NO: 1243061
ugucguuugaauugaguuc

SEQ ID NO: 1392221 - RNA, 19 nt, Artificial Sequence
  Description of Artificial Sequence: Synthetic oligonucleotide
  Antisense strand to SEQ ID NO: 1392220
gaacucaauucaaacgaca

SEQ ID NO: 1392222 - RNA, 19 nt, Artificial Sequence
  Description of Artificial Sequence: Synthetic oligonucleotide
  Sense strand starting at position 3397 of SEQ ID NO: 1243061
ugaauugaguucuggauga

SEQ ID NO: 1392223 - RNA, 19 nt, Artificial Sequence
  Description of Artificial Sequence: Synthetic oligonucleotide
  Antisense strand to SEQ ID NO: 1392222
ucauccagaacucaauuca

SEQ ID NO: 1392224 - RNA, 19 nt, Artificial Sequence
  Description of Artificial Sequence: Synthetic oligonucleotide
  Sense strand starting at position 3401 of SEQ ID NO: 1243061
uugaguucuggaugacaag

SEQ ID NO: 1392225 - RNA, 19 nt, Artificial Sequence
  Description of Artificial Sequence: Synthetic oligonucleotide
  Antisense strand to SEQ ID NO: 1392224
cuugucauccagaacucaa

SEQ ID NO: 1392226 - RNA, 19 nt, Artificial Sequence
  Description of Artificial Sequence: Synthetic oligonucleotide
  Sense strand starting at position 3492 of SEQ ID NO: 1243061
uagaguuggugggcaugaa

SEQ ID NO: 1392227 - RNA, 19 nt, Artificial Sequence
  Description of Artificial Sequence: Synthetic oligonucleotide
  Antisense strand to SEQ ID NO: 1392226
uucaugcccaccaacucua

SEQ ID NO: 1392228 - RNA, 19 nt, Artificial Sequence
  Description of Artificial Sequence: Synthetic oligonucleotide
  Sense strand starting at position 3493 of SEQ ID NO: 1243061
agaguuggugggcaugaau

SEQ ID NO: 1392229 - RNA, 19 nt, Artificial Sequence
  Description of Artificial Sequence: Synthetic oligonucleotide
  Antisense strand to SEQ ID NO: 1392228
auucaugcccaccaacucu

SEQ ID NO: 1392230 - RNA, 19 nt, Artificial Sequence
  Description of Artificial Sequence: Synthetic oligonucleotide
  Sense strand starting at position 3605 of SEQ ID NO: 1243061
gaguaaaccuuucugauug

SEQ ID NO: 1392231 - RNA, 19 nt, Artificial Sequence
  Description of Artificial Sequence: Synthetic oligonucleotide
  Antisense strand to SEQ ID NO: 1392230
caaucagaaagguuuacuc

SEQ ID NO: 1392232 - RNA, 19 nt, Artificial Sequence
  Description of Artificial Sequence: Synthetic oligonucleotide
  Sense strand starting at position 3607 of SEQ ID NO: 1243061
guaaaccuuucugauugau

SEQ ID NO: 1392233 - RNA, 19 nt, Artificial Sequence
  Description of Artificial Sequence: Synthetic oligonucleotide
  Antisense strand to SEQ ID NO: 1392232
aucaaucagaaagguuuac

SEQ ID NO: 1392234 - RNA, 19 nt, Artificial Sequence
  Description of Artificial Sequence: Synthetic oligonucleotide
  Sense strand starting at position 3690 of SEQ ID NO: 1243061
agagaugaguuacaaagcu

SEQ ID NO: 1392235 - RNA, 19 nt, Artificial Sequence
  Description of Artificial Sequence: Synthetic oligonucleotide
  Antisense strand to SEQ ID NO: 1392234
agcuuuguaacucaucucu

SEQ ID NO: 1392236 - RNA, 19 nt, Artificial Sequence
  Description of Artificial Sequence: Synthetic oligonucleotide
  Sense strand starting at position 3762 of SEQ ID NO: 1243061
uugacagauccagguugua

SEQ ID NO: 1392237 - RNA, 19 nt, Artificial Sequence
  Description of Artificial Sequence: Synthetic oligonucleotide
  Antisense strand to SEQ ID NO: 1392236
uacaaccuggaucugucaa

SEQ ID NO: 1392238 - RNA, 19 nt, Artificial Sequence
  Description of Artificial Sequence: Synthetic oligonucleotide
  Sense strand starting at position 3931 of SEQ ID NO: 1243061
ugguaaauuugagauggcu

SEQ ID NO: 1392239 - RNA, 19 nt, Artificial Sequence
  Description of Artificial Sequence: Synthetic oligonucleotide
  Antisense strand to SEQ ID NO: 1392238
agccaucucaaauuuacca

SEQ ID NO: 1392240 - RNA, 19 nt, Artificial Sequence
  Description of Artificial Sequence: Synthetic oligonucleotide
  Sense strand starting at position 3965 of SEQ ID NO: 1243061
guagaugucuaguugcagu

SEQ ID NO: 1392241 - RNA, 19 nt, Artificial Sequence
  Description of Artificial Sequence: Synthetic oligonucleotide
  Antisense strand to SEQ ID NO: 1392240
acugcaacuagacaucuac

SEQ ID NO: 1392242 - RNA, 19 nt, Artificial Sequence
  Description of Artificial Sequence: Synthetic oligonucleotide
  Sense strand starting at position 3973 of SEQ ID NO: 1243061
cuaguugcaguugaauaua

SEQ ID NO: 1392243 - RNA, 19 nt, Artificial Sequence
  Description of Artificial Sequence: Synthetic oligonucleotide
  Antisense strand to SEQ ID NO: 1392242
uauauucaacugcaacuag

SEQ ID NO: 1392244 - RNA, 19 nt, Artificial Sequence
  Description of Artificial Sequence: Synthetic oligonucleotide
  Sense strand starting at position 3976 of SEQ ID NO: 1243061
guugcaguugaauauauga

SEQ ID NO: 1392245 - RNA, 19 nt, Artificial Sequence
  Description of Artificial Sequence: Synthetic oligonucleotide
  Antisense strand to SEQ ID NO: 1392244
ucauauauucaacugcaac

SEQ ID NO: 1392246 - RNA, 19 nt, Artificial Sequence
  Description of Artificial Sequence: Synthetic oligonucleotide
  Sense strand starting at position 3978 of SEQ ID NO: 1243061
ugcaguugaauauaugagu

SEQ ID NO: 1392247 - RNA, 19 nt, Artificial Sequence
  Description of Artificial Sequence: Synthetic oligonucleotide
  Antisense strand to SEQ ID NO: 1392246
acucauauauucaacugca

SEQ ID NO: 1392248 - RNA, 19 nt, Artificial Sequence
  Description of Artificial Sequence: Synthetic oligonucleotide
  Sense strand starting at position 67 of SEQ ID NO: 1243062
ggaucuuugaucuguagga

SEQ ID NO: 1392249 - RNA, 19 nt, Artificial Sequence
  Description of Artificial Sequence: Synthetic oligonucleotide
  Antisense strand to SEQ ID NO: 1392248
uccuacagaucaaagaucc

SEQ ID NO: 1392250 - RNA, 19 nt, Artificial Sequence
  Description of Artificial Sequence: Synthetic oligonucleotide
  Sense strand starting at position 68 of SEQ ID NO: 1243062
gaucuuugaucuguaggaa

SEQ ID NO: 1392251 - RNA, 19 nt, Artificial Sequence
  Description of Artificial Sequence: Synthetic oligonucleotide
  Antisense strand to SEQ ID NO: 1392250
uuccuacagaucaaagauc

SEQ ID NO: 1392252 - RNA, 19 nt, Artificial Sequence
  Description of Artificial Sequence: Synthetic oligonucleotide
  Sense strand starting at position 71 of SEQ ID NO: 1243062
cuuugaucuguaggaaaug

SEQ ID NO: 1392253 - RNA, 19 nt, Artificial Sequence
  Description of Artificial Sequence: Synthetic oligonucleotide
  Antisense strand to SEQ ID NO: 1392252
cauuuccuacagaucaaag

SEQ ID NO: 1392254 - RNA, 19 nt, Artificial Sequence
  Description of Artificial Sequence: Synthetic oligonucleotide
  Sense strand starting at position 2346 of SEQ ID NO: 1243062
gggaguuguuaccuggaag

SEQ ID NO: 1392255 - RNA, 19 nt, Artificial Sequence
  Description of Artificial Sequence: Synthetic oligonucleotide
  Antisense strand to SEQ ID NO: 1392254
cuuccagguaacaacuccc

SEQ ID NO: 1392256 - RNA, 19 nt, Artificial Sequence
  Description of Artificial Sequence: Synthetic oligonucleotide
  Sense strand starting at position 2347 of SEQ ID NO: 1243062
ggaguuguuaccuggaaga

SEQ ID NO: 1392257 - RNA, 19 nt, Artificial Sequence
  Description of Artificial Sequence: Synthetic oligonucleotide
  Antisense strand to SEQ ID NO: 1392256
ucuuccagguaacaacucc

SEQ ID NO: 1392258 - RNA, 19 nt, Artificial Sequence
  Description of Artificial Sequence: Synthetic oligonucleotide
  Sense strand starting at position 2349 of SEQ ID NO: 1243062
aguuguuaccuggaagaug

SEQ ID NO: 1392259 - RNA, 19 nt, Artificial Sequence
  Description of Artificial Sequence: Synthetic oligonucleotide
  Antisense strand to SEQ ID NO: 1392258
caucuuccagguaacaacu

SEQ ID NO: 1392260 - RNA, 19 nt, Artificial Sequence
  Description of Artificial Sequence: Synthetic oligonucleotide
  Sense strand starting at position 3027 of SEQ ID NO: 1243062
uuacaauccugcgcugagu

SEQ ID NO: 1392261 - RNA, 19 nt, Artificial Sequence
  Description of Artificial Sequence: Synthetic oligonucleotide
  Antisense strand to SEQ ID NO: 1392260
acucagcgcaggauuguaa

SEQ ID NO: 1392262 - RNA, 19 nt, Artificial Sequence
  Description of Artificial Sequence: Synthetic oligonucleotide
  Sense strand starting at position 3263 of SEQ ID NO: 1243062
ccaggauguuugccugcaa

SEQ ID NO: 1392263 - RNA, 19 nt, Artificial Sequence
  Description of Artificial Sequence: Synthetic oligonucleotide
  Antisense strand to SEQ ID NO: 1392262
uugcaggcaaacauccugg

SEQ ID NO: 1392264 - RNA, 19 nt, Artificial Sequence
  Description of Artificial Sequence: Synthetic oligonucleotide
  Sense strand starting at position 3267 of SEQ ID NO: 1243062
gauguuugccugcaacaca

SEQ ID NO: 1392265 - RNA, 19 nt, Artificial Sequence
  Description of Artificial Sequence: Synthetic oligonucleotide
  Antisense strand to SEQ ID NO: 1392264
uguguugcaggcaaacauc

SEQ ID NO: 1392266 - RNA, 19 nt, Artificial Sequence
  Description of Artificial Sequence: Synthetic oligonucleotide
  Sense strand starting at position 3836 of SEQ ID NO: 1243062
ucuugucaaguguguccaa

SEQ ID NO: 1392267 - RNA, 19 nt, Artificial Sequence
  Description of Artificial Sequence: Synthetic oligonucleotide
  Antisense strand to SEQ ID NO: 1392266
uuggacacacuugacaaga

SEQ ID NO: 1392268 - RNA, 19 nt, Artificial Sequence
  Description of Artificial Sequence: Synthetic oligonucleotide
  Sense strand starting at position 3837 of SEQ ID NO: 1243062
cuugucaaguguguccaaa

SEQ ID NO: 1392269 - RNA, 19 nt, Artificial Sequence
  Description of Artificial Sequence: Synthetic oligonucleotide
  Antisense strand to SEQ ID NO: 1392268
uuuggacacacuugacaag

SEQ ID NO: 1392270 - RNA, 19 nt, Artificial Sequence
  Description of Artificial Sequence: Synthetic oligonucleotide
  Sense strand starting at position 3867 of SEQ ID NO: 1243062
aggucacucucuggguuaa

SEQ ID NO: 1392271 - RNA, 19 nt, Artificial Sequence
  Description of Artificial Sequence: Synthetic oligonucleotide
  Antisense strand to SEQ ID NO: 1392270
uuaacccagagagugaccu

SEQ ID NO: 1392272 - RNA, 19 nt, Artificial Sequence
  Description of Artificial Sequence: Synthetic oligonucleotide
  Sense strand starting at position 3868 of SEQ ID NO: 1243062
ggucacucucuggguuaau

SEQ ID NO: 1392273 - RNA, 19 nt, Artificial Sequence
  Description of Artificial Sequence: Synthetic oligonucleotide
  Antisense strand to SEQ ID NO: 1392272
auuaacccagagagugacc

SEQ ID NO: 1392274 - RNA, 19 nt, Artificial Sequence
  Description of Artificial Sequence: Synthetic oligonucleotide
  Sense strand starting at position 3869 of SEQ ID NO: 1243062
gucacucucuggguuaauu

SEQ ID NO: 1392275 - RNA, 19 nt, Artificial Sequence
  Description of Artificial Sequence: Synthetic oligonucleotide
  Antisense strand to SEQ ID NO: 1392274
aauuaacccagagagugac

SEQ ID NO: 1392276 - RNA, 19 nt, Artificial Sequence
  Description of Artificial Sequence: Synthetic oligonucleotide
  Sense strand starting at position 3877 of SEQ ID NO: 1243062
cuggguuaauucuuauuau

SEQ ID NO: 1392277 - RNA, 19 nt, Artificial Sequence
  Description of Artificial Sequence: Synthetic oligonucleotide
  Antisense strand to SEQ ID NO: 1392276
auaauaagaauuaacccag

SEQ ID NO: 1392278 - RNA, 19 nt, Artificial Sequence
  Description of Artificial Sequence: Synthetic oligonucleotide
  Sense strand starting at position 3878 of SEQ ID NO: 1243062
uggguuaauucuuauuaug

SEQ ID NO: 1392279 - RNA, 19 nt, Artificial Sequence
  Description of Artificial Sequence: Synthetic oligonucleotide
  Antisense strand to SEQ ID NO: 1392278
cauaauaagaauuaaccca

SEQ ID NO: 1392280 - RNA, 19 nt, Artificial Sequence
  Description of Artificial Sequence: Synthetic oligonucleotide
  Sense strand starting at position 3880 of SEQ ID NO: 1243062
gguuaauucuuauuaugca

SEQ ID NO: 1392281 - RNA, 19 nt, Artificial Sequence
  Description of Artificial Sequence: Synthetic oligonucleotide
  Antisense strand to SEQ ID NO: 1392280
ugcauaauaagaauuaacc

SEQ ID NO: 1392282 - RNA, 19 nt, Artificial Sequence
  Description of Artificial Sequence: Synthetic oligonucleotide
  Sense strand starting at position 3892 of SEQ ID NO: 1243062
uuaugcaacuagugaaaga

SEQ ID NO: 1392283 - RNA, 19 nt, Artificial Sequence
  Description of Artificial Sequence: Synthetic oligonucleotide
  Antisense strand to SEQ ID NO: 1392282
ucuuucacuaguugcauaa

SEQ ID NO: 1392284 - RNA, 19 nt, Artificial Sequence
  Description of Artificial Sequence: Synthetic oligonucleotide
  Sense strand starting at position 3920 of SEQ ID NO: 1243062
cucaguacccagugguaau

SEQ ID NO: 1392285 - RNA, 19 nt, Artificial Sequence
  Description of Artificial Sequence: Synthetic oligonucleotide
  Antisense strand to SEQ ID NO: 1392284
auuaccacuggguacugag

SEQ ID NO: 1392286 - RNA, 19 nt, Artificial Sequence
  Description of Artificial Sequence: Synthetic oligonucleotide
  Sense strand starting at position 3921 of SEQ ID NO: 1243062
ucaguacccagugguaaua

SEQ ID NO: 1392287 - RNA, 19 nt, Artificial Sequence
  Description of Artificial Sequence: Synthetic oligonucleotide
  Antisense strand to SEQ ID NO: 1392286
uauuaccacuggguacuga

SEQ ID NO: 1392288 - RNA, 19 nt, Artificial Sequence
  Description of Artificial Sequence: Synthetic oligonucleotide
  Sense strand starting at position 3923 of SEQ ID NO: 1243062
aguacccagugguaauauu

SEQ ID NO: 1392289 - RNA, 19 nt, Artificial Sequence
  Description of Artificial Sequence: Synthetic oligonucleotide
  Antisense strand to SEQ ID NO: 1392288
aauauuaccacuggguacu

SEQ ID NO: 1392290 - RNA, 19 nt, Artificial Sequence
  Description of Artificial Sequence: Synthetic oligonucleotide
  Sense strand starting at position 3943 of SEQ ID NO: 1243062
gcacccuucucauggaguu

SEQ ID NO: 1392291 - RNA, 19 nt, Artificial Sequence
  Description of Artificial Sequence: Synthetic oligonucleotide
  Antisense strand to SEQ ID NO: 1392290
aacuccaugagaagggugc

SEQ ID NO: 1392292 - RNA, 19 nt, Artificial Sequence
  Description of Artificial Sequence: Synthetic oligonucleotide
  Sense strand starting at position 3956 of SEQ ID NO: 1243062
ggaguugcuguggagauca

SEQ ID NO: 1392293 - RNA, 19 nt, Artificial Sequence
  Description of Artificial Sequence: Synthetic oligonucleotide
  Antisense strand to SEQ ID NO: 1392292
ugaucuccacagcaacucc

SEQ ID NO: 1392294 - RNA, 19 nt, Artificial Sequence
  Description of Artificial Sequence: Synthetic oligonucleotide
  Sense strand starting at position 3968 of SEQ ID NO: 1243062
gagaucaagugaguuaaug

SEQ ID NO: 1392295 - RNA, 19 nt, Artificial Sequence
  Description of Artificial Sequence: Synthetic oligonucleotide
  Antisense strand to SEQ ID NO: 1392294
cauuaacucacuugaucuc

SEQ ID NO: 1392296 - RNA, 19 nt, Artificial Sequence
  Description of Artificial Sequence: Synthetic oligonucleotide
  Sense strand starting at position 1905 of SEQ ID NO: 1243063
gggaguuguuaccuggaag

SEQ ID NO: 1392297 - RNA, 19 nt, Artificial Sequence
  Description of Artificial Sequence: Synthetic oligonucleotide
  Antisense strand to SEQ ID NO: 1392296
cuuccagguaacaacuccc

SEQ ID NO: 1392298 - RNA, 19 nt, Artificial Sequence
  Description of Artificial Sequence: Synthetic oligonucleotide
  Sense strand starting at position 1906 of SEQ ID NO: 1243063
ggaguuguuaccuggaaga

SEQ ID NO: 1392299 - RNA, 19 nt, Artificial Sequence
  Description of Artificial Sequence: Synthetic oligonucleotide
  Antisense strand to SEQ ID NO: 1392298
ucuuccagguaacaacucc

SEQ ID NO: 1392300 - RNA, 19 nt, Artificial Sequence
  Description of Artificial Sequence: Synthetic oligonucleotide
  Sense strand starting at position 1908 of SEQ ID NO: 1243063
aguuguuaccuggaagaug

SEQ ID NO: 1392301 - RNA, 19 nt, Artificial Sequence
  Description of Artificial Sequence: Synthetic oligonucleotide
  Antisense strand to SEQ ID NO: 1392300
caucuuccagguaacaacu

SEQ ID NO: 1392302 - RNA, 19 nt, Artificial Sequence
  Description of Artificial Sequence: Synthetic oligonucleotide
  Sense strand starting at position 2586 of SEQ ID NO: 1243063
uuacaauccugcgcugagu

SEQ ID NO: 1392303 - RNA, 19 nt, Artificial Sequence
  Description of Artificial Sequence: Synthetic oligonucleotide
  Antisense strand to SEQ ID NO: 1392302
acucagcgcaggauuguaa

SEQ ID NO: 1392304 - RNA, 19 nt, Artificial Sequence
  Description of Artificial Sequence: Synthetic oligonucleotide
  Sense strand starting at position 2822 of SEQ ID NO: 1243063
ccaggauguuugccugcaa

SEQ ID NO: 1392305 - RNA, 19 nt, Artificial Sequence
  Description of Artificial Sequence: Synthetic oligonucleotide
  Antisense strand to SEQ ID NO: 1392304
uugcaggcaaacauccugg

SEQ ID NO: 1392306 - RNA, 19 nt, Artificial Sequence
  Description of Artificial Sequence: Synthetic oligonucleotide
  Sense strand starting at position 2826 of SEQ ID NO: 1243063
gauguuugccugcaacaca

SEQ ID NO: 1392307 - RNA, 19 nt, Artificial Sequence
  Description of Artificial Sequence: Synthetic oligonucleotide
  Antisense strand to SEQ ID NO: 1392306
uguguugcaggcaaacauc

SEQ ID NO: 1392308 - RNA, 19 nt, Artificial Sequence
  Description of Artificial Sequence: Synthetic oligonucleotide
  Sense strand starting at position 3395 of SEQ ID NO: 1243063
ucuugucaaguguguccaa

SEQ ID NO: 1392309 - RNA, 19 nt, Artificial Sequence
  Description of Artificial Sequence: Synthetic oligonucleotide
  Antisense strand to SEQ ID NO: 1392308
uuggacacacuugacaaga

SEQ ID NO: 1392310 - RNA, 19 nt, Artificial Sequence
  Description of Artificial Sequence: Synthetic oligonucleotide
  Sense strand starting at position 3396 of SEQ ID NO: 1243063
cuugucaaguguguccaaa

SEQ ID NO: 1392311 - RNA, 19 nt, Artificial Sequence
  Description of Artificial Sequence: Synthetic oligonucleotide
  Antisense strand to SEQ ID NO: 1392310
uuuggacacacuugacaag

SEQ ID NO: 1392312 - RNA, 19 nt, Artificial Sequence
  Description of Artificial Sequence: Synthetic oligonucleotide
  Sense strand starting at position 3426 of SEQ ID NO: 1243063
aggucacucucuggguuaa

SEQ ID NO: 1392313 - RNA, 19 nt, Artificial Sequence
  Description of Artificial Sequence: Synthetic oligonucleotide
  Antisense strand to SEQ ID NO: 1392312
uuaacccagagagugaccu

SEQ ID NO: 1392314 - RNA, 19 nt, Artificial Sequence
  Description of Artificial Sequence: Synthetic oligonucleotide
  Sense strand starting at position 3427 of SEQ ID NO: 1243063
ggucacucucuggguuaau

SEQ ID NO: 1392315 - RNA, 19 nt, Artificial Sequence
  Description of Artificial Sequence: Synthetic oligonucleotide
  Antisense strand to SEQ ID NO: 1392314
auuaacccagagagugacc

SEQ ID NO: 1392316 - RNA, 19 nt, Artificial Sequence
  Description of Artificial Sequence: Synthetic oligonucleotide
  Sense strand starting at position 3428 of SEQ ID NO: 1243063
gucacucucuggguuaauu

SEQ ID NO: 1392317 - RNA, 19 nt, Artificial Sequence
  Description of Artificial Sequence: Synthetic oligonucleotide
  Antisense strand to SEQ ID NO: 1392316
aauuaacccagagagugac

SEQ ID NO: 1392318 - RNA, 19 nt, Artificial Sequence
  Description of Artificial Sequence: Synthetic oligonucleotide
  Sense strand starting at position 3436 of SEQ ID NO: 1243063
cuggguuaauucuuauuau

SEQ ID NO: 1392319 - RNA, 19 nt, Artificial Sequence
  Description of Artificial Sequence: Synthetic oligonucleotide
  Antisense strand to SEQ ID NO: 1392318
auaauaagaauuaacccag

SEQ ID NO: 1392320 - RNA, 19 nt, Artificial Sequence
  Description of Artificial Sequence: Synthetic oligonucleotide
  Sense strand starting at position 3437 of SEQ ID NO: 1243063
uggguuaauucuuauuaug

SEQ ID NO: 1392321 - RNA, 19 nt, Artificial Sequence
  Description of Artificial Sequence: Synthetic oligonucleotide
  Antisense strand to SEQ ID NO: 1392320
cauaauaagaauuaaccca

SEQ ID NO: 1392322 - RNA, 19 nt, Artificial Sequence
  Description of Artificial Sequence: Synthetic oligonucleotide
  Sense strand starting at position 3439 of SEQ ID NO: 1243063
gguuaauucuuauuaugca

SEQ ID NO: 1392323 - RNA, 19 nt, Artificial Sequence
  Description of Artificial Sequence: Synthetic oligonucleotide
  Antisense strand to SEQ ID NO: 1392322
ugcauaauaagaauuaacc

SEQ ID NO: 1392324 - RNA, 19 nt, Artificial Sequence
  Description of Artificial Sequence: Synthetic oligonucleotide
  Sense strand starting at position 3451 of SEQ ID NO: 1243063
uuaugcaacuagugaaaga

SEQ ID NO: 1392325 - RNA, 19 nt, Artificial Sequence
  Description of Artificial Sequence: Synthetic oligonucleotide
  Antisense strand to SEQ ID NO: 1392324
ucuuucacuaguugcauaa

SEQ ID NO: 1392326 - RNA, 19 nt, Artificial Sequence
  Description of Artificial Sequence: Synthetic oligonucleotide
  Sense strand starting at position 3479 of SEQ ID NO: 1243063
cucaguacccagugguaau

SEQ ID NO: 1392327 - RNA, 19 nt, Artificial Sequence
  Description of Artificial Sequence: Synthetic oligonucleotide
  Antisense strand to SEQ ID NO: 1392326
auuaccacuggguacugag

SEQ ID NO: 1392328 - RNA, 19 nt, Artificial Sequence
  Description of Artificial Sequence: Synthetic oligonucleotide
  Sense strand starting at position 3480 of SEQ ID NO: 1243063
ucaguacccagugguaaua

SEQ ID NO: 1392329 - RNA, 19 nt, Artificial Sequence
  Description of Artificial Sequence: Synthetic oligonucleotide
  Antisense strand to SEQ ID NO: 1392328
uauuaccacuggguacuga

SEQ ID NO: 1392330 - RNA, 19 nt, Artificial Sequence
  Description of Artificial Sequence: Synthetic oligonucleotide
  Sense strand starting at position 3482 of SEQ ID NO: 1243063
aguacccagugguaauauu

SEQ ID NO: 1392331 - RNA, 19 nt, Artificial Sequence
  Description of Artificial Sequence: Synthetic oligonucleotide
  Antisense strand to SEQ ID NO: 1392330
aauauuaccacuggguacu

SEQ ID NO: 1392332 - RNA, 19 nt, Artificial Sequence
  Description of Artificial Sequence: Synthetic oligonucleotide
  Sense strand starting at position 3502 of SEQ ID NO: 1243063
gcacccuucucauggaguu

SEQ ID NO: 1392333 - RNA, 19 nt, Artificial Sequence
  Description of Artificial Sequence: Synthetic oligonucleotide
  Antisense strand to SEQ ID NO: 1392332
aacuccaugagaagggugc

SEQ ID NO: 1392334 - RNA, 19 nt, Artificial Sequence
  Description of Artificial Sequence: Synthetic oligonucleotide
  Sense strand starting at position 3515 of SEQ ID NO: 1243063
ggaguugcuguggagauca

SEQ ID NO: 1392335 - RNA, 19 nt, Artificial Sequence
  Description of Artificial Sequence: Synthetic oligonucleotide
  Antisense strand to SEQ ID NO: 1392334
ugaucuccacagcaacucc

SEQ ID NO: 1392336 - RNA, 19 nt, Artificial Sequence
  Description of Artificial Sequence: Synthetic oligonucleotide
  Sense strand starting at position 3527 of SEQ ID NO: 1243063
gagaucaagugaguuaaug

SEQ ID NO: 1392337 - RNA, 19 nt, Artificial Sequence
  Description of Artificial Sequence: Synthetic oligonucleotide
  Antisense strand to SEQ ID NO: 1392336
cauuaacucacuugaucuc

SEQ ID NO: 1392338 - RNA, 19 nt, Artificial Sequence
  Description of Artificial Sequence: Synthetic oligonucleotide
  Sense strand starting at position 3628 of SEQ ID NO: 1243063
gggagaaaguaauaugaau

SEQ ID NO: 1392339 - RNA, 19 nt, Artificial Sequence
  Description of Artificial Sequence: Synthetic oligonucleotide
  Antisense strand to SEQ ID NO: 1392338
auucauauuacuuucuccc

SEQ ID NO: 1392340 - RNA, 19 nt, Artificial Sequence
  Description of Artificial Sequence: Synthetic oligonucleotide
  Sense strand starting at position 3679 of SEQ ID NO: 1243063
ggguaguucuagugguguu

SEQ ID NO: 1392341 - RNA, 19 nt, Artificial Sequence
  Description of Artificial Sequence: Synthetic oligonucleotide
  Antisense strand to SEQ ID NO: 1392340
aacaccacuagaacuaccc

SEQ ID NO: 1392342 - RNA, 19 nt, Artificial Sequence
  Description of Artificial Sequence: Synthetic oligonucleotide
  Sense strand starting at position 3682 of SEQ ID NO: 1243063
uaguucuagugguguucga

SEQ ID NO: 1392343 - RNA, 19 nt, Artificial Sequence
  Description of Artificial Sequence: Synthetic oligonucleotide
  Antisense strand to SEQ ID NO: 1392342
ucgaacaccacuagaacua

SEQ ID NO: 1392344 - RNA, 19 nt, Artificial Sequence
  Description of Artificial Sequence: Synthetic oligonucleotide
  Sense strand starting at position 3684 of SEQ ID NO: 1243063
guucuagugguguucgauu

SEQ ID NO: 1392345 - RNA, 19 nt, Artificial Sequence
  Description of Artificial Sequence: Synthetic oligonucleotide
  Antisense strand to SEQ ID NO: 1392344
aaucgaacaccacuagaac

SEQ ID NO: 1392346 - RNA, 19 nt, Artificial Sequence
  Description of Artificial Sequence: Synthetic oligonucleotide
  Sense strand starting at position 3692 of SEQ ID NO: 1243063
gguguucgauucuggguau

SEQ ID NO: 1392347 - RNA, 19 nt, Artificial Sequence
  Description of Artificial Sequence: Synthetic oligonucleotide
  Antisense strand to SEQ ID NO: 1392346
auacccagaaucgaacacc

SEQ ID NO: 1392348 - RNA, 19 nt, Artificial Sequence
  Description of Artificial Sequence: Synthetic oligonucleotide
  Sense strand starting at position 3695 of SEQ ID NO: 1243063
guucgauucuggguaugug

SEQ ID NO: 1392349 - RNA, 19 nt, Artificial Sequence
  Description of Artificial Sequence: Synthetic oligonucleotide
  Antisense strand to SEQ ID NO: 1392348
cacauacccagaaucgaac

SEQ ID NO: 1392350 - RNA, 19 nt, Artificial Sequence
  Description of Artificial Sequence: Synthetic oligonucleotide
  Sense strand starting at position 3713 of SEQ ID NO: 1243063
gcauaugugugguuucuug

SEQ ID NO: 1392351 - RNA, 19 nt, Artificial Sequence
  Description of Artificial Sequence: Synthetic oligonucleotide
  Antisense strand to SEQ ID NO: 1392350
caagaaaccacacauaugc

SEQ ID NO: 1392352 - RNA, 19 nt, Artificial Sequence
  Description of Artificial Sequence: Synthetic oligonucleotide
  Sense strand starting at position 3720 of SEQ ID NO: 1243063
ugugguuucuugcuugacu

SEQ ID NO: 1392353 - RNA, 19 nt, Artificial Sequence
  Description of Artificial Sequence: Synthetic oligonucleotide
  Antisense strand to SEQ ID NO: 1392352
agucaagcaagaaaccaca

SEQ ID NO: 1392354 - RNA, 19 nt, Artificial Sequence
  Description of Artificial Sequence: Synthetic oligonucleotide
  Sense strand starting at position 3732 of SEQ ID NO: 1243063
cuugacugcuuaggucaua

SEQ ID NO: 1392355 - RNA, 19 nt, Artificial Sequence
  Description of Artificial Sequence: Synthetic oligonucleotide
  Antisense strand to SEQ ID NO: 1392354
uaugaccuaagcagucaag

SEQ ID NO: 1392356 - RNA, 19 nt, Artificial Sequence
  Description of Artificial Sequence: Synthetic oligonucleotide
  Sense strand starting at position 3735 of SEQ ID NO: 1243063
gacugcuuaggucauaguu

SEQ ID NO: 1392357 - RNA, 19 nt, Artificial Sequence
  Description of Artificial Sequence: Synthetic oligonucleotide
  Antisense strand to SEQ ID NO: 1392356
aacuaugaccuaagcaguc

SEQ ID NO: 1392358 - RNA, 19 nt, Artificial Sequence
  Description of Artificial Sequence: Synthetic oligonucleotide
  Sense strand starting at position 3743 of SEQ ID NO: 1243063
aggucauaguucccuaagu

SEQ ID NO: 1392359 - RNA, 19 nt, Artificial Sequence
  Description of Artificial Sequence: Synthetic oligonucleotide
  Antisense strand to SEQ ID NO: 1392358
acuuagggaacuaugaccu

SEQ ID NO: 1392360 - RNA, 19 nt, Artificial Sequence
  Description of Artificial Sequence: Synthetic oligonucleotide
  Sense strand starting at position 3744 of SEQ ID NO: 1243063
ggucauaguucccuaaguu

SEQ ID NO: 1392361 - RNA, 19 nt, Artificial Sequence
  Description of Artificial Sequence: Synthetic oligonucleotide
  Antisense strand to SEQ ID NO: 1392360
aacuuagggaacuaugacc

SEQ ID NO: 1392362 - RNA, 19 nt, Artificial Sequence
  Description of Artificial Sequence: Synthetic oligonucleotide
  Sense strand starting at position 3745 of SEQ ID NO: 1243063
gucauaguucccuaaguuu

SEQ ID NO: 1392363 - RNA, 19 nt, Artificial Sequence
  Description of Artificial Sequence: Synthetic oligonucleotide
  Antisense strand to SEQ ID NO: 1392362
aaacuuagggaacuaugac

SEQ ID NO: 1392364 - RNA, 19 nt, Artificial Sequence
  Description of Artificial Sequence: Synthetic oligonucleotide
  Sense strand starting at position 3898 of SEQ ID NO: 1243063
caaguugaggucuguuagu

SEQ ID NO: 1392365 - RNA, 19 nt, Artificial Sequence
  Description of Artificial Sequence: Synthetic oligonucleotide
  Antisense strand to SEQ ID NO: 1392364
acuaacagaccucaacuug

SEQ ID NO: 1392366 - RNA, 19 nt, Artificial Sequence
  Description of Artificial Sequence: Synthetic oligonucleotide
  Sense strand starting at position 286 of SEQ ID NO: 1243064
ccuuccuaguucuuguuaa

SEQ ID NO: 1392367 - RNA, 19 nt, Artificial Sequence
  Description of Artificial Sequence: Synthetic oligonucleotide
  Antisense strand to SEQ ID NO: 1392366
uuaacaagaacuaggaagg

SEQ ID NO: 1392368 - RNA, 19 nt, Artificial Sequence
  Description of Artificial Sequence: Synthetic oligonucleotide
  Sense strand starting at position 299 of SEQ ID NO: 1243064
uguuaaccuccugacuaga

SEQ ID NO: 1392369 - RNA, 19 nt, Artificial Sequence
  Description of Artificial Sequence: Synthetic oligonucleotide
  Antisense strand to SEQ ID NO: 1392368
ucuagucaggagguuaaca

SEQ ID NO: 1392370 - RNA, 19 nt, Artificial Sequence
  Description of Artificial Sequence: Synthetic oligonucleotide
  Sense strand starting at position 489 of SEQ ID NO: 1243064
ugcugucauccgcaucaca

SEQ ID NO: 1392371 - RNA, 19 nt, Artificial Sequence
  Description of Artificial Sequence: Synthetic oligonucleotide
  Antisense strand to SEQ ID NO: 1392370
ugugaugcggaugacagca

SEQ ID NO: 1392372 - RNA, 19 nt, Artificial Sequence
  Description of Artificial Sequence: Synthetic oligonucleotide
  Sense strand starting at position 541 of SEQ ID NO: 1243064
aaguguucugcauaaaugc

SEQ ID NO: 1392373 - RNA, 19 nt, Artificial Sequence
  Description of Artificial Sequence: Synthetic oligonucleotide
  Antisense strand to SEQ ID NO: 1392372
gcauuuaugcagaacacuu

SEQ ID NO: 1392374 - RNA, 19 nt, Artificial Sequence
  Description of Artificial Sequence: Synthetic oligonucleotide
  Sense strand starting at position 825 of SEQ ID NO: 1243064
ggguaacggaaauguucua

SEQ ID NO: 1392375 - RNA, 19 nt, Artificial Sequence
  Description of Artificial Sequence: Synthetic oligonucleotide
  Antisense strand to SEQ ID NO: 1392374
uagaacauuuccguuaccc

SEQ ID NO: 1392376 - RNA, 19 nt, Artificial Sequence
  Description of Artificial Sequence: Synthetic oligonucleotide
  Sense strand starting at position 859 of SEQ ID NO: 1243064
guggcugugcugcuguaaa

SEQ ID NO: 1392377 - RNA, 19 nt, Artificial Sequence
  Description of Artificial Sequence: Synthetic oligonucleotide
  Antisense strand to SEQ ID NO: 1392376
uuuacagcagcacagccac

SEQ ID NO: 1392378 - RNA, 19 nt, Artificial Sequence
  Description of Artificial Sequence: Synthetic oligonucleotide
  Sense strand starting at position 861 of SEQ ID NO: 1243064
ggcugugcugcuguaaauu

SEQ ID NO: 1392379 - RNA, 19 nt, Artificial Sequence
  Description of Artificial Sequence: Synthetic oligonucleotide
  Antisense strand to SEQ ID NO: 1392378
aauuuacagcagcacagcc

SEQ ID NO: 1392380 - RNA, 19 nt, Artificial Sequence
  Description of Artificial Sequence: Synthetic oligonucleotide
  Sense strand starting at position 985 of SEQ ID NO: 1243064
gcggauucuccagauugaa

SEQ ID NO: 1392381 - RNA, 19 nt, Artificial Sequence
  Description of Artificial Sequence: Synthetic oligonucleotide
  Antisense strand to SEQ ID NO: 1392380
uucaaucuggagaauccgc

SEQ ID NO: 1392382 - RNA, 19 nt, Artificial Sequence
  Description of Artificial Sequence: Synthetic oligonucleotide
  Sense strand starting at position 1064 of SEQ ID NO: 1243064
auuggagaccuugacguua

SEQ ID NO: 1392383 - RNA, 19 nt, Artificial Sequence
  Description of Artificial Sequence: Synthetic oligonucleotide
  Antisense strand to SEQ ID NO: 1392382
uaacgucaaggucuccaau

SEQ ID NO: 1392384 - RNA, 19 nt, Artificial Sequence
  Description of Artificial Sequence: Synthetic oligonucleotide
  Sense strand starting at position 1156 of SEQ ID NO: 1243064
guaauuucgaagugucaau

SEQ ID NO: 1392385 - RNA, 19 nt, Artificial Sequence
  Description of Artificial Sequence: Synthetic oligonucleotide
  Antisense strand to SEQ ID NO: 1392384
auugacacuucgaaauuac

SEQ ID NO: 1392386 - RNA, 19 nt, Artificial Sequence
  Description of Artificial Sequence: Synthetic oligonucleotide
  Sense strand starting at position 1163 of SEQ ID NO: 1243064
cgaagugucaaucagaauc

SEQ ID NO: 1392387 - RNA, 19 nt, Artificial Sequence
  Description of Artificial Sequence: Synthetic oligonucleotide
  Antisense strand to SEQ ID NO: 1392386
gauucugauugacacuucg

SEQ ID NO: 1392388 - RNA, 19 nt, Artificial Sequence
  Description of Artificial Sequence: Synthetic oligonucleotide
  Sense strand starting at position 1356 of SEQ ID NO: 1243064
cugagaguucgccgaacag

SEQ ID NO: 1392389 - RNA, 19 nt, Artificial Sequence
  Description of Artificial Sequence: Synthetic oligonucleotide
  Antisense strand to SEQ ID NO: 1392388
cuguucggcgaacucucag

SEQ ID NO: 1392390 - RNA, 19 nt, Artificial Sequence
  Description of Artificial Sequence: Synthetic oligonucleotide
  Sense strand starting at position 1482 of SEQ ID NO: 1243064
agaauugagucugucugga

SEQ ID NO: 1392391 - RNA, 19 nt, Artificial Sequence
  Description of Artificial Sequence: Synthetic oligonucleotide
  Antisense strand to SEQ ID NO: 1392390
uccagacagacucaauucu

SEQ ID NO: 1392392 - RNA, 19 nt, Artificial Sequence
  Description of Artificial Sequence: Synthetic oligonucleotide
  Sense strand starting at position 1525 of SEQ ID NO: 1243064
uuguuucacucggugaaug

SEQ ID NO: 1392393 - RNA, 19 nt, Artificial Sequence
  Description of Artificial Sequence: Synthetic oligonucleotide
  Antisense strand to SEQ ID NO: 1392392
cauucaccgagugaaacaa

SEQ ID NO: 1392394 - RNA, 19 nt, Artificial Sequence
  Description of Artificial Sequence: Synthetic oligonucleotide
  Sense strand starting at position 1527 of SEQ ID NO: 1243064
guuucacucggugaaugcu

SEQ ID NO: 1392395 - RNA, 19 nt, Artificial Sequence
  Description of Artificial Sequence: Synthetic oligonucleotide
  Antisense strand to SEQ ID NO: 1392394
agcauucaccgagugaaac

SEQ ID NO: 1392396 - RNA, 19 nt, Artificial Sequence
  Description of Artificial Sequence: Synthetic oligonucleotide
  Sense strand starting at position 1536 of SEQ ID NO: 1243064
ggugaaugcucauuucacg

SEQ ID NO: 1392397 - RNA, 19 nt, Artificial Sequence
  Description of Artificial Sequence: Synthetic oligonucleotide
  Antisense strand to SEQ ID NO: 1392396
cgugaaaugagcauucacc

SEQ ID NO: 1392398 - RNA, 19 nt, Artificial Sequence
  Description of Artificial Sequence: Synthetic oligonucleotide
  Sense strand starting at position 1620 of SEQ ID NO: 1243064
gcacgcuguguccaaacaa

SEQ ID NO: 1392399 - RNA, 19 nt, Artificial Sequence
  Description of Artificial Sequence: Synthetic oligonucleotide
  Antisense strand to SEQ ID NO: 1392398
uuguuuggacacagcgugc

SEQ ID NO: 1392400 - RNA, 19 nt, Artificial Sequence
  Description of Artificial Sequence: Synthetic oligonucleotide
  Sense strand starting at position 2387 of SEQ ID NO: 1243064
gggcgguagcucguuaaga

SEQ ID NO: 1392401 - RNA, 19 nt, Artificial Sequence
  Description of Artificial Sequence: Synthetic oligonucleotide
  Antisense strand to SEQ ID NO: 1392400
ucuuaacgagcuaccgccc

SEQ ID NO: 1392402 - RNA, 19 nt, Artificial Sequence
  Description of Artificial Sequence: Synthetic oligonucleotide
  Sense strand starting at position 2389 of SEQ ID NO: 1243064
gcgguagcucguuaagaug

SEQ ID NO: 1392403 - RNA, 19 nt, Artificial Sequence
  Description of Artificial Sequence: Synthetic oligonucleotide
  Antisense strand to SEQ ID NO: 1392402
caucuuaacgagcuaccgc

SEQ ID NO: 1392404 - RNA, 19 nt, Artificial Sequence
  Description of Artificial Sequence: Synthetic oligonucleotide
  Sense strand starting at position 2587 of SEQ ID NO: 1243064
gaauaaauguguuaaacug

SEQ ID NO: 1392405 - RNA, 19 nt, Artificial Sequence
  Description of Artificial Sequence: Synthetic oligonucleotide
  Antisense strand to SEQ ID NO: 1392404
caguuuaacacauuuauuc

SEQ ID NO: 1392406 - RNA, 19 nt, Artificial Sequence
  Description of Artificial Sequence: Synthetic oligonucleotide
  Sense strand starting at position 2630 of SEQ ID NO: 1243064
augucugggugacuuagau

SEQ ID NO: 1392407 - RNA, 19 nt, Artificial Sequence
  Description of Artificial Sequence: Synthetic oligonucleotide
  Antisense strand to SEQ ID NO: 1392406
aucuaagucacccagacau

SEQ ID NO: 1392408 - RNA, 19 nt, Artificial Sequence
  Description of Artificial Sequence: Synthetic oligonucleotide
  Sense strand starting at position 2714 of SEQ ID NO: 1243064
cugaaagcgucuucaggua

SEQ ID NO: 1392409 - RNA, 19 nt, Artificial Sequence
  Description of Artificial Sequence: Synthetic oligonucleotide
  Antisense strand to SEQ ID NO: 1392408
uaccugaagacgcuuucag

SEQ ID NO: 1392410 - RNA, 19 nt, Artificial Sequence
  Description of Artificial Sequence: Synthetic oligonucleotide
  Sense strand starting at position 2812 of SEQ ID NO: 1243064
gcugaacugcaccaauauu

SEQ ID NO: 1392411 - RNA, 19 nt, Artificial Sequence
  Description of Artificial Sequence: Synthetic oligonucleotide
  Antisense strand to SEQ ID NO: 1392410
aauauuggugcaguucagc

SEQ ID NO: 1392412 - RNA, 19 nt, Artificial Sequence
  Description of Artificial Sequence: Synthetic oligonucleotide
  Sense strand starting at position 2926 of SEQ ID NO: 1243064
ucaggcuucuacuucguaa

SEQ ID NO: 1392413 - RNA, 19 nt, Artificial Sequence
  Description of Artificial Sequence: Synthetic oligonucleotide
  Antisense strand to SEQ ID NO: 1392412
uuacgaaguagaagccuga

SEQ ID NO: 1392414 - RNA, 19 nt, Artificial Sequence
  Description of Artificial Sequence: Synthetic oligonucleotide
  Sense strand starting at position 2928 of SEQ ID NO: 1243064
aggcuucuacuucguaauu

SEQ ID NO: 1392415 - RNA, 19 nt, Artificial Sequence
  Description of Artificial Sequence: Synthetic oligonucleotide
  Antisense strand to SEQ ID NO: 1392414
aauuacgaaguagaagccu

SEQ ID NO: 1392416 - RNA, 19 nt, Artificial Sequence
  Description of Artificial Sequence: Synthetic oligonucleotide
  Sense strand starting at position 2929 of SEQ ID NO: 1243064
ggcuucuacuucguaauuu

SEQ ID NO: 1392417 - RNA, 19 nt, Artificial Sequence
  Description of Artificial Sequence: Synthetic oligonucleotide
  Antisense strand to SEQ ID NO: 1392416
aaauuacgaaguagaagcc

SEQ ID NO: 1392418 - RNA, 19 nt, Artificial Sequence
  Description of Artificial Sequence: Synthetic oligonucleotide
  Sense strand starting at position 3350 of SEQ ID NO: 1243064
ggguuaaauuaaguacaca

SEQ ID NO: 1392419 - RNA, 19 nt, Artificial Sequence
  Description of Artificial Sequence: Synthetic oligonucleotide
  Antisense strand to SEQ ID NO: 1392418
uguguacuuaauuuaaccc

SEQ ID NO: 1392420 - RNA, 19 nt, Artificial Sequence
  Description of Artificial Sequence: Synthetic oligonucleotide
  Sense strand starting at position 3472 of SEQ ID NO: 1243064
agagacaugucucuauagu

SEQ ID NO: 1392421 - RNA, 19 nt, Artificial Sequence
  Description of Artificial Sequence: Synthetic oligonucleotide
  Antisense strand to SEQ ID NO: 1392420
acuauagagacaugucucu

SEQ ID NO: 1392422 - RNA, 19 nt, Artificial Sequence
  Description of Artificial Sequence: Synthetic oligonucleotide
  Sense strand starting at position 3473 of SEQ ID NO: 1243064
gagacaugucucuauaguu

SEQ ID NO: 1392423 - RNA, 19 nt, Artificial Sequence
  Description of Artificial Sequence: Synthetic oligonucleotide
  Antisense strand to SEQ ID NO: 1392422
aacuauagagacaugucuc

SEQ ID NO: 1392424 - RNA, 19 nt, Artificial Sequence
  Description of Artificial Sequence: Synthetic oligonucleotide
  Sense strand starting at position 3704 of SEQ ID NO: 1243064
ucaauauguggugguggau

SEQ ID NO: 1392425 - RNA, 19 nt, Artificial Sequence
  Description of Artificial Sequence: Synthetic oligonucleotide
  Antisense strand to SEQ ID NO: 1392424
auccaccaccacauauuga

SEQ ID NO: 1392426 - RNA, 19 nt, Artificial Sequence
  Description of Artificial Sequence: Synthetic oligonucleotide
  Sense strand starting at position 3713 of SEQ ID NO: 1243064
ggugguggauucuugaauc

SEQ ID NO: 1392427 - RNA, 19 nt, Artificial Sequence
  Description of Artificial Sequence: Synthetic oligonucleotide
  Antisense strand to SEQ ID NO: 1392426
gauucaagaauccaccacc

SEQ ID NO: 1392428 - RNA, 19 nt, Artificial Sequence
  Description of Artificial Sequence: Synthetic oligonucleotide
  Sense strand starting at position 3738 of SEQ ID NO: 1243064
ugacucagaucucauacga

SEQ ID NO: 1392429 - RNA, 19 nt, Artificial Sequence
  Description of Artificial Sequence: Synthetic oligonucleotide
  Antisense strand to SEQ ID NO: 1392428
ucguaugagaucugaguca

SEQ ID NO: 1392430 - RNA, 19 nt, Artificial Sequence
  Description of Artificial Sequence: Synthetic oligonucleotide
  Sense strand starting at position 3771 of SEQ ID NO: 1243064
ggagaauccuugccucucu

SEQ ID NO: 1392431 - RNA, 19 nt, Artificial Sequence
  Description of Artificial Sequence: Synthetic oligonucleotide
  Antisense strand to SEQ ID NO: 1392430
agagaggcaaggauucucc

SEQ ID NO: 1392432 - RNA, 19 nt, Artificial Sequence
  Description of Artificial Sequence: Synthetic oligonucleotide
  Sense strand starting at position 3851 of SEQ ID NO: 1243064
uugacuauguccuucuguu

SEQ ID NO: 1392433 - RNA, 19 nt, Artificial Sequence
  Description of Artificial Sequence: Synthetic oligonucleotide
  Antisense strand to SEQ ID NO: 1392432
aacagaaggacauagucaa

SEQ ID NO: 1392434 - RNA, 19 nt, Artificial Sequence
  Description of Artificial Sequence: Synthetic oligonucleotide
  Sense strand starting at position 3855 of SEQ ID NO: 1243064
cuauguccuucuguuccaa

SEQ ID NO: 1392435 - RNA, 19 nt, Artificial Sequence
  Description of Artificial Sequence: Synthetic oligonucleotide
  Antisense strand to SEQ ID NO: 1392434
uuggaacagaaggacauag

SEQ ID NO: 1392436 - RNA, 19 nt, Artificial Sequence
  Description of Artificial Sequence: Synthetic oligonucleotide
  Sense strand starting at position 3877 of SEQ ID NO: 1243064
uagguaaauuaaucuuggu

SEQ ID NO: 1392437 - RNA, 19 nt, Artificial Sequence
  Description of Artificial Sequence: Synthetic oligonucleotide
  Antisense strand to SEQ ID NO: 1392436
accaagauuaauuuaccua

SEQ ID NO: 1392438 - RNA, 19 nt, Artificial Sequence
  Description of Artificial Sequence: Synthetic oligonucleotide
  Sense strand starting at position 3883 of SEQ ID NO: 1243064
aauuaaucuuggucagggu

SEQ ID NO: 1392439 - RNA, 19 nt, Artificial Sequence
  Description of Artificial Sequence: Synthetic oligonucleotide
  Antisense strand to SEQ ID NO: 1392438
acccugaccaagauuaauu

SEQ ID NO: 1392440 - RNA, 19 nt, Artificial Sequence
  Description of Artificial Sequence: Synthetic oligonucleotide
  Sense strand starting at position 3913 of SEQ ID NO: 1243064
cccuuuagucacuaugcca

SEQ ID NO: 1392441 - RNA, 19 nt, Artificial Sequence
  Description of Artificial Sequence: Synthetic oligonucleotide
  Antisense strand to SEQ ID NO: 1392440
uggcauagugacuaaaggg

SEQ ID NO: 1392442 - RNA, 19 nt, Artificial Sequence
  Description of Artificial Sequence: Synthetic oligonucleotide
  Sense strand starting at position 3971 of SEQ ID NO: 1243064
agugauugcaggcauccau

SEQ ID NO: 1392443 - RNA, 19 nt, Artificial Sequence
  Description of Artificial Sequence: Synthetic oligonucleotide
  Antisense strand to SEQ ID NO: 1392442
auggaugccugcaaucacu

SEQ ID NO: 1392444 - RNA, 19 nt, Artificial Sequence
  Description of Artificial Sequence: Synthetic oligonucleotide
  Sense strand starting at position 3978 of SEQ ID NO: 1243064
gcaggcauccaucauguga

SEQ ID NO: 1392445 - RNA, 19 nt, Artificial Sequence
  Description of Artificial Sequence: Synthetic oligonucleotide
  Antisense strand to SEQ ID NO: 1392444
ucacaugauggaugccugc

SEQ ID NO: 1392446 - RNA, 19 nt, Artificial Sequence
  Description of Artificial Sequence: Synthetic oligonucleotide
  Sense strand starting at position 2030 of SEQ ID NO: 1243065
uggaauuacucgucccauu

SEQ ID NO: 1392447 - RNA, 19 nt, Artificial Sequence
  Description of Artificial Sequence: Synthetic oligonucleotide
  Antisense strand to SEQ ID NO: 1392446
aaugggacgaguaauucca

SEQ ID NO: 1392448 - RNA, 19 nt, Artificial Sequence
  Description of Artificial Sequence: Synthetic oligonucleotide
  Sense strand starting at position 2103 of SEQ ID NO: 1243065
uugugucugcgauguucga

SEQ ID NO: 1392449 - RNA, 19 nt, Artificial Sequence
  Description of Artificial Sequence: Synthetic oligonucleotide
  Antisense strand to SEQ ID NO: 1392448
ucgaacaucgcagacacaa

SEQ ID NO: 1392450 - RNA, 19 nt, Artificial Sequence
  Description of Artificial Sequence: Synthetic oligonucleotide
  Sense strand starting at position 2107 of SEQ ID NO: 1243065
gucugcgauguucgaguua

SEQ ID NO: 1392451 - RNA, 19 nt, Artificial Sequence
  Description of Artificial Sequence: Synthetic oligonucleotide
  Antisense strand to SEQ ID NO: 1392450
uaacucgaacaucgcagac

SEQ ID NO: 1392452 - RNA, 19 nt, Artificial Sequence
  Description of Artificial Sequence: Synthetic oligonucleotide
  Sense strand starting at position 2152 of SEQ ID NO: 1243065
gccaaacucugaccaugaa

SEQ ID NO: 1392453 - RNA, 19 nt, Artificial Sequence
  Description of Artificial Sequence: Synthetic oligonucleotide
  Antisense strand to SEQ ID NO: 1392452
uucauggucagaguuuggc

SEQ ID NO: 1392454 - RNA, 19 nt, Artificial Sequence
  Description of Artificial Sequence: Synthetic oligonucleotide
  Sense strand starting at position 2240 of SEQ ID NO: 1243065
aguaaauacuuguuacaac

SEQ ID NO: 1392455 - RNA, 19 nt, Artificial Sequence
  Description of Artificial Sequence: Synthetic oligonucleotide
  Antisense strand to SEQ ID NO: 1392454
guuguaacaaguauuuacu

SEQ ID NO: 1392456 - RNA, 19 nt, Artificial Sequence
  Description of Artificial Sequence: Synthetic oligonucleotide
  Sense strand starting at position 2475 of SEQ ID NO: 1243065
ccagcugagucaggauaau

SEQ ID NO: 1392457 - RNA, 19 nt, Artificial Sequence
  Description of Artificial Sequence: Synthetic oligonucleotide
  Antisense strand to SEQ ID NO: 1392456
auuauccugacucagcugg

SEQ ID NO: 1392458 - RNA, 19 nt, Artificial Sequence
  Description of Artificial Sequence: Synthetic oligonucleotide
  Sense strand starting at position 2594 of SEQ ID NO: 1243065
auuauuauugccgggcaca

SEQ ID NO: 1392459 - RNA, 19 nt, Artificial Sequence
  Description of Artificial Sequence: Synthetic oligonucleotide
  Antisense strand to SEQ ID NO: 1392458
ugugcccggcaauaauaau

SEQ ID NO: 1392460 - RNA, 19 nt, Artificial Sequence
  Description of Artificial Sequence: Synthetic oligonucleotide
  Sense strand starting at position 3560 of SEQ ID NO: 1243065
augcaccagugauaaauau

SEQ ID NO: 1392461 - RNA, 19 nt, Artificial Sequence
  Description of Artificial Sequence: Synthetic oligonucleotide
  Antisense strand to SEQ ID NO: 1392460
auauuuaucacuggugcau

SEQ ID NO: 1392462 - RNA, 19 nt, Artificial Sequence
  Description of Artificial Sequence: Synthetic oligonucleotide
  Sense strand starting at position 3580 of SEQ ID NO: 1243065
cagguugacggaugacaga

SEQ ID NO: 1392463 - RNA, 19 nt, Artificial Sequence
  Description of Artificial Sequence: Synthetic oligonucleotide
  Antisense strand to SEQ ID NO: 1392462
ucugucauccgucaaccug

SEQ ID NO: 1392464 - RNA, 19 nt, Artificial Sequence
  Description of Artificial Sequence: Synthetic oligonucleotide
  Sense strand starting at position 3694 of SEQ ID NO: 1243065
cgugaauggugucccaguu

SEQ ID NO: 1392465 - RNA, 19 nt, Artificial Sequence
  Description of Artificial Sequence: Synthetic oligonucleotide
  Antisense strand to SEQ ID NO: 1392464
aacugggacaccauucacg

SEQ ID NO: 1392466 - RNA, 19 nt, Artificial Sequence
  Description of Artificial Sequence: Synthetic oligonucleotide
  Sense strand starting at position 3823 of SEQ ID NO: 1243065
aacgauaccgucugaugga

SEQ ID NO: 1392467 - RNA, 19 nt, Artificial Sequence
  Description of Artificial Sequence: Synthetic oligonucleotide
  Antisense strand to SEQ ID NO: 1392466
uccaucagacgguaucguu

SEQ ID NO: 1392468 - RNA, 19 nt, Artificial Sequence
  Description of Artificial Sequence: Synthetic oligonucleotide
  Sense strand starting at position 3900 of SEQ ID NO: 1243065
uugggagacuuggucaaac

SEQ ID NO: 1392469 - RNA, 19 nt, Artificial Sequence
  Description of Artificial Sequence: Synthetic oligonucleotide
  Antisense strand to SEQ ID NO: 1392468
guuugaccaagucucccaa

SEQ ID NO: 1392470 - RNA, 19 nt, Artificial Sequence
  Description of Artificial Sequence: Synthetic oligonucleotide
  Sense strand starting at position 154 of SEQ ID NO: 1243066
guggaauauucuggaagga

SEQ ID NO: 1392471 - RNA, 19 nt, Artificial Sequence
  Description of Artificial Sequence: Synthetic oligonucleotide
  Antisense strand to SEQ ID NO: 1392470
uccuuccagaauauuccac

SEQ ID NO: 1392472 - RNA, 19 nt, Artificial Sequence
  Description of Artificial Sequence: Synthetic oligonucleotide
  Sense strand starting at position 203 of SEQ ID NO: 1243066
acguuuagggcccaagauu

SEQ ID NO: 1392473 - RNA, 19 nt, Artificial Sequence
  Description of Artificial Sequence: Synthetic oligonucleotide
  Antisense strand to SEQ ID NO: 1392472
aaucuugggcccuaaacgu

SEQ ID NO: 1392474 - RNA, 19 nt, Artificial Sequence
  Description of Artificial Sequence: Synthetic oligonucleotide
  Sense strand starting at position 745 of SEQ ID NO: 1243066
guaagaacaugcuugaugu

SEQ ID NO: 1392475 - RNA, 19 nt, Artificial Sequence
  Description of Artificial Sequence: Synthetic oligonucleotide
  Antisense strand to SEQ ID NO: 1392474
acaucaagcauguucuuac

SEQ ID NO: 1392476 - RNA, 19 nt, Artificial Sequence
  Description of Artificial Sequence: Synthetic oligonucleotide
  Sense strand starting at position 746 of SEQ ID NO: 1243066
uaagaacaugcuugauguu

SEQ ID NO: 1392477 - RNA, 19 nt, Artificial Sequence
  Description of Artificial Sequence: Synthetic oligonucleotide
  Antisense strand to SEQ ID NO: 1392476
aacaucaagcauguucuua

SEQ ID NO: 1392478 - RNA, 19 nt, Artificial Sequence
  Description of Artificial Sequence: Synthetic oligonucleotide
  Sense strand starting at position 813 of SEQ ID NO: 1243066
cucuguugcccugauguga

SEQ ID NO: 1392479 - RNA, 19 nt, Artificial Sequence
  Description of Artificial Sequence: Synthetic oligonucleotide
  Antisense strand to SEQ ID NO: 1392478
ucacaucagggcaacagag

SEQ ID NO: 1392480 - RNA, 19 nt, Artificial Sequence
  Description of Artificial Sequence: Synthetic oligonucleotide
  Sense strand starting at position 1163 of SEQ ID NO: 1243066
cccagauuauacgcuuuaa

SEQ ID NO: 1392481 - RNA, 19 nt, Artificial Sequence
  Description of Artificial Sequence: Synthetic oligonucleotide
  Antisense strand to SEQ ID NO: 1392480
uuaaagcguauaaucuggg

SEQ ID NO: 1392482 - RNA, 19 nt, Artificial Sequence
  Description of Artificial Sequence: Synthetic oligonucleotide
  Sense strand starting at position 1203 of SEQ ID NO: 1243066
gguggccuaugucugaaau

SEQ ID NO: 1392483 - RNA, 19 nt, Artificial Sequence
  Description of Artificial Sequence: Synthetic oligonucleotide
  Antisense strand to SEQ ID NO: 1392482
auuucagacauaggccacc

SEQ ID NO: 1392484 - RNA, 19 nt, Artificial Sequence
  Description of Artificial Sequence: Synthetic oligonucleotide
  Sense strand starting at position 1204 of SEQ ID NO: 1243066
guggccuaugucugaaauc

SEQ ID NO: 1392485 - RNA, 19 nt, Artificial Sequence
  Description of Artificial Sequence: Synthetic oligonucleotide
  Antisense strand to SEQ ID NO: 1392484
gauuucagacauaggccac

SEQ ID NO: 1392486 - RNA, 19 nt, Artificial Sequence
  Description of Artificial Sequence: Synthetic oligonucleotide
  Sense strand starting at position 1304 of SEQ ID NO: 1243066
cugagaagauucuauacca

SEQ ID NO: 1392487 - RNA, 19 nt, Artificial Sequence
  Description of Artificial Sequence: Synthetic oligonucleotide
  Antisense strand to SEQ ID NO: 1392486
ugguauagaaucuucucag

SEQ ID NO: 1392488 - RNA, 19 nt, Artificial Sequence
  Description of Artificial Sequence: Synthetic oligonucleotide
  Sense strand starting at position 1355 of SEQ ID NO: 1243066
uuugcuaaccuagagaugu

SEQ ID NO: 1392489 - RNA, 19 nt, Artificial Sequence
  Description of Artificial Sequence: Synthetic oligonucleotide
  Antisense strand to SEQ ID NO: 1392488
acaucucuagguuagcaaa

SEQ ID NO: 1392490 - RNA, 19 nt, Artificial Sequence
  Description of Artificial Sequence: Synthetic oligonucleotide
  Sense strand starting at position 1363 of SEQ ID NO: 1243066
ccuagagauguuugucuga

SEQ ID NO: 1392491 - RNA, 19 nt, Artificial Sequence
  Description of Artificial Sequence: Synthetic oligonucleotide
  Antisense strand to SEQ ID NO: 1392490
ucagacaaacaucucuagg

SEQ ID NO: 1392492 - RNA, 19 nt, Artificial Sequence
  Description of Artificial Sequence: Synthetic oligonucleotide
  Sense strand starting at position 1365 of SEQ ID NO: 1243066
uagagauguuugucugaca

SEQ ID NO: 1392493 - RNA, 19 nt, Artificial Sequence
  Description of Artificial Sequence: Synthetic oligonucleotide
  Antisense strand to SEQ ID NO: 1392492
ugucagacaaacaucucua

SEQ ID NO: 1392494 - RNA, 19 nt, Artificial Sequence
  Description of Artificial Sequence: Synthetic oligonucleotide
  Sense strand starting at position 1366 of SEQ ID NO: 1243066
agagauguuugucugacau

SEQ ID NO: 1392495 - RNA, 19 nt, Artificial Sequence
  Description of Artificial Sequence: Synthetic oligonucleotide
  Antisense strand to SEQ ID NO: 1392494
augucagacaaacaucucu

SEQ ID NO: 1392496 - RNA, 19 nt, Artificial Sequence
  Description of Artificial Sequence: Synthetic oligonucleotide
  Sense strand starting at position 1372 of SEQ ID NO: 1243066
guuugucugacaugaguau

SEQ ID NO: 1392497 - RNA, 19 nt, Artificial Sequence
  Description of Artificial Sequence: Synthetic oligonucleotide
  Antisense strand to SEQ ID NO: 1392496
auacucaugucagacaaac

SEQ ID NO: 1392498 - RNA, 19 nt, Artificial Sequence
  Description of Artificial Sequence: Synthetic oligonucleotide
  Sense strand starting at position 1373 of SEQ ID NO: 1243066
uuugucugacaugaguauu

SEQ ID NO: 1392499 - RNA, 19 nt, Artificial Sequence
  Description of Artificial Sequence: Synthetic oligonucleotide
  Antisense strand to SEQ ID NO: 1392498
aauacucaugucagacaaa

SEQ ID NO: 1392500 - RNA, 19 nt, Artificial Sequence
  Description of Artificial Sequence: Synthetic oligonucleotide
  Sense strand starting at position 1376 of SEQ ID NO: 1243066
gucugacaugaguauuaau

SEQ ID NO: 1392501 - RNA, 19 nt, Artificial Sequence
  Description of Artificial Sequence: Synthetic oligonucleotide
  Antisense strand to SEQ ID NO: 1392500
auuaauacucaugucagac

SEQ ID NO: 1392502 - RNA, 19 nt, Artificial Sequence
  Description of Artificial Sequence: Synthetic oligonucleotide
  Sense strand starting at position 1379 of SEQ ID NO: 1243066
ugacaugaguauuaaucau

SEQ ID NO: 1392503 - RNA, 19 nt, Artificial Sequence
  Description of Artificial Sequence: Synthetic oligonucleotide
  Antisense strand to SEQ ID NO: 1392502
augauuaauacucauguca

SEQ ID NO: 1392504 - RNA, 19 nt, Artificial Sequence
  Description of Artificial Sequence: Synthetic oligonucleotide
  Sense strand starting at position 1543 of SEQ ID NO: 1243066
gaacuaaagucaucuggau

SEQ ID NO: 1392505 - RNA, 19 nt, Artificial Sequence
  Description of Artificial Sequence: Synthetic oligonucleotide
  Antisense strand to SEQ ID NO: 1392504
auccagaugacuuuaguuc

SEQ ID NO: 1392506 - RNA, 19 nt, Artificial Sequence
  Description of Artificial Sequence: Synthetic oligonucleotide
  Sense strand starting at position 2020 of SEQ ID NO: 1243066
uguccuuggugagcaagaa

SEQ ID NO: 1392507 - RNA, 19 nt, Artificial Sequence
  Description of Artificial Sequence: Synthetic oligonucleotide
  Antisense strand to SEQ ID NO: 1392506
uucuugcucaccaaggaca

SEQ ID NO: 1392508 - RNA, 19 nt, Artificial Sequence
  Description of Artificial Sequence: Synthetic oligonucleotide
  Sense strand starting at position 2021 of SEQ ID NO: 1243066
guccuuggugagcaagaaa

SEQ ID NO: 1392509 - RNA, 19 nt, Artificial Sequence
  Description of Artificial Sequence: Synthetic oligonucleotide
  Antisense strand to SEQ ID NO: 1392508
uuucuugcucaccaaggac

SEQ ID NO: 1392510 - RNA, 19 nt, Artificial Sequence
  Description of Artificial Sequence: Synthetic oligonucleotide
  Sense strand starting at position 2069 of SEQ ID NO: 1243066
caggaaaugcucugugucu

SEQ ID NO: 1392511 - RNA, 19 nt, Artificial Sequence
  Description of Artificial Sequence: Synthetic oligonucleotide
  Antisense strand to SEQ ID NO: 1392510
agacacagagcauuuccug

SEQ ID NO: 1392512 - RNA, 19 nt, Artificial Sequence
  Description of Artificial Sequence: Synthetic oligonucleotide
  Sense strand starting at position 2070 of SEQ ID NO: 1243066
aggaaaugcucugugucuu

SEQ ID NO: 1392513 - RNA, 19 nt, Artificial Sequence
  Description of Artificial Sequence: Synthetic oligonucleotide
  Antisense strand to SEQ ID NO: 1392512
aagacacagagcauuuccu

SEQ ID NO: 1392514 - RNA, 19 nt, Artificial Sequence
  Description of Artificial Sequence: Synthetic oligonucleotide
  Sense strand starting at position 2078 of SEQ ID NO: 1243066
cucugugucuuggugggaa

SEQ ID NO: 1392515 - RNA, 19 nt, Artificial Sequence
  Description of Artificial Sequence: Synthetic oligonucleotide
  Antisense strand to SEQ ID NO: 1392514
uucccaccaagacacagag

SEQ ID NO: 1392516 - RNA, 19 nt, Artificial Sequence
  Description of Artificial Sequence: Synthetic oligonucleotide
  Sense strand starting at position 2080 of SEQ ID NO: 1243066
cugugucuuggugggaacu

SEQ ID NO: 1392517 - RNA, 19 nt, Artificial Sequence
  Description of Artificial Sequence: Synthetic oligonucleotide
  Antisense strand to SEQ ID NO: 1392516
aguucccaccaagacacag

SEQ ID NO: 1392518 - RNA, 19 nt, Artificial Sequence
  Description of Artificial Sequence: Synthetic oligonucleotide
  Sense strand starting at position 2106 of SEQ ID NO: 1243066
aggguaaggguguguccau

SEQ ID NO: 1392519 - RNA, 19 nt, Artificial Sequence
  Description of Artificial Sequence: Synthetic oligonucleotide
  Antisense strand to SEQ ID NO: 1392518
auggacacacccuuacccu

SEQ ID NO: 1392520 - RNA, 19 nt, Artificial Sequence
  Description of Artificial Sequence: Synthetic oligonucleotide
  Sense strand starting at position 2469 of SEQ ID NO: 1243066
aauacaguccugugagcuu

SEQ ID NO: 1392521 - RNA, 19 nt, Artificial Sequence
  Description of Artificial Sequence: Synthetic oligonucleotide
  Antisense strand to SEQ ID NO: 1392520
aagcucacaggacuguauu

SEQ ID NO: 1392522 - RNA, 19 nt, Artificial Sequence
  Description of Artificial Sequence: Synthetic oligonucleotide
  Sense strand starting at position 2488 of SEQ ID NO: 1243066
ugccuuuccuggcccaaga

SEQ ID NO: 1392523 - RNA, 19 nt, Artificial Sequence
  Description of Artificial Sequence: Synthetic oligonucleotide
  Antisense strand to SEQ ID NO: 1392522
ucuugggccaggaaaggca

SEQ ID NO: 1392524 - RNA, 19 nt, Artificial Sequence
  Description of Artificial Sequence: Synthetic oligonucleotide
  Sense strand starting at position 2525 of SEQ ID NO: 1243066
gggcacugccaggagauaa

SEQ ID NO: 1392525 - RNA, 19 nt, Artificial Sequence
  Description of Artificial Sequence: Synthetic oligonucleotide
  Antisense strand to SEQ ID NO: 1392524
uuaucuccuggcagugccc

SEQ ID NO: 1392526 - RNA, 19 nt, Artificial Sequence
  Description of Artificial Sequence: Synthetic oligonucleotide
  Sense strand starting at position 2640 of SEQ ID NO: 1243066
ugacucaucuguucccaga

SEQ ID NO: 1392527 - RNA, 19 nt, Artificial Sequence
  Description of Artificial Sequence: Synthetic oligonucleotide
  Antisense strand to SEQ ID NO: 1392526
ucugggaacagaugaguca

SEQ ID NO: 1392528 - RNA, 19 nt, Artificial Sequence
  Description of Artificial Sequence: Synthetic oligonucleotide
  Sense strand starting at position 2688 of SEQ ID NO: 1243066
gaaugcucuuccgugcaca

SEQ ID NO: 1392529 - RNA, 19 nt, Artificial Sequence
  Description of Artificial Sequence: Synthetic oligonucleotide
  Antisense strand to SEQ ID NO: 1392528
ugugcacggaagagcauuc

SEQ ID NO: 1392530 - RNA, 19 nt, Artificial Sequence
  Description of Artificial Sequence: Synthetic oligonucleotide
  Sense strand starting at position 3628 of SEQ ID NO: 1243066
agccaagaaucuguagcuu

SEQ ID NO: 1392531 - RNA, 19 nt, Artificial Sequence
  Description of Artificial Sequence: Synthetic oligonucleotide
  Antisense strand to SEQ ID NO: 1392530
aagcuacagauucuuggcu

SEQ ID NO: 1392532 - RNA, 19 nt, Artificial Sequence
  Description of Artificial Sequence: Synthetic oligonucleotide
  Sense strand starting at position 3648 of SEQ ID NO: 1243066
gugacuugccuagagccaa

SEQ ID NO: 1392533 - RNA, 19 nt, Artificial Sequence
  Description of Artificial Sequence: Synthetic oligonucleotide
  Antisense strand to SEQ ID NO: 1392532
uuggcucuaggcaagucac

SEQ ID NO: 1392534 - RNA, 19 nt, Artificial Sequence
  Description of Artificial Sequence: Synthetic oligonucleotide
  Sense strand starting at position 3693 of SEQ ID NO: 1243066
caucgucuccugcaugaca

SEQ ID NO: 1392535 - RNA, 19 nt, Artificial Sequence
  Description of Artificial Sequence: Synthetic oligonucleotide
  Antisense strand to SEQ ID NO: 1392534
ugucaugcaggagacgaug

SEQ ID NO: 1392536 - RNA, 19 nt, Artificial Sequence
  Description of Artificial Sequence: Synthetic oligonucleotide
  Sense strand starting at position 3695 of SEQ ID NO: 1243066
ucgucuccugcaugacaau

SEQ ID NO: 1392537 - RNA, 19 nt, Artificial Sequence
  Description of Artificial Sequence: Synthetic oligonucleotide
  Antisense strand to SEQ ID NO: 1392536
auugucaugcaggagacga

SEQ ID NO: 1392538 - RNA, 19 nt, Artificial Sequence
  Description of Artificial Sequence: Synthetic oligonucleotide
  Sense strand starting at position 3696 of SEQ ID NO: 1243066
cgucuccugcaugacaaua

SEQ ID NO: 1392539 - RNA, 19 nt, Artificial Sequence
  Description of Artificial Sequence: Synthetic oligonucleotide
  Antisense strand to SEQ ID NO: 1392538
uauugucaugcaggagacg

SEQ ID NO: 1392540 - RNA, 19 nt, Artificial Sequence
  Description of Artificial Sequence: Synthetic oligonucleotide
  Sense strand starting at position 3888 of SEQ ID NO: 1243066
augaguucugguugguuga

SEQ ID NO: 1392541 - RNA, 19 nt, Artificial Sequence
  Description of Artificial Sequence: Synthetic oligonucleotide
  Antisense strand to SEQ ID NO: 1392540
ucaaccaaccagaacucau

SEQ ID NO: 1392542 - RNA, 19 nt, Artificial Sequence
  Description of Artificial Sequence: Synthetic oligonucleotide
  Sense strand starting at position 3889 of SEQ ID NO: 1243066
ugaguucugguugguugaa

SEQ ID NO: 1392543 - RNA, 19 nt, Artificial Sequence
  Description of Artificial Sequence: Synthetic oligonucleotide
  Antisense strand to SEQ ID NO: 1392542
uucaaccaaccagaacuca

SEQ ID NO: 1392544 - RNA, 19 nt, Artificial Sequence
  Description of Artificial Sequence: Synthetic oligonucleotide
  Sense strand starting at position 3890 of SEQ ID NO: 1243066
gaguucugguugguugaau

SEQ ID NO: 1392545 - RNA, 19 nt, Artificial Sequence
  Description of Artificial Sequence: Synthetic oligonucleotide
  Antisense strand to SEQ ID NO: 1392544
auucaaccaaccagaacuc

SEQ ID NO: 1392546 - RNA, 19 nt, Artificial Sequence
  Description of Artificial Sequence: Synthetic oligonucleotide
  Sense strand starting at position 3891 of SEQ ID NO: 1243066
aguucugguugguugaauu

SEQ ID NO: 1392547 - RNA, 19 nt, Artificial Sequence
  Description of Artificial Sequence: Synthetic oligonucleotide
  Antisense strand to SEQ ID NO: 1392546
aauucaaccaaccagaacu

SEQ ID NO: 1392548 - RNA, 19 nt, Artificial Sequence
  Description of Artificial Sequence: Synthetic oligonucleotide
  Sense strand starting at position 3947 of SEQ ID NO: 1243066
cacagaguauuugguguuu

SEQ ID NO: 1392549 - RNA, 19 nt, Artificial Sequence
  Description of Artificial Sequence: Synthetic oligonucleotide
  Antisense strand to SEQ ID NO: 1392548
aaacaccaaauacucugug

SEQ ID NO: 1392550 - RNA, 19 nt, Artificial Sequence
  Description of Artificial Sequence: Synthetic oligonucleotide
  Sense strand starting at position 111 of SEQ ID NO: 1243067
gaacgaaauggugguuugu

SEQ ID NO: 1392551 - RNA, 19 nt, Artificial Sequence
  Description of Artificial Sequence: Synthetic oligonucleotide
  Antisense strand to SEQ ID NO: 1392550
acaaaccaccauuucguuc

SEQ ID NO: 1392552 - RNA, 19 nt, Artificial Sequence
  Description of Artificial Sequence: Synthetic oligonucleotide
  Sense strand starting at position 120 of SEQ ID NO: 1243067
ggugguuugucccucaaca

SEQ ID NO: 1392553 - RNA, 19 nt, Artificial Sequence
  Description of Artificial Sequence: Synthetic oligonucleotide
  Antisense strand to SEQ ID NO: 1392552
uguugagggacaaaccacc

SEQ ID NO: 1392554 - RNA, 19 nt, Artificial Sequence
  Description of Artificial Sequence: Synthetic oligonucleotide
  Sense strand starting at position 122 of SEQ ID NO: 1243067
ugguuugucccucaacauc

SEQ ID NO: 1392555 - RNA, 19 nt, Artificial Sequence
  Description of Artificial Sequence: Synthetic oligonucleotide
  Antisense strand to SEQ ID NO: 1392554
gauguugagggacaaacca

SEQ ID NO: 1392556 - RNA, 19 nt, Artificial Sequence
  Description of Artificial Sequence: Synthetic oligonucleotide
  Sense strand starting at position 216 of SEQ ID NO: 1243067
ccucuuuaacucugggaau

SEQ ID NO: 1392557 - RNA, 19 nt, Artificial Sequence
  Description of Artificial Sequence: Synthetic oligonucleotide
  Antisense strand to SEQ ID NO: 1392556
auucccagaguuaaagagg

SEQ ID NO: 1392558 - RNA, 19 nt, Artificial Sequence
  Description of Artificial Sequence: Synthetic oligonucleotide
  Sense strand starting at position 296 of SEQ ID NO: 1243067
uguggaguuagucaaauau

SEQ ID NO: 1392559 - RNA, 19 nt, Artificial Sequence
  Description of Artificial Sequence: Synthetic oligonucleotide
  Antisense strand to SEQ ID NO: 1392558
auauuugacuaacuccaca

SEQ ID NO: 1392560 - RNA, 19 nt, Artificial Sequence
  Description of Artificial Sequence: Synthetic oligonucleotide
  Sense strand starting at position 336 of SEQ ID NO: 1243067
uaguuuguagucguguguu

SEQ ID NO: 1392561 - RNA, 19 nt, Artificial Sequence
  Description of Artificial Sequence: Synthetic oligonucleotide
  Antisense strand to SEQ ID NO: 1392560
aacacacgacuacaaacua

SEQ ID NO: 1392562 - RNA, 19 nt, Artificial Sequence
  Description of Artificial Sequence: Synthetic oligonucleotide
  Sense strand starting at position 436 of SEQ ID NO: 1243067
acaagaugccucgauguuc

SEQ ID NO: 1392563 - RNA, 19 nt, Artificial Sequence
  Description of Artificial Sequence: Synthetic oligonucleotide
  Antisense strand to SEQ ID NO: 1392562
gaacaucgaggcaucuugu

SEQ ID NO: 1392564 - RNA, 19 nt, Artificial Sequence
  Description of Artificial Sequence: Synthetic oligonucleotide
  Sense strand starting at position 472 of SEQ ID NO: 1243067
gauggcccugcuugucaau

SEQ ID NO: 1392565 - RNA, 19 nt, Artificial Sequence
  Description of Artificial Sequence: Synthetic oligonucleotide
  Antisense strand to SEQ ID NO: 1392564
auugacaagcagggccauc

SEQ ID NO: 1392566 - RNA, 19 nt, Artificial Sequence
  Description of Artificial Sequence: Synthetic oligonucleotide
  Sense strand starting at position 484 of SEQ ID NO: 1243067
ugucaauauuauccaaugu

SEQ ID NO: 1392567 - RNA, 19 nt, Artificial Sequence
  Description of Artificial Sequence: Synthetic oligonucleotide
  Antisense strand to SEQ ID NO: 1392566
acauuggauaauauugaca

SEQ ID NO: 1392568 - RNA, 19 nt, Artificial Sequence
  Description of Artificial Sequence: Synthetic oligonucleotide
  Sense strand starting at position 536 of SEQ ID NO: 1243067
gaagaaacauuugggaauu

SEQ ID NO: 1392569 - RNA, 19 nt, Artificial Sequence
  Description of Artificial Sequence: Synthetic oligonucleotide
  Antisense strand to SEQ ID NO: 1392568
aauucccaaauguuucuuc

SEQ ID NO: 1392570 - RNA, 19 nt, Artificial Sequence
  Description of Artificial Sequence: Synthetic oligonucleotide
  Sense strand starting at position 547 of SEQ ID NO: 1243067
ugggaauuaagcuguguca

SEQ ID NO: 1392571 - RNA, 19 nt, Artificial Sequence
  Description of Artificial Sequence: Synthetic oligonucleotide
  Antisense strand to SEQ ID NO: 1392570
ugacacagcuuaauuccca

SEQ ID NO: 1392572 - RNA, 19 nt, Artificial Sequence
  Description of Artificial Sequence: Synthetic oligonucleotide
  Sense strand starting at position 549 of SEQ ID NO: 1243067
ggaauuaagcugugucaag

SEQ ID NO: 1392573 - RNA, 19 nt, Artificial Sequence
  Description of Artificial Sequence: Synthetic oligonucleotide
  Antisense strand to SEQ ID NO: 1392572
cuugacacagcuuaauucc

SEQ ID NO: 1392574 - RNA, 19 nt, Artificial Sequence
  Description of Artificial Sequence: Synthetic oligonucleotide
  Sense strand starting at position 550 of SEQ ID NO: 1243067
gaauuaagcugugucaagu

SEQ ID NO: 1392575 - RNA, 19 nt, Artificial Sequence
  Description of Artificial Sequence: Synthetic oligonucleotide
  Antisense strand to SEQ ID NO: 1392574
acuugacacagcuuaauuc

SEQ ID NO: 1392576 - RNA, 19 nt, Artificial Sequence
  Description of Artificial Sequence: Synthetic oligonucleotide
  Sense strand starting at position 631 of SEQ ID NO: 1243067
cuugccgaacugugacaaa

SEQ ID NO: 1392577 - RNA, 19 nt, Artificial Sequence
  Description of Artificial Sequence: Synthetic oligonucleotide
  Antisense strand to SEQ ID NO: 1392576
uuugucacaguucggcaag

SEQ ID NO: 1392578 - RNA, 19 nt, Artificial Sequence
  Description of Artificial Sequence: Synthetic oligonucleotide
  Sense strand starting at position 705 of SEQ ID NO: 1243067
acaugugagucgagaggau

SEQ ID NO: 1392579 - RNA, 19 nt, Artificial Sequence
  Description of Artificial Sequence: Synthetic oligonucleotide
  Antisense strand to SEQ ID NO: 1392578
auccucucgacucacaugu

SEQ ID NO: 1392580 - RNA, 19 nt, Artificial Sequence
  Description of Artificial Sequence: Synthetic oligonucleotide
  Sense strand starting at position 718 of SEQ ID NO: 1243067
gaggaugagucagacauuu

SEQ ID NO: 1392581 - RNA, 19 nt, Artificial Sequence
  Description of Artificial Sequence: Synthetic oligonucleotide
  Antisense strand to SEQ ID NO: 1392580
aaaugucugacucauccuc

SEQ ID NO: 1392582 - RNA, 19 nt, Artificial Sequence
  Description of Artificial Sequence: Synthetic oligonucleotide
  Sense strand starting at position 735 of SEQ ID NO: 1243067
uugacucaguggcugaaua

SEQ ID NO: 1392583 - RNA, 19 nt, Artificial Sequence
  Description of Artificial Sequence: Synthetic oligonucleotide
  Antisense strand to SEQ ID NO: 1392582
uauucagccacugagucaa

SEQ ID NO: 1392584 - RNA, 19 nt, Artificial Sequence
  Description of Artificial Sequence: Synthetic oligonucleotide
  Sense strand starting at position 736 of SEQ ID NO: 1243067
ugacucaguggcugaauau

SEQ ID NO: 1392585 - RNA, 19 nt, Artificial Sequence
  Description of Artificial Sequence: Synthetic oligonucleotide
  Antisense strand to SEQ ID NO: 1392584
auauucagccacugaguca

SEQ ID NO: 1392586 - RNA, 19 nt, Artificial Sequence
  Description of Artificial Sequence: Synthetic oligonucleotide
  Sense strand starting at position 737 of SEQ ID NO: 1243067
gacucaguggcugaauauu

SEQ ID NO: 1392587 - RNA, 19 nt, Artificial Sequence
  Description of Artificial Sequence: Synthetic oligonucleotide
  Antisense strand to SEQ ID NO: 1392586
aauauucagccacugaguc

SEQ ID NO: 1392588 - RNA, 19 nt, Artificial Sequence
  Description of Artificial Sequence: Synthetic oligonucleotide
  Sense strand starting at position 746 of SEQ ID NO: 1243067
gcugaauauucuguacaaa

SEQ ID NO: 1392589 - RNA, 19 nt, Artificial Sequence
  Description of Artificial Sequence: Synthetic oligonucleotide
  Antisense strand to SEQ ID NO: 1392588
uuuguacagaauauucagc

SEQ ID NO: 1392590 - RNA, 19 nt, Artificial Sequence
  Description of Artificial Sequence: Synthetic oligonucleotide
  Sense strand starting at position 812 of SEQ ID NO: 1243067
gcaucucuuggugggacau

SEQ ID NO: 1392591 - RNA, 19 nt, Artificial Sequence
  Description of Artificial Sequence: Synthetic oligonucleotide
  Antisense strand to SEQ ID NO: 1392590
augucccaccaagagaugc

SEQ ID NO: 1392592 - RNA, 19 nt, Artificial Sequence
  Description of Artificial Sequence: Synthetic oligonucleotide
  Sense strand starting at position 824 of SEQ ID NO: 1243067
gggacaugguauccuauua

SEQ ID NO: 1392593 - RNA, 19 nt, Artificial Sequence
  Description of Artificial Sequence: Synthetic oligonucleotide
  Antisense strand to SEQ ID NO: 1392592
uaauaggauaccauguccc

SEQ ID NO: 1392594 - RNA, 19 nt, Artificial Sequence
  Description of Artificial Sequence: Synthetic oligonucleotide
  Sense strand starting at position 853 of SEQ ID NO: 1243067
uucccuuauuugucugcua

SEQ ID NO: 1392595 - RNA, 19 nt, Artificial Sequence
  Description of Artificial Sequence: Synthetic oligonucleotide
  Antisense strand to SEQ ID NO: 1392594
uagcagacaaauaagggaa

SEQ ID NO: 1392596 - RNA, 19 nt, Artificial Sequence
  Description of Artificial Sequence: Synthetic oligonucleotide
  Sense strand starting at position 864 of SEQ ID NO: 1243067
gucugcuaccguuagaggu

SEQ ID NO: 1392597 - RNA, 19 nt, Artificial Sequence
  Description of Artificial Sequence: Synthetic oligonucleotide
  Antisense strand to SEQ ID NO: 1392596
accucuaacgguagcagac

SEQ ID NO: 1392598 - RNA, 19 nt, Artificial Sequence
  Description of Artificial Sequence: Synthetic oligonucleotide
  Sense strand starting at position 868 of SEQ ID NO: 1243067
gcuaccguuagagguauau

SEQ ID NO: 1392599 - RNA, 19 nt, Artificial Sequence
  Description of Artificial Sequence: Synthetic oligonucleotide
  Antisense strand to SEQ ID NO: 1392598
auauaccucuaacgguagc

SEQ ID NO: 1392600 - RNA, 19 nt, Artificial Sequence
  Description of Artificial Sequence: Synthetic oligonucleotide
  Sense strand starting at position 872 of SEQ ID NO: 1243067
ccguuagagguauauggua

SEQ ID NO: 1392601 - RNA, 19 nt, Artificial Sequence
  Description of Artificial Sequence: Synthetic oligonucleotide
  Antisense strand to SEQ ID NO: 1392600
uaccauauaccucuaacgg

SEQ ID NO: 1392602 - RNA, 19 nt, Artificial Sequence
  Description of Artificial Sequence: Synthetic oligonucleotide
  Sense strand starting at position 874 of SEQ ID NO: 1243067
guuagagguauaugguaau

SEQ ID NO: 1392603 - RNA, 19 nt, Artificial Sequence
  Description of Artificial Sequence: Synthetic oligonucleotide
  Antisense strand to SEQ ID NO: 1392602
auuaccauauaccucuaac

SEQ ID NO: 1392604 - RNA, 19 nt, Artificial Sequence
  Description of Artificial Sequence: Synthetic oligonucleotide
  Sense strand starting at position 877 of SEQ ID NO: 1243067
agagguauaugguaauaga

SEQ ID NO: 1392605 - RNA, 19 nt, Artificial Sequence
  Description of Artificial Sequence: Synthetic oligonucleotide
  Antisense strand to SEQ ID NO: 1392604
ucuauuaccauauaccucu

SEQ ID NO: 1392606 - RNA, 19 nt, Artificial Sequence
  Description of Artificial Sequence: Synthetic oligonucleotide
  Sense strand starting at position 884 of SEQ ID NO: 1243067
uaugguaauagacguuagu

SEQ ID NO: 1392607 - RNA, 19 nt, Artificial Sequence
  Description of Artificial Sequence: Synthetic oligonucleotide
  Antisense strand to SEQ ID NO: 1392606
acuaacgucuauuaccaua

SEQ ID NO: 1392608 - RNA, 19 nt, Artificial Sequence
  Description of Artificial Sequence: Synthetic oligonucleotide
  Sense strand starting at position 897 of SEQ ID NO: 1243067
guuagugucugcccacaaa

SEQ ID NO: 1392609 - RNA, 19 nt, Artificial Sequence
  Description of Artificial Sequence: Synthetic oligonucleotide
  Antisense strand to SEQ ID NO: 1392608
uuugugggcagacacuaac

SEQ ID NO: 1392610 - RNA, 19 nt, Artificial Sequence
  Description of Artificial Sequence: Synthetic oligonucleotide
  Sense strand starting at position 3197 of SEQ ID NO: 1243067
acccuagauguguauaucu

SEQ ID NO: 1392611 - RNA, 19 nt, Artificial Sequence
  Description of Artificial Sequence: Synthetic oligonucleotide
  Antisense strand to SEQ ID NO: 1392610
agauauacacaucuagggu

SEQ ID NO: 1392612 - RNA, 19 nt, Artificial Sequence
  Description of Artificial Sequence: Synthetic oligonucleotide
  Sense strand starting at position 3199 of SEQ ID NO: 1243067
ccuagauguguauaucuau

SEQ ID NO: 1392613 - RNA, 19 nt, Artificial Sequence
  Description of Artificial Sequence: Synthetic oligonucleotide
  Antisense strand to SEQ ID NO: 1392612
auagauauacacaucuagg

SEQ ID NO: 1392614 - RNA, 19 nt, Artificial Sequence
  Description of Artificial Sequence: Synthetic oligonucleotide
  Sense strand starting at position 3202 of SEQ ID NO: 1243067
agauguguauaucuaugua

SEQ ID NO: 1392615 - RNA, 19 nt, Artificial Sequence
  Description of Artificial Sequence: Synthetic oligonucleotide
  Antisense strand to SEQ ID NO: 1392614
uacauagauauacacaucu

SEQ ID NO: 1392616 - RNA, 19 nt, Artificial Sequence
  Description of Artificial Sequence: Synthetic oligonucleotide
  Sense strand starting at position 3205 of SEQ ID NO: 1243067
uguguauaucuauguauga

SEQ ID NO: 1392617 - RNA, 19 nt, Artificial Sequence
  Description of Artificial Sequence: Synthetic oligonucleotide
  Antisense strand to SEQ ID NO: 1392616
ucauacauagauauacaca

SEQ ID NO: 1392618 - RNA, 19 nt, Artificial Sequence
  Description of Artificial Sequence: Synthetic oligonucleotide
  Sense strand starting at position 3206 of SEQ ID NO: 1243067
guguauaucuauguaugaa

SEQ ID NO: 1392619 - RNA, 19 nt, Artificial Sequence
  Description of Artificial Sequence: Synthetic oligonucleotide
  Antisense strand to SEQ ID NO: 1392618
uucauacauagauauacac

SEQ ID NO: 1392620 - RNA, 19 nt, Artificial Sequence
  Description of Artificial Sequence: Synthetic oligonucleotide
  Sense strand starting at position 3245 of SEQ ID NO: 1243067
gugcuaaggauuggacuua

SEQ ID NO: 1392621 - RNA, 19 nt, Artificial Sequence
  Description of Artificial Sequence: Synthetic oligonucleotide
  Antisense strand to SEQ ID NO: 1392620
uaaguccaauccuuagcac

SEQ ID NO: 1392622 - RNA, 19 nt, Artificial Sequence
  Description of Artificial Sequence: Synthetic oligonucleotide
  Sense strand starting at position 3254 of SEQ ID NO: 1243067
auuggacuuaggugaaucu

SEQ ID NO: 1392623 - RNA, 19 nt, Artificial Sequence
  Description of Artificial Sequence: Synthetic oligonucleotide
  Antisense strand to SEQ ID NO: 1392622
agauucaccuaaguccaau

SEQ ID NO: 1392624 - RNA, 19 nt, Artificial Sequence
  Description of Artificial Sequence: Synthetic oligonucleotide
  Sense strand starting at position 3466 of SEQ ID NO: 1243067
agaacaacuuuggugcaua

SEQ ID NO: 1392625 - RNA, 19 nt, Artificial Sequence
  Description of Artificial Sequence: Synthetic oligonucleotide
  Antisense strand to SEQ ID NO: 1392624
uaugcaccaaaguuguucu

SEQ ID NO: 1392626 - RNA, 19 nt, Artificial Sequence
  Description of Artificial Sequence: Synthetic oligonucleotide
  Sense strand starting at position 3469 of SEQ ID NO: 1243067
acaacuuuggugcauauaa

SEQ ID NO: 1392627 - RNA, 19 nt, Artificial Sequence
  Description of Artificial Sequence: Synthetic oligonucleotide
  Antisense strand to SEQ ID NO: 1392626
uuauaugcaccaaaguugu

SEQ ID NO: 1392628 - RNA, 19 nt, Artificial Sequence
  Description of Artificial Sequence: Synthetic oligonucleotide
  Sense strand starting at position 3631 of SEQ ID NO: 1243067
caaauauaaugggaagagu

SEQ ID NO: 1392629 - RNA, 19 nt, Artificial Sequence
  Description of Artificial Sequence: Synthetic oligonucleotide
  Antisense strand to SEQ ID NO: 1392628
acucuucccauuauauuug

SEQ ID NO: 1392630 - RNA, 19 nt, Artificial Sequence
  Description of Artificial Sequence: Synthetic oligonucleotide
  Sense strand starting at position 188 of SEQ ID NO: 1243068
gaacgaaauggugguuugu

SEQ ID NO: 1392631 - RNA, 19 nt, Artificial Sequence
  Description of Artificial Sequence: Synthetic oligonucleotide
  Antisense strand to SEQ ID NO: 1392630
acaaaccaccauuucguuc

SEQ ID NO: 1392632 - RNA, 19 nt, Artificial Sequence
  Description of Artificial Sequence: Synthetic oligonucleotide
  Sense strand starting at position 197 of SEQ ID NO: 1243068
ggugguuugucccucaaca

SEQ ID NO: 1392633 - RNA, 19 nt, Artificial Sequence
  Description of Artificial Sequence: Synthetic oligonucleotide
  Antisense strand to SEQ ID NO: 1392632
uguugagggacaaaccacc

SEQ ID NO: 1392634 - RNA, 19 nt, Artificial Sequence
  Description of Artificial Sequence: Synthetic oligonucleotide
  Sense strand starting at position 199 of SEQ ID NO: 1243068
ugguuugucccucaacauc

SEQ ID NO: 1392635 - RNA, 19 nt, Artificial Sequence
  Description of Artificial Sequence: Synthetic oligonucleotide
  Antisense strand to SEQ ID NO: 1392634
gauguugagggacaaacca

SEQ ID NO: 1392636 - RNA, 19 nt, Artificial Sequence
  Description of Artificial Sequence: Synthetic oligonucleotide
  Sense strand starting at position 293 of SEQ ID NO: 1243068
ccucuuuaacucugggaau

SEQ ID NO: 1392637 - RNA, 19 nt, Artificial Sequence
  Description of Artificial Sequence: Synthetic oligonucleotide
  Antisense strand to SEQ ID NO: 1392636
auucccagaguuaaagagg

SEQ ID NO: 1392638 - RNA, 19 nt, Artificial Sequence
  Description of Artificial Sequence: Synthetic oligonucleotide
  Sense strand starting at position 373 of SEQ ID NO: 1243068
uguggaguuagucaaauau

SEQ ID NO: 1392639 - RNA, 19 nt, Artificial Sequence
  Description of Artificial Sequence: Synthetic oligonucleotide
  Antisense strand to SEQ ID NO: 1392638
auauuugacuaacuccaca

SEQ ID NO: 1392640 - RNA, 19 nt, Artificial Sequence
  Description of Artificial Sequence: Synthetic oligonucleotide
  Sense strand starting at position 413 of SEQ ID NO: 1243068
uaguuuguagucguguguu

SEQ ID NO: 1392641 - RNA, 19 nt, Artificial Sequence
  Description of Artificial Sequence: Synthetic oligonucleotide
  Antisense strand to SEQ ID NO: 1392640
aacacacgacuacaaacua

SEQ ID NO: 1392642 - RNA, 19 nt, Artificial Sequence
  Description of Artificial Sequence: Synthetic oligonucleotide
  Sense strand starting at position 513 of SEQ ID NO: 1243068
acaagaugccucgauguuc

SEQ ID NO: 1392643 - RNA, 19 nt, Artificial Sequence
  Description of Artificial Sequence: Synthetic oligonucleotide
  Antisense strand to SEQ ID NO: 1392642
gaacaucgaggcaucuugu

SEQ ID NO: 1392644 - RNA, 19 nt, Artificial Sequence
  Description of Artificial Sequence: Synthetic oligonucleotide
  Sense strand starting at position 549 of SEQ ID NO: 1243068
gauggcccugcuugucaau

SEQ ID NO: 1392645 - RNA, 19 nt, Artificial Sequence
  Description of Artificial Sequence: Synthetic oligonucleotide
  Antisense strand to SEQ ID NO: 1392644
auugacaagcagggccauc

SEQ ID NO: 1392646 - RNA, 19 nt, Artificial Sequence
  Description of Artificial Sequence: Synthetic oligonucleotide
  Sense strand starting at position 561 of SEQ ID NO: 1243068
ugucaauauuauccaaugu

SEQ ID NO: 1392647 - RNA, 19 nt, Artificial Sequence
  Description of Artificial Sequence: Synthetic oligonucleotide
  Antisense strand to SEQ ID NO: 1392646
acauuggauaauauugaca

SEQ ID NO: 1392648 - RNA, 19 nt, Artificial Sequence
  Description of Artificial Sequence: Synthetic oligonucleotide
  Sense strand starting at position 613 of SEQ ID NO: 1243068
gaagaaacauuugggaauu

SEQ ID NO: 1392649 - RNA, 19 nt, Artificial Sequence
  Description of Artificial Sequence: Synthetic oligonucleotide
  Antisense strand to SEQ ID NO: 1392648
aauucccaaauguuucuuc

SEQ ID NO: 1392650 - RNA, 19 nt, Artificial Sequence
  Description of Artificial Sequence: Synthetic oligonucleotide
  Sense strand starting at position 624 of SEQ ID NO: 1243068
ugggaauuaagcuguguca

SEQ ID NO: 1392651 - RNA, 19 nt, Artificial Sequence
  Description of Artificial Sequence: Synthetic oligonucleotide
  Antisense strand to SEQ ID NO: 1392650
ugacacagcuuaauuccca

SEQ ID NO: 1392652 - RNA, 19 nt, Artificial Sequence
  Description of Artificial Sequence: Synthetic oligonucleotide
  Sense strand starting at position 626 of SEQ ID NO: 1243068
ggaauuaagcugugucaag

SEQ ID NO: 1392653 - RNA, 19 nt, Artificial Sequence
  Description of Artificial Sequence: Synthetic oligonucleotide
  Antisense strand to SEQ ID NO: 1392652
cuugacacagcuuaauucc

SEQ ID NO: 1392654 - RNA, 19 nt, Artificial Sequence
  Description of Artificial Sequence: Synthetic oligonucleotide
  Sense strand starting at position 627 of SEQ ID NO: 1243068
gaauuaagcugugucaagu

SEQ ID NO: 1392655 - RNA, 19 nt, Artificial Sequence
  Description of Artificial Sequence: Synthetic oligonucleotide
  Antisense strand to SEQ ID NO: 1392654
acuugacacagcuuaauuc

SEQ ID NO: 1392656 - RNA, 19 nt, Artificial Sequence
  Description of Artificial Sequence: Synthetic oligonucleotide
  Sense strand starting at position 708 of SEQ ID NO: 1243068
cuugccgaacugugacaaa

SEQ ID NO: 1392657 - RNA, 19 nt, Artificial Sequence
  Description of Artificial Sequence: Synthetic oligonucleotide
  Antisense strand to SEQ ID NO: 1392656
uuugucacaguucggcaag

SEQ ID NO: 1392658 - RNA, 19 nt, Artificial Sequence
  Description of Artificial Sequence: Synthetic oligonucleotide
  Sense strand starting at position 782 of SEQ ID NO: 1243068
acaugugagucgagaggau

SEQ ID NO: 1392659 - RNA, 19 nt, Artificial Sequence
  Description of Artificial Sequence: Synthetic oligonucleotide
  Antisense strand to SEQ ID NO: 1392658
auccucucgacucacaugu

SEQ ID NO: 1392660 - RNA, 19 nt, Artificial Sequence
  Description of Artificial Sequence: Synthetic oligonucleotide
  Sense strand starting at position 795 of SEQ ID NO: 1243068
gaggaugagucagacauuu

SEQ ID NO: 1392661 - RNA, 19 nt, Artificial Sequence
  Description of Artificial Sequence: Synthetic oligonucleotide
  Antisense strand to SEQ ID NO: 1392660
aaaugucugacucauccuc

SEQ ID NO: 1392662 - RNA, 19 nt, Artificial Sequence
  Description of Artificial Sequence: Synthetic oligonucleotide
  Sense strand starting at position 812 of SEQ ID NO: 1243068
uugacucaguggcugaaua

SEQ ID NO: 1392663 - RNA, 19 nt, Artificial Sequence
  Description of Artificial Sequence: Synthetic oligonucleotide
  Antisense strand to SEQ ID NO: 1392662
uauucagccacugagucaa

SEQ ID NO: 1392664 - RNA, 19 nt, Artificial Sequence
  Description of Artificial Sequence: Synthetic oligonucleotide
  Sense strand starting at position 813 of SEQ ID NO: 1243068
ugacucaguggcugaauau

SEQ ID NO: 1392665 - RNA, 19 nt, Artificial Sequence
  Description of Artificial Sequence: Synthetic oligonucleotide
  Antisense strand to SEQ ID NO: 1392664
auauucagccacugaguca

SEQ ID NO: 1392666 - RNA, 19 nt, Artificial Sequence
  Description of Artificial Sequence: Synthetic oligonucleotide
  Sense strand starting at position 814 of SEQ ID NO: 1243068
gacucaguggcugaauauu

SEQ ID NO: 1392667 - RNA, 19 nt, Artificial Sequence
  Description of Artificial Sequence: Synthetic oligonucleotide
  Antisense strand to SEQ ID NO: 1392666
aauauucagccacugaguc

SEQ ID NO: 1392668 - RNA, 19 nt, Artificial Sequence
  Description of Artificial Sequence: Synthetic oligonucleotide
  Sense strand starting at position 823 of SEQ ID NO: 1243068
gcugaauauucuguacaaa

SEQ ID NO: 1392669 - RNA, 19 nt, Artificial Sequence
  Description of Artificial Sequence: Synthetic oligonucleotide
  Antisense strand to SEQ ID NO: 1392668
uuuguacagaauauucagc

SEQ ID NO: 1392670 - RNA, 19 nt, Artificial Sequence
  Description of Artificial Sequence: Synthetic oligonucleotide
  Sense strand starting at position 889 of SEQ ID NO: 1243068
gcaucucuuggugggacau

SEQ ID NO: 1392671 - RNA, 19 nt, Artificial Sequence
  Description of Artificial Sequence: Synthetic oligonucleotide
  Antisense strand to SEQ ID NO: 1392670
augucccaccaagagaugc

SEQ ID NO: 1392672 - RNA, 19 nt, Artificial Sequence
  Description of Artificial Sequence: Synthetic oligonucleotide
  Sense strand starting at position 901 of SEQ ID NO: 1243068
gggacaugguauccuauua

SEQ ID NO: 1392673 - RNA, 19 nt, Artificial Sequence
  Description of Artificial Sequence: Synthetic oligonucleotide
  Antisense strand to SEQ ID NO: 1392672
uaauaggauaccauguccc

SEQ ID NO: 1392674 - RNA, 19 nt, Artificial Sequence
  Description of Artificial Sequence: Synthetic oligonucleotide
  Sense strand starting at position 930 of SEQ ID NO: 1243068
uucccuuauuugucugcua

SEQ ID NO: 1392675 - RNA, 19 nt, Artificial Sequence
  Description of Artificial Sequence: Synthetic oligonucleotide
  Antisense strand to SEQ ID NO: 1392674
uagcagacaaauaagggaa

SEQ ID NO: 1392676 - RNA, 19 nt, Artificial Sequence
  Description of Artificial Sequence: Synthetic oligonucleotide
  Sense strand starting at position 941 of SEQ ID NO: 1243068
gucugcuaccguuagaggu

SEQ ID NO: 1392677 - RNA, 19 nt, Artificial Sequence
  Description of Artificial Sequence: Synthetic oligonucleotide
  Antisense strand to SEQ ID NO: 1392676
accucuaacgguagcagac

SEQ ID NO: 1392678 - RNA, 19 nt, Artificial Sequence
  Description of Artificial Sequence: Synthetic oligonucleotide
  Sense strand starting at position 945 of SEQ ID NO: 1243068
gcuaccguuagagguauau

SEQ ID NO: 1392679 - RNA, 19 nt, Artificial Sequence
  Description of Artificial Sequence: Synthetic oligonucleotide
  Antisense strand to SEQ ID NO: 1392678
auauaccucuaacgguagc

SEQ ID NO: 1392680 - RNA, 19 nt, Artificial Sequence
  Description of Artificial Sequence: Synthetic oligonucleotide
  Sense strand starting at position 949 of SEQ ID NO: 1243068
ccguuagagguauauggua

SEQ ID NO: 1392681 - RNA, 19 nt, Artificial Sequence
  Description of Artificial Sequence: Synthetic oligonucleotide
  Antisense strand to SEQ ID NO: 1392680
uaccauauaccucuaacgg

SEQ ID NO: 1392682 - RNA, 19 nt, Artificial Sequence
  Description of Artificial Sequence: Synthetic oligonucleotide
  Sense strand starting at position 951 of SEQ ID NO: 1243068
guuagagguauaugguaau

SEQ ID NO: 1392683 - RNA, 19 nt, Artificial Sequence
  Description of Artificial Sequence: Synthetic oligonucleotide
  Antisense strand to SEQ ID NO: 1392682
auuaccauauaccucuaac

SEQ ID NO: 1392684 - RNA, 19 nt, Artificial Sequence
  Description of Artificial Sequence: Synthetic oligonucleotide
  Sense strand starting at position 954 of SEQ ID NO: 1243068
agagguauaugguaauaga

SEQ ID NO: 1392685 - RNA, 19 nt, Artificial Sequence
  Description of Artificial Sequence: Synthetic oligonucleotide
  Antisense strand to SEQ ID NO: 1392684
ucuauuaccauauaccucu

SEQ ID NO: 1392686 - RNA, 19 nt, Artificial Sequence
  Description of Artificial Sequence: Synthetic oligonucleotide
  Sense strand starting at position 961 of SEQ ID NO: 1243068
uaugguaauagacguuagu

SEQ ID NO: 1392687 - RNA, 19 nt, Artificial Sequence
  Description of Artificial Sequence: Synthetic oligonucleotide
  Antisense strand to SEQ ID NO: 1392686
acuaacgucuauuaccaua

SEQ ID NO: 1392688 - RNA, 19 nt, Artificial Sequence
  Description of Artificial Sequence: Synthetic oligonucleotide
  Sense strand starting at position 974 of SEQ ID NO: 1243068
guuagugucugcccacaaa

SEQ ID NO: 1392689 - RNA, 19 nt, Artificial Sequence
  Description of Artificial Sequence: Synthetic oligonucleotide
  Antisense strand to SEQ ID NO: 1392688
uuugugggcagacacuaac

SEQ ID NO: 1392690 - RNA, 19 nt, Artificial Sequence
  Description of Artificial Sequence: Synthetic oligonucleotide
  Sense strand starting at position 3274 of SEQ ID NO: 1243068
acccuagauguguauaucu

SEQ ID NO: 1392691 - RNA, 19 nt, Artificial Sequence
  Description of Artificial Sequence: Synthetic oligonucleotide
  Antisense strand to SEQ ID NO: 1392690
agauauacacaucuagggu

SEQ ID NO: 1392692 - RNA, 19 nt, Artificial Sequence
  Description of Artificial Sequence: Synthetic oligonucleotide
  Sense strand starting at position 3276 of SEQ ID NO: 1243068
ccuagauguguauaucuau

SEQ ID NO: 1392693 - RNA, 19 nt, Artificial Sequence
  Description of Artificial Sequence: Synthetic oligonucleotide
  Antisense strand to SEQ ID NO: 1392692
auagauauacacaucuagg

SEQ ID NO: 1392694 - RNA, 19 nt, Artificial Sequence
  Description of Artificial Sequence: Synthetic oligonucleotide
  Sense strand starting at position 3279 of SEQ ID NO: 1243068
agauguguauaucuaugua

SEQ ID NO: 1392695 - RNA, 19 nt, Artificial Sequence
  Description of Artificial Sequence: Synthetic oligonucleotide
  Antisense strand to SEQ ID NO: 1392694
uacauagauauacacaucu

SEQ ID NO: 1392696 - RNA, 19 nt, Artificial Sequence
  Description of Artificial Sequence: Synthetic oligonucleotide
  Sense strand starting at position 3282 of SEQ ID NO: 1243068
uguguauaucuauguauga

SEQ ID NO: 1392697 - RNA, 19 nt, Artificial Sequence
  Description of Artificial Sequence: Synthetic oligonucleotide
  Antisense strand to SEQ ID NO: 1392696
ucauacauagauauacaca

SEQ ID NO: 1392698 - RNA, 19 nt, Artificial Sequence
  Description of Artificial Sequence: Synthetic oligonucleotide
  Sense strand starting at position 3283 of SEQ ID NO: 1243068
guguauaucuauguaugaa

SEQ ID NO: 1392699 - RNA, 19 nt, Artificial Sequence
  Description of Artificial Sequence: Synthetic oligonucleotide
  Antisense strand to SEQ ID NO: 1392698
uucauacauagauauacac

SEQ ID NO: 1392700 - RNA, 19 nt, Artificial Sequence
  Description of Artificial Sequence: Synthetic oligonucleotide
  Sense strand starting at position 3322 of SEQ ID NO: 1243068
gugcuaaggauuggacuua

SEQ ID NO: 1392701 - RNA, 19 nt, Artificial Sequence
  Description of Artificial Sequence: Synthetic oligonucleotide
  Antisense strand to SEQ ID NO: 1392700
uaaguccaauccuuagcac

SEQ ID NO: 1392702 - RNA, 19 nt, Artificial Sequence
  Description of Artificial Sequence: Synthetic oligonucleotide
  Sense strand starting at position 3331 of SEQ ID NO: 1243068
auuggacuuaggugaaucu

SEQ ID NO: 1392703 - RNA, 19 nt, Artificial Sequence
  Description of Artificial Sequence: Synthetic oligonucleotide
  Antisense strand to SEQ ID NO: 1392702
agauucaccuaaguccaau

SEQ ID NO: 1392704 - RNA, 19 nt, Artificial Sequence
  Description of Artificial Sequence: Synthetic oligonucleotide
  Sense strand starting at position 3543 of SEQ ID NO: 1243068
agaacaacuuuggugcaua

SEQ ID NO: 1392705 - RNA, 19 nt, Artificial Sequence
  Description of Artificial Sequence: Synthetic oligonucleotide
  Antisense strand to SEQ ID NO: 1392704
uaugcaccaaaguuguucu

SEQ ID NO: 1392706 - RNA, 19 nt, Artificial Sequence
  Description of Artificial Sequence: Synthetic oligonucleotide
  Sense strand starting at position 3546 of SEQ ID NO: 1243068
acaacuuuggugcauauaa

SEQ ID NO: 1392707 - RNA, 19 nt, Artificial Sequence
  Description of Artificial Sequence: Synthetic oligonucleotide
  Antisense strand to SEQ ID NO: 1392706
uuauaugcaccaaaguugu

SEQ ID NO: 1392708 - RNA, 19 nt, Artificial Sequence
  Description of Artificial Sequence: Synthetic oligonucleotide
  Sense strand starting at position 3708 of SEQ ID NO: 1243068
caaauauaaugggaagagu

SEQ ID NO: 1392709 - RNA, 19 nt, Artificial Sequence
  Description of Artificial Sequence: Synthetic oligonucleotide
  Antisense strand to SEQ ID NO: 1392708
acucuucccauuauauuug

SEQ ID NO: 1392710 - RNA, 19 nt, Artificial Sequence
  Description of Artificial Sequence: Synthetic oligonucleotide
  Sense strand starting at position 575 of SEQ ID NO: 1243069
ucuaguuucccggaucuga

SEQ ID NO: 1392711 - RNA, 19 nt, Artificial Sequence
  Description of Artificial Sequence: Synthetic oligonucleotide
  Antisense strand to SEQ ID NO: 1392710
ucagauccgggaaacuaga

SEQ ID NO: 1392712 - RNA, 19 nt, Artificial Sequence
  Description of Artificial Sequence: Synthetic oligonucleotide
  Sense strand starting at position 981 of SEQ ID NO: 1243069
gccagcucuuuccagagau

SEQ ID NO: 1392713 - RNA, 19 nt, Artificial Sequence
  Description of Artificial Sequence: Synthetic oligonucleotide
  Antisense strand to SEQ ID NO: 1392712
aucucuggaaagagcuggc

SEQ ID NO: 1392714 - RNA, 19 nt, Artificial Sequence
  Description of Artificial Sequence: Synthetic oligonucleotide
  Sense strand starting at position 983 of SEQ ID NO: 1243069
cagcucuuuccagagauga

SEQ ID NO: 1392715 - RNA, 19 nt, Artificial Sequence
  Description of Artificial Sequence: Synthetic oligonucleotide
  Antisense strand to SEQ ID NO: 1392714
ucaucucuggaaagagcug

SEQ ID NO: 1392716 - RNA, 19 nt, Artificial Sequence
  Description of Artificial Sequence: Synthetic oligonucleotide
  Sense strand starting at position 1047 of SEQ ID NO: 1243069
ggcuguguggccugacaag

SEQ ID NO: 1392717 - RNA, 19 nt, Artificial Sequence
  Description of Artificial Sequence: Synthetic oligonucleotide
  Antisense strand to SEQ ID NO: 1392716
cuugucaggccacacagcc

SEQ ID NO: 1392718 - RNA, 19 nt, Artificial Sequence
  Description of Artificial Sequence: Synthetic oligonucleotide
  Sense strand starting at position 1140 of SEQ ID NO: 1243069
aggguaagacuucgggacu

SEQ ID NO: 1392719 - RNA, 19 nt, Artificial Sequence
  Description of Artificial Sequence: Synthetic oligonucleotide
  Antisense strand to SEQ ID NO: 1392718
agucccgaagucuuacccu

SEQ ID NO: 1392720 - RNA, 19 nt, Artificial Sequence
  Description of Artificial Sequence: Synthetic oligonucleotide
  Sense strand starting at position 2112 of SEQ ID NO: 1243069
cccggaacuuuccgccaau

SEQ ID NO: 1392721 - RNA, 19 nt, Artificial Sequence
  Description of Artificial Sequence: Synthetic oligonucleotide
  Antisense strand to SEQ ID NO: 1392720
auuggcggaaaguuccggg

SEQ ID NO: 1392722 - RNA, 19 nt, Artificial Sequence
  Description of Artificial Sequence: Synthetic oligonucleotide
  Sense strand starting at position 2113 of SEQ ID NO: 1243069
ccggaacuuuccgccaaua

SEQ ID NO: 1392723 - RNA, 19 nt, Artificial Sequence
  Description of Artificial Sequence: Synthetic oligonucleotide
  Antisense strand to SEQ ID NO: 1392722
uauuggcggaaaguuccgg

SEQ ID NO: 1392724 - RNA, 19 nt, Artificial Sequence
  Description of Artificial Sequence: Synthetic oligonucleotide
  Sense strand starting at position 2182 of SEQ ID NO: 1243069
ggacuaucccacgguccaa

SEQ ID NO: 1392725 - RNA, 19 nt, Artificial Sequence
  Description of Artificial Sequence: Synthetic oligonucleotide
  Antisense strand to SEQ ID NO: 1392724
uuggaccgugggauagucc

SEQ ID NO: 1392726 - RNA, 19 nt, Artificial Sequence
  Description of Artificial Sequence: Synthetic oligonucleotide
  Sense strand starting at position 2306 of SEQ ID NO: 1243069
gcgcugucccgaucggagu

SEQ ID NO: 1392727 - RNA, 19 nt, Artificial Sequence
  Description of Artificial Sequence: Synthetic oligonucleotide
  Antisense strand to SEQ ID NO: 1392726
acuccgaucgggacagcgc

SEQ ID NO: 1392728 - RNA, 19 nt, Artificial Sequence
  Description of Artificial Sequence: Synthetic oligonucleotide
  Sense strand starting at position 2919 of SEQ ID NO: 1243069
cugaguuggccugauggga

SEQ ID NO: 1392729 - RNA, 19 nt, Artificial Sequence
  Description of Artificial Sequence: Synthetic oligonucleotide
  Antisense strand to SEQ ID NO: 1392728
ucccaucaggccaacucag

SEQ ID NO: 1392730 - RNA, 19 nt, Artificial Sequence
  Description of Artificial Sequence: Synthetic oligonucleotide
  Sense strand starting at position 3177 of SEQ ID NO: 1243069
gacugugcagccugaagau

SEQ ID NO: 1392731 - RNA, 19 nt, Artificial Sequence
  Description of Artificial Sequence: Synthetic oligonucleotide
  Antisense strand to SEQ ID NO: 1392730
aucuucaggcugcacaguc

SEQ ID NO: 1392732 - RNA, 19 nt, Artificial Sequence
  Description of Artificial Sequence: Synthetic oligonucleotide
  Sense strand starting at position 3186 of SEQ ID NO: 1243069
gccugaagaugugaacauu

SEQ ID NO: 1392733 - RNA, 19 nt, Artificial Sequence
  Description of Artificial Sequence: Synthetic oligonucleotide
  Antisense strand to SEQ ID NO: 1392732
aauguucacaucuucaggc

SEQ ID NO: 1392734 - RNA, 19 nt, Artificial Sequence
  Description of Artificial Sequence: Synthetic oligonucleotide
  Sense strand starting at position 3239 of SEQ ID NO: 1243069
gcucgaaacucauggugga

SEQ ID NO: 1392735 - RNA, 19 nt, Artificial Sequence
  Description of Artificial Sequence: Synthetic oligonucleotide
  Antisense strand to SEQ ID NO: 1392734
uccaccaugaguuucgagc

SEQ ID NO: 1392736 - RNA, 19 nt, Artificial Sequence
  Description of Artificial Sequence: Synthetic oligonucleotide
  Sense strand starting at position 3262 of SEQ ID NO: 1243069
ugaguucaccaguggcagu

SEQ ID NO: 1392737 - RNA, 19 nt, Artificial Sequence
  Description of Artificial Sequence: Synthetic oligonucleotide
  Antisense strand to SEQ ID NO: 1392736
acugccacuggugaacuca

SEQ ID NO: 1392738 - RNA, 19 nt, Artificial Sequence
  Description of Artificial Sequence: Synthetic oligonucleotide
  Sense strand starting at position 3431 of SEQ ID NO: 1243069
agaaguagccaucacaauc

SEQ ID NO: 1392739 - RNA, 19 nt, Artificial Sequence
  Description of Artificial Sequence: Synthetic oligonucleotide
  Antisense strand to SEQ ID NO: 1392738
gauugugauggcuacuucu

SEQ ID NO: 1392740 - RNA, 19 nt, Artificial Sequence
  Description of Artificial Sequence: Synthetic oligonucleotide
  Sense strand starting at position 18 of SEQ ID NO: 1243070
uaaagaaagucugugaauc

SEQ ID NO: 1392741 - RNA, 19 nt, Artificial Sequence
  Description of Artificial Sequence: Synthetic oligonucleotide
  Antisense strand to SEQ ID NO: 1392740
gauucacagacuuucuuua

SEQ ID NO: 1392742 - RNA, 19 nt, Artificial Sequence
  Description of Artificial Sequence: Synthetic oligonucleotide
  Sense strand starting at position 19 of SEQ ID NO: 1243070
aaagaaagucugugaaucu

SEQ ID NO: 1392743 - RNA, 19 nt, Artificial Sequence
  Description of Artificial Sequence: Synthetic oligonucleotide
  Antisense strand to SEQ ID NO: 1392742
agauucacagacuuucuuu

SEQ ID NO: 1392744 - RNA, 19 nt, Artificial Sequence
  Description of Artificial Sequence: Synthetic oligonucleotide
  Sense strand starting at position 36 of SEQ ID NO: 1243070
cuggcaaaucaaugcagaa

SEQ ID NO: 1392745 - RNA, 19 nt, Artificial Sequence
  Description of Artificial Sequence: Synthetic oligonucleotide
  Antisense strand to SEQ ID NO: 1392744
uucugcauugauuugccag

SEQ ID NO: 1392746 - RNA, 19 nt, Artificial Sequence
  Description of Artificial Sequence: Synthetic oligonucleotide
  Sense strand starting at position 58 of SEQ ID NO: 1243070
cauggugucauugaaagug

SEQ ID NO: 1392747 - RNA, 19 nt, Artificial Sequence
  Description of Artificial Sequence: Synthetic oligonucleotide
  Antisense strand to SEQ ID NO: 1392746
cacuuucaaugacaccaug

SEQ ID NO: 1392748 - RNA, 19 nt, Artificial Sequence
  Description of Artificial Sequence: Synthetic oligonucleotide
  Sense strand starting at position 63 of SEQ ID NO: 1243070
ugucauugaaagugaugga

SEQ ID NO: 1392749 - RNA, 19 nt, Artificial Sequence
  Description of Artificial Sequence: Synthetic oligonucleotide
  Antisense strand to SEQ ID NO: 1392748
uccaucacuuucaaugaca

SEQ ID NO: 1392750 - RNA, 19 nt, Artificial Sequence
  Description of Artificial Sequence: Synthetic oligonucleotide
  Sense strand starting at position 110 of SEQ ID NO: 1243070
aaucaaucggacuggcaaa

SEQ ID NO: 1392751 - RNA, 19 nt, Artificial Sequence
  Description of Artificial Sequence: Synthetic oligonucleotide
  Antisense strand to SEQ ID NO: 1392750
uuugccaguccgauugauu

SEQ ID NO: 1392752 - RNA, 19 nt, Artificial Sequence
  Description of Artificial Sequence: Synthetic oligonucleotide
  Sense strand starting at position 442 of SEQ ID NO: 1243070
aagugauccuaccucagag

SEQ ID NO: 1392753 - RNA, 19 nt, Artificial Sequence
  Description of Artificial Sequence: Synthetic oligonucleotide
  Antisense strand to SEQ ID NO: 1392752
cucugagguaggaucacuu

SEQ ID NO: 1392754 - RNA, 19 nt, Artificial Sequence
  Description of Artificial Sequence: Synthetic oligonucleotide
  Sense strand starting at position 807 of SEQ ID NO: 1243070
caggcuucccaagaaaugu

SEQ ID NO: 1392755 - RNA, 19 nt, Artificial Sequence
  Description of Artificial Sequence: Synthetic oligonucleotide
  Antisense strand to SEQ ID NO: 1392754
acauuucuugggaagccug

SEQ ID NO: 1392756 - RNA, 19 nt, Artificial Sequence
  Description of Artificial Sequence: Synthetic oligonucleotide
  Sense strand starting at position 836 of SEQ ID NO: 1243070
guaaguuccagaugaagga

SEQ ID NO: 1392757 - RNA, 19 nt, Artificial Sequence
  Description of Artificial Sequence: Synthetic oligonucleotide
  Antisense strand to SEQ ID NO: 1392756
uccuucaucuggaacuuac

SEQ ID NO: 1392758 - RNA, 19 nt, Artificial Sequence
  Description of Artificial Sequence: Synthetic oligonucleotide
  Sense strand starting at position 866 of SEQ ID NO: 1243070
aguggcuuucccuagaauc

SEQ ID NO: 1392759 - RNA, 19 nt, Artificial Sequence
  Description of Artificial Sequence: Synthetic oligonucleotide
  Antisense strand to SEQ ID NO: 1392758
gauucuagggaaagccacu

SEQ ID NO: 1392760 - RNA, 19 nt, Artificial Sequence
  Description of Artificial Sequence: Synthetic oligonucleotide
  Sense strand starting at position 868 of SEQ ID NO: 1243070
uggcuuucccuagaaucag

SEQ ID NO: 1392761 - RNA, 19 nt, Artificial Sequence
  Description of Artificial Sequence: Synthetic oligonucleotide
  Antisense strand to SEQ ID NO: 1392760
cugauucuagggaaagcca

SEQ ID NO: 1392762 - RNA, 19 nt, Artificial Sequence
  Description of Artificial Sequence: Synthetic oligonucleotide
  Sense strand starting at position 879 of SEQ ID NO: 1243070
agaaucagcuaucugggaa

SEQ ID NO: 1392763 - RNA, 19 nt, Artificial Sequence
  Description of Artificial Sequence: Synthetic oligonucleotide
  Antisense strand to SEQ ID NO: 1392762
uucccagauagcugauucu

SEQ ID NO: 1392764 - RNA, 19 nt, Artificial Sequence
  Description of Artificial Sequence: Synthetic oligonucleotide
  Sense strand starting at position 882 of SEQ ID NO: 1243070
aucagcuaucugggaauaa

SEQ ID NO: 1392765 - RNA, 19 nt, Artificial Sequence
  Description of Artificial Sequence: Synthetic oligonucleotide
  Antisense strand to SEQ ID NO: 1392764
uuauucccagauagcugau

SEQ ID NO: 1392766 - RNA, 19 nt, Artificial Sequence
  Description of Artificial Sequence: Synthetic oligonucleotide
  Sense strand starting at position 971 of SEQ ID NO: 1243070
gggcuuacgacauauagua

SEQ ID NO: 1392767 - RNA, 19 nt, Artificial Sequence
  Description of Artificial Sequence: Synthetic oligonucleotide
  Antisense strand to SEQ ID NO: 1392766
uacuauaugucguaagccc

SEQ ID NO: 1392768 - RNA, 19 nt, Artificial Sequence
  Description of Artificial Sequence: Synthetic oligonucleotide
  Sense strand starting at position 1079 of SEQ ID NO: 1243070
caguuucucuagucaggaa

SEQ ID NO: 1392769 - RNA, 19 nt, Artificial Sequence
  Description of Artificial Sequence: Synthetic oligonucleotide
  Antisense strand to SEQ ID NO: 1392768
uuccugacuagagaaacug

SEQ ID NO: 1392770 - RNA, 19 nt, Artificial Sequence
  Description of Artificial Sequence: Synthetic oligonucleotide
  Sense strand starting at position 1248 of SEQ ID NO: 1243070
cguguucuuggcucuucua

SEQ ID NO: 1392771 - RNA, 19 nt, Artificial Sequence
  Description of Artificial Sequence: Synthetic oligonucleotide
  Antisense strand to SEQ ID NO: 1392770
uagaagagccaagaacacg

SEQ ID NO: 1392772 - RNA, 19 nt, Artificial Sequence
  Description of Artificial Sequence: Synthetic oligonucleotide
  Sense strand starting at position 1352 of SEQ ID NO: 1243070
gaucacgguguugaaauaa

SEQ ID NO: 1392773 - RNA, 19 nt, Artificial Sequence
  Description of Artificial Sequence: Synthetic oligonucleotide
  Antisense strand to SEQ ID NO: 1392772
uuauuucaacaccgugauc

SEQ ID NO: 1392774 - RNA, 19 nt, Artificial Sequence
  Description of Artificial Sequence: Synthetic oligonucleotide
  Sense strand starting at position 1420 of SEQ ID NO: 1243070
auaauuuggcgcgauccca

SEQ ID NO: 1392775 - RNA, 19 nt, Artificial Sequence
  Description of Artificial Sequence: Synthetic oligonucleotide
  Antisense strand to SEQ ID NO: 1392774
ugggaucgcgccaaauuau

SEQ ID NO: 1392776 - RNA, 19 nt, Artificial Sequence
  Description of Artificial Sequence: Synthetic oligonucleotide
  Sense strand starting at position 1578 of SEQ ID NO: 1243070
ugucuugucgccuuccuga

SEQ ID NO: 1392777 - RNA, 19 nt, Artificial Sequence
  Description of Artificial Sequence: Synthetic oligonucleotide
  Antisense strand to SEQ ID NO: 1392776
ucaggaaggcgacaagaca

SEQ ID NO: 1392778 - RNA, 19 nt, Artificial Sequence
  Description of Artificial Sequence: Synthetic oligonucleotide
  Sense strand starting at position 1601 of SEQ ID NO: 1243070
acccuuguggguuaacuau

SEQ ID NO: 1392779 - RNA, 19 nt, Artificial Sequence
  Description of Artificial Sequence: Synthetic oligonucleotide
  Antisense strand to SEQ ID NO: 1392778
auaguuaacccacaagggu

SEQ ID NO: 1392780 - RNA, 19 nt, Artificial Sequence
  Description of Artificial Sequence: Synthetic oligonucleotide
  Sense strand starting at position 1757 of SEQ ID NO: 1243070
ggaaacugacgcuaagagu

SEQ ID NO: 1392781 - RNA, 19 nt, Artificial Sequence
  Description of Artificial Sequence: Synthetic oligonucleotide
  Antisense strand to SEQ ID NO: 1392780
acucuuagcgucaguuucc

SEQ ID NO: 1392782 - RNA, 19 nt, Artificial Sequence
  Description of Artificial Sequence: Synthetic oligonucleotide
  Sense strand starting at position 2199 of SEQ ID NO: 1243070
ugguaaagccuggauucga

SEQ ID NO: 1392783 - RNA, 19 nt, Artificial Sequence
  Description of Artificial Sequence: Synthetic oligonucleotide
  Antisense strand to SEQ ID NO: 1392782
ucgaauccaggcuuuacca

SEQ ID NO: 1392784 - RNA, 19 nt, Artificial Sequence
  Description of Artificial Sequence: Synthetic oligonucleotide
  Sense strand starting at position 2241 of SEQ ID NO: 1243070
ggugcuauuuaaccagcau

SEQ ID NO: 1392785 - RNA, 19 nt, Artificial Sequence
  Description of Artificial Sequence: Synthetic oligonucleotide
  Antisense strand to SEQ ID NO: 1392784
augcugguuaaauagcacc

SEQ ID NO: 1392786 - RNA, 19 nt, Artificial Sequence
  Description of Artificial Sequence: Synthetic oligonucleotide
  Sense strand starting at position 2268 of SEQ ID NO: 1243070
auuuauuaucacggguguu

SEQ ID NO: 1392787 - RNA, 19 nt, Artificial Sequence
  Description of Artificial Sequence: Synthetic oligonucleotide
  Antisense strand to SEQ ID NO: 1392786
aacacccgugauaauaaau

SEQ ID NO: 1392788 - RNA, 19 nt, Artificial Sequence
  Description of Artificial Sequence: Synthetic oligonucleotide
  Sense strand starting at position 2300 of SEQ ID NO: 1243070
cucuuaguacucguuuguu

SEQ ID NO: 1392789 - RNA, 19 nt, Artificial Sequence
  Description of Artificial Sequence: Synthetic oligonucleotide
  Antisense strand to SEQ ID NO: 1392788
aacaaacgaguacuaagag

SEQ ID NO: 1392790 - RNA, 19 nt, Artificial Sequence
  Description of Artificial Sequence: Synthetic oligonucleotide
  Sense strand starting at position 2613 of SEQ ID NO: 1243070
auuauuaauaggugguagu

SEQ ID NO: 1392791 - RNA, 19 nt, Artificial Sequence
  Description of Artificial Sequence: Synthetic oligonucleotide
  Antisense strand to SEQ ID NO: 1392790
acuaccaccuauuaauaau

SEQ ID NO: 1392792 - RNA, 19 nt, Artificial Sequence
  Description of Artificial Sequence: Synthetic oligonucleotide
  Sense strand starting at position 2645 of SEQ ID NO: 1243070
gguagugauuucguuaauu

SEQ ID NO: 1392793 - RNA, 19 nt, Artificial Sequence
  Description of Artificial Sequence: Synthetic oligonucleotide
  Antisense strand to SEQ ID NO: 1392792
aauuaacgaaaucacuacc

SEQ ID NO: 1392794 - RNA, 19 nt, Artificial Sequence
  Description of Artificial Sequence: Synthetic oligonucleotide
  Sense strand starting at position 2650 of SEQ ID NO: 1243070
ugauuucguuaauucguau

SEQ ID NO: 1392795 - RNA, 19 nt, Artificial Sequence
  Description of Artificial Sequence: Synthetic oligonucleotide
  Antisense strand to SEQ ID NO: 1392794
auacgaauuaacgaaauca

SEQ ID NO: 1392796 - RNA, 19 nt, Artificial Sequence
  Description of Artificial Sequence: Synthetic oligonucleotide
  Sense strand starting at position 2990 of SEQ ID NO: 1243070
auagguagccaggguuaga

SEQ ID NO: 1392797 - RNA, 19 nt, Artificial Sequence
  Description of Artificial Sequence: Synthetic oligonucleotide
  Antisense strand to SEQ ID NO: 1392796
ucuaacccuggcuaccuau

SEQ ID NO: 1392798 - RNA, 19 nt, Artificial Sequence
  Description of Artificial Sequence: Synthetic oligonucleotide
  Sense strand starting at position 3056 of SEQ ID NO: 1243070
gggagcugccagggauaua

SEQ ID NO: 1392799 - RNA, 19 nt, Artificial Sequence
  Description of Artificial Sequence: Synthetic oligonucleotide
  Antisense strand to SEQ ID NO: 1392798
uauaucccuggcagcuccc

SEQ ID NO: 1392800 - RNA, 19 nt, Artificial Sequence
  Description of Artificial Sequence: Synthetic oligonucleotide
  Sense strand starting at position 3129 of SEQ ID NO: 1243070
ucagacaugucagugaaca

SEQ ID NO: 1392801 - RNA, 19 nt, Artificial Sequence
  Description of Artificial Sequence: Synthetic oligonucleotide
  Antisense strand to SEQ ID NO: 1392800
uguucacugacaugucuga

SEQ ID NO: 1392802 - RNA, 19 nt, Artificial Sequence
  Description of Artificial Sequence: Synthetic oligonucleotide
  Sense strand starting at position 3130 of SEQ ID NO: 1243070
cagacaugucagugaacau

SEQ ID NO: 1392803 - RNA, 19 nt, Artificial Sequence
  Description of Artificial Sequence: Synthetic oligonucleotide
  Antisense strand to SEQ ID NO: 1392802
auguucacugacaugucug

SEQ ID NO: 1392804 - RNA, 19 nt, Artificial Sequence
  Description of Artificial Sequence: Synthetic oligonucleotide
  Sense strand starting at position 3171 of SEQ ID NO: 1243070
auguaaaguccacauaugu

SEQ ID NO: 1392805 - RNA, 19 nt, Artificial Sequence
  Description of Artificial Sequence: Synthetic oligonucleotide
  Antisense strand to SEQ ID NO: 1392804
acauauguggacuuuacau

SEQ ID NO: 1392806 - RNA, 19 nt, Artificial Sequence
  Description of Artificial Sequence: Synthetic oligonucleotide
  Sense strand starting at position 3348 of SEQ ID NO: 1243070
gugacuaagcgacacaaau

SEQ ID NO: 1392807 - RNA, 19 nt, Artificial Sequence
  Description of Artificial Sequence: Synthetic oligonucleotide
  Antisense strand to SEQ ID NO: 1392806
auuugugucgcuuagucac

SEQ ID NO: 1392808 - RNA, 19 nt, Artificial Sequence
  Description of Artificial Sequence: Synthetic oligonucleotide
  Sense strand starting at position 3399 of SEQ ID NO: 1243070
agauuauguuuccugaaau

SEQ ID NO: 1392809 - RNA, 19 nt, Artificial Sequence
  Description of Artificial Sequence: Synthetic oligonucleotide
  Antisense strand to SEQ ID NO: 1392808
auuucaggaaacauaaucu

SEQ ID NO: 1392810 - RNA, 19 nt, Artificial Sequence
  Description of Artificial Sequence: Synthetic oligonucleotide
  Sense strand starting at position 3739 of SEQ ID NO: 1243070
agccaucuaugaccaagaa

SEQ ID NO: 1392811 - RNA, 19 nt, Artificial Sequence
  Description of Artificial Sequence: Synthetic oligonucleotide
  Antisense strand to SEQ ID NO: 1392810
uucuuggucauagauggcu

SEQ ID NO: 1392812 - RNA, 19 nt, Artificial Sequence
  Description of Artificial Sequence: Synthetic oligonucleotide
  Sense strand starting at position 3812 of SEQ ID NO: 1243070
augagaaaugaauguguuu

SEQ ID NO: 1392813 - RNA, 19 nt, Artificial Sequence
  Description of Artificial Sequence: Synthetic oligonucleotide
  Antisense strand to SEQ ID NO: 1392812
aaacacauucauuucucau

SEQ ID NO: 1392814 - RNA, 19 nt, Artificial Sequence
  Description of Artificial Sequence: Synthetic oligonucleotide
  Sense strand starting at position 3817 of SEQ ID NO: 1243070
aaaugaauguguuuaucag

SEQ ID NO: 1392815 - RNA, 19 nt, Artificial Sequence
  Description of Artificial Sequence: Synthetic oligonucleotide
  Antisense strand to SEQ ID NO: 1392814
cugauaaacacauucauuu

SEQ ID NO: 1392816 - RNA, 19 nt, Artificial Sequence
  Description of Artificial Sequence: Synthetic oligonucleotide
  Sense strand starting at position 3927 of SEQ ID NO: 1243070
aguaauaggucaccaggua

SEQ ID NO: 1392817 - RNA, 19 nt, Artificial Sequence
  Description of Artificial Sequence: Synthetic oligonucleotide
  Antisense strand to SEQ ID NO: 1392816
uaccuggugaccuauuacu

SEQ ID NO: 1392818 - RNA, 19 nt, Artificial Sequence
  Description of Artificial Sequence: Synthetic oligonucleotide
  Sense strand starting at position 3928 of SEQ ID NO: 1243070
guaauaggucaccagguaa

SEQ ID NO: 1392819 - RNA, 19 nt, Artificial Sequence
  Description of Artificial Sequence: Synthetic oligonucleotide
  Antisense strand to SEQ ID NO: 1392818
uuaccuggugaccuauuac

SEQ ID NO: 1392820 - RNA, 19 nt, Artificial Sequence
  Description of Artificial Sequence: Synthetic oligonucleotide
  Sense strand starting at position 147 of SEQ ID NO: 1243071
cccauuguuccauauguga

SEQ ID NO: 1392821 - RNA, 19 nt, Artificial Sequence
  Description of Artificial Sequence: Synthetic oligonucleotide
  Antisense strand to SEQ ID NO: 1392820
ucacauauggaacaauggg

SEQ ID NO: 1392822 - RNA, 19 nt, Artificial Sequence
  Description of Artificial Sequence: Synthetic oligonucleotide
  Sense strand starting at position 150 of SEQ ID NO: 1243071
auuguuccauaugugacau

SEQ ID NO: 1392823 - RNA, 19 nt, Artificial Sequence
  Description of Artificial Sequence: Synthetic oligonucleotide
  Antisense strand to SEQ ID NO: 1392822
augucacauauggaacaau

SEQ ID NO: 1392824 - RNA, 19 nt, Artificial Sequence
  Description of Artificial Sequence: Synthetic oligonucleotide
  Sense strand starting at position 202 of SEQ ID NO: 1243071
uugaguugucucuauaaga

SEQ ID NO: 1392825 - RNA, 19 nt, Artificial Sequence
  Description of Artificial Sequence: Synthetic oligonucleotide
  Antisense strand to SEQ ID NO: 1392824
ucuuauagagacaacucaa

SEQ ID NO: 1392826 - RNA, 19 nt, Artificial Sequence
  Description of Artificial Sequence: Synthetic oligonucleotide
  Sense strand starting at position 220 of SEQ ID NO: 1243071
aaugaacuaguguaagcaa

SEQ ID NO: 1392827 - RNA, 19 nt, Artificial Sequence
  Description of Artificial Sequence: Synthetic oligonucleotide
  Antisense strand to SEQ ID NO: 1392826
uugcuuacacuaguucauu

SEQ ID NO: 1392828 - RNA, 19 nt, Artificial Sequence
  Description of Artificial Sequence: Synthetic oligonucleotide
  Sense strand starting at position 223 of SEQ ID NO: 1243071
gaacuaguguaagcaaaua

SEQ ID NO: 1392829 - RNA, 19 nt, Artificial Sequence
  Description of Artificial Sequence: Synthetic oligonucleotide
  Antisense strand to SEQ ID NO: 1392828
uauuugcuuacacuaguuc

SEQ ID NO: 1392830 - RNA, 19 nt, Artificial Sequence
  Description of Artificial Sequence: Synthetic oligonucleotide
  Sense strand starting at position 370 of SEQ ID NO: 1243071
acagaaauuuaggauuccu

SEQ ID NO: 1392831 - RNA, 19 nt, Artificial Sequence
  Description of Artificial Sequence: Synthetic oligonucleotide
  Antisense strand to SEQ ID NO: 1392830
aggaauccuaaauuucugu

SEQ ID NO: 1392832 - RNA, 19 nt, Artificial Sequence
  Description of Artificial Sequence: Synthetic oligonucleotide
  Sense strand starting at position 495 of SEQ ID NO: 1243071
augaaaucaaccugggugu

SEQ ID NO: 1392833 - RNA, 19 nt, Artificial Sequence
  Description of Artificial Sequence: Synthetic oligonucleotide
  Antisense strand to SEQ ID NO: 1392832
acacccagguugauuucau

SEQ ID NO: 1392834 - RNA, 19 nt, Artificial Sequence
  Description of Artificial Sequence: Synthetic oligonucleotide
  Sense strand starting at position 496 of SEQ ID NO: 1243071
ugaaaucaaccugggugua

SEQ ID NO: 1392835 - RNA, 19 nt, Artificial Sequence
  Description of Artificial Sequence: Synthetic oligonucleotide
  Antisense strand to SEQ ID NO: 1392834
uacacccagguugauuuca

SEQ ID NO: 1392836 - RNA, 19 nt, Artificial Sequence
  Description of Artificial Sequence: Synthetic oligonucleotide
  Sense strand starting at position 497 of SEQ ID NO: 1243071
gaaaucaaccuggguguaa

SEQ ID NO: 1392837 - RNA, 19 nt, Artificial Sequence
  Description of Artificial Sequence: Synthetic oligonucleotide
  Antisense strand to SEQ ID NO: 1392836
uuacacccagguugauuuc

SEQ ID NO: 1392838 - RNA, 19 nt, Artificial Sequence
  Description of Artificial Sequence: Synthetic oligonucleotide
  Sense strand starting at position 498 of SEQ ID NO: 1243071
aaaucaaccuggguguaaa

SEQ ID NO: 1392839 - RNA, 19 nt, Artificial Sequence
  Description of Artificial Sequence: Synthetic oligonucleotide
  Antisense strand to SEQ ID NO: 1392838
uuuacacccagguugauuu

SEQ ID NO: 1392840 - RNA, 19 nt, Artificial Sequence
  Description of Artificial Sequence: Synthetic oligonucleotide
  Sense strand starting at position 499 of SEQ ID NO: 1243071
aaucaaccuggguguaaau

SEQ ID NO: 1392841 - RNA, 19 nt, Artificial Sequence
  Description of Artificial Sequence: Synthetic oligonucleotide
  Antisense strand to SEQ ID NO: 1392840
auuuacacccagguugauu

SEQ ID NO: 1392842 - RNA, 19 nt, Artificial Sequence
  Description of Artificial Sequence: Synthetic oligonucleotide
  Sense strand starting at position 508 of SEQ ID NO: 1243071
ggguguaaauucucugaac

SEQ ID NO: 1392843 - RNA, 19 nt, Artificial Sequence
  Description of Artificial Sequence: Synthetic oligonucleotide
  Antisense strand to SEQ ID NO: 1392842
guucagagaauuuacaccc

SEQ ID NO: 1392844 - RNA, 19 nt, Artificial Sequence
  Description of Artificial Sequence: Synthetic oligonucleotide
  Sense strand starting at position 509 of SEQ ID NO: 1243071
gguguaaauucucugaaca

SEQ ID NO: 1392845 - RNA, 19 nt, Artificial Sequence
  Description of Artificial Sequence: Synthetic oligonucleotide
  Antisense strand to SEQ ID NO: 1392844
uguucagagaauuuacacc

SEQ ID NO: 1392846 - RNA, 19 nt, Artificial Sequence
  Description of Artificial Sequence: Synthetic oligonucleotide
  Sense strand starting at position 510 of SEQ ID NO: 1243071
guguaaauucucugaacac

SEQ ID NO: 1392847 - RNA, 19 nt, Artificial Sequence
  Description of Artificial Sequence: Synthetic oligonucleotide
  Antisense strand to SEQ ID NO: 1392846
guguucagagaauuuacac

SEQ ID NO: 1392848 - RNA, 19 nt, Artificial Sequence
  Description of Artificial Sequence: Synthetic oligonucleotide
  Sense strand starting at position 715 of SEQ ID NO: 1243071
cuauguuaaggucauauac

SEQ ID NO: 1392849 - RNA, 19 nt, Artificial Sequence
  Description of Artificial Sequence: Synthetic oligonucleotide
  Antisense strand to SEQ ID NO: 1392848
guauaugaccuuaacauag

SEQ ID NO: 1392850 - RNA, 19 nt, Artificial Sequence
  Description of Artificial Sequence: Synthetic oligonucleotide
  Sense strand starting at position 754 of SEQ ID NO: 1243071
acaguuaaccuguacacgu

SEQ ID NO: 1392851 - RNA, 19 nt, Artificial Sequence
  Description of Artificial Sequence: Synthetic oligonucleotide
  Antisense strand to SEQ ID NO: 1392850
acguguacagguuaacugu

SEQ ID NO: 1392852 - RNA, 19 nt, Artificial Sequence
  Description of Artificial Sequence: Synthetic oligonucleotide
  Sense strand starting at position 829 of SEQ ID NO: 1243071
gcucacgaugcauaacuaa

SEQ ID NO: 1392853 - RNA, 19 nt, Artificial Sequence
  Description of Artificial Sequence: Synthetic oligonucleotide
  Antisense strand to SEQ ID NO: 1392852
uuaguuaugcaucgugagc

SEQ ID NO: 1392854 - RNA, 19 nt, Artificial Sequence
  Description of Artificial Sequence: Synthetic oligonucleotide
  Sense strand starting at position 960 of SEQ ID NO: 1243071
agaucucugcuagguagga

SEQ ID NO: 1392855 - RNA, 19 nt, Artificial Sequence
  Description of Artificial Sequence: Synthetic oligonucleotide
  Antisense strand to SEQ ID NO: 1392854
uccuaccuagcagagaucu

SEQ ID NO: 1392856 - RNA, 19 nt, Artificial Sequence
  Description of Artificial Sequence: Synthetic oligonucleotide
  Sense strand starting at position 980 of SEQ ID NO: 1243071
gggaagguuccguaggaug

SEQ ID NO: 1392857 - RNA, 19 nt, Artificial Sequence
  Description of Artificial Sequence: Synthetic oligonucleotide
  Antisense strand to SEQ ID NO: 1392856
cauccuacggaaccuuccc

SEQ ID NO: 1392858 - RNA, 19 nt, Artificial Sequence
  Description of Artificial Sequence: Synthetic oligonucleotide
  Sense strand starting at position 1029 of SEQ ID NO: 1243071
agugcuuagggagaaaugu

SEQ ID NO: 1392859 - RNA, 19 nt, Artificial Sequence
  Description of Artificial Sequence: Synthetic oligonucleotide
  Antisense strand to SEQ ID NO: 1392858
acauuucucccuaagcacu

SEQ ID NO: 1392860 - RNA, 19 nt, Artificial Sequence
  Description of Artificial Sequence: Synthetic oligonucleotide
  Sense strand starting at position 1052 of SEQ ID NO: 1243071
ccaaucagccuggagaguu

SEQ ID NO: 1392861 - RNA, 19 nt, Artificial Sequence
  Description of Artificial Sequence: Synthetic oligonucleotide
  Antisense strand to SEQ ID NO: 1392860
aacucuccaggcugauugg

SEQ ID NO: 1392862 - RNA, 19 nt, Artificial Sequence
  Description of Artificial Sequence: Synthetic oligonucleotide
  Sense strand starting at position 1068 of SEQ ID NO: 1243071
guucaauggcuugcgaugu

SEQ ID NO: 1392863 - RNA, 19 nt, Artificial Sequence
  Description of Artificial Sequence: Synthetic oligonucleotide
  Antisense strand to SEQ ID NO: 1392862
acaucgcaagccauugaac

SEQ ID NO: 1392864 - RNA, 19 nt, Artificial Sequence
  Description of Artificial Sequence: Synthetic oligonucleotide
  Sense strand starting at position 2110 of SEQ ID NO: 1243071
ugccuuggccucuaguaaa

SEQ ID NO: 1392865 - RNA, 19 nt, Artificial Sequence
  Description of Artificial Sequence: Synthetic oligonucleotide
  Antisense strand to SEQ ID NO: 1392864
uuuacuagaggccaaggca

SEQ ID NO: 1392866 - RNA, 19 nt, Artificial Sequence
  Description of Artificial Sequence: Synthetic oligonucleotide
  Sense strand starting at position 2387 of SEQ ID NO: 1243071
agguucuucccggagacga

SEQ ID NO: 1392867 - RNA, 19 nt, Artificial Sequence
  Description of Artificial Sequence: Synthetic oligonucleotide
  Antisense strand to SEQ ID NO: 1392866
ucgucuccgggaagaaccu

SEQ ID NO: 1392868 - RNA, 19 nt, Artificial Sequence
  Description of Artificial Sequence: Synthetic oligonucleotide
  Sense strand starting at position 2389 of SEQ ID NO: 1243071
guucuucccggagacgaau

SEQ ID NO: 1392869 - RNA, 19 nt, Artificial Sequence
  Description of Artificial Sequence: Synthetic oligonucleotide
  Antisense strand to SEQ ID NO: 1392868
auucgucuccgggaagaac

SEQ ID NO: 1392870 - RNA, 19 nt, Artificial Sequence
  Description of Artificial Sequence: Synthetic oligonucleotide
  Sense strand starting at position 2538 of SEQ ID NO: 1243071
gcuggcuacguguuucuau

SEQ ID NO: 1392871 - RNA, 19 nt, Artificial Sequence
  Description of Artificial Sequence: Synthetic oligonucleotide
  Antisense strand to SEQ ID NO: 1392870
auagaaacacguagccagc

SEQ ID NO: 1392872 - RNA, 19 nt, Artificial Sequence
  Description of Artificial Sequence: Synthetic oligonucleotide
  Sense strand starting at position 2637 of SEQ ID NO: 1243071
ggcccugcccaagaaugaa

SEQ ID NO: 1392873 - RNA, 19 nt, Artificial Sequence
  Description of Artificial Sequence: Synthetic oligonucleotide
  Antisense strand to SEQ ID NO: 1392872
uucauucuugggcagggcc

SEQ ID NO: 1392874 - RNA, 19 nt, Artificial Sequence
  Description of Artificial Sequence: Synthetic oligonucleotide
  Sense strand starting at position 2681 of SEQ ID NO: 1243071
ccuuguuuccuugaauuag

SEQ ID NO: 1392875 - RNA, 19 nt, Artificial Sequence
  Description of Artificial Sequence: Synthetic oligonucleotide
  Antisense strand to SEQ ID NO: 1392874
cuaauucaaggaaacaagg

SEQ ID NO: 1392876 - RNA, 19 nt, Artificial Sequence
  Description of Artificial Sequence: Synthetic oligonucleotide
  Sense strand starting at position 2692 of SEQ ID NO: 1243071
ugaauuagcacagggaagu

SEQ ID NO: 1392877 - RNA, 19 nt, Artificial Sequence
  Description of Artificial Sequence: Synthetic oligonucleotide
  Antisense strand to SEQ ID NO: 1392876
acuucccugugcuaauuca

SEQ ID NO: 1392878 - RNA, 19 nt, Artificial Sequence
  Description of Artificial Sequence: Synthetic oligonucleotide
  Sense strand starting at position 2693 of SEQ ID NO: 1243071
gaauuagcacagggaaguu

SEQ ID NO: 1392879 - RNA, 19 nt, Artificial Sequence
  Description of Artificial Sequence: Synthetic oligonucleotide
  Antisense strand to SEQ ID NO: 1392878
aacuucccugugcuaauuc

SEQ ID NO: 1392880 - RNA, 19 nt, Artificial Sequence
  Description of Artificial Sequence: Synthetic oligonucleotide
  Sense strand starting at position 2751 of SEQ ID NO: 1243071
aguguuuaacccggauauu

SEQ ID NO: 1392881 - RNA, 19 nt, Artificial Sequence
  Description of Artificial Sequence: Synthetic oligonucleotide
  Antisense strand to SEQ ID NO: 1392880
aauauccggguuaaacacu

SEQ ID NO: 1392882 - RNA, 19 nt, Artificial Sequence
  Description of Artificial Sequence: Synthetic oligonucleotide
  Sense strand starting at position 2884 of SEQ ID NO: 1243071
guaacauuucgugggaguc

SEQ ID NO: 1392883 - RNA, 19 nt, Artificial Sequence
  Description of Artificial Sequence: Synthetic oligonucleotide
  Antisense strand to SEQ ID NO: 1392882
gacucccacgaaauguuac

SEQ ID NO: 1392884 - RNA, 19 nt, Artificial Sequence
  Description of Artificial Sequence: Synthetic oligonucleotide
  Sense strand starting at position 2896 of SEQ ID NO: 1243071
gggagucccuaacuuuaau

SEQ ID NO: 1392885 - RNA, 19 nt, Artificial Sequence
  Description of Artificial Sequence: Synthetic oligonucleotide
  Antisense strand to SEQ ID NO: 1392884
auuaaaguuagggacuccc

SEQ ID NO: 1392886 - RNA, 19 nt, Artificial Sequence
  Description of Artificial Sequence: Synthetic oligonucleotide
  Sense strand starting at position 2918 of SEQ ID NO: 1243071
uuccuagguuuguuuggaa

SEQ ID NO: 1392887 - RNA, 19 nt, Artificial Sequence
  Description of Artificial Sequence: Synthetic oligonucleotide
  Antisense strand to SEQ ID NO: 1392886
uuccaaacaaaccuaggaa

SEQ ID NO: 1392888 - RNA, 19 nt, Artificial Sequence
  Description of Artificial Sequence: Synthetic oligonucleotide
  Sense strand starting at position 2968 of SEQ ID NO: 1243071
uguaaaugugucuaaguuc

SEQ ID NO: 1392889 - RNA, 19 nt, Artificial Sequence
  Description of Artificial Sequence: Synthetic oligonucleotide
  Antisense strand to SEQ ID NO: 1392888
gaacuuagacacauuuaca

SEQ ID NO: 1392890 - RNA, 19 nt, Artificial Sequence
  Description of Artificial Sequence: Synthetic oligonucleotide
  Sense strand starting at position 3019 of SEQ ID NO: 1243071
agcguugcacaucagagau

SEQ ID NO: 1392891 - RNA, 19 nt, Artificial Sequence
  Description of Artificial Sequence: Synthetic oligonucleotide
  Antisense strand to SEQ ID NO: 1392890
aucucugaugugcaacgcu

SEQ ID NO: 1392892 - RNA, 19 nt, Artificial Sequence
  Description of Artificial Sequence: Synthetic oligonucleotide
  Sense strand starting at position 3465 of SEQ ID NO: 1243071
gauaucuuguugccuaaug

SEQ ID NO: 1392893 - RNA, 19 nt, Artificial Sequence
  Description of Artificial Sequence: Synthetic oligonucleotide
  Antisense strand to SEQ ID NO: 1392892
cauuaggcaacaagauauc

SEQ ID NO: 1392894 - RNA, 19 nt, Artificial Sequence
  Description of Artificial Sequence: Synthetic oligonucleotide
  Sense strand starting at position 3678 of SEQ ID NO: 1243071
cuguuuauuuacuaugaca

SEQ ID NO: 1392895 - RNA, 19 nt, Artificial Sequence
  Description of Artificial Sequence: Synthetic oligonucleotide
  Antisense strand to SEQ ID NO: 1392894
ugucauaguaaauaaacag

SEQ ID NO: 1392896 - RNA, 19 nt, Artificial Sequence
  Description of Artificial Sequence: Synthetic oligonucleotide
  Sense strand starting at position 3709 of SEQ ID NO: 1243071
gucucuuaggaucagugua

SEQ ID NO: 1392897 - RNA, 19 nt, Artificial Sequence
  Description of Artificial Sequence: Synthetic oligonucleotide
  Antisense strand to SEQ ID NO: 1392896
uacacugauccuaagagac

SEQ ID NO: 1392898 - RNA, 19 nt, Artificial Sequence
  Description of Artificial Sequence: Synthetic oligonucleotide
  Sense strand starting at position 3711 of SEQ ID NO: 1243071
cucuuaggaucaguguaac

SEQ ID NO: 1392899 - RNA, 19 nt, Artificial Sequence
  Description of Artificial Sequence: Synthetic oligonucleotide
  Antisense strand to SEQ ID NO: 1392898
guuacacugauccuaagag

SEQ ID NO: 1392900 - RNA, 19 nt, Artificial Sequence
  Description of Artificial Sequence: Synthetic oligonucleotide
  Sense strand starting at position 132 of SEQ ID NO: 1243072
agguucuucccggagacga

SEQ ID NO: 1392901 - RNA, 19 nt, Artificial Sequence
  Description of Artificial Sequence: Synthetic oligonucleotide
  Antisense strand to SEQ ID NO: 1392900
ucgucuccgggaagaaccu

SEQ ID NO: 1392902 - RNA, 19 nt, Artificial Sequence
  Description of Artificial Sequence: Synthetic oligonucleotide
  Sense strand starting at position 134 of SEQ ID NO: 1243072
guucuucccggagacgaau

SEQ ID NO: 1392903 - RNA, 19 nt, Artificial Sequence
  Description of Artificial Sequence: Synthetic oligonucleotide
  Antisense strand to SEQ ID NO: 1392902
auucgucuccgggaagaac

SEQ ID NO: 1392904 - RNA, 19 nt, Artificial Sequence
  Description of Artificial Sequence: Synthetic oligonucleotide
  Sense strand starting at position 283 of SEQ ID NO: 1243072
gcuggcuacguguuucuau

SEQ ID NO: 1392905 - RNA, 19 nt, Artificial Sequence
  Description of Artificial Sequence: Synthetic oligonucleotide
  Antisense strand to SEQ ID NO: 1392904
auagaaacacguagccagc

SEQ ID NO: 1392906 - RNA, 19 nt, Artificial Sequence
  Description of Artificial Sequence: Synthetic oligonucleotide
  Sense strand starting at position 382 of SEQ ID NO: 1243072
ggcccugcccaagaaugaa

SEQ ID NO: 1392907 - RNA, 19 nt, Artificial Sequence
  Description of Artificial Sequence: Synthetic oligonucleotide
  Antisense strand to SEQ ID NO: 1392906
uucauucuugggcagggcc

SEQ ID NO: 1392908 - RNA, 19 nt, Artificial Sequence
  Description of Artificial Sequence: Synthetic oligonucleotide
  Sense strand starting at position 426 of SEQ ID NO: 1243072
ccuuguuuccuugaauuag

SEQ ID NO: 1392909 - RNA, 19 nt, Artificial Sequence
  Description of Artificial Sequence: Synthetic oligonucleotide
  Antisense strand to SEQ ID NO: 1392908
cuaauucaaggaaacaagg

SEQ ID NO: 1392910 - RNA, 19 nt, Artificial Sequence
  Description of Artificial Sequence: Synthetic oligonucleotide
  Sense strand starting at position 437 of SEQ ID NO: 1243072
ugaauuagcacagggaagu

SEQ ID NO: 1392911 - RNA, 19 nt, Artificial Sequence
  Description of Artificial Sequence: Synthetic oligonucleotide
  Antisense strand to SEQ ID NO: 1392910
acuucccugugcuaauuca

SEQ ID NO: 1392912 - RNA, 19 nt, Artificial Sequence
  Description of Artificial Sequence: Synthetic oligonucleotide
  Sense strand starting at position 438 of SEQ ID NO: 1243072
gaauuagcacagggaaguu

SEQ ID NO: 1392913 - RNA, 19 nt, Artificial Sequence
  Description of Artificial Sequence: Synthetic oligonucleotide
  Antisense strand to SEQ ID NO: 1392912
aacuucccugugcuaauuc

SEQ ID NO: 1392914 - RNA, 19 nt, Artificial Sequence
  Description of Artificial Sequence: Synthetic oligonucleotide
  Sense strand starting at position 629 of SEQ ID NO: 1243072
guaacauuucgugggaguc

SEQ ID NO: 1392915 - RNA, 19 nt, Artificial Sequence
  Description of Artificial Sequence: Synthetic oligonucleotide
  Antisense strand to SEQ ID NO: 1392914
gacucccacgaaauguuac

SEQ ID NO: 1392916 - RNA, 19 nt, Artificial Sequence
  Description of Artificial Sequence: Synthetic oligonucleotide
  Sense strand starting at position 641 of SEQ ID NO: 1243072
gggagucccuaacuuuaau

SEQ ID NO: 1392917 - RNA, 19 nt, Artificial Sequence
  Description of Artificial Sequence: Synthetic oligonucleotide
  Antisense strand to SEQ ID NO: 1392916
auuaaaguuagggacuccc

SEQ ID NO: 1392918 - RNA, 19 nt, Artificial Sequence
  Description of Artificial Sequence: Synthetic oligonucleotide
  Sense strand starting at position 663 of SEQ ID NO: 1243072
uuccuagguuuguuuggaa

SEQ ID NO: 1392919 - RNA, 19 nt, Artificial Sequence
  Description of Artificial Sequence: Synthetic oligonucleotide
  Antisense strand to SEQ ID NO: 1392918
uuccaaacaaaccuaggaa

SEQ ID NO: 1392920 - RNA, 19 nt, Artificial Sequence
  Description of Artificial Sequence: Synthetic oligonucleotide
  Sense strand starting at position 713 of SEQ ID NO: 1243072
uguaaaugugucuaaguuc

SEQ ID NO: 1392921 - RNA, 19 nt, Artificial Sequence
  Description of Artificial Sequence: Synthetic oligonucleotide
  Antisense strand to SEQ ID NO: 1392920
gaacuuagacacauuuaca

SEQ ID NO: 1392922 - RNA, 19 nt, Artificial Sequence
  Description of Artificial Sequence: Synthetic oligonucleotide
  Sense strand starting at position 764 of SEQ ID NO: 1243072
agcguugcacaucagagau

SEQ ID NO: 1392923 - RNA, 19 nt, Artificial Sequence
  Description of Artificial Sequence: Synthetic oligonucleotide
  Antisense strand to SEQ ID NO: 1392922
aucucugaugugcaacgcu

SEQ ID NO: 1392924 - RNA, 19 nt, Artificial Sequence
  Description of Artificial Sequence: Synthetic oligonucleotide
  Sense strand starting at position 1454 of SEQ ID NO: 1243072
gucucuuaggaucagugua

SEQ ID NO: 1392925 - RNA, 19 nt, Artificial Sequence
  Description of Artificial Sequence: Synthetic oligonucleotide
  Antisense strand to SEQ ID NO: 1392924
uacacugauccuaagagac

SEQ ID NO: 1392926 - RNA, 19 nt, Artificial Sequence
  Description of Artificial Sequence: Synthetic oligonucleotide
  Sense strand starting at position 1456 of SEQ ID NO: 1243072
cucuuaggaucaguguaac

SEQ ID NO: 1392927 - RNA, 19 nt, Artificial Sequence
  Description of Artificial Sequence: Synthetic oligonucleotide
  Antisense strand to SEQ ID NO: 1392926
guuacacugauccuaagag

SEQ ID NO: 1392928 - RNA, 19 nt, Artificial Sequence
  Description of Artificial Sequence: Synthetic oligonucleotide
  Sense strand starting at position 1862 of SEQ ID NO: 1243072
cagagcauccgaugaucaa

SEQ ID NO: 1392929 - RNA, 19 nt, Artificial Sequence
  Description of Artificial Sequence: Synthetic oligonucleotide
  Antisense strand to SEQ ID NO: 1392928
uugaucaucggaugcucug

SEQ ID NO: 1392930 - RNA, 19 nt, Artificial Sequence
  Description of Artificial Sequence: Synthetic oligonucleotide
  Sense strand starting at position 2035 of SEQ ID NO: 1243072
agaguaaauauacgaagca

SEQ ID NO: 1392931 - RNA, 19 nt, Artificial Sequence
  Description of Artificial Sequence: Synthetic oligonucleotide
  Antisense strand to SEQ ID NO: 1392930
ugcuucguauauuuacucu

SEQ ID NO: 1392932 - RNA, 19 nt, Artificial Sequence
  Description of Artificial Sequence: Synthetic oligonucleotide
  Sense strand starting at position 2098 of SEQ ID NO: 1243072
cuagaaugucacuaccgua

SEQ ID NO: 1392933 - RNA, 19 nt, Artificial Sequence
  Description of Artificial Sequence: Synthetic oligonucleotide
  Antisense strand to SEQ ID NO: 1392932
uacgguagugacauucuag

SEQ ID NO: 1392934 - RNA, 19 nt, Artificial Sequence
  Description of Artificial Sequence: Synthetic oligonucleotide
  Sense strand starting at position 2103 of SEQ ID NO: 1243072
augucacuaccguauauua

SEQ ID NO: 1392935 - RNA, 19 nt, Artificial Sequence
  Description of Artificial Sequence: Synthetic oligonucleotide
  Antisense strand to SEQ ID NO: 1392934
uaauauacgguagugacau

SEQ ID NO: 1392936 - RNA, 19 nt, Artificial Sequence
  Description of Artificial Sequence: Synthetic oligonucleotide
  Sense strand starting at position 2105 of SEQ ID NO: 1243072
gucacuaccguauauuaaa

SEQ ID NO: 1392937 - RNA, 19 nt, Artificial Sequence
  Description of Artificial Sequence: Synthetic oligonucleotide
  Antisense strand to SEQ ID NO: 1392936
uuuaauauacgguagugac

SEQ ID NO: 1392938 - RNA, 19 nt, Artificial Sequence
  Description of Artificial Sequence: Synthetic oligonucleotide
  Sense strand starting at position 2191 of SEQ ID NO: 1243072
guucuaacaugaucuugag

SEQ ID NO: 1392939 - RNA, 19 nt, Artificial Sequence
  Description of Artificial Sequence: Synthetic oligonucleotide
  Antisense strand to SEQ ID NO: 1392938
cucaagaucauguuagaac

SEQ ID NO: 1392940 - RNA, 19 nt, Artificial Sequence
  Description of Artificial Sequence: Synthetic oligonucleotide
  Sense strand starting at position 2199 of SEQ ID NO: 1243072
augaucuugagaugcaguu

SEQ ID NO: 1392941 - RNA, 19 nt, Artificial Sequence
  Description of Artificial Sequence: Synthetic oligonucleotide
  Antisense strand to SEQ ID NO: 1392940
aacugcaucucaagaucau

SEQ ID NO: 1392942 - RNA, 19 nt, Artificial Sequence
  Description of Artificial Sequence: Synthetic oligonucleotide
  Sense strand starting at position 2205 of SEQ ID NO: 1243072
uugagaugcaguuaguaau

SEQ ID NO: 1392943 - RNA, 19 nt, Artificial Sequence
  Description of Artificial Sequence: Synthetic oligonucleotide
  Antisense strand to SEQ ID NO: 1392942
auuacuaacugcaucucaa

SEQ ID NO: 1392944 - RNA, 19 nt, Artificial Sequence
  Description of Artificial Sequence: Synthetic oligonucleotide
  Sense strand starting at position 2325 of SEQ ID NO: 1243072
gggaucacuuuccuaucua

SEQ ID NO: 1392945 - RNA, 19 nt, Artificial Sequence
  Description of Artificial Sequence: Synthetic oligonucleotide
  Antisense strand to SEQ ID NO: 1392944
uagauaggaaagugauccc

SEQ ID NO: 1392946 - RNA, 19 nt, Artificial Sequence
  Description of Artificial Sequence: Synthetic oligonucleotide
  Sense strand starting at position 2337 of SEQ ID NO: 1243072
cuaucuagaucucuaggca

SEQ ID NO: 1392947 - RNA, 19 nt, Artificial Sequence
  Description of Artificial Sequence: Synthetic oligonucleotide
  Antisense strand to SEQ ID NO: 1392946
ugccuagagaucuagauag

SEQ ID NO: 1392948 - RNA, 19 nt, Artificial Sequence
  Description of Artificial Sequence: Synthetic oligonucleotide
  Sense strand starting at position 2340 of SEQ ID NO: 1243072
ucuagaucucuaggcaaag

SEQ ID NO: 1392949 - RNA, 19 nt, Artificial Sequence
  Description of Artificial Sequence: Synthetic oligonucleotide
  Antisense strand to SEQ ID NO: 1392948
cuuugccuagagaucuaga

SEQ ID NO: 1392950 - RNA, 19 nt, Artificial Sequence
  Description of Artificial Sequence: Synthetic oligonucleotide
  Sense strand starting at position 2385 of SEQ ID NO: 1243072
guuacaaagcuuggcauuu

SEQ ID NO: 1392951 - RNA, 19 nt, Artificial Sequence
  Description of Artificial Sequence: Synthetic oligonucleotide
  Antisense strand to SEQ ID NO: 1392950
aaaugccaagcuuuguaac

SEQ ID NO: 1392952 - RNA, 19 nt, Artificial Sequence
  Description of Artificial Sequence: Synthetic oligonucleotide
  Sense strand starting at position 2456 of SEQ ID NO: 1243072
agaguuuggaucuguacaa

SEQ ID NO: 1392953 - RNA, 19 nt, Artificial Sequence
  Description of Artificial Sequence: Synthetic oligonucleotide
  Antisense strand to SEQ ID NO: 1392952
uuguacagauccaaacucu

SEQ ID NO: 1392954 - RNA, 19 nt, Artificial Sequence
  Description of Artificial Sequence: Synthetic oligonucleotide
  Sense strand starting at position 2457 of SEQ ID NO: 1243072
gaguuuggaucuguacaaa

SEQ ID NO: 1392955 - RNA, 19 nt, Artificial Sequence
  Description of Artificial Sequence: Synthetic oligonucleotide
  Antisense strand to SEQ ID NO: 1392954
uuuguacagauccaaacuc

SEQ ID NO: 1392956 - RNA, 19 nt, Artificial Sequence
  Description of Artificial Sequence: Synthetic oligonucleotide
  Sense strand starting at position 2476 of SEQ ID NO: 1243072
accuauugaugauuguuau

SEQ ID NO: 1392957 - RNA, 19 nt, Artificial Sequence
  Description of Artificial Sequence: Synthetic oligonucleotide
  Antisense strand to SEQ ID NO: 1392956
auaacaaucaucaauaggu

SEQ ID NO: 1392958 - RNA, 19 nt, Artificial Sequence
  Description of Artificial Sequence: Synthetic oligonucleotide
  Sense strand starting at position 2477 of SEQ ID NO: 1243072
ccuauugaugauuguuauc

SEQ ID NO: 1392959 - RNA, 19 nt, Artificial Sequence
  Description of Artificial Sequence: Synthetic oligonucleotide
  Antisense strand to SEQ ID NO: 1392958
gauaacaaucaucaauagg

SEQ ID NO: 1392960 - RNA, 19 nt, Artificial Sequence
  Description of Artificial Sequence: Synthetic oligonucleotide
  Sense strand starting at position 2482 of SEQ ID NO: 1243072
ugaugauuguuaucuccuu

SEQ ID NO: 1392961 - RNA, 19 nt, Artificial Sequence
  Description of Artificial Sequence: Synthetic oligonucleotide
  Antisense strand to SEQ ID NO: 1392960
aaggagauaacaaucauca

SEQ ID NO: 1392962 - RNA, 19 nt, Artificial Sequence
  Description of Artificial Sequence: Synthetic oligonucleotide
  Sense strand starting at position 2487 of SEQ ID NO: 1243072
auuguuaucuccuugaaga

SEQ ID NO: 1392963 - RNA, 19 nt, Artificial Sequence
  Description of Artificial Sequence: Synthetic oligonucleotide
  Antisense strand to SEQ ID NO: 1392962
ucuucaaggagauaacaau

SEQ ID NO: 1392964 - RNA, 19 nt, Artificial Sequence
  Description of Artificial Sequence: Synthetic oligonucleotide
  Sense strand starting at position 2488 of SEQ ID NO: 1243072
uuguuaucuccuugaagag

SEQ ID NO: 1392965 - RNA, 19 nt, Artificial Sequence
  Description of Artificial Sequence: Synthetic oligonucleotide
  Antisense strand to SEQ ID NO: 1392964
cucuucaaggagauaacaa

SEQ ID NO: 1392966 - RNA, 19 nt, Artificial Sequence
  Description of Artificial Sequence: Synthetic oligonucleotide
  Sense strand starting at position 3224 of SEQ ID NO: 1243072
aauagaauguguccuguag

SEQ ID NO: 1392967 - RNA, 19 nt, Artificial Sequence
  Description of Artificial Sequence: Synthetic oligonucleotide
  Antisense strand to SEQ ID NO: 1392966
cuacaggacacauucuauu

SEQ ID NO: 1392968 - RNA, 19 nt, Artificial Sequence
  Description of Artificial Sequence: Synthetic oligonucleotide
  Sense strand starting at position 3238 of SEQ ID NO: 1243072
uguaguuauuaagcaauga

SEQ ID NO: 1392969 - RNA, 19 nt, Artificial Sequence
  Description of Artificial Sequence: Synthetic oligonucleotide
  Antisense strand to SEQ ID NO: 1392968
ucauugcuuaauaacuaca

SEQ ID NO: 1392970 - RNA, 19 nt, Artificial Sequence
  Description of Artificial Sequence: Synthetic oligonucleotide
  Sense strand starting at position 3239 of SEQ ID NO: 1243072
guaguuauuaagcaaugag

SEQ ID NO: 1392971 - RNA, 19 nt, Artificial Sequence
  Description of Artificial Sequence: Synthetic oligonucleotide
  Antisense strand to SEQ ID NO: 1392970
cucauugcuuaauaacuac

SEQ ID NO: 1392972 - RNA, 19 nt, Artificial Sequence
  Description of Artificial Sequence: Synthetic oligonucleotide
  Sense strand starting at position 3301 of SEQ ID NO: 1243072
uuaauuaacguaggagauc

SEQ ID NO: 1392973 - RNA, 19 nt, Artificial Sequence
  Description of Artificial Sequence: Synthetic oligonucleotide
  Antisense strand to SEQ ID NO: 1392972
gaucuccuacguuaauuaa

SEQ ID NO: 1392974 - RNA, 19 nt, Artificial Sequence
  Description of Artificial Sequence: Synthetic oligonucleotide
  Sense strand starting at position 3313 of SEQ ID NO: 1243072
ggagaucuuuaucugaauu

SEQ ID NO: 1392975 - RNA, 19 nt, Artificial Sequence
  Description of Artificial Sequence: Synthetic oligonucleotide
  Antisense strand to SEQ ID NO: 1392974
aauucagauaaagaucucc

SEQ ID NO: 1392976 - RNA, 19 nt, Artificial Sequence
  Description of Artificial Sequence: Synthetic oligonucleotide
  Sense strand starting at position 3371 of SEQ ID NO: 1243072
ugggcuccaguugaugaau

SEQ ID NO: 1392977 - RNA, 19 nt, Artificial Sequence
  Description of Artificial Sequence: Synthetic oligonucleotide
  Antisense strand to SEQ ID NO: 1392976
auucaucaacuggagccca

SEQ ID NO: 1392978 - RNA, 19 nt, Artificial Sequence
  Description of Artificial Sequence: Synthetic oligonucleotide
  Sense strand starting at position 3615 of SEQ ID NO: 1243072
ccucaaguagcagaauuga

SEQ ID NO: 1392979 - RNA, 19 nt, Artificial Sequence
  Description of Artificial Sequence: Synthetic oligonucleotide
  Antisense strand to SEQ ID NO: 1392978
ucaauucugcuacuugagg

SEQ ID NO: 1392980 - RNA, 19 nt, Artificial Sequence
  Description of Artificial Sequence: Synthetic oligonucleotide
  Sense strand starting at position 46 of SEQ ID NO: 1243073
ggccacgagugauuagcaa

SEQ ID NO: 1392981 - RNA, 19 nt, Artificial Sequence
  Description of Artificial Sequence: Synthetic oligonucleotide
  Antisense strand to SEQ ID NO: 1392980
uugcuaaucacucguggcc

SEQ ID NO: 1392982 - RNA, 19 nt, Artificial Sequence
  Description of Artificial Sequence: Synthetic oligonucleotide
  Sense strand starting at position 53 of SEQ ID NO: 1243073
agugauuagcaaugacauu

SEQ ID NO: 1392983 - RNA, 19 nt, Artificial Sequence
  Description of Artificial Sequence: Synthetic oligonucleotide
  Antisense strand to SEQ ID NO: 1392982
aaugucauugcuaaucacu

SEQ ID NO: 1392984 - RNA, 19 nt, Artificial Sequence
  Description of Artificial Sequence: Synthetic oligonucleotide
  Sense strand starting at position 88 of SEQ ID NO: 1243073
cccgaagcgggcuguaaau

SEQ ID NO: 1392985 - RNA, 19 nt, Artificial Sequence
  Description of Artificial Sequence: Synthetic oligonucleotide
  Antisense strand to SEQ ID NO: 1392984
auuuacagcccgcuucggg

SEQ ID NO: 1392986 - RNA, 19 nt, Artificial Sequence
  Description of Artificial Sequence: Synthetic oligonucleotide
  Sense strand starting at position 99 of SEQ ID NO: 1243073
cuguaaaugacauguaugu

SEQ ID NO: 1392987 - RNA, 19 nt, Artificial Sequence
  Description of Artificial Sequence: Synthetic oligonucleotide
  Antisense strand to SEQ ID NO: 1392986
acauacaugucauuuacag

SEQ ID NO: 1392988 - RNA, 19 nt, Artificial Sequence
  Description of Artificial Sequence: Synthetic oligonucleotide
  Sense strand starting at position 101 of SEQ ID NO: 1243073
guaaaugacauguauguua

SEQ ID NO: 1392989 - RNA, 19 nt, Artificial Sequence
  Description of Artificial Sequence: Synthetic oligonucleotide
  Antisense strand to SEQ ID NO: 1392988
uaacauacaugucauuuac

SEQ ID NO: 1392990 - RNA, 19 nt, Artificial Sequence
  Description of Artificial Sequence: Synthetic oligonucleotide
  Sense strand starting at position 108 of SEQ ID NO: 1243073
acauguauguuauucuguu

SEQ ID NO: 1392991 - RNA, 19 nt, Artificial Sequence
  Description of Artificial Sequence: Synthetic oligonucleotide
  Antisense strand to SEQ ID NO: 1392990
aacagaauaacauacaugu

SEQ ID NO: 1392992 - RNA, 19 nt, Artificial Sequence
  Description of Artificial Sequence: Synthetic oligonucleotide
  Sense strand starting at position 203 of SEQ ID NO: 1243073
ugugucaugccacugcuua

SEQ ID NO: 1392993 - RNA, 19 nt, Artificial Sequence
  Description of Artificial Sequence: Synthetic oligonucleotide
  Antisense strand to SEQ ID NO: 1392992
uaagcaguggcaugacaca

SEQ ID NO: 1392994 - RNA, 19 nt, Artificial Sequence
  Description of Artificial Sequence: Synthetic oligonucleotide
  Sense strand starting at position 222 of SEQ ID NO: 1243073
cuaugauuauggucauuag

SEQ ID NO: 1392995 - RNA, 19 nt, Artificial Sequence
  Description of Artificial Sequence: Synthetic oligonucleotide
  Antisense strand to SEQ ID NO: 1392994
cuaaugaccauaaucauag

SEQ ID NO: 1392996 - RNA, 19 nt, Artificial Sequence
  Description of Artificial Sequence: Synthetic oligonucleotide
  Sense strand starting at position 225 of SEQ ID NO: 1243073
ugauuauggucauuagcua

SEQ ID NO: 1392997 - RNA, 19 nt, Artificial Sequence
  Description of Artificial Sequence: Synthetic oligonucleotide
  Antisense strand to SEQ ID NO: 1392996
uagcuaaugaccauaauca

SEQ ID NO: 1392998 - RNA, 19 nt, Artificial Sequence
  Description of Artificial Sequence: Synthetic oligonucleotide
  Sense strand starting at position 308 of SEQ ID NO: 1243073
gguucugagggcuguauaa

SEQ ID NO: 1392999 - RNA, 19 nt, Artificial Sequence
  Description of Artificial Sequence: Synthetic oligonucleotide
  Antisense strand to SEQ ID NO: 1392998
uuauacagcccucagaacc

SEQ ID NO: 1393000 - RNA, 19 nt, Artificial Sequence
  Description of Artificial Sequence: Synthetic oligonucleotide
  Sense strand starting at position 409 of SEQ ID NO: 1243073
cuggaagaauaucagagau

SEQ ID NO: 1393001 - RNA, 19 nt, Artificial Sequence
  Description of Artificial Sequence: Synthetic oligonucleotide
  Antisense strand to SEQ ID NO: 1393000
aucucugauauucuuccag

SEQ ID NO: 1393002 - RNA, 19 nt, Artificial Sequence
  Description of Artificial Sequence: Synthetic oligonucleotide
  Sense strand starting at position 411 of SEQ ID NO: 1243073
ggaagaauaucagagauga

SEQ ID NO: 1393003 - RNA, 19 nt, Artificial Sequence
  Description of Artificial Sequence: Synthetic oligonucleotide
  Antisense strand to SEQ ID NO: 1393002
ucaucucugauauucuucc

SEQ ID NO: 1393004 - RNA, 19 nt, Artificial Sequence
  Description of Artificial Sequence: Synthetic oligonucleotide
  Sense strand starting at position 831 of SEQ ID NO: 1243073
ggcccacacucagagaaau

SEQ ID NO: 1393005 - RNA, 19 nt, Artificial Sequence
  Description of Artificial Sequence: Synthetic oligonucleotide
  Antisense strand to SEQ ID NO: 1393004
auuucucugagugugggcc

SEQ ID NO: 1393006 - RNA, 19 nt, Artificial Sequence
  Description of Artificial Sequence: Synthetic oligonucleotide
  Sense strand starting at position 887 of SEQ ID NO: 1243073
gacaucagaucagaugaga

SEQ ID NO: 1393007 - RNA, 19 nt, Artificial Sequence
  Description of Artificial Sequence: Synthetic oligonucleotide
  Antisense strand to SEQ ID NO: 1393006
ucucaucugaucugauguc

SEQ ID NO: 1393008 - RNA, 19 nt, Artificial Sequence
  Description of Artificial Sequence: Synthetic oligonucleotide
  Sense strand starting at position 1392 of SEQ ID NO: 1243073
ugaggucaaucugaugaca

SEQ ID NO: 1393009 - RNA, 19 nt, Artificial Sequence
  Description of Artificial Sequence: Synthetic oligonucleotide
  Antisense strand to SEQ ID NO: 1393008
ugucaucagauugaccuca

SEQ ID NO: 1393010 - RNA, 19 nt, Artificial Sequence
  Description of Artificial Sequence: Synthetic oligonucleotide
  Sense strand starting at position 2124 of SEQ ID NO: 1243073
ggaacuaucuuucccagga

SEQ ID NO: 1393011 - RNA, 19 nt, Artificial Sequence
  Description of Artificial Sequence: Synthetic oligonucleotide
  Antisense strand to SEQ ID NO: 1393010
uccugggaaagauaguucc

SEQ ID NO: 1393012 - RNA, 19 nt, Artificial Sequence
  Description of Artificial Sequence: Synthetic oligonucleotide
  Sense strand starting at position 2128 of SEQ ID NO: 1243073
cuaucuuucccaggaugcu

SEQ ID NO: 1393013 - RNA, 19 nt, Artificial Sequence
  Description of Artificial Sequence: Synthetic oligonucleotide
  Antisense strand to SEQ ID NO: 1393012
agcauccugggaaagauag

SEQ ID NO: 1393014 - RNA, 19 nt, Artificial Sequence
  Description of Artificial Sequence: Synthetic oligonucleotide
  Sense strand starting at position 2292 of SEQ ID NO: 1243073
gucauuuccucaucuguuc

SEQ ID NO: 1393015 - RNA, 19 nt, Artificial Sequence
  Description of Artificial Sequence: Synthetic oligonucleotide
  Antisense strand to SEQ ID NO: 1393014
gaacagaugaggaaaugac

SEQ ID NO: 1393016 - RNA, 19 nt, Artificial Sequence
  Description of Artificial Sequence: Synthetic oligonucleotide
  Sense strand starting at position 2299 of SEQ ID NO: 1243073
ccucaucuguucgcuuaca

SEQ ID NO: 1393017 - RNA, 19 nt, Artificial Sequence
  Description of Artificial Sequence: Synthetic oligonucleotide
  Antisense strand to SEQ ID NO: 1393016
uguaagcgaacagaugagg

SEQ ID NO: 1393018 - RNA, 19 nt, Artificial Sequence
  Description of Artificial Sequence: Synthetic oligonucleotide
  Sense strand starting at position 2357 of SEQ ID NO: 1243073
ugaaauagcucccugaguc

SEQ ID NO: 1393019 - RNA, 19 nt, Artificial Sequence
  Description of Artificial Sequence: Synthetic oligonucleotide
  Antisense strand to SEQ ID NO: 1393018
gacucagggagcuauuuca

SEQ ID NO: 1393020 - RNA, 19 nt, Artificial Sequence
  Description of Artificial Sequence: Synthetic oligonucleotide
  Sense strand starting at position 2504 of SEQ ID NO: 1243073
gccagaauuugaggacuac

SEQ ID NO: 1393021 - RNA, 19 nt, Artificial Sequence
  Description of Artificial Sequence: Synthetic oligonucleotide
  Antisense strand to SEQ ID NO: 1393020
guaguccucaaauucuggc

SEQ ID NO: 1393022 - RNA, 19 nt, Artificial Sequence
  Description of Artificial Sequence: Synthetic oligonucleotide
  Sense strand starting at position 2553 of SEQ ID NO: 1243073
cugagagcuguauaggcau

SEQ ID NO: 1393023 - RNA, 19 nt, Artificial Sequence
  Description of Artificial Sequence: Synthetic oligonucleotide
  Antisense strand to SEQ ID NO: 1393022
augccuauacagcucucag

SEQ ID NO: 1393024 - RNA, 19 nt, Artificial Sequence
  Description of Artificial Sequence: Synthetic oligonucleotide
  Sense strand starting at position 2737 of SEQ ID NO: 1243073
gcaguagacucucccacau

SEQ ID NO: 1393025 - RNA, 19 nt, Artificial Sequence
  Description of Artificial Sequence: Synthetic oligonucleotide
  Antisense strand to SEQ ID NO: 1393024
augugggagagucuacugc

SEQ ID NO: 1393026 - RNA, 19 nt, Artificial Sequence
  Description of Artificial Sequence: Synthetic oligonucleotide
  Sense strand starting at position 2739 of SEQ ID NO: 1243073
aguagacucucccacauuu

SEQ ID NO: 1393027 - RNA, 19 nt, Artificial Sequence
  Description of Artificial Sequence: Synthetic oligonucleotide
  Antisense strand to SEQ ID NO: 1393026
aaaugugggagagucuacu

SEQ ID NO: 1393028 - RNA, 19 nt, Artificial Sequence
  Description of Artificial Sequence: Synthetic oligonucleotide
  Sense strand starting at position 2787 of SEQ ID NO: 1243073
gagagagccgcaugaaaug

SEQ ID NO: 1393029 - RNA, 19 nt, Artificial Sequence
  Description of Artificial Sequence: Synthetic oligonucleotide
  Antisense strand to SEQ ID NO: 1393028
cauuucaugcggcucucuc

SEQ ID NO: 1393030 - RNA, 19 nt, Artificial Sequence
  Description of Artificial Sequence: Synthetic oligonucleotide
  Sense strand starting at position 2860 of SEQ ID NO: 1243073
caagguguucccuggcuuu

SEQ ID NO: 1393031 - RNA, 19 nt, Artificial Sequence
  Description of Artificial Sequence: Synthetic oligonucleotide
  Antisense strand to SEQ ID NO: 1393030
aaagccagggaacaccuug

SEQ ID NO: 1393032 - RNA, 19 nt, Artificial Sequence
  Description of Artificial Sequence: Synthetic oligonucleotide
  Sense strand starting at position 2936 of SEQ ID NO: 1243073
cuuggauucugagcagagu

SEQ ID NO: 1393033 - RNA, 19 nt, Artificial Sequence
  Description of Artificial Sequence: Synthetic oligonucleotide
  Antisense strand to SEQ ID NO: 1393032
acucugcucagaauccaag

SEQ ID NO: 1393034 - RNA, 19 nt, Artificial Sequence
  Description of Artificial Sequence: Synthetic oligonucleotide
  Sense strand starting at position 2939 of SEQ ID NO: 1243073
ggauucugagcagagugau

SEQ ID NO: 1393035 - RNA, 19 nt, Artificial Sequence
  Description of Artificial Sequence: Synthetic oligonucleotide
  Antisense strand to SEQ ID NO: 1393034
aucacucugcucagaaucc

SEQ ID NO: 1393036 - RNA, 19 nt, Artificial Sequence
  Description of Artificial Sequence: Synthetic oligonucleotide
  Sense strand starting at position 3011 of SEQ ID NO: 1243073
cugagucuccaauggucaa

SEQ ID NO: 1393037 - RNA, 19 nt, Artificial Sequence
  Description of Artificial Sequence: Synthetic oligonucleotide
  Antisense strand to SEQ ID NO: 1393036
uugaccauuggagacucag

SEQ ID NO: 1393038 - RNA, 19 nt, Artificial Sequence
  Description of Artificial Sequence: Synthetic oligonucleotide
  Sense strand starting at position 3046 of SEQ ID NO: 1243073
uggaaaugcuucuuauacc

SEQ ID NO: 1393039 - RNA, 19 nt, Artificial Sequence
  Description of Artificial Sequence: Synthetic oligonucleotide
  Antisense strand to SEQ ID NO: 1393038
gguauaagaagcauuucca

SEQ ID NO: 1393040 - RNA, 19 nt, Artificial Sequence
  Description of Artificial Sequence: Synthetic oligonucleotide
  Sense strand starting at position 3109 of SEQ ID NO: 1243073
uaaauuguucugucgcgca

SEQ ID NO: 1393041 - RNA, 19 nt, Artificial Sequence
  Description of Artificial Sequence: Synthetic oligonucleotide
  Antisense strand to SEQ ID NO: 1393040
ugcgcgacagaacaauuua

SEQ ID NO: 1393042 - RNA, 19 nt, Artificial Sequence
  Description of Artificial Sequence: Synthetic oligonucleotide
  Sense strand starting at position 3123 of SEQ ID NO: 1243073
gcgcagucuggagagaagu

SEQ ID NO: 1393043 - RNA, 19 nt, Artificial Sequence
  Description of Artificial Sequence: Synthetic oligonucleotide
  Antisense strand to SEQ ID NO: 1393042
acuucucuccagacugcgc

SEQ ID NO: 1393044 - RNA, 19 nt, Artificial Sequence
  Description of Artificial Sequence: Synthetic oligonucleotide
  Sense strand starting at position 3351 of SEQ ID NO: 1243073
ugggauuagagaugagcca

SEQ ID NO: 1393045 - RNA, 19 nt, Artificial Sequence
  Description of Artificial Sequence: Synthetic oligonucleotide
  Antisense strand to SEQ ID NO: 1393044
uggcucaucucuaauccca

SEQ ID NO: 1393046 - RNA, 19 nt, Artificial Sequence
  Description of Artificial Sequence: Synthetic oligonucleotide
  Sense strand starting at position 3430 of SEQ ID NO: 1243073
agccaagagacuuguguga

SEQ ID NO: 1393047 - RNA, 19 nt, Artificial Sequence
  Description of Artificial Sequence: Synthetic oligonucleotide
  Antisense strand to SEQ ID NO: 1393046
ucacacaagucucuuggcu

SEQ ID NO: 1393048 - RNA, 19 nt, Artificial Sequence
  Description of Artificial Sequence: Synthetic oligonucleotide
  Sense strand starting at position 3434 of SEQ ID NO: 1243073
aagagacuugugugauuau

SEQ ID NO: 1393049 - RNA, 19 nt, Artificial Sequence
  Description of Artificial Sequence: Synthetic oligonucleotide
  Antisense strand to SEQ ID NO: 1393048
auaaucacacaagucucuu

SEQ ID NO: 1393050 - RNA, 19 nt, Artificial Sequence
  Description of Artificial Sequence: Synthetic oligonucleotide
  Sense strand starting at position 3437 of SEQ ID NO: 1243073
agacuugugugauuaugau

SEQ ID NO: 1393051 - RNA, 19 nt, Artificial Sequence
  Description of Artificial Sequence: Synthetic oligonucleotide
  Antisense strand to SEQ ID NO: 1393050
aucauaaucacacaagucu

SEQ ID NO: 1393052 - RNA, 19 nt, Artificial Sequence
  Description of Artificial Sequence: Synthetic oligonucleotide
  Sense strand starting at position 3468 of SEQ ID NO: 1243073
cuuggaggagccugauuaa

SEQ ID NO: 1393053 - RNA, 19 nt, Artificial Sequence
  Description of Artificial Sequence: Synthetic oligonucleotide
  Antisense strand to SEQ ID NO: 1393052
uuaaucaggcuccuccaag

SEQ ID NO: 1393054 - RNA, 19 nt, Artificial Sequence
  Description of Artificial Sequence: Synthetic oligonucleotide
  Sense strand starting at position 3471 of SEQ ID NO: 1243073
ggaggagccugauuaaauc

SEQ ID NO: 1393055 - RNA, 19 nt, Artificial Sequence
  Description of Artificial Sequence: Synthetic oligonucleotide
  Antisense strand to SEQ ID NO: 1393054
gauuuaaucaggcuccucc

SEQ ID NO: 1393056 - RNA, 19 nt, Artificial Sequence
  Description of Artificial Sequence: Synthetic oligonucleotide
  Sense strand starting at position 3544 of SEQ ID NO: 1243073
ugcugagggcucugcacau

SEQ ID NO: 1393057 - RNA, 19 nt, Artificial Sequence
  Description of Artificial Sequence: Synthetic oligonucleotide
  Antisense strand to SEQ ID NO: 1393056
augugcagagcccucagca

SEQ ID NO: 1393058 - RNA, 19 nt, Artificial Sequence
  Description of Artificial Sequence: Synthetic oligonucleotide
  Sense strand starting at position 3976 of SEQ ID NO: 1243073
acuugaggucaaggguuua

SEQ ID NO: 1393059 - RNA, 19 nt, Artificial Sequence
  Description of Artificial Sequence: Synthetic oligonucleotide
  Antisense strand to SEQ ID NO: 1393058
uaaacccuugaccucaagu

SEQ ID NO: 1393060 - RNA, 19 nt, Artificial Sequence
  Description of Artificial Sequence: Synthetic oligonucleotide
  Sense strand starting at position 71 of SEQ ID NO: 1243074
gugggacagaucuguauaa

SEQ ID NO: 1393061 - RNA, 19 nt, Artificial Sequence
  Description of Artificial Sequence: Synthetic oligonucleotide
  Antisense strand to SEQ ID NO: 1393060
uuauacagaucugucccac

SEQ ID NO: 1393062 - RNA, 19 nt, Artificial Sequence
  Description of Artificial Sequence: Synthetic oligonucleotide
  Sense strand starting at position 72 of SEQ ID NO: 1243074
ugggacagaucuguauaau

SEQ ID NO: 1393063 - RNA, 19 nt, Artificial Sequence
  Description of Artificial Sequence: Synthetic oligonucleotide
  Antisense strand to SEQ ID NO: 1393062
auuauacagaucuguccca

SEQ ID NO: 1393064 - RNA, 19 nt, Artificial Sequence
  Description of Artificial Sequence: Synthetic oligonucleotide
  Sense strand starting at position 88 of SEQ ID NO: 1243074
aaugaagauucgccuggua

SEQ ID NO: 1393065 - RNA, 19 nt, Artificial Sequence
  Description of Artificial Sequence: Synthetic oligonucleotide
  Antisense strand to SEQ ID NO: 1393064
uaccaggcgaaucuucauu

SEQ ID NO: 1393066 - RNA, 19 nt, Artificial Sequence
  Description of Artificial Sequence: Synthetic oligonucleotide
  Sense strand starting at position 129 of SEQ ID NO: 1243074
gcagauuaagcccacuaua

SEQ ID NO: 1393067 - RNA, 19 nt, Artificial Sequence
  Description of Artificial Sequence: Synthetic oligonucleotide
  Antisense strand to SEQ ID NO: 1393066
uauagugggcuuaaucugc

SEQ ID NO: 1393068 - RNA, 19 nt, Artificial Sequence
  Description of Artificial Sequence: Synthetic oligonucleotide
  Sense strand starting at position 202 of SEQ ID NO: 1243074
uccaguaauguaggagaaa

SEQ ID NO: 1393069 - RNA, 19 nt, Artificial Sequence
  Description of Artificial Sequence: Synthetic oligonucleotide
  Antisense strand to SEQ ID NO: 1393068
uuucuccuacauuacugga

SEQ ID NO: 1393070 - RNA, 19 nt, Artificial Sequence
  Description of Artificial Sequence: Synthetic oligonucleotide
  Sense strand starting at position 255 of SEQ ID NO: 1243074
cugucuaaacauuagcgau

SEQ ID NO: 1393071 - RNA, 19 nt, Artificial Sequence
  Description of Artificial Sequence: Synthetic oligonucleotide
  Antisense strand to SEQ ID NO: 1393070
aucgcuaauguuuagacag

SEQ ID NO: 1393072 - RNA, 19 nt, Artificial Sequence
  Description of Artificial Sequence: Synthetic oligonucleotide
  Sense strand starting at position 315 of SEQ ID NO: 1243074
ucagaauacugagcauaua

SEQ ID NO: 1393073 - RNA, 19 nt, Artificial Sequence
  Description of Artificial Sequence: Synthetic oligonucleotide
  Antisense strand to SEQ ID NO: 1393072
uauaugcucaguauucuga

SEQ ID NO: 1393074 - RNA, 19 nt, Artificial Sequence
  Description of Artificial Sequence: Synthetic oligonucleotide
  Sense strand starting at position 410 of SEQ ID NO: 1243074
uuguuaggaagccaguauu

SEQ ID NO: 1393075 - RNA, 19 nt, Artificial Sequence
  Description of Artificial Sequence: Synthetic oligonucleotide
  Antisense strand to SEQ ID NO: 1393074
aauacuggcuuccuaacaa

SEQ ID NO: 1393076 - RNA, 19 nt, Artificial Sequence
  Description of Artificial Sequence: Synthetic oligonucleotide
  Sense strand starting at position 495 of SEQ ID NO: 1243074
uugugcuaauauuuacgua

SEQ ID NO: 1393077 - RNA, 19 nt, Artificial Sequence
  Description of Artificial Sequence: Synthetic oligonucleotide
  Antisense strand to SEQ ID NO: 1393076
uacguaaauauuagcacaa

SEQ ID NO: 1393078 - RNA, 19 nt, Artificial Sequence
  Description of Artificial Sequence: Synthetic oligonucleotide
  Sense strand starting at position 527 of SEQ ID NO: 1243074
ucuguuauuugucuugcca

SEQ ID NO: 1393079 - RNA, 19 nt, Artificial Sequence
  Description of Artificial Sequence: Synthetic oligonucleotide
  Antisense strand to SEQ ID NO: 1393078
uggcaagacaaauaacaga

SEQ ID NO: 1393080 - RNA, 19 nt, Artificial Sequence
  Description of Artificial Sequence: Synthetic oligonucleotide
  Sense strand starting at position 531 of SEQ ID NO: 1243074
uuauuugucuugccauguu

SEQ ID NO: 1393081 - RNA, 19 nt, Artificial Sequence
  Description of Artificial Sequence: Synthetic oligonucleotide
  Antisense strand to SEQ ID NO: 1393080
aacauggcaagacaaauaa

SEQ ID NO: 1393082 - RNA, 19 nt, Artificial Sequence
  Description of Artificial Sequence: Synthetic oligonucleotide
  Sense strand starting at position 576 of SEQ ID NO: 1243074
ucucuuuaauucgcaagaa

SEQ ID NO: 1393083 - RNA, 19 nt, Artificial Sequence
  Description of Artificial Sequence: Synthetic oligonucleotide
  Antisense strand to SEQ ID NO: 1393082
uucuugcgaauuaaagaga

SEQ ID NO: 1393084 - RNA, 19 nt, Artificial Sequence
  Description of Artificial Sequence: Synthetic oligonucleotide
  Sense strand starting at position 580 of SEQ ID NO: 1243074
uuuaauucgcaagaaacag

SEQ ID NO: 1393085 - RNA, 19 nt, Artificial Sequence
  Description of Artificial Sequence: Synthetic oligonucleotide
  Antisense strand to SEQ ID NO: 1393084
cuguuucuugcgaauuaaa

SEQ ID NO: 1393086 - RNA, 19 nt, Artificial Sequence
  Description of Artificial Sequence: Synthetic oligonucleotide
  Sense strand starting at position 643 of SEQ ID NO: 1243074
ugcucuuucccugaaguag

SEQ ID NO: 1393087 - RNA, 19 nt, Artificial Sequence
  Description of Artificial Sequence: Synthetic oligonucleotide
  Antisense strand to SEQ ID NO: 1393086
cuacuucagggaaagagca

SEQ ID NO: 1393088 - RNA, 19 nt, Artificial Sequence
  Description of Artificial Sequence: Synthetic oligonucleotide
  Sense strand starting at position 825 of SEQ ID NO: 1243074
gugggaucucgcuauauug

SEQ ID NO: 1393089 - RNA, 19 nt, Artificial Sequence
  Description of Artificial Sequence: Synthetic oligonucleotide
  Antisense strand to SEQ ID NO: 1393088
caauauagcgagaucccac

SEQ ID NO: 1393090 - RNA, 19 nt, Artificial Sequence
  Description of Artificial Sequence: Synthetic oligonucleotide
  Sense strand starting at position 938 of SEQ ID NO: 1243074
acugucuuccagcacaaga

SEQ ID NO: 1393091 - RNA, 19 nt, Artificial Sequence
  Description of Artificial Sequence: Synthetic oligonucleotide
  Antisense strand to SEQ ID NO: 1393090
ucuugugcuggaagacagu

SEQ ID NO: 1393092 - RNA, 19 nt, Artificial Sequence
  Description of Artificial Sequence: Synthetic oligonucleotide
  Sense strand starting at position 940 of SEQ ID NO: 1243074
ugucuuccagcacaagagu

SEQ ID NO: 1393093 - RNA, 19 nt, Artificial Sequence
  Description of Artificial Sequence: Synthetic oligonucleotide
  Antisense strand to SEQ ID NO: 1393092
acucuugugcuggaagaca

SEQ ID NO: 1393094 - RNA, 19 nt, Artificial Sequence
  Description of Artificial Sequence: Synthetic oligonucleotide
  Sense strand starting at position 951 of SEQ ID NO: 1243074
acaagaguauguccuagau

SEQ ID NO: 1393095 - RNA, 19 nt, Artificial Sequence
  Description of Artificial Sequence: Synthetic oligonucleotide
  Antisense strand to SEQ ID NO: 1393094
aucuaggacauacucuugu

SEQ ID NO: 1393096 - RNA, 19 nt, Artificial Sequence
  Description of Artificial Sequence: Synthetic oligonucleotide
  Sense strand starting at position 955 of SEQ ID NO: 1243074
gaguauguccuagauguga

SEQ ID NO: 1393097 - RNA, 19 nt, Artificial Sequence
  Description of Artificial Sequence: Synthetic oligonucleotide
  Antisense strand to SEQ ID NO: 1393096
ucacaucuaggacauacuc

SEQ ID NO: 1393098 - RNA, 19 nt, Artificial Sequence
  Description of Artificial Sequence: Synthetic oligonucleotide
  Sense strand starting at position 963 of SEQ ID NO: 1243074
ccuagaugugaaugguaca

SEQ ID NO: 1393099 - RNA, 19 nt, Artificial Sequence
  Description of Artificial Sequence: Synthetic oligonucleotide
  Antisense strand to SEQ ID NO: 1393098
uguaccauucacaucuagg

SEQ ID NO: 1393100 - RNA, 19 nt, Artificial Sequence
  Description of Artificial Sequence: Synthetic oligonucleotide
  Sense strand starting at position 1065 of SEQ ID NO: 1243074
gaggucacauuguuuauga

SEQ ID NO: 1393101 - RNA, 19 nt, Artificial Sequence
  Description of Artificial Sequence: Synthetic oligonucleotide
  Antisense strand to SEQ ID NO: 1393100
ucauaaacaaugugaccuc

SEQ ID NO: 1393102 - RNA, 19 nt, Artificial Sequence
  Description of Artificial Sequence: Synthetic oligonucleotide
  Sense strand starting at position 1066 of SEQ ID NO: 1243074
aggucacauuguuuaugaa

SEQ ID NO: 1393103 - RNA, 19 nt, Artificial Sequence
  Description of Artificial Sequence: Synthetic oligonucleotide
  Antisense strand to SEQ ID NO: 1393102
uucauaaacaaugugaccu

SEQ ID NO: 1393104 - RNA, 19 nt, Artificial Sequence
  Description of Artificial Sequence: Synthetic oligonucleotide
  Sense strand starting at position 1067 of SEQ ID NO: 1243074
ggucacauuguuuaugaau

SEQ ID NO: 1393105 - RNA, 19 nt, Artificial Sequence
  Description of Artificial Sequence: Synthetic oligonucleotide
  Antisense strand to SEQ ID NO: 1393104
auucauaaacaaugugacc

SEQ ID NO: 1393106 - RNA, 19 nt, Artificial Sequence
  Description of Artificial Sequence: Synthetic oligonucleotide
  Sense strand starting at position 1096 of SEQ ID NO: 1243074
gguaguaaagagggcuuua

SEQ ID NO: 1393107 - RNA, 19 nt, Artificial Sequence
  Description of Artificial Sequence: Synthetic oligonucleotide
  Antisense strand to SEQ ID NO: 1393106
uaaagcccucuuuacuacc

SEQ ID NO: 1393108 - RNA, 19 nt, Artificial Sequence
  Description of Artificial Sequence: Synthetic oligonucleotide
  Sense strand starting at position 1170 of SEQ ID NO: 1243074
cacuguucccaagagugga

SEQ ID NO: 1393109 - RNA, 19 nt, Artificial Sequence
  Description of Artificial Sequence: Synthetic oligonucleotide
  Antisense strand to SEQ ID NO: 1393108
uccacucuugggaacagug

SEQ ID NO: 1393110 - RNA, 19 nt, Artificial Sequence
  Description of Artificial Sequence: Synthetic oligonucleotide
  Sense strand starting at position 1246 of SEQ ID NO: 1243074
agcccugggcuccaauauu

SEQ ID NO: 1393111 - RNA, 19 nt, Artificial Sequence
  Description of Artificial Sequence: Synthetic oligonucleotide
  Antisense strand to SEQ ID NO: 1393110
aauauuggagcccagggcu

SEQ ID NO: 1393112 - RNA, 19 nt, Artificial Sequence
  Description of Artificial Sequence: Synthetic oligonucleotide
  Sense strand starting at position 2196 of SEQ ID NO: 1243074
gugacugggaaggguuaaa

SEQ ID NO: 1393113 - RNA, 19 nt, Artificial Sequence
  Description of Artificial Sequence: Synthetic oligonucleotide
  Antisense strand to SEQ ID NO: 1393112
uuuaacccuucccagucac

SEQ ID NO: 1393114 - RNA, 19 nt, Artificial Sequence
  Description of Artificial Sequence: Synthetic oligonucleotide
  Sense strand starting at position 2475 of SEQ ID NO: 1243074
caguaauggcuccauguca

SEQ ID NO: 1393115 - RNA, 19 nt, Artificial Sequence
  Description of Artificial Sequence: Synthetic oligonucleotide
  Antisense strand to SEQ ID NO: 1393114
ugacauggagccauuacug

SEQ ID NO: 1393116 - RNA, 19 nt, Artificial Sequence
  Description of Artificial Sequence: Synthetic oligonucleotide
  Sense strand starting at position 2499 of SEQ ID NO: 1243074
ccaggaauuggcugagcca

SEQ ID NO: 1393117 - RNA, 19 nt, Artificial Sequence
  Description of Artificial Sequence: Synthetic oligonucleotide
  Antisense strand to SEQ ID NO: 1393116
uggcucagccaauuccugg

SEQ ID NO: 1393118 - RNA, 19 nt, Artificial Sequence
  Description of Artificial Sequence: Synthetic oligonucleotide
  Sense strand starting at position 2672 of SEQ ID NO: 1243074
ggaggagcuccugggaagu

SEQ ID NO: 1393119 - RNA, 19 nt, Artificial Sequence
  Description of Artificial Sequence: Synthetic oligonucleotide
  Antisense strand to SEQ ID NO: 1393118
acuucccaggagcuccucc

SEQ ID NO: 1393120 - RNA, 19 nt, Artificial Sequence
  Description of Artificial Sequence: Synthetic oligonucleotide
  Sense strand starting at position 2798 of SEQ ID NO: 1243074
cucugaagacugugugacu

SEQ ID NO: 1393121 - RNA, 19 nt, Artificial Sequence
  Description of Artificial Sequence: Synthetic oligonucleotide
  Antisense strand to SEQ ID NO: 1393120
agucacacagucuucagag

SEQ ID NO: 1393122 - RNA, 19 nt, Artificial Sequence
  Description of Artificial Sequence: Synthetic oligonucleotide
  Sense strand starting at position 2799 of SEQ ID NO: 1243074
ucugaagacugugugacua

SEQ ID NO: 1393123 - RNA, 19 nt, Artificial Sequence
  Description of Artificial Sequence: Synthetic oligonucleotide
  Antisense strand to SEQ ID NO: 1393122
uagucacacagucuucaga

SEQ ID NO: 1393124 - RNA, 19 nt, Artificial Sequence
  Description of Artificial Sequence: Synthetic oligonucleotide
  Sense strand starting at position 2937 of SEQ ID NO: 1243074
gacuucuucccaggaguaa

SEQ ID NO: 1393125 - RNA, 19 nt, Artificial Sequence
  Description of Artificial Sequence: Synthetic oligonucleotide
  Antisense strand to SEQ ID NO: 1393124
uuacuccugggaagaaguc

SEQ ID NO: 1393126 - RNA, 19 nt, Artificial Sequence
  Description of Artificial Sequence: Synthetic oligonucleotide
  Sense strand starting at position 2997 of SEQ ID NO: 1243074
acauuuauugcgggcauau

SEQ ID NO: 1393127 - RNA, 19 nt, Artificial Sequence
  Description of Artificial Sequence: Synthetic oligonucleotide
  Antisense strand to SEQ ID NO: 1393126
auaugcccgcaauaaaugu

SEQ ID NO: 1393128 - RNA, 19 nt, Artificial Sequence
  Description of Artificial Sequence: Synthetic oligonucleotide
  Sense strand starting at position 3007 of SEQ ID NO: 1243074
cgggcauaucaaggucaua

SEQ ID NO: 1393129 - RNA, 19 nt, Artificial Sequence
  Description of Artificial Sequence: Synthetic oligonucleotide
  Antisense strand to SEQ ID NO: 1393128
uaugaccuugauaugcccg

SEQ ID NO: 1393130 - RNA, 19 nt, Artificial Sequence
  Description of Artificial Sequence: Synthetic oligonucleotide
  Sense strand starting at position 3050 of SEQ ID NO: 1243074
uggagaaaguagccuguuu

SEQ ID NO: 1393131 - RNA, 19 nt, Artificial Sequence
  Description of Artificial Sequence: Synthetic oligonucleotide
  Antisense strand to SEQ ID NO: 1393130
aaacaggcuacuuucucca

SEQ ID NO: 1393132 - RNA, 19 nt, Artificial Sequence
  Description of Artificial Sequence: Synthetic oligonucleotide
  Sense strand starting at position 3465 of SEQ ID NO: 1243074
ggugcugucuauuuauuaa

SEQ ID NO: 1393133 - RNA, 19 nt, Artificial Sequence
  Description of Artificial Sequence: Synthetic oligonucleotide
  Antisense strand to SEQ ID NO: 1393132
uuaauaaauagacagcacc

SEQ ID NO: 1393134 - RNA, 19 nt, Artificial Sequence
  Description of Artificial Sequence: Synthetic oligonucleotide
  Sense strand starting at position 3539 of SEQ ID NO: 1243074
cuagguucuagauagaugu

SEQ ID NO: 1393135 - RNA, 19 nt, Artificial Sequence
  Description of Artificial Sequence: Synthetic oligonucleotide
  Antisense strand to SEQ ID NO: 1393134
acaucuaucuagaaccuag

SEQ ID NO: 1393136 - RNA, 19 nt, Artificial Sequence
  Description of Artificial Sequence: Synthetic oligonucleotide
  Sense strand starting at position 3888 of SEQ ID NO: 1243074
ugagaaguccuacgaugug

SEQ ID NO: 1393137 - RNA, 19 nt, Artificial Sequence
  Description of Artificial Sequence: Synthetic oligonucleotide
  Antisense strand to SEQ ID NO: 1393136
cacaucguaggacuucuca

SEQ ID NO: 1393138 - RNA, 19 nt, Artificial Sequence
  Description of Artificial Sequence: Synthetic oligonucleotide
  Sense strand starting at position 3953 of SEQ ID NO: 1243074
cgcaguuguggcccgagaa

SEQ ID NO: 1393139 - RNA, 19 nt, Artificial Sequence
  Description of Artificial Sequence: Synthetic oligonucleotide
  Antisense strand to SEQ ID NO: 1393138
uucucgggccacaacugcg

SEQ ID NO: 1393140 - RNA, 19 nt, Artificial Sequence
  Description of Artificial Sequence: Synthetic oligonucleotide
  Sense strand starting at position 294 of SEQ ID NO: 1243075
agagaaguguuauauuucu

SEQ ID NO: 1393141 - RNA, 19 nt, Artificial Sequence
  Description of Artificial Sequence: Synthetic oligonucleotide
  Antisense strand to SEQ ID NO: 1393140
agaaauauaacacuucucu

SEQ ID NO: 1393142 - RNA, 19 nt, Artificial Sequence
  Description of Artificial Sequence: Synthetic oligonucleotide
  Sense strand starting at position 443 of SEQ ID NO: 1243075
augggaaauuaguagggau

SEQ ID NO: 1393143 - RNA, 19 nt, Artificial Sequence
  Description of Artificial Sequence: Synthetic oligonucleotide
  Antisense strand to SEQ ID NO: 1393142
aucccuacuaauuucccau

SEQ ID NO: 1393144 - RNA, 19 nt, Artificial Sequence
  Description of Artificial Sequence: Synthetic oligonucleotide
  Sense strand starting at position 490 of SEQ ID NO: 1243075
gggacuugccuguaugaaa

SEQ ID NO: 1393145 - RNA, 19 nt, Artificial Sequence
  Description of Artificial Sequence: Synthetic oligonucleotide
  Antisense strand to SEQ ID NO: 1393144
uuucauacaggcaaguccc

SEQ ID NO: 1393146 - RNA, 19 nt, Artificial Sequence
  Description of Artificial Sequence: Synthetic oligonucleotide
  Sense strand starting at position 627 of SEQ ID NO: 1243075
acacuuagacugggcaauu

SEQ ID NO: 1393147 - RNA, 19 nt, Artificial Sequence
  Description of Artificial Sequence: Synthetic oligonucleotide
  Antisense strand to SEQ ID NO: 1393146
aauugcccagucuaagugu

SEQ ID NO: 1393148 - RNA, 19 nt, Artificial Sequence
  Description of Artificial Sequence: Synthetic oligonucleotide
  Sense strand starting at position 645 of SEQ ID NO: 1243075
uugaauuucuaggaacuua

SEQ ID NO: 1393149 - RNA, 19 nt, Artificial Sequence
  Description of Artificial Sequence: Synthetic oligonucleotide
  Antisense strand to SEQ ID NO: 1393148
uaaguuccuagaaauucaa

SEQ ID NO: 1393150 - RNA, 19 nt, Artificial Sequence
  Description of Artificial Sequence: Synthetic oligonucleotide
  Sense strand starting at position 899 of SEQ ID NO: 1243075
uuuaauuggguguggugau

SEQ ID NO: 1393151 - RNA, 19 nt, Artificial Sequence
  Description of Artificial Sequence: Synthetic oligonucleotide
  Antisense strand to SEQ ID NO: 1393150
aucaccacacccaauuaaa

SEQ ID NO: 1393152 - RNA, 19 nt, Artificial Sequence
  Description of Artificial Sequence: Synthetic oligonucleotide
  Sense strand starting at position 1144 of SEQ ID NO: 1243075
ugguaauaacaaugcaaau

SEQ ID NO: 1393153 - RNA, 19 nt, Artificial Sequence
  Description of Artificial Sequence: Synthetic oligonucleotide
  Antisense strand to SEQ ID NO: 1393152
auuugcauuguuauuacca

SEQ ID NO: 1393154 - RNA, 19 nt, Artificial Sequence
  Description of Artificial Sequence: Synthetic oligonucleotide
  Sense strand starting at position 1899 of SEQ ID NO: 1243075
cugugaugccugcagagaa

SEQ ID NO: 1393155 - RNA, 19 nt, Artificial Sequence
  Description of Artificial Sequence: Synthetic oligonucleotide
  Antisense strand to SEQ ID NO: 1393154
uucucugcaggcaucacag

SEQ ID NO: 1393156 - RNA, 19 nt, Artificial Sequence
  Description of Artificial Sequence: Synthetic oligonucleotide
  Sense strand starting at position 1911 of SEQ ID NO: 1243075
cagagaaugcugcgacacu

SEQ ID NO: 1393157 - RNA, 19 nt, Artificial Sequence
  Description of Artificial Sequence: Synthetic oligonucleotide
  Antisense strand to SEQ ID NO: 1393156
agugucgcagcauucucug

SEQ ID NO: 1393158 - RNA, 19 nt, Artificial Sequence
  Description of Artificial Sequence: Synthetic oligonucleotide
  Sense strand starting at position 2068 of SEQ ID NO: 1243075
caaagucacuggguaacua

SEQ ID NO: 1393159 - RNA, 19 nt, Artificial Sequence
  Description of Artificial Sequence: Synthetic oligonucleotide
  Antisense strand to SEQ ID NO: 1393158
uaguuacccagugacuuug

SEQ ID NO: 1393160 - RNA, 19 nt, Artificial Sequence
  Description of Artificial Sequence: Synthetic oligonucleotide
  Sense strand starting at position 2203 of SEQ ID NO: 1243075
aacugaaaguuggagagaa

SEQ ID NO: 1393161 - RNA, 19 nt, Artificial Sequence
  Description of Artificial Sequence: Synthetic oligonucleotide
  Antisense strand to SEQ ID NO: 1393160
uucucuccaacuuucaguu

SEQ ID NO: 1393162 - RNA, 19 nt, Artificial Sequence
  Description of Artificial Sequence: Synthetic oligonucleotide
  Sense strand starting at position 2237 of SEQ ID NO: 1243075
uucucugugcuggauaaua

SEQ ID NO: 1393163 - RNA, 19 nt, Artificial Sequence
  Description of Artificial Sequence: Synthetic oligonucleotide
  Antisense strand to SEQ ID NO: 1393162
uauuauccagcacagagaa

SEQ ID NO: 1393164 - RNA, 19 nt, Artificial Sequence
  Description of Artificial Sequence: Synthetic oligonucleotide
  Sense strand starting at position 2239 of SEQ ID NO: 1243075
cucugugcuggauaauauu

SEQ ID NO: 1393165 - RNA, 19 nt, Artificial Sequence
  Description of Artificial Sequence: Synthetic oligonucleotide
  Antisense strand to SEQ ID NO: 1393164
aauauuauccagcacagag

SEQ ID NO: 1393166 - RNA, 19 nt, Artificial Sequence
  Description of Artificial Sequence: Synthetic oligonucleotide
  Sense strand starting at position 2316 of SEQ ID NO: 1243075
cuucuaaggucauugcaga

SEQ ID NO: 1393167 - RNA, 19 nt, Artificial Sequence
  Description of Artificial Sequence: Synthetic oligonucleotide
  Antisense strand to SEQ ID NO: 1393166
ucugcaaugaccuuagaag

SEQ ID NO: 1393168 - RNA, 19 nt, Artificial Sequence
  Description of Artificial Sequence: Synthetic oligonucleotide
  Sense strand starting at position 2317 of SEQ ID NO: 1243075
uucuaaggucauugcagaa

SEQ ID NO: 1393169 - RNA, 19 nt, Artificial Sequence
  Description of Artificial Sequence: Synthetic oligonucleotide
  Antisense strand to SEQ ID NO: 1393168
uucugcaaugaccuuagaa

SEQ ID NO: 1393170 - RNA, 19 nt, Artificial Sequence
  Description of Artificial Sequence: Synthetic oligonucleotide
  Sense strand starting at position 2344 of SEQ ID NO: 1243075
uacagugugagucagguuu

SEQ ID NO: 1393171 - RNA, 19 nt, Artificial Sequence
  Description of Artificial Sequence: Synthetic oligonucleotide
  Antisense strand to SEQ ID NO: 1393170
aaaccugacucacacugua

SEQ ID NO: 1393172 - RNA, 19 nt, Artificial Sequence
  Description of Artificial Sequence: Synthetic oligonucleotide
  Sense strand starting at position 2388 of SEQ ID NO: 1243075
uagaaagucuaaguagugu

SEQ ID NO: 1393173 - RNA, 19 nt, Artificial Sequence
  Description of Artificial Sequence: Synthetic oligonucleotide
  Antisense strand to SEQ ID NO: 1393172
acacuacuuagacuuucua

SEQ ID NO: 1393174 - RNA, 19 nt, Artificial Sequence
  Description of Artificial Sequence: Synthetic oligonucleotide
  Sense strand starting at position 2676 of SEQ ID NO: 1243075
auuucuucgccuugcuauu

SEQ ID NO: 1393175 - RNA, 19 nt, Artificial Sequence
  Description of Artificial Sequence: Synthetic oligonucleotide
  Antisense strand to SEQ ID NO: 1393174
aauagcaaggcgaagaaau

SEQ ID NO: 1393176 - RNA, 19 nt, Artificial Sequence
  Description of Artificial Sequence: Synthetic oligonucleotide
  Sense strand starting at position 2725 of SEQ ID NO: 1243075
uccugucuuaggugaagag

SEQ ID NO: 1393177 - RNA, 19 nt, Artificial Sequence
  Description of Artificial Sequence: Synthetic oligonucleotide
  Antisense strand to SEQ ID NO: 1393176
cucuucaccuaagacagga

SEQ ID NO: 1393178 - RNA, 19 nt, Artificial Sequence
  Description of Artificial Sequence: Synthetic oligonucleotide
  Sense strand starting at position 2726 of SEQ ID NO: 1243075
ccugucuuaggugaagaga

SEQ ID NO: 1393179 - RNA, 19 nt, Artificial Sequence
  Description of Artificial Sequence: Synthetic oligonucleotide
  Antisense strand to SEQ ID NO: 1393178
ucucuucaccuaagacagg

SEQ ID NO: 1393180 - RNA, 19 nt, Artificial Sequence
  Description of Artificial Sequence: Synthetic oligonucleotide
  Sense strand starting at position 2873 of SEQ ID NO: 1243075
gcguucacugaguaaguga

SEQ ID NO: 1393181 - RNA, 19 nt, Artificial Sequence
  Description of Artificial Sequence: Synthetic oligonucleotide
  Antisense strand to SEQ ID NO: 1393180
ucacuuacucagugaacgc

SEQ ID NO: 1393182 - RNA, 19 nt, Artificial Sequence
  Description of Artificial Sequence: Synthetic oligonucleotide
  Sense strand starting at position 2881 of SEQ ID NO: 1243075
ugaguaagugacugagcaa

SEQ ID NO: 1393183 - RNA, 19 nt, Artificial Sequence
  Description of Artificial Sequence: Synthetic oligonucleotide
  Antisense strand to SEQ ID NO: 1393182
uugcucagucacuuacuca

SEQ ID NO: 1393184 - RNA, 19 nt, Artificial Sequence
  Description of Artificial Sequence: Synthetic oligonucleotide
  Sense strand starting at position 2884 of SEQ ID NO: 1243075
guaagugacugagcaacuu

SEQ ID NO: 1393185 - RNA, 19 nt, Artificial Sequence
  Description of Artificial Sequence: Synthetic oligonucleotide
  Antisense strand to SEQ ID NO: 1393184
aaguugcucagucacuuac

SEQ ID NO: 1393186 - RNA, 19 nt, Artificial Sequence
  Description of Artificial Sequence: Synthetic oligonucleotide
  Sense strand starting at position 3152 of SEQ ID NO: 1243075
aacacaggugccugugauu

SEQ ID NO: 1393187 - RNA, 19 nt, Artificial Sequence
  Description of Artificial Sequence: Synthetic oligonucleotide
  Antisense strand to SEQ ID NO: 1393186
aaucacaggcaccuguguu

SEQ ID NO: 1393188 - RNA, 19 nt, Artificial Sequence
  Description of Artificial Sequence: Synthetic oligonucleotide
  Sense strand starting at position 3176 of SEQ ID NO: 1243075
aaggaagacucuuaggaga

SEQ ID NO: 1393189 - RNA, 19 nt, Artificial Sequence
  Description of Artificial Sequence: Synthetic oligonucleotide
  Antisense strand to SEQ ID NO: 1393188
ucuccuaagagucuuccuu

SEQ ID NO: 1393190 - RNA, 19 nt, Artificial Sequence
  Description of Artificial Sequence: Synthetic oligonucleotide
  Sense strand starting at position 3190 of SEQ ID NO: 1243075
ggagagugguggguaugau

SEQ ID NO: 1393191 - RNA, 19 nt, Artificial Sequence
  Description of Artificial Sequence: Synthetic oligonucleotide
  Antisense strand to SEQ ID NO: 1393190
aucauacccaccacucucc

SEQ ID NO: 1393192 - RNA, 19 nt, Artificial Sequence
  Description of Artificial Sequence: Synthetic oligonucleotide
  Sense strand starting at position 3191 of SEQ ID NO: 1243075
gagagugguggguaugaua

SEQ ID NO: 1393193 - RNA, 19 nt, Artificial Sequence
  Description of Artificial Sequence: Synthetic oligonucleotide
  Antisense strand to SEQ ID NO: 1393192
uaucauacccaccacucuc

SEQ ID NO: 1393194 - RNA, 19 nt, Artificial Sequence
  Description of Artificial Sequence: Synthetic oligonucleotide
  Sense strand starting at position 3233 of SEQ ID NO: 1243075
caaguauguagucagugga

SEQ ID NO: 1393195 - RNA, 19 nt, Artificial Sequence
  Description of Artificial Sequence: Synthetic oligonucleotide
  Antisense strand to SEQ ID NO: 1393194
uccacugacuacauacuug

SEQ ID NO: 1393196 - RNA, 19 nt, Artificial Sequence
  Description of Artificial Sequence: Synthetic oligonucleotide
  Sense strand starting at position 3262 of SEQ ID NO: 1243075
ggaggucuggaaugugaag

SEQ ID NO: 1393197 - RNA, 19 nt, Artificial Sequence
  Description of Artificial Sequence: Synthetic oligonucleotide
  Antisense strand to SEQ ID NO: 1393196
cuucacauuccagaccucc

SEQ ID NO: 1393198 - RNA, 19 nt, Artificial Sequence
  Description of Artificial Sequence: Synthetic oligonucleotide
  Sense strand starting at position 3336 of SEQ ID NO: 1243075
ggaagcugugugaguguuu

SEQ ID NO: 1393199 - RNA, 19 nt, Artificial Sequence
  Description of Artificial Sequence: Synthetic oligonucleotide
  Antisense strand to SEQ ID NO: 1393198
aaacacucacacagcuucc

SEQ ID NO: 1393200 - RNA, 19 nt, Artificial Sequence
  Description of Artificial Sequence: Synthetic oligonucleotide
  Sense strand starting at position 3378 of SEQ ID NO: 1243075
gcaggauggguauacugau

SEQ ID NO: 1393201 - RNA, 19 nt, Artificial Sequence
  Description of Artificial Sequence: Synthetic oligonucleotide
  Antisense strand to SEQ ID NO: 1393200
aucaguauacccauccugc

SEQ ID NO: 1393202 - RNA, 19 nt, Artificial Sequence
  Description of Artificial Sequence: Synthetic oligonucleotide
  Sense strand starting at position 3384 of SEQ ID NO: 1243075
uggguauacugaucugcua

SEQ ID NO: 1393203 - RNA, 19 nt, Artificial Sequence
  Description of Artificial Sequence: Synthetic oligonucleotide
  Antisense strand to SEQ ID NO: 1393202
uagcagaucaguauaccca

SEQ ID NO: 1393204 - RNA, 19 nt, Artificial Sequence
  Description of Artificial Sequence: Synthetic oligonucleotide
  Sense strand starting at position 3387 of SEQ ID NO: 1243075
guauacugaucugcuauaa

SEQ ID NO: 1393205 - RNA, 19 nt, Artificial Sequence
  Description of Artificial Sequence: Synthetic oligonucleotide
  Antisense strand to SEQ ID NO: 1393204
uuauagcagaucaguauac

SEQ ID NO: 1393206 - RNA, 19 nt, Artificial Sequence
  Description of Artificial Sequence: Synthetic oligonucleotide
  Sense strand starting at position 3572 of SEQ ID NO: 1243075
agugauauaucaucauggu

SEQ ID NO: 1393207 - RNA, 19 nt, Artificial Sequence
  Description of Artificial Sequence: Synthetic oligonucleotide
  Antisense strand to SEQ ID NO: 1393206
accaugaugauauaucacu

SEQ ID NO: 1393208 - RNA, 19 nt, Artificial Sequence
  Description of Artificial Sequence: Synthetic oligonucleotide
  Sense strand starting at position 3573 of SEQ ID NO: 1243075
gugauauaucaucaugguu

SEQ ID NO: 1393209 - RNA, 19 nt, Artificial Sequence
  Description of Artificial Sequence: Synthetic oligonucleotide
  Antisense strand to SEQ ID NO: 1393208
aaccaugaugauauaucac

SEQ ID NO: 1393210 - RNA, 19 nt, Artificial Sequence
  Description of Artificial Sequence: Synthetic oligonucleotide
  Sense strand starting at position 3928 of SEQ ID NO: 1243075
ggugaugauggacauguuu

SEQ ID NO: 1393211 - RNA, 19 nt, Artificial Sequence
  Description of Artificial Sequence: Synthetic oligonucleotide
  Antisense strand to SEQ ID NO: 1393210
aaacauguccaucaucacc

SEQ ID NO: 1393212 - RNA, 19 nt, Artificial Sequence
  Description of Artificial Sequence: Synthetic oligonucleotide
  Sense strand starting at position 3965 of SEQ ID NO: 1243075
ucuguauagccucauuggu

SEQ ID NO: 1393213 - RNA, 19 nt, Artificial Sequence
  Description of Artificial Sequence: Synthetic oligonucleotide
  Antisense strand to SEQ ID NO: 1393212
accaaugaggcuauacaga

SEQ ID NO: 1393214 - RNA, 19 nt, Artificial Sequence
  Description of Artificial Sequence: Synthetic oligonucleotide
  Sense strand starting at position 3967 of SEQ ID NO: 1243075
uguauagccucauugguga

SEQ ID NO: 1393215 - RNA, 19 nt, Artificial Sequence
  Description of Artificial Sequence: Synthetic oligonucleotide
  Antisense strand to SEQ ID NO: 1393214
ucaccaaugaggcuauaca

SEQ ID NO: 1393216 - RNA, 19 nt, Artificial Sequence
  Description of Artificial Sequence: Synthetic oligonucleotide
  Sense strand starting at position 3970 of SEQ ID NO: 1243075
auagccucauuggugaaau

SEQ ID NO: 1393217 - RNA, 19 nt, Artificial Sequence
  Description of Artificial Sequence: Synthetic oligonucleotide
  Antisense strand to SEQ ID NO: 1393216
auuucaccaaugaggcuau

SEQ ID NO: 1393218 - RNA, 19 nt, Artificial Sequence
  Description of Artificial Sequence: Synthetic oligonucleotide
  Sense strand starting at position 3972 of SEQ ID NO: 1243075
agccucauuggugaaaugu

SEQ ID NO: 1393219 - RNA, 19 nt, Artificial Sequence
  Description of Artificial Sequence: Synthetic oligonucleotide
  Antisense strand to SEQ ID NO: 1393218
acauuucaccaaugaggcu

SEQ ID NO: 1393220 - RNA, 19 nt, Artificial Sequence
  Description of Artificial Sequence: Synthetic oligonucleotide
  Sense strand starting at position 241 of SEQ ID NO: 1243076
ggaccugccucuugggaaa

SEQ ID NO: 1393221 - RNA, 19 nt, Artificial Sequence
  Description of Artificial Sequence: Synthetic oligonucleotide
  Antisense strand to SEQ ID NO: 1393220
uuucccaagaggcaggucc

SEQ ID NO: 1393222 - RNA, 19 nt, Artificial Sequence
  Description of Artificial Sequence: Synthetic oligonucleotide
  Sense strand starting at position 243 of SEQ ID NO: 1243076
accugccucuugggaaaua

SEQ ID NO: 1393223 - RNA, 19 nt, Artificial Sequence
  Description of Artificial Sequence: Synthetic oligonucleotide
  Antisense strand to SEQ ID NO: 1393222
uauuucccaagaggcaggu

SEQ ID NO: 1393224 - RNA, 19 nt, Artificial Sequence
  Description of Artificial Sequence: Synthetic oligonucleotide
  Sense strand starting at position 254 of SEQ ID NO: 1243076
gggaaauacuugggacgca

SEQ ID NO: 1393225 - RNA, 19 nt, Artificial Sequence
  Description of Artificial Sequence: Synthetic oligonucleotide
  Antisense strand to SEQ ID NO: 1393224
ugcgucccaaguauuuccc

SEQ ID NO: 1393226 - RNA, 19 nt, Artificial Sequence
  Description of Artificial Sequence: Synthetic oligonucleotide
  Sense strand starting at position 348 of SEQ ID NO: 1243076
gcaggacucgcgcucugau

SEQ ID NO: 1393227 - RNA, 19 nt, Artificial Sequence
  Description of Artificial Sequence: Synthetic oligonucleotide
  Antisense strand to SEQ ID NO: 1393226
aucagagcgcgaguccugc

SEQ ID NO: 1393228 - RNA, 19 nt, Artificial Sequence
  Description of Artificial Sequence: Synthetic oligonucleotide
  Sense strand starting at position 385 of SEQ ID NO: 1243076
guccucacuucucucagua

SEQ ID NO: 1393229 - RNA, 19 nt, Artificial Sequence
  Description of Artificial Sequence: Synthetic oligonucleotide
  Antisense strand to SEQ ID NO: 1393228
uacugagagaagugaggac

SEQ ID NO: 1393230 - RNA, 19 nt, Artificial Sequence
  Description of Artificial Sequence: Synthetic oligonucleotide
  Sense strand starting at position 426 of SEQ ID NO: 1243076
gucucagccucugcuugaa

SEQ ID NO: 1393231 - RNA, 19 nt, Artificial Sequence
  Description of Artificial Sequence: Synthetic oligonucleotide
  Antisense strand to SEQ ID NO: 1393230
uucaagcagaggcugagac

SEQ ID NO: 1393232 - RNA, 19 nt, Artificial Sequence
  Description of Artificial Sequence: Synthetic oligonucleotide
  Sense strand starting at position 430 of SEQ ID NO: 1243076
cagccucugcuugaagaga

SEQ ID NO: 1393233 - RNA, 19 nt, Artificial Sequence
  Description of Artificial Sequence: Synthetic oligonucleotide
  Antisense strand to SEQ ID NO: 1393232
ucucuucaagcagaggcug

SEQ ID NO: 1393234 - RNA, 19 nt, Artificial Sequence
  Description of Artificial Sequence: Synthetic oligonucleotide
  Sense strand starting at position 729 of SEQ ID NO: 1243076
accagagcucaggaguuua

SEQ ID NO: 1393235 - RNA, 19 nt, Artificial Sequence
  Description of Artificial Sequence: Synthetic oligonucleotide
  Antisense strand to SEQ ID NO: 1393234
uaaacuccugagcucuggu

SEQ ID NO: 1393236 - RNA, 19 nt, Artificial Sequence
  Description of Artificial Sequence: Synthetic oligonucleotide
  Sense strand starting at position 1174 of SEQ ID NO: 1243076
gaagacacucucugugcua

SEQ ID NO: 1393237 - RNA, 19 nt, Artificial Sequence
  Description of Artificial Sequence: Synthetic oligonucleotide
  Antisense strand to SEQ ID NO: 1393236
uagcacagagagugucuuc

SEQ ID NO: 1393238 - RNA, 19 nt, Artificial Sequence
  Description of Artificial Sequence: Synthetic oligonucleotide
  Sense strand starting at position 1177 of SEQ ID NO: 1243076
gacacucucugugcuaagu

SEQ ID NO: 1393239 - RNA, 19 nt, Artificial Sequence
  Description of Artificial Sequence: Synthetic oligonucleotide
  Antisense strand to SEQ ID NO: 1393238
acuuagcacagagaguguc

SEQ ID NO: 1393240 - RNA, 19 nt, Artificial Sequence
  Description of Artificial Sequence: Synthetic oligonucleotide
  Sense strand starting at position 1185 of SEQ ID NO: 1243076
cugugcuaaguagauuaua

SEQ ID NO: 1393241 - RNA, 19 nt, Artificial Sequence
  Description of Artificial Sequence: Synthetic oligonucleotide
  Antisense strand to SEQ ID NO: 1393240
uauaaucuacuuagcacag

SEQ ID NO: 1393242 - RNA, 19 nt, Artificial Sequence
  Description of Artificial Sequence: Synthetic oligonucleotide
  Sense strand starting at position 1218 of SEQ ID NO: 1243076
ugccgaauggcgcuuauca

SEQ ID NO: 1393243 - RNA, 19 nt, Artificial Sequence
  Description of Artificial Sequence: Synthetic oligonucleotide
  Antisense strand to SEQ ID NO: 1393242
ugauaagcgccauucggca

SEQ ID NO: 1393244 - RNA, 19 nt, Artificial Sequence
  Description of Artificial Sequence: Synthetic oligonucleotide
  Sense strand starting at position 1219 of SEQ ID NO: 1243076
gccgaauggcgcuuaucau

SEQ ID NO: 1393245 - RNA, 19 nt, Artificial Sequence
  Description of Artificial Sequence: Synthetic oligonucleotide
  Antisense strand to SEQ ID NO: 1393244
augauaagcgccauucggc

SEQ ID NO: 1393246 - RNA, 19 nt, Artificial Sequence
  Description of Artificial Sequence: Synthetic oligonucleotide
  Sense strand starting at position 1220 of SEQ ID NO: 1243076
ccgaauggcgcuuaucauu

SEQ ID NO: 1393247 - RNA, 19 nt, Artificial Sequence
  Description of Artificial Sequence: Synthetic oligonucleotide
  Antisense strand to SEQ ID NO: 1393246
aaugauaagcgccauucgg

SEQ ID NO: 1393248 - RNA, 19 nt, Artificial Sequence
  Description of Artificial Sequence: Synthetic oligonucleotide
  Sense strand starting at position 1283 of SEQ ID NO: 1243076
acgcgucacacgcgugaua

SEQ ID NO: 1393249 - RNA, 19 nt, Artificial Sequence
  Description of Artificial Sequence: Synthetic oligonucleotide
  Antisense strand to SEQ ID NO: 1393248
uaucacgcgugugacgcgu

SEQ ID NO: 1393250 - RNA, 19 nt, Artificial Sequence
  Description of Artificial Sequence: Synthetic oligonucleotide
  Sense strand starting at position 2013 of SEQ ID NO: 1243076
gggcuaggauuggcugaaa

SEQ ID NO: 1393251 - RNA, 19 nt, Artificial Sequence
  Description of Artificial Sequence: Synthetic oligonucleotide
  Antisense strand to SEQ ID NO: 1393250
uuucagccaauccuagccc

SEQ ID NO: 1393252 - RNA, 19 nt, Artificial Sequence
  Description of Artificial Sequence: Synthetic oligonucleotide
  Sense strand starting at position 2104 of SEQ ID NO: 1243076
gggaaauacuuaugcuaaa

SEQ ID NO: 1393253 - RNA, 19 nt, Artificial Sequence
  Description of Artificial Sequence: Synthetic oligonucleotide
  Antisense strand to SEQ ID NO: 1393252
uuuagcauaaguauuuccc

SEQ ID NO: 1393254 - RNA, 19 nt, Artificial Sequence
  Description of Artificial Sequence: Synthetic oligonucleotide
  Sense strand starting at position 2570 of SEQ ID NO: 1243076
cuagcucuccaguggaaau

SEQ ID NO: 1393255 - RNA, 19 nt, Artificial Sequence
  Description of Artificial Sequence: Synthetic oligonucleotide
  Antisense strand to SEQ ID NO: 1393254
auuuccacuggagagcuag

SEQ ID NO: 1393256 - RNA, 19 nt, Artificial Sequence
  Description of Artificial Sequence: Synthetic oligonucleotide
  Sense strand starting at position 2580 of SEQ ID NO: 1243076
aguggaaauuccucaaggu

SEQ ID NO: 1393257 - RNA, 19 nt, Artificial Sequence
  Description of Artificial Sequence: Synthetic oligonucleotide
  Antisense strand to SEQ ID NO: 1393256
accuugaggaauuuccacu

SEQ ID NO: 1393258 - RNA, 19 nt, Artificial Sequence
  Description of Artificial Sequence: Synthetic oligonucleotide
  Sense strand starting at position 2581 of SEQ ID NO: 1243076
guggaaauuccucaagguc

SEQ ID NO: 1393259 - RNA, 19 nt, Artificial Sequence
  Description of Artificial Sequence: Synthetic oligonucleotide
  Antisense strand to SEQ ID NO: 1393258
gaccuugaggaauuuccac

SEQ ID NO: 1393260 - RNA, 19 nt, Artificial Sequence
  Description of Artificial Sequence: Synthetic oligonucleotide
  Sense strand starting at position 2590 of SEQ ID NO: 1243076
ccucaaggucacugacaau

SEQ ID NO: 1393261 - RNA, 19 nt, Artificial Sequence
  Description of Artificial Sequence: Synthetic oligonucleotide
  Antisense strand to SEQ ID NO: 1393260
auugucagugaccuugagg

SEQ ID NO: 1393262 - RNA, 19 nt, Artificial Sequence
  Description of Artificial Sequence: Synthetic oligonucleotide
  Sense strand starting at position 3190 of SEQ ID NO: 1243076
gguggauggucuugaucuc

SEQ ID NO: 1393263 - RNA, 19 nt, Artificial Sequence
  Description of Artificial Sequence: Synthetic oligonucleotide
  Antisense strand to SEQ ID NO: 1393262
gagaucaagaccauccacc

SEQ ID NO: 1393264 - RNA, 19 nt, Artificial Sequence
  Description of Artificial Sequence: Synthetic oligonucleotide
  Sense strand starting at position 3298 of SEQ ID NO: 1243076
gcaucugagccaugguuga

SEQ ID NO: 1393265 - RNA, 19 nt, Artificial Sequence
  Description of Artificial Sequence: Synthetic oligonucleotide
  Antisense strand to SEQ ID NO: 1393264
ucaaccauggcucagaugc

SEQ ID NO: 1393266 - RNA, 19 nt, Artificial Sequence
  Description of Artificial Sequence: Synthetic oligonucleotide
  Sense strand starting at position 3358 of SEQ ID NO: 1243076
cccgacauuuagucucuuu

SEQ ID NO: 1393267 - RNA, 19 nt, Artificial Sequence
  Description of Artificial Sequence: Synthetic oligonucleotide
  Antisense strand to SEQ ID NO: 1393266
aaagagacuaaaugucggg

SEQ ID NO: 1393268 - RNA, 19 nt, Artificial Sequence
  Description of Artificial Sequence: Synthetic oligonucleotide
  Sense strand starting at position 3520 of SEQ ID NO: 1243076
ggccucagcucccuguuaa

SEQ ID NO: 1393269 - RNA, 19 nt, Artificial Sequence
  Description of Artificial Sequence: Synthetic oligonucleotide
  Antisense strand to SEQ ID NO: 1393268
uuaacagggagcugaggcc

SEQ ID NO: 1393270 - RNA, 19 nt, Artificial Sequence
  Description of Artificial Sequence: Synthetic oligonucleotide
  Sense strand starting at position 3521 of SEQ ID NO: 1243076
gccucagcucccuguuaag

SEQ ID NO: 1393271 - RNA, 19 nt, Artificial Sequence
  Description of Artificial Sequence: Synthetic oligonucleotide
  Antisense strand to SEQ ID NO: 1393270
cuuaacagggagcugaggc

SEQ ID NO: 1393272 - RNA, 19 nt, Artificial Sequence
  Description of Artificial Sequence: Synthetic oligonucleotide
  Sense strand starting at position 3524 of SEQ ID NO: 1243076
ucagcucccuguuaagaca

SEQ ID NO: 1393273 - RNA, 19 nt, Artificial Sequence
  Description of Artificial Sequence: Synthetic oligonucleotide
  Antisense strand to SEQ ID NO: 1393272
ugucuuaacagggagcuga

SEQ ID NO: 1393274 - RNA, 19 nt, Artificial Sequence
  Description of Artificial Sequence: Synthetic oligonucleotide
  Sense strand starting at position 3625 of SEQ ID NO: 1243076
gugcccaccuuguauuaca

SEQ ID NO: 1393275 - RNA, 19 nt, Artificial Sequence
  Description of Artificial Sequence: Synthetic oligonucleotide
  Antisense strand to SEQ ID NO: 1393274
uguaauacaaggugggcac

SEQ ID NO: 1393276 - RNA, 19 nt, Artificial Sequence
  Description of Artificial Sequence: Synthetic oligonucleotide
  Sense strand starting at position 3634 of SEQ ID NO: 1243076
uuguauuacagcugggcaa

SEQ ID NO: 1393277 - RNA, 19 nt, Artificial Sequence
  Description of Artificial Sequence: Synthetic oligonucleotide
  Antisense strand to SEQ ID NO: 1393276
uugcccagcuguaauacaa

SEQ ID NO: 1393278 - RNA, 19 nt, Artificial Sequence
  Description of Artificial Sequence: Synthetic oligonucleotide
  Sense strand starting at position 3636 of SEQ ID NO: 1243076
guauuacagcugggcaaga

SEQ ID NO: 1393279 - RNA, 19 nt, Artificial Sequence
  Description of Artificial Sequence: Synthetic oligonucleotide
  Antisense strand to SEQ ID NO: 1393278
ucuugcccagcuguaauac

SEQ ID NO: 1393280 - RNA, 19 nt, Artificial Sequence
  Description of Artificial Sequence: Synthetic oligonucleotide
  Sense strand starting at position 154 of SEQ ID NO: 1243077
aguggaucgacuugggaga

SEQ ID NO: 1393281 - RNA, 19 nt, Artificial Sequence
  Description of Artificial Sequence: Synthetic oligonucleotide
  Antisense strand to SEQ ID NO: 1393280
ucucccaagucgauccacu

SEQ ID NO: 1393282 - RNA, 19 nt, Artificial Sequence
  Description of Artificial Sequence: Synthetic oligonucleotide
  Sense strand starting at position 258 of SEQ ID NO: 1243077
ggguguuagugcccgggau

SEQ ID NO: 1393283 - RNA, 19 nt, Artificial Sequence
  Description of Artificial Sequence: Synthetic oligonucleotide
  Antisense strand to SEQ ID NO: 1393282
aucccgggcacuaacaccc

SEQ ID NO: 1393284 - RNA, 19 nt, Artificial Sequence
  Description of Artificial Sequence: Synthetic oligonucleotide
  Sense strand starting at position 377 of SEQ ID NO: 1243077
caggacucacggugcuauu

SEQ ID NO: 1393285 - RNA, 19 nt, Artificial Sequence
  Description of Artificial Sequence: Synthetic oligonucleotide
  Antisense strand to SEQ ID NO: 1393284
aauagcaccgugaguccug

SEQ ID NO: 1393286 - RNA, 19 nt, Artificial Sequence
  Description of Artificial Sequence: Synthetic oligonucleotide
  Sense strand starting at position 795 of SEQ ID NO: 1243077
ggaccugccucuugggaaa

SEQ ID NO: 1393287 - RNA, 19 nt, Artificial Sequence
  Description of Artificial Sequence: Synthetic oligonucleotide
  Antisense strand to SEQ ID NO: 1393286
uuucccaagaggcaggucc

SEQ ID NO: 1393288 - RNA, 19 nt, Artificial Sequence
  Description of Artificial Sequence: Synthetic oligonucleotide
  Sense strand starting at position 797 of SEQ ID NO: 1243077
accugccucuugggaaaua

SEQ ID NO: 1393289 - RNA, 19 nt, Artificial Sequence
  Description of Artificial Sequence: Synthetic oligonucleotide
  Antisense strand to SEQ ID NO: 1393288
uauuucccaagaggcaggu

SEQ ID NO: 1393290 - RNA, 19 nt, Artificial Sequence
  Description of Artificial Sequence: Synthetic oligonucleotide
  Sense strand starting at position 808 of SEQ ID NO: 1243077
gggaaauacuugggacgca

SEQ ID NO: 1393291 - RNA, 19 nt, Artificial Sequence
  Description of Artificial Sequence: Synthetic oligonucleotide
  Antisense strand to SEQ ID NO: 1393290
ugcgucccaaguauuuccc

SEQ ID NO: 1393292 - RNA, 19 nt, Artificial Sequence
  Description of Artificial Sequence: Synthetic oligonucleotide
  Sense strand starting at position 902 of SEQ ID NO: 1243077
gcaggacucgcgcucugau

SEQ ID NO: 1393293 - RNA, 19 nt, Artificial Sequence
  Description of Artificial Sequence: Synthetic oligonucleotide
  Antisense strand to SEQ ID NO: 1393292
aucagagcgcgaguccugc

SEQ ID NO: 1393294 - RNA, 19 nt, Artificial Sequence
  Description of Artificial Sequence: Synthetic oligonucleotide
  Sense strand starting at position 939 of SEQ ID NO: 1243077
guccucacuucucucagua

SEQ ID NO: 1393295 - RNA, 19 nt, Artificial Sequence
  Description of Artificial Sequence: Synthetic oligonucleotide
  Antisense strand to SEQ ID NO: 1393294
uacugagagaagugaggac

SEQ ID NO: 1393296 - RNA, 19 nt, Artificial Sequence
  Description of Artificial Sequence: Synthetic oligonucleotide
  Sense strand starting at position 980 of SEQ ID NO: 1243077
gucucagccucugcuugaa

SEQ ID NO: 1393297 - RNA, 19 nt, Artificial Sequence
  Description of Artificial Sequence: Synthetic oligonucleotide
  Antisense strand to SEQ ID NO: 1393296
uucaagcagaggcugagac

SEQ ID NO: 1393298 - RNA, 19 nt, Artificial Sequence
  Description of Artificial Sequence: Synthetic oligonucleotide
  Sense strand starting at position 984 of SEQ ID NO: 1243077
cagccucugcuugaagaga

SEQ ID NO: 1393299 - RNA, 19 nt, Artificial Sequence
  Description of Artificial Sequence: Synthetic oligonucleotide
  Antisense strand to SEQ ID NO: 1393298
ucucuucaagcagaggcug

SEQ ID NO: 1393300 - RNA, 19 nt, Artificial Sequence
  Description of Artificial Sequence: Synthetic oligonucleotide
  Sense strand starting at position 1283 of SEQ ID NO: 1243077
accagagcucaggaguuua

SEQ ID NO: 1393301 - RNA, 19 nt, Artificial Sequence
  Description of Artificial Sequence: Synthetic oligonucleotide
  Antisense strand to SEQ ID NO: 1393300
uaaacuccugagcucuggu

SEQ ID NO: 1393302 - RNA, 19 nt, Artificial Sequence
  Description of Artificial Sequence: Synthetic oligonucleotide
  Sense strand starting at position 1728 of SEQ ID NO: 1243077
gaagacacucucugugcua

SEQ ID NO: 1393303 - RNA, 19 nt, Artificial Sequence
  Description of Artificial Sequence: Synthetic oligonucleotide
  Antisense strand to SEQ ID NO: 1393302
uagcacagagagugucuuc

SEQ ID NO: 1393304 - RNA, 19 nt, Artificial Sequence
  Description of Artificial Sequence: Synthetic oligonucleotide
  Sense strand starting at position 1731 of SEQ ID NO: 1243077
gacacucucugugcuaagu

SEQ ID NO: 1393305 - RNA, 19 nt, Artificial Sequence
  Description of Artificial Sequence: Synthetic oligonucleotide
  Antisense strand to SEQ ID NO: 1393304
acuuagcacagagaguguc

SEQ ID NO: 1393306 - RNA, 19 nt, Artificial Sequence
  Description of Artificial Sequence: Synthetic oligonucleotide
  Sense strand starting at position 1739 of SEQ ID NO: 1243077
cugugcuaaguagauuaua

SEQ ID NO: 1393307 - RNA, 19 nt, Artificial Sequence
  Description of Artificial Sequence: Synthetic oligonucleotide
  Antisense strand to SEQ ID NO: 1393306
uauaaucuacuuagcacag

SEQ ID NO: 1393308 - RNA, 19 nt, Artificial Sequence
  Description of Artificial Sequence: Synthetic oligonucleotide
  Sense strand starting at position 1772 of SEQ ID NO: 1243077
ugccgaauggcgcuuauca

SEQ ID NO: 1393309 - RNA, 19 nt, Artificial Sequence
  Description of Artificial Sequence: Synthetic oligonucleotide
  Antisense strand to SEQ ID NO: 1393308
ugauaagcgccauucggca

SEQ ID NO: 1393310 - RNA, 19 nt, Artificial Sequence
  Description of Artificial Sequence: Synthetic oligonucleotide
  Sense strand starting at position 1773 of SEQ ID NO: 1243077
gccgaauggcgcuuaucau

SEQ ID NO: 1393311 - RNA, 19 nt, Artificial Sequence
  Description of Artificial Sequence: Synthetic oligonucleotide
  Antisense strand to SEQ ID NO: 1393310
augauaagcgccauucggc

SEQ ID NO: 1393312 - RNA, 19 nt, Artificial Sequence
  Description of Artificial Sequence: Synthetic oligonucleotide
  Sense strand starting at position 1774 of SEQ ID NO: 1243077
ccgaauggcgcuuaucauu

SEQ ID NO: 1393313 - RNA, 19 nt, Artificial Sequence
  Description of Artificial Sequence: Synthetic oligonucleotide
  Antisense strand to SEQ ID NO: 1393312
aaugauaagcgccauucgg

SEQ ID NO: 1393314 - RNA, 19 nt, Artificial Sequence
  Description of Artificial Sequence: Synthetic oligonucleotide
  Sense strand starting at position 1837 of SEQ ID NO: 1243077
acgcgucacacgcgugaua

SEQ ID NO: 1393315 - RNA, 19 nt, Artificial Sequence
  Description of Artificial Sequence: Synthetic oligonucleotide
  Antisense strand to SEQ ID NO: 1393314
uaucacgcgugugacgcgu

SEQ ID NO: 1393316 - RNA, 19 nt, Artificial Sequence
  Description of Artificial Sequence: Synthetic oligonucleotide
  Sense strand starting at position 2567 of SEQ ID NO: 1243077
gggcuaggauuggcugaaa

SEQ ID NO: 1393317 - RNA, 19 nt, Artificial Sequence
  Description of Artificial Sequence: Synthetic oligonucleotide
  Antisense strand to SEQ ID NO: 1393316
uuucagccaauccuagccc

SEQ ID NO: 1393318 - RNA, 19 nt, Artificial Sequence
  Description of Artificial Sequence: Synthetic oligonucleotide
  Sense strand starting at position 2658 of SEQ ID NO: 1243077
gggaaauacuuaugcuaaa

SEQ ID NO: 1393319 - RNA, 19 nt, Artificial Sequence
  Description of Artificial Sequence: Synthetic oligonucleotide
  Antisense strand to SEQ ID NO: 1393318
uuuagcauaaguauuuccc

SEQ ID NO: 1393320 - RNA, 19 nt, Artificial Sequence
  Description of Artificial Sequence: Synthetic oligonucleotide
  Sense strand starting at position 3124 of SEQ ID NO: 1243077
cuagcucuccaguggaaau

SEQ ID NO: 1393321 - RNA, 19 nt, Artificial Sequence
  Description of Artificial Sequence: Synthetic oligonucleotide
  Antisense strand to SEQ ID NO: 1393320
auuuccacuggagagcuag

SEQ ID NO: 1393322 - RNA, 19 nt, Artificial Sequence
  Description of Artificial Sequence: Synthetic oligonucleotide
  Sense strand starting at position 3134 of SEQ ID NO: 1243077
aguggaaauuccucaaggu

SEQ ID NO: 1393323 - RNA, 19 nt, Artificial Sequence
  Description of Artificial Sequence: Synthetic oligonucleotide
  Antisense strand to SEQ ID NO: 1393322
accuugaggaauuuccacu

SEQ ID NO: 1393324 - RNA, 19 nt, Artificial Sequence
  Description of Artificial Sequence: Synthetic oligonucleotide
  Sense strand starting at position 3135 of SEQ ID NO: 1243077
guggaaauuccucaagguc

SEQ ID NO: 1393325 - RNA, 19 nt, Artificial Sequence
  Description of Artificial Sequence: Synthetic oligonucleotide
  Antisense strand to SEQ ID NO: 1393324
gaccuugaggaauuuccac

SEQ ID NO: 1393326 - RNA, 19 nt, Artificial Sequence
  Description of Artificial Sequence: Synthetic oligonucleotide
  Sense strand starting at position 3144 of SEQ ID NO: 1243077
ccucaaggucacugacaau

SEQ ID NO: 1393327 - RNA, 19 nt, Artificial Sequence
  Description of Artificial Sequence: Synthetic oligonucleotide
  Antisense strand to SEQ ID NO: 1393326
auugucagugaccuugagg

SEQ ID NO: 1393328 - RNA, 19 nt, Artificial Sequence
  Description of Artificial Sequence: Synthetic oligonucleotide
  Sense strand starting at position 3744 of SEQ ID NO: 1243077
gguggauggucuugaucuc

SEQ ID NO: 1393329 - RNA, 19 nt, Artificial Sequence
  Description of Artificial Sequence: Synthetic oligonucleotide
  Antisense strand to SEQ ID NO: 1393328
gagaucaagaccauccacc

SEQ ID NO: 1393330 - RNA, 19 nt, Artificial Sequence
  Description of Artificial Sequence: Synthetic oligonucleotide
  Sense strand starting at position 3852 of SEQ ID NO: 1243077
gcaucugagccaugguuga

SEQ ID NO: 1393331 - RNA, 19 nt, Artificial Sequence
  Description of Artificial Sequence: Synthetic oligonucleotide
  Antisense strand to SEQ ID NO: 1393330
ucaaccauggcucagaugc

SEQ ID NO: 1393332 - RNA, 19 nt, Artificial Sequence
  Description of Artificial Sequence: Synthetic oligonucleotide
  Sense strand starting at position 3912 of SEQ ID NO: 1243077
cccgacauuuagucucuuu

SEQ ID NO: 1393333 - RNA, 19 nt, Artificial Sequence
  Description of Artificial Sequence: Synthetic oligonucleotide
  Antisense strand to SEQ ID NO: 1393332
aaagagacuaaaugucggg

SEQ ID NO: 1393334 - RNA, 19 nt, Artificial Sequence
  Description of Artificial Sequence: Synthetic oligonucleotide
  Sense strand starting at position 68 of SEQ ID NO: 1243078
guugucacucuugacauua

SEQ ID NO: 1393335 - RNA, 19 nt, Artificial Sequence
  Description of Artificial Sequence: Synthetic oligonucleotide
  Antisense strand to SEQ ID NO: 1393334
uaaugucaagagugacaac

SEQ ID NO: 1393336 - RNA, 19 nt, Artificial Sequence
  Description of Artificial Sequence: Synthetic oligonucleotide
  Sense strand starting at position 148 of SEQ ID NO: 1243078
uaaacaucugauuaacggu

SEQ ID NO: 1393337 - RNA, 19 nt, Artificial Sequence
  Description of Artificial Sequence: Synthetic oligonucleotide
  Antisense strand to SEQ ID NO: 1393336
accguuaaucagauguuua

SEQ ID NO: 1393338 - RNA, 19 nt, Artificial Sequence
  Description of Artificial Sequence: Synthetic oligonucleotide
  Sense strand starting at position 162 of SEQ ID NO: 1243078
acgguaagacagugauaua

SEQ ID NO: 1393339 - RNA, 19 nt, Artificial Sequence
  Description of Artificial Sequence: Synthetic oligonucleotide
  Antisense strand to SEQ ID NO: 1393338
uauaucacugucuuaccgu

SEQ ID NO: 1393340 - RNA, 19 nt, Artificial Sequence
  Description of Artificial Sequence: Synthetic oligonucleotide
  Sense strand starting at position 189 of SEQ ID NO: 1243078
ugcaaauaacccuggauua

SEQ ID NO: 1393341 - RNA, 19 nt, Artificial Sequence
  Description of Artificial Sequence: Synthetic oligonucleotide
  Antisense strand to SEQ ID NO: 1393340
uaauccaggguuauuugca

SEQ ID NO: 1393342 - RNA, 19 nt, Artificial Sequence
  Description of Artificial Sequence: Synthetic oligonucleotide
  Sense strand starting at position 190 of SEQ ID NO: 1243078
gcaaauaacccuggauuag

SEQ ID NO: 1393343 - RNA, 19 nt, Artificial Sequence
  Description of Artificial Sequence: Synthetic oligonucleotide
  Antisense strand to SEQ ID NO: 1393342
cuaauccaggguuauuugc

SEQ ID NO: 1393344 - RNA, 19 nt, Artificial Sequence
  Description of Artificial Sequence: Synthetic oligonucleotide
  Sense strand starting at position 213 of SEQ ID NO: 1243078
ggugaucagcaagagcuuu

SEQ ID NO: 1393345 - RNA, 19 nt, Artificial Sequence
  Description of Artificial Sequence: Synthetic oligonucleotide
  Antisense strand to SEQ ID NO: 1393344
aaagcucuugcugaucacc

SEQ ID NO: 1393346 - RNA, 19 nt, Artificial Sequence
  Description of Artificial Sequence: Synthetic oligonucleotide
  Sense strand starting at position 343 of SEQ ID NO: 1243078
guauuagaguucuuaaaug

SEQ ID NO: 1393347 - RNA, 19 nt, Artificial Sequence
  Description of Artificial Sequence: Synthetic oligonucleotide
  Antisense strand to SEQ ID NO: 1393346
cauuuaagaacucuaauac

SEQ ID NO: 1393348 - RNA, 19 nt, Artificial Sequence
  Description of Artificial Sequence: Synthetic oligonucleotide
  Sense strand starting at position 348 of SEQ ID NO: 1243078
agaguucuuaaauggguca

SEQ ID NO: 1393349 - RNA, 19 nt, Artificial Sequence
  Description of Artificial Sequence: Synthetic oligonucleotide
  Antisense strand to SEQ ID NO: 1393348
ugacccauuuaagaacucu

SEQ ID NO: 1393350 - RNA, 19 nt, Artificial Sequence
  Description of Artificial Sequence: Synthetic oligonucleotide
  Sense strand starting at position 353 of SEQ ID NO: 1243078
ucuuaaaugggucaaguca

SEQ ID NO: 1393351 - RNA, 19 nt, Artificial Sequence
  Description of Artificial Sequence: Synthetic oligonucleotide
  Antisense strand to SEQ ID NO: 1393350
ugacuugacccauuuaaga

SEQ ID NO: 1393352 - RNA, 19 nt, Artificial Sequence
  Description of Artificial Sequence: Synthetic oligonucleotide
  Sense strand starting at position 641 of SEQ ID NO: 1243078
ccgugauaacaccacugua

SEQ ID NO: 1393353 - RNA, 19 nt, Artificial Sequence
  Description of Artificial Sequence: Synthetic oligonucleotide
  Antisense strand to SEQ ID NO: 1393352
uacagugguguuaucacgg

SEQ ID NO: 1393354 - RNA, 19 nt, Artificial Sequence
  Description of Artificial Sequence: Synthetic oligonucleotide
  Sense strand starting at position 762 of SEQ ID NO: 1243078
cuucuuucgggucauaauc

SEQ ID NO: 1393355 - RNA, 19 nt, Artificial Sequence
  Description of Artificial Sequence: Synthetic oligonucleotide
  Antisense strand to SEQ ID NO: 1393354
gauuaugacccgaaagaag

SEQ ID NO: 1393356 - RNA, 19 nt, Artificial Sequence
  Description of Artificial Sequence: Synthetic oligonucleotide
  Sense strand starting at position 792 of SEQ ID NO: 1243078
aaaguaugugucugcauuu

SEQ ID NO: 1393357 - RNA, 19 nt, Artificial Sequence
  Description of Artificial Sequence: Synthetic oligonucleotide
  Antisense strand to SEQ ID NO: 1393356
aaaugcagacacauacuuu

SEQ ID NO: 1393358 - RNA, 19 nt, Artificial Sequence
  Description of Artificial Sequence: Synthetic oligonucleotide
  Sense strand starting at position 793 of SEQ ID NO: 1243078
aaguaugugucugcauuua

SEQ ID NO: 1393359 - RNA, 19 nt, Artificial Sequence
  Description of Artificial Sequence: Synthetic oligonucleotide
  Antisense strand to SEQ ID NO: 1393358
uaaaugcagacacauacuu

SEQ ID NO: 1393360 - RNA, 19 nt, Artificial Sequence
  Description of Artificial Sequence: Synthetic oligonucleotide
  Sense strand starting at position 814 of SEQ ID NO: 1243078
augaaugaacugugcuaau

SEQ ID NO: 1393361 - RNA, 19 nt, Artificial Sequence
  Description of Artificial Sequence: Synthetic oligonucleotide
  Antisense strand to SEQ ID NO: 1393360
auuagcacaguucauucau

SEQ ID NO: 1393362 - RNA, 19 nt, Artificial Sequence
  Description of Artificial Sequence: Synthetic oligonucleotide
  Sense strand starting at position 833 of SEQ ID NO: 1243078
gccugauuaccucaaguca

SEQ ID NO: 1393363 - RNA, 19 nt, Artificial Sequence
  Description of Artificial Sequence: Synthetic oligonucleotide
  Antisense strand to SEQ ID NO: 1393362
ugacuugagguaaucaggc

SEQ ID NO: 1393364 - RNA, 19 nt, Artificial Sequence
  Description of Artificial Sequence: Synthetic oligonucleotide
  Sense strand starting at position 971 of SEQ ID NO: 1243078
ccuauuuaccuuugugcau

SEQ ID NO: 1393365 - RNA, 19 nt, Artificial Sequence
  Description of Artificial Sequence: Synthetic oligonucleotide
  Antisense strand to SEQ ID NO: 1393364
augcacaaagguaaauagg

SEQ ID NO: 1393366 - RNA, 19 nt, Artificial Sequence
  Description of Artificial Sequence: Synthetic oligonucleotide
  Sense strand starting at position 972 of SEQ ID NO: 1243078
cuauuuaccuuugugcauu

SEQ ID NO: 1393367 - RNA, 19 nt, Artificial Sequence
  Description of Artificial Sequence: Synthetic oligonucleotide
  Antisense strand to SEQ ID NO: 1393366
aaugcacaaagguaaauag

SEQ ID NO: 1393368 - RNA, 19 nt, Artificial Sequence
  Description of Artificial Sequence: Synthetic oligonucleotide
  Sense strand starting at position 1197 of SEQ ID NO: 1243078
agugcugaguauuuaguaa

SEQ ID NO: 1393369 - RNA, 19 nt, Artificial Sequence
  Description of Artificial Sequence: Synthetic oligonucleotide
  Antisense strand to SEQ ID NO: 1393368
uuacuaaauacucagcacu

SEQ ID NO: 1393370 - RNA, 19 nt, Artificial Sequence
  Description of Artificial Sequence: Synthetic oligonucleotide
  Sense strand starting at position 1331 of SEQ ID NO: 1243078
ggcgaagugagcgugcuau

SEQ ID NO: 1393371 - RNA, 19 nt, Artificial Sequence
  Description of Artificial Sequence: Synthetic oligonucleotide
  Antisense strand to SEQ ID NO: 1393370
auagcacgcucacuucgcc

SEQ ID NO: 1393372 - RNA, 19 nt, Artificial Sequence
  Description of Artificial Sequence: Synthetic oligonucleotide
  Sense strand starting at position 2353 of SEQ ID NO: 1243078
aucagagucaccugggaac

SEQ ID NO: 1393373 - RNA, 19 nt, Artificial Sequence
  Description of Artificial Sequence: Synthetic oligonucleotide
  Antisense strand to SEQ ID NO: 1393372
guucccaggugacucugau

SEQ ID NO: 1393374 - RNA, 19 nt, Artificial Sequence
  Description of Artificial Sequence: Synthetic oligonucleotide
  Sense strand starting at position 2448 of SEQ ID NO: 1243078
ggaauaugcuugcuuaaga

SEQ ID NO: 1393375 - RNA, 19 nt, Artificial Sequence
  Description of Artificial Sequence: Synthetic oligonucleotide
  Antisense strand to SEQ ID NO: 1393374
ucuuaagcaagcauauucc

SEQ ID NO: 1393376 - RNA, 19 nt, Artificial Sequence
  Description of Artificial Sequence: Synthetic oligonucleotide
  Sense strand starting at position 2449 of SEQ ID NO: 1243078
gaauaugcuugcuuaagag

SEQ ID NO: 1393377 - RNA, 19 nt, Artificial Sequence
  Description of Artificial Sequence: Synthetic oligonucleotide
  Antisense strand to SEQ ID NO: 1393376
cucuuaagcaagcauauuc

SEQ ID NO: 1393378 - RNA, 19 nt, Artificial Sequence
  Description of Artificial Sequence: Synthetic oligonucleotide
  Sense strand starting at position 2527 of SEQ ID NO: 1243078
ucaccauucgcgucagugu

SEQ ID NO: 1393379 - RNA, 19 nt, Artificial Sequence
  Description of Artificial Sequence: Synthetic oligonucleotide
  Antisense strand to SEQ ID NO: 1393378
acacugacgcgaaugguga

SEQ ID NO: 1393380 - RNA, 19 nt, Artificial Sequence
  Description of Artificial Sequence: Synthetic oligonucleotide
  Sense strand starting at position 2535 of SEQ ID NO: 1243078
cgcgucagugucuuacaca

SEQ ID NO: 1393381 - RNA, 19 nt, Artificial Sequence
  Description of Artificial Sequence: Synthetic oligonucleotide
  Antisense strand to SEQ ID NO: 1393380
uguguaagacacugacgcg

SEQ ID NO: 1393382 - RNA, 19 nt, Artificial Sequence
  Description of Artificial Sequence: Synthetic oligonucleotide
  Sense strand starting at position 2709 of SEQ ID NO: 1243078
agccauacccuugagcaaa

SEQ ID NO: 1393383 - RNA, 19 nt, Artificial Sequence
  Description of Artificial Sequence: Synthetic oligonucleotide
  Antisense strand to SEQ ID NO: 1393382
uuugcucaaggguauggcu

SEQ ID NO: 1393384 - RNA, 19 nt, Artificial Sequence
  Description of Artificial Sequence: Synthetic oligonucleotide
  Sense strand starting at position 2809 of SEQ ID NO: 1243078
gaaagauaggccugaacuc

SEQ ID NO: 1393385 - RNA, 19 nt, Artificial Sequence
  Description of Artificial Sequence: Synthetic oligonucleotide
  Antisense strand to SEQ ID NO: 1393384
gaguucaggccuaucuuuc

SEQ ID NO: 1393386 - RNA, 19 nt, Artificial Sequence
  Description of Artificial Sequence: Synthetic oligonucleotide
  Sense strand starting at position 2850 of SEQ ID NO: 1243078
ccauuacaaucuguagaag

SEQ ID NO: 1393387 - RNA, 19 nt, Artificial Sequence
  Description of Artificial Sequence: Synthetic oligonucleotide
  Antisense strand to SEQ ID NO: 1393386
cuucuacagauuguaaugg

SEQ ID NO: 1393388 - RNA, 19 nt, Artificial Sequence
  Description of Artificial Sequence: Synthetic oligonucleotide
  Sense strand starting at position 2941 of SEQ ID NO: 1243078
uuccacucugauggaaaua

SEQ ID NO: 1393389 - RNA, 19 nt, Artificial Sequence
  Description of Artificial Sequence: Synthetic oligonucleotide
  Antisense strand to SEQ ID NO: 1393388
uauuuccaucagaguggaa

SEQ ID NO: 1393390 - RNA, 19 nt, Artificial Sequence
  Description of Artificial Sequence: Synthetic oligonucleotide
  Sense strand starting at position 3074 of SEQ ID NO: 1243078
ggagguaguucuguaugag

SEQ ID NO: 1393391 - RNA, 19 nt, Artificial Sequence
  Description of Artificial Sequence: Synthetic oligonucleotide
  Antisense strand to SEQ ID NO: 1393390
cucauacagaacuaccucc

SEQ ID NO: 1393392 - RNA, 19 nt, Artificial Sequence
  Description of Artificial Sequence: Synthetic oligonucleotide
  Sense strand starting at position 3075 of SEQ ID NO: 1243078
gagguaguucuguaugagg

SEQ ID NO: 1393393 - RNA, 19 nt, Artificial Sequence
  Description of Artificial Sequence: Synthetic oligonucleotide
  Antisense strand to SEQ ID NO: 1393392
ccucauacagaacuaccuc

SEQ ID NO: 1393394 - RNA, 19 nt, Artificial Sequence
  Description of Artificial Sequence: Synthetic oligonucleotide
  Sense strand starting at position 3227 of SEQ ID NO: 1243078
uuucuaagaaguggugaaa

SEQ ID NO: 1393395 - RNA, 19 nt, Artificial Sequence
  Description of Artificial Sequence: Synthetic oligonucleotide
  Antisense strand to SEQ ID NO: 1393394
uuucaccacuucuuagaaa

SEQ ID NO: 1393396 - RNA, 19 nt, Artificial Sequence
  Description of Artificial Sequence: Synthetic oligonucleotide
  Sense strand starting at position 3353 of SEQ ID NO: 1243078
uuaggaaucuugucuugaa

SEQ ID NO: 1393397 - RNA, 19 nt, Artificial Sequence
  Description of Artificial Sequence: Synthetic oligonucleotide
  Antisense strand to SEQ ID NO: 1393396
uucaagacaagauuccuaa

SEQ ID NO: 1393398 - RNA, 19 nt, Artificial Sequence
  Description of Artificial Sequence: Synthetic oligonucleotide
  Sense strand starting at position 3357 of SEQ ID NO: 1243078
gaaucuugucuugaaagcu

SEQ ID NO: 1393399 - RNA, 19 nt, Artificial Sequence
  Description of Artificial Sequence: Synthetic oligonucleotide
  Antisense strand to SEQ ID NO: 1393398
agcuuucaagacaagauuc

SEQ ID NO: 1393400 - RNA, 19 nt, Artificial Sequence
  Description of Artificial Sequence: Synthetic oligonucleotide
  Sense strand starting at position 3383 of SEQ ID NO: 1243078
gcuuaagcauuugcuaagu

SEQ ID NO: 1393401 - RNA, 19 nt, Artificial Sequence
  Description of Artificial Sequence: Synthetic oligonucleotide
  Antisense strand to SEQ ID NO: 1393400
acuuagcaaaugcuuaagc

SEQ ID NO: 1393402 - RNA, 19 nt, Artificial Sequence
  Description of Artificial Sequence: Synthetic oligonucleotide
  Sense strand starting at position 3388 of SEQ ID NO: 1243078
agcauuugcuaaguguagu

SEQ ID NO: 1393403 - RNA, 19 nt, Artificial Sequence
  Description of Artificial Sequence: Synthetic oligonucleotide
  Antisense strand to SEQ ID NO: 1393402
acuacacuuagcaaaugcu

SEQ ID NO: 1393404 - RNA, 19 nt, Artificial Sequence
  Description of Artificial Sequence: Synthetic oligonucleotide
  Sense strand starting at position 3456 of SEQ ID NO: 1243078
uguaauuucuggcuucugu

SEQ ID NO: 1393405 - RNA, 19 nt, Artificial Sequence
  Description of Artificial Sequence: Synthetic oligonucleotide
  Antisense strand to SEQ ID NO: 1393404
acagaagccagaaauuaca

SEQ ID NO: 1393406 - RNA, 19 nt, Artificial Sequence
  Description of Artificial Sequence: Synthetic oligonucleotide
  Sense strand starting at position 3634 of SEQ ID NO: 1243078
uguuuaaccaaggaagugu

SEQ ID NO: 1393407 - RNA, 19 nt, Artificial Sequence
  Description of Artificial Sequence: Synthetic oligonucleotide
  Antisense strand to SEQ ID NO: 1393406
acacuuccuugguuaaaca

SEQ ID NO: 1393408 - RNA, 19 nt, Artificial Sequence
  Description of Artificial Sequence: Synthetic oligonucleotide
  Sense strand starting at position 3647 of SEQ ID NO: 1243078
aagugugagacugguagau

SEQ ID NO: 1393409 - RNA, 19 nt, Artificial Sequence
  Description of Artificial Sequence: Synthetic oligonucleotide
  Antisense strand to SEQ ID NO: 1393408
aucuaccagucucacacuu

SEQ ID NO: 1393410 - RNA, 19 nt, Artificial Sequence
  Description of Artificial Sequence: Synthetic oligonucleotide
  Sense strand starting at position 3713 of SEQ ID NO: 1243078
aauggaaugguccaugcau

SEQ ID NO: 1393411 - RNA, 19 nt, Artificial Sequence
  Description of Artificial Sequence: Synthetic oligonucleotide
  Antisense strand to SEQ ID NO: 1393410
augcauggaccauuccauu

SEQ ID NO: 1393412 - RNA, 19 nt, Artificial Sequence
  Description of Artificial Sequence: Synthetic oligonucleotide
  Sense strand starting at position 3780 of SEQ ID NO: 1243078
uggaucuguguccaaccaa

SEQ ID NO: 1393413 - RNA, 19 nt, Artificial Sequence
  Description of Artificial Sequence: Synthetic oligonucleotide
  Antisense strand to SEQ ID NO: 1393412
uugguuggacacagaucca

SEQ ID NO: 1393414 - RNA, 19 nt, Artificial Sequence
  Description of Artificial Sequence: Synthetic oligonucleotide
  Sense strand starting at position 859 of SEQ ID NO: 1243079
ggucuuaccucggcaugga

SEQ ID NO: 1393415 - RNA, 19 nt, Artificial Sequence
  Description of Artificial Sequence: Synthetic oligonucleotide
  Antisense strand to SEQ ID NO: 1393414
uccaugccgagguaagacc

SEQ ID NO: 1393416 - RNA, 19 nt, Artificial Sequence
  Description of Artificial Sequence: Synthetic oligonucleotide
  Sense strand starting at position 2074 of SEQ ID NO: 1243079
gggugucucuggccauuga

SEQ ID NO: 1393417 - RNA, 19 nt, Artificial Sequence
  Description of Artificial Sequence: Synthetic oligonucleotide
  Antisense strand to SEQ ID NO: 1393416
ucaauggccagagacaccc

SEQ ID NO: 1393418 - RNA, 19 nt, Artificial Sequence
  Description of Artificial Sequence: Synthetic oligonucleotide
  Sense strand starting at position 2075 of SEQ ID NO: 1243079
ggugucucuggccauugaa

SEQ ID NO: 1393419 - RNA, 19 nt, Artificial Sequence
  Description of Artificial Sequence: Synthetic oligonucleotide
  Antisense strand to SEQ ID NO: 1393418
uucaauggccagagacacc

SEQ ID NO: 1393420 - RNA, 19 nt, Artificial Sequence
  Description of Artificial Sequence: Synthetic oligonucleotide
  Sense strand starting at position 2078 of SEQ ID NO: 1243079
gucucuggccauugaauaa

SEQ ID NO: 1393421 - RNA, 19 nt, Artificial Sequence
  Description of Artificial Sequence: Synthetic oligonucleotide
  Antisense strand to SEQ ID NO: 1393420
uuauucaauggccagagac

SEQ ID NO: 1393422 - RNA, 19 nt, Artificial Sequence
  Description of Artificial Sequence: Synthetic oligonucleotide
  Sense strand starting at position 2244 of SEQ ID NO: 1243079
ccauguucuuaucgggaac

SEQ ID NO: 1393423 - RNA, 19 nt, Artificial Sequence
  Description of Artificial Sequence: Synthetic oligonucleotide
  Antisense strand to SEQ ID NO: 1393422
guucccgauaagaacaugg

SEQ ID NO: 1393424 - RNA, 19 nt, Artificial Sequence
  Description of Artificial Sequence: Synthetic oligonucleotide
  Sense strand starting at position 2246 of SEQ ID NO: 1243079
auguucuuaucgggaacgu

SEQ ID NO: 1393425 - RNA, 19 nt, Artificial Sequence
  Description of Artificial Sequence: Synthetic oligonucleotide
  Antisense strand to SEQ ID NO: 1393424
acguucccgauaagaacau

SEQ ID NO: 1393426 - RNA, 19 nt, Artificial Sequence
  Description of Artificial Sequence: Synthetic oligonucleotide
  Sense strand starting at position 2417 of SEQ ID NO: 1243079
agcuuaacgagcuggauuu

SEQ ID NO: 1393427 - RNA, 19 nt, Artificial Sequence
  Description of Artificial Sequence: Synthetic oligonucleotide
  Antisense strand to SEQ ID NO: 1393426
aaauccagcucguuaagcu

SEQ ID NO: 1393428 - RNA, 19 nt, Artificial Sequence
  Description of Artificial Sequence: Synthetic oligonucleotide
  Sense strand starting at position 2435 of SEQ ID NO: 1243079
ucauucuauuccggaagca

SEQ ID NO: 1393429 - RNA, 19 nt, Artificial Sequence
  Description of Artificial Sequence: Synthetic oligonucleotide
  Antisense strand to SEQ ID NO: 1393428
ugcuuccggaauagaauga

SEQ ID NO: 1393430 - RNA, 19 nt, Artificial Sequence
  Description of Artificial Sequence: Synthetic oligonucleotide
  Sense strand starting at position 2743 of SEQ ID NO: 1243079
ggcagagugccuuagagag

SEQ ID NO: 1393431 - RNA, 19 nt, Artificial Sequence
  Description of Artificial Sequence: Synthetic oligonucleotide
  Antisense strand to SEQ ID NO: 1393430
cucucuaaggcacucugcc

SEQ ID NO: 1393432 - RNA, 19 nt, Artificial Sequence
  Description of Artificial Sequence: Synthetic oligonucleotide
  Sense strand starting at position 2875 of SEQ ID NO: 1243079
cugggaaguugguuucuaa

SEQ ID NO: 1393433 - RNA, 19 nt, Artificial Sequence
  Description of Artificial Sequence: Synthetic oligonucleotide
  Antisense strand to SEQ ID NO: 1393432
uuagaaaccaacuucccag

SEQ ID NO: 1393434 - RNA, 19 nt, Artificial Sequence
  Description of Artificial Sequence: Synthetic oligonucleotide
  Sense strand starting at position 2879 of SEQ ID NO: 1243079
gaaguugguuucuaaauuc

SEQ ID NO: 1393435 - RNA, 19 nt, Artificial Sequence
  Description of Artificial Sequence: Synthetic oligonucleotide
  Antisense strand to SEQ ID NO: 1393434
gaauuuagaaaccaacuuc

SEQ ID NO: 1393436 - RNA, 19 nt, Artificial Sequence
  Description of Artificial Sequence: Synthetic oligonucleotide
  Sense strand starting at position 2920 of SEQ ID NO: 1243079
ggaaaugugcaguggucuu

SEQ ID NO: 1393437 - RNA, 19 nt, Artificial Sequence
  Description of Artificial Sequence: Synthetic oligonucleotide
  Antisense strand to SEQ ID NO: 1393436
aagaccacugcacauuucc

SEQ ID NO: 1393438 - RNA, 19 nt, Artificial Sequence
  Description of Artificial Sequence: Synthetic oligonucleotide
  Sense strand starting at position 2994 of SEQ ID NO: 1243079
gauauuuagucccgauuag

SEQ ID NO: 1393439 - RNA, 19 nt, Artificial Sequence
  Description of Artificial Sequence: Synthetic oligonucleotide
  Antisense strand to SEQ ID NO: 1393438
cuaaucgggacuaaauauc

SEQ ID NO: 1393440 - RNA, 19 nt, Artificial Sequence
  Description of Artificial Sequence: Synthetic oligonucleotide
  Sense strand starting at position 3346 of SEQ ID NO: 1243079
gggcuagcuguuagugaga

SEQ ID NO: 1393441 - RNA, 19 nt, Artificial Sequence
  Description of Artificial Sequence: Synthetic oligonucleotide
  Antisense strand to SEQ ID NO: 1393440
ucucacuaacagcuagccc

SEQ ID NO: 1393442 - RNA, 19 nt, Artificial Sequence
  Description of Artificial Sequence: Synthetic oligonucleotide
  Sense strand starting at position 3374 of SEQ ID NO: 1243079
gaaugaguggagcaacguu

SEQ ID NO: 1393443 - RNA, 19 nt, Artificial Sequence
  Description of Artificial Sequence: Synthetic oligonucleotide
  Antisense strand to SEQ ID NO: 1393442
aacguugcuccacucauuc

SEQ ID NO: 1393444 - RNA, 19 nt, Artificial Sequence
  Description of Artificial Sequence: Synthetic oligonucleotide
  Sense strand starting at position 3406 of SEQ ID NO: 1243079
gucggucaagucuggugau

SEQ ID NO: 1393445 - RNA, 19 nt, Artificial Sequence
  Description of Artificial Sequence: Synthetic oligonucleotide
  Antisense strand to SEQ ID NO: 1393444
aucaccagacuugaccgac

SEQ ID NO: 1393446 - RNA, 19 nt, Artificial Sequence
  Description of Artificial Sequence: Synthetic oligonucleotide
  Sense strand starting at position 3407 of SEQ ID NO: 1243079
ucggucaagucuggugauu

SEQ ID NO: 1393447 - RNA, 19 nt, Artificial Sequence
  Description of Artificial Sequence: Synthetic oligonucleotide
  Antisense strand to SEQ ID NO: 1393446
aaucaccagacuugaccga

SEQ ID NO: 1393448 - RNA, 19 nt, Artificial Sequence
  Description of Artificial Sequence: Synthetic oligonucleotide
  Sense strand starting at position 3457 of SEQ ID NO: 1243079
ccaauccugccuuaaggaa

SEQ ID NO: 1393449 - RNA, 19 nt, Artificial Sequence
  Description of Artificial Sequence: Synthetic oligonucleotide
  Antisense strand to SEQ ID NO: 1393448
uuccuuaaggcaggauugg

SEQ ID NO: 1393450 - RNA, 19 nt, Artificial Sequence
  Description of Artificial Sequence: Synthetic oligonucleotide
  Sense strand starting at position 3517 of SEQ ID NO: 1243079
gguucuggcuccuauaggu

SEQ ID NO: 1393451 - RNA, 19 nt, Artificial Sequence
  Description of Artificial Sequence: Synthetic oligonucleotide
  Antisense strand to SEQ ID NO: 1393450
accuauaggagccagaacc

SEQ ID NO: 1393452 - RNA, 19 nt, Artificial Sequence
  Description of Artificial Sequence: Synthetic oligonucleotide
  Sense strand starting at position 3575 of SEQ ID NO: 1243079
ccaagauagcuggguuucu

SEQ ID NO: 1393453 - RNA, 19 nt, Artificial Sequence
  Description of Artificial Sequence: Synthetic oligonucleotide
  Antisense strand to SEQ ID NO: 1393452
agaaacccagcuaucuugg

SEQ ID NO: 1393454 - RNA, 19 nt, Artificial Sequence
  Description of Artificial Sequence: Synthetic oligonucleotide
  Sense strand starting at position 3576 of SEQ ID NO: 1243079
caagauagcuggguuucua

SEQ ID NO: 1393455 - RNA, 19 nt, Artificial Sequence
  Description of Artificial Sequence: Synthetic oligonucleotide
  Antisense strand to SEQ ID NO: 1393454
uagaaacccagcuaucuug

SEQ ID NO: 1393456 - RNA, 19 nt, Artificial Sequence
  Description of Artificial Sequence: Synthetic oligonucleotide
  Sense strand starting at position 3624 of SEQ ID NO: 1243079
aggacuagucagugggacu

SEQ ID NO: 1393457 - RNA, 19 nt, Artificial Sequence
  Description of Artificial Sequence: Synthetic oligonucleotide
  Antisense strand to SEQ ID NO: 1393456
agucccacugacuaguccu

SEQ ID NO: 1393458 - RNA, 19 nt, Artificial Sequence
  Description of Artificial Sequence: Synthetic oligonucleotide
  Sense strand starting at position 3639 of SEQ ID NO: 1243079
gacugagaugugugaacug

SEQ ID NO: 1393459 - RNA, 19 nt, Artificial Sequence
  Description of Artificial Sequence: Synthetic oligonucleotide
  Antisense strand to SEQ ID NO: 1393458
caguucacacaucucaguc

SEQ ID NO: 1393460 - RNA, 19 nt, Artificial Sequence
  Description of Artificial Sequence: Synthetic oligonucleotide
  Sense strand starting at position 3821 of SEQ ID NO: 1243079
uguggugugagggauugua

SEQ ID NO: 1393461 - RNA, 19 nt, Artificial Sequence
  Description of Artificial Sequence: Synthetic oligonucleotide
  Antisense strand to SEQ ID NO: 1393460
uacaaucccucacaccaca

SEQ ID NO: 1393462 - RNA, 19 nt, Artificial Sequence
  Description of Artificial Sequence: Synthetic oligonucleotide
  Sense strand starting at position 3875 of SEQ ID NO: 1243079
uugccucagcuguaauuua

SEQ ID NO: 1393463 - RNA, 19 nt, Artificial Sequence
  Description of Artificial Sequence: Synthetic oligonucleotide
  Antisense strand to SEQ ID NO: 1393462
uaaauuacagcugaggcaa

SEQ ID NO: 1393464 - RNA, 19 nt, Artificial Sequence
  Description of Artificial Sequence: Synthetic oligonucleotide
  Sense strand starting at position 3883 of SEQ ID NO: 1243079
gcuguaauuuacugggcaa

SEQ ID NO: 1393465 - RNA, 19 nt, Artificial Sequence
  Description of Artificial Sequence: Synthetic oligonucleotide
  Antisense strand to SEQ ID NO: 1393464
uugcccaguaaauuacagc

SEQ ID NO: 1393466 - RNA, 19 nt, Artificial Sequence
  Description of Artificial Sequence: Synthetic oligonucleotide
  Sense strand starting at position 3896 of SEQ ID NO: 1243079
gggcaauccgagcaaguua

SEQ ID NO: 1393467 - RNA, 19 nt, Artificial Sequence
  Description of Artificial Sequence: Synthetic oligonucleotide
  Antisense strand to SEQ ID NO: 1393466
uaacuugcucggauugccc

SEQ ID NO: 1393468 - RNA, 19 nt, Artificial Sequence
  Description of Artificial Sequence: Synthetic oligonucleotide
  Sense strand starting at position 3924 of SEQ ID NO: 1243079
uuggguuuguuuccucauu

SEQ ID NO: 1393469 - RNA, 19 nt, Artificial Sequence
  Description of Artificial Sequence: Synthetic oligonucleotide
  Antisense strand to SEQ ID NO: 1393468
aaugaggaaacaaacccaa

SEQ ID NO: 1393470 - RNA, 19 nt, Artificial Sequence
  Description of Artificial Sequence: Synthetic oligonucleotide
  Sense strand starting at position 3925 of SEQ ID NO: 1243079
uggguuuguuuccucauuu

SEQ ID NO: 1393471 - RNA, 19 nt, Artificial Sequence
  Description of Artificial Sequence: Synthetic oligonucleotide
  Antisense strand to SEQ ID NO: 1393470
aaaugaggaaacaaaccca

SEQ ID NO: 1393472 - RNA, 19 nt, Artificial Sequence
  Description of Artificial Sequence: Synthetic oligonucleotide
  Sense strand starting at position 3926 of SEQ ID NO: 1243079
ggguuuguuuccucauuug

SEQ ID NO: 1393473 - RNA, 19 nt, Artificial Sequence
  Description of Artificial Sequence: Synthetic oligonucleotide
  Antisense strand to SEQ ID NO: 1393472
caaaugaggaaacaaaccc

SEQ ID NO: 1393474 - RNA, 19 nt, Artificial Sequence
  Description of Artificial Sequence: Synthetic oligonucleotide
  Sense strand starting at position 3950 of SEQ ID NO: 1243079
ggagaguucugaggucgua

SEQ ID NO: 1393475 - RNA, 19 nt, Artificial Sequence
  Description of Artificial Sequence: Synthetic oligonucleotide
  Antisense strand to SEQ ID NO: 1393474
uacgaccucagaacucucc

SEQ ID NO: 1393476 - RNA, 19 nt, Artificial Sequence
  Description of Artificial Sequence: Synthetic oligonucleotide
  Sense strand starting at position 82 of SEQ ID NO: 1243080
acucuugcucugugucaaa

SEQ ID NO: 1393477 - RNA, 19 nt, Artificial Sequence
  Description of Artificial Sequence: Synthetic oligonucleotide
  Antisense strand to SEQ ID NO: 1393476
uuugacacagagcaagagu

SEQ ID NO: 1393478 - RNA, 19 nt, Artificial Sequence
  Description of Artificial Sequence: Synthetic oligonucleotide
  Sense strand starting at position 105 of SEQ ID NO: 1243080
auagaagccguuuguauua

SEQ ID NO: 1393479 - RNA, 19 nt, Artificial Sequence
  Description of Artificial Sequence: Synthetic oligonucleotide
  Antisense strand to SEQ ID NO: 1393478
uaauacaaacggcuucuau

SEQ ID NO: 1393480 - RNA, 19 nt, Artificial Sequence
  Description of Artificial Sequence: Synthetic oligonucleotide
  Sense strand starting at position 233 of SEQ ID NO: 1243080
auggccagcaaguaugaaa

SEQ ID NO: 1393481 - RNA, 19 nt, Artificial Sequence
  Description of Artificial Sequence: Synthetic oligonucleotide
  Antisense strand to SEQ ID NO: 1393480
uuucauacuugcuggccau

SEQ ID NO: 1393482 - RNA, 19 nt, Artificial Sequence
  Description of Artificial Sequence: Synthetic oligonucleotide
  Sense strand starting at position 248 of SEQ ID NO: 1243080
gaaacucaagucugucuga

SEQ ID NO: 1393483 - RNA, 19 nt, Artificial Sequence
  Description of Artificial Sequence: Synthetic oligonucleotide
  Antisense strand to SEQ ID NO: 1393482
ucagacagacuugaguuuc

SEQ ID NO: 1393484 - RNA, 19 nt, Artificial Sequence
  Description of Artificial Sequence: Synthetic oligonucleotide
  Sense strand starting at position 274 of SEQ ID NO: 1243080
uucuaagaacuguguauug

SEQ ID NO: 1393485 - RNA, 19 nt, Artificial Sequence
  Description of Artificial Sequence: Synthetic oligonucleotide
  Antisense strand to SEQ ID NO: 1393484
caauacacaguucuuagaa

SEQ ID NO: 1393486 - RNA, 19 nt, Artificial Sequence
  Description of Artificial Sequence: Synthetic oligonucleotide
  Sense strand starting at position 348 of SEQ ID NO: 1243080
gagagaaugcaugggucaa

SEQ ID NO: 1393487 - RNA, 19 nt, Artificial Sequence
  Description of Artificial Sequence: Synthetic oligonucleotide
  Antisense strand to SEQ ID NO: 1393486
uugacccaugcauucucuc

SEQ ID NO: 1393488 - RNA, 19 nt, Artificial Sequence
  Description of Artificial Sequence: Synthetic oligonucleotide
  Sense strand starting at position 349 of SEQ ID NO: 1243080
agagaaugcaugggucaag

SEQ ID NO: 1393489 - RNA, 19 nt, Artificial Sequence
  Description of Artificial Sequence: Synthetic oligonucleotide
  Antisense strand to SEQ ID NO: 1393488
cuugacccaugcauucucu

SEQ ID NO: 1393490 - RNA, 19 nt, Artificial Sequence
  Description of Artificial Sequence: Synthetic oligonucleotide
  Sense strand starting at position 891 of SEQ ID NO: 1243080
acuauauguccaggcacua

SEQ ID NO: 1393491 - RNA, 19 nt, Artificial Sequence
  Description of Artificial Sequence: Synthetic oligonucleotide
  Antisense strand to SEQ ID NO: 1393490
uagugccuggacauauagu

SEQ ID NO: 1393492 - RNA, 19 nt, Artificial Sequence
  Description of Artificial Sequence: Synthetic oligonucleotide
  Sense strand starting at position 1071 of SEQ ID NO: 1243080
ggcuccagaggcugugaua

SEQ ID NO: 1393493 - RNA, 19 nt, Artificial Sequence
  Description of Artificial Sequence: Synthetic oligonucleotide
  Antisense strand to SEQ ID NO: 1393492
uaucacagccucuggagcc

SEQ ID NO: 1393494 - RNA, 19 nt, Artificial Sequence
  Description of Artificial Sequence: Synthetic oligonucleotide
  Sense strand starting at position 1078 of SEQ ID NO: 1243080
gaggcugugauauggaauc

SEQ ID NO: 1393495 - RNA, 19 nt, Artificial Sequence
  Description of Artificial Sequence: Synthetic oligonucleotide
  Antisense strand to SEQ ID NO: 1393494
gauuccauaucacagccuc

SEQ ID NO: 1393496 - RNA, 19 nt, Artificial Sequence
  Description of Artificial Sequence: Synthetic oligonucleotide
  Sense strand starting at position 1080 of SEQ ID NO: 1243080
ggcugugauauggaaucau

SEQ ID NO: 1393497 - RNA, 19 nt, Artificial Sequence
  Description of Artificial Sequence: Synthetic oligonucleotide
  Antisense strand to SEQ ID NO: 1393496
augauuccauaucacagcc

SEQ ID NO: 1393498 - RNA, 19 nt, Artificial Sequence
  Description of Artificial Sequence: Synthetic oligonucleotide
  Sense strand starting at position 1226 of SEQ ID NO: 1243080
guagacagaccuggguuua

SEQ ID NO: 1393499 - RNA, 19 nt, Artificial Sequence
  Description of Artificial Sequence: Synthetic oligonucleotide
  Antisense strand to SEQ ID NO: 1393498
uaaacccaggucugucuac

SEQ ID NO: 1393500 - RNA, 19 nt, Artificial Sequence
  Description of Artificial Sequence: Synthetic oligonucleotide
  Sense strand starting at position 1227 of SEQ ID NO: 1243080
uagacagaccuggguuuaa

SEQ ID NO: 1393501 - RNA, 19 nt, Artificial Sequence
  Description of Artificial Sequence: Synthetic oligonucleotide
  Antisense strand to SEQ ID NO: 1393500
uuaaacccaggucugucua

SEQ ID NO: 1393502 - RNA, 19 nt, Artificial Sequence
  Description of Artificial Sequence: Synthetic oligonucleotide
  Sense strand starting at position 1419 of SEQ ID NO: 1243080
agugcuacugcugaggaaa

SEQ ID NO: 1393503 - RNA, 19 nt, Artificial Sequence
  Description of Artificial Sequence: Synthetic oligonucleotide
  Antisense strand to SEQ ID NO: 1393502
uuuccucagcaguagcacu

SEQ ID NO: 1393504 - RNA, 19 nt, Artificial Sequence
  Description of Artificial Sequence: Synthetic oligonucleotide
  Sense strand starting at position 1454 of SEQ ID NO: 1243080
agacaauucugucucuaag

SEQ ID NO: 1393505 - RNA, 19 nt, Artificial Sequence
  Description of Artificial Sequence: Synthetic oligonucleotide
  Antisense strand to SEQ ID NO: 1393504
cuuagagacagaauugucu

SEQ ID NO: 1393506 - RNA, 19 nt, Artificial Sequence
  Description of Artificial Sequence: Synthetic oligonucleotide
  Sense strand starting at position 1456 of SEQ ID NO: 1243080
acaauucugucucuaaggu

SEQ ID NO: 1393507 - RNA, 19 nt, Artificial Sequence
  Description of Artificial Sequence: Synthetic oligonucleotide
  Antisense strand to SEQ ID NO: 1393506
accuuagagacagaauugu

SEQ ID NO: 1393508 - RNA, 19 nt, Artificial Sequence
  Description of Artificial Sequence: Synthetic oligonucleotide
  Sense strand starting at position 1493 of SEQ ID NO: 1243080
gcugauagaucccaaauaa

SEQ ID NO: 1393509 - RNA, 19 nt, Artificial Sequence
  Description of Artificial Sequence: Synthetic oligonucleotide
  Antisense strand to SEQ ID NO: 1393508
uuauuugggaucuaucagc

SEQ ID NO: 1393510 - RNA, 19 nt, Artificial Sequence
  Description of Artificial Sequence: Synthetic oligonucleotide
  Sense strand starting at position 1528 of SEQ ID NO: 1243080
ugauaaguacuguguuaga

SEQ ID NO: 1393511 - RNA, 19 nt, Artificial Sequence
  Description of Artificial Sequence: Synthetic oligonucleotide
  Antisense strand to SEQ ID NO: 1393510
ucuaacacaguacuuauca

SEQ ID NO: 1393512 - RNA, 19 nt, Artificial Sequence
  Description of Artificial Sequence: Synthetic oligonucleotide
  Sense strand starting at position 1653 of SEQ ID NO: 1243080
aauggcuagugcuuauuga

SEQ ID NO: 1393513 - RNA, 19 nt, Artificial Sequence
  Description of Artificial Sequence: Synthetic oligonucleotide
  Antisense strand to SEQ ID NO: 1393512
ucaauaagcacuagccauu

SEQ ID NO: 1393514 - RNA, 19 nt, Artificial Sequence
  Description of Artificial Sequence: Synthetic oligonucleotide
  Sense strand starting at position 1660 of SEQ ID NO: 1243080
agugcuuauugaguacuua

SEQ ID NO: 1393515 - RNA, 19 nt, Artificial Sequence
  Description of Artificial Sequence: Synthetic oligonucleotide
  Antisense strand to SEQ ID NO: 1393514
uaaguacucaauaagcacu

SEQ ID NO: 1393516 - RNA, 19 nt, Artificial Sequence
  Description of Artificial Sequence: Synthetic oligonucleotide
  Sense strand starting at position 1664 of SEQ ID NO: 1243080
cuuauugaguacuuaccau

SEQ ID NO: 1393517 - RNA, 19 nt, Artificial Sequence
  Description of Artificial Sequence: Synthetic oligonucleotide
  Antisense strand to SEQ ID NO: 1393516
augguaaguacucaauaag

SEQ ID NO: 1393518 - RNA, 19 nt, Artificial Sequence
  Description of Artificial Sequence: Synthetic oligonucleotide
  Sense strand starting at position 1991 of SEQ ID NO: 1243080
aggcaugcauucuuaguca

SEQ ID NO: 1393519 - RNA, 19 nt, Artificial Sequence
  Description of Artificial Sequence: Synthetic oligonucleotide
  Antisense strand to SEQ ID NO: 1393518
ugacuaagaaugcaugccu

SEQ ID NO: 1393520 - RNA, 19 nt, Artificial Sequence
  Description of Artificial Sequence: Synthetic oligonucleotide
  Sense strand starting at position 1995 of SEQ ID NO: 1243080
augcauucuuagucacaga

SEQ ID NO: 1393521 - RNA, 19 nt, Artificial Sequence
  Description of Artificial Sequence: Synthetic oligonucleotide
  Antisense strand to SEQ ID NO: 1393520
ucugugacuaagaaugcau

SEQ ID NO: 1393522 - RNA, 19 nt, Artificial Sequence
  Description of Artificial Sequence: Synthetic oligonucleotide
  Sense strand starting at position 2253 of SEQ ID NO: 1243080
uugagaaguuacccuauau

SEQ ID NO: 1393523 - RNA, 19 nt, Artificial Sequence
  Description of Artificial Sequence: Synthetic oligonucleotide
  Antisense strand to SEQ ID NO: 1393522
auauaggguaacuucucaa

SEQ ID NO: 1393524 - RNA, 19 nt, Artificial Sequence
  Description of Artificial Sequence: Synthetic oligonucleotide
  Sense strand starting at position 2594 of SEQ ID NO: 1243080
caaguagcuuugucauugu

SEQ ID NO: 1393525 - RNA, 19 nt, Artificial Sequence
  Description of Artificial Sequence: Synthetic oligonucleotide
  Antisense strand to SEQ ID NO: 1393524
acaaugacaaagcuacuug

SEQ ID NO: 1393526 - RNA, 19 nt, Artificial Sequence
  Description of Artificial Sequence: Synthetic oligonucleotide
  Sense strand starting at position 2747 of SEQ ID NO: 1243080
gcuguuuggaagggugaga

SEQ ID NO: 1393527 - RNA, 19 nt, Artificial Sequence
  Description of Artificial Sequence: Synthetic oligonucleotide
  Antisense strand to SEQ ID NO: 1393526
ucucacccuuccaaacagc

SEQ ID NO: 1393528 - RNA, 19 nt, Artificial Sequence
  Description of Artificial Sequence: Synthetic oligonucleotide
  Sense strand starting at position 3188 of SEQ ID NO: 1243080
uuuggagaaguucgaggaa

SEQ ID NO: 1393529 - RNA, 19 nt, Artificial Sequence
  Description of Artificial Sequence: Synthetic oligonucleotide
  Antisense strand to SEQ ID NO: 1393528
uuccucgaacuucuccaaa

SEQ ID NO: 1393530 - RNA, 19 nt, Artificial Sequence
  Description of Artificial Sequence: Synthetic oligonucleotide
  Sense strand starting at position 3191 of SEQ ID NO: 1243080
ggagaaguucgaggaaacu

SEQ ID NO: 1393531 - RNA, 19 nt, Artificial Sequence
  Description of Artificial Sequence: Synthetic oligonucleotide
  Antisense strand to SEQ ID NO: 1393530
aguuuccucgaacuucucc

SEQ ID NO: 1393532 - RNA, 19 nt, Artificial Sequence
  Description of Artificial Sequence: Synthetic oligonucleotide
  Sense strand starting at position 3238 of SEQ ID NO: 1243080
uccauuaagccaggagaaa

SEQ ID NO: 1393533 - RNA, 19 nt, Artificial Sequence
  Description of Artificial Sequence: Synthetic oligonucleotide
  Antisense strand to SEQ ID NO: 1393532
uuucuccuggcuuaaugga

SEQ ID NO: 1393534 - RNA, 19 nt, Artificial Sequence
  Description of Artificial Sequence: Synthetic oligonucleotide
  Sense strand starting at position 3310 of SEQ ID NO: 1243080
ucgagcuguuuguuuaaag

SEQ ID NO: 1393535 - RNA, 19 nt, Artificial Sequence
  Description of Artificial Sequence: Synthetic oligonucleotide
  Antisense strand to SEQ ID NO: 1393534
cuuuaaacaaacagcucga

SEQ ID NO: 1393536 - RNA, 19 nt, Artificial Sequence
  Description of Artificial Sequence: Synthetic oligonucleotide
  Sense strand starting at position 3338 of SEQ ID NO: 1243080
cggaucugugccgaagguu

SEQ ID NO: 1393537 - RNA, 19 nt, Artificial Sequence
  Description of Artificial Sequence: Synthetic oligonucleotide
  Antisense strand to SEQ ID NO: 1393536
aaccuucggcacagauccg

SEQ ID NO: 1393538 - RNA, 19 nt, Artificial Sequence
  Description of Artificial Sequence: Synthetic oligonucleotide
  Sense strand starting at position 3346 of SEQ ID NO: 1243080
ugccgaagguuccuagaaa

SEQ ID NO: 1393539 - RNA, 19 nt, Artificial Sequence
  Description of Artificial Sequence: Synthetic oligonucleotide
  Antisense strand to SEQ ID NO: 1393538
uuucuaggaaccuucggca

SEQ ID NO: 1393540 - RNA, 19 nt, Artificial Sequence
  Description of Artificial Sequence: Synthetic oligonucleotide
  Sense strand starting at position 3410 of SEQ ID NO: 1243080
cgcauaaguuuacccaaau

SEQ ID NO: 1393541 - RNA, 19 nt, Artificial Sequence
  Description of Artificial Sequence: Synthetic oligonucleotide
  Antisense strand to SEQ ID NO: 1393540
auuuggguaaacuuaugcg

SEQ ID NO: 1393542 - RNA, 19 nt, Artificial Sequence
  Description of Artificial Sequence: Synthetic oligonucleotide
  Sense strand starting at position 3421 of SEQ ID NO: 1243080
acccaaauugugugccaga

SEQ ID NO: 1393543 - RNA, 19 nt, Artificial Sequence
  Description of Artificial Sequence: Synthetic oligonucleotide
  Antisense strand to SEQ ID NO: 1393542
ucuggcacacaauuugggu

SEQ ID NO: 1393544 - RNA, 19 nt, Artificial Sequence
  Description of Artificial Sequence: Synthetic oligonucleotide
  Sense strand starting at position 3697 of SEQ ID NO: 1243080
ugcugaagguugccaaauu

SEQ ID NO: 1393545 - RNA, 19 nt, Artificial Sequence
  Description of Artificial Sequence: Synthetic oligonucleotide
  Antisense strand to SEQ ID NO: 1393544
aauuuggcaaccuucagca

SEQ ID NO: 1393546 - RNA, 19 nt, Artificial Sequence
  Description of Artificial Sequence: Synthetic oligonucleotide
  Sense strand starting at position 3705 of SEQ ID NO: 1243080
guugccaaauuguuuauca

SEQ ID NO: 1393547 - RNA, 19 nt, Artificial Sequence
  Description of Artificial Sequence: Synthetic oligonucleotide
  Antisense strand to SEQ ID NO: 1393546
ugauaaacaauuuggcaac

SEQ ID NO: 1393548 - RNA, 19 nt, Artificial Sequence
  Description of Artificial Sequence: Synthetic oligonucleotide
  Sense strand starting at position 3753 of SEQ ID NO: 1243080
caccguuugcaagagauca

SEQ ID NO: 1393549 - RNA, 19 nt, Artificial Sequence
  Description of Artificial Sequence: Synthetic oligonucleotide
  Antisense strand to SEQ ID NO: 1393548
ugaucucuugcaaacggug

SEQ ID NO: 1393550 - RNA, 19 nt, Artificial Sequence
  Description of Artificial Sequence: Synthetic oligonucleotide
  Sense strand starting at position 3755 of SEQ ID NO: 1243080
ccguuugcaagagaucacu

SEQ ID NO: 1393551 - RNA, 19 nt, Artificial Sequence
  Description of Artificial Sequence: Synthetic oligonucleotide
  Antisense strand to SEQ ID NO: 1393550
agugaucucuugcaaacgg

SEQ ID NO: 1393552 - RNA, 19 nt, Artificial Sequence
  Description of Artificial Sequence: Synthetic oligonucleotide
  Sense strand starting at position 3773 of SEQ ID NO: 1243080
uccaauagcuugccaaaga

SEQ ID NO: 1393553 - RNA, 19 nt, Artificial Sequence
  Description of Artificial Sequence: Synthetic oligonucleotide
  Antisense strand to SEQ ID NO: 1393552
ucuuuggcaagcuauugga

SEQ ID NO: 1393554 - RNA, 19 nt, Artificial Sequence
  Description of Artificial Sequence: Synthetic oligonucleotide
  Sense strand starting at position 3876 of SEQ ID NO: 1243080
cuccgaaguuugucuaaac

SEQ ID NO: 1393555 - RNA, 19 nt, Artificial Sequence
  Description of Artificial Sequence: Synthetic oligonucleotide
  Antisense strand to SEQ ID NO: 1393554
guuuagacaaacuucggag

SEQ ID NO: 1393556 - RNA, 19 nt, Artificial Sequence
  Description of Artificial Sequence: Synthetic oligonucleotide
  Sense strand starting at position 20 of SEQ ID NO: 1243081
gcuguuuggaagggugaga

SEQ ID NO: 1393557 - RNA, 19 nt, Artificial Sequence
  Description of Artificial Sequence: Synthetic oligonucleotide
  Antisense strand to SEQ ID NO: 1393556
ucucacccuuccaaacagc

SEQ ID NO: 1393558 - RNA, 19 nt, Artificial Sequence
  Description of Artificial Sequence: Synthetic oligonucleotide
  Sense strand starting at position 461 of SEQ ID NO: 1243081
uuuggagaaguucgaggaa

SEQ ID NO: 1393559 - RNA, 19 nt, Artificial Sequence
  Description of Artificial Sequence: Synthetic oligonucleotide
  Antisense strand to SEQ ID NO: 1393558
uuccucgaacuucuccaaa

SEQ ID NO: 1393560 - RNA, 19 nt, Artificial Sequence
  Description of Artificial Sequence: Synthetic oligonucleotide
  Sense strand starting at position 464 of SEQ ID NO: 1243081
ggagaaguucgaggaaacu

SEQ ID NO: 1393561 - RNA, 19 nt, Artificial Sequence
  Description of Artificial Sequence: Synthetic oligonucleotide
  Antisense strand to SEQ ID NO: 1393560
aguuuccucgaacuucucc

SEQ ID NO: 1393562 - RNA, 19 nt, Artificial Sequence
  Description of Artificial Sequence: Synthetic oligonucleotide
  Sense strand starting at position 511 of SEQ ID NO: 1243081
uccauuaagccaggagaaa

SEQ ID NO: 1393563 - RNA, 19 nt, Artificial Sequence
  Description of Artificial Sequence: Synthetic oligonucleotide
  Antisense strand to SEQ ID NO: 1393562
uuucuccuggcuuaaugga

SEQ ID NO: 1393564 - RNA, 19 nt, Artificial Sequence
  Description of Artificial Sequence: Synthetic oligonucleotide
  Sense strand starting at position 611 of SEQ ID NO: 1243081
cggaucugugccgaagguu

SEQ ID NO: 1393565 - RNA, 19 nt, Artificial Sequence
  Description of Artificial Sequence: Synthetic oligonucleotide
  Antisense strand to SEQ ID NO: 1393564
aaccuucggcacagauccg

SEQ ID NO: 1393566 - RNA, 19 nt, Artificial Sequence
  Description of Artificial Sequence: Synthetic oligonucleotide
  Sense strand starting at position 619 of SEQ ID NO: 1243081
ugccgaagguuccuagaaa

SEQ ID NO: 1393567 - RNA, 19 nt, Artificial Sequence
  Description of Artificial Sequence: Synthetic oligonucleotide
  Antisense strand to SEQ ID NO: 1393566
uuucuaggaaccuucggca

SEQ ID NO: 1393568 - RNA, 19 nt, Artificial Sequence
  Description of Artificial Sequence: Synthetic oligonucleotide
  Sense strand starting at position 683 of SEQ ID NO: 1243081
cgcauaaguuuacccaaau

SEQ ID NO: 1393569 - RNA, 19 nt, Artificial Sequence
  Description of Artificial Sequence: Synthetic oligonucleotide
  Antisense strand to SEQ ID NO: 1393568
auuuggguaaacuuaugcg

SEQ ID NO: 1393570 - RNA, 19 nt, Artificial Sequence
  Description of Artificial Sequence: Synthetic oligonucleotide
  Sense strand starting at position 694 of SEQ ID NO: 1243081
acccaaauugugugccaga

SEQ ID NO: 1393571 - RNA, 19 nt, Artificial Sequence
  Description of Artificial Sequence: Synthetic oligonucleotide
  Antisense strand to SEQ ID NO: 1393570
ucuggcacacaauuugggu

SEQ ID NO: 1393572 - RNA, 19 nt, Artificial Sequence
  Description of Artificial Sequence: Synthetic oligonucleotide
  Sense strand starting at position 970 of SEQ ID NO: 1243081
ugcugaagguugccaaauu

SEQ ID NO: 1393573 - RNA, 19 nt, Artificial Sequence
  Description of Artificial Sequence: Synthetic oligonucleotide
  Antisense strand to SEQ ID NO: 1393572
aauuuggcaaccuucagca

SEQ ID NO: 1393574 - RNA, 19 nt, Artificial Sequence
  Description of Artificial Sequence: Synthetic oligonucleotide
  Sense strand starting at position 978 of SEQ ID NO: 1243081
guugccaaauuguuuauca

SEQ ID NO: 1393575 - RNA, 19 nt, Artificial Sequence
  Description of Artificial Sequence: Synthetic oligonucleotide
  Antisense strand to SEQ ID NO: 1393574
ugauaaacaauuuggcaac

SEQ ID NO: 1393576 - RNA, 19 nt, Artificial Sequence
  Description of Artificial Sequence: Synthetic oligonucleotide
  Sense strand starting at position 1026 of SEQ ID NO: 1243081
caccguuugcaagagauca

SEQ ID NO: 1393577 - RNA, 19 nt, Artificial Sequence
  Description of Artificial Sequence: Synthetic oligonucleotide
  Antisense strand to SEQ ID NO: 1393576
ugaucucuugcaaacggug

SEQ ID NO: 1393578 - RNA, 19 nt, Artificial Sequence
  Description of Artificial Sequence: Synthetic oligonucleotide
  Sense strand starting at position 1028 of SEQ ID NO: 1243081
ccguuugcaagagaucacu

SEQ ID NO: 1393579 - RNA, 19 nt, Artificial Sequence
  Description of Artificial Sequence: Synthetic oligonucleotide
  Antisense strand to SEQ ID NO: 1393578
agugaucucuugcaaacgg

SEQ ID NO: 1393580 - RNA, 19 nt, Artificial Sequence
  Description of Artificial Sequence: Synthetic oligonucleotide
  Sense strand starting at position 1046 of SEQ ID NO: 1243081
uccaauagcuugccaaaga

SEQ ID NO: 1393581 - RNA, 19 nt, Artificial Sequence
  Description of Artificial Sequence: Synthetic oligonucleotide
  Antisense strand to SEQ ID NO: 1393580
ucuuuggcaagcuauugga

SEQ ID NO: 1393582 - RNA, 19 nt, Artificial Sequence
  Description of Artificial Sequence: Synthetic oligonucleotide
  Sense strand starting at position 1149 of SEQ ID NO: 1243081
cuccgaaguuugucuaaac

SEQ ID NO: 1393583 - RNA, 19 nt, Artificial Sequence
  Description of Artificial Sequence: Synthetic oligonucleotide
  Antisense strand to SEQ ID NO: 1393582
guuuagacaaacuucggag

SEQ ID NO: 1393584 - RNA, 19 nt, Artificial Sequence
  Description of Artificial Sequence: Synthetic oligonucleotide
  Sense strand starting at position 1930 of SEQ ID NO: 1243081
ccuugacguccugagguua

SEQ ID NO: 1393585 - RNA, 19 nt, Artificial Sequence
  Description of Artificial Sequence: Synthetic oligonucleotide
  Antisense strand to SEQ ID NO: 1393584
uaaccucaggacgucaagg

SEQ ID NO: 1393586 - RNA, 19 nt, Artificial Sequence
  Description of Artificial Sequence: Synthetic oligonucleotide
  Sense strand starting at position 2022 of SEQ ID NO: 1243081
aaggaauggucagaaacag

SEQ ID NO: 1393587 - RNA, 19 nt, Artificial Sequence
  Description of Artificial Sequence: Synthetic oligonucleotide
  Antisense strand to SEQ ID NO: 1393586
cuguuucugaccauuccuu

SEQ ID NO: 1393588 - RNA, 19 nt, Artificial Sequence
  Description of Artificial Sequence: Synthetic oligonucleotide
  Sense strand starting at position 2056 of SEQ ID NO: 1243081
gauagauggucagagacag

SEQ ID NO: 1393589 - RNA, 19 nt, Artificial Sequence
  Description of Artificial Sequence: Synthetic oligonucleotide
  Antisense strand to SEQ ID NO: 1393588
cugucucugaccaucuauc

SEQ ID NO: 1393590 - RNA, 19 nt, Artificial Sequence
  Description of Artificial Sequence: Synthetic oligonucleotide
  Sense strand starting at position 2079 of SEQ ID NO: 1243081
uuucgauauuuagggauag

SEQ ID NO: 1393591 - RNA, 19 nt, Artificial Sequence
  Description of Artificial Sequence: Synthetic oligonucleotide
  Antisense strand to SEQ ID NO: 1393590
cuaucccuaaauaucgaaa

SEQ ID NO: 1393592 - RNA, 19 nt, Artificial Sequence
  Description of Artificial Sequence: Synthetic oligonucleotide
  Sense strand starting at position 2103 of SEQ ID NO: 1243081
gagagauucugggaugaac

SEQ ID NO: 1393593 - RNA, 19 nt, Artificial Sequence
  Description of Artificial Sequence: Synthetic oligonucleotide
  Antisense strand to SEQ ID NO: 1393592
guucaucccagaaucucuc

SEQ ID NO: 1393594 - RNA, 19 nt, Artificial Sequence
  Description of Artificial Sequence: Synthetic oligonucleotide
  Sense strand starting at position 2194 of SEQ ID NO: 1243081
gcaaauguguaagccuuaa

SEQ ID NO: 1393595 - RNA, 19 nt, Artificial Sequence
  Description of Artificial Sequence: Synthetic oligonucleotide
  Antisense strand to SEQ ID NO: 1393594
uuaaggcuuacacauuugc

SEQ ID NO: 1393596 - RNA, 19 nt, Artificial Sequence
  Description of Artificial Sequence: Synthetic oligonucleotide
  Sense strand starting at position 2198 of SEQ ID NO: 1243081
auguguaagccuuaacuug

SEQ ID NO: 1393597 - RNA, 19 nt, Artificial Sequence
  Description of Artificial Sequence: Synthetic oligonucleotide
  Antisense strand to SEQ ID NO: 1393596
caaguuaaggcuuacacau

SEQ ID NO: 1393598 - RNA, 19 nt, Artificial Sequence
  Description of Artificial Sequence: Synthetic oligonucleotide
  Sense strand starting at position 2220 of SEQ ID NO: 1243081
ucguauagugcgagaugcu

SEQ ID NO: 1393599 - RNA, 19 nt, Artificial Sequence
  Description of Artificial Sequence: Synthetic oligonucleotide
  Antisense strand to SEQ ID NO: 1393598
agcaucucgcacuauacga

SEQ ID NO: 1393600 - RNA, 19 nt, Artificial Sequence
  Description of Artificial Sequence: Synthetic oligonucleotide
  Sense strand starting at position 2377 of SEQ ID NO: 1243081
ucggucacaggaugagaua

SEQ ID NO: 1393601 - RNA, 19 nt, Artificial Sequence
  Description of Artificial Sequence: Synthetic oligonucleotide
  Antisense strand to SEQ ID NO: 1393600
uaucucauccugugaccga

SEQ ID NO: 1393602 - RNA, 19 nt, Artificial Sequence
  Description of Artificial Sequence: Synthetic oligonucleotide
  Sense strand starting at position 2400 of SEQ ID NO: 1243081
uugggcaagacugguuuaa

SEQ ID NO: 1393603 - RNA, 19 nt, Artificial Sequence
  Description of Artificial Sequence: Synthetic oligonucleotide
  Antisense strand to SEQ ID NO: 1393602
uuaaaccagucuugcccaa

SEQ ID NO: 1393604 - RNA, 19 nt, Artificial Sequence
  Description of Artificial Sequence: Synthetic oligonucleotide
  Sense strand starting at position 2402 of SEQ ID NO: 1243081
gggcaagacugguuuaaua

SEQ ID NO: 1393605 - RNA, 19 nt, Artificial Sequence
  Description of Artificial Sequence: Synthetic oligonucleotide
  Antisense strand to SEQ ID NO: 1393604
uauuaaaccagucuugccc

SEQ ID NO: 1393606 - RNA, 19 nt, Artificial Sequence
  Description of Artificial Sequence: Synthetic oligonucleotide
  Sense strand starting at position 2645 of SEQ ID NO: 1243081
cccucaguuccacgaauuc

SEQ ID NO: 1393607 - RNA, 19 nt, Artificial Sequence
  Description of Artificial Sequence: Synthetic oligonucleotide
  Antisense strand to SEQ ID NO: 1393606
gaauucguggaacugaggg

SEQ ID NO: 1393608 - RNA, 19 nt, Artificial Sequence
  Description of Artificial Sequence: Synthetic oligonucleotide
  Sense strand starting at position 2736 of SEQ ID NO: 1243081
ugaaguucucccugugaca

SEQ ID NO: 1393609 - RNA, 19 nt, Artificial Sequence
  Description of Artificial Sequence: Synthetic oligonucleotide
  Antisense strand to SEQ ID NO: 1393608
ugucacagggagaacuuca

SEQ ID NO: 1393610 - RNA, 19 nt, Artificial Sequence
  Description of Artificial Sequence: Synthetic oligonucleotide
  Sense strand starting at position 2751 of SEQ ID NO: 1243081
gacaaccgucucugaggaa

SEQ ID NO: 1393611 - RNA, 19 nt, Artificial Sequence
  Description of Artificial Sequence: Synthetic oligonucleotide
  Antisense strand to SEQ ID NO: 1393610
uuccucagagacgguuguc

SEQ ID NO: 1393612 - RNA, 19 nt, Artificial Sequence
  Description of Artificial Sequence: Synthetic oligonucleotide
  Sense strand starting at position 2763 of SEQ ID NO: 1243081
ugaggaaugucuucucccu

SEQ ID NO: 1393613 - RNA, 19 nt, Artificial Sequence
  Description of Artificial Sequence: Synthetic oligonucleotide
  Antisense strand to SEQ ID NO: 1393612
agggagaagacauuccuca

SEQ ID NO: 1393614 - RNA, 19 nt, Artificial Sequence
  Description of Artificial Sequence: Synthetic oligonucleotide
  Sense strand starting at position 2790 of SEQ ID NO: 1243081
aaagacaguugagagauaa

SEQ ID NO: 1393615 - RNA, 19 nt, Artificial Sequence
  Description of Artificial Sequence: Synthetic oligonucleotide
  Antisense strand to SEQ ID NO: 1393614
uuaucucucaacugucuuu

SEQ ID NO: 1393616 - RNA, 19 nt, Artificial Sequence
  Description of Artificial Sequence: Synthetic oligonucleotide
  Sense strand starting at position 3192 of SEQ ID NO: 1243081
ggcauuggaggucacgauu

SEQ ID NO: 1393617 - RNA, 19 nt, Artificial Sequence
  Description of Artificial Sequence: Synthetic oligonucleotide
  Antisense strand to SEQ ID NO: 1393616
aaucgugaccuccaaugcc

SEQ ID NO: 1393618 - RNA, 19 nt, Artificial Sequence
  Description of Artificial Sequence: Synthetic oligonucleotide
  Sense strand starting at position 3195 of SEQ ID NO: 1243081
auuggaggucacgauuaug

SEQ ID NO: 1393619 - RNA, 19 nt, Artificial Sequence
  Description of Artificial Sequence: Synthetic oligonucleotide
  Antisense strand to SEQ ID NO: 1393618
cauaaucgugaccuccaau

SEQ ID NO: 1393620 - RNA, 19 nt, Artificial Sequence
  Description of Artificial Sequence: Synthetic oligonucleotide
  Sense strand starting at position 3198 of SEQ ID NO: 1243081
ggaggucacgauuaugucu

SEQ ID NO: 1393621 - RNA, 19 nt, Artificial Sequence
  Description of Artificial Sequence: Synthetic oligonucleotide
  Antisense strand to SEQ ID NO: 1393620
agacauaaucgugaccucc

SEQ ID NO: 1393622 - RNA, 19 nt, Artificial Sequence
  Description of Artificial Sequence: Synthetic oligonucleotide
  Sense strand starting at position 3203 of SEQ ID NO: 1243081
ucacgauuaugucuugauc

SEQ ID NO: 1393623 - RNA, 19 nt, Artificial Sequence
  Description of Artificial Sequence: Synthetic oligonucleotide
  Antisense strand to SEQ ID NO: 1393622
gaucaagacauaaucguga

SEQ ID NO: 1393624 - RNA, 19 nt, Artificial Sequence
  Description of Artificial Sequence: Synthetic oligonucleotide
  Sense strand starting at position 3206 of SEQ ID NO: 1243081
cgauuaugucuugaucauc

SEQ ID NO: 1393625 - RNA, 19 nt, Artificial Sequence
  Description of Artificial Sequence: Synthetic oligonucleotide
  Antisense strand to SEQ ID NO: 1393624
gaugaucaagacauaaucg

SEQ ID NO: 1393626 - RNA, 19 nt, Artificial Sequence
  Description of Artificial Sequence: Synthetic oligonucleotide
  Sense strand starting at position 3209 of SEQ ID NO: 1243081
uuaugucuugaucaucaca

SEQ ID NO: 1393627 - RNA, 19 nt, Artificial Sequence
  Description of Artificial Sequence: Synthetic oligonucleotide
  Antisense strand to SEQ ID NO: 1393626
ugugaugaucaagacauaa

SEQ ID NO: 1393628 - RNA, 19 nt, Artificial Sequence
  Description of Artificial Sequence: Synthetic oligonucleotide
  Sense strand starting at position 3297 of SEQ ID NO: 1243081
ugcucugacuuuccagagu

SEQ ID NO: 1393629 - RNA, 19 nt, Artificial Sequence
  Description of Artificial Sequence: Synthetic oligonucleotide
  Antisense strand to SEQ ID NO: 1393628
acucuggaaagucagagca

SEQ ID NO: 1393630 - RNA, 19 nt, Artificial Sequence
  Description of Artificial Sequence: Synthetic oligonucleotide
  Sense strand starting at position 3733 of SEQ ID NO: 1243081
agugacugcucccuuuaga

SEQ ID NO: 1393631 - RNA, 19 nt, Artificial Sequence
  Description of Artificial Sequence: Synthetic oligonucleotide
  Antisense strand to SEQ ID NO: 1393630
ucuaaagggagcagucacu

SEQ ID NO: 1393632 - RNA, 19 nt, Artificial Sequence
  Description of Artificial Sequence: Synthetic oligonucleotide
  Sense strand starting at position 3736 of SEQ ID NO: 1243081
gacugcucccuuuagauga

SEQ ID NO: 1393633 - RNA, 19 nt, Artificial Sequence
  Description of Artificial Sequence: Synthetic oligonucleotide
  Antisense strand to SEQ ID NO: 1393632
ucaucuaaagggagcaguc

SEQ ID NO: 1393634 - RNA, 19 nt, Artificial Sequence
  Description of Artificial Sequence: Synthetic oligonucleotide
  Sense strand starting at position 3877 of SEQ ID NO: 1243081
gucucuggagucugcauaa

SEQ ID NO: 1393635 - RNA, 19 nt, Artificial Sequence
  Description of Artificial Sequence: Synthetic oligonucleotide
  Antisense strand to SEQ ID NO: 1393634
uuaugcagacuccagagac

SEQ ID NO: 1393636 - RNA, 19 nt, Artificial Sequence
  Description of Artificial Sequence: Synthetic oligonucleotide
  Sense strand starting at position 47 of SEQ ID NO: 1243082
ggcuccagaggcugugaua

SEQ ID NO: 1393637 - RNA, 19 nt, Artificial Sequence
  Description of Artificial Sequence: Synthetic oligonucleotide
  Antisense strand to SEQ ID NO: 1393636
uaucacagccucuggagcc

SEQ ID NO: 1393638 - RNA, 19 nt, Artificial Sequence
  Description of Artificial Sequence: Synthetic oligonucleotide
  Sense strand starting at position 54 of SEQ ID NO: 1243082
gaggcugugauauggaauc

SEQ ID NO: 1393639 - RNA, 19 nt, Artificial Sequence
  Description of Artificial Sequence: Synthetic oligonucleotide
  Antisense strand to SEQ ID NO: 1393638
gauuccauaucacagccuc

SEQ ID NO: 1393640 - RNA, 19 nt, Artificial Sequence
  Description of Artificial Sequence: Synthetic oligonucleotide
  Sense strand starting at position 56 of SEQ ID NO: 1243082
ggcugugauauggaaucau

SEQ ID NO: 1393641 - RNA, 19 nt, Artificial Sequence
  Description of Artificial Sequence: Synthetic oligonucleotide
  Antisense strand to SEQ ID NO: 1393640
augauuccauaucacagcc

SEQ ID NO: 1393642 - RNA, 19 nt, Artificial Sequence
  Description of Artificial Sequence: Synthetic oligonucleotide
  Sense strand starting at position 202 of SEQ ID NO: 1243082
guagacagaccuggguuua

SEQ ID NO: 1393643 - RNA, 19 nt, Artificial Sequence
  Description of Artificial Sequence: Synthetic oligonucleotide
  Antisense strand to SEQ ID NO: 1393642
uaaacccaggucugucuac

SEQ ID NO: 1393644 - RNA, 19 nt, Artificial Sequence
  Description of Artificial Sequence: Synthetic oligonucleotide
  Sense strand starting at position 203 of SEQ ID NO: 1243082
uagacagaccuggguuuaa

SEQ ID NO: 1393645 - RNA, 19 nt, Artificial Sequence
  Description of Artificial Sequence: Synthetic oligonucleotide
  Antisense strand to SEQ ID NO: 1393644
uuaaacccaggucugucua

SEQ ID NO: 1393646 - RNA, 19 nt, Artificial Sequence
  Description of Artificial Sequence: Synthetic oligonucleotide
  Sense strand starting at position 395 of SEQ ID NO: 1243082
agugcuacugcugaggaaa

SEQ ID NO: 1393647 - RNA, 19 nt, Artificial Sequence
  Description of Artificial Sequence: Synthetic oligonucleotide
  Antisense strand to SEQ ID NO: 1393646
uuuccucagcaguagcacu

SEQ ID NO: 1393648 - RNA, 19 nt, Artificial Sequence
  Description of Artificial Sequence: Synthetic oligonucleotide
  Sense strand starting at position 430 of SEQ ID NO: 1243082
agacaauucugucucuaag

SEQ ID NO: 1393649 - RNA, 19 nt, Artificial Sequence
  Description of Artificial Sequence: Synthetic oligonucleotide
  Antisense strand to SEQ ID NO: 1393648
cuuagagacagaauugucu

SEQ ID NO: 1393650 - RNA, 19 nt, Artificial Sequence
  Description of Artificial Sequence: Synthetic oligonucleotide
  Sense strand starting at position 432 of SEQ ID NO: 1243082
acaauucugucucuaaggu

SEQ ID NO: 1393651 - RNA, 19 nt, Artificial Sequence
  Description of Artificial Sequence: Synthetic oligonucleotide
  Antisense strand to SEQ ID NO: 1393650
accuuagagacagaauugu

SEQ ID NO: 1393652 - RNA, 19 nt, Artificial Sequence
  Description of Artificial Sequence: Synthetic oligonucleotide
  Sense strand starting at position 469 of SEQ ID NO: 1243082
gcugauagaucccaaauaa

SEQ ID NO: 1393653 - RNA, 19 nt, Artificial Sequence
  Description of Artificial Sequence: Synthetic oligonucleotide
  Antisense strand to SEQ ID NO: 1393652
uuauuugggaucuaucagc

SEQ ID NO: 1393654 - RNA, 19 nt, Artificial Sequence
  Description of Artificial Sequence: Synthetic oligonucleotide
  Sense strand starting at position 504 of SEQ ID NO: 1243082
ugauaaguacuguguuaga

SEQ ID NO: 1393655 - RNA, 19 nt, Artificial Sequence
  Description of Artificial Sequence: Synthetic oligonucleotide
  Antisense strand to SEQ ID NO: 1393654
ucuaacacaguacuuauca

SEQ ID NO: 1393656 - RNA, 19 nt, Artificial Sequence
  Description of Artificial Sequence: Synthetic oligonucleotide
  Sense strand starting at position 629 of SEQ ID NO: 1243082
aauggcuagugcuuauuga

SEQ ID NO: 1393657 - RNA, 19 nt, Artificial Sequence
  Description of Artificial Sequence: Synthetic oligonucleotide
  Antisense strand to SEQ ID NO: 1393656
ucaauaagcacuagccauu

SEQ ID NO: 1393658 - RNA, 19 nt, Artificial Sequence
  Description of Artificial Sequence: Synthetic oligonucleotide
  Sense strand starting at position 636 of SEQ ID NO: 1243082
agugcuuauugaguacuua

SEQ ID NO: 1393659 - RNA, 19 nt, Artificial Sequence
  Description of Artificial Sequence: Synthetic oligonucleotide
  Antisense strand to SEQ ID NO: 1393658
uaaguacucaauaagcacu

SEQ ID NO: 1393660 - RNA, 19 nt, Artificial Sequence
  Description of Artificial Sequence: Synthetic oligonucleotide
  Sense strand starting at position 640 of SEQ ID NO: 1243082
cuuauugaguacuuaccau

SEQ ID NO: 1393661 - RNA, 19 nt, Artificial Sequence
  Description of Artificial Sequence: Synthetic oligonucleotide
  Antisense strand to SEQ ID NO: 1393660
augguaaguacucaauaag

SEQ ID NO: 1393662 - RNA, 19 nt, Artificial Sequence
  Description of Artificial Sequence: Synthetic oligonucleotide
  Sense strand starting at position 967 of SEQ ID NO: 1243082
aggcaugcauucuuaguca

SEQ ID NO: 1393663 - RNA, 19 nt, Artificial Sequence
  Description of Artificial Sequence: Synthetic oligonucleotide
  Antisense strand to SEQ ID NO: 1393662
ugacuaagaaugcaugccu

SEQ ID NO: 1393664 - RNA, 19 nt, Artificial Sequence
  Description of Artificial Sequence: Synthetic oligonucleotide
  Sense strand starting at position 971 of SEQ ID NO: 1243082
augcauucuuagucacaga

SEQ ID NO: 1393665 - RNA, 19 nt, Artificial Sequence
  Description of Artificial Sequence: Synthetic oligonucleotide
  Antisense strand to SEQ ID NO: 1393664
ucugugacuaagaaugcau

SEQ ID NO: 1393666 - RNA, 19 nt, Artificial Sequence
  Description of Artificial Sequence: Synthetic oligonucleotide
  Sense strand starting at position 1229 of SEQ ID NO: 1243082
uugagaaguuacccuauau

SEQ ID NO: 1393667 - RNA, 19 nt, Artificial Sequence
  Description of Artificial Sequence: Synthetic oligonucleotide
  Antisense strand to SEQ ID NO: 1393666
auauaggguaacuucucaa

SEQ ID NO: 1393668 - RNA, 19 nt, Artificial Sequence
  Description of Artificial Sequence: Synthetic oligonucleotide
  Sense strand starting at position 1723 of SEQ ID NO: 1243082
gcuguuuggaagggugaga

SEQ ID NO: 1393669 - RNA, 19 nt, Artificial Sequence
  Description of Artificial Sequence: Synthetic oligonucleotide
  Antisense strand to SEQ ID NO: 1393668
ucucacccuuccaaacagc

SEQ ID NO: 1393670 - RNA, 19 nt, Artificial Sequence
  Description of Artificial Sequence: Synthetic oligonucleotide
  Sense strand starting at position 2164 of SEQ ID NO: 1243082
uuuggagaaguucgaggaa

SEQ ID NO: 1393671 - RNA, 19 nt, Artificial Sequence
  Description of Artificial Sequence: Synthetic oligonucleotide
  Antisense strand to SEQ ID NO: 1393670
uuccucgaacuucuccaaa

SEQ ID NO: 1393672 - RNA, 19 nt, Artificial Sequence
  Description of Artificial Sequence: Synthetic oligonucleotide
  Sense strand starting at position 2167 of SEQ ID NO: 1243082
ggagaaguucgaggaaacu

SEQ ID NO: 1393673 - RNA, 19 nt, Artificial Sequence
  Description of Artificial Sequence: Synthetic oligonucleotide
  Antisense strand to SEQ ID NO: 1393672
aguuuccucgaacuucucc

SEQ ID NO: 1393674 - RNA, 19 nt, Artificial Sequence
  Description of Artificial Sequence: Synthetic oligonucleotide
  Sense strand starting at position 2214 of SEQ ID NO: 1243082
uccauuaagccaggagaaa

SEQ ID NO: 1393675 - RNA, 19 nt, Artificial Sequence
  Description of Artificial Sequence: Synthetic oligonucleotide
  Antisense strand to SEQ ID NO: 1393674
uuucuccuggcuuaaugga

SEQ ID NO: 1393676 - RNA, 19 nt, Artificial Sequence
  Description of Artificial Sequence: Synthetic oligonucleotide
  Sense strand starting at position 2286 of SEQ ID NO: 1243082
ucgagcuguuuguuuaaag

SEQ ID NO: 1393677 - RNA, 19 nt, Artificial Sequence
  Description of Artificial Sequence: Synthetic oligonucleotide
  Antisense strand to SEQ ID NO: 1393676
cuuuaaacaaacagcucga

SEQ ID NO: 1393678 - RNA, 19 nt, Artificial Sequence
  Description of Artificial Sequence: Synthetic oligonucleotide
  Sense strand starting at position 2314 of SEQ ID NO: 1243082
cggaucugugccgaagguu

SEQ ID NO: 1393679 - RNA, 19 nt, Artificial Sequence
  Description of Artificial Sequence: Synthetic oligonucleotide
  Antisense strand to SEQ ID NO: 1393678
aaccuucggcacagauccg

SEQ ID NO: 1393680 - RNA, 19 nt, Artificial Sequence
  Description of Artificial Sequence: Synthetic oligonucleotide
  Sense strand starting at position 2322 of SEQ ID NO: 1243082
ugccgaagguuccuagaaa

SEQ ID NO: 1393681 - RNA, 19 nt, Artificial Sequence
  Description of Artificial Sequence: Synthetic oligonucleotide
  Antisense strand to SEQ ID NO: 1393680
uuucuaggaaccuucggca

SEQ ID NO: 1393682 - RNA, 19 nt, Artificial Sequence
  Description of Artificial Sequence: Synthetic oligonucleotide
  Sense strand starting at position 2386 of SEQ ID NO: 1243082
cgcauaaguuuacccaaau

SEQ ID NO: 1393683 - RNA, 19 nt, Artificial Sequence
  Description of Artificial Sequence: Synthetic oligonucleotide
  Antisense strand to SEQ ID NO: 1393682
auuuggguaaacuuaugcg

SEQ ID NO: 1393684 - RNA, 19 nt, Artificial Sequence
  Description of Artificial Sequence: Synthetic oligonucleotide
  Sense strand starting at position 2397 of SEQ ID NO: 1243082
acccaaauugugugccaga

SEQ ID NO: 1393685 - RNA, 19 nt, Artificial Sequence
  Description of Artificial Sequence: Synthetic oligonucleotide
  Antisense strand to SEQ ID NO: 1393684
ucuggcacacaauuugggu

SEQ ID NO: 1393686 - RNA, 19 nt, Artificial Sequence
  Description of Artificial Sequence: Synthetic oligonucleotide
  Sense strand starting at position 2673 of SEQ ID NO: 1243082
ugcugaagguugccaaauu

SEQ ID NO: 1393687 - RNA, 19 nt, Artificial Sequence
  Description of Artificial Sequence: Synthetic oligonucleotide
  Antisense strand to SEQ ID NO: 1393686
aauuuggcaaccuucagca

SEQ ID NO: 1393688 - RNA, 19 nt, Artificial Sequence
  Description of Artificial Sequence: Synthetic oligonucleotide
  Sense strand starting at position 2681 of SEQ ID NO: 1243082
guugccaaauuguuuauca

SEQ ID NO: 1393689 - RNA, 19 nt, Artificial Sequence
  Description of Artificial Sequence: Synthetic oligonucleotide
  Antisense strand to SEQ ID NO: 1393688
ugauaaacaauuuggcaac

SEQ ID NO: 1393690 - RNA, 19 nt, Artificial Sequence
  Description of Artificial Sequence: Synthetic oligonucleotide
  Sense strand starting at position 2729 of SEQ ID NO: 1243082
caccguuugcaagagauca

SEQ ID NO: 1393691 - RNA, 19 nt, Artificial Sequence
  Description of Artificial Sequence: Synthetic oligonucleotide
  Antisense strand to SEQ ID NO: 1393690
ugaucucuugcaaacggug

SEQ ID NO: 1393692 - RNA, 19 nt, Artificial Sequence
  Description of Artificial Sequence: Synthetic oligonucleotide
  Sense strand starting at position 2731 of SEQ ID NO: 1243082
ccguuugcaagagaucacu

SEQ ID NO: 1393693 - RNA, 19 nt, Artificial Sequence
  Description of Artificial Sequence: Synthetic oligonucleotide
  Antisense strand to SEQ ID NO: 1393692
agugaucucuugcaaacgg

SEQ ID NO: 1393694 - RNA, 19 nt, Artificial Sequence
  Description of Artificial Sequence: Synthetic oligonucleotide
  Sense strand starting at position 2749 of SEQ ID NO: 1243082
uccaauagcuugccaaaga

SEQ ID NO: 1393695 - RNA, 19 nt, Artificial Sequence
  Description of Artificial Sequence: Synthetic oligonucleotide
  Antisense strand to SEQ ID NO: 1393694
ucuuuggcaagcuauugga

SEQ ID NO: 1393696 - RNA, 19 nt, Artificial Sequence
  Description of Artificial Sequence: Synthetic oligonucleotide
  Sense strand starting at position 2852 of SEQ ID NO: 1243082
cuccgaaguuugucuaaac

SEQ ID NO: 1393697 - RNA, 19 nt, Artificial Sequence
  Description of Artificial Sequence: Synthetic oligonucleotide
  Antisense strand to SEQ ID NO: 1393696
guuuagacaaacuucggag

SEQ ID NO: 1393698 - RNA, 19 nt, Artificial Sequence
  Description of Artificial Sequence: Synthetic oligonucleotide
  Sense strand starting at position 3633 of SEQ ID NO: 1243082
ccuugacguccugagguua

SEQ ID NO: 1393699 - RNA, 19 nt, Artificial Sequence
  Description of Artificial Sequence: Synthetic oligonucleotide
  Antisense strand to SEQ ID NO: 1393698
uaaccucaggacgucaagg

SEQ ID NO: 1393700 - RNA, 19 nt, Artificial Sequence
  Description of Artificial Sequence: Synthetic oligonucleotide
  Sense strand starting at position 3725 of SEQ ID NO: 1243082
aaggaauggucagaaacag

SEQ ID NO: 1393701 - RNA, 19 nt, Artificial Sequence
  Description of Artificial Sequence: Synthetic oligonucleotide
  Antisense strand to SEQ ID NO: 1393700
cuguuucugaccauuccuu

SEQ ID NO: 1393702 - RNA, 19 nt, Artificial Sequence
  Description of Artificial Sequence: Synthetic oligonucleotide
  Sense strand starting at position 3759 of SEQ ID NO: 1243082
gauagauggucagagacag

SEQ ID NO: 1393703 - RNA, 19 nt, Artificial Sequence
  Description of Artificial Sequence: Synthetic oligonucleotide
  Antisense strand to SEQ ID NO: 1393702
cugucucugaccaucuauc

SEQ ID NO: 1393704 - RNA, 19 nt, Artificial Sequence
  Description of Artificial Sequence: Synthetic oligonucleotide
  Sense strand starting at position 3782 of SEQ ID NO: 1243082
uuucgauauuuagggauag

SEQ ID NO: 1393705 - RNA, 19 nt, Artificial Sequence
  Description of Artificial Sequence: Synthetic oligonucleotide
  Antisense strand to SEQ ID NO: 1393704
cuaucccuaaauaucgaaa

SEQ ID NO: 1393706 - RNA, 19 nt, Artificial Sequence
  Description of Artificial Sequence: Synthetic oligonucleotide
  Sense strand starting at position 3804 of SEQ ID NO: 1243082
cagagagauucugggauga

SEQ ID NO: 1393707 - RNA, 19 nt, Artificial Sequence
  Description of Artificial Sequence: Synthetic oligonucleotide
  Antisense strand to SEQ ID NO: 1393706
ucaucccagaaucucucug

SEQ ID NO: 1393708 - RNA, 19 nt, Artificial Sequence
  Description of Artificial Sequence: Synthetic oligonucleotide
  Sense strand starting at position 3806 of SEQ ID NO: 1243082
gagagauucugggaugaac

SEQ ID NO: 1393709 - RNA, 19 nt, Artificial Sequence
  Description of Artificial Sequence: Synthetic oligonucleotide
  Antisense strand to SEQ ID NO: 1393708
guucaucccagaaucucuc

SEQ ID NO: 1393710 - RNA, 19 nt, Artificial Sequence
  Description of Artificial Sequence: Synthetic oligonucleotide
  Sense strand starting at position 3897 of SEQ ID NO: 1243082
gcaaauguguaagccuuaa

SEQ ID NO: 1393711 - RNA, 19 nt, Artificial Sequence
  Description of Artificial Sequence: Synthetic oligonucleotide
  Antisense strand to SEQ ID NO: 1393710
uuaaggcuuacacauuugc

SEQ ID NO: 1393712 - RNA, 19 nt, Artificial Sequence
  Description of Artificial Sequence: Synthetic oligonucleotide
  Sense strand starting at position 3901 of SEQ ID NO: 1243082
auguguaagccuuaacuug

SEQ ID NO: 1393713 - RNA, 19 nt, Artificial Sequence
  Description of Artificial Sequence: Synthetic oligonucleotide
  Antisense strand to SEQ ID NO: 1393712
caaguuaaggcuuacacau

SEQ ID NO: 1393714 - RNA, 19 nt, Artificial Sequence
  Description of Artificial Sequence: Synthetic oligonucleotide
  Sense strand starting at position 3923 of SEQ ID NO: 1243082
ucguauagugcgagaugcu

SEQ ID NO: 1393715 - RNA, 19 nt, Artificial Sequence
  Description of Artificial Sequence: Synthetic oligonucleotide
  Antisense strand to SEQ ID NO: 1393714
agcaucucgcacuauacga

SEQ ID NO: 1393716 - RNA, 19 nt, Artificial Sequence
  Description of Artificial Sequence: Synthetic oligonucleotide
  Sense strand starting at position 94 of SEQ ID NO: 1243083
aauggcuagugcuuauuga

SEQ ID NO: 1393717 - RNA, 19 nt, Artificial Sequence
  Description of Artificial Sequence: Synthetic oligonucleotide
  Antisense strand to SEQ ID NO: 1393716
ucaauaagcacuagccauu

SEQ ID NO: 1393718 - RNA, 19 nt, Artificial Sequence
  Description of Artificial Sequence: Synthetic oligonucleotide
  Sense strand starting at position 101 of SEQ ID NO: 1243083
agugcuuauugaguacuua

SEQ ID NO: 1393719 - RNA, 19 nt, Artificial Sequence
  Description of Artificial Sequence: Synthetic oligonucleotide
  Antisense strand to SEQ ID NO: 1393718
uaaguacucaauaagcacu

SEQ ID NO: 1393720 - RNA, 19 nt, Artificial Sequence
  Description of Artificial Sequence: Synthetic oligonucleotide
  Sense strand starting at position 105 of SEQ ID NO: 1243083
cuuauugaguacuuaccau

SEQ ID NO: 1393721 - RNA, 19 nt, Artificial Sequence
  Description of Artificial Sequence: Synthetic oligonucleotide
  Antisense strand to SEQ ID NO: 1393720
augguaaguacucaauaag

SEQ ID NO: 1393722 - RNA, 19 nt, Artificial Sequence
  Description of Artificial Sequence: Synthetic oligonucleotide
  Sense strand starting at position 432 of SEQ ID NO: 1243083
aggcaugcauucuuaguca

SEQ ID NO: 1393723 - RNA, 19 nt, Artificial Sequence
  Description of Artificial Sequence: Synthetic oligonucleotide
  Antisense strand to SEQ ID NO: 1393722
ugacuaagaaugcaugccu

SEQ ID NO: 1393724 - RNA, 19 nt, Artificial Sequence
  Description of Artificial Sequence: Synthetic oligonucleotide
  Sense strand starting at position 436 of SEQ ID NO: 1243083
augcauucuuagucacaga

SEQ ID NO: 1393725 - RNA, 19 nt, Artificial Sequence
  Description of Artificial Sequence: Synthetic oligonucleotide
  Antisense strand to SEQ ID NO: 1393724
ucugugacuaagaaugcau

SEQ ID NO: 1393726 - RNA, 19 nt, Artificial Sequence
  Description of Artificial Sequence: Synthetic oligonucleotide
  Sense strand starting at position 694 of SEQ ID NO: 1243083
uugagaaguuacccuauau

SEQ ID NO: 1393727 - RNA, 19 nt, Artificial Sequence
  Description of Artificial Sequence: Synthetic oligonucleotide
  Antisense strand to SEQ ID NO: 1393726
auauaggguaacuucucaa

SEQ ID NO: 1393728 - RNA, 19 nt, Artificial Sequence
  Description of Artificial Sequence: Synthetic oligonucleotide
  Sense strand starting at position 1035 of SEQ ID NO: 1243083
caaguagcuuugucauugu

SEQ ID NO: 1393729 - RNA, 19 nt, Artificial Sequence
  Description of Artificial Sequence: Synthetic oligonucleotide
  Antisense strand to SEQ ID NO: 1393728
acaaugacaaagcuacuug

SEQ ID NO: 1393730 - RNA, 19 nt, Artificial Sequence
  Description of Artificial Sequence: Synthetic oligonucleotide
  Sense strand starting at position 1188 of SEQ ID NO: 1243083
gcuguuuggaagggugaga

SEQ ID NO: 1393731 - RNA, 19 nt, Artificial Sequence
  Description of Artificial Sequence: Synthetic oligonucleotide
  Antisense strand to SEQ ID NO: 1393730
ucucacccuuccaaacagc

SEQ ID NO: 1393732 - RNA, 19 nt, Artificial Sequence
  Description of Artificial Sequence: Synthetic oligonucleotide
  Sense strand starting at position 1629 of SEQ ID NO: 1243083
uuuggagaaguucgaggaa

SEQ ID NO: 1393733 - RNA, 19 nt, Artificial Sequence
  Description of Artificial Sequence: Synthetic oligonucleotide
  Antisense strand to SEQ ID NO: 1393732
uuccucgaacuucuccaaa

SEQ ID NO: 1393734 - RNA, 19 nt, Artificial Sequence
  Description of Artificial Sequence: Synthetic oligonucleotide
  Sense strand starting at position 1632 of SEQ ID NO: 1243083
ggagaaguucgaggaaacu

SEQ ID NO: 1393735 - RNA, 19 nt, Artificial Sequence
  Description of Artificial Sequence: Synthetic oligonucleotide
  Antisense strand to SEQ ID NO: 1393734
aguuuccucgaacuucucc

SEQ ID NO: 1393736 - RNA, 19 nt, Artificial Sequence
  Description of Artificial Sequence: Synthetic oligonucleotide
  Sense strand starting at position 1679 of SEQ ID NO: 1243083
uccauuaagccaggagaaa

SEQ ID NO: 1393737 - RNA, 19 nt, Artificial Sequence
  Description of Artificial Sequence: Synthetic oligonucleotide
  Antisense strand to SEQ ID NO: 1393736
uuucuccuggcuuaaugga

SEQ ID NO: 1393738 - RNA, 19 nt, Artificial Sequence
  Description of Artificial Sequence: Synthetic oligonucleotide
  Sense strand starting at position 1751 of SEQ ID NO: 1243083
ucgagcuguuuguuuaaag

SEQ ID NO: 1393739 - RNA, 19 nt, Artificial Sequence
  Description of Artificial Sequence: Synthetic oligonucleotide
  Antisense strand to SEQ ID NO: 1393738
cuuuaaacaaacagcucga

SEQ ID NO: 1393740 - RNA, 19 nt, Artificial Sequence
  Description of Artificial Sequence: Synthetic oligonucleotide
  Sense strand starting at position 1779 of SEQ ID NO: 1243083
cggaucugugccgaagguu

SEQ ID NO: 1393741 - RNA, 19 nt, Artificial Sequence
  Description of Artificial Sequence: Synthetic oligonucleotide
  Antisense strand to SEQ ID NO: 1393740
aaccuucggcacagauccg

SEQ ID NO: 1393742 - RNA, 19 nt, Artificial Sequence
  Description of Artificial Sequence: Synthetic oligonucleotide
  Sense strand starting at position 1787 of SEQ ID NO: 1243083
ugccgaagguuccuagaaa

SEQ ID NO: 1393743 - RNA, 19 nt, Artificial Sequence
  Description of Artificial Sequence: Synthetic oligonucleotide
  Antisense strand to SEQ ID NO: 1393742
uuucuaggaaccuucggca

SEQ ID NO: 1393744 - RNA, 19 nt, Artificial Sequence
  Description of Artificial Sequence: Synthetic oligonucleotide
  Sense strand starting at position 1851 of SEQ ID NO: 1243083
cgcauaaguuuacccaaau

SEQ ID NO: 1393745 - RNA, 19 nt, Artificial Sequence
  Description of Artificial Sequence: Synthetic oligonucleotide
  Antisense strand to SEQ ID NO: 1393744
auuuggguaaacuuaugcg

SEQ ID NO: 1393746 - RNA, 19 nt, Artificial Sequence
  Description of Artificial Sequence: Synthetic oligonucleotide
  Sense strand starting at position 1862 of SEQ ID NO: 1243083
acccaaauugugugccaga

SEQ ID NO: 1393747 - RNA, 19 nt, Artificial Sequence
  Description of Artificial Sequence: Synthetic oligonucleotide
  Antisense strand to SEQ ID NO: 1393746
ucuggcacacaauuugggu

SEQ ID NO: 1393748 - RNA, 19 nt, Artificial Sequence
  Description of Artificial Sequence: Synthetic oligonucleotide
  Sense strand starting at position 2138 of SEQ ID NO: 1243083
ugcugaagguugccaaauu

SEQ ID NO: 1393749 - RNA, 19 nt, Artificial Sequence
  Description of Artificial Sequence: Synthetic oligonucleotide
  Antisense strand to SEQ ID NO: 1393748
aauuuggcaaccuucagca

SEQ ID NO: 1393750 - RNA, 19 nt, Artificial Sequence
  Description of Artificial Sequence: Synthetic oligonucleotide
  Sense strand starting at position 2146 of SEQ ID NO: 1243083
guugccaaauuguuuauca

SEQ ID NO: 1393751 - RNA, 19 nt, Artificial Sequence
  Description of Artificial Sequence: Synthetic oligonucleotide
  Antisense strand to SEQ ID NO: 1393750
ugauaaacaauuuggcaac

SEQ ID NO: 1393752 - RNA, 19 nt, Artificial Sequence
  Description of Artificial Sequence: Synthetic oligonucleotide
  Sense strand starting at position 2194 of SEQ ID NO: 1243083
caccguuugcaagagauca

SEQ ID NO: 1393753 - RNA, 19 nt, Artificial Sequence
  Description of Artificial Sequence: Synthetic oligonucleotide
  Antisense strand to SEQ ID NO: 1393752
ugaucucuugcaaacggug

SEQ ID NO: 1393754 - RNA, 19 nt, Artificial Sequence
  Description of Artificial Sequence: Synthetic oligonucleotide
  Sense strand starting at position 2196 of SEQ ID NO: 1243083
ccguuugcaagagaucacu

SEQ ID NO: 1393755 - RNA, 19 nt, Artificial Sequence
  Description of Artificial Sequence: Synthetic oligonucleotide
  Antisense strand to SEQ ID NO: 1393754
agugaucucuugcaaacgg

SEQ ID NO: 1393756 - RNA, 19 nt, Artificial Sequence
  Description of Artificial Sequence: Synthetic oligonucleotide
  Sense strand starting at position 2214 of SEQ ID NO: 1243083
uccaauagcuugccaaaga

SEQ ID NO: 1393757 - RNA, 19 nt, Artificial Sequence
  Description of Artificial Sequence: Synthetic oligonucleotide
  Antisense strand to SEQ ID NO: 1393756
ucuuuggcaagcuauugga

SEQ ID NO: 1393758 - RNA, 19 nt, Artificial Sequence
  Description of Artificial Sequence: Synthetic oligonucleotide
  Sense strand starting at position 2317 of SEQ ID NO: 1243083
cuccgaaguuugucuaaac

SEQ ID NO: 1393759 - RNA, 19 nt, Artificial Sequence
  Description of Artificial Sequence: Synthetic oligonucleotide
  Antisense strand to SEQ ID NO: 1393758
guuuagacaaacuucggag

SEQ ID NO: 1393760 - RNA, 19 nt, Artificial Sequence
  Description of Artificial Sequence: Synthetic oligonucleotide
  Sense strand starting at position 3098 of SEQ ID NO: 1243083
ccuugacguccugagguua

SEQ ID NO: 1393761 - RNA, 19 nt, Artificial Sequence
  Description of Artificial Sequence: Synthetic oligonucleotide
  Antisense strand to SEQ ID NO: 1393760
uaaccucaggacgucaagg

SEQ ID NO: 1393762 - RNA, 19 nt, Artificial Sequence
  Description of Artificial Sequence: Synthetic oligonucleotide
  Sense strand starting at position 3190 of SEQ ID NO: 1243083
aaggaauggucagaaacag

SEQ ID NO: 1393763 - RNA, 19 nt, Artificial Sequence
  Description of Artificial Sequence: Synthetic oligonucleotide
  Antisense strand to SEQ ID NO: 1393762
cuguuucugaccauuccuu

SEQ ID NO: 1393764 - RNA, 19 nt, Artificial Sequence
  Description of Artificial Sequence: Synthetic oligonucleotide
  Sense strand starting at position 3224 of SEQ ID NO: 1243083
gauagauggucagagacag

SEQ ID NO: 1393765 - RNA, 19 nt, Artificial Sequence
  Description of Artificial Sequence: Synthetic oligonucleotide
  Antisense strand to SEQ ID NO: 1393764
cugucucugaccaucuauc

SEQ ID NO: 1393766 - RNA, 19 nt, Artificial Sequence
  Description of Artificial Sequence: Synthetic oligonucleotide
  Sense strand starting at position 3247 of SEQ ID NO: 1243083
uuucgauauuuagggauag

SEQ ID NO: 1393767 - RNA, 19 nt, Artificial Sequence
  Description of Artificial Sequence: Synthetic oligonucleotide
  Antisense strand to SEQ ID NO: 1393766
cuaucccuaaauaucgaaa

SEQ ID NO: 1393768 - RNA, 19 nt, Artificial Sequence
  Description of Artificial Sequence: Synthetic oligonucleotide
  Sense strand starting at position 3269 of SEQ ID NO: 1243083
cagagagauucugggauga

SEQ ID NO: 1393769 - RNA, 19 nt, Artificial Sequence
  Description of Artificial Sequence: Synthetic oligonucleotide
  Antisense strand to SEQ ID NO: 1393768
ucaucccagaaucucucug

SEQ ID NO: 1393770 - RNA, 19 nt, Artificial Sequence
  Description of Artificial Sequence: Synthetic oligonucleotide
  Sense strand starting at position 3271 of SEQ ID NO: 1243083
gagagauucugggaugaac

SEQ ID NO: 1393771 - RNA, 19 nt, Artificial Sequence
  Description of Artificial Sequence: Synthetic oligonucleotide
  Antisense strand to SEQ ID NO: 1393770
guucaucccagaaucucuc

SEQ ID NO: 1393772 - RNA, 19 nt, Artificial Sequence
  Description of Artificial Sequence: Synthetic oligonucleotide
  Sense strand starting at position 3362 of SEQ ID NO: 1243083
gcaaauguguaagccuuaa

SEQ ID NO: 1393773 - RNA, 19 nt, Artificial Sequence
  Description of Artificial Sequence: Synthetic oligonucleotide
  Antisense strand to SEQ ID NO: 1393772
uuaaggcuuacacauuugc

SEQ ID NO: 1393774 - RNA, 19 nt, Artificial Sequence
  Description of Artificial Sequence: Synthetic oligonucleotide
  Sense strand starting at position 3366 of SEQ ID NO: 1243083
auguguaagccuuaacuug

SEQ ID NO: 1393775 - RNA, 19 nt, Artificial Sequence
  Description of Artificial Sequence: Synthetic oligonucleotide
  Antisense strand to SEQ ID NO: 1393774
caaguuaaggcuuacacau

SEQ ID NO: 1393776 - RNA, 19 nt, Artificial Sequence
  Description of Artificial Sequence: Synthetic oligonucleotide
  Sense strand starting at position 3388 of SEQ ID NO: 1243083
ucguauagugcgagaugcu

SEQ ID NO: 1393777 - RNA, 19 nt, Artificial Sequence
  Description of Artificial Sequence: Synthetic oligonucleotide
  Antisense strand to SEQ ID NO: 1393776
agcaucucgcacuauacga

SEQ ID NO: 1393778 - RNA, 19 nt, Artificial Sequence
  Description of Artificial Sequence: Synthetic oligonucleotide
  Sense strand starting at position 3389 of SEQ ID NO: 1243083
cguauagugcgagaugcua

SEQ ID NO: 1393779 - RNA, 19 nt, Artificial Sequence
  Description of Artificial Sequence: Synthetic oligonucleotide
  Antisense strand to SEQ ID NO: 1393778
uagcaucucgcacuauacg

SEQ ID NO: 1393780 - RNA, 19 nt, Artificial Sequence
  Description of Artificial Sequence: Synthetic oligonucleotide
  Sense strand starting at position 3545 of SEQ ID NO: 1243083
ucggucacaggaugagaua

SEQ ID NO: 1393781 - RNA, 19 nt, Artificial Sequence
  Description of Artificial Sequence: Synthetic oligonucleotide
  Antisense strand to SEQ ID NO: 1393780
uaucucauccugugaccga

SEQ ID NO: 1393782 - RNA, 19 nt, Artificial Sequence
  Description of Artificial Sequence: Synthetic oligonucleotide
  Sense strand starting at position 3568 of SEQ ID NO: 1243083
uugggcaagacugguuuaa

SEQ ID NO: 1393783 - RNA, 19 nt, Artificial Sequence
  Description of Artificial Sequence: Synthetic oligonucleotide
  Antisense strand to SEQ ID NO: 1393782
uuaaaccagucuugcccaa

SEQ ID NO: 1393784 - RNA, 19 nt, Artificial Sequence
  Description of Artificial Sequence: Synthetic oligonucleotide
  Sense strand starting at position 3570 of SEQ ID NO: 1243083
gggcaagacugguuuaaua

SEQ ID NO: 1393785 - RNA, 19 nt, Artificial Sequence
  Description of Artificial Sequence: Synthetic oligonucleotide
  Antisense strand to SEQ ID NO: 1393784
uauuaaaccagucuugccc

SEQ ID NO: 1393786 - RNA, 19 nt, Artificial Sequence
  Description of Artificial Sequence: Synthetic oligonucleotide
  Sense strand starting at position 3813 of SEQ ID NO: 1243083
cccucaguuccacgaauuc

SEQ ID NO: 1393787 - RNA, 19 nt, Artificial Sequence
  Description of Artificial Sequence: Synthetic oligonucleotide
  Antisense strand to SEQ ID NO: 1393786
gaauucguggaacugaggg

SEQ ID NO: 1393788 - RNA, 19 nt, Artificial Sequence
  Description of Artificial Sequence: Synthetic oligonucleotide
  Sense strand starting at position 3904 of SEQ ID NO: 1243083
ugaaguucucccugugaca

SEQ ID NO: 1393789 - RNA, 19 nt, Artificial Sequence
  Description of Artificial Sequence: Synthetic oligonucleotide
  Antisense strand to SEQ ID NO: 1393788
ugucacagggagaacuuca

SEQ ID NO: 1393790 - RNA, 19 nt, Artificial Sequence
  Description of Artificial Sequence: Synthetic oligonucleotide
  Sense strand starting at position 3919 of SEQ ID NO: 1243083
gacaaccgucucugaggaa

SEQ ID NO: 1393791 - RNA, 19 nt, Artificial Sequence
  Description of Artificial Sequence: Synthetic oligonucleotide
  Antisense strand to SEQ ID NO: 1393790
uuccucagagacgguuguc

SEQ ID NO: 1393792 - RNA, 19 nt, Artificial Sequence
  Description of Artificial Sequence: Synthetic oligonucleotide
  Sense strand starting at position 3931 of SEQ ID NO: 1243083
ugaggaaugucuucucccu

SEQ ID NO: 1393793 - RNA, 19 nt, Artificial Sequence
  Description of Artificial Sequence: Synthetic oligonucleotide
  Antisense strand to SEQ ID NO: 1393792
agggagaagacauuccuca

SEQ ID NO: 1393794 - RNA, 19 nt, Artificial Sequence
  Description of Artificial Sequence: Synthetic oligonucleotide
  Sense strand starting at position 3958 of SEQ ID NO: 1243083
aaagacaguugagagauaa

SEQ ID NO: 1393795 - RNA, 19 nt, Artificial Sequence
  Description of Artificial Sequence: Synthetic oligonucleotide
  Antisense strand to SEQ ID NO: 1393794
uuaucucucaacugucuuu

SEQ ID NO: 1393796 - RNA, 19 nt, Artificial Sequence
  Description of Artificial Sequence: Synthetic oligonucleotide
  Sense strand starting at position 359 of SEQ ID NO: 1243084
gcuguuuggaagggugaga

SEQ ID NO: 1393797 - RNA, 19 nt, Artificial Sequence
  Description of Artificial Sequence: Synthetic oligonucleotide
  Antisense strand to SEQ ID NO: 1393796
ucucacccuuccaaacagc

SEQ ID NO: 1393798 - RNA, 19 nt, Artificial Sequence
  Description of Artificial Sequence: Synthetic oligonucleotide
  Sense strand starting at position 800 of SEQ ID NO: 1243084
uuuggagaaguucgaggaa

SEQ ID NO: 1393799 - RNA, 19 nt, Artificial Sequence
  Description of Artificial Sequence: Synthetic oligonucleotide
  Antisense strand to SEQ ID NO: 1393798
uuccucgaacuucuccaaa

SEQ ID NO: 1393800 - RNA, 19 nt, Artificial Sequence
  Description of Artificial Sequence: Synthetic oligonucleotide
  Sense strand starting at position 803 of SEQ ID NO: 1243084
ggagaaguucgaggaaacu

SEQ ID NO: 1393801 - RNA, 19 nt, Artificial Sequence
  Description of Artificial Sequence: Synthetic oligonucleotide
  Antisense strand to SEQ ID NO: 1393800
aguuuccucgaacuucucc

SEQ ID NO: 1393802 - RNA, 19 nt, Artificial Sequence
  Description of Artificial Sequence: Synthetic oligonucleotide
  Sense strand starting at position 850 of SEQ ID NO: 1243084
uccauuaagccaggagaaa

SEQ ID NO: 1393803 - RNA, 19 nt, Artificial Sequence
  Description of Artificial Sequence: Synthetic oligonucleotide
  Antisense strand to SEQ ID NO: 1393802
uuucuccuggcuuaaugga

SEQ ID NO: 1393804 - RNA, 19 nt, Artificial Sequence
  Description of Artificial Sequence: Synthetic oligonucleotide
  Sense strand starting at position 950 of SEQ ID NO: 1243084
cggaucugugccgaagguu

SEQ ID NO: 1393805 - RNA, 19 nt, Artificial Sequence
  Description of Artificial Sequence: Synthetic oligonucleotide
  Antisense strand to SEQ ID NO: 1393804
aaccuucggcacagauccg

SEQ ID NO: 1393806 - RNA, 19 nt, Artificial Sequence
  Description of Artificial Sequence: Synthetic oligonucleotide
  Sense strand starting at position 958 of SEQ ID NO: 1243084
ugccgaagguuccuagaaa

SEQ ID NO: 1393807 - RNA, 19 nt, Artificial Sequence
  Description of Artificial Sequence: Synthetic oligonucleotide
  Antisense strand to SEQ ID NO: 1393806
uuucuaggaaccuucggca

SEQ ID NO: 1393808 - RNA, 19 nt, Artificial Sequence
  Description of Artificial Sequence: Synthetic oligonucleotide
  Sense strand starting at position 1022 of SEQ ID NO: 1243084
cgcauaaguuuacccaaau

SEQ ID NO: 1393809 - RNA, 19 nt, Artificial Sequence
  Description of Artificial Sequence: Synthetic oligonucleotide
  Antisense strand to SEQ ID NO: 1393808
auuuggguaaacuuaugcg

SEQ ID NO: 1393810 - RNA, 19 nt, Artificial Sequence
  Description of Artificial Sequence: Synthetic oligonucleotide
  Sense strand starting at position 1033 of SEQ ID NO: 1243084
acccaaauugugugccaga

SEQ ID NO: 1393811 - RNA, 19 nt, Artificial Sequence
  Description of Artificial Sequence: Synthetic oligonucleotide
  Antisense strand to SEQ ID NO: 1393810
ucuggcacacaauuugggu

SEQ ID NO: 1393812 - RNA, 19 nt, Artificial Sequence
  Description of Artificial Sequence: Synthetic oligonucleotide
  Sense strand starting at position 1309 of SEQ ID NO: 1243084
ugcugaagguugccaaauu

SEQ ID NO: 1393813 - RNA, 19 nt, Artificial Sequence
  Description of Artificial Sequence: Synthetic oligonucleotide
  Antisense strand to SEQ ID NO: 1393812
aauuuggcaaccuucagca

SEQ ID NO: 1393814 - RNA, 19 nt, Artificial Sequence
  Description of Artificial Sequence: Synthetic oligonucleotide
  Sense strand starting at position 1317 of SEQ ID NO: 1243084
guugccaaauuguuuauca

SEQ ID NO: 1393815 - RNA, 19 nt, Artificial Sequence
  Description of Artificial Sequence: Synthetic oligonucleotide
  Antisense strand to SEQ ID NO: 1393814
ugauaaacaauuuggcaac

SEQ ID NO: 1393816 - RNA, 19 nt, Artificial Sequence
  Description of Artificial Sequence: Synthetic oligonucleotide
  Sense strand starting at position 1365 of SEQ ID NO: 1243084
caccguuugcaagagauca

SEQ ID NO: 1393817 - RNA, 19 nt, Artificial Sequence
  Description of Artificial Sequence: Synthetic oligonucleotide
  Antisense strand to SEQ ID NO: 1393816
ugaucucuugcaaacggug

SEQ ID NO: 1393818 - RNA, 19 nt, Artificial Sequence
  Description of Artificial Sequence: Synthetic oligonucleotide
  Sense strand starting at position 1367 of SEQ ID NO: 1243084
ccguuugcaagagaucacu

SEQ ID NO: 1393819 - RNA, 19 nt, Artificial Sequence
  Description of Artificial Sequence: Synthetic oligonucleotide
  Antisense strand to SEQ ID NO: 1393818
agugaucucuugcaaacgg

SEQ ID NO: 1393820 - RNA, 19 nt, Artificial Sequence
  Description of Artificial Sequence: Synthetic oligonucleotide
  Sense strand starting at position 1385 of SEQ ID NO: 1243084
uccaauagcuugccaaaga

SEQ ID NO: 1393821 - RNA, 19 nt, Artificial Sequence
  Description of Artificial Sequence: Synthetic oligonucleotide
  Antisense strand to SEQ ID NO: 1393820
ucuuuggcaagcuauugga

SEQ ID NO: 1393822 - RNA, 19 nt, Artificial Sequence
  Description of Artificial Sequence: Synthetic oligonucleotide
  Sense strand starting at position 1488 of SEQ ID NO: 1243084
cuccgaaguuugucuaaac

SEQ ID NO: 1393823 - RNA, 19 nt, Artificial Sequence
  Description of Artificial Sequence: Synthetic oligonucleotide
  Antisense strand to SEQ ID NO: 1393822
guuuagacaaacuucggag

SEQ ID NO: 1393824 - RNA, 19 nt, Artificial Sequence
  Description of Artificial Sequence: Synthetic oligonucleotide
  Sense strand starting at position 2269 of SEQ ID NO: 1243084
ccuugacguccugagguua

SEQ ID NO: 1393825 - RNA, 19 nt, Artificial Sequence
  Description of Artificial Sequence: Synthetic oligonucleotide
  Antisense strand to SEQ ID NO: 1393824
uaaccucaggacgucaagg

SEQ ID NO: 1393826 - RNA, 19 nt, Artificial Sequence
  Description of Artificial Sequence: Synthetic oligonucleotide
  Sense strand starting at position 2361 of SEQ ID NO: 1243084
aaggaauggucagaaacag

SEQ ID NO: 1393827 - RNA, 19 nt, Artificial Sequence
  Description of Artificial Sequence: Synthetic oligonucleotide
  Antisense strand to SEQ ID NO: 1393826
cuguuucugaccauuccuu

SEQ ID NO: 1393828 - RNA, 19 nt, Artificial Sequence
  Description of Artificial Sequence: Synthetic oligonucleotide
  Sense strand starting at position 2395 of SEQ ID NO: 1243084
gauagauggucagagacag

SEQ ID NO: 1393829 - RNA, 19 nt, Artificial Sequence
  Description of Artificial Sequence: Synthetic oligonucleotide
  Antisense strand to SEQ ID NO: 1393828
cugucucugaccaucuauc

SEQ ID NO: 1393830 - RNA, 19 nt, Artificial Sequence
  Description of Artificial Sequence: Synthetic oligonucleotide
  Sense strand starting at position 2418 of SEQ ID NO: 1243084
uuucgauauuuagggauag

SEQ ID NO: 1393831 - RNA, 19 nt, Artificial Sequence
  Description of Artificial Sequence: Synthetic oligonucleotide
  Antisense strand to SEQ ID NO: 1393830
cuaucccuaaauaucgaaa

SEQ ID NO: 1393832 - RNA, 19 nt, Artificial Sequence
  Description of Artificial Sequence: Synthetic oligonucleotide
  Sense strand starting at position 2440 of SEQ ID NO: 1243084
cagagagauucugggauga

SEQ ID NO: 1393833 - RNA, 19 nt, Artificial Sequence
  Description of Artificial Sequence: Synthetic oligonucleotide
  Antisense strand to SEQ ID NO: 1393832
ucaucccagaaucucucug

SEQ ID NO: 1393834 - RNA, 19 nt, Artificial Sequence
  Description of Artificial Sequence: Synthetic oligonucleotide
  Sense strand starting at position 2442 of SEQ ID NO: 1243084
gagagauucugggaugaac

SEQ ID NO: 1393835 - RNA, 19 nt, Artificial Sequence
  Description of Artificial Sequence: Synthetic oligonucleotide
  Antisense strand to SEQ ID NO: 1393834
guucaucccagaaucucuc

SEQ ID NO: 1393836 - RNA, 19 nt, Artificial Sequence
  Description of Artificial Sequence: Synthetic oligonucleotide
  Sense strand starting at position 2533 of SEQ ID NO: 1243084
gcaaauguguaagccuuaa

SEQ ID NO: 1393837 - RNA, 19 nt, Artificial Sequence
  Description of Artificial Sequence: Synthetic oligonucleotide
  Antisense strand to SEQ ID NO: 1393836
uuaaggcuuacacauuugc

SEQ ID NO: 1393838 - RNA, 19 nt, Artificial Sequence
  Description of Artificial Sequence: Synthetic oligonucleotide
  Sense strand starting at position 2537 of SEQ ID NO: 1243084
auguguaagccuuaacuug

SEQ ID NO: 1393839 - RNA, 19 nt, Artificial Sequence
  Description of Artificial Sequence: Synthetic oligonucleotide
  Antisense strand to SEQ ID NO: 1393838
caaguuaaggcuuacacau

SEQ ID NO: 1393840 - RNA, 19 nt, Artificial Sequence
  Description of Artificial Sequence: Synthetic oligonucleotide
  Sense strand starting at position 2559 of SEQ ID NO: 1243084
ucguauagugcgagaugcu

SEQ ID NO: 1393841 - RNA, 19 nt, Artificial Sequence
  Description of Artificial Sequence: Synthetic oligonucleotide
  Antisense strand to SEQ ID NO: 1393840
agcaucucgcacuauacga

SEQ ID NO: 1393842 - RNA, 19 nt, Artificial Sequence
  Description of Artificial Sequence: Synthetic oligonucleotide
  Sense strand starting at position 2716 of SEQ ID NO: 1243084
ucggucacaggaugagaua

SEQ ID NO: 1393843 - RNA, 19 nt, Artificial Sequence
  Description of Artificial Sequence: Synthetic oligonucleotide
  Antisense strand to SEQ ID NO: 1393842
uaucucauccugugaccga

SEQ ID NO: 1393844 - RNA, 19 nt, Artificial Sequence
  Description of Artificial Sequence: Synthetic oligonucleotide
  Sense strand starting at position 2739 of SEQ ID NO: 1243084
uugggcaagacugguuuaa

SEQ ID NO: 1393845 - RNA, 19 nt, Artificial Sequence
  Description of Artificial Sequence: Synthetic oligonucleotide
  Antisense strand to SEQ ID NO: 1393844
uuaaaccagucuugcccaa

SEQ ID NO: 1393846 - RNA, 19 nt, Artificial Sequence
  Description of Artificial Sequence: Synthetic oligonucleotide
  Sense strand starting at position 2741 of SEQ ID NO: 1243084
gggcaagacugguuuaaua

SEQ ID NO: 1393847 - RNA, 19 nt, Artificial Sequence
  Description of Artificial Sequence: Synthetic oligonucleotide
  Antisense strand to SEQ ID NO: 1393846
uauuaaaccagucuugccc

SEQ ID NO: 1393848 - RNA, 19 nt, Artificial Sequence
  Description of Artificial Sequence: Synthetic oligonucleotide
  Sense strand starting at position 2984 of SEQ ID NO: 1243084
cccucaguuccacgaauuc

SEQ ID NO: 1393849 - RNA, 19 nt, Artificial Sequence
  Description of Artificial Sequence: Synthetic oligonucleotide
  Antisense strand to SEQ ID NO: 1393848
gaauucguggaacugaggg

SEQ ID NO: 1393850 - RNA, 19 nt, Artificial Sequence
  Description of Artificial Sequence: Synthetic oligonucleotide
  Sense strand starting at position 3075 of SEQ ID NO: 1243084
ugaaguucucccugugaca

SEQ ID NO: 1393851 - RNA, 19 nt, Artificial Sequence
  Description of Artificial Sequence: Synthetic oligonucleotide
  Antisense strand to SEQ ID NO: 1393850
ugucacagggagaacuuca

SEQ ID NO: 1393852 - RNA, 19 nt, Artificial Sequence
  Description of Artificial Sequence: Synthetic oligonucleotide
  Sense strand starting at position 3090 of SEQ ID NO: 1243084
gacaaccgucucugaggaa

SEQ ID NO: 1393853 - RNA, 19 nt, Artificial Sequence
  Description of Artificial Sequence: Synthetic oligonucleotide
  Antisense strand to SEQ ID NO: 1393852
uuccucagagacgguuguc

SEQ ID NO: 1393854 - RNA, 19 nt, Artificial Sequence
  Description of Artificial Sequence: Synthetic oligonucleotide
  Sense strand starting at position 3102 of SEQ ID NO: 1243084
ugaggaaugucuucucccu

SEQ ID NO: 1393855 - RNA, 19 nt, Artificial Sequence
  Description of Artificial Sequence: Synthetic oligonucleotide
  Antisense strand to SEQ ID NO: 1393854
agggagaagacauuccuca

SEQ ID NO: 1393856 - RNA, 19 nt, Artificial Sequence
  Description of Artificial Sequence: Synthetic oligonucleotide
  Sense strand starting at position 3129 of SEQ ID NO: 1243084
aaagacaguugagagauaa

SEQ ID NO: 1393857 - RNA, 19 nt, Artificial Sequence
  Description of Artificial Sequence: Synthetic oligonucleotide
  Antisense strand to SEQ ID NO: 1393856
uuaucucucaacugucuuu

SEQ ID NO: 1393858 - RNA, 19 nt, Artificial Sequence
  Description of Artificial Sequence: Synthetic oligonucleotide
  Sense strand starting at position 3469 of SEQ ID NO: 1243084
agggaacaguuugagaagu

SEQ ID NO: 1393859 - RNA, 19 nt, Artificial Sequence
  Description of Artificial Sequence: Synthetic oligonucleotide
  Antisense strand to SEQ ID NO: 1393858
acuucucaaacuguucccu

SEQ ID NO: 1393860 - RNA, 19 nt, Artificial Sequence
  Description of Artificial Sequence: Synthetic oligonucleotide
  Sense strand starting at position 3471 of SEQ ID NO: 1243084
ggaacaguuugagaaguaa

SEQ ID NO: 1393861 - RNA, 19 nt, Artificial Sequence
  Description of Artificial Sequence: Synthetic oligonucleotide
  Antisense strand to SEQ ID NO: 1393860
uuacuucucaaacuguucc

SEQ ID NO: 1393862 - RNA, 19 nt, Artificial Sequence
  Description of Artificial Sequence: Synthetic oligonucleotide
  Sense strand starting at position 3531 of SEQ ID NO: 1243084
ggcauuggaggucacgauu

SEQ ID NO: 1393863 - RNA, 19 nt, Artificial Sequence
  Description of Artificial Sequence: Synthetic oligonucleotide
  Antisense strand to SEQ ID NO: 1393862
aaucgugaccuccaaugcc

SEQ ID NO: 1393864 - RNA, 19 nt, Artificial Sequence
  Description of Artificial Sequence: Synthetic oligonucleotide
  Sense strand starting at position 3534 of SEQ ID NO: 1243084
auuggaggucacgauuaug

SEQ ID NO: 1393865 - RNA, 19 nt, Artificial Sequence
  Description of Artificial Sequence: Synthetic oligonucleotide
  Antisense strand to SEQ ID NO: 1393864
cauaaucgugaccuccaau

SEQ ID NO: 1393866 - RNA, 19 nt, Artificial Sequence
  Description of Artificial Sequence: Synthetic oligonucleotide
  Sense strand starting at position 3537 of SEQ ID NO: 1243084
ggaggucacgauuaugucu

SEQ ID NO: 1393867 - RNA, 19 nt, Artificial Sequence
  Description of Artificial Sequence: Synthetic oligonucleotide
  Antisense strand to SEQ ID NO: 1393866
agacauaaucgugaccucc

SEQ ID NO: 1393868 - RNA, 19 nt, Artificial Sequence
  Description of Artificial Sequence: Synthetic oligonucleotide
  Sense strand starting at position 3542 of SEQ ID NO: 1243084
ucacgauuaugucuugauc

SEQ ID NO: 1393869 - RNA, 19 nt, Artificial Sequence
  Description of Artificial Sequence: Synthetic oligonucleotide
  Antisense strand to SEQ ID NO: 1393868
gaucaagacauaaucguga

SEQ ID NO: 1393870 - RNA, 19 nt, Artificial Sequence
  Description of Artificial Sequence: Synthetic oligonucleotide
  Sense strand starting at position 3545 of SEQ ID NO: 1243084
cgauuaugucuugaucauc

SEQ ID NO: 1393871 - RNA, 19 nt, Artificial Sequence
  Description of Artificial Sequence: Synthetic oligonucleotide
  Antisense strand to SEQ ID NO: 1393870
gaugaucaagacauaaucg

SEQ ID NO: 1393872 - RNA, 19 nt, Artificial Sequence
  Description of Artificial Sequence: Synthetic oligonucleotide
  Sense strand starting at position 3548 of SEQ ID NO: 1243084
uuaugucuugaucaucaca

SEQ ID NO: 1393873 - RNA, 19 nt, Artificial Sequence
  Description of Artificial Sequence: Synthetic oligonucleotide
  Antisense strand to SEQ ID NO: 1393872
ugugaugaucaagacauaa

SEQ ID NO: 1393874 - RNA, 19 nt, Artificial Sequence
  Description of Artificial Sequence: Synthetic oligonucleotide
  Sense strand starting at position 3636 of SEQ ID NO: 1243084
ugcucugacuuuccagagu

SEQ ID NO: 1393875 - RNA, 19 nt, Artificial Sequence
  Description of Artificial Sequence: Synthetic oligonucleotide
  Antisense strand to SEQ ID NO: 1393874
acucuggaaagucagagca

SEQ ID NO: 1393876 - RNA, 19 nt, Artificial Sequence
  Description of Artificial Sequence: Synthetic oligonucleotide
  Sense strand starting at position 65 of SEQ ID NO: 1243085
gggacacucuucuuccaca

SEQ ID NO: 1393877 - RNA, 19 nt, Artificial Sequence
  Description of Artificial Sequence: Synthetic oligonucleotide
  Antisense strand to SEQ ID NO: 1393876
uguggaagaagaguguccc

SEQ ID NO: 1393878 - RNA, 19 nt, Artificial Sequence
  Description of Artificial Sequence: Synthetic oligonucleotide
  Sense strand starting at position 111 of SEQ ID NO: 1243085
guggucucagcucauauga

SEQ ID NO: 1393879 - RNA, 19 nt, Artificial Sequence
  Description of Artificial Sequence: Synthetic oligonucleotide
  Antisense strand to SEQ ID NO: 1393878
ucauaugagcugagaccac

SEQ ID NO: 1393880 - RNA, 19 nt, Artificial Sequence
  Description of Artificial Sequence: Synthetic oligonucleotide
  Sense strand starting at position 113 of SEQ ID NO: 1243085
ggucucagcucauaugaca

SEQ ID NO: 1393881 - RNA, 19 nt, Artificial Sequence
  Description of Artificial Sequence: Synthetic oligonucleotide
  Antisense strand to SEQ ID NO: 1393880
ugucauaugagcugagacc

SEQ ID NO: 1393882 - RNA, 19 nt, Artificial Sequence
  Description of Artificial Sequence: Synthetic oligonucleotide
  Sense strand starting at position 256 of SEQ ID NO: 1243085
ucucucccucgagaaaguu

SEQ ID NO: 1393883 - RNA, 19 nt, Artificial Sequence
  Description of Artificial Sequence: Synthetic oligonucleotide
  Antisense strand to SEQ ID NO: 1393882
aacuuucucgagggagaga

SEQ ID NO: 1393884 - RNA, 19 nt, Artificial Sequence
  Description of Artificial Sequence: Synthetic oligonucleotide
  Sense strand starting at position 264 of SEQ ID NO: 1243085
ucgagaaaguuagcuccau

SEQ ID NO: 1393885 - RNA, 19 nt, Artificial Sequence
  Description of Artificial Sequence: Synthetic oligonucleotide
  Antisense strand to SEQ ID NO: 1393884
auggagcuaacuuucucga

SEQ ID NO: 1393886 - RNA, 19 nt, Artificial Sequence
  Description of Artificial Sequence: Synthetic oligonucleotide
  Sense strand starting at position 270 of SEQ ID NO: 1243085
aaguuagcuccaugagagc

SEQ ID NO: 1393887 - RNA, 19 nt, Artificial Sequence
  Description of Artificial Sequence: Synthetic oligonucleotide
  Antisense strand to SEQ ID NO: 1393886
gcucucauggagcuaacuu

SEQ ID NO: 1393888 - RNA, 19 nt, Artificial Sequence
  Description of Artificial Sequence: Synthetic oligonucleotide
  Sense strand starting at position 335 of SEQ ID NO: 1243085
gggcguggcaucuaagaga

SEQ ID NO: 1393889 - RNA, 19 nt, Artificial Sequence
  Description of Artificial Sequence: Synthetic oligonucleotide
  Antisense strand to SEQ ID NO: 1393888
ucucuuagaugccacgccc

SEQ ID NO: 1393890 - RNA, 19 nt, Artificial Sequence
  Description of Artificial Sequence: Synthetic oligonucleotide
  Sense strand starting at position 358 of SEQ ID NO: 1243085
caaaguauauuugguuaga

SEQ ID NO: 1393891 - RNA, 19 nt, Artificial Sequence
  Description of Artificial Sequence: Synthetic oligonucleotide
  Antisense strand to SEQ ID NO: 1393890
ucuaaccaaauauacuuug

SEQ ID NO: 1393892 - RNA, 19 nt, Artificial Sequence
  Description of Artificial Sequence: Synthetic oligonucleotide
  Sense strand starting at position 902 of SEQ ID NO: 1243085
ugaagcaauccuugagucu

SEQ ID NO: 1393893 - RNA, 19 nt, Artificial Sequence
  Description of Artificial Sequence: Synthetic oligonucleotide
  Antisense strand to SEQ ID NO: 1393892
agacucaaggauugcuuca

SEQ ID NO: 1393894 - RNA, 19 nt, Artificial Sequence
  Description of Artificial Sequence: Synthetic oligonucleotide
  Sense strand starting at position 903 of SEQ ID NO: 1243085
gaagcaauccuugagucuc

SEQ ID NO: 1393895 - RNA, 19 nt, Artificial Sequence
  Description of Artificial Sequence: Synthetic oligonucleotide
  Antisense strand to SEQ ID NO: 1393894
gagacucaaggauugcuuc

SEQ ID NO: 1393896 - RNA, 19 nt, Artificial Sequence
  Description of Artificial Sequence: Synthetic oligonucleotide
  Sense strand starting at position 954 of SEQ ID NO: 1243085
gccaccagguucuugauaa

SEQ ID NO: 1393897 - RNA, 19 nt, Artificial Sequence
  Description of Artificial Sequence: Synthetic oligonucleotide
  Antisense strand to SEQ ID NO: 1393896
uuaucaagaaccugguggc

SEQ ID NO: 1393898 - RNA, 19 nt, Artificial Sequence
  Description of Artificial Sequence: Synthetic oligonucleotide
  Sense strand starting at position 955 of SEQ ID NO: 1243085
ccaccagguucuugauaaa

SEQ ID NO: 1393899 - RNA, 19 nt, Artificial Sequence
  Description of Artificial Sequence: Synthetic oligonucleotide
  Antisense strand to SEQ ID NO: 1393898
uuuaucaagaaccuggugg

SEQ ID NO: 1393900 - RNA, 19 nt, Artificial Sequence
  Description of Artificial Sequence: Synthetic oligonucleotide
  Sense strand starting at position 958 of SEQ ID NO: 1243085
ccagguucuugauaaaugc

SEQ ID NO: 1393901 - RNA, 19 nt, Artificial Sequence
  Description of Artificial Sequence: Synthetic oligonucleotide
  Antisense strand to SEQ ID NO: 1393900
gcauuuaucaagaaccugg

SEQ ID NO: 1393902 - RNA, 19 nt, Artificial Sequence
  Description of Artificial Sequence: Synthetic oligonucleotide
  Sense strand starting at position 965 of SEQ ID NO: 1243085
cuugauaaaugcuuaugga

SEQ ID NO: 1393903 - RNA, 19 nt, Artificial Sequence
  Description of Artificial Sequence: Synthetic oligonucleotide
  Antisense strand to SEQ ID NO: 1393902
uccauaagcauuuaucaag

SEQ ID NO: 1393904 - RNA, 19 nt, Artificial Sequence
  Description of Artificial Sequence: Synthetic oligonucleotide
  Sense strand starting at position 968 of SEQ ID NO: 1243085
gauaaaugcuuauggaaag

SEQ ID NO: 1393905 - RNA, 19 nt, Artificial Sequence
  Description of Artificial Sequence: Synthetic oligonucleotide
  Antisense strand to SEQ ID NO: 1393904
cuuuccauaagcauuuauc

SEQ ID NO: 1393906 - RNA, 19 nt, Artificial Sequence
  Description of Artificial Sequence: Synthetic oligonucleotide
  Sense strand starting at position 1016 of SEQ ID NO: 1243085
gccugagaucagcaucuuc

SEQ ID NO: 1393907 - RNA, 19 nt, Artificial Sequence
  Description of Artificial Sequence: Synthetic oligonucleotide
  Antisense strand to SEQ ID NO: 1393906
gaagaugcugaucucaggc

SEQ ID NO: 1393908 - RNA, 19 nt, Artificial Sequence
  Description of Artificial Sequence: Synthetic oligonucleotide
  Sense strand starting at position 1436 of SEQ ID NO: 1243085
gccagucuugucuggacuu

SEQ ID NO: 1393909 - RNA, 19 nt, Artificial Sequence
  Description of Artificial Sequence: Synthetic oligonucleotide
  Antisense strand to SEQ ID NO: 1393908
aaguccagacaagacuggc

SEQ ID NO: 1393910 - RNA, 19 nt, Artificial Sequence
  Description of Artificial Sequence: Synthetic oligonucleotide
  Sense strand starting at position 1546 of SEQ ID NO: 1243085
ucagucacucuuuggauau

SEQ ID NO: 1393911 - RNA, 19 nt, Artificial Sequence
  Description of Artificial Sequence: Synthetic oligonucleotide
  Antisense strand to SEQ ID NO: 1393910
auauccaaagagugacuga

SEQ ID NO: 1393912 - RNA, 19 nt, Artificial Sequence
  Description of Artificial Sequence: Synthetic oligonucleotide
  Sense strand starting at position 1994 of SEQ ID NO: 1243085
cgggaaucccaggaugguu

SEQ ID NO: 1393913 - RNA, 19 nt, Artificial Sequence
  Description of Artificial Sequence: Synthetic oligonucleotide
  Antisense strand to SEQ ID NO: 1393912
aaccauccugggauucccg

SEQ ID NO: 1393914 - RNA, 19 nt, Artificial Sequence
  Description of Artificial Sequence: Synthetic oligonucleotide
  Sense strand starting at position 2312 of SEQ ID NO: 1243085
gcaaguuucucuucccaga

SEQ ID NO: 1393915 - RNA, 19 nt, Artificial Sequence
  Description of Artificial Sequence: Synthetic oligonucleotide
  Antisense strand to SEQ ID NO: 1393914
ucugggaagagaaacuugc

SEQ ID NO: 1393916 - RNA, 19 nt, Artificial Sequence
  Description of Artificial Sequence: Synthetic oligonucleotide
  Sense strand starting at position 2364 of SEQ ID NO: 1243085
ucgcuucugcuuucucgaa

SEQ ID NO: 1393917 - RNA, 19 nt, Artificial Sequence
  Description of Artificial Sequence: Synthetic oligonucleotide
  Antisense strand to SEQ ID NO: 1393916
uucgagaaagcagaagcga

SEQ ID NO: 1393918 - RNA, 19 nt, Artificial Sequence
  Description of Artificial Sequence: Synthetic oligonucleotide
  Sense strand starting at position 2727 of SEQ ID NO: 1243085
ucccuaagugccggacauu

SEQ ID NO: 1393919 - RNA, 19 nt, Artificial Sequence
  Description of Artificial Sequence: Synthetic oligonucleotide
  Antisense strand to SEQ ID NO: 1393918
aauguccggcacuuaggga

SEQ ID NO: 1393920 - RNA, 19 nt, Artificial Sequence
  Description of Artificial Sequence: Synthetic oligonucleotide
  Sense strand starting at position 2957 of SEQ ID NO: 1243085
gggcgagugugaguuaaac

SEQ ID NO: 1393921 - RNA, 19 nt, Artificial Sequence
  Description of Artificial Sequence: Synthetic oligonucleotide
  Antisense strand to SEQ ID NO: 1393920
guuuaacucacacucgccc

SEQ ID NO: 1393922 - RNA, 19 nt, Artificial Sequence
  Description of Artificial Sequence: Synthetic oligonucleotide
  Sense strand starting at position 2959 of SEQ ID NO: 1243085
gcgagugugaguuaaacug

SEQ ID NO: 1393923 - RNA, 19 nt, Artificial Sequence
  Description of Artificial Sequence: Synthetic oligonucleotide
  Antisense strand to SEQ ID NO: 1393922
caguuuaacucacacucgc

SEQ ID NO: 1393924 - RNA, 19 nt, Artificial Sequence
  Description of Artificial Sequence: Synthetic oligonucleotide
  Sense strand starting at position 2967 of SEQ ID NO: 1243085
gaguuaaacugcucagucu

SEQ ID NO: 1393925 - RNA, 19 nt, Artificial Sequence
  Description of Artificial Sequence: Synthetic oligonucleotide
  Antisense strand to SEQ ID NO: 1393924
agacugagcaguuuaacuc

SEQ ID NO: 1393926 - RNA, 19 nt, Artificial Sequence
  Description of Artificial Sequence: Synthetic oligonucleotide
  Sense strand starting at position 3124 of SEQ ID NO: 1243085
gaggcucaaccagaaguuu

SEQ ID NO: 1393927 - RNA, 19 nt, Artificial Sequence
  Description of Artificial Sequence: Synthetic oligonucleotide
  Antisense strand to SEQ ID NO: 1393926
aaacuucugguugagccuc

SEQ ID NO: 1393928 - RNA, 19 nt, Artificial Sequence
  Description of Artificial Sequence: Synthetic oligonucleotide
  Sense strand starting at position 3133 of SEQ ID NO: 1243085
ccagaaguuuacguucuca

SEQ ID NO: 1393929 - RNA, 19 nt, Artificial Sequence
  Description of Artificial Sequence: Synthetic oligonucleotide
  Antisense strand to SEQ ID NO: 1393928
ugagaacguaaacuucugg

SEQ ID NO: 1393930 - RNA, 19 nt, Artificial Sequence
  Description of Artificial Sequence: Synthetic oligonucleotide
  Sense strand starting at position 3137 of SEQ ID NO: 1243085
aaguuuacguucucacagu

SEQ ID NO: 1393931 - RNA, 19 nt, Artificial Sequence
  Description of Artificial Sequence: Synthetic oligonucleotide
  Antisense strand to SEQ ID NO: 1393930
acugugagaacguaaacuu

SEQ ID NO: 1393932 - RNA, 19 nt, Artificial Sequence
  Description of Artificial Sequence: Synthetic oligonucleotide
  Sense strand starting at position 3138 of SEQ ID NO: 1243085
aguuuacguucucacaguu

SEQ ID NO: 1393933 - RNA, 19 nt, Artificial Sequence
  Description of Artificial Sequence: Synthetic oligonucleotide
  Antisense strand to SEQ ID NO: 1393932
aacugugagaacguaaacu

SEQ ID NO: 1393934 - RNA, 19 nt, Artificial Sequence
  Description of Artificial Sequence: Synthetic oligonucleotide
  Sense strand starting at position 3192 of SEQ ID NO: 1243085
gggcuaguuucuccggaug

SEQ ID NO: 1393935 - RNA, 19 nt, Artificial Sequence
  Description of Artificial Sequence: Synthetic oligonucleotide
  Antisense strand to SEQ ID NO: 1393934
cauccggagaaacuagccc

SEQ ID NO: 1393936 - RNA, 19 nt, Artificial Sequence
  Description of Artificial Sequence: Synthetic oligonucleotide
  Sense strand starting at position 3284 of SEQ ID NO: 1243085
ccagaaguaucguccucuu

SEQ ID NO: 1393937 - RNA, 19 nt, Artificial Sequence
  Description of Artificial Sequence: Synthetic oligonucleotide
  Antisense strand to SEQ ID NO: 1393936
aagaggacgauacuucugg

SEQ ID NO: 1393938 - RNA, 19 nt, Artificial Sequence
  Description of Artificial Sequence: Synthetic oligonucleotide
  Sense strand starting at position 3620 of SEQ ID NO: 1243085
auugaccucuuguaagaag

SEQ ID NO: 1393939 - RNA, 19 nt, Artificial Sequence
  Description of Artificial Sequence: Synthetic oligonucleotide
  Antisense strand to SEQ ID NO: 1393938
cuucuuacaagaggucaau

SEQ ID NO: 1393940 - RNA, 19 nt, Artificial Sequence
  Description of Artificial Sequence: Synthetic oligonucleotide
  Sense strand starting at position 3623 of SEQ ID NO: 1243085
gaccucuuguaagaaguca

SEQ ID NO: 1393941 - RNA, 19 nt, Artificial Sequence
  Description of Artificial Sequence: Synthetic oligonucleotide
  Antisense strand to SEQ ID NO: 1393940
ugacuucuuacaagagguc

SEQ ID NO: 1393942 - RNA, 19 nt, Artificial Sequence
  Description of Artificial Sequence: Synthetic oligonucleotide
  Sense strand starting at position 3864 of SEQ ID NO: 1243085
gcagcaguagcaugaucau

SEQ ID NO: 1393943 - RNA, 19 nt, Artificial Sequence
  Description of Artificial Sequence: Synthetic oligonucleotide
  Antisense strand to SEQ ID NO: 1393942
augaucaugcuacugcugc

SEQ ID NO: 1393944 - RNA, 19 nt, Artificial Sequence
  Description of Artificial Sequence: Synthetic oligonucleotide
  Sense strand starting at position 8 of SEQ ID NO: 1243086
cuugguaauguccacuauu

SEQ ID NO: 1393945 - RNA, 19 nt, Artificial Sequence
  Description of Artificial Sequence: Synthetic oligonucleotide
  Antisense strand to SEQ ID NO: 1393944
aauaguggacauuaccaag

SEQ ID NO: 1393946 - RNA, 19 nt, Artificial Sequence
  Description of Artificial Sequence: Synthetic oligonucleotide
  Sense strand starting at position 32 of SEQ ID NO: 1243086
caaugacugucguuaauau

SEQ ID NO: 1393947 - RNA, 19 nt, Artificial Sequence
  Description of Artificial Sequence: Synthetic oligonucleotide
  Antisense strand to SEQ ID NO: 1393946
auauuaacgacagucauug

SEQ ID NO: 1393948 - RNA, 19 nt, Artificial Sequence
  Description of Artificial Sequence: Synthetic oligonucleotide
  Sense strand starting at position 33 of SEQ ID NO: 1243086
aaugacugucguuaauauc

SEQ ID NO: 1393949 - RNA, 19 nt, Artificial Sequence
  Description of Artificial Sequence: Synthetic oligonucleotide
  Antisense strand to SEQ ID NO: 1393948
gauauuaacgacagucauu

SEQ ID NO: 1393950 - RNA, 19 nt, Artificial Sequence
  Description of Artificial Sequence: Synthetic oligonucleotide
  Sense strand starting at position 39 of SEQ ID NO: 1243086
ugucguuaauauccacuaa

SEQ ID NO: 1393951 - RNA, 19 nt, Artificial Sequence
  Description of Artificial Sequence: Synthetic oligonucleotide
  Antisense strand to SEQ ID NO: 1393950
uuaguggauauuaacgaca

SEQ ID NO: 1393952 - RNA, 19 nt, Artificial Sequence
  Description of Artificial Sequence: Synthetic oligonucleotide
  Sense strand starting at position 169 of SEQ ID NO: 1243086
ccaugacugcccugaucca

SEQ ID NO: 1393953 - RNA, 19 nt, Artificial Sequence
  Description of Artificial Sequence: Synthetic oligonucleotide
  Antisense strand to SEQ ID NO: 1393952
uggaucagggcagucaugg

SEQ ID NO: 1393954 - RNA, 19 nt, Artificial Sequence
  Description of Artificial Sequence: Synthetic oligonucleotide
  Sense strand starting at position 176 of SEQ ID NO: 1243086
ugcccugauccacaaguua

SEQ ID NO: 1393955 - RNA, 19 nt, Artificial Sequence
  Description of Artificial Sequence: Synthetic oligonucleotide
  Antisense strand to SEQ ID NO: 1393954
uaacuuguggaucagggca

SEQ ID NO: 1393956 - RNA, 19 nt, Artificial Sequence
  Description of Artificial Sequence: Synthetic oligonucleotide
  Sense strand starting at position 501 of SEQ ID NO: 1243086
gugcaacuaugucucaaua

SEQ ID NO: 1393957 - RNA, 19 nt, Artificial Sequence
  Description of Artificial Sequence: Synthetic oligonucleotide
  Antisense strand to SEQ ID NO: 1393956
uauugagacauaguugcac

SEQ ID NO: 1393958 - RNA, 19 nt, Artificial Sequence
  Description of Artificial Sequence: Synthetic oligonucleotide
  Sense strand starting at position 547 of SEQ ID NO: 1243086
auauucugucacugacauu

SEQ ID NO: 1393959 - RNA, 19 nt, Artificial Sequence
  Description of Artificial Sequence: Synthetic oligonucleotide
  Antisense strand to SEQ ID NO: 1393958
aaugucagugacagaauau

SEQ ID NO: 1393960 - RNA, 19 nt, Artificial Sequence
  Description of Artificial Sequence: Synthetic oligonucleotide
  Sense strand starting at position 667 of SEQ ID NO: 1243086
cucagugagguccacugau

SEQ ID NO: 1393961 - RNA, 19 nt, Artificial Sequence
  Description of Artificial Sequence: Synthetic oligonucleotide
  Antisense strand to SEQ ID NO: 1393960
aucaguggaccucacugag

SEQ ID NO: 1393962 - RNA, 19 nt, Artificial Sequence
  Description of Artificial Sequence: Synthetic oligonucleotide
  Sense strand starting at position 720 of SEQ ID NO: 1243086
caaagugaucaauggcaca

SEQ ID NO: 1393963 - RNA, 19 nt, Artificial Sequence
  Description of Artificial Sequence: Synthetic oligonucleotide
  Antisense strand to SEQ ID NO: 1393962
ugugccauugaucacuuug

SEQ ID NO: 1393964 - RNA, 19 nt, Artificial Sequence
  Description of Artificial Sequence: Synthetic oligonucleotide
  Sense strand starting at position 733 of SEQ ID NO: 1243086
ggcacagacuucucaguga

SEQ ID NO: 1393965 - RNA, 19 nt, Artificial Sequence
  Description of Artificial Sequence: Synthetic oligonucleotide
  Antisense strand to SEQ ID NO: 1393964
ucacugagaagucugugcc

SEQ ID NO: 1393966 - RNA, 19 nt, Artificial Sequence
  Description of Artificial Sequence: Synthetic oligonucleotide
  Sense strand starting at position 736 of SEQ ID NO: 1243086
acagacuucucagugacuu

SEQ ID NO: 1393967 - RNA, 19 nt, Artificial Sequence
  Description of Artificial Sequence: Synthetic oligonucleotide
  Antisense strand to SEQ ID NO: 1393966
aagucacugagaagucugu

SEQ ID NO: 1393968 - RNA, 19 nt, Artificial Sequence
  Description of Artificial Sequence: Synthetic oligonucleotide
  Sense strand starting at position 841 of SEQ ID NO: 1243086
ugauguaaauacucugagu

SEQ ID NO: 1393969 - RNA, 19 nt, Artificial Sequence
  Description of Artificial Sequence: Synthetic oligonucleotide
  Antisense strand to SEQ ID NO: 1393968
acucagaguauuuacauca

SEQ ID NO: 1393970 - RNA, 19 nt, Artificial Sequence
  Description of Artificial Sequence: Synthetic oligonucleotide
  Sense strand starting at position 980 of SEQ ID NO: 1243086
cgcauucuuugaucuaaac

SEQ ID NO: 1393971 - RNA, 19 nt, Artificial Sequence
  Description of Artificial Sequence: Synthetic oligonucleotide
  Antisense strand to SEQ ID NO: 1393970
guuuagaucaaagaaugcg

SEQ ID NO: 1393972 - RNA, 19 nt, Artificial Sequence
  Description of Artificial Sequence: Synthetic oligonucleotide
  Sense strand starting at position 1080 of SEQ ID NO: 1243086
cagugaacauccguugaca

SEQ ID NO: 1393973 - RNA, 19 nt, Artificial Sequence
  Description of Artificial Sequence: Synthetic oligonucleotide
  Antisense strand to SEQ ID NO: 1393972
ugucaacggauguucacug

SEQ ID NO: 1393974 - RNA, 19 nt, Artificial Sequence
  Description of Artificial Sequence: Synthetic oligonucleotide
  Sense strand starting at position 1099 of SEQ ID NO: 1243086
gccaaugacuuccucaaug

SEQ ID NO: 1393975 - RNA, 19 nt, Artificial Sequence
  Description of Artificial Sequence: Synthetic oligonucleotide
  Antisense strand to SEQ ID NO: 1393974
cauugaggaagucauuggc

SEQ ID NO: 1393976 - RNA, 19 nt, Artificial Sequence
  Description of Artificial Sequence: Synthetic oligonucleotide
  Sense strand starting at position 1104 of SEQ ID NO: 1243086
ugacuuccucaaugaugua

SEQ ID NO: 1393977 - RNA, 19 nt, Artificial Sequence
  Description of Artificial Sequence: Synthetic oligonucleotide
  Antisense strand to SEQ ID NO: 1393976
uacaucauugaggaaguca

SEQ ID NO: 1393978 - RNA, 19 nt, Artificial Sequence
  Description of Artificial Sequence: Synthetic oligonucleotide
  Sense strand starting at position 1550 of SEQ ID NO: 1243086
ggauuucaauaggacgaga

SEQ ID NO: 1393979 - RNA, 19 nt, Artificial Sequence
  Description of Artificial Sequence: Synthetic oligonucleotide
  Antisense strand to SEQ ID NO: 1393978
ucucguccuauugaaaucc

SEQ ID NO: 1393980 - RNA, 19 nt, Artificial Sequence
  Description of Artificial Sequence: Synthetic oligonucleotide
  Sense strand starting at position 2051 of SEQ ID NO: 1243086
gucuucuuucugggccaau

SEQ ID NO: 1393981 - RNA, 19 nt, Artificial Sequence
  Description of Artificial Sequence: Synthetic oligonucleotide
  Antisense strand to SEQ ID NO: 1393980
auuggcccagaaagaagac

SEQ ID NO: 1393982 - RNA, 19 nt, Artificial Sequence
  Description of Artificial Sequence: Synthetic oligonucleotide
  Sense strand starting at position 2152 of SEQ ID NO: 1243086
acgcccauccauugauuga

SEQ ID NO: 1393983 - RNA, 19 nt, Artificial Sequence
  Description of Artificial Sequence: Synthetic oligonucleotide
  Antisense strand to SEQ ID NO: 1393982
ucaaucaauggaugggcgu

SEQ ID NO: 1393984 - RNA, 19 nt, Artificial Sequence
  Description of Artificial Sequence: Synthetic oligonucleotide
  Sense strand starting at position 2232 of SEQ ID NO: 1243086
agcgucagucccgauggau

SEQ ID NO: 1393985 - RNA, 19 nt, Artificial Sequence
  Description of Artificial Sequence: Synthetic oligonucleotide
  Antisense strand to SEQ ID NO: 1393984
auccaucgggacugacgcu

SEQ ID NO: 1393986 - RNA, 19 nt, Artificial Sequence
  Description of Artificial Sequence: Synthetic oligonucleotide
  Sense strand starting at position 2244 of SEQ ID NO: 1243086
gauggauaccugugccgga

SEQ ID NO: 1393987 - RNA, 19 nt, Artificial Sequence
  Description of Artificial Sequence: Synthetic oligonucleotide
  Antisense strand to SEQ ID NO: 1393986
uccggcacagguauccauc

SEQ ID NO: 1393988 - RNA, 19 nt, Artificial Sequence
  Description of Artificial Sequence: Synthetic oligonucleotide
  Sense strand starting at position 2364 of SEQ ID NO: 1243086
ggcagucgccgcuucuaau

SEQ ID NO: 1393989 - RNA, 19 nt, Artificial Sequence
  Description of Artificial Sequence: Synthetic oligonucleotide
  Antisense strand to SEQ ID NO: 1393988
auuagaagcggcgacugcc

SEQ ID NO: 1393990 - RNA, 19 nt, Artificial Sequence
  Description of Artificial Sequence: Synthetic oligonucleotide
  Sense strand starting at position 2530 of SEQ ID NO: 1243086
cgucacuuucugugaucag

SEQ ID NO: 1393991 - RNA, 19 nt, Artificial Sequence
  Description of Artificial Sequence: Synthetic oligonucleotide
  Antisense strand to SEQ ID NO: 1393990
cugaucacagaaagugacg

SEQ ID NO: 1393992 - RNA, 19 nt, Artificial Sequence
  Description of Artificial Sequence: Synthetic oligonucleotide
  Sense strand starting at position 2539 of SEQ ID NO: 1243086
cugugaucaguuugggaaa

SEQ ID NO: 1393993 - RNA, 19 nt, Artificial Sequence
  Description of Artificial Sequence: Synthetic oligonucleotide
  Antisense strand to SEQ ID NO: 1393992
uuucccaaacugaucacag

SEQ ID NO: 1393994 - RNA, 19 nt, Artificial Sequence
  Description of Artificial Sequence: Synthetic oligonucleotide
  Sense strand starting at position 2675 of SEQ ID NO: 1243086
guuucuccaucagugaaac

SEQ ID NO: 1393995 - RNA, 19 nt, Artificial Sequence
  Description of Artificial Sequence: Synthetic oligonucleotide
  Antisense strand to SEQ ID NO: 1393994
guuucacugauggagaaac

SEQ ID NO: 1393996 - RNA, 19 nt, Artificial Sequence
  Description of Artificial Sequence: Synthetic oligonucleotide
  Sense strand starting at position 2699 of SEQ ID NO: 1243086
ugggaaucgcuugacguga

SEQ ID NO: 1393997 - RNA, 19 nt, Artificial Sequence
  Description of Artificial Sequence: Synthetic oligonucleotide
  Antisense strand to SEQ ID NO: 1393996
ucacgucaagcgauuccca

SEQ ID NO: 1393998 - RNA, 19 nt, Artificial Sequence
  Description of Artificial Sequence: Synthetic oligonucleotide
  Sense strand starting at position 2738 of SEQ ID NO: 1243086
cacuucgagugauugcuaa

SEQ ID NO: 1393999 - RNA, 19 nt, Artificial Sequence
  Description of Artificial Sequence: Synthetic oligonucleotide
  Antisense strand to SEQ ID NO: 1393998
uuagcaaucacucgaagug

SEQ ID NO: 1394000 - RNA, 19 nt, Artificial Sequence
  Description of Artificial Sequence: Synthetic oligonucleotide
  Sense strand starting at position 2766 of SEQ ID NO: 1243086
uuugguacuaguuaggaua

SEQ ID NO: 1394001 - RNA, 19 nt, Artificial Sequence
  Description of Artificial Sequence: Synthetic oligonucleotide
  Antisense strand to SEQ ID NO: 1394000
uauccuaacuaguaccaaa

SEQ ID NO: 1394002 - RNA, 19 nt, Artificial Sequence
  Description of Artificial Sequence: Synthetic oligonucleotide
  Sense strand starting at position 2835 of SEQ ID NO: 1243086
agcaucaugugcuuuauau

SEQ ID NO: 1394003 - RNA, 19 nt, Artificial Sequence
  Description of Artificial Sequence: Synthetic oligonucleotide
  Antisense strand to SEQ ID NO: 1394002
auauaaagcacaugaugcu

SEQ ID NO: 1394004 - RNA, 19 nt, Artificial Sequence
  Description of Artificial Sequence: Synthetic oligonucleotide
  Sense strand starting at position 2854 of SEQ ID NO: 1243086
acaauagguaaucgauaag

SEQ ID NO: 1394005 - RNA, 19 nt, Artificial Sequence
  Description of Artificial Sequence: Synthetic oligonucleotide
  Antisense strand to SEQ ID NO: 1394004
cuuaucgauuaccuauugu

SEQ ID NO: 1394006 - RNA, 19 nt, Artificial Sequence
  Description of Artificial Sequence: Synthetic oligonucleotide
  Sense strand starting at position 2860 of SEQ ID NO: 1243086
gguaaucgauaaguaauaa

SEQ ID NO: 1394007 - RNA, 19 nt, Artificial Sequence
  Description of Artificial Sequence: Synthetic oligonucleotide
  Antisense strand to SEQ ID NO: 1394006
uuauuacuuaucgauuacc

SEQ ID NO: 1394008 - RNA, 19 nt, Artificial Sequence
  Description of Artificial Sequence: Synthetic oligonucleotide
  Sense strand starting at position 3440 of SEQ ID NO: 1243086
gggauuaccauucgacauc

SEQ ID NO: 1394009 - RNA, 19 nt, Artificial Sequence
  Description of Artificial Sequence: Synthetic oligonucleotide
  Antisense strand to SEQ ID NO: 1394008
gaugucgaaugguaauccc

SEQ ID NO: 1394010 - RNA, 19 nt, Artificial Sequence
  Description of Artificial Sequence: Synthetic oligonucleotide
  Sense strand starting at position 3454 of SEQ ID NO: 1243086
acaucagauuucgguggga

SEQ ID NO: 1394011 - RNA, 19 nt, Artificial Sequence
  Description of Artificial Sequence: Synthetic oligonucleotide
  Antisense strand to SEQ ID NO: 1394010
ucccaccgaaaucugaugu

SEQ ID NO: 1394012 - RNA, 19 nt, Artificial Sequence
  Description of Artificial Sequence: Synthetic oligonucleotide
  Sense strand starting at position 3574 of SEQ ID NO: 1243086
uuuguuucaggugagcaga

SEQ ID NO: 1394013 - RNA, 19 nt, Artificial Sequence
  Description of Artificial Sequence: Synthetic oligonucleotide
  Antisense strand to SEQ ID NO: 1394012
ucugcucaccugaaacaaa

SEQ ID NO: 1394014 - RNA, 19 nt, Artificial Sequence
  Description of Artificial Sequence: Synthetic oligonucleotide
  Sense strand starting at position 3640 of SEQ ID NO: 1243086
cuaucaauuuacguuguca

SEQ ID NO: 1394015 - RNA, 19 nt, Artificial Sequence
  Description of Artificial Sequence: Synthetic oligonucleotide
  Antisense strand to SEQ ID NO: 1394014
ugacaacguaaauugauag

SEQ ID NO: 1394016 - RNA, 19 nt, Artificial Sequence
  Description of Artificial Sequence: Synthetic oligonucleotide
  Sense strand starting at position 3735 of SEQ ID NO: 1243086
ggaaguauguagcuuuauc

SEQ ID NO: 1394017 - RNA, 19 nt, Artificial Sequence
  Description of Artificial Sequence: Synthetic oligonucleotide
  Antisense strand to SEQ ID NO: 1394016
gauaaagcuacauacuucc

SEQ ID NO: 1394018 - RNA, 19 nt, Artificial Sequence
  Description of Artificial Sequence: Synthetic oligonucleotide
  Sense strand starting at position 3743 of SEQ ID NO: 1243086
guagcuuuaucuuuguaaa

SEQ ID NO: 1394019 - RNA, 19 nt, Artificial Sequence
  Description of Artificial Sequence: Synthetic oligonucleotide
  Antisense strand to SEQ ID NO: 1394018
uuuacaaagauaaagcuac

SEQ ID NO: 1394020 - RNA, 19 nt, Artificial Sequence
  Description of Artificial Sequence: Synthetic oligonucleotide
  Sense strand starting at position 3822 of SEQ ID NO: 1243086
uuaccuuuggcuuaguaau

SEQ ID NO: 1394021 - RNA, 19 nt, Artificial Sequence
  Description of Artificial Sequence: Synthetic oligonucleotide
  Antisense strand to SEQ ID NO: 1394020
auuacuaagccaaagguaa

SEQ ID NO: 1394022 - RNA, 19 nt, Artificial Sequence
  Description of Artificial Sequence: Synthetic oligonucleotide
  Sense strand starting at position 3824 of SEQ ID NO: 1243086
accuuuggcuuaguaauuu

SEQ ID NO: 1394023 - RNA, 19 nt, Artificial Sequence
  Description of Artificial Sequence: Synthetic oligonucleotide
  Antisense strand to SEQ ID NO: 1394022
aaauuacuaagccaaaggu

SEQ ID NO: 1394024 - RNA, 19 nt, Artificial Sequence
  Description of Artificial Sequence: Synthetic oligonucleotide
  Sense strand starting at position 35 of SEQ ID NO: 1243087
agcccagauccuugaccua

SEQ ID NO: 1394025 - RNA, 19 nt, Artificial Sequence
  Description of Artificial Sequence: Synthetic oligonucleotide
  Antisense strand to SEQ ID NO: 1394024
uaggucaaggaucugggcu

SEQ ID NO: 1394026 - RNA, 19 nt, Artificial Sequence
  Description of Artificial Sequence: Synthetic oligonucleotide
  Sense strand starting at position 139 of SEQ ID NO: 1243087
acaguucccacguguggaa

SEQ ID NO: 1394027 - RNA, 19 nt, Artificial Sequence
  Description of Artificial Sequence: Synthetic oligonucleotide
  Antisense strand to SEQ ID NO: 1394026
uuccacacgugggaacugu

SEQ ID NO: 1394028 - RNA, 19 nt, Artificial Sequence
  Description of Artificial Sequence: Synthetic oligonucleotide
  Sense strand starting at position 166 of SEQ ID NO: 1243087
guggauugccggugaggaa

SEQ ID NO: 1394029 - RNA, 19 nt, Artificial Sequence
  Description of Artificial Sequence: Synthetic oligonucleotide
  Antisense strand to SEQ ID NO: 1394028
uuccucaccggcaauccac

SEQ ID NO: 1394030 - RNA, 19 nt, Artificial Sequence
  Description of Artificial Sequence: Synthetic oligonucleotide
  Sense strand starting at position 197 of SEQ ID NO: 1243087
aagugcuccugcccuagau

SEQ ID NO: 1394031 - RNA, 19 nt, Artificial Sequence
  Description of Artificial Sequence: Synthetic oligonucleotide
  Antisense strand to SEQ ID NO: 1394030
aucuagggcaggagcacuu

SEQ ID NO: 1394032 - RNA, 19 nt, Artificial Sequence
  Description of Artificial Sequence: Synthetic oligonucleotide
  Sense strand starting at position 782 of SEQ ID NO: 1243087
aggagacagcuguguggua

SEQ ID NO: 1394033 - RNA, 19 nt, Artificial Sequence
  Description of Artificial Sequence: Synthetic oligonucleotide
  Antisense strand to SEQ ID NO: 1394032
uaccacacagcugucuccu

SEQ ID NO: 1394034 - RNA, 19 nt, Artificial Sequence
  Description of Artificial Sequence: Synthetic oligonucleotide
  Sense strand starting at position 783 of SEQ ID NO: 1243087
ggagacagcugugugguaa

SEQ ID NO: 1394035 - RNA, 19 nt, Artificial Sequence
  Description of Artificial Sequence: Synthetic oligonucleotide
  Antisense strand to SEQ ID NO: 1394034
uuaccacacagcugucucc

SEQ ID NO: 1394036 - RNA, 19 nt, Artificial Sequence
  Description of Artificial Sequence: Synthetic oligonucleotide
  Sense strand starting at position 1539 of SEQ ID NO: 1243087
cgggagugcugacguuaau

SEQ ID NO: 1394037 - RNA, 19 nt, Artificial Sequence
  Description of Artificial Sequence: Synthetic oligonucleotide
  Antisense strand to SEQ ID NO: 1394036
auuaacgucagcacucccg

SEQ ID NO: 1394038 - RNA, 19 nt, Artificial Sequence
  Description of Artificial Sequence: Synthetic oligonucleotide
  Sense strand starting at position 1542 of SEQ ID NO: 1243087
gagugcugacguuaaugua

SEQ ID NO: 1394039 - RNA, 19 nt, Artificial Sequence
  Description of Artificial Sequence: Synthetic oligonucleotide
  Antisense strand to SEQ ID NO: 1394038
uacauuaacgucagcacuc

SEQ ID NO: 1394040 - RNA, 19 nt, Artificial Sequence
  Description of Artificial Sequence: Synthetic oligonucleotide
  Sense strand starting at position 1545 of SEQ ID NO: 1243087
ugcugacguuaauguagaa

SEQ ID NO: 1394041 - RNA, 19 nt, Artificial Sequence
  Description of Artificial Sequence: Synthetic oligonucleotide
  Antisense strand to SEQ ID NO: 1394040
uucuacauuaacgucagca

SEQ ID NO: 1394042 - RNA, 19 nt, Artificial Sequence
  Description of Artificial Sequence: Synthetic oligonucleotide
  Sense strand starting at position 2312 of SEQ ID NO: 1243087
ggcggaguggucgugcuuu

SEQ ID NO: 1394043 - RNA, 19 nt, Artificial Sequence
  Description of Artificial Sequence: Synthetic oligonucleotide
  Antisense strand to SEQ ID NO: 1394042
aaagcacgaccacuccgcc

SEQ ID NO: 1394044 - RNA, 19 nt, Artificial Sequence
  Description of Artificial Sequence: Synthetic oligonucleotide
  Sense strand starting at position 2425 of SEQ ID NO: 1243087
gggaguccuuauccaggaa

SEQ ID NO: 1394045 - RNA, 19 nt, Artificial Sequence
  Description of Artificial Sequence: Synthetic oligonucleotide
  Antisense strand to SEQ ID NO: 1394044
uuccuggauaaggacuccc

SEQ ID NO: 1394046 - RNA, 19 nt, Artificial Sequence
  Description of Artificial Sequence: Synthetic oligonucleotide
  Sense strand starting at position 2428 of SEQ ID NO: 1243087
aguccuuauccaggaagug

SEQ ID NO: 1394047 - RNA, 19 nt, Artificial Sequence
  Description of Artificial Sequence: Synthetic oligonucleotide
  Antisense strand to SEQ ID NO: 1394046
cacuuccuggauaaggacu

SEQ ID NO: 1394048 - RNA, 19 nt, Artificial Sequence
  Description of Artificial Sequence: Synthetic oligonucleotide
  Sense strand starting at position 2719 of SEQ ID NO: 1243087
gcgccuguaagcucucaca

SEQ ID NO: 1394049 - RNA, 19 nt, Artificial Sequence
  Description of Artificial Sequence: Synthetic oligonucleotide
  Antisense strand to SEQ ID NO: 1394048
ugugagagcuuacaggcgc

SEQ ID NO: 1394050 - RNA, 19 nt, Artificial Sequence
  Description of Artificial Sequence: Synthetic oligonucleotide
  Sense strand starting at position 2908 of SEQ ID NO: 1243087
agguuuaucugggucugca

SEQ ID NO: 1394051 - RNA, 19 nt, Artificial Sequence
  Description of Artificial Sequence: Synthetic oligonucleotide
  Antisense strand to SEQ ID NO: 1394050
ugcagacccagauaaaccu

SEQ ID NO: 1394052 - RNA, 19 nt, Artificial Sequence
  Description of Artificial Sequence: Synthetic oligonucleotide
  Sense strand starting at position 3009 of SEQ ID NO: 1243087
cuuugacuucugugacccu

SEQ ID NO: 1394053 - RNA, 19 nt, Artificial Sequence
  Description of Artificial Sequence: Synthetic oligonucleotide
  Antisense strand to SEQ ID NO: 1394052
agggucacagaagucaaag

SEQ ID NO: 1394054 - RNA, 19 nt, Artificial Sequence
  Description of Artificial Sequence: Synthetic oligonucleotide
  Sense strand starting at position 3135 of SEQ ID NO: 1243087
cccucagaugagugugaca

SEQ ID NO: 1394055 - RNA, 19 nt, Artificial Sequence
  Description of Artificial Sequence: Synthetic oligonucleotide
  Antisense strand to SEQ ID NO: 1394054
ugucacacucaucugaggg

SEQ ID NO: 1394056 - RNA, 19 nt, Artificial Sequence
  Description of Artificial Sequence: Synthetic oligonucleotide
  Sense strand starting at position 3150 of SEQ ID NO: 1243087
gacaccugguccuacagaa

SEQ ID NO: 1394057 - RNA, 19 nt, Artificial Sequence
  Description of Artificial Sequence: Synthetic oligonucleotide
  Antisense strand to SEQ ID NO: 1394056
uucuguaggaccagguguc

SEQ ID NO: 1394058 - RNA, 19 nt, Artificial Sequence
  Description of Artificial Sequence: Synthetic oligonucleotide
  Sense strand starting at position 3330 of SEQ ID NO: 1243087
ggcauaaugugucaucaau

SEQ ID NO: 1394059 - RNA, 19 nt, Artificial Sequence
  Description of Artificial Sequence: Synthetic oligonucleotide
  Antisense strand to SEQ ID NO: 1394058
auugaugacacauuaugcc

SEQ ID NO: 1394060 - RNA, 19 nt, Artificial Sequence
  Description of Artificial Sequence: Synthetic oligonucleotide
  Sense strand starting at position 3337 of SEQ ID NO: 1243087
ugugucaucaauccguguu

SEQ ID NO: 1394061 - RNA, 19 nt, Artificial Sequence
  Description of Artificial Sequence: Synthetic oligonucleotide
  Antisense strand to SEQ ID NO: 1394060
aacacggauugaugacaca

SEQ ID NO: 1394062 - RNA, 19 nt, Artificial Sequence
  Description of Artificial Sequence: Synthetic oligonucleotide
  Sense strand starting at position 3338 of SEQ ID NO: 1243087
gugucaucaauccguguuu

SEQ ID NO: 1394063 - RNA, 19 nt, Artificial Sequence
  Description of Artificial Sequence: Synthetic oligonucleotide
  Antisense strand to SEQ ID NO: 1394062
aaacacggauugaugacac

SEQ ID NO: 1394064 - RNA, 19 nt, Artificial Sequence
  Description of Artificial Sequence: Synthetic oligonucleotide
  Sense strand starting at position 3339 of SEQ ID NO: 1243087
ugucaucaauccguguuua

SEQ ID NO: 1394065 - RNA, 19 nt, Artificial Sequence
  Description of Artificial Sequence: Synthetic oligonucleotide
  Antisense strand to SEQ ID NO: 1394064
uaaacacggauugaugaca

SEQ ID NO: 1394066 - RNA, 19 nt, Artificial Sequence
  Description of Artificial Sequence: Synthetic oligonucleotide
  Sense strand starting at position 3340 of SEQ ID NO: 1243087
gucaucaauccguguuuau

SEQ ID NO: 1394067 - RNA, 19 nt, Artificial Sequence
  Description of Artificial Sequence: Synthetic oligonucleotide
  Antisense strand to SEQ ID NO: 1394066
auaaacacggauugaugac

SEQ ID NO: 1394068 - RNA, 19 nt, Artificial Sequence
  Description of Artificial Sequence: Synthetic oligonucleotide
  Sense strand starting at position 3343 of SEQ ID NO: 1243087
aucaauccguguuuauaaa

SEQ ID NO: 1394069 - RNA, 19 nt, Artificial Sequence
  Description of Artificial Sequence: Synthetic oligonucleotide
  Antisense strand to SEQ ID NO: 1394068
uuuauaaacacggauugau

SEQ ID NO: 1394070 - RNA, 19 nt, Artificial Sequence
  Description of Artificial Sequence: Synthetic oligonucleotide
  Sense strand starting at position 3428 of SEQ ID NO: 1243087
ucuccuuccugugggaaca

SEQ ID NO: 1394071 - RNA, 19 nt, Artificial Sequence
  Description of Artificial Sequence: Synthetic oligonucleotide
  Antisense strand to SEQ ID NO: 1394070
uguucccacaggaaggaga

SEQ ID NO: 1394072 - RNA, 19 nt, Artificial Sequence
  Description of Artificial Sequence: Synthetic oligonucleotide
  Sense strand starting at position 3471 of SEQ ID NO: 1243087
cccucagucuaguagggaa

SEQ ID NO: 1394073 - RNA, 19 nt, Artificial Sequence
  Description of Artificial Sequence: Synthetic oligonucleotide
  Antisense strand to SEQ ID NO: 1394072
uucccuacuagacugaggg

SEQ ID NO: 1394074 - RNA, 19 nt, Artificial Sequence
  Description of Artificial Sequence: Synthetic oligonucleotide
  Sense strand starting at position 3505 of SEQ ID NO: 1243087
gagccuuuguccucuugau

SEQ ID NO: 1394075 - RNA, 19 nt, Artificial Sequence
  Description of Artificial Sequence: Synthetic oligonucleotide
  Antisense strand to SEQ ID NO: 1394074
aucaagaggacaaaggcuc

SEQ ID NO: 1394076 - RNA, 19 nt, Artificial Sequence
  Description of Artificial Sequence: Synthetic oligonucleotide
  Sense strand starting at position 3530 of SEQ ID NO: 1243087
ggagaggauggguguuacu

SEQ ID NO: 1394077 - RNA, 19 nt, Artificial Sequence
  Description of Artificial Sequence: Synthetic oligonucleotide
  Antisense strand to SEQ ID NO: 1394076
aguaacacccauccucucc

SEQ ID NO: 1394078 - RNA, 19 nt, Artificial Sequence
  Description of Artificial Sequence: Synthetic oligonucleotide
  Sense strand starting at position 3539 of SEQ ID NO: 1243087
ggguguuacuuuguacuua

SEQ ID NO: 1394079 - RNA, 19 nt, Artificial Sequence
  Description of Artificial Sequence: Synthetic oligonucleotide
  Antisense strand to SEQ ID NO: 1394078
uaaguacaaaguaacaccc

SEQ ID NO: 1394080 - RNA, 19 nt, Artificial Sequence
  Description of Artificial Sequence: Synthetic oligonucleotide
  Sense strand starting at position 3540 of SEQ ID NO: 1243087
gguguuacuuuguacuuau

SEQ ID NO: 1394081 - RNA, 19 nt, Artificial Sequence
  Description of Artificial Sequence: Synthetic oligonucleotide
  Antisense strand to SEQ ID NO: 1394080
auaaguacaaaguaacacc

SEQ ID NO: 1394082 - RNA, 19 nt, Artificial Sequence
  Description of Artificial Sequence: Synthetic oligonucleotide
  Sense strand starting at position 3561 of SEQ ID NO: 1243087
uuauucugauguuacaagu

SEQ ID NO: 1394083 - RNA, 19 nt, Artificial Sequence
  Description of Artificial Sequence: Synthetic oligonucleotide
  Antisense strand to SEQ ID NO: 1394082
acuuguaacaucagaauaa

SEQ ID NO: 1394084 - RNA, 19 nt, Artificial Sequence
  Description of Artificial Sequence: Synthetic oligonucleotide
  Sense strand starting at position 3580 of SEQ ID NO: 1243087
gauacaugguccuugcaga

SEQ ID NO: 1394085 - RNA, 19 nt, Artificial Sequence
  Description of Artificial Sequence: Synthetic oligonucleotide
  Antisense strand to SEQ ID NO: 1394084
ucugcaaggaccauguauc

SEQ ID NO: 1394086 - RNA, 19 nt, Artificial Sequence
  Description of Artificial Sequence: Synthetic oligonucleotide
  Sense strand starting at position 3581 of SEQ ID NO: 1243087
auacaugguccuugcagaa

SEQ ID NO: 1394087 - RNA, 19 nt, Artificial Sequence
  Description of Artificial Sequence: Synthetic oligonucleotide
  Antisense strand to SEQ ID NO: 1394086
uucugcaaggaccauguau

SEQ ID NO: 1394088 - RNA, 19 nt, Artificial Sequence
  Description of Artificial Sequence: Synthetic oligonucleotide
  Sense strand starting at position 3642 of SEQ ID NO: 1243087
ccaccuuucuuaugaggaa

SEQ ID NO: 1394089 - RNA, 19 nt, Artificial Sequence
  Description of Artificial Sequence: Synthetic oligonucleotide
  Antisense strand to SEQ ID NO: 1394088
uuccucauaagaaaggugg

SEQ ID NO: 1394090 - RNA, 19 nt, Artificial Sequence
  Description of Artificial Sequence: Synthetic oligonucleotide
  Sense strand starting at position 3645 of SEQ ID NO: 1243087
ccuuucuuaugaggaaaga

SEQ ID NO: 1394091 - RNA, 19 nt, Artificial Sequence
  Description of Artificial Sequence: Synthetic oligonucleotide
  Antisense strand to SEQ ID NO: 1394090
ucuuuccucauaagaaagg

SEQ ID NO: 1394092 - RNA, 19 nt, Artificial Sequence
  Description of Artificial Sequence: Synthetic oligonucleotide
  Sense strand starting at position 3662 of SEQ ID NO: 1243087
gagaaucacuuggagagca

SEQ ID NO: 1394093 - RNA, 19 nt, Artificial Sequence
  Description of Artificial Sequence: Synthetic oligonucleotide
  Antisense strand to SEQ ID NO: 1394092
ugcucuccaagugauucuc

SEQ ID NO: 1394094 - RNA, 19 nt, Artificial Sequence
  Description of Artificial Sequence: Synthetic oligonucleotide
  Sense strand starting at position 3740 of SEQ ID NO: 1243087
uccagauguucuggacuga

SEQ ID NO: 1394095 - RNA, 19 nt, Artificial Sequence
  Description of Artificial Sequence: Synthetic oligonucleotide
  Antisense strand to SEQ ID NO: 1394094
ucaguccagaacaucugga

SEQ ID NO: 1394096 - RNA, 19 nt, Artificial Sequence
  Description of Artificial Sequence: Synthetic oligonucleotide
  Sense strand starting at position 3803 of SEQ ID NO: 1243087
ccugguuuguggucucaug

SEQ ID NO: 1394097 - RNA, 19 nt, Artificial Sequence
  Description of Artificial Sequence: Synthetic oligonucleotide
  Antisense strand to SEQ ID NO: 1394096
caugagaccacaaaccagg

SEQ ID NO: 1394098 - RNA, 19 nt, Artificial Sequence
  Description of Artificial Sequence: Synthetic oligonucleotide
  Sense strand starting at position 3847 of SEQ ID NO: 1243087
ggaugagaguuccaacugu

SEQ ID NO: 1394099 - RNA, 19 nt, Artificial Sequence
  Description of Artificial Sequence: Synthetic oligonucleotide
  Antisense strand to SEQ ID NO: 1394098
acaguuggaacucucaucc

SEQ ID NO: 1394100 - RNA, 19 nt, Artificial Sequence
  Description of Artificial Sequence: Synthetic oligonucleotide
  Sense strand starting at position 391 of SEQ ID NO: 1243088
gagugcugacguuaaugua

SEQ ID NO: 1394101 - RNA, 19 nt, Artificial Sequence
  Description of Artificial Sequence: Synthetic oligonucleotide
  Antisense strand to SEQ ID NO: 1394100
uacauuaacgucagcacuc

SEQ ID NO: 1394102 - RNA, 19 nt, Artificial Sequence
  Description of Artificial Sequence: Synthetic oligonucleotide
  Sense strand starting at position 1161 of SEQ ID NO: 1243088
ggcggaguggucgugcuuu

SEQ ID NO: 1394103 - RNA, 19 nt, Artificial Sequence
  Description of Artificial Sequence: Synthetic oligonucleotide
  Antisense strand to SEQ ID NO: 1394102
aaagcacgaccacuccgcc

SEQ ID NO: 1394104 - RNA, 19 nt, Artificial Sequence
  Description of Artificial Sequence: Synthetic oligonucleotide
  Sense strand starting at position 1274 of SEQ ID NO: 1243088
gggaguccuuauccaggaa

SEQ ID NO: 1394105 - RNA, 19 nt, Artificial Sequence
  Description of Artificial Sequence: Synthetic oligonucleotide
  Antisense strand to SEQ ID NO: 1394104
uuccuggauaaggacuccc

SEQ ID NO: 1394106 - RNA, 19 nt, Artificial Sequence
  Description of Artificial Sequence: Synthetic oligonucleotide
  Sense strand starting at position 1277 of SEQ ID NO: 1243088
aguccuuauccaggaagug

SEQ ID NO: 1394107 - RNA, 19 nt, Artificial Sequence
  Description of Artificial Sequence: Synthetic oligonucleotide
  Antisense strand to SEQ ID NO: 1394106
cacuuccuggauaaggacu

SEQ ID NO: 1394108 - RNA, 19 nt, Artificial Sequence
  Description of Artificial Sequence: Synthetic oligonucleotide
  Sense strand starting at position 1568 of SEQ ID NO: 1243088
gcgccuguaagcucucaca

SEQ ID NO: 1394109 - RNA, 19 nt, Artificial Sequence
  Description of Artificial Sequence: Synthetic oligonucleotide
  Antisense strand to SEQ ID NO: 1394108
ugugagagcuuacaggcgc

SEQ ID NO: 1394110 - RNA, 19 nt, Artificial Sequence
  Description of Artificial Sequence: Synthetic oligonucleotide
  Sense strand starting at position 1757 of SEQ ID NO: 1243088
agguuuaucugggucugca

SEQ ID NO: 1394111 - RNA, 19 nt, Artificial Sequence
  Description of Artificial Sequence: Synthetic oligonucleotide
  Antisense strand to SEQ ID NO: 1394110
ugcagacccagauaaaccu

SEQ ID NO: 1394112 - RNA, 19 nt, Artificial Sequence
  Description of Artificial Sequence: Synthetic oligonucleotide
  Sense strand starting at position 1858 of SEQ ID NO: 1243088
cuuugacuucugugacccu

SEQ ID NO: 1394113 - RNA, 19 nt, Artificial Sequence
  Description of Artificial Sequence: Synthetic oligonucleotide
  Antisense strand to SEQ ID NO: 1394112
agggucacagaagucaaag

SEQ ID NO: 1394114 - RNA, 19 nt, Artificial Sequence
  Description of Artificial Sequence: Synthetic oligonucleotide
  Sense strand starting at position 1984 of SEQ ID NO: 1243088
cccucagaugagugugaca

SEQ ID NO: 1394115 - RNA, 19 nt, Artificial Sequence
  Description of Artificial Sequence: Synthetic oligonucleotide
  Antisense strand to SEQ ID NO: 1394114
ugucacacucaucugaggg

SEQ ID NO: 1394116 - RNA, 19 nt, Artificial Sequence
  Description of Artificial Sequence: Synthetic oligonucleotide
  Sense strand starting at position 1999 of SEQ ID NO: 1243088
gacaccugguccuacagaa

SEQ ID NO: 1394117 - RNA, 19 nt, Artificial Sequence
  Description of Artificial Sequence: Synthetic oligonucleotide
  Antisense strand to SEQ ID NO: 1394116
uucuguaggaccagguguc

SEQ ID NO: 1394118 - RNA, 19 nt, Artificial Sequence
  Description of Artificial Sequence: Synthetic oligonucleotide
  Sense strand starting at position 2186 of SEQ ID NO: 1243088
ugugucaucaauccguguu

SEQ ID NO: 1394119 - RNA, 19 nt, Artificial Sequence
  Description of Artificial Sequence: Synthetic oligonucleotide
  Antisense strand to SEQ ID NO: 1394118
aacacggauugaugacaca

SEQ ID NO: 1394120 - RNA, 19 nt, Artificial Sequence
  Description of Artificial Sequence: Synthetic oligonucleotide
  Sense strand starting at position 2188 of SEQ ID NO: 1243088
ugucaucaauccguguuua

SEQ ID NO: 1394121 - RNA, 19 nt, Artificial Sequence
  Description of Artificial Sequence: Synthetic oligonucleotide
  Antisense strand to SEQ ID NO: 1394120
uaaacacggauugaugaca

SEQ ID NO: 1394122 - RNA, 19 nt, Artificial Sequence
  Description of Artificial Sequence: Synthetic oligonucleotide
  Sense strand starting at position 2189 of SEQ ID NO: 1243088
gucaucaauccguguuuau

SEQ ID NO: 1394123 - RNA, 19 nt, Artificial Sequence
  Description of Artificial Sequence: Synthetic oligonucleotide
  Antisense strand to SEQ ID NO: 1394122
auaaacacggauugaugac

SEQ ID NO: 1394124 - RNA, 19 nt, Artificial Sequence
  Description of Artificial Sequence: Synthetic oligonucleotide
  Sense strand starting at position 2192 of SEQ ID NO: 1243088
aucaauccguguuuauaaa

SEQ ID NO: 1394125 - RNA, 19 nt, Artificial Sequence
  Description of Artificial Sequence: Synthetic oligonucleotide
  Antisense strand to SEQ ID NO: 1394124
uuuauaaacacggauugau

SEQ ID NO: 1394126 - RNA, 19 nt, Artificial Sequence
  Description of Artificial Sequence: Synthetic oligonucleotide
  Sense strand starting at position 2354 of SEQ ID NO: 1243088
gagccuuuguccucuugau

SEQ ID NO: 1394127 - RNA, 19 nt, Artificial Sequence
  Description of Artificial Sequence: Synthetic oligonucleotide
  Antisense strand to SEQ ID NO: 1394126
aucaagaggacaaaggcuc

SEQ ID NO: 1394128 - RNA, 19 nt, Artificial Sequence
  Description of Artificial Sequence: Synthetic oligonucleotide
  Sense strand starting at position 2379 of SEQ ID NO: 1243088
ggagaggauggguguuacu

SEQ ID NO: 1394129 - RNA, 19 nt, Artificial Sequence
  Description of Artificial Sequence: Synthetic oligonucleotide
  Antisense strand to SEQ ID NO: 1394128
aguaacacccauccucucc

SEQ ID NO: 1394130 - RNA, 19 nt, Artificial Sequence
  Description of Artificial Sequence: Synthetic oligonucleotide
  Sense strand starting at position 2388 of SEQ ID NO: 1243088
ggguguuacuuuguacuua

SEQ ID NO: 1394131 - RNA, 19 nt, Artificial Sequence
  Description of Artificial Sequence: Synthetic oligonucleotide
  Antisense strand to SEQ ID NO: 1394130
uaaguacaaaguaacaccc

SEQ ID NO: 1394132 - RNA, 19 nt, Artificial Sequence
  Description of Artificial Sequence: Synthetic oligonucleotide
  Sense strand starting at position 2429 of SEQ ID NO: 1243088
gauacaugguccuugcaga

SEQ ID NO: 1394133 - RNA, 19 nt, Artificial Sequence
  Description of Artificial Sequence: Synthetic oligonucleotide
  Antisense strand to SEQ ID NO: 1394132
ucugcaaggaccauguauc

SEQ ID NO: 1394134 - RNA, 19 nt, Artificial Sequence
  Description of Artificial Sequence: Synthetic oligonucleotide
  Sense strand starting at position 2430 of SEQ ID NO: 1243088
auacaugguccuugcagaa

SEQ ID NO: 1394135 - RNA, 19 nt, Artificial Sequence
  Description of Artificial Sequence: Synthetic oligonucleotide
  Antisense strand to SEQ ID NO: 1394134
uucugcaaggaccauguau

SEQ ID NO: 1394136 - RNA, 19 nt, Artificial Sequence
  Description of Artificial Sequence: Synthetic oligonucleotide
  Sense strand starting at position 2511 of SEQ ID NO: 1243088
gagaaucacuuggagagca

SEQ ID NO: 1394137 - RNA, 19 nt, Artificial Sequence
  Description of Artificial Sequence: Synthetic oligonucleotide
  Antisense strand to SEQ ID NO: 1394136
ugcucuccaagugauucuc

SEQ ID NO: 1394138 - RNA, 19 nt, Artificial Sequence
  Description of Artificial Sequence: Synthetic oligonucleotide
  Sense strand starting at position 2652 of SEQ ID NO: 1243088
ccugguuuguggucucaug

SEQ ID NO: 1394139 - RNA, 19 nt, Artificial Sequence
  Description of Artificial Sequence: Synthetic oligonucleotide
  Antisense strand to SEQ ID NO: 1394138
caugagaccacaaaccagg

SEQ ID NO: 1394140 - RNA, 19 nt, Artificial Sequence
  Description of Artificial Sequence: Synthetic oligonucleotide
  Sense strand starting at position 2880 of SEQ ID NO: 1243088
ccuugaggcuuugaaagga

SEQ ID NO: 1394141 - RNA, 19 nt, Artificial Sequence
  Description of Artificial Sequence: Synthetic oligonucleotide
  Antisense strand to SEQ ID NO: 1394140
uccuuucaaagccucaagg

SEQ ID NO: 1394142 - RNA, 19 nt, Artificial Sequence
  Description of Artificial Sequence: Synthetic oligonucleotide
  Sense strand starting at position 2884 of SEQ ID NO: 1243088
gaggcuuugaaaggaguga

SEQ ID NO: 1394143 - RNA, 19 nt, Artificial Sequence
  Description of Artificial Sequence: Synthetic oligonucleotide
  Antisense strand to SEQ ID NO: 1394142
ucacuccuuucaaagccuc

SEQ ID NO: 1394144 - RNA, 19 nt, Artificial Sequence
  Description of Artificial Sequence: Synthetic oligonucleotide
  Sense strand starting at position 2895 of SEQ ID NO: 1243088
aggagugaaggcuaguauu

SEQ ID NO: 1394145 - RNA, 19 nt, Artificial Sequence
  Description of Artificial Sequence: Synthetic oligonucleotide
  Antisense strand to SEQ ID NO: 1394144
aauacuagccuucacuccu

SEQ ID NO: 1394146 - RNA, 19 nt, Artificial Sequence
  Description of Artificial Sequence: Synthetic oligonucleotide
  Sense strand starting at position 3035 of SEQ ID NO: 1243088
gucuuugagagauguggcu

SEQ ID NO: 1394147 - RNA, 19 nt, Artificial Sequence
  Description of Artificial Sequence: Synthetic oligonucleotide
  Antisense strand to SEQ ID NO: 1394146
agccacaucucucaaagac

SEQ ID NO: 1394148 - RNA, 19 nt, Artificial Sequence
  Description of Artificial Sequence: Synthetic oligonucleotide
  Sense strand starting at position 3041 of SEQ ID NO: 1243088
gagagauguggcuguauug

SEQ ID NO: 1394149 - RNA, 19 nt, Artificial Sequence
  Description of Artificial Sequence: Synthetic oligonucleotide
  Antisense strand to SEQ ID NO: 1394148
caauacagccacaucucuc

SEQ ID NO: 1394150 - RNA, 19 nt, Artificial Sequence
  Description of Artificial Sequence: Synthetic oligonucleotide
  Sense strand starting at position 3075 of SEQ ID NO: 1243088
guucuaguaucagccuuau

SEQ ID NO: 1394151 - RNA, 19 nt, Artificial Sequence
  Description of Artificial Sequence: Synthetic oligonucleotide
  Antisense strand to SEQ ID NO: 1394150
auaaggcugauacuagaac

SEQ ID NO: 1394152 - RNA, 19 nt, Artificial Sequence
  Description of Artificial Sequence: Synthetic oligonucleotide
  Sense strand starting at position 3121 of SEQ ID NO: 1243088
ccgucuucucucugaugga

SEQ ID NO: 1394153 - RNA, 19 nt, Artificial Sequence
  Description of Artificial Sequence: Synthetic oligonucleotide
  Antisense strand to SEQ ID NO: 1394152
uccaucagagagaagacgg

SEQ ID NO: 1394154 - RNA, 19 nt, Artificial Sequence
  Description of Artificial Sequence: Synthetic oligonucleotide
  Sense strand starting at position 3258 of SEQ ID NO: 1243088
ggccaucugugucugauga

SEQ ID NO: 1394155 - RNA, 19 nt, Artificial Sequence
  Description of Artificial Sequence: Synthetic oligonucleotide
  Antisense strand to SEQ ID NO: 1394154
ucaucagacacagauggcc

SEQ ID NO: 1394156 - RNA, 19 nt, Artificial Sequence
  Description of Artificial Sequence: Synthetic oligonucleotide
  Sense strand starting at position 3289 of SEQ ID NO: 1243088
caaagcuuccuugggcaga

SEQ ID NO: 1394157 - RNA, 19 nt, Artificial Sequence
  Description of Artificial Sequence: Synthetic oligonucleotide
  Antisense strand to SEQ ID NO: 1394156
ucugcccaaggaagcuuug

SEQ ID NO: 1394158 - RNA, 19 nt, Artificial Sequence
  Description of Artificial Sequence: Synthetic oligonucleotide
  Sense strand starting at position 3291 of SEQ ID NO: 1243088
aagcuuccuugggcagaga

SEQ ID NO: 1394159 - RNA, 19 nt, Artificial Sequence
  Description of Artificial Sequence: Synthetic oligonucleotide
  Antisense strand to SEQ ID NO: 1394158
ucucugcccaaggaagcuu

SEQ ID NO: 1394160 - RNA, 19 nt, Artificial Sequence
  Description of Artificial Sequence: Synthetic oligonucleotide
  Sense strand starting at position 3411 of SEQ ID NO: 1243088
cuugccaaacccugggaua

SEQ ID NO: 1394161 - RNA, 19 nt, Artificial Sequence
  Description of Artificial Sequence: Synthetic oligonucleotide
  Antisense strand to SEQ ID NO: 1394160
uaucccaggguuuggcaag

SEQ ID NO: 1394162 - RNA, 19 nt, Artificial Sequence
  Description of Artificial Sequence: Synthetic oligonucleotide
  Sense strand starting at position 3412 of SEQ ID NO: 1243088
uugccaaacccugggauau

SEQ ID NO: 1394163 - RNA, 19 nt, Artificial Sequence
  Description of Artificial Sequence: Synthetic oligonucleotide
  Antisense strand to SEQ ID NO: 1394162
auaucccaggguuuggcaa

SEQ ID NO: 1394164 - RNA, 19 nt, Artificial Sequence
  Description of Artificial Sequence: Synthetic oligonucleotide
  Sense strand starting at position 3451 of SEQ ID NO: 1243088
agaaauagccuaugacuuc

SEQ ID NO: 1394165 - RNA, 19 nt, Artificial Sequence
  Description of Artificial Sequence: Synthetic oligonucleotide
  Antisense strand to SEQ ID NO: 1394164
gaagucauaggcuauuucu

SEQ ID NO: 1394166 - RNA, 19 nt, Artificial Sequence
  Description of Artificial Sequence: Synthetic oligonucleotide
  Sense strand starting at position 3617 of SEQ ID NO: 1243088
gauuacuuguggccuagaa

SEQ ID NO: 1394167 - RNA, 19 nt, Artificial Sequence
  Description of Artificial Sequence: Synthetic oligonucleotide
  Antisense strand to SEQ ID NO: 1394166
uucuaggccacaaguaauc

SEQ ID NO: 1394168 - RNA, 19 nt, Artificial Sequence
  Description of Artificial Sequence: Synthetic oligonucleotide
  Sense strand starting at position 3682 of SEQ ID NO: 1243088
ugggaacacuccucuuacu

SEQ ID NO: 1394169 - RNA, 19 nt, Artificial Sequence
  Description of Artificial Sequence: Synthetic oligonucleotide
  Antisense strand to SEQ ID NO: 1394168
aguaagaggaguguuccca

SEQ ID NO: 1394170 - RNA, 19 nt, Artificial Sequence
  Description of Artificial Sequence: Synthetic oligonucleotide
  Sense strand starting at position 3750 of SEQ ID NO: 1243088
ggguuuggucuagacccua

SEQ ID NO: 1394171 - RNA, 19 nt, Artificial Sequence
  Description of Artificial Sequence: Synthetic oligonucleotide
  Antisense strand to SEQ ID NO: 1394170
uagggucuagaccaaaccc

SEQ ID NO: 1394172 - RNA, 19 nt, Artificial Sequence
  Description of Artificial Sequence: Synthetic oligonucleotide
  Sense strand starting at position 3834 of SEQ ID NO: 1243088
ccauuucuccagggugcau

SEQ ID NO: 1394173 - RNA, 19 nt, Artificial Sequence
  Description of Artificial Sequence: Synthetic oligonucleotide
  Antisense strand to SEQ ID NO: 1394172
augcacccuggagaaaugg

SEQ ID NO: 1394174 - RNA, 19 nt, Artificial Sequence
  Description of Artificial Sequence: Synthetic oligonucleotide
  Sense strand starting at position 3874 of SEQ ID NO: 1243088
ggagcuggguuuccguaua

SEQ ID NO: 1394175 - RNA, 19 nt, Artificial Sequence
  Description of Artificial Sequence: Synthetic oligonucleotide
  Antisense strand to SEQ ID NO: 1394174
uauacggaaacccagcucc

SEQ ID NO: 1394176 - RNA, 19 nt, Artificial Sequence
  Description of Artificial Sequence: Synthetic oligonucleotide
  Sense strand starting at position 3977 of SEQ ID NO: 1243088
ggguacaauccugaguuuc

SEQ ID NO: 1394177 - RNA, 19 nt, Artificial Sequence
  Description of Artificial Sequence: Synthetic oligonucleotide
  Antisense strand to SEQ ID NO: 1394176
gaaacucaggauuguaccc

SEQ ID NO: 1394178 - RNA, 19 nt, Artificial Sequence
  Description of Artificial Sequence: Synthetic oligonucleotide
  Sense strand starting at position 3979 of SEQ ID NO: 1243088
guacaauccugaguuucgu

SEQ ID NO: 1394179 - RNA, 19 nt, Artificial Sequence
  Description of Artificial Sequence: Synthetic oligonucleotide
  Antisense strand to SEQ ID NO: 1394178
acgaaacucaggauuguac

SEQ ID NO: 1394180 - RNA, 19 nt, Artificial Sequence
  Description of Artificial Sequence: Synthetic oligonucleotide
  Sense strand starting at position 111 of SEQ ID NO: 1243089
gcuaauaugcaugaaagug

SEQ ID NO: 1394181 - RNA, 19 nt, Artificial Sequence
  Description of Artificial Sequence: Synthetic oligonucleotide
  Antisense strand to SEQ ID NO: 1394180
cacuuucaugcauauuagc

SEQ ID NO: 1394182 - RNA, 19 nt, Artificial Sequence
  Description of Artificial Sequence: Synthetic oligonucleotide
  Sense strand starting at position 119 of SEQ ID NO: 1243089
gcaugaaagugcuugacaa

SEQ ID NO: 1394183 - RNA, 19 nt, Artificial Sequence
  Description of Artificial Sequence: Synthetic oligonucleotide
  Antisense strand to SEQ ID NO: 1394182
uugucaagcacuuucaugc

SEQ ID NO: 1394184 - RNA, 19 nt, Artificial Sequence
  Description of Artificial Sequence: Synthetic oligonucleotide
  Sense strand starting at position 120 of SEQ ID NO: 1243089
caugaaagugcuugacaaa

SEQ ID NO: 1394185 - RNA, 19 nt, Artificial Sequence
  Description of Artificial Sequence: Synthetic oligonucleotide
  Antisense strand to SEQ ID NO: 1394184
uuugucaagcacuuucaug

SEQ ID NO: 1394186 - RNA, 19 nt, Artificial Sequence
  Description of Artificial Sequence: Synthetic oligonucleotide
  Sense strand starting at position 478 of SEQ ID NO: 1243089
gcuuaagcgauuugucuac

SEQ ID NO: 1394187 - RNA, 19 nt, Artificial Sequence
  Description of Artificial Sequence: Synthetic oligonucleotide
  Antisense strand to SEQ ID NO: 1394186
guagacaaaucgcuuaagc

SEQ ID NO: 1394188 - RNA, 19 nt, Artificial Sequence
  Description of Artificial Sequence: Synthetic oligonucleotide
  Sense strand starting at position 622 of SEQ ID NO: 1243089
uuugcuacucucuagaagu

SEQ ID NO: 1394189 - RNA, 19 nt, Artificial Sequence
  Description of Artificial Sequence: Synthetic oligonucleotide
  Antisense strand to SEQ ID NO: 1394188
acuucuagagaguagcaaa

SEQ ID NO: 1394190 - RNA, 19 nt, Artificial Sequence
  Description of Artificial Sequence: Synthetic oligonucleotide
  Sense strand starting at position 676 of SEQ ID NO: 1243089
guaauaaagagccaggguu

SEQ ID NO: 1394191 - RNA, 19 nt, Artificial Sequence
  Description of Artificial Sequence: Synthetic oligonucleotide
  Antisense strand to SEQ ID NO: 1394190
aacccuggcucuuuauuac

SEQ ID NO: 1394192 - RNA, 19 nt, Artificial Sequence
  Description of Artificial Sequence: Synthetic oligonucleotide
  Sense strand starting at position 708 of SEQ ID NO: 1243089
gccugaauucccguccugu

SEQ ID NO: 1394193 - RNA, 19 nt, Artificial Sequence
  Description of Artificial Sequence: Synthetic oligonucleotide
  Antisense strand to SEQ ID NO: 1394192
acaggacgggaauucaggc

SEQ ID NO: 1394194 - RNA, 19 nt, Artificial Sequence
  Description of Artificial Sequence: Synthetic oligonucleotide
  Sense strand starting at position 781 of SEQ ID NO: 1243089
uugccuuagcuguaagaag

SEQ ID NO: 1394195 - RNA, 19 nt, Artificial Sequence
  Description of Artificial Sequence: Synthetic oligonucleotide
  Antisense strand to SEQ ID NO: 1394194
cuucuuacagcuaaggcaa

SEQ ID NO: 1394196 - RNA, 19 nt, Artificial Sequence
  Description of Artificial Sequence: Synthetic oligonucleotide
  Sense strand starting at position 825 of SEQ ID NO: 1243089
aagugucauuaugugaauu

SEQ ID NO: 1394197 - RNA, 19 nt, Artificial Sequence
  Description of Artificial Sequence: Synthetic oligonucleotide
  Antisense strand to SEQ ID NO: 1394196
aauucacauaaugacacuu

SEQ ID NO: 1394198 - RNA, 19 nt, Artificial Sequence
  Description of Artificial Sequence: Synthetic oligonucleotide
  Sense strand starting at position 835 of SEQ ID NO: 1243089
augugaauugcauagguua

SEQ ID NO: 1394199 - RNA, 19 nt, Artificial Sequence
  Description of Artificial Sequence: Synthetic oligonucleotide
  Antisense strand to SEQ ID NO: 1394198
uaaccuaugcaauucacau

SEQ ID NO: 1394200 - RNA, 19 nt, Artificial Sequence
  Description of Artificial Sequence: Synthetic oligonucleotide
  Sense strand starting at position 838 of SEQ ID NO: 1243089
ugaauugcauagguuaaua

SEQ ID NO: 1394201 - RNA, 19 nt, Artificial Sequence
  Description of Artificial Sequence: Synthetic oligonucleotide
  Antisense strand to SEQ ID NO: 1394200
uauuaaccuaugcaauuca

SEQ ID NO: 1394202 - RNA, 19 nt, Artificial Sequence
  Description of Artificial Sequence: Synthetic oligonucleotide
  Sense strand starting at position 870 of SEQ ID NO: 1243089
ucaaucauugucuaguacu

SEQ ID NO: 1394203 - RNA, 19 nt, Artificial Sequence
  Description of Artificial Sequence: Synthetic oligonucleotide
  Antisense strand to SEQ ID NO: 1394202
aguacuagacaaugauuga

SEQ ID NO: 1394204 - RNA, 19 nt, Artificial Sequence
  Description of Artificial Sequence: Synthetic oligonucleotide
  Sense strand starting at position 1056 of SEQ ID NO: 1243089
ugucucuaauucuuggaaa

SEQ ID NO: 1394205 - RNA, 19 nt, Artificial Sequence
  Description of Artificial Sequence: Synthetic oligonucleotide
  Antisense strand to SEQ ID NO: 1394204
uuuccaagaauuagagaca

SEQ ID NO: 1394206 - RNA, 19 nt, Artificial Sequence
  Description of Artificial Sequence: Synthetic oligonucleotide
  Sense strand starting at position 1122 of SEQ ID NO: 1243089
aguuucuccuaguuuagga

SEQ ID NO: 1394207 - RNA, 19 nt, Artificial Sequence
  Description of Artificial Sequence: Synthetic oligonucleotide
  Antisense strand to SEQ ID NO: 1394206
uccuaaacuaggagaaacu

SEQ ID NO: 1394208 - RNA, 19 nt, Artificial Sequence
  Description of Artificial Sequence: Synthetic oligonucleotide
  Sense strand starting at position 1171 of SEQ ID NO: 1243089
gagacuacccugcgagacu

SEQ ID NO: 1394209 - RNA, 19 nt, Artificial Sequence
  Description of Artificial Sequence: Synthetic oligonucleotide
  Antisense strand to SEQ ID NO: 1394208
agucucgcaggguagucuc

SEQ ID NO: 1394210 - RNA, 19 nt, Artificial Sequence
  Description of Artificial Sequence: Synthetic oligonucleotide
  Sense strand starting at position 1192 of SEQ ID NO: 1243089
cccucuucucccuggaaga

SEQ ID NO: 1394211 - RNA, 19 nt, Artificial Sequence
  Description of Artificial Sequence: Synthetic oligonucleotide
  Antisense strand to SEQ ID NO: 1394210
ucuuccagggagaagaggg

SEQ ID NO: 1394212 - RNA, 19 nt, Artificial Sequence
  Description of Artificial Sequence: Synthetic oligonucleotide
  Sense strand starting at position 1193 of SEQ ID NO: 1243089
ccucuucucccuggaagaa

SEQ ID NO: 1394213 - RNA, 19 nt, Artificial Sequence
  Description of Artificial Sequence: Synthetic oligonucleotide
  Antisense strand to SEQ ID NO: 1394212
uucuuccagggagaagagg

SEQ ID NO: 1394214 - RNA, 19 nt, Artificial Sequence
  Description of Artificial Sequence: Synthetic oligonucleotide
  Sense strand starting at position 1576 of SEQ ID NO: 1243089
agcaacaacuucucgagaa

SEQ ID NO: 1394215 - RNA, 19 nt, Artificial Sequence
  Description of Artificial Sequence: Synthetic oligonucleotide
  Antisense strand to SEQ ID NO: 1394214
uucucgagaaguuguugcu

SEQ ID NO: 1394216 - RNA, 19 nt, Artificial Sequence
  Description of Artificial Sequence: Synthetic oligonucleotide
  Sense strand starting at position 1726 of SEQ ID NO: 1243089
gcugguucccaguaaacag

SEQ ID NO: 1394217 - RNA, 19 nt, Artificial Sequence
  Description of Artificial Sequence: Synthetic oligonucleotide
  Antisense strand to SEQ ID NO: 1394216
cuguuuacugggaaccagc

SEQ ID NO: 1394218 - RNA, 19 nt, Artificial Sequence
  Description of Artificial Sequence: Synthetic oligonucleotide
  Sense strand starting at position 2109 of SEQ ID NO: 1243089
gacugagaggcucggguaa

SEQ ID NO: 1394219 - RNA, 19 nt, Artificial Sequence
  Description of Artificial Sequence: Synthetic oligonucleotide
  Antisense strand to SEQ ID NO: 1394218
uuacccgagccucucaguc

SEQ ID NO: 1394220 - RNA, 19 nt, Artificial Sequence
  Description of Artificial Sequence: Synthetic oligonucleotide
  Sense strand starting at position 2563 of SEQ ID NO: 1243089
gugucuggccgagugaucu

SEQ ID NO: 1394221 - RNA, 19 nt, Artificial Sequence
  Description of Artificial Sequence: Synthetic oligonucleotide
  Antisense strand to SEQ ID NO: 1394220
agaucacucggccagacac

SEQ ID NO: 1394222 - RNA, 19 nt, Artificial Sequence
  Description of Artificial Sequence: Synthetic oligonucleotide
  Sense strand starting at position 3171 of SEQ ID NO: 1243089
ggcugauaccaugaguucu

SEQ ID NO: 1394223 - RNA, 19 nt, Artificial Sequence
  Description of Artificial Sequence: Synthetic oligonucleotide
  Antisense strand to SEQ ID NO: 1394222
agaacucaugguaucagcc

SEQ ID NO: 1394224 - RNA, 19 nt, Artificial Sequence
  Description of Artificial Sequence: Synthetic oligonucleotide
  Sense strand starting at position 3182 of SEQ ID NO: 1243089
ugaguucuacgucagauug

SEQ ID NO: 1394225 - RNA, 19 nt, Artificial Sequence
  Description of Artificial Sequence: Synthetic oligonucleotide
  Antisense strand to SEQ ID NO: 1394224
caaucugacguagaacuca

SEQ ID NO: 1394226 - RNA, 19 nt, Artificial Sequence
  Description of Artificial Sequence: Synthetic oligonucleotide
  Sense strand starting at position 3260 of SEQ ID NO: 1243089
gguauugucaucguguugu

SEQ ID NO: 1394227 - RNA, 19 nt, Artificial Sequence
  Description of Artificial Sequence: Synthetic oligonucleotide
  Antisense strand to SEQ ID NO: 1394226
acaacacgaugacaauacc

SEQ ID NO: 1394228 - RNA, 19 nt, Artificial Sequence
  Description of Artificial Sequence: Synthetic oligonucleotide
  Sense strand starting at position 3262 of SEQ ID NO: 1243089
uauugucaucguguuguua

SEQ ID NO: 1394229 - RNA, 19 nt, Artificial Sequence
  Description of Artificial Sequence: Synthetic oligonucleotide
  Antisense strand to SEQ ID NO: 1394228
uaacaacacgaugacaaua

SEQ ID NO: 1394230 - RNA, 19 nt, Artificial Sequence
  Description of Artificial Sequence: Synthetic oligonucleotide
  Sense strand starting at position 3323 of SEQ ID NO: 1243089
acagcuaauccauguuaga

SEQ ID NO: 1394231 - RNA, 19 nt, Artificial Sequence
  Description of Artificial Sequence: Synthetic oligonucleotide
  Antisense strand to SEQ ID NO: 1394230
ucuaacauggauuagcugu

SEQ ID NO: 1394232 - RNA, 19 nt, Artificial Sequence
  Description of Artificial Sequence: Synthetic oligonucleotide
  Sense strand starting at position 3333 of SEQ ID NO: 1243089
cauguuagagcugaaauuc

SEQ ID NO: 1394233 - RNA, 19 nt, Artificial Sequence
  Description of Artificial Sequence: Synthetic oligonucleotide
  Antisense strand to SEQ ID NO: 1394232
gaauuucagcucuaacaug

SEQ ID NO: 1394234 - RNA, 19 nt, Artificial Sequence
  Description of Artificial Sequence: Synthetic oligonucleotide
  Sense strand starting at position 3513 of SEQ ID NO: 1243089
gcugauauucuggacguaa

SEQ ID NO: 1394235 - RNA, 19 nt, Artificial Sequence
  Description of Artificial Sequence: Synthetic oligonucleotide
  Antisense strand to SEQ ID NO: 1394234
uuacguccagaauaucagc

SEQ ID NO: 1394236 - RNA, 19 nt, Artificial Sequence
  Description of Artificial Sequence: Synthetic oligonucleotide
  Sense strand starting at position 3517 of SEQ ID NO: 1243089
auauucuggacguaaguaa

SEQ ID NO: 1394237 - RNA, 19 nt, Artificial Sequence
  Description of Artificial Sequence: Synthetic oligonucleotide
  Antisense strand to SEQ ID NO: 1394236
uuacuuacguccagaauau

SEQ ID NO: 1394238 - RNA, 19 nt, Artificial Sequence
  Description of Artificial Sequence: Synthetic oligonucleotide
  Sense strand starting at position 3564 of SEQ ID NO: 1243089
agugaugugacagaguaac

SEQ ID NO: 1394239 - RNA, 19 nt, Artificial Sequence
  Description of Artificial Sequence: Synthetic oligonucleotide
  Antisense strand to SEQ ID NO: 1394238
guuacucugucacaucacu

SEQ ID NO: 1394240 - RNA, 19 nt, Artificial Sequence
  Description of Artificial Sequence: Synthetic oligonucleotide
  Sense strand starting at position 3574 of SEQ ID NO: 1243089
cagaguaacgcuuaggguu

SEQ ID NO: 1394241 - RNA, 19 nt, Artificial Sequence
  Description of Artificial Sequence: Synthetic oligonucleotide
  Antisense strand to SEQ ID NO: 1394240
aacccuaagcguuacucug

SEQ ID NO: 1394242 - RNA, 19 nt, Artificial Sequence
  Description of Artificial Sequence: Synthetic oligonucleotide
  Sense strand starting at position 3641 of SEQ ID NO: 1243089
aggcuugaaaguugagaaa

SEQ ID NO: 1394243 - RNA, 19 nt, Artificial Sequence
  Description of Artificial Sequence: Synthetic oligonucleotide
  Antisense strand to SEQ ID NO: 1394242
uuucucaacuuucaagccu

SEQ ID NO: 1394244 - RNA, 19 nt, Artificial Sequence
  Description of Artificial Sequence: Synthetic oligonucleotide
  Sense strand starting at position 3668 of SEQ ID NO: 1243089
uuaugaagaguuggaggua

SEQ ID NO: 1394245 - RNA, 19 nt, Artificial Sequence
  Description of Artificial Sequence: Synthetic oligonucleotide
  Antisense strand to SEQ ID NO: 1394244
uaccuccaacucuucauaa

SEQ ID NO: 1394246 - RNA, 19 nt, Artificial Sequence
  Description of Artificial Sequence: Synthetic oligonucleotide
  Sense strand starting at position 3712 of SEQ ID NO: 1243089
cuguaaagguccucagaua

SEQ ID NO: 1394247 - RNA, 19 nt, Artificial Sequence
  Description of Artificial Sequence: Synthetic oligonucleotide
  Antisense strand to SEQ ID NO: 1394246
uaucugaggaccuuuacag

SEQ ID NO: 1394248 - RNA, 19 nt, Artificial Sequence
  Description of Artificial Sequence: Synthetic oligonucleotide
  Sense strand starting at position 3713 of SEQ ID NO: 1243089
uguaaagguccucagauau

SEQ ID NO: 1394249 - RNA, 19 nt, Artificial Sequence
  Description of Artificial Sequence: Synthetic oligonucleotide
  Antisense strand to SEQ ID NO: 1394248
auaucugaggaccuuuaca

SEQ ID NO: 1394250 - RNA, 19 nt, Artificial Sequence
  Description of Artificial Sequence: Synthetic oligonucleotide
  Sense strand starting at position 3736 of SEQ ID NO: 1243089
aagacaaaguccguguuaa

SEQ ID NO: 1394251 - RNA, 19 nt, Artificial Sequence
  Description of Artificial Sequence: Synthetic oligonucleotide
  Antisense strand to SEQ ID NO: 1394250
uuaacacggacuuugucuu

SEQ ID NO: 1394252 - RNA, 19 nt, Artificial Sequence
  Description of Artificial Sequence: Synthetic oligonucleotide
  Sense strand starting at position 3737 of SEQ ID NO: 1243089
agacaaaguccguguuaaa

SEQ ID NO: 1394253 - RNA, 19 nt, Artificial Sequence
  Description of Artificial Sequence: Synthetic oligonucleotide
  Antisense strand to SEQ ID NO: 1394252
uuuaacacggacuuugucu

SEQ ID NO: 1394254 - RNA, 19 nt, Artificial Sequence
  Description of Artificial Sequence: Synthetic oligonucleotide
  Sense strand starting at position 3774 of SEQ ID NO: 1243089
aguagagguuaaucauaag

SEQ ID NO: 1394255 - RNA, 19 nt, Artificial Sequence
  Description of Artificial Sequence: Synthetic oligonucleotide
  Antisense strand to SEQ ID NO: 1394254
cuuaugauuaaccucuacu

SEQ ID NO: 1394256 - RNA, 19 nt, Artificial Sequence
  Description of Artificial Sequence: Synthetic oligonucleotide
  Sense strand starting at position 3780 of SEQ ID NO: 1243089
gguuaaucauaagccacau

SEQ ID NO: 1394257 - RNA, 19 nt, Artificial Sequence
  Description of Artificial Sequence: Synthetic oligonucleotide
  Antisense strand to SEQ ID NO: 1394256
auguggcuuaugauuaacc

SEQ ID NO: 1394258 - RNA, 19 nt, Artificial Sequence
  Description of Artificial Sequence: Synthetic oligonucleotide
  Sense strand starting at position 3927 of SEQ ID NO: 1243089
gacugaugucgucauaaga

SEQ ID NO: 1394259 - RNA, 19 nt, Artificial Sequence
  Description of Artificial Sequence: Synthetic oligonucleotide
  Antisense strand to SEQ ID NO: 1394258
ucuuaugacgacaucaguc

SEQ ID NO: 1394260 - RNA, 19 nt, Artificial Sequence
  Description of Artificial Sequence: Synthetic oligonucleotide
  Sense strand starting at position 32 of SEQ ID NO: 1243090
aggguagguuucuucaaga

SEQ ID NO: 1394261 - RNA, 19 nt, Artificial Sequence
  Description of Artificial Sequence: Synthetic oligonucleotide
  Antisense strand to SEQ ID NO: 1394260
ucuugaagaaaccuacccu

SEQ ID NO: 1394262 - RNA, 19 nt, Artificial Sequence
  Description of Artificial Sequence: Synthetic oligonucleotide
  Sense strand starting at position 52 of SEQ ID NO: 1243090
gguggcuugucugacuuca

SEQ ID NO: 1394263 - RNA, 19 nt, Artificial Sequence
  Description of Artificial Sequence: Synthetic oligonucleotide
  Antisense strand to SEQ ID NO: 1394262
ugaagucagacaagccacc

SEQ ID NO: 1394264 - RNA, 19 nt, Artificial Sequence
  Description of Artificial Sequence: Synthetic oligonucleotide
  Sense strand starting at position 100 of SEQ ID NO: 1243090
aggagaaguucccucccau

SEQ ID NO: 1394265 - RNA, 19 nt, Artificial Sequence
  Description of Artificial Sequence: Synthetic oligonucleotide
  Antisense strand to SEQ ID NO: 1394264
augggagggaacuucuccu

SEQ ID NO: 1394266 - RNA, 19 nt, Artificial Sequence
  Description of Artificial Sequence: Synthetic oligonucleotide
  Sense strand starting at position 156 of SEQ ID NO: 1243090
gcuugagacccguagagau

SEQ ID NO: 1394267 - RNA, 19 nt, Artificial Sequence
  Description of Artificial Sequence: Synthetic oligonucleotide
  Antisense strand to SEQ ID NO: 1394266
aucucuacgggucucaagc

SEQ ID NO: 1394268 - RNA, 19 nt, Artificial Sequence
  Description of Artificial Sequence: Synthetic oligonucleotide
  Sense strand starting at position 213 of SEQ ID NO: 1243090
uagaaaucgcaaugaugcu

SEQ ID NO: 1394269 - RNA, 19 nt, Artificial Sequence
  Description of Artificial Sequence: Synthetic oligonucleotide
  Antisense strand to SEQ ID NO: 1394268
agcaucauugcgauuucua

SEQ ID NO: 1394270 - RNA, 19 nt, Artificial Sequence
  Description of Artificial Sequence: Synthetic oligonucleotide
  Sense strand starting at position 270 of SEQ ID NO: 1243090
cuccaaagaugacaagaau

SEQ ID NO: 1394271 - RNA, 19 nt, Artificial Sequence
  Description of Artificial Sequence: Synthetic oligonucleotide
  Antisense strand to SEQ ID NO: 1394270
auucuugucaucuuuggag

SEQ ID NO: 1394272 - RNA, 19 nt, Artificial Sequence
  Description of Artificial Sequence: Synthetic oligonucleotide
  Sense strand starting at position 365 of SEQ ID NO: 1243090
aggucacccuguuuguuua

SEQ ID NO: 1394273 - RNA, 19 nt, Artificial Sequence
  Description of Artificial Sequence: Synthetic oligonucleotide
  Antisense strand to SEQ ID NO: 1394272
uaaacaaacagggugaccu

SEQ ID NO: 1394274 - RNA, 19 nt, Artificial Sequence
  Description of Artificial Sequence: Synthetic oligonucleotide
  Sense strand starting at position 366 of SEQ ID NO: 1243090
ggucacccuguuuguuuaa

SEQ ID NO: 1394275 - RNA, 19 nt, Artificial Sequence
  Description of Artificial Sequence: Synthetic oligonucleotide
  Antisense strand to SEQ ID NO: 1394274
uuaaacaaacagggugacc

SEQ ID NO: 1394276 - RNA, 19 nt, Artificial Sequence
  Description of Artificial Sequence: Synthetic oligonucleotide
  Sense strand starting at position 367 of SEQ ID NO: 1243090
gucacccuguuuguuuaaa

SEQ ID NO: 1394277 - RNA, 19 nt, Artificial Sequence
  Description of Artificial Sequence: Synthetic oligonucleotide
  Antisense strand to SEQ ID NO: 1394276
uuuaaacaaacagggugac

SEQ ID NO: 1394278 - RNA, 19 nt, Artificial Sequence
  Description of Artificial Sequence: Synthetic oligonucleotide
  Sense strand starting at position 368 of SEQ ID NO: 1243090
ucacccuguuuguuuaaau

SEQ ID NO: 1394279 - RNA, 19 nt, Artificial Sequence
  Description of Artificial Sequence: Synthetic oligonucleotide
  Antisense strand to SEQ ID NO: 1394278
auuuaaacaaacaggguga

SEQ ID NO: 1394280 - RNA, 19 nt, Artificial Sequence
  Description of Artificial Sequence: Synthetic oligonucleotide
  Sense strand starting at position 403 of SEQ ID NO: 1243090
ccagguuacuuguagauga

SEQ ID NO: 1394281 - RNA, 19 nt, Artificial Sequence
  Description of Artificial Sequence: Synthetic oligonucleotide
  Antisense strand to SEQ ID NO: 1394280
ucaucuacaaguaaccugg

SEQ ID NO: 1394282 - RNA, 19 nt, Artificial Sequence
  Description of Artificial Sequence: Synthetic oligonucleotide
  Sense strand starting at position 517 of SEQ ID NO: 1243090
gugcuagcaucaugacuca

SEQ ID NO: 1394283 - RNA, 19 nt, Artificial Sequence
  Description of Artificial Sequence: Synthetic oligonucleotide
  Antisense strand to SEQ ID NO: 1394282
ugagucaugaugcuagcac

SEQ ID NO: 1394284 - RNA, 19 nt, Artificial Sequence
  Description of Artificial Sequence: Synthetic oligonucleotide
  Sense strand starting at position 620 of SEQ ID NO: 1243090
acacacuacuugggagaau

SEQ ID NO: 1394285 - RNA, 19 nt, Artificial Sequence
  Description of Artificial Sequence: Synthetic oligonucleotide
  Antisense strand to SEQ ID NO: 1394284
auucucccaaguagugugu

SEQ ID NO: 1394286 - RNA, 19 nt, Artificial Sequence
  Description of Artificial Sequence: Synthetic oligonucleotide
  Sense strand starting at position 653 of SEQ ID NO: 1243090
ccuuucuugugccaaguaa

SEQ ID NO: 1394287 - RNA, 19 nt, Artificial Sequence
  Description of Artificial Sequence: Synthetic oligonucleotide
  Antisense strand to SEQ ID NO: 1394286
uuacuuggcacaagaaagg

SEQ ID NO: 1394288 - RNA, 19 nt, Artificial Sequence
  Description of Artificial Sequence: Synthetic oligonucleotide
  Sense strand starting at position 700 of SEQ ID NO: 1243090
gguggaguccuuugugacu

SEQ ID NO: 1394289 - RNA, 19 nt, Artificial Sequence
  Description of Artificial Sequence: Synthetic oligonucleotide
  Antisense strand to SEQ ID NO: 1394288
agucacaaaggacuccacc

SEQ ID NO: 1394290 - RNA, 19 nt, Artificial Sequence
  Description of Artificial Sequence: Synthetic oligonucleotide
  Sense strand starting at position 705 of SEQ ID NO: 1243090
aguccuuugugacucguua

SEQ ID NO: 1394291 - RNA, 19 nt, Artificial Sequence
  Description of Artificial Sequence: Synthetic oligonucleotide
  Antisense strand to SEQ ID NO: 1394290
uaacgagucacaaaggacu

SEQ ID NO: 1394292 - RNA, 19 nt, Artificial Sequence
  Description of Artificial Sequence: Synthetic oligonucleotide
  Sense strand starting at position 707 of SEQ ID NO: 1243090
uccuuugugacucguuaag

SEQ ID NO: 1394293 - RNA, 19 nt, Artificial Sequence
  Description of Artificial Sequence: Synthetic oligonucleotide
  Antisense strand to SEQ ID NO: 1394292
cuuaacgagucacaaagga

SEQ ID NO: 1394294 - RNA, 19 nt, Artificial Sequence
  Description of Artificial Sequence: Synthetic oligonucleotide
  Sense strand starting at position 714 of SEQ ID NO: 1243090
ugacucguuaagggaauga

SEQ ID NO: 1394295 - RNA, 19 nt, Artificial Sequence
  Description of Artificial Sequence: Synthetic oligonucleotide
  Antisense strand to SEQ ID NO: 1394294
ucauucccuuaacgaguca

SEQ ID NO: 1394296 - RNA, 19 nt, Artificial Sequence
  Description of Artificial Sequence: Synthetic oligonucleotide
  Sense strand starting at position 757 of SEQ ID NO: 1243090
uuccauuguucuuauugua

SEQ ID NO: 1394297 - RNA, 19 nt, Artificial Sequence
  Description of Artificial Sequence: Synthetic oligonucleotide
  Antisense strand to SEQ ID NO: 1394296
uacaauaagaacaauggaa

SEQ ID NO: 1394298 - RNA, 19 nt, Artificial Sequence
  Description of Artificial Sequence: Synthetic oligonucleotide
  Sense strand starting at position 764 of SEQ ID NO: 1243090
guucuuauuguaugcagua

SEQ ID NO: 1394299 - RNA, 19 nt, Artificial Sequence
  Description of Artificial Sequence: Synthetic oligonucleotide
  Antisense strand to SEQ ID NO: 1394298
uacugcauacaauaagaac

SEQ ID NO: 1394300 - RNA, 19 nt, Artificial Sequence
  Description of Artificial Sequence: Synthetic oligonucleotide
  Sense strand starting at position 769 of SEQ ID NO: 1243090
uauuguaugcaguagagaa

SEQ ID NO: 1394301 - RNA, 19 nt, Artificial Sequence
  Description of Artificial Sequence: Synthetic oligonucleotide
  Antisense strand to SEQ ID NO: 1394300
uucucuacugcauacaaua

SEQ ID NO: 1394302 - RNA, 19 nt, Artificial Sequence
  Description of Artificial Sequence: Synthetic oligonucleotide
  Sense strand starting at position 781 of SEQ ID NO: 1243090
uagagaagguuuccacagu

SEQ ID NO: 1394303 - RNA, 19 nt, Artificial Sequence
  Description of Artificial Sequence: Synthetic oligonucleotide
  Antisense strand to SEQ ID NO: 1394302
acuguggaaaccuucucua

SEQ ID NO: 1394304 - RNA, 19 nt, Artificial Sequence
  Description of Artificial Sequence: Synthetic oligonucleotide
  Sense strand starting at position 968 of SEQ ID NO: 1243090
gcaugaauuugcugaagau

SEQ ID NO: 1394305 - RNA, 19 nt, Artificial Sequence
  Description of Artificial Sequence: Synthetic oligonucleotide
  Antisense strand to SEQ ID NO: 1394304
aucuucagcaaauucaugc

SEQ ID NO: 1394306 - RNA, 19 nt, Artificial Sequence
  Description of Artificial Sequence: Synthetic oligonucleotide
  Sense strand starting at position 1264 of SEQ ID NO: 1243090
cgacccuaguccucuaaau

SEQ ID NO: 1394307 - RNA, 19 nt, Artificial Sequence
  Description of Artificial Sequence: Synthetic oligonucleotide
  Antisense strand to SEQ ID NO: 1394306
auuuagaggacuagggucg

SEQ ID NO: 1394308 - RNA, 19 nt, Artificial Sequence
  Description of Artificial Sequence: Synthetic oligonucleotide
  Sense strand starting at position 1328 of SEQ ID NO: 1243090
gccagugccuccugcaaau

SEQ ID NO: 1394309 - RNA, 19 nt, Artificial Sequence
  Description of Artificial Sequence: Synthetic oligonucleotide
  Antisense strand to SEQ ID NO: 1394308
auuugcaggaggcacuggc

SEQ ID NO: 1394310 - RNA, 19 nt, Artificial Sequence
  Description of Artificial Sequence: Synthetic oligonucleotide
  Sense strand starting at position 2062 of SEQ ID NO: 1243090
ggcugaacguuugaaaggu

SEQ ID NO: 1394311 - RNA, 19 nt, Artificial Sequence
  Description of Artificial Sequence: Synthetic oligonucleotide
  Antisense strand to SEQ ID NO: 1394310
accuuucaaacguucagcc

SEQ ID NO: 1394312 - RNA, 19 nt, Artificial Sequence
  Description of Artificial Sequence: Synthetic oligonucleotide
  Sense strand starting at position 2470 of SEQ ID NO: 1243090
ugaaauuagauagguguga

SEQ ID NO: 1394313 - RNA, 19 nt, Artificial Sequence
  Description of Artificial Sequence: Synthetic oligonucleotide
  Antisense strand to SEQ ID NO: 1394312
ucacaccuaucuaauuuca

SEQ ID NO: 1394314 - RNA, 19 nt, Artificial Sequence
  Description of Artificial Sequence: Synthetic oligonucleotide
  Sense strand starting at position 2471 of SEQ ID NO: 1243090
gaaauuagauaggugugau

SEQ ID NO: 1394315 - RNA, 19 nt, Artificial Sequence
  Description of Artificial Sequence: Synthetic oligonucleotide
  Antisense strand to SEQ ID NO: 1394314
aucacaccuaucuaauuuc

SEQ ID NO: 1394316 - RNA, 19 nt, Artificial Sequence
  Description of Artificial Sequence: Synthetic oligonucleotide
  Sense strand starting at position 2483 of SEQ ID NO: 1243090
gugugaugguuccaugacu

SEQ ID NO: 1394317 - RNA, 19 nt, Artificial Sequence
  Description of Artificial Sequence: Synthetic oligonucleotide
  Antisense strand to SEQ ID NO: 1394316
agucauggaaccaucacac

SEQ ID NO: 1394318 - RNA, 19 nt, Artificial Sequence
  Description of Artificial Sequence: Synthetic oligonucleotide
  Sense strand starting at position 2491 of SEQ ID NO: 1243090
guuccaugacuuugugaau

SEQ ID NO: 1394319 - RNA, 19 nt, Artificial Sequence
  Description of Artificial Sequence: Synthetic oligonucleotide
  Antisense strand to SEQ ID NO: 1394318
auucacaaagucauggaac

SEQ ID NO: 1394320 - RNA, 19 nt, Artificial Sequence
  Description of Artificial Sequence: Synthetic oligonucleotide
  Sense strand starting at position 2492 of SEQ ID NO: 1243090
uuccaugacuuugugaauc

SEQ ID NO: 1394321 - RNA, 19 nt, Artificial Sequence
  Description of Artificial Sequence: Synthetic oligonucleotide
  Antisense strand to SEQ ID NO: 1394320
gauucacaaagucauggaa

SEQ ID NO: 1394322 - RNA, 19 nt, Artificial Sequence
  Description of Artificial Sequence: Synthetic oligonucleotide
  Sense strand starting at position 2494 of SEQ ID NO: 1243090
ccaugacuuugugaaucua

SEQ ID NO: 1394323 - RNA, 19 nt, Artificial Sequence
  Description of Artificial Sequence: Synthetic oligonucleotide
  Antisense strand to SEQ ID NO: 1394322
uagauucacaaagucaugg

SEQ ID NO: 1394324 - RNA, 19 nt, Artificial Sequence
  Description of Artificial Sequence: Synthetic oligonucleotide
  Sense strand starting at position 2636 of SEQ ID NO: 1243090
ccagaucagccuggacaaa

SEQ ID NO: 1394325 - RNA, 19 nt, Artificial Sequence
  Description of Artificial Sequence: Synthetic oligonucleotide
  Antisense strand to SEQ ID NO: 1394324
uuuguccaggcugaucugg

SEQ ID NO: 1394326 - RNA, 19 nt, Artificial Sequence
  Description of Artificial Sequence: Synthetic oligonucleotide
  Sense strand starting at position 2726 of SEQ ID NO: 1243090
gguggugcgcacugauagu

SEQ ID NO: 1394327 - RNA, 19 nt, Artificial Sequence
  Description of Artificial Sequence: Synthetic oligonucleotide
  Antisense strand to SEQ ID NO: 1394326
acuaucagugcgcaccacc

SEQ ID NO: 1394328 - RNA, 19 nt, Artificial Sequence
  Description of Artificial Sequence: Synthetic oligonucleotide
  Sense strand starting at position 3864 of SEQ ID NO: 1243090
auucuauuauuugggaauc

SEQ ID NO: 1394329 - RNA, 19 nt, Artificial Sequence
  Description of Artificial Sequence: Synthetic oligonucleotide
  Antisense strand to SEQ ID NO: 1394328
gauucccaaauaauagaau

SEQ ID NO: 1394330 - RNA, 19 nt, Artificial Sequence
  Description of Artificial Sequence: Synthetic oligonucleotide
  Sense strand starting at position 3865 of SEQ ID NO: 1243090
uucuauuauuugggaaucu

SEQ ID NO: 1394331 - RNA, 19 nt, Artificial Sequence
  Description of Artificial Sequence: Synthetic oligonucleotide
  Antisense strand to SEQ ID NO: 1394330
agauucccaaauaauagaa

SEQ ID NO: 1394332 - RNA, 19 nt, Artificial Sequence
  Description of Artificial Sequence: Synthetic oligonucleotide
  Sense strand starting at position 3866 of SEQ ID NO: 1243090
ucuauuauuugggaaucuu

SEQ ID NO: 1394333 - RNA, 19 nt, Artificial Sequence
  Description of Artificial Sequence: Synthetic oligonucleotide
  Antisense strand to SEQ ID NO: 1394332
aagauucccaaauaauaga

SEQ ID NO: 1394334 - RNA, 19 nt, Artificial Sequence
  Description of Artificial Sequence: Synthetic oligonucleotide
  Sense strand starting at position 3945 of SEQ ID NO: 1243090
auugauugauccugcuaug

SEQ ID NO: 1394335 - RNA, 19 nt, Artificial Sequence
  Description of Artificial Sequence: Synthetic oligonucleotide
  Antisense strand to SEQ ID NO: 1394334
cauagcaggaucaaucaau

SEQ ID NO: 1394336 - RNA, 19 nt, Artificial Sequence
  Description of Artificial Sequence: Synthetic oligonucleotide
  Sense strand starting at position 493 of SEQ ID NO: 1243091
gcuugccuugaggauguaa

SEQ ID NO: 1394337 - RNA, 19 nt, Artificial Sequence
  Description of Artificial Sequence: Synthetic oligonucleotide
  Antisense strand to SEQ ID NO: 1394336
uuacauccucaaggcaagc

SEQ ID NO: 1394338 - RNA, 19 nt, Artificial Sequence
  Description of Artificial Sequence: Synthetic oligonucleotide
  Sense strand starting at position 519 of SEQ ID NO: 1243091
gcccauaagccucaucgau

SEQ ID NO: 1394339 - RNA, 19 nt, Artificial Sequence
  Description of Artificial Sequence: Synthetic oligonucleotide
  Antisense strand to SEQ ID NO: 1394338
aucgaugaggcuuaugggc

SEQ ID NO: 1394340 - RNA, 19 nt, Artificial Sequence
  Description of Artificial Sequence: Synthetic oligonucleotide
  Sense strand starting at position 521 of SEQ ID NO: 1243091
ccauaagccucaucgauga

SEQ ID NO: 1394341 - RNA, 19 nt, Artificial Sequence
  Description of Artificial Sequence: Synthetic oligonucleotide
  Antisense strand to SEQ ID NO: 1394340
ucaucgaugaggcuuaugg

SEQ ID NO: 1394342 - RNA, 19 nt, Artificial Sequence
  Description of Artificial Sequence: Synthetic oligonucleotide
  Sense strand starting at position 567 of SEQ ID NO: 1243091
cugugaacuucuuguccag

SEQ ID NO: 1394343 - RNA, 19 nt, Artificial Sequence
  Description of Artificial Sequence: Synthetic oligonucleotide
  Antisense strand to SEQ ID NO: 1394342
cuggacaagaaguucacag

SEQ ID NO: 1394344 - RNA, 19 nt, Artificial Sequence
  Description of Artificial Sequence: Synthetic oligonucleotide
  Sense strand starting at position 569 of SEQ ID NO: 1243091
gugaacuucuuguccagga

SEQ ID NO: 1394345 - RNA, 19 nt, Artificial Sequence
  Description of Artificial Sequence: Synthetic oligonucleotide
  Antisense strand to SEQ ID NO: 1394344
uccuggacaagaaguucac

SEQ ID NO: 1394346 - RNA, 19 nt, Artificial Sequence
  Description of Artificial Sequence: Synthetic oligonucleotide
  Sense strand starting at position 570 of SEQ ID NO: 1243091
ugaacuucuuguccaggau

SEQ ID NO: 1394347 - RNA, 19 nt, Artificial Sequence
  Description of Artificial Sequence: Synthetic oligonucleotide
  Antisense strand to SEQ ID NO: 1394346
auccuggacaagaaguuca

SEQ ID NO: 1394348 - RNA, 19 nt, Artificial Sequence
  Description of Artificial Sequence: Synthetic oligonucleotide
  Sense strand starting at position 582 of SEQ ID NO: 1243091
ccaggaucucacuguagaa

SEQ ID NO: 1394349 - RNA, 19 nt, Artificial Sequence
  Description of Artificial Sequence: Synthetic oligonucleotide
  Antisense strand to SEQ ID NO: 1394348
uucuacagugagauccugg

SEQ ID NO: 1394350 - RNA, 19 nt, Artificial Sequence
  Description of Artificial Sequence: Synthetic oligonucleotide
  Sense strand starting at position 595 of SEQ ID NO: 1243091
guagaacucucgcucaaac

SEQ ID NO: 1394351 - RNA, 19 nt, Artificial Sequence
  Description of Artificial Sequence: Synthetic oligonucleotide
  Antisense strand to SEQ ID NO: 1394350
guuugagcgagaguucuac

SEQ ID NO: 1394352 - RNA, 19 nt, Artificial Sequence
  Description of Artificial Sequence: Synthetic oligonucleotide
  Sense strand starting at position 934 of SEQ ID NO: 1243091
caguuuacagguugucaca

SEQ ID NO: 1394353 - RNA, 19 nt, Artificial Sequence
  Description of Artificial Sequence: Synthetic oligonucleotide
  Antisense strand to SEQ ID NO: 1394352
ugugacaaccuguaaacug

SEQ ID NO: 1394354 - RNA, 19 nt, Artificial Sequence
  Description of Artificial Sequence: Synthetic oligonucleotide
  Sense strand starting at position 936 of SEQ ID NO: 1243091
guuuacagguugucacauu

SEQ ID NO: 1394355 - RNA, 19 nt, Artificial Sequence
  Description of Artificial Sequence: Synthetic oligonucleotide
  Antisense strand to SEQ ID NO: 1394354
aaugugacaaccuguaaac

SEQ ID NO: 1394356 - RNA, 19 nt, Artificial Sequence
  Description of Artificial Sequence: Synthetic oligonucleotide
  Sense strand starting at position 1180 of SEQ ID NO: 1243091
aucaguccuguuugccaga

SEQ ID NO: 1394357 - RNA, 19 nt, Artificial Sequence
  Description of Artificial Sequence: Synthetic oligonucleotide
  Antisense strand to SEQ ID NO: 1394356
ucuggcaaacaggacugau

SEQ ID NO: 1394358 - RNA, 19 nt, Artificial Sequence
  Description of Artificial Sequence: Synthetic oligonucleotide
  Sense strand starting at position 1181 of SEQ ID NO: 1243091
ucaguccuguuugccagaa

SEQ ID NO: 1394359 - RNA, 19 nt, Artificial Sequence
  Description of Artificial Sequence: Synthetic oligonucleotide
  Antisense strand to SEQ ID NO: 1394358
uucuggcaaacaggacuga

SEQ ID NO: 1394360 - RNA, 19 nt, Artificial Sequence
  Description of Artificial Sequence: Synthetic oligonucleotide
  Sense strand starting at position 1183 of SEQ ID NO: 1243091
aguccuguuugccagaacu

SEQ ID NO: 1394361 - RNA, 19 nt, Artificial Sequence
  Description of Artificial Sequence: Synthetic oligonucleotide
  Antisense strand to SEQ ID NO: 1394360
aguucuggcaaacaggacu

SEQ ID NO: 1394362 - RNA, 19 nt, Artificial Sequence
  Description of Artificial Sequence: Synthetic oligonucleotide
  Sense strand starting at position 1221 of SEQ ID NO: 1243091
gcuccuuugccggagaugu

SEQ ID NO: 1394363 - RNA, 19 nt, Artificial Sequence
  Description of Artificial Sequence: Synthetic oligonucleotide
  Antisense strand to SEQ ID NO: 1394362
acaucuccggcaaaggagc

SEQ ID NO: 1394364 - RNA, 19 nt, Artificial Sequence
  Description of Artificial Sequence: Synthetic oligonucleotide
  Sense strand starting at position 1361 of SEQ ID NO: 1243091
ccuugucguuguuggcaua

SEQ ID NO: 1394365 - RNA, 19 nt, Artificial Sequence
  Description of Artificial Sequence: Synthetic oligonucleotide
  Antisense strand to SEQ ID NO: 1394364
uaugccaacaacgacaagg

SEQ ID NO: 1394366 - RNA, 19 nt, Artificial Sequence
  Description of Artificial Sequence: Synthetic oligonucleotide
  Sense strand starting at position 1364 of SEQ ID NO: 1243091
ugucguuguuggcauauau

SEQ ID NO: 1394367 - RNA, 19 nt, Artificial Sequence
  Description of Artificial Sequence: Synthetic oligonucleotide
  Antisense strand to SEQ ID NO: 1394366
auauaugccaacaacgaca

SEQ ID NO: 1394368 - RNA, 19 nt, Artificial Sequence
  Description of Artificial Sequence: Synthetic oligonucleotide
  Sense strand starting at position 1627 of SEQ ID NO: 1243091
acgggauacuuguguagag

SEQ ID NO: 1394369 - RNA, 19 nt, Artificial Sequence
  Description of Artificial Sequence: Synthetic oligonucleotide
  Antisense strand to SEQ ID NO: 1394368
cucuacacaaguaucccgu

SEQ ID NO: 1394370 - RNA, 19 nt, Artificial Sequence
  Description of Artificial Sequence: Synthetic oligonucleotide
  Sense strand starting at position 1631 of SEQ ID NO: 1243091
gauacuuguguagaggcau

SEQ ID NO: 1394371 - RNA, 19 nt, Artificial Sequence
  Description of Artificial Sequence: Synthetic oligonucleotide
  Antisense strand to SEQ ID NO: 1394370
augccucuacacaaguauc

SEQ ID NO: 1394372 - RNA, 19 nt, Artificial Sequence
  Description of Artificial Sequence: Synthetic oligonucleotide
  Sense strand starting at position 2212 of SEQ ID NO: 1243091
aaacucguuuaguuugaaa

SEQ ID NO: 1394373 - RNA, 19 nt, Artificial Sequence
  Description of Artificial Sequence: Synthetic oligonucleotide
  Antisense strand to SEQ ID NO: 1394372
uuucaaacuaaacgaguuu

SEQ ID NO: 1394374 - RNA, 19 nt, Artificial Sequence
  Description of Artificial Sequence: Synthetic oligonucleotide
  Sense strand starting at position 2347 of SEQ ID NO: 1243091
ccuuuauaagcuuagagau

SEQ ID NO: 1394375 - RNA, 19 nt, Artificial Sequence
  Description of Artificial Sequence: Synthetic oligonucleotide
  Antisense strand to SEQ ID NO: 1394374
aucucuaagcuuauaaagg

SEQ ID NO: 1394376 - RNA, 19 nt, Artificial Sequence
  Description of Artificial Sequence: Synthetic oligonucleotide
  Sense strand starting at position 2349 of SEQ ID NO: 1243091
uuuauaagcuuagagauug

SEQ ID NO: 1394377 - RNA, 19 nt, Artificial Sequence
  Description of Artificial Sequence: Synthetic oligonucleotide
  Antisense strand to SEQ ID NO: 1394376
caaucucuaagcuuauaaa

SEQ ID NO: 1394378 - RNA, 19 nt, Artificial Sequence
  Description of Artificial Sequence: Synthetic oligonucleotide
  Sense strand starting at position 2359 of SEQ ID NO: 1243091
uagagauugcuuugguggu

SEQ ID NO: 1394379 - RNA, 19 nt, Artificial Sequence
  Description of Artificial Sequence: Synthetic oligonucleotide
  Antisense strand to SEQ ID NO: 1394378
accaccaaagcaaucucua

SEQ ID NO: 1394380 - RNA, 19 nt, Artificial Sequence
  Description of Artificial Sequence: Synthetic oligonucleotide
  Sense strand starting at position 2361 of SEQ ID NO: 1243091
gagauugcuuuggugguca

SEQ ID NO: 1394381 - RNA, 19 nt, Artificial Sequence
  Description of Artificial Sequence: Synthetic oligonucleotide
  Antisense strand to SEQ ID NO: 1394380
ugaccaccaaagcaaucuc

SEQ ID NO: 1394382 - RNA, 19 nt, Artificial Sequence
  Description of Artificial Sequence: Synthetic oligonucleotide
  Sense strand starting at position 2417 of SEQ ID NO: 1243091
ggccauaucccggacaaga

SEQ ID NO: 1394383 - RNA, 19 nt, Artificial Sequence
  Description of Artificial Sequence: Synthetic oligonucleotide
  Antisense strand to SEQ ID NO: 1394382
ucuuguccgggauauggcc

SEQ ID NO: 1394384 - RNA, 19 nt, Artificial Sequence
  Description of Artificial Sequence: Synthetic oligonucleotide
  Sense strand starting at position 3141 of SEQ ID NO: 1243091
accuguggucuccaaguaa

SEQ ID NO: 1394385 - RNA, 19 nt, Artificial Sequence
  Description of Artificial Sequence: Synthetic oligonucleotide
  Antisense strand to SEQ ID NO: 1394384
uuacuuggagaccacaggu

SEQ ID NO: 1394386 - RNA, 19 nt, Artificial Sequence
  Description of Artificial Sequence: Synthetic oligonucleotide
  Sense strand starting at position 3293 of SEQ ID NO: 1243091
gaggguaucuaggccaauu

SEQ ID NO: 1394387 - RNA, 19 nt, Artificial Sequence
  Description of Artificial Sequence: Synthetic oligonucleotide
  Antisense strand to SEQ ID NO: 1394386
aauuggccuagauacccuc

SEQ ID NO: 1394388 - RNA, 19 nt, Artificial Sequence
  Description of Artificial Sequence: Synthetic oligonucleotide
  Sense strand starting at position 3440 of SEQ ID NO: 1243091
ucccgaucguucuugcaga

SEQ ID NO: 1394389 - RNA, 19 nt, Artificial Sequence
  Description of Artificial Sequence: Synthetic oligonucleotide
  Antisense strand to SEQ ID NO: 1394388
ucugcaagaacgaucggga

SEQ ID NO: 1394390 - RNA, 19 nt, Artificial Sequence
  Description of Artificial Sequence: Synthetic oligonucleotide
  Sense strand starting at position 3441 of SEQ ID NO: 1243091
cccgaucguucuugcagau

SEQ ID NO: 1394391 - RNA, 19 nt, Artificial Sequence
  Description of Artificial Sequence: Synthetic oligonucleotide
  Antisense strand to SEQ ID NO: 1394390
aucugcaagaacgaucggg

SEQ ID NO: 1394392 - RNA, 19 nt, Artificial Sequence
  Description of Artificial Sequence: Synthetic oligonucleotide
  Sense strand starting at position 3445 of SEQ ID NO: 1243091
aucguucuugcagaucuga

SEQ ID NO: 1394393 - RNA, 19 nt, Artificial Sequence
  Description of Artificial Sequence: Synthetic oligonucleotide
  Antisense strand to SEQ ID NO: 1394392
ucagaucugcaagaacgau

SEQ ID NO: 1394394 - RNA, 19 nt, Artificial Sequence
  Description of Artificial Sequence: Synthetic oligonucleotide
  Sense strand starting at position 3564 of SEQ ID NO: 1243091
ugcuguggguguaguagua

SEQ ID NO: 1394395 - RNA, 19 nt, Artificial Sequence
  Description of Artificial Sequence: Synthetic oligonucleotide
  Antisense strand to SEQ ID NO: 1394394
uacuacuacacccacagca

SEQ ID NO: 1394396 - RNA, 19 nt, Artificial Sequence
  Description of Artificial Sequence: Synthetic oligonucleotide
  Sense strand starting at position 3576 of SEQ ID NO: 1243091
aguaguaguugucgcuagu

SEQ ID NO: 1394397 - RNA, 19 nt, Artificial Sequence
  Description of Artificial Sequence: Synthetic oligonucleotide
  Antisense strand to SEQ ID NO: 1394396
acuagcgacaacuacuacu

SEQ ID NO: 1394398 - RNA, 19 nt, Artificial Sequence
  Description of Artificial Sequence: Synthetic oligonucleotide
  Sense strand starting at position 3579 of SEQ ID NO: 1243091
aguaguugucgcuagucau

SEQ ID NO: 1394399 - RNA, 19 nt, Artificial Sequence
  Description of Artificial Sequence: Synthetic oligonucleotide
  Antisense strand to SEQ ID NO: 1394398
augacuagcgacaacuacu

SEQ ID NO: 1394400 - RNA, 19 nt, Artificial Sequence
  Description of Artificial Sequence: Synthetic oligonucleotide
  Sense strand starting at position 3582 of SEQ ID NO: 1243091
aguugucgcuagucaucau

SEQ ID NO: 1394401 - RNA, 19 nt, Artificial Sequence
  Description of Artificial Sequence: Synthetic oligonucleotide
  Antisense strand to SEQ ID NO: 1394400
augaugacuagcgacaacu

SEQ ID NO: 1394402 - RNA, 19 nt, Artificial Sequence
  Description of Artificial Sequence: Synthetic oligonucleotide
  Sense strand starting at position 3585 of SEQ ID NO: 1243091
ugucgcuagucaucaugga

SEQ ID NO: 1394403 - RNA, 19 nt, Artificial Sequence
  Description of Artificial Sequence: Synthetic oligonucleotide
  Antisense strand to SEQ ID NO: 1394402
uccaugaugacuagcgaca

SEQ ID NO: 1394404 - RNA, 19 nt, Artificial Sequence
  Description of Artificial Sequence: Synthetic oligonucleotide
  Sense strand starting at position 3594 of SEQ ID NO: 1243091
ucaucauggagguguagau

SEQ ID NO: 1394405 - RNA, 19 nt, Artificial Sequence
  Description of Artificial Sequence: Synthetic oligonucleotide
  Antisense strand to SEQ ID NO: 1394404
aucuacaccuccaugauga

SEQ ID NO: 1394406 - RNA, 19 nt, Artificial Sequence
  Description of Artificial Sequence: Synthetic oligonucleotide
  Sense strand starting at position 3705 of SEQ ID NO: 1243091
agcgguaagccuggagaaa

SEQ ID NO: 1394407 - RNA, 19 nt, Artificial Sequence
  Description of Artificial Sequence: Synthetic oligonucleotide
  Antisense strand to SEQ ID NO: 1394406
uuucuccaggcuuaccgcu

SEQ ID NO: 1394408 - RNA, 19 nt, Artificial Sequence
  Description of Artificial Sequence: Synthetic oligonucleotide
  Sense strand starting at position 3775 of SEQ ID NO: 1243091
cccagauacggugguuacu

SEQ ID NO: 1394409 - RNA, 19 nt, Artificial Sequence
  Description of Artificial Sequence: Synthetic oligonucleotide
  Antisense strand to SEQ ID NO: 1394408
aguaaccaccguaucuggg

SEQ ID NO: 1394410 - RNA, 19 nt, Artificial Sequence
  Description of Artificial Sequence: Synthetic oligonucleotide
  Sense strand starting at position 356 of SEQ ID NO: 1243092
ggaagagguuagcgaagau

SEQ ID NO: 1394411 - RNA, 19 nt, Artificial Sequence
  Description of Artificial Sequence: Synthetic oligonucleotide
  Antisense strand to SEQ ID NO: 1394410
aucuucgcuaaccucuucc

SEQ ID NO: 1394412 - RNA, 19 nt, Artificial Sequence
  Description of Artificial Sequence: Synthetic oligonucleotide
  Sense strand starting at position 987 of SEQ ID NO: 1243092
gaggcagacucggguguaa

SEQ ID NO: 1394413 - RNA, 19 nt, Artificial Sequence
  Description of Artificial Sequence: Synthetic oligonucleotide
  Antisense strand to SEQ ID NO: 1394412
uuacacccgagucugccuc

SEQ ID NO: 1394414 - RNA, 19 nt, Artificial Sequence
  Description of Artificial Sequence: Synthetic oligonucleotide
  Sense strand starting at position 1128 of SEQ ID NO: 1243092
ggguaaucccaggguucca

SEQ ID NO: 1394415 - RNA, 19 nt, Artificial Sequence
  Description of Artificial Sequence: Synthetic oligonucleotide
  Antisense strand to SEQ ID NO: 1394414
uggaacccugggauuaccc

SEQ ID NO: 1394416 - RNA, 19 nt, Artificial Sequence
  Description of Artificial Sequence: Synthetic oligonucleotide
  Sense strand starting at position 1146 of SEQ ID NO: 1243092
augcguauccucugcacau

SEQ ID NO: 1394417 - RNA, 19 nt, Artificial Sequence
  Description of Artificial Sequence: Synthetic oligonucleotide
  Antisense strand to SEQ ID NO: 1394416
augugcagaggauacgcau

SEQ ID NO: 1394418 - RNA, 19 nt, Artificial Sequence
  Description of Artificial Sequence: Synthetic oligonucleotide
  Sense strand starting at position 1147 of SEQ ID NO: 1243092
ugcguauccucugcacauu

SEQ ID NO: 1394419 - RNA, 19 nt, Artificial Sequence
  Description of Artificial Sequence: Synthetic oligonucleotide
  Antisense strand to SEQ ID NO: 1394418
aaugugcagaggauacgca

SEQ ID NO: 1394420 - RNA, 19 nt, Artificial Sequence
  Description of Artificial Sequence: Synthetic oligonucleotide
  Sense strand starting at position 1200 of SEQ ID NO: 1243092
uucugucguucugcgauaa

SEQ ID NO: 1394421 - RNA, 19 nt, Artificial Sequence
  Description of Artificial Sequence: Synthetic oligonucleotide
  Antisense strand to SEQ ID NO: 1394420
uuaucgcagaacgacagaa

SEQ ID NO: 1394422 - RNA, 19 nt, Artificial Sequence
  Description of Artificial Sequence: Synthetic oligonucleotide
  Sense strand starting at position 1201 of SEQ ID NO: 1243092
ucugucguucugcgauaau

SEQ ID NO: 1394423 - RNA, 19 nt, Artificial Sequence
  Description of Artificial Sequence: Synthetic oligonucleotide
  Antisense strand to SEQ ID NO: 1394422
auuaucgcagaacgacaga

SEQ ID NO: 1394424 - RNA, 19 nt, Artificial Sequence
  Description of Artificial Sequence: Synthetic oligonucleotide
  Sense strand starting at position 1204 of SEQ ID NO: 1243092
gucguucugcgauaaucau

SEQ ID NO: 1394425 - RNA, 19 nt, Artificial Sequence
  Description of Artificial Sequence: Synthetic oligonucleotide
  Antisense strand to SEQ ID NO: 1394424
augauuaucgcagaacgac

SEQ ID NO: 1394426 - RNA, 19 nt, Artificial Sequence
  Description of Artificial Sequence: Synthetic oligonucleotide
  Sense strand starting at position 1329 of SEQ ID NO: 1243092
ugguacaugacguguucga

SEQ ID NO: 1394427 - RNA, 19 nt, Artificial Sequence
  Description of Artificial Sequence: Synthetic oligonucleotide
  Antisense strand to SEQ ID NO: 1394426
ucgaacacgucauguacca

SEQ ID NO: 1394428 - RNA, 19 nt, Artificial Sequence
  Description of Artificial Sequence: Synthetic oligonucleotide
  Sense strand starting at position 1364 of SEQ ID NO: 1243092
cucagucuucccugaugaa

SEQ ID NO: 1394429 - RNA, 19 nt, Artificial Sequence
  Description of Artificial Sequence: Synthetic oligonucleotide
  Antisense strand to SEQ ID NO: 1394428
uucaucagggaagacugag

SEQ ID NO: 1394430 - RNA, 19 nt, Artificial Sequence
  Description of Artificial Sequence: Synthetic oligonucleotide
  Sense strand starting at position 1365 of SEQ ID NO: 1243092
ucagucuucccugaugaag

SEQ ID NO: 1394431 - RNA, 19 nt, Artificial Sequence
  Description of Artificial Sequence: Synthetic oligonucleotide
  Antisense strand to SEQ ID NO: 1394430
cuucaucagggaagacuga

SEQ ID NO: 1394432 - RNA, 19 nt, Artificial Sequence
  Description of Artificial Sequence: Synthetic oligonucleotide
  Sense strand starting at position 1367 of SEQ ID NO: 1243092
agucuucccugaugaagaa

SEQ ID NO: 1394433 - RNA, 19 nt, Artificial Sequence
  Description of Artificial Sequence: Synthetic oligonucleotide
  Antisense strand to SEQ ID NO: 1394432
uucuucaucagggaagacu

SEQ ID NO: 1394434 - RNA, 19 nt, Artificial Sequence
  Description of Artificial Sequence: Synthetic oligonucleotide
  Sense strand starting at position 1456 of SEQ ID NO: 1243092
gagccuuaccuuugaaggu

SEQ ID NO: 1394435 - RNA, 19 nt, Artificial Sequence
  Description of Artificial Sequence: Synthetic oligonucleotide
  Antisense strand to SEQ ID NO: 1394434
accuucaaagguaaggcuc

SEQ ID NO: 1394436 - RNA, 19 nt, Artificial Sequence
  Description of Artificial Sequence: Synthetic oligonucleotide
  Sense strand starting at position 2027 of SEQ ID NO: 1243092
gccggugucccaggcuaaa

SEQ ID NO: 1394437 - RNA, 19 nt, Artificial Sequence
  Description of Artificial Sequence: Synthetic oligonucleotide
  Antisense strand to SEQ ID NO: 1394436
uuuagccugggacaccggc

SEQ ID NO: 1394438 - RNA, 19 nt, Artificial Sequence
  Description of Artificial Sequence: Synthetic oligonucleotide
  Sense strand starting at position 2701 of SEQ ID NO: 1243092
gcgugaguggucgcggguu

SEQ ID NO: 1394439 - RNA, 19 nt, Artificial Sequence
  Description of Artificial Sequence: Synthetic oligonucleotide
  Antisense strand to SEQ ID NO: 1394438
aacccgcgaccacucacgc

SEQ ID NO: 1394440 - RNA, 19 nt, Artificial Sequence
  Description of Artificial Sequence: Synthetic oligonucleotide
  Sense strand starting at position 2769 of SEQ ID NO: 1243092
uggagcugucccugaggca

SEQ ID NO: 1394441 - RNA, 19 nt, Artificial Sequence
  Description of Artificial Sequence: Synthetic oligonucleotide
  Antisense strand to SEQ ID NO: 1394440
ugccucagggacagcucca

SEQ ID NO: 1394442 - RNA, 19 nt, Artificial Sequence
  Description of Artificial Sequence: Synthetic oligonucleotide
  Sense strand starting at position 2859 of SEQ ID NO: 1243092
gccguucugcugguauaga

SEQ ID NO: 1394443 - RNA, 19 nt, Artificial Sequence
  Description of Artificial Sequence: Synthetic oligonucleotide
  Antisense strand to SEQ ID NO: 1394442
ucuauaccagcagaacggc

SEQ ID NO: 1394444 - RNA, 19 nt, Artificial Sequence
  Description of Artificial Sequence: Synthetic oligonucleotide
  Sense strand starting at position 2890 of SEQ ID NO: 1243092
ggagaagguuccgucucga

SEQ ID NO: 1394445 - RNA, 19 nt, Artificial Sequence
  Description of Artificial Sequence: Synthetic oligonucleotide
  Antisense strand to SEQ ID NO: 1394444
ucgagacggaaccuucucc

SEQ ID NO: 1394446 - RNA, 19 nt, Artificial Sequence
  Description of Artificial Sequence: Synthetic oligonucleotide
  Sense strand starting at position 3230 of SEQ ID NO: 1243092
aguagucccucucuaauca

SEQ ID NO: 1394447 - RNA, 19 nt, Artificial Sequence
  Description of Artificial Sequence: Synthetic oligonucleotide
  Antisense strand to SEQ ID NO: 1394446
ugauuagagagggacuacu

SEQ ID NO: 1394448 - RNA, 19 nt, Artificial Sequence
  Description of Artificial Sequence: Synthetic oligonucleotide
  Sense strand starting at position 3335 of SEQ ID NO: 1243092
ggacuccucucugauccaa

SEQ ID NO: 1394449 - RNA, 19 nt, Artificial Sequence
  Description of Artificial Sequence: Synthetic oligonucleotide
  Antisense strand to SEQ ID NO: 1394448
uuggaucagagaggagucc

SEQ ID NO: 1394450 - RNA, 19 nt, Artificial Sequence
  Description of Artificial Sequence: Synthetic oligonucleotide
  Sense strand starting at position 3360 of SEQ ID NO: 1243092
agagguuucuagggugaga

SEQ ID NO: 1394451 - RNA, 19 nt, Artificial Sequence
  Description of Artificial Sequence: Synthetic oligonucleotide
  Antisense strand to SEQ ID NO: 1394450
ucucacccuagaaaccucu

SEQ ID NO: 1394452 - RNA, 19 nt, Artificial Sequence
  Description of Artificial Sequence: Synthetic oligonucleotide
  Sense strand starting at position 3362 of SEQ ID NO: 1243092
agguuucuagggugagaug

SEQ ID NO: 1394453 - RNA, 19 nt, Artificial Sequence
  Description of Artificial Sequence: Synthetic oligonucleotide
  Antisense strand to SEQ ID NO: 1394452
caucucacccuagaaaccu

SEQ ID NO: 1394454 - RNA, 19 nt, Artificial Sequence
  Description of Artificial Sequence: Synthetic oligonucleotide
  Sense strand starting at position 3419 of SEQ ID NO: 1243092
ccuagaggauccugagaag

SEQ ID NO: 1394455 - RNA, 19 nt, Artificial Sequence
  Description of Artificial Sequence: Synthetic oligonucleotide
  Antisense strand to SEQ ID NO: 1394454
cuucucaggauccucuagg

SEQ ID NO: 1394456 - RNA, 19 nt, Artificial Sequence
  Description of Artificial Sequence: Synthetic oligonucleotide
  Sense strand starting at position 3422 of SEQ ID NO: 1243092
agaggauccugagaagugu

SEQ ID NO: 1394457 - RNA, 19 nt, Artificial Sequence
  Description of Artificial Sequence: Synthetic oligonucleotide
  Antisense strand to SEQ ID NO: 1394456
acacuucucaggauccucu

SEQ ID NO: 1394458 - RNA, 19 nt, Artificial Sequence
  Description of Artificial Sequence: Synthetic oligonucleotide
  Sense strand starting at position 3470 of SEQ ID NO: 1243092
caggcuucguccucugaca

SEQ ID NO: 1394459 - RNA, 19 nt, Artificial Sequence
  Description of Artificial Sequence: Synthetic oligonucleotide
  Antisense strand to SEQ ID NO: 1394458
ugucagaggacgaagccug

SEQ ID NO: 1394460 - RNA, 19 nt, Artificial Sequence
  Description of Artificial Sequence: Synthetic oligonucleotide
  Sense strand starting at position 3612 of SEQ ID NO: 1243092
ugcuuugugcuaggucaaa

SEQ ID NO: 1394461 - RNA, 19 nt, Artificial Sequence
  Description of Artificial Sequence: Synthetic oligonucleotide
  Antisense strand to SEQ ID NO: 1394460
uuugaccuagcacaaagca

SEQ ID NO: 1394462 - RNA, 19 nt, Artificial Sequence
  Description of Artificial Sequence: Synthetic oligonucleotide
  Sense strand starting at position 3805 of SEQ ID NO: 1243092
caggcuugcuguucugcaa

SEQ ID NO: 1394463 - RNA, 19 nt, Artificial Sequence
  Description of Artificial Sequence: Synthetic oligonucleotide
  Antisense strand to SEQ ID NO: 1394462
uugcagaacagcaagccug

SEQ ID NO: 1394464 - RNA, 19 nt, Artificial Sequence
  Description of Artificial Sequence: Synthetic oligonucleotide
  Sense strand starting at position 3858 of SEQ ID NO: 1243092
cgcagccuccugugaacaa

SEQ ID NO: 1394465 - RNA, 19 nt, Artificial Sequence
  Description of Artificial Sequence: Synthetic oligonucleotide
  Antisense strand to SEQ ID NO: 1394464
uuguucacaggaggcugcg

SEQ ID NO: 1394466 - RNA, 19 nt, Artificial Sequence
  Description of Artificial Sequence: Synthetic oligonucleotide
  Sense strand starting at position 193 of SEQ ID NO: 1243093
agagcaaacuucuguggua

SEQ ID NO: 1394467 - RNA, 19 nt, Artificial Sequence
  Description of Artificial Sequence: Synthetic oligonucleotide
  Antisense strand to SEQ ID NO: 1394466
uaccacagaaguuugcucu

SEQ ID NO: 1394468 - RNA, 19 nt, Artificial Sequence
  Description of Artificial Sequence: Synthetic oligonucleotide
  Sense strand starting at position 194 of SEQ ID NO: 1243093
gagcaaacuucugugguac

SEQ ID NO: 1394469 - RNA, 19 nt, Artificial Sequence
  Description of Artificial Sequence: Synthetic oligonucleotide
  Antisense strand to SEQ ID NO: 1394468
guaccacagaaguuugcuc

SEQ ID NO: 1394470 - RNA, 19 nt, Artificial Sequence
  Description of Artificial Sequence: Synthetic oligonucleotide
  Sense strand starting at position 382 of SEQ ID NO: 1243093
gugagcagagcuuagauca

SEQ ID NO: 1394471 - RNA, 19 nt, Artificial Sequence
  Description of Artificial Sequence: Synthetic oligonucleotide
  Antisense strand to SEQ ID NO: 1394470
ugaucuaagcucugcucac

SEQ ID NO: 1394472 - RNA, 19 nt, Artificial Sequence
  Description of Artificial Sequence: Synthetic oligonucleotide
  Sense strand starting at position 1454 of SEQ ID NO: 1243093
gggugaaaucugcguccag

SEQ ID NO: 1394473 - RNA, 19 nt, Artificial Sequence
  Description of Artificial Sequence: Synthetic oligonucleotide
  Antisense strand to SEQ ID NO: 1394472
cuggacgcagauuucaccc

SEQ ID NO: 1394474 - RNA, 19 nt, Artificial Sequence
  Description of Artificial Sequence: Synthetic oligonucleotide
  Sense strand starting at position 1456 of SEQ ID NO: 1243093
gugaaaucugcguccagcu

SEQ ID NO: 1394475 - RNA, 19 nt, Artificial Sequence
  Description of Artificial Sequence: Synthetic oligonucleotide
  Antisense strand to SEQ ID NO: 1394474
agcuggacgcagauuucac

SEQ ID NO: 1394476 - RNA, 19 nt, Artificial Sequence
  Description of Artificial Sequence: Synthetic oligonucleotide
  Sense strand starting at position 1458 of SEQ ID NO: 1243093
gaaaucugcguccagcuga

SEQ ID NO: 1394477 - RNA, 19 nt, Artificial Sequence
  Description of Artificial Sequence: Synthetic oligonucleotide
  Antisense strand to SEQ ID NO: 1394476
ucagcuggacgcagauuuc

SEQ ID NO: 1394478 - RNA, 19 nt, Artificial Sequence
  Description of Artificial Sequence: Synthetic oligonucleotide
  Sense strand starting at position 1571 of SEQ ID NO: 1243093
gagcucaaagguuguuacu

SEQ ID NO: 1394479 - RNA, 19 nt, Artificial Sequence
  Description of Artificial Sequence: Synthetic oligonucleotide
  Antisense strand to SEQ ID NO: 1394478
aguaacaaccuuugagcuc

SEQ ID NO: 1394480 - RNA, 19 nt, Artificial Sequence
  Description of Artificial Sequence: Synthetic oligonucleotide
  Sense strand starting at position 1573 of SEQ ID NO: 1243093
gcucaaagguuguuacuua

SEQ ID NO: 1394481 - RNA, 19 nt, Artificial Sequence
  Description of Artificial Sequence: Synthetic oligonucleotide
  Antisense strand to SEQ ID NO: 1394480
uaaguaacaaccuuugagc

SEQ ID NO: 1394482 - RNA, 19 nt, Artificial Sequence
  Description of Artificial Sequence: Synthetic oligonucleotide
  Sense strand starting at position 1577 of SEQ ID NO: 1243093
aaagguuguuacuuacaga

SEQ ID NO: 1394483 - RNA, 19 nt, Artificial Sequence
  Description of Artificial Sequence: Synthetic oligonucleotide
  Antisense strand to SEQ ID NO: 1394482
ucuguaaguaacaaccuuu

SEQ ID NO: 1394484 - RNA, 19 nt, Artificial Sequence
  Description of Artificial Sequence: Synthetic oligonucleotide
  Sense strand starting at position 1761 of SEQ ID NO: 1243093
ucuaaagggcgaugugaaa

SEQ ID NO: 1394485 - RNA, 19 nt, Artificial Sequence
  Description of Artificial Sequence: Synthetic oligonucleotide
  Antisense strand to SEQ ID NO: 1394484
uuucacaucgcccuuuaga

SEQ ID NO: 1394486 - RNA, 19 nt, Artificial Sequence
  Description of Artificial Sequence: Synthetic oligonucleotide
  Sense strand starting at position 1912 of SEQ ID NO: 1243093
ggguaacucugaugugcag

SEQ ID NO: 1394487 - RNA, 19 nt, Artificial Sequence
  Description of Artificial Sequence: Synthetic oligonucleotide
  Antisense strand to SEQ ID NO: 1394486
cugcacaucagaguuaccc

SEQ ID NO: 1394488 - RNA, 19 nt, Artificial Sequence
  Description of Artificial Sequence: Synthetic oligonucleotide
  Sense strand starting at position 1918 of SEQ ID NO: 1243093
cucugaugugcagggugau

SEQ ID NO: 1394489 - RNA, 19 nt, Artificial Sequence
  Description of Artificial Sequence: Synthetic oligonucleotide
  Antisense strand to SEQ ID NO: 1394488
aucacccugcacaucagag

SEQ ID NO: 1394490 - RNA, 19 nt, Artificial Sequence
  Description of Artificial Sequence: Synthetic oligonucleotide
  Sense strand starting at position 1919 of SEQ ID NO: 1243093
ucugaugugcagggugauu

SEQ ID NO: 1394491 - RNA, 19 nt, Artificial Sequence
  Description of Artificial Sequence: Synthetic oligonucleotide
  Antisense strand to SEQ ID NO: 1394490
aaucacccugcacaucaga

SEQ ID NO: 1394492 - RNA, 19 nt, Artificial Sequence
  Description of Artificial Sequence: Synthetic oligonucleotide
  Sense strand starting at position 1931 of SEQ ID NO: 1243093
ggugauuggccacaccuga

SEQ ID NO: 1394493 - RNA, 19 nt, Artificial Sequence
  Description of Artificial Sequence: Synthetic oligonucleotide
  Antisense strand to SEQ ID NO: 1394492
ucagguguggccaaucacc

SEQ ID NO: 1394494 - RNA, 19 nt, Artificial Sequence
  Description of Artificial Sequence: Synthetic oligonucleotide
  Sense strand starting at position 2326 of SEQ ID NO: 1243093
cugauucucaggugcugaa

SEQ ID NO: 1394495 - RNA, 19 nt, Artificial Sequence
  Description of Artificial Sequence: Synthetic oligonucleotide
  Antisense strand to SEQ ID NO: 1394494
uucagcaccugagaaucag

SEQ ID NO: 1394496 - RNA, 19 nt, Artificial Sequence
  Description of Artificial Sequence: Synthetic oligonucleotide
  Sense strand starting at position 2612 of SEQ ID NO: 1243093
agcugucuucccuacgcau

SEQ ID NO: 1394497 - RNA, 19 nt, Artificial Sequence
  Description of Artificial Sequence: Synthetic oligonucleotide
  Antisense strand to SEQ ID NO: 1394496
augcguagggaagacagcu

SEQ ID NO: 1394498 - RNA, 19 nt, Artificial Sequence
  Description of Artificial Sequence: Synthetic oligonucleotide
  Sense strand starting at position 2720 of SEQ ID NO: 1243093
gcaugucgugagcucuuau

SEQ ID NO: 1394499 - RNA, 19 nt, Artificial Sequence
  Description of Artificial Sequence: Synthetic oligonucleotide
  Antisense strand to SEQ ID NO: 1394498
auaagagcucacgacaugc

SEQ ID NO: 1394500 - RNA, 19 nt, Artificial Sequence
  Description of Artificial Sequence: Synthetic oligonucleotide
  Sense strand starting at position 2749 of SEQ ID NO: 1243093
gaaucugccuccgcuauga

SEQ ID NO: 1394501 - RNA, 19 nt, Artificial Sequence
  Description of Artificial Sequence: Synthetic oligonucleotide
  Antisense strand to SEQ ID NO: 1394500
ucauagcggaggcagauuc

SEQ ID NO: 1394502 - RNA, 19 nt, Artificial Sequence
  Description of Artificial Sequence: Synthetic oligonucleotide
  Sense strand starting at position 2776 of SEQ ID NO: 1243093
aaagguuugugugcugaac

SEQ ID NO: 1394503 - RNA, 19 nt, Artificial Sequence
  Description of Artificial Sequence: Synthetic oligonucleotide
  Antisense strand to SEQ ID NO: 1394502
guucagcacacaaaccuuu

SEQ ID NO: 1394504 - RNA, 19 nt, Artificial Sequence
  Description of Artificial Sequence: Synthetic oligonucleotide
  Sense strand starting at position 2779 of SEQ ID NO: 1243093
gguuugugugcugaacgga

SEQ ID NO: 1394505 - RNA, 19 nt, Artificial Sequence
  Description of Artificial Sequence: Synthetic oligonucleotide
  Antisense strand to SEQ ID NO: 1394504
uccguucagcacacaaacc

SEQ ID NO: 1394506 - RNA, 19 nt, Artificial Sequence
  Description of Artificial Sequence: Synthetic oligonucleotide
  Sense strand starting at position 2846 of SEQ ID NO: 1243093
ucgugacucgcgguggaau

SEQ ID NO: 1394507 - RNA, 19 nt, Artificial Sequence
  Description of Artificial Sequence: Synthetic oligonucleotide
  Antisense strand to SEQ ID NO: 1394506
auuccaccgcgagucacga

SEQ ID NO: 1394508 - RNA, 19 nt, Artificial Sequence
  Description of Artificial Sequence: Synthetic oligonucleotide
  Sense strand starting at position 2901 of SEQ ID NO: 1243093
agguguaagcgucaacuua

SEQ ID NO: 1394509 - RNA, 19 nt, Artificial Sequence
  Description of Artificial Sequence: Synthetic oligonucleotide
  Antisense strand to SEQ ID NO: 1394508
uaaguugacgcuuacaccu

SEQ ID NO: 1394510 - RNA, 19 nt, Artificial Sequence
  Description of Artificial Sequence: Synthetic oligonucleotide
  Sense strand starting at position 3054 of SEQ ID NO: 1243093
cgggaacucacagguaaag

SEQ ID NO: 1394511 - RNA, 19 nt, Artificial Sequence
  Description of Artificial Sequence: Synthetic oligonucleotide
  Antisense strand to SEQ ID NO: 1394510
cuuuaccugugaguucccg

SEQ ID NO: 1394512 - RNA, 19 nt, Artificial Sequence
  Description of Artificial Sequence: Synthetic oligonucleotide
  Sense strand starting at position 3112 of SEQ ID NO: 1243093
acagcuuugcucugaagga

SEQ ID NO: 1394513 - RNA, 19 nt, Artificial Sequence
  Description of Artificial Sequence: Synthetic oligonucleotide
  Antisense strand to SEQ ID NO: 1394512
uccuucagagcaaagcugu

SEQ ID NO: 1394514 - RNA, 19 nt, Artificial Sequence
  Description of Artificial Sequence: Synthetic oligonucleotide
  Sense strand starting at position 192 of SEQ ID NO: 1243094
agagcaaacuucuguggua

SEQ ID NO: 1394515 - RNA, 19 nt, Artificial Sequence
  Description of Artificial Sequence: Synthetic oligonucleotide
  Antisense strand to SEQ ID NO: 1394514
uaccacagaaguuugcucu

SEQ ID NO: 1394516 - RNA, 19 nt, Artificial Sequence
  Description of Artificial Sequence: Synthetic oligonucleotide
  Sense strand starting at position 193 of SEQ ID NO: 1243094
gagcaaacuucugugguac

SEQ ID NO: 1394517 - RNA, 19 nt, Artificial Sequence
  Description of Artificial Sequence: Synthetic oligonucleotide
  Antisense strand to SEQ ID NO: 1394516
guaccacagaaguuugcuc

SEQ ID NO: 1394518 - RNA, 19 nt, Artificial Sequence
  Description of Artificial Sequence: Synthetic oligonucleotide
  Sense strand starting at position 381 of SEQ ID NO: 1243094
gugagcagagcuuagauca

SEQ ID NO: 1394519 - RNA, 19 nt, Artificial Sequence
  Description of Artificial Sequence: Synthetic oligonucleotide
  Antisense strand to SEQ ID NO: 1394518
ugaucuaagcucugcucac

SEQ ID NO: 1394520 - RNA, 19 nt, Artificial Sequence
  Description of Artificial Sequence: Synthetic oligonucleotide
  Sense strand starting at position 1453 of SEQ ID NO: 1243094
gggugaaaucugcguccag

SEQ ID NO: 1394521 - RNA, 19 nt, Artificial Sequence
  Description of Artificial Sequence: Synthetic oligonucleotide
  Antisense strand to SEQ ID NO: 1394520
cuggacgcagauuucaccc

SEQ ID NO: 1394522 - RNA, 19 nt, Artificial Sequence
  Description of Artificial Sequence: Synthetic oligonucleotide
  Sense strand starting at position 1455 of SEQ ID NO: 1243094
gugaaaucugcguccagcu

SEQ ID NO: 1394523 - RNA, 19 nt, Artificial Sequence
  Description of Artificial Sequence: Synthetic oligonucleotide
  Antisense strand to SEQ ID NO: 1394522
agcuggacgcagauuucac

SEQ ID NO: 1394524 - RNA, 19 nt, Artificial Sequence
  Description of Artificial Sequence: Synthetic oligonucleotide
  Sense strand starting at position 1457 of SEQ ID NO: 1243094
gaaaucugcguccagcuga

SEQ ID NO: 1394525 - RNA, 19 nt, Artificial Sequence
  Description of Artificial Sequence: Synthetic oligonucleotide
  Antisense strand to SEQ ID NO: 1394524
ucagcuggacgcagauuuc

SEQ ID NO: 1394526 - RNA, 19 nt, Artificial Sequence
  Description of Artificial Sequence: Synthetic oligonucleotide
  Sense strand starting at position 1570 of SEQ ID NO: 1243094
gagcucaaagguuguuacu

SEQ ID NO: 1394527 - RNA, 19 nt, Artificial Sequence
  Description of Artificial Sequence: Synthetic oligonucleotide
  Antisense strand to SEQ ID NO: 1394526
aguaacaaccuuugagcuc

SEQ ID NO: 1394528 - RNA, 19 nt, Artificial Sequence
  Description of Artificial Sequence: Synthetic oligonucleotide
  Sense strand starting at position 1572 of SEQ ID NO: 1243094
gcucaaagguuguuacuua

SEQ ID NO: 1394529 - RNA, 19 nt, Artificial Sequence
  Description of Artificial Sequence: Synthetic oligonucleotide
  Antisense strand to SEQ ID NO: 1394528
uaaguaacaaccuuugagc

SEQ ID NO: 1394530 - RNA, 19 nt, Artificial Sequence
  Description of Artificial Sequence: Synthetic oligonucleotide
  Sense strand starting at position 1576 of SEQ ID NO: 1243094
aaagguuguuacuuacaga

SEQ ID NO: 1394531 - RNA, 19 nt, Artificial Sequence
  Description of Artificial Sequence: Synthetic oligonucleotide
  Antisense strand to SEQ ID NO: 1394530
ucuguaaguaacaaccuuu

SEQ ID NO: 1394532 - RNA, 19 nt, Artificial Sequence
  Description of Artificial Sequence: Synthetic oligonucleotide
  Sense strand starting at position 1760 of SEQ ID NO: 1243094
ucuaaagggcgaugugaaa

SEQ ID NO: 1394533 - RNA, 19 nt, Artificial Sequence
  Description of Artificial Sequence: Synthetic oligonucleotide
  Antisense strand to SEQ ID NO: 1394532
uuucacaucgcccuuuaga

SEQ ID NO: 1394534 - RNA, 19 nt, Artificial Sequence
  Description of Artificial Sequence: Synthetic oligonucleotide
  Sense strand starting at position 1911 of SEQ ID NO: 1243094
ggguaacucugaugugcag

SEQ ID NO: 1394535 - RNA, 19 nt, Artificial Sequence
  Description of Artificial Sequence: Synthetic oligonucleotide
  Antisense strand to SEQ ID NO: 1394534
cugcacaucagaguuaccc

SEQ ID NO: 1394536 - RNA, 19 nt, Artificial Sequence
  Description of Artificial Sequence: Synthetic oligonucleotide
  Sense strand starting at position 1917 of SEQ ID NO: 1243094
cucugaugugcagggugau

SEQ ID NO: 1394537 - RNA, 19 nt, Artificial Sequence
  Description of Artificial Sequence: Synthetic oligonucleotide
  Antisense strand to SEQ ID NO: 1394536
aucacccugcacaucagag

SEQ ID NO: 1394538 - RNA, 19 nt, Artificial Sequence
  Description of Artificial Sequence: Synthetic oligonucleotide
  Sense strand starting at position 1918 of SEQ ID NO: 1243094
ucugaugugcagggugauu

SEQ ID NO: 1394539 - RNA, 19 nt, Artificial Sequence
  Description of Artificial Sequence: Synthetic oligonucleotide
  Antisense strand to SEQ ID NO: 1394538
aaucacccugcacaucaga

SEQ ID NO: 1394540 - RNA, 19 nt, Artificial Sequence
  Description of Artificial Sequence: Synthetic oligonucleotide
  Sense strand starting at position 1930 of SEQ ID NO: 1243094
ggugauuggccacaccuga

SEQ ID NO: 1394541 - RNA, 19 nt, Artificial Sequence
  Description of Artificial Sequence: Synthetic oligonucleotide
  Antisense strand to SEQ ID NO: 1394540
ucagguguggccaaucacc

SEQ ID NO: 1394542 - RNA, 19 nt, Artificial Sequence
  Description of Artificial Sequence: Synthetic oligonucleotide
  Sense strand starting at position 2325 of SEQ ID NO: 1243094
cugauucucaggugcugaa

SEQ ID NO: 1394543 - RNA, 19 nt, Artificial Sequence
  Description of Artificial Sequence: Synthetic oligonucleotide
  Antisense strand to SEQ ID NO: 1394542
uucagcaccugagaaucag

SEQ ID NO: 1394544 - RNA, 19 nt, Artificial Sequence
  Description of Artificial Sequence: Synthetic oligonucleotide
  Sense strand starting at position 2611 of SEQ ID NO: 1243094
agcugucuucccuacgcau

SEQ ID NO: 1394545 - RNA, 19 nt, Artificial Sequence
  Description of Artificial Sequence: Synthetic oligonucleotide
  Antisense strand to SEQ ID NO: 1394544
augcguagggaagacagcu

SEQ ID NO: 1394546 - RNA, 19 nt, Artificial Sequence
  Description of Artificial Sequence: Synthetic oligonucleotide
  Sense strand starting at position 2719 of SEQ ID NO: 1243094
gcaugucgugagcucuuau

SEQ ID NO: 1394547 - RNA, 19 nt, Artificial Sequence
  Description of Artificial Sequence: Synthetic oligonucleotide
  Antisense strand to SEQ ID NO: 1394546
auaagagcucacgacaugc

SEQ ID NO: 1394548 - RNA, 19 nt, Artificial Sequence
  Description of Artificial Sequence: Synthetic oligonucleotide
  Sense strand starting at position 2748 of SEQ ID NO: 1243094
gaaucugccuccgcuauga

SEQ ID NO: 1394549 - RNA, 19 nt, Artificial Sequence
  Description of Artificial Sequence: Synthetic oligonucleotide
  Antisense strand to SEQ ID NO: 1394548
ucauagcggaggcagauuc

SEQ ID NO: 1394550 - RNA, 19 nt, Artificial Sequence
  Description of Artificial Sequence: Synthetic oligonucleotide
  Sense strand starting at position 2775 of SEQ ID NO: 1243094
aaagguuugugugcugaac

SEQ ID NO: 1394551 - RNA, 19 nt, Artificial Sequence
  Description of Artificial Sequence: Synthetic oligonucleotide
  Antisense strand to SEQ ID NO: 1394550
guucagcacacaaaccuuu

SEQ ID NO: 1394552 - RNA, 19 nt, Artificial Sequence
  Description of Artificial Sequence: Synthetic oligonucleotide
  Sense strand starting at position 2778 of SEQ ID NO: 1243094
gguuugugugcugaacgga

SEQ ID NO: 1394553 - RNA, 19 nt, Artificial Sequence
  Description of Artificial Sequence: Synthetic oligonucleotide
  Antisense strand to SEQ ID NO: 1394552
uccguucagcacacaaacc

SEQ ID NO: 1394554 - RNA, 19 nt, Artificial Sequence
  Description of Artificial Sequence: Synthetic oligonucleotide
  Sense strand starting at position 2845 of SEQ ID NO: 1243094
ucgugacucgcgguggaau

SEQ ID NO: 1394555 - RNA, 19 nt, Artificial Sequence
  Description of Artificial Sequence: Synthetic oligonucleotide
  Antisense strand to SEQ ID NO: 1394554
auuccaccgcgagucacga

SEQ ID NO: 1394556 - RNA, 19 nt, Artificial Sequence
  Description of Artificial Sequence: Synthetic oligonucleotide
  Sense strand starting at position 2900 of SEQ ID NO: 1243094
agguguaagcgucaacuua

SEQ ID NO: 1394557 - RNA, 19 nt, Artificial Sequence
  Description of Artificial Sequence: Synthetic oligonucleotide
  Antisense strand to SEQ ID NO: 1394556
uaaguugacgcuuacaccu

SEQ ID NO: 1394558 - RNA, 19 nt, Artificial Sequence
  Description of Artificial Sequence: Synthetic oligonucleotide
  Sense strand starting at position 3053 of SEQ ID NO: 1243094
cgggaacucacagguaaag

SEQ ID NO: 1394559 - RNA, 19 nt, Artificial Sequence
  Description of Artificial Sequence: Synthetic oligonucleotide
  Antisense strand to SEQ ID NO: 1394558
cuuuaccugugaguucccg

SEQ ID NO: 1394560 - RNA, 19 nt, Artificial Sequence
  Description of Artificial Sequence: Synthetic oligonucleotide
  Sense strand starting at position 3111 of SEQ ID NO: 1243094
acagcuuugcucugaagga

SEQ ID NO: 1394561 - RNA, 19 nt, Artificial Sequence
  Description of Artificial Sequence: Synthetic oligonucleotide
  Antisense strand to SEQ ID NO: 1394560
uccuucagagcaaagcugu

SEQ ID NO: 1394562 - RNA, 19 nt, Artificial Sequence
  Description of Artificial Sequence: Synthetic oligonucleotide
  Sense strand starting at position 500 of SEQ ID NO: 1243095
agagcaaacuucuguggua

SEQ ID NO: 1394563 - RNA, 19 nt, Artificial Sequence
  Description of Artificial Sequence: Synthetic oligonucleotide
  Antisense strand to SEQ ID NO: 1394562
uaccacagaaguuugcucu

SEQ ID NO: 1394564 - RNA, 19 nt, Artificial Sequence
  Description of Artificial Sequence: Synthetic oligonucleotide
  Sense strand starting at position 501 of SEQ ID NO: 1243095
gagcaaacuucugugguac

SEQ ID NO: 1394565 - RNA, 19 nt, Artificial Sequence
  Description of Artificial Sequence: Synthetic oligonucleotide
  Antisense strand to SEQ ID NO: 1394564
guaccacagaaguuugcuc

SEQ ID NO: 1394566 - RNA, 19 nt, Artificial Sequence
  Description of Artificial Sequence: Synthetic oligonucleotide
  Sense strand starting at position 689 of SEQ ID NO: 1243095
gugagcagagcuuagauca

SEQ ID NO: 1394567 - RNA, 19 nt, Artificial Sequence
  Description of Artificial Sequence: Synthetic oligonucleotide
  Antisense strand to SEQ ID NO: 1394566
ugaucuaagcucugcucac

SEQ ID NO: 1394568 - RNA, 19 nt, Artificial Sequence
  Description of Artificial Sequence: Synthetic oligonucleotide
  Sense strand starting at position 1761 of SEQ ID NO: 1243095
gggugaaaucugcguccag

SEQ ID NO: 1394569 - RNA, 19 nt, Artificial Sequence
  Description of Artificial Sequence: Synthetic oligonucleotide
  Antisense strand to SEQ ID NO: 1394568
cuggacgcagauuucaccc

SEQ ID NO: 1394570 - RNA, 19 nt, Artificial Sequence
  Description of Artificial Sequence: Synthetic oligonucleotide
  Sense strand starting at position 1763 of SEQ ID NO: 1243095
gugaaaucugcguccagcu

SEQ ID NO: 1394571 - RNA, 19 nt, Artificial Sequence
  Description of Artificial Sequence: Synthetic oligonucleotide
  Antisense strand to SEQ ID NO: 1394570
agcuggacgcagauuucac

SEQ ID NO: 1394572 - RNA, 19 nt, Artificial Sequence
  Description of Artificial Sequence: Synthetic oligonucleotide
  Sense strand starting at position 1765 of SEQ ID NO: 1243095
gaaaucugcguccagcuga

SEQ ID NO: 1394573 - RNA, 19 nt, Artificial Sequence
  Description of Artificial Sequence: Synthetic oligonucleotide
  Antisense strand to SEQ ID NO: 1394572
ucagcuggacgcagauuuc

SEQ ID NO: 1394574 - RNA, 19 nt, Artificial Sequence
  Description of Artificial Sequence: Synthetic oligonucleotide
  Sense strand starting at position 1878 of SEQ ID NO: 1243095
gagcucaaagguuguuacu

SEQ ID NO: 1394575 - RNA, 19 nt, Artificial Sequence
  Description of Artificial Sequence: Synthetic oligonucleotide
  Antisense strand to SEQ ID NO: 1394574
aguaacaaccuuugagcuc

SEQ ID NO: 1394576 - RNA, 19 nt, Artificial Sequence
  Description of Artificial Sequence: Synthetic oligonucleotide
  Sense strand starting at position 1880 of SEQ ID NO: 1243095
gcucaaagguuguuacuua

SEQ ID NO: 1394577 - RNA, 19 nt, Artificial Sequence
  Description of Artificial Sequence: Synthetic oligonucleotide
  Antisense strand to SEQ ID NO: 1394576
uaaguaacaaccuuugagc

SEQ ID NO: 1394578 - RNA, 19 nt, Artificial Sequence
  Description of Artificial Sequence: Synthetic oligonucleotide
  Sense strand starting at position 1884 of SEQ ID NO: 1243095
aaagguuguuacuuacaga

SEQ ID NO: 1394579 - RNA, 19 nt, Artificial Sequence
  Description of Artificial Sequence: Synthetic oligonucleotide
  Antisense strand to SEQ ID NO: 1394578
ucuguaaguaacaaccuuu

SEQ ID NO: 1394580 - RNA, 19 nt, Artificial Sequence
  Description of Artificial Sequence: Synthetic oligonucleotide
  Sense strand starting at position 2068 of SEQ ID NO: 1243095
ucuaaagggcgaugugaaa

SEQ ID NO: 1394581 - RNA, 19 nt, Artificial Sequence
  Description of Artificial Sequence: Synthetic oligonucleotide
  Antisense strand to SEQ ID NO: 1394580
uuucacaucgcccuuuaga

SEQ ID NO: 1394582 - RNA, 19 nt, Artificial Sequence
  Description of Artificial Sequence: Synthetic oligonucleotide
  Sense strand starting at position 2219 of SEQ ID NO: 1243095
ggguaacucugaugugcag

SEQ ID NO: 1394583 - RNA, 19 nt, Artificial Sequence
  Description of Artificial Sequence: Synthetic oligonucleotide
  Antisense strand to SEQ ID NO: 1394582
cugcacaucagaguuaccc

SEQ ID NO: 1394584 - RNA, 19 nt, Artificial Sequence
  Description of Artificial Sequence: Synthetic oligonucleotide
  Sense strand starting at position 2225 of SEQ ID NO: 1243095
cucugaugugcagggugau

SEQ ID NO: 1394585 - RNA, 19 nt, Artificial Sequence
  Description of Artificial Sequence: Synthetic oligonucleotide
  Antisense strand to SEQ ID NO: 1394584
aucacccugcacaucagag

SEQ ID NO: 1394586 - RNA, 19 nt, Artificial Sequence
  Description of Artificial Sequence: Synthetic oligonucleotide
  Sense strand starting at position 2226 of SEQ ID NO: 1243095
ucugaugugcagggugauu

SEQ ID NO: 1394587 - RNA, 19 nt, Artificial Sequence
  Description of Artificial Sequence: Synthetic oligonucleotide
  Antisense strand to SEQ ID NO: 1394586
aaucacccugcacaucaga

SEQ ID NO: 1394588 - RNA, 19 nt, Artificial Sequence
  Description of Artificial Sequence: Synthetic oligonucleotide
  Sense strand starting at position 2238 of SEQ ID NO: 1243095
ggugauuggccacaccuga

SEQ ID NO: 1394589 - RNA, 19 nt, Artificial Sequence
  Description of Artificial Sequence: Synthetic oligonucleotide
  Antisense strand to SEQ ID NO: 1394588
ucagguguggccaaucacc

SEQ ID NO: 1394590 - RNA, 19 nt, Artificial Sequence
  Description of Artificial Sequence: Synthetic oligonucleotide
  Sense strand starting at position 2633 of SEQ ID NO: 1243095
cugauucucaggugcugaa

SEQ ID NO: 1394591 - RNA, 19 nt, Artificial Sequence
  Description of Artificial Sequence: Synthetic oligonucleotide
  Antisense strand to SEQ ID NO: 1394590
uucagcaccugagaaucag

SEQ ID NO: 1394592 - RNA, 19 nt, Artificial Sequence
  Description of Artificial Sequence: Synthetic oligonucleotide
  Sense strand starting at position 2919 of SEQ ID NO: 1243095
agcugucuucccuacgcau

SEQ ID NO: 1394593 - RNA, 19 nt, Artificial Sequence
  Description of Artificial Sequence: Synthetic oligonucleotide
  Antisense strand to SEQ ID NO: 1394592
augcguagggaagacagcu

SEQ ID NO: 1394594 - RNA, 19 nt, Artificial Sequence
  Description of Artificial Sequence: Synthetic oligonucleotide
  Sense strand starting at position 3027 of SEQ ID NO: 1243095
gcaugucgugagcucuuau

SEQ ID NO: 1394595 - RNA, 19 nt, Artificial Sequence
  Description of Artificial Sequence: Synthetic oligonucleotide
  Antisense strand to SEQ ID NO: 1394594
auaagagcucacgacaugc

SEQ ID NO: 1394596 - RNA, 19 nt, Artificial Sequence
  Description of Artificial Sequence: Synthetic oligonucleotide
  Sense strand starting at position 3056 of SEQ ID NO: 1243095
gaaucugccuccgcuauga

SEQ ID NO: 1394597 - RNA, 19 nt, Artificial Sequence
  Description of Artificial Sequence: Synthetic oligonucleotide
  Antisense strand to SEQ ID NO: 1394596
ucauagcggaggcagauuc

SEQ ID NO: 1394598 - RNA, 19 nt, Artificial Sequence
  Description of Artificial Sequence: Synthetic oligonucleotide
  Sense strand starting at position 3083 of SEQ ID NO: 1243095
aaagguuugugugcugaac

SEQ ID NO: 1394599 - RNA, 19 nt, Artificial Sequence
  Description of Artificial Sequence: Synthetic oligonucleotide
  Antisense strand to SEQ ID NO: 1394598
guucagcacacaaaccuuu

SEQ ID NO: 1394600 - RNA, 19 nt, Artificial Sequence
  Description of Artificial Sequence: Synthetic oligonucleotide
  Sense strand starting at position 3086 of SEQ ID NO: 1243095
gguuugugugcugaacgga

SEQ ID NO: 1394601 - RNA, 19 nt, Artificial Sequence
  Description of Artificial Sequence: Synthetic oligonucleotide
  Antisense strand to SEQ ID NO: 1394600
uccguucagcacacaaacc

SEQ ID NO: 1394602 - RNA, 19 nt, Artificial Sequence
  Description of Artificial Sequence: Synthetic oligonucleotide
  Sense strand starting at position 3153 of SEQ ID NO: 1243095
ucgugacucgcgguggaau

SEQ ID NO: 1394603 - RNA, 19 nt, Artificial Sequence
  Description of Artificial Sequence: Synthetic oligonucleotide
  Antisense strand to SEQ ID NO: 1394602
auuccaccgcgagucacga

SEQ ID NO: 1394604 - RNA, 19 nt, Artificial Sequence
  Description of Artificial Sequence: Synthetic oligonucleotide
  Sense strand starting at position 3208 of SEQ ID NO: 1243095
agguguaagcgucaacuua

SEQ ID NO: 1394605 - RNA, 19 nt, Artificial Sequence
  Description of Artificial Sequence: Synthetic oligonucleotide
  Antisense strand to SEQ ID NO: 1394604
uaaguugacgcuuacaccu

SEQ ID NO: 1394606 - RNA, 19 nt, Artificial Sequence
  Description of Artificial Sequence: Synthetic oligonucleotide
  Sense strand starting at position 3361 of SEQ ID NO: 1243095
cgggaacucacagguaaag

SEQ ID NO: 1394607 - RNA, 19 nt, Artificial Sequence
  Description of Artificial Sequence: Synthetic oligonucleotide
  Antisense strand to SEQ ID NO: 1394606
cuuuaccugugaguucccg

SEQ ID NO: 1394608 - RNA, 19 nt, Artificial Sequence
  Description of Artificial Sequence: Synthetic oligonucleotide
  Sense strand starting at position 3419 of SEQ ID NO: 1243095
acagcuuugcucugaagga

SEQ ID NO: 1394609 - RNA, 19 nt, Artificial Sequence
  Description of Artificial Sequence: Synthetic oligonucleotide
  Antisense strand to SEQ ID NO: 1394608
uccuucagagcaaagcugu

SEQ ID NO: 1394610 - RNA, 19 nt, Artificial Sequence
  Description of Artificial Sequence: Synthetic oligonucleotide
  Sense strand starting at position 2 of SEQ ID NO: 1243096
ccacgcugucggcgugaau

SEQ ID NO: 1394611 - RNA, 19 nt, Artificial Sequence
  Description of Artificial Sequence: Synthetic oligonucleotide
  Antisense strand to SEQ ID NO: 1394610
auucacgccgacagcgugg

SEQ ID NO: 1394612 - RNA, 19 nt, Artificial Sequence
  Description of Artificial Sequence: Synthetic oligonucleotide
  Sense strand starting at position 13 of SEQ ID NO: 1243096
gcgugaauggucucgguga

SEQ ID NO: 1394613 - RNA, 19 nt, Artificial Sequence
  Description of Artificial Sequence: Synthetic oligonucleotide
  Antisense strand to SEQ ID NO: 1394612
ucaccgagaccauucacgc

SEQ ID NO: 1394614 - RNA, 19 nt, Artificial Sequence
  Description of Artificial Sequence: Synthetic oligonucleotide
  Sense strand starting at position 14 of SEQ ID NO: 1243096
cgugaauggucucggugaa

SEQ ID NO: 1394615 - RNA, 19 nt, Artificial Sequence
  Description of Artificial Sequence: Synthetic oligonucleotide
  Antisense strand to SEQ ID NO: 1394614
uucaccgagaccauucacg

SEQ ID NO: 1394616 - RNA, 19 nt, Artificial Sequence
  Description of Artificial Sequence: Synthetic oligonucleotide
  Sense strand starting at position 15 of SEQ ID NO: 1243096
gugaauggucucggugaac

SEQ ID NO: 1394617 - RNA, 19 nt, Artificial Sequence
  Description of Artificial Sequence: Synthetic oligonucleotide
  Antisense strand to SEQ ID NO: 1394616
guucaccgagaccauucac

SEQ ID NO: 1394618 - RNA, 19 nt, Artificial Sequence
  Description of Artificial Sequence: Synthetic oligonucleotide
  Sense strand starting at position 127 of SEQ ID NO: 1243096
gaggcaaauguggagucau

SEQ ID NO: 1394619 - RNA, 19 nt, Artificial Sequence
  Description of Artificial Sequence: Synthetic oligonucleotide
  Antisense strand to SEQ ID NO: 1394618
augacuccacauuugccuc

SEQ ID NO: 1394620 - RNA, 19 nt, Artificial Sequence
  Description of Artificial Sequence: Synthetic oligonucleotide
  Sense strand starting at position 265 of SEQ ID NO: 1243096
ugcugagcucacguuuagu

SEQ ID NO: 1394621 - RNA, 19 nt, Artificial Sequence
  Description of Artificial Sequence: Synthetic oligonucleotide
  Antisense strand to SEQ ID NO: 1394620
acuaaacgugagcucagca

SEQ ID NO: 1394622 - RNA, 19 nt, Artificial Sequence
  Description of Artificial Sequence: Synthetic oligonucleotide
  Sense strand starting at position 268 of SEQ ID NO: 1243096
ugagcucacguuuaguaga

SEQ ID NO: 1394623 - RNA, 19 nt, Artificial Sequence
  Description of Artificial Sequence: Synthetic oligonucleotide
  Antisense strand to SEQ ID NO: 1394622
ucuacuaaacgugagcuca

SEQ ID NO: 1394624 - RNA, 19 nt, Artificial Sequence
  Description of Artificial Sequence: Synthetic oligonucleotide
  Sense strand starting at position 275 of SEQ ID NO: 1243096
acguuuaguagaugugcca

SEQ ID NO: 1394625 - RNA, 19 nt, Artificial Sequence
  Description of Artificial Sequence: Synthetic oligonucleotide
  Antisense strand to SEQ ID NO: 1394624
uggcacaucuacuaaacgu

SEQ ID NO: 1394626 - RNA, 19 nt, Artificial Sequence
  Description of Artificial Sequence: Synthetic oligonucleotide
  Sense strand starting at position 282 of SEQ ID NO: 1243096
guagaugugccagagacca

SEQ ID NO: 1394627 - RNA, 19 nt, Artificial Sequence
  Description of Artificial Sequence: Synthetic oligonucleotide
  Antisense strand to SEQ ID NO: 1394626
uggucucuggcacaucuac

SEQ ID NO: 1394628 - RNA, 19 nt, Artificial Sequence
  Description of Artificial Sequence: Synthetic oligonucleotide
  Sense strand starting at position 371 of SEQ ID NO: 1243096
uccaucuuugcuuggugau

SEQ ID NO: 1394629 - RNA, 19 nt, Artificial Sequence
  Description of Artificial Sequence: Synthetic oligonucleotide
  Antisense strand to SEQ ID NO: 1394628
aucaccaagcaaagaugga

SEQ ID NO: 1394630 - RNA, 19 nt, Artificial Sequence
  Description of Artificial Sequence: Synthetic oligonucleotide
  Sense strand starting at position 372 of SEQ ID NO: 1243096
ccaucuuugcuuggugaug

SEQ ID NO: 1394631 - RNA, 19 nt, Artificial Sequence
  Description of Artificial Sequence: Synthetic oligonucleotide
  Antisense strand to SEQ ID NO: 1394630
caucaccaagcaaagaugg

SEQ ID NO: 1394632 - RNA, 19 nt, Artificial Sequence
  Description of Artificial Sequence: Synthetic oligonucleotide
  Sense strand starting at position 374 of SEQ ID NO: 1243096
aucuuugcuuggugaugca

SEQ ID NO: 1394633 - RNA, 19 nt, Artificial Sequence
  Description of Artificial Sequence: Synthetic oligonucleotide
  Antisense strand to SEQ ID NO: 1394632
ugcaucaccaagcaaagau

SEQ ID NO: 1394634 - RNA, 19 nt, Artificial Sequence
  Description of Artificial Sequence: Synthetic oligonucleotide
  Sense strand starting at position 430 of SEQ ID NO: 1243096
uggguaguccaaugaggac

SEQ ID NO: 1394635 - RNA, 19 nt, Artificial Sequence
  Description of Artificial Sequence: Synthetic oligonucleotide
  Antisense strand to SEQ ID NO: 1394634
guccucauuggacuaccca

SEQ ID NO: 1394636 - RNA, 19 nt, Artificial Sequence
  Description of Artificial Sequence: Synthetic oligonucleotide
  Sense strand starting at position 612 of SEQ ID NO: 1243096
agagaacagucccagagaa

SEQ ID NO: 1394637 - RNA, 19 nt, Artificial Sequence
  Description of Artificial Sequence: Synthetic oligonucleotide
  Antisense strand to SEQ ID NO: 1394636
uucucugggacuguucucu

SEQ ID NO: 1394638 - RNA, 19 nt, Artificial Sequence
  Description of Artificial Sequence: Synthetic oligonucleotide
  Sense strand starting at position 700 of SEQ ID NO: 1243096
aaaggaucccuuuggagug

SEQ ID NO: 1394639 - RNA, 19 nt, Artificial Sequence
  Description of Artificial Sequence: Synthetic oligonucleotide
  Antisense strand to SEQ ID NO: 1394638
cacuccaaagggauccuuu

SEQ ID NO: 1394640 - RNA, 19 nt, Artificial Sequence
  Description of Artificial Sequence: Synthetic oligonucleotide
  Sense strand starting at position 908 of SEQ ID NO: 1243096
uggaguuucuggcuuggca

SEQ ID NO: 1394641 - RNA, 19 nt, Artificial Sequence
  Description of Artificial Sequence: Synthetic oligonucleotide
  Antisense strand to SEQ ID NO: 1394640
ugccaagccagaaacucca

SEQ ID NO: 1394642 - RNA, 19 nt, Artificial Sequence
  Description of Artificial Sequence: Synthetic oligonucleotide
  Sense strand starting at position 910 of SEQ ID NO: 1243096
gaguuucuggcuuggcaga

SEQ ID NO: 1394643 - RNA, 19 nt, Artificial Sequence
  Description of Artificial Sequence: Synthetic oligonucleotide
  Antisense strand to SEQ ID NO: 1394642
ucugccaagccagaaacuc

SEQ ID NO: 1394644 - RNA, 19 nt, Artificial Sequence
  Description of Artificial Sequence: Synthetic oligonucleotide
  Sense strand starting at position 936 of SEQ ID NO: 1243096
gaggacaacugggaucuaa

SEQ ID NO: 1394645 - RNA, 19 nt, Artificial Sequence
  Description of Artificial Sequence: Synthetic oligonucleotide
  Antisense strand to SEQ ID NO: 1394644
uuagaucccaguuguccuc

SEQ ID NO: 1394646 - RNA, 19 nt, Artificial Sequence
  Description of Artificial Sequence: Synthetic oligonucleotide
  Sense strand starting at position 985 of SEQ ID NO: 1243096
ccgggaugguccuguguca

SEQ ID NO: 1394647 - RNA, 19 nt, Artificial Sequence
  Description of Artificial Sequence: Synthetic oligonucleotide
  Antisense strand to SEQ ID NO: 1394646
ugacacaggaccaucccgg

SEQ ID NO: 1394648 - RNA, 19 nt, Artificial Sequence
  Description of Artificial Sequence: Synthetic oligonucleotide
  Sense strand starting at position 1061 of SEQ ID NO: 1243096
cucagacuugccuguggau

SEQ ID NO: 1394649 - RNA, 19 nt, Artificial Sequence
  Description of Artificial Sequence: Synthetic oligonucleotide
  Antisense strand to SEQ ID NO: 1394648
auccacaggcaagucugag

SEQ ID NO: 1394650 - RNA, 19 nt, Artificial Sequence
  Description of Artificial Sequence: Synthetic oligonucleotide
  Sense strand starting at position 1126 of SEQ ID NO: 1243096
gggauucaucagggccagu

SEQ ID NO: 1394651 - RNA, 19 nt, Artificial Sequence
  Description of Artificial Sequence: Synthetic oligonucleotide
  Antisense strand to SEQ ID NO: 1394650
acuggcccugaugaauccc

SEQ ID NO: 1394652 - RNA, 19 nt, Artificial Sequence
  Description of Artificial Sequence: Synthetic oligonucleotide
  Sense strand starting at position 1302 of SEQ ID NO: 1243096
acauucuaugcuugccaga

SEQ ID NO: 1394653 - RNA, 19 nt, Artificial Sequence
  Description of Artificial Sequence: Synthetic oligonucleotide
  Antisense strand to SEQ ID NO: 1394652
ucuggcaagcauagaaugu

SEQ ID NO: 1394654 - RNA, 19 nt, Artificial Sequence
  Description of Artificial Sequence: Synthetic oligonucleotide
  Sense strand starting at position 1304 of SEQ ID NO: 1243096
auucuaugcuugccagacu

SEQ ID NO: 1394655 - RNA, 19 nt, Artificial Sequence
  Description of Artificial Sequence: Synthetic oligonucleotide
  Antisense strand to SEQ ID NO: 1394654
agucuggcaagcauagaau

SEQ ID NO: 1394656 - RNA, 19 nt, Artificial Sequence
  Description of Artificial Sequence: Synthetic oligonucleotide
  Sense strand starting at position 1316 of SEQ ID NO: 1243096
ccagacuccucccagagau

SEQ ID NO: 1394657 - RNA, 19 nt, Artificial Sequence
  Description of Artificial Sequence: Synthetic oligonucleotide
  Antisense strand to SEQ ID NO: 1394656
aucucugggaggagucugg

SEQ ID NO: 1394658 - RNA, 19 nt, Artificial Sequence
  Description of Artificial Sequence: Synthetic oligonucleotide
  Sense strand starting at position 1473 of SEQ ID NO: 1243096
gccaucacuuuggagugua

SEQ ID NO: 1394659 - RNA, 19 nt, Artificial Sequence
  Description of Artificial Sequence: Synthetic oligonucleotide
  Antisense strand to SEQ ID NO: 1394658
uacacuccaaagugauggc

SEQ ID NO: 1394660 - RNA, 19 nt, Artificial Sequence
  Description of Artificial Sequence: Synthetic oligonucleotide
  Sense strand starting at position 1811 of SEQ ID NO: 1243096
gguucaaagugauucugga

SEQ ID NO: 1394661 - RNA, 19 nt, Artificial Sequence
  Description of Artificial Sequence: Synthetic oligonucleotide
  Antisense strand to SEQ ID NO: 1394660
uccagaaucacuuugaacc

SEQ ID NO: 1394662 - RNA, 19 nt, Artificial Sequence
  Description of Artificial Sequence: Synthetic oligonucleotide
  Sense strand starting at position 2297 of SEQ ID NO: 1243096
aguccagucccugguacua

SEQ ID NO: 1394663 - RNA, 19 nt, Artificial Sequence
  Description of Artificial Sequence: Synthetic oligonucleotide
  Antisense strand to SEQ ID NO: 1394662
uaguaccagggacuggacu

SEQ ID NO: 1394664 - RNA, 19 nt, Artificial Sequence
  Description of Artificial Sequence: Synthetic oligonucleotide
  Sense strand starting at position 2911 of SEQ ID NO: 1243096
gccacaauauugggaauua

SEQ ID NO: 1394665 - RNA, 19 nt, Artificial Sequence
  Description of Artificial Sequence: Synthetic oligonucleotide
  Antisense strand to SEQ ID NO: 1394664
uaauucccaauauuguggc

SEQ ID NO: 1394666 - RNA, 19 nt, Artificial Sequence
  Description of Artificial Sequence: Synthetic oligonucleotide
  Sense strand starting at position 2912 of SEQ ID NO: 1243096
ccacaauauugggaauuau

SEQ ID NO: 1394667 - RNA, 19 nt, Artificial Sequence
  Description of Artificial Sequence: Synthetic oligonucleotide
  Antisense strand to SEQ ID NO: 1394666
auaauucccaauauugugg

SEQ ID NO: 1394668 - RNA, 19 nt, Artificial Sequence
  Description of Artificial Sequence: Synthetic oligonucleotide
  Sense strand starting at position 2930 of SEQ ID NO: 1243096
ugguuuaggagucgugcau

SEQ ID NO: 1394669 - RNA, 19 nt, Artificial Sequence
  Description of Artificial Sequence: Synthetic oligonucleotide
  Antisense strand to SEQ ID NO: 1394668
augcacgacuccuaaacca

SEQ ID NO: 1394670 - RNA, 19 nt, Artificial Sequence
  Description of Artificial Sequence: Synthetic oligonucleotide
  Sense strand starting at position 3117 of SEQ ID NO: 1243096
gcugacucccugugauuuc

SEQ ID NO: 1394671 - RNA, 19 nt, Artificial Sequence
  Description of Artificial Sequence: Synthetic oligonucleotide
  Antisense strand to SEQ ID NO: 1394670
gaaaucacagggagucagc

SEQ ID NO: 1394672 - RNA, 19 nt, Artificial Sequence
  Description of Artificial Sequence: Synthetic oligonucleotide
  Sense strand starting at position 3386 of SEQ ID NO: 1243096
gucuuaaugaaucggcuuu

SEQ ID NO: 1394673 - RNA, 19 nt, Artificial Sequence
  Description of Artificial Sequence: Synthetic oligonucleotide
  Antisense strand to SEQ ID NO: 1394672
aaagccgauucauuaagac

SEQ ID NO: 1394674 - RNA, 19 nt, Artificial Sequence
  Description of Artificial Sequence: Synthetic oligonucleotide
  Sense strand starting at position 3565 of SEQ ID NO: 1243096
cggcguuuccuucuccaga

SEQ ID NO: 1394675 - RNA, 19 nt, Artificial Sequence
  Description of Artificial Sequence: Synthetic oligonucleotide
  Antisense strand to SEQ ID NO: 1394674
ucuggagaaggaaacgccg

SEQ ID NO: 1394676 - RNA, 19 nt, Artificial Sequence
  Description of Artificial Sequence: Synthetic oligonucleotide
  Sense strand starting at position 3566 of SEQ ID NO: 1243096
ggcguuuccuucuccagau

SEQ ID NO: 1394677 - RNA, 19 nt, Artificial Sequence
  Description of Artificial Sequence: Synthetic oligonucleotide
  Antisense strand to SEQ ID NO: 1394676
aucuggagaaggaaacgcc

SEQ ID NO: 1394678 - RNA, 19 nt, Artificial Sequence
  Description of Artificial Sequence: Synthetic oligonucleotide
  Sense strand starting at position 3567 of SEQ ID NO: 1243096
gcguuuccuucuccagaug

SEQ ID NO: 1394679 - RNA, 19 nt, Artificial Sequence
  Description of Artificial Sequence: Synthetic oligonucleotide
  Antisense strand to SEQ ID NO: 1394678
caucuggagaaggaaacgc

SEQ ID NO: 1394680 - RNA, 19 nt, Artificial Sequence
  Description of Artificial Sequence: Synthetic oligonucleotide
  Sense strand starting at position 3631 of SEQ ID NO: 1243096
uagucacucuggccagaaa

SEQ ID NO: 1394681 - RNA, 19 nt, Artificial Sequence
  Description of Artificial Sequence: Synthetic oligonucleotide
  Antisense strand to SEQ ID NO: 1394680
uuucuggccagagugacua

SEQ ID NO: 1394682 - RNA, 19 nt, Artificial Sequence
  Description of Artificial Sequence: Synthetic oligonucleotide
  Sense strand starting at position 3741 of SEQ ID NO: 1243096
aucagugcccagggauaga

SEQ ID NO: 1394683 - RNA, 19 nt, Artificial Sequence
  Description of Artificial Sequence: Synthetic oligonucleotide
  Antisense strand to SEQ ID NO: 1394682
ucuaucccugggcacugau

SEQ ID NO: 1394684 - RNA, 19 nt, Artificial Sequence
  Description of Artificial Sequence: Synthetic oligonucleotide
  Sense strand starting at position 3956 of SEQ ID NO: 1243096
guaggcugaaucuggagaa

SEQ ID NO: 1394685 - RNA, 19 nt, Artificial Sequence
  Description of Artificial Sequence: Synthetic oligonucleotide
  Antisense strand to SEQ ID NO: 1394684
uucuccagauucagccuac

SEQ ID NO: 1394686 - RNA, 19 nt, Artificial Sequence
  Description of Artificial Sequence: Synthetic oligonucleotide
  Sense strand starting at position 3957 of SEQ ID NO: 1243096
uaggcugaaucuggagaau

SEQ ID NO: 1394687 - RNA, 19 nt, Artificial Sequence
  Description of Artificial Sequence: Synthetic oligonucleotide
  Antisense strand to SEQ ID NO: 1394686
auucuccagauucagccua

SEQ ID NO: 1394688 - RNA, 19 nt, Artificial Sequence
  Description of Artificial Sequence: Synthetic oligonucleotide
  Sense strand starting at position 143 of SEQ ID NO: 1243097
gaaggugugugacccacau

SEQ ID NO: 1394689 - RNA, 19 nt, Artificial Sequence
  Description of Artificial Sequence: Synthetic oligonucleotide
  Antisense strand to SEQ ID NO: 1394688
augugggucacacaccuuc

SEQ ID NO: 1394690 - RNA, 19 nt, Artificial Sequence
  Description of Artificial Sequence: Synthetic oligonucleotide
  Sense strand starting at position 337 of SEQ ID NO: 1243097
aaagcuuaagucugugaca

SEQ ID NO: 1394691 - RNA, 19 nt, Artificial Sequence
  Description of Artificial Sequence: Synthetic oligonucleotide
  Antisense strand to SEQ ID NO: 1394690
ugucacagacuuaagcuuu

SEQ ID NO: 1394692 - RNA, 19 nt, Artificial Sequence
  Description of Artificial Sequence: Synthetic oligonucleotide
  Sense strand starting at position 339 of SEQ ID NO: 1243097
agcuuaagucugugacaga

SEQ ID NO: 1394693 - RNA, 19 nt, Artificial Sequence
  Description of Artificial Sequence: Synthetic oligonucleotide
  Antisense strand to SEQ ID NO: 1394692
ucugucacagacuuaagcu

SEQ ID NO: 1394694 - RNA, 19 nt, Artificial Sequence
  Description of Artificial Sequence: Synthetic oligonucleotide
  Sense strand starting at position 365 of SEQ ID NO: 1243097
ggcauuauaucaucuguca

SEQ ID NO: 1394695 - RNA, 19 nt, Artificial Sequence
  Description of Artificial Sequence: Synthetic oligonucleotide
  Antisense strand to SEQ ID NO: 1394694
ugacagaugauauaaugcc

SEQ ID NO: 1394696 - RNA, 19 nt, Artificial Sequence
  Description of Artificial Sequence: Synthetic oligonucleotide
  Sense strand starting at position 445 of SEQ ID NO: 1243097
gcacucaguguguaagaua

SEQ ID NO: 1394697 - RNA, 19 nt, Artificial Sequence
  Description of Artificial Sequence: Synthetic oligonucleotide
  Antisense strand to SEQ ID NO: 1394696
uaucuuacacacugagugc

SEQ ID NO: 1394698 - RNA, 19 nt, Artificial Sequence
  Description of Artificial Sequence: Synthetic oligonucleotide
  Sense strand starting at position 576 of SEQ ID NO: 1243097
agcauuaagucagcaacuu

SEQ ID NO: 1394699 - RNA, 19 nt, Artificial Sequence
  Description of Artificial Sequence: Synthetic oligonucleotide
  Antisense strand to SEQ ID NO: 1394698
aaguugcugacuuaaugcu

SEQ ID NO: 1394700 - RNA, 19 nt, Artificial Sequence
  Description of Artificial Sequence: Synthetic oligonucleotide
  Sense strand starting at position 577 of SEQ ID NO: 1243097
gcauuaagucagcaacuuu

SEQ ID NO: 1394701 - RNA, 19 nt, Artificial Sequence
  Description of Artificial Sequence: Synthetic oligonucleotide
  Antisense strand to SEQ ID NO: 1394700
aaaguugcugacuuaaugc

SEQ ID NO: 1394702 - RNA, 19 nt, Artificial Sequence
  Description of Artificial Sequence: Synthetic oligonucleotide
  Sense strand starting at position 945 of SEQ ID NO: 1243097
gagauaagugguggaucuu

SEQ ID NO: 1394703 - RNA, 19 nt, Artificial Sequence
  Description of Artificial Sequence: Synthetic oligonucleotide
  Antisense strand to SEQ ID NO: 1394702
aagauccaccacuuaucuc

SEQ ID NO: 1394704 - RNA, 19 nt, Artificial Sequence
  Description of Artificial Sequence: Synthetic oligonucleotide
  Sense strand starting at position 946 of SEQ ID NO: 1243097
agauaagugguggaucuuu

SEQ ID NO: 1394705 - RNA, 19 nt, Artificial Sequence
  Description of Artificial Sequence: Synthetic oligonucleotide
  Antisense strand to SEQ ID NO: 1394704
aaagauccaccacuuaucu

SEQ ID NO: 1394706 - RNA, 19 nt, Artificial Sequence
  Description of Artificial Sequence: Synthetic oligonucleotide
  Sense strand starting at position 957 of SEQ ID NO: 1243097
ggaucuuucgagugagggu

SEQ ID NO: 1394707 - RNA, 19 nt, Artificial Sequence
  Description of Artificial Sequence: Synthetic oligonucleotide
  Antisense strand to SEQ ID NO: 1394706
acccucacucgaaagaucc

SEQ ID NO: 1394708 - RNA, 19 nt, Artificial Sequence
  Description of Artificial Sequence: Synthetic oligonucleotide
  Sense strand starting at position 966 of SEQ ID NO: 1243097
gagugagggucuucuguga

SEQ ID NO: 1394709 - RNA, 19 nt, Artificial Sequence
  Description of Artificial Sequence: Synthetic oligonucleotide
  Antisense strand to SEQ ID NO: 1394708
ucacagaagacccucacuc

SEQ ID NO: 1394710 - RNA, 19 nt, Artificial Sequence
  Description of Artificial Sequence: Synthetic oligonucleotide
  Sense strand starting at position 1092 of SEQ ID NO: 1243097
ggaggaaaguccuuaggug

SEQ ID NO: 1394711 - RNA, 19 nt, Artificial Sequence
  Description of Artificial Sequence: Synthetic oligonucleotide
  Antisense strand to SEQ ID NO: 1394710
caccuaaggacuuuccucc

SEQ ID NO: 1394712 - RNA, 19 nt, Artificial Sequence
  Description of Artificial Sequence: Synthetic oligonucleotide
  Sense strand starting at position 1093 of SEQ ID NO: 1243097
gaggaaaguccuuaggugu

SEQ ID NO: 1394713 - RNA, 19 nt, Artificial Sequence
  Description of Artificial Sequence: Synthetic oligonucleotide
  Antisense strand to SEQ ID NO: 1394712
acaccuaaggacuuuccuc

SEQ ID NO: 1394714 - RNA, 19 nt, Artificial Sequence
  Description of Artificial Sequence: Synthetic oligonucleotide
  Sense strand starting at position 1096 of SEQ ID NO: 1243097
gaaaguccuuaggugucau

SEQ ID NO: 1394715 - RNA, 19 nt, Artificial Sequence
  Description of Artificial Sequence: Synthetic oligonucleotide
  Antisense strand to SEQ ID NO: 1394714
augacaccuaaggacuuuc

SEQ ID NO: 1394716 - RNA, 19 nt, Artificial Sequence
  Description of Artificial Sequence: Synthetic oligonucleotide
  Sense strand starting at position 1181 of SEQ ID NO: 1243097
auccaucacgucuaaagau

SEQ ID NO: 1394717 - RNA, 19 nt, Artificial Sequence
  Description of Artificial Sequence: Synthetic oligonucleotide
  Antisense strand to SEQ ID NO: 1394716
aucuuuagacgugauggau

SEQ ID NO: 1394718 - RNA, 19 nt, Artificial Sequence
  Description of Artificial Sequence: Synthetic oligonucleotide
  Sense strand starting at position 1202 of SEQ ID NO: 1243097
ggcucugauccugaaucag

SEQ ID NO: 1394719 - RNA, 19 nt, Artificial Sequence
  Description of Artificial Sequence: Synthetic oligonucleotide
  Antisense strand to SEQ ID NO: 1394718
cugauucaggaucagagcc

SEQ ID NO: 1394720 - RNA, 19 nt, Artificial Sequence
  Description of Artificial Sequence: Synthetic oligonucleotide
  Sense strand starting at position 1247 of SEQ ID NO: 1243097
ggaucauuggccuacuccu

SEQ ID NO: 1394721 - RNA, 19 nt, Artificial Sequence
  Description of Artificial Sequence: Synthetic oligonucleotide
  Antisense strand to SEQ ID NO: 1394720
aggaguaggccaaugaucc

SEQ ID NO: 1394722 - RNA, 19 nt, Artificial Sequence
  Description of Artificial Sequence: Synthetic oligonucleotide
  Sense strand starting at position 1447 of SEQ ID NO: 1243097
acagcaguuggucaacaaa

SEQ ID NO: 1394723 - RNA, 19 nt, Artificial Sequence
  Description of Artificial Sequence: Synthetic oligonucleotide
  Antisense strand to SEQ ID NO: 1394722
uuuguugaccaacugcugu

SEQ ID NO: 1394724 - RNA, 19 nt, Artificial Sequence
  Description of Artificial Sequence: Synthetic oligonucleotide
  Sense strand starting at position 1482 of SEQ ID NO: 1243097
cauugccaggccugauaga

SEQ ID NO: 1394725 - RNA, 19 nt, Artificial Sequence
  Description of Artificial Sequence: Synthetic oligonucleotide
  Antisense strand to SEQ ID NO: 1394724
ucuaucaggccuggcaaug

SEQ ID NO: 1394726 - RNA, 19 nt, Artificial Sequence
  Description of Artificial Sequence: Synthetic oligonucleotide
  Sense strand starting at position 1483 of SEQ ID NO: 1243097
auugccaggccugauagau

SEQ ID NO: 1394727 - RNA, 19 nt, Artificial Sequence
  Description of Artificial Sequence: Synthetic oligonucleotide
  Antisense strand to SEQ ID NO: 1394726
aucuaucaggccuggcaau

SEQ ID NO: 1394728 - RNA, 19 nt, Artificial Sequence
  Description of Artificial Sequence: Synthetic oligonucleotide
  Sense strand starting at position 1537 of SEQ ID NO: 1243097
ucuuacuucuaucuguaga

SEQ ID NO: 1394729 - RNA, 19 nt, Artificial Sequence
  Description of Artificial Sequence: Synthetic oligonucleotide
  Antisense strand to SEQ ID NO: 1394728
ucuacagauagaaguaaga

SEQ ID NO: 1394730 - RNA, 19 nt, Artificial Sequence
  Description of Artificial Sequence: Synthetic oligonucleotide
  Sense strand starting at position 1542 of SEQ ID NO: 1243097
cuucuaucuguagaggcua

SEQ ID NO: 1394731 - RNA, 19 nt, Artificial Sequence
  Description of Artificial Sequence: Synthetic oligonucleotide
  Antisense strand to SEQ ID NO: 1394730
uagccucuacagauagaag

SEQ ID NO: 1394732 - RNA, 19 nt, Artificial Sequence
  Description of Artificial Sequence: Synthetic oligonucleotide
  Sense strand starting at position 1713 of SEQ ID NO: 1243097
ucugaaaugggaggcauua

SEQ ID NO: 1394733 - RNA, 19 nt, Artificial Sequence
  Description of Artificial Sequence: Synthetic oligonucleotide
  Antisense strand to SEQ ID NO: 1394732
uaaugccucccauuucaga

SEQ ID NO: 1394734 - RNA, 19 nt, Artificial Sequence
  Description of Artificial Sequence: Synthetic oligonucleotide
  Sense strand starting at position 1725 of SEQ ID NO: 1243097
ggcauuagaauaggaaugu

SEQ ID NO: 1394735 - RNA, 19 nt, Artificial Sequence
  Description of Artificial Sequence: Synthetic oligonucleotide
  Antisense strand to SEQ ID NO: 1394734
acauuccuauucuaaugcc

SEQ ID NO: 1394736 - RNA, 19 nt, Artificial Sequence
  Description of Artificial Sequence: Synthetic oligonucleotide
  Sense strand starting at position 1729 of SEQ ID NO: 1243097
uuagaauaggaauguucua

SEQ ID NO: 1394737 - RNA, 19 nt, Artificial Sequence
  Description of Artificial Sequence: Synthetic oligonucleotide
  Antisense strand to SEQ ID NO: 1394736
uagaacauuccuauucuaa

SEQ ID NO: 1394738 - RNA, 19 nt, Artificial Sequence
  Description of Artificial Sequence: Synthetic oligonucleotide
  Sense strand starting at position 1826 of SEQ ID NO: 1243097
ccucuacuccuagggacau

SEQ ID NO: 1394739 - RNA, 19 nt, Artificial Sequence
  Description of Artificial Sequence: Synthetic oligonucleotide
  Antisense strand to SEQ ID NO: 1394738
augucccuaggaguagagg

SEQ ID NO: 1394740 - RNA, 19 nt, Artificial Sequence
  Description of Artificial Sequence: Synthetic oligonucleotide
  Sense strand starting at position 2671 of SEQ ID NO: 1243097
agguccuccuuugcaaaua

SEQ ID NO: 1394741 - RNA, 19 nt, Artificial Sequence
  Description of Artificial Sequence: Synthetic oligonucleotide
  Antisense strand to SEQ ID NO: 1394740
uauuugcaaaggaggaccu

SEQ ID NO: 1394742 - RNA, 19 nt, Artificial Sequence
  Description of Artificial Sequence: Synthetic oligonucleotide
  Sense strand starting at position 2738 of SEQ ID NO: 1243097
caguucuggacauguggga

SEQ ID NO: 1394743 - RNA, 19 nt, Artificial Sequence
  Description of Artificial Sequence: Synthetic oligonucleotide
  Antisense strand to SEQ ID NO: 1394742
ucccacauguccagaacug

SEQ ID NO: 1394744 - RNA, 19 nt, Artificial Sequence
  Description of Artificial Sequence: Synthetic oligonucleotide
  Sense strand starting at position 3077 of SEQ ID NO: 1243097
cacucuuuaccaugggaug

SEQ ID NO: 1394745 - RNA, 19 nt, Artificial Sequence
  Description of Artificial Sequence: Synthetic oligonucleotide
  Antisense strand to SEQ ID NO: 1394744
caucccaugguaaagagug

SEQ ID NO: 1394746 - RNA, 19 nt, Artificial Sequence
  Description of Artificial Sequence: Synthetic oligonucleotide
  Sense strand starting at position 3095 of SEQ ID NO: 1243097
ggcaccaagucauucuuua

SEQ ID NO: 1394747 - RNA, 19 nt, Artificial Sequence
  Description of Artificial Sequence: Synthetic oligonucleotide
  Antisense strand to SEQ ID NO: 1394746
uaaagaaugacuuggugcc

SEQ ID NO: 1394748 - RNA, 19 nt, Artificial Sequence
  Description of Artificial Sequence: Synthetic oligonucleotide
  Sense strand starting at position 3099 of SEQ ID NO: 1243097
ccaagucauucuuuaggga

SEQ ID NO: 1394749 - RNA, 19 nt, Artificial Sequence
  Description of Artificial Sequence: Synthetic oligonucleotide
  Antisense strand to SEQ ID NO: 1394748
ucccuaaagaaugacuugg

SEQ ID NO: 1394750 - RNA, 19 nt, Artificial Sequence
  Description of Artificial Sequence: Synthetic oligonucleotide
  Sense strand starting at position 3104 of SEQ ID NO: 1243097
ucauucuuuagggaugugu

SEQ ID NO: 1394751 - RNA, 19 nt, Artificial Sequence
  Description of Artificial Sequence: Synthetic oligonucleotide
  Antisense strand to SEQ ID NO: 1394750
acacaucccuaaagaauga

SEQ ID NO: 1394752 - RNA, 19 nt, Artificial Sequence
  Description of Artificial Sequence: Synthetic oligonucleotide
  Sense strand starting at position 3113 of SEQ ID NO: 1243097
agggauguguccucaugac

SEQ ID NO: 1394753 - RNA, 19 nt, Artificial Sequence
  Description of Artificial Sequence: Synthetic oligonucleotide
  Antisense strand to SEQ ID NO: 1394752
gucaugaggacacaucccu

SEQ ID NO: 1394754 - RNA, 19 nt, Artificial Sequence
  Description of Artificial Sequence: Synthetic oligonucleotide
  Sense strand starting at position 3340 of SEQ ID NO: 1243097
gaaguuucugugccacguu

SEQ ID NO: 1394755 - RNA, 19 nt, Artificial Sequence
  Description of Artificial Sequence: Synthetic oligonucleotide
  Antisense strand to SEQ ID NO: 1394754
aacguggcacagaaacuuc

SEQ ID NO: 1394756 - RNA, 19 nt, Artificial Sequence
  Description of Artificial Sequence: Synthetic oligonucleotide
  Sense strand starting at position 3368 of SEQ ID NO: 1243097
acuggaagcgaucauguau

SEQ ID NO: 1394757 - RNA, 19 nt, Artificial Sequence
  Description of Artificial Sequence: Synthetic oligonucleotide
  Antisense strand to SEQ ID NO: 1394756
auacaugaucgcuuccagu

SEQ ID NO: 1394758 - RNA, 19 nt, Artificial Sequence
  Description of Artificial Sequence: Synthetic oligonucleotide
  Sense strand starting at position 3394 of SEQ ID NO: 1243097
acccauaugguguggcaaa

SEQ ID NO: 1394759 - RNA, 19 nt, Artificial Sequence
  Description of Artificial Sequence: Synthetic oligonucleotide
  Antisense strand to SEQ ID NO: 1394758
uuugccacaccauaugggu

SEQ ID NO: 1394760 - RNA, 19 nt, Artificial Sequence
  Description of Artificial Sequence: Synthetic oligonucleotide
  Sense strand starting at position 3407 of SEQ ID NO: 1243097
ggcaaagugcaguaccauu

SEQ ID NO: 1394761 - RNA, 19 nt, Artificial Sequence
  Description of Artificial Sequence: Synthetic oligonucleotide
  Antisense strand to SEQ ID NO: 1394760
aaugguacugcacuuugcc

SEQ ID NO: 1394762 - RNA, 19 nt, Artificial Sequence
  Description of Artificial Sequence: Synthetic oligonucleotide
  Sense strand starting at position 3434 of SEQ ID NO: 1243097
gugugaacucagugaggua

SEQ ID NO: 1394763 - RNA, 19 nt, Artificial Sequence
  Description of Artificial Sequence: Synthetic oligonucleotide
  Antisense strand to SEQ ID NO: 1394762
uaccucacugaguucacac

SEQ ID NO: 1394764 - RNA, 19 nt, Artificial Sequence
  Description of Artificial Sequence: Synthetic oligonucleotide
  Sense strand starting at position 3435 of SEQ ID NO: 1243097
ugugaacucagugagguaa

SEQ ID NO: 1394765 - RNA, 19 nt, Artificial Sequence
  Description of Artificial Sequence: Synthetic oligonucleotide
  Antisense strand to SEQ ID NO: 1394764
uuaccucacugaguucaca

SEQ ID NO: 1394766 - RNA, 19 nt, Artificial Sequence
  Description of Artificial Sequence: Synthetic oligonucleotide
  Sense strand starting at position 3505 of SEQ ID NO: 1243097
gagccuggucucuaagcuu

SEQ ID NO: 1394767 - RNA, 19 nt, Artificial Sequence
  Description of Artificial Sequence: Synthetic oligonucleotide
  Antisense strand to SEQ ID NO: 1394766
aagcuuagagaccaggcuc

SEQ ID NO: 1394768 - RNA, 19 nt, Artificial Sequence
  Description of Artificial Sequence: Synthetic oligonucleotide
  Sense strand starting at position 115 of SEQ ID NO: 1243098
augggcaaaguuugugaau

SEQ ID NO: 1394769 - RNA, 19 nt, Artificial Sequence
  Description of Artificial Sequence: Synthetic oligonucleotide
  Antisense strand to SEQ ID NO: 1394768
auucacaaacuuugcccau

SEQ ID NO: 1394770 - RNA, 19 nt, Artificial Sequence
  Description of Artificial Sequence: Synthetic oligonucleotide
  Sense strand starting at position 124 of SEQ ID NO: 1243098
guuugugaaucucucauuu

SEQ ID NO: 1394771 - RNA, 19 nt, Artificial Sequence
  Description of Artificial Sequence: Synthetic oligonucleotide
  Antisense strand to SEQ ID NO: 1394770
aaaugagagauucacaaac

SEQ ID NO: 1394772 - RNA, 19 nt, Artificial Sequence
  Description of Artificial Sequence: Synthetic oligonucleotide
  Sense strand starting at position 144 of SEQ ID NO: 1243098
ccuguuauuucuguguaua

SEQ ID NO: 1394773 - RNA, 19 nt, Artificial Sequence
  Description of Artificial Sequence: Synthetic oligonucleotide
  Antisense strand to SEQ ID NO: 1394772
uauacacagaaauaacagg

SEQ ID NO: 1394774 - RNA, 19 nt, Artificial Sequence
  Description of Artificial Sequence: Synthetic oligonucleotide
  Sense strand starting at position 145 of SEQ ID NO: 1243098
cuguuauuucuguguauac

SEQ ID NO: 1394775 - RNA, 19 nt, Artificial Sequence
  Description of Artificial Sequence: Synthetic oligonucleotide
  Antisense strand to SEQ ID NO: 1394774
guauacacagaaauaacag

SEQ ID NO: 1394776 - RNA, 19 nt, Artificial Sequence
  Description of Artificial Sequence: Synthetic oligonucleotide
  Sense strand starting at position 146 of SEQ ID NO: 1243098
uguuauuucuguguauacu

SEQ ID NO: 1394777 - RNA, 19 nt, Artificial Sequence
  Description of Artificial Sequence: Synthetic oligonucleotide
  Antisense strand to SEQ ID NO: 1394776
aguauacacagaaauaaca

SEQ ID NO: 1394778 - RNA, 19 nt, Artificial Sequence
  Description of Artificial Sequence: Synthetic oligonucleotide
  Sense strand starting at position 152 of SEQ ID NO: 1243098
uucuguguauacuuauuga

SEQ ID NO: 1394779 - RNA, 19 nt, Artificial Sequence
  Description of Artificial Sequence: Synthetic oligonucleotide
  Antisense strand to SEQ ID NO: 1394778
ucaauaaguauacacagaa

SEQ ID NO: 1394780 - RNA, 19 nt, Artificial Sequence
  Description of Artificial Sequence: Synthetic oligonucleotide
  Sense strand starting at position 167 of SEQ ID NO: 1243098
uugaaauguuuccuguuga

SEQ ID NO: 1394781 - RNA, 19 nt, Artificial Sequence
  Description of Artificial Sequence: Synthetic oligonucleotide
  Antisense strand to SEQ ID NO: 1394780
ucaacaggaaacauuucaa

SEQ ID NO: 1394782 - RNA, 19 nt, Artificial Sequence
  Description of Artificial Sequence: Synthetic oligonucleotide
  Sense strand starting at position 172 of SEQ ID NO: 1243098
auguuuccuguugaaucuu

SEQ ID NO: 1394783 - RNA, 19 nt, Artificial Sequence
  Description of Artificial Sequence: Synthetic oligonucleotide
  Antisense strand to SEQ ID NO: 1394782
aagauucaacaggaaacau

SEQ ID NO: 1394784 - RNA, 19 nt, Artificial Sequence
  Description of Artificial Sequence: Synthetic oligonucleotide
  Sense strand starting at position 434 of SEQ ID NO: 1243098
uggagaaguuucucugcca

SEQ ID NO: 1394785 - RNA, 19 nt, Artificial Sequence
  Description of Artificial Sequence: Synthetic oligonucleotide
  Antisense strand to SEQ ID NO: 1394784
uggcagagaaacuucucca

SEQ ID NO: 1394786 - RNA, 19 nt, Artificial Sequence
  Description of Artificial Sequence: Synthetic oligonucleotide
  Sense strand starting at position 435 of SEQ ID NO: 1243098
ggagaaguuucucugccac

SEQ ID NO: 1394787 - RNA, 19 nt, Artificial Sequence
  Description of Artificial Sequence: Synthetic oligonucleotide
  Antisense strand to SEQ ID NO: 1394786
guggcagagaaacuucucc

SEQ ID NO: 1394788 - RNA, 19 nt, Artificial Sequence
  Description of Artificial Sequence: Synthetic oligonucleotide
  Sense strand starting at position 437 of SEQ ID NO: 1243098
agaaguuucucugccacau

SEQ ID NO: 1394789 - RNA, 19 nt, Artificial Sequence
  Description of Artificial Sequence: Synthetic oligonucleotide
  Antisense strand to SEQ ID NO: 1394788
auguggcagagaaacuucu

SEQ ID NO: 1394790 - RNA, 19 nt, Artificial Sequence
  Description of Artificial Sequence: Synthetic oligonucleotide
  Sense strand starting at position 613 of SEQ ID NO: 1243098
agaaccaggucuuuaaauu

SEQ ID NO: 1394791 - RNA, 19 nt, Artificial Sequence
  Description of Artificial Sequence: Synthetic oligonucleotide
  Antisense strand to SEQ ID NO: 1394790
aauuuaaagaccugguucu

SEQ ID NO: 1394792 - RNA, 19 nt, Artificial Sequence
  Description of Artificial Sequence: Synthetic oligonucleotide
  Sense strand starting at position 681 of SEQ ID NO: 1243098
aaaggagagucagaaucaa

SEQ ID NO: 1394793 - RNA, 19 nt, Artificial Sequence
  Description of Artificial Sequence: Synthetic oligonucleotide
  Antisense strand to SEQ ID NO: 1394792
uugauucugacucuccuuu

SEQ ID NO: 1394794 - RNA, 19 nt, Artificial Sequence
  Description of Artificial Sequence: Synthetic oligonucleotide
  Sense strand starting at position 1070 of SEQ ID NO: 1243098
ugagguuugugucccaaua

SEQ ID NO: 1394795 - RNA, 19 nt, Artificial Sequence
  Description of Artificial Sequence: Synthetic oligonucleotide
  Antisense strand to SEQ ID NO: 1394794
uauugggacacaaaccuca

SEQ ID NO: 1394796 - RNA, 19 nt, Artificial Sequence
  Description of Artificial Sequence: Synthetic oligonucleotide
  Sense strand starting at position 1589 of SEQ ID NO: 1243098
uguguugaacucugaagag

SEQ ID NO: 1394797 - RNA, 19 nt, Artificial Sequence
  Description of Artificial Sequence: Synthetic oligonucleotide
  Antisense strand to SEQ ID NO: 1394796
cucuucagaguucaacaca

SEQ ID NO: 1394798 - RNA, 19 nt, Artificial Sequence
  Description of Artificial Sequence: Synthetic oligonucleotide
  Sense strand starting at position 2173 of SEQ ID NO: 1243098
ucguuaccuucccuggaua

SEQ ID NO: 1394799 - RNA, 19 nt, Artificial Sequence
  Description of Artificial Sequence: Synthetic oligonucleotide
  Antisense strand to SEQ ID NO: 1394798
uauccagggaagguaacga

SEQ ID NO: 1394800 - RNA, 19 nt, Artificial Sequence
  Description of Artificial Sequence: Synthetic oligonucleotide
  Sense strand starting at position 2251 of SEQ ID NO: 1243098
gagagaguugugugcaaag

SEQ ID NO: 1394801 - RNA, 19 nt, Artificial Sequence
  Description of Artificial Sequence: Synthetic oligonucleotide
  Antisense strand to SEQ ID NO: 1394800
cuuugcacacaacucucuc

SEQ ID NO: 1394802 - RNA, 19 nt, Artificial Sequence
  Description of Artificial Sequence: Synthetic oligonucleotide
  Sense strand starting at position 2253 of SEQ ID NO: 1243098
gagaguugugugcaaagga

SEQ ID NO: 1394803 - RNA, 19 nt, Artificial Sequence
  Description of Artificial Sequence: Synthetic oligonucleotide
  Antisense strand to SEQ ID NO: 1394802
uccuuugcacacaacucuc

SEQ ID NO: 1394804 - RNA, 19 nt, Artificial Sequence
  Description of Artificial Sequence: Synthetic oligonucleotide
  Sense strand starting at position 2280 of SEQ ID NO: 1243098
ggcugugaccuuuggauuu

SEQ ID NO: 1394805 - RNA, 19 nt, Artificial Sequence
  Description of Artificial Sequence: Synthetic oligonucleotide
  Antisense strand to SEQ ID NO: 1394804
aaauccaaaggucacagcc

SEQ ID NO: 1394806 - RNA, 19 nt, Artificial Sequence
  Description of Artificial Sequence: Synthetic oligonucleotide
  Sense strand starting at position 2450 of SEQ ID NO: 1243098
gcauaaaucucuccagggu

SEQ ID NO: 1394807 - RNA, 19 nt, Artificial Sequence
  Description of Artificial Sequence: Synthetic oligonucleotide
  Antisense strand to SEQ ID NO: 1394806
acccuggagagauuuaugc

SEQ ID NO: 1394808 - RNA, 19 nt, Artificial Sequence
  Description of Artificial Sequence: Synthetic oligonucleotide
  Sense strand starting at position 2556 of SEQ ID NO: 1243098
caugcagauccuggaugaa

SEQ ID NO: 1394809 - RNA, 19 nt, Artificial Sequence
  Description of Artificial Sequence: Synthetic oligonucleotide
  Antisense strand to SEQ ID NO: 1394808
uucauccaggaucugcaug

SEQ ID NO: 1394810 - RNA, 19 nt, Artificial Sequence
  Description of Artificial Sequence: Synthetic oligonucleotide
  Sense strand starting at position 2559 of SEQ ID NO: 1243098
gcagauccuggaugaaauu

SEQ ID NO: 1394811 - RNA, 19 nt, Artificial Sequence
  Description of Artificial Sequence: Synthetic oligonucleotide
  Antisense strand to SEQ ID NO: 1394810
aauuucauccaggaucugc

SEQ ID NO: 1394812 - RNA, 19 nt, Artificial Sequence
  Description of Artificial Sequence: Synthetic oligonucleotide
  Sense strand starting at position 2837 of SEQ ID NO: 1243098
uuccgucugaccuagguau

SEQ ID NO: 1394813 - RNA, 19 nt, Artificial Sequence
  Description of Artificial Sequence: Synthetic oligonucleotide
  Antisense strand to SEQ ID NO: 1394812
auaccuaggucagacggaa

SEQ ID NO: 1394814 - RNA, 19 nt, Artificial Sequence
  Description of Artificial Sequence: Synthetic oligonucleotide
  Sense strand starting at position 3005 of SEQ ID NO: 1243098
gcgcuaaugaguuugcuuu

SEQ ID NO: 1394815 - RNA, 19 nt, Artificial Sequence
  Description of Artificial Sequence: Synthetic oligonucleotide
  Antisense strand to SEQ ID NO: 1394814
aaagcaaacucauuagcgc

SEQ ID NO: 1394816 - RNA, 19 nt, Artificial Sequence
  Description of Artificial Sequence: Synthetic oligonucleotide
  Sense strand starting at position 3069 of SEQ ID NO: 1243098
uguugagucacauauuggu

SEQ ID NO: 1394817 - RNA, 19 nt, Artificial Sequence
  Description of Artificial Sequence: Synthetic oligonucleotide
  Antisense strand to SEQ ID NO: 1394816
accaauaugugacucaaca

SEQ ID NO: 1394818 - RNA, 19 nt, Artificial Sequence
  Description of Artificial Sequence: Synthetic oligonucleotide
  Sense strand starting at position 3113 of SEQ ID NO: 1243098
gucuuuccauuucugugau

SEQ ID NO: 1394819 - RNA, 19 nt, Artificial Sequence
  Description of Artificial Sequence: Synthetic oligonucleotide
  Antisense strand to SEQ ID NO: 1394818
aucacagaaauggaaagac

SEQ ID NO: 1394820 - RNA, 19 nt, Artificial Sequence
  Description of Artificial Sequence: Synthetic oligonucleotide
  Sense strand starting at position 3214 of SEQ ID NO: 1243098
accacaggucaaugcuuau

SEQ ID NO: 1394821 - RNA, 19 nt, Artificial Sequence
  Description of Artificial Sequence: Synthetic oligonucleotide
  Antisense strand to SEQ ID NO: 1394820
auaagcauugaccuguggu

SEQ ID NO: 1394822 - RNA, 19 nt, Artificial Sequence
  Description of Artificial Sequence: Synthetic oligonucleotide
  Sense strand starting at position 3225 of SEQ ID NO: 1243098
augcuuauguggcugauga

SEQ ID NO: 1394823 - RNA, 19 nt, Artificial Sequence
  Description of Artificial Sequence: Synthetic oligonucleotide
  Antisense strand to SEQ ID NO: 1394822
ucaucagccacauaagcau

SEQ ID NO: 1394824 - RNA, 19 nt, Artificial Sequence
  Description of Artificial Sequence: Synthetic oligonucleotide
  Sense strand starting at position 3227 of SEQ ID NO: 1243098
gcuuauguggcugaugaga

SEQ ID NO: 1394825 - RNA, 19 nt, Artificial Sequence
  Description of Artificial Sequence: Synthetic oligonucleotide
  Antisense strand to SEQ ID NO: 1394824
ucucaucagccacauaagc

SEQ ID NO: 1394826 - RNA, 19 nt, Artificial Sequence
  Description of Artificial Sequence: Synthetic oligonucleotide
  Sense strand starting at position 3391 of SEQ ID NO: 1243098
cucucaguucuggagucau

SEQ ID NO: 1394827 - RNA, 19 nt, Artificial Sequence
  Description of Artificial Sequence: Synthetic oligonucleotide
  Antisense strand to SEQ ID NO: 1394826
augacuccagaacugagag

SEQ ID NO: 1394828 - RNA, 19 nt, Artificial Sequence
  Description of Artificial Sequence: Synthetic oligonucleotide
  Sense strand starting at position 3395 of SEQ ID NO: 1243098
caguucuggagucauggaa

SEQ ID NO: 1394829 - RNA, 19 nt, Artificial Sequence
  Description of Artificial Sequence: Synthetic oligonucleotide
  Antisense strand to SEQ ID NO: 1394828
uuccaugacuccagaacug

SEQ ID NO: 1394830 - RNA, 19 nt, Artificial Sequence
  Description of Artificial Sequence: Synthetic oligonucleotide
  Sense strand starting at position 3672 of SEQ ID NO: 1243098
cauagcagccgugaauaau

SEQ ID NO: 1394831 - RNA, 19 nt, Artificial Sequence
  Description of Artificial Sequence: Synthetic oligonucleotide
  Antisense strand to SEQ ID NO: 1394830
auuauucacggcugcuaug

SEQ ID NO: 1394832 - RNA, 19 nt, Artificial Sequence
  Description of Artificial Sequence: Synthetic oligonucleotide
  Sense strand starting at position 3675 of SEQ ID NO: 1243098
agcagccgugaauaauaau

SEQ ID NO: 1394833 - RNA, 19 nt, Artificial Sequence
  Description of Artificial Sequence: Synthetic oligonucleotide
  Antisense strand to SEQ ID NO: 1394832
auuauuauucacggcugcu

SEQ ID NO: 1394834 - RNA, 19 nt, Artificial Sequence
  Description of Artificial Sequence: Synthetic oligonucleotide
  Sense strand starting at position 3712 of SEQ ID NO: 1243098
auuauagaccacuggucau

SEQ ID NO: 1394835 - RNA, 19 nt, Artificial Sequence
  Description of Artificial Sequence: Synthetic oligonucleotide
  Antisense strand to SEQ ID NO: 1394834
augaccaguggucuauaau

SEQ ID NO: 1394836 - RNA, 19 nt, Artificial Sequence
  Description of Artificial Sequence: Synthetic oligonucleotide
  Sense strand starting at position 3768 of SEQ ID NO: 1243098
aucauuggccucuacgagu

SEQ ID NO: 1394837 - RNA, 19 nt, Artificial Sequence
  Description of Artificial Sequence: Synthetic oligonucleotide
  Antisense strand to SEQ ID NO: 1394836
acucguagaggccaaugau

SEQ ID NO: 1394838 - RNA, 19 nt, Artificial Sequence
  Description of Artificial Sequence: Synthetic oligonucleotide
  Sense strand starting at position 3782 of SEQ ID NO: 1243098
cgaguccaacccuauuaca

SEQ ID NO: 1394839 - RNA, 19 nt, Artificial Sequence
  Description of Artificial Sequence: Synthetic oligonucleotide
  Antisense strand to SEQ ID NO: 1394838
uguaauaggguuggacucg

SEQ ID NO: 1394840 - RNA, 19 nt, Artificial Sequence
  Description of Artificial Sequence: Synthetic oligonucleotide
  Sense strand starting at position 3812 of SEQ ID NO: 1243098
cuuaaugagagguaugcau

SEQ ID NO: 1394841 - RNA, 19 nt, Artificial Sequence
  Description of Artificial Sequence: Synthetic oligonucleotide
  Antisense strand to SEQ ID NO: 1394840
augcauaccucucauuaag

SEQ ID NO: 1394842 - RNA, 19 nt, Artificial Sequence
  Description of Artificial Sequence: Synthetic oligonucleotide
  Sense strand starting at position 3814 of SEQ ID NO: 1243098
uaaugagagguaugcauuc

SEQ ID NO: 1394843 - RNA, 19 nt, Artificial Sequence
  Description of Artificial Sequence: Synthetic oligonucleotide
  Antisense strand to SEQ ID NO: 1394842
gaaugcauaccucucauua

SEQ ID NO: 1394844 - RNA, 19 nt, Artificial Sequence
  Description of Artificial Sequence: Synthetic oligonucleotide
  Sense strand starting at position 3816 of SEQ ID NO: 1243098
augagagguaugcauucua

SEQ ID NO: 1394845 - RNA, 19 nt, Artificial Sequence
  Description of Artificial Sequence: Synthetic oligonucleotide
  Antisense strand to SEQ ID NO: 1394844
uagaaugcauaccucucau

SEQ ID NO: 1394846 - RNA, 19 nt, Artificial Sequence
  Description of Artificial Sequence: Synthetic oligonucleotide
  Sense strand starting at position 3836 of SEQ ID NO: 1243098
gaaauaugucuuuaggcaa

SEQ ID NO: 1394847 - RNA, 19 nt, Artificial Sequence
  Description of Artificial Sequence: Synthetic oligonucleotide
  Antisense strand to SEQ ID NO: 1394846
uugccuaaagacauauuuc

SEQ ID NO: 1394848 - RNA, 19 nt, Artificial Sequence
  Description of Artificial Sequence: Synthetic oligonucleotide
  Sense strand starting at position 317 of SEQ ID NO: 1243099
aggaguuucugugccacau

SEQ ID NO: 1394849 - RNA, 19 nt, Artificial Sequence
  Description of Artificial Sequence: Synthetic oligonucleotide
  Antisense strand to SEQ ID NO: 1394848
auguggcacagaaacuccu

SEQ ID NO: 1394850 - RNA, 19 nt, Artificial Sequence
  Description of Artificial Sequence: Synthetic oligonucleotide
  Sense strand starting at position 346 of SEQ ID NO: 1243099
acuggaagcgaucauauau

SEQ ID NO: 1394851 - RNA, 19 nt, Artificial Sequence
  Description of Artificial Sequence: Synthetic oligonucleotide
  Antisense strand to SEQ ID NO: 1394850
auauaugaucgcuuccagu

SEQ ID NO: 1394852 - RNA, 19 nt, Artificial Sequence
  Description of Artificial Sequence: Synthetic oligonucleotide
  Sense strand starting at position 411 of SEQ ID NO: 1243099
aguguaaacucagugaggu

SEQ ID NO: 1394853 - RNA, 19 nt, Artificial Sequence
  Description of Artificial Sequence: Synthetic oligonucleotide
  Antisense strand to SEQ ID NO: 1394852
accucacugaguuuacacu

SEQ ID NO: 1394854 - RNA, 19 nt, Artificial Sequence
  Description of Artificial Sequence: Synthetic oligonucleotide
  Sense strand starting at position 412 of SEQ ID NO: 1243099
guguaaacucagugaggua

SEQ ID NO: 1394855 - RNA, 19 nt, Artificial Sequence
  Description of Artificial Sequence: Synthetic oligonucleotide
  Antisense strand to SEQ ID NO: 1394854
uaccucacugaguuuacac

SEQ ID NO: 1394856 - RNA, 19 nt, Artificial Sequence
  Description of Artificial Sequence: Synthetic oligonucleotide
  Sense strand starting at position 413 of SEQ ID NO: 1243099
uguaaacucagugagguaa

SEQ ID NO: 1394857 - RNA, 19 nt, Artificial Sequence
  Description of Artificial Sequence: Synthetic oligonucleotide
  Antisense strand to SEQ ID NO: 1394856
uuaccucacugaguuuaca

SEQ ID NO: 1394858 - RNA, 19 nt, Artificial Sequence
  Description of Artificial Sequence: Synthetic oligonucleotide
  Sense strand starting at position 457 of SEQ ID NO: 1243099
uugcuaguggcucacauuu

SEQ ID NO: 1394859 - RNA, 19 nt, Artificial Sequence
  Description of Artificial Sequence: Synthetic oligonucleotide
  Antisense strand to SEQ ID NO: 1394858
aaaugugagccacuagcaa

SEQ ID NO: 1394860 - RNA, 19 nt, Artificial Sequence
  Description of Artificial Sequence: Synthetic oligonucleotide
  Sense strand starting at position 548 of SEQ ID NO: 1243099
agaacagaguaagauuaaa

SEQ ID NO: 1394861 - RNA, 19 nt, Artificial Sequence
  Description of Artificial Sequence: Synthetic oligonucleotide
  Antisense strand to SEQ ID NO: 1394860
uuuaaucuuacucuguucu

SEQ ID NO: 1394862 - RNA, 19 nt, Artificial Sequence
  Description of Artificial Sequence: Synthetic oligonucleotide
  Sense strand starting at position 952 of SEQ ID NO: 1243099
guuugugucccacgagaaa

SEQ ID NO: 1394863 - RNA, 19 nt, Artificial Sequence
  Description of Artificial Sequence: Synthetic oligonucleotide
  Antisense strand to SEQ ID NO: 1394862
uuucucgugggacacaaac

SEQ ID NO: 1394864 - RNA, 19 nt, Artificial Sequence
  Description of Artificial Sequence: Synthetic oligonucleotide
  Sense strand starting at position 1236 of SEQ ID NO: 1243099
cagugagugagaugcagaa

SEQ ID NO: 1394865 - RNA, 19 nt, Artificial Sequence
  Description of Artificial Sequence: Synthetic oligonucleotide
  Antisense strand to SEQ ID NO: 1394864
uucugcaucucacucacug

SEQ ID NO: 1394866 - RNA, 19 nt, Artificial Sequence
  Description of Artificial Sequence: Synthetic oligonucleotide
  Sense strand starting at position 1483 of SEQ ID NO: 1243099
gagucaauguuuccagcac

SEQ ID NO: 1394867 - RNA, 19 nt, Artificial Sequence
  Description of Artificial Sequence: Synthetic oligonucleotide
  Antisense strand to SEQ ID NO: 1394866
gugcuggaaacauugacuc

SEQ ID NO: 1394868 - RNA, 19 nt, Artificial Sequence
  Description of Artificial Sequence: Synthetic oligonucleotide
  Sense strand starting at position 1591 of SEQ ID NO: 1243099
agccuugagccucaguauu

SEQ ID NO: 1394869 - RNA, 19 nt, Artificial Sequence
  Description of Artificial Sequence: Synthetic oligonucleotide
  Antisense strand to SEQ ID NO: 1394868
aauacugaggcucaaggcu

SEQ ID NO: 1394870 - RNA, 19 nt, Artificial Sequence
  Description of Artificial Sequence: Synthetic oligonucleotide
  Sense strand starting at position 1593 of SEQ ID NO: 1243099
ccuugagccucaguauucu

SEQ ID NO: 1394871 - RNA, 19 nt, Artificial Sequence
  Description of Artificial Sequence: Synthetic oligonucleotide
  Antisense strand to SEQ ID NO: 1394870
agaauacugaggcucaagg

SEQ ID NO: 1394872 - RNA, 19 nt, Artificial Sequence
  Description of Artificial Sequence: Synthetic oligonucleotide
  Sense strand starting at position 1735 of SEQ ID NO: 1243099
cagagacccucuguaauag

SEQ ID NO: 1394873 - RNA, 19 nt, Artificial Sequence
  Description of Artificial Sequence: Synthetic oligonucleotide
  Antisense strand to SEQ ID NO: 1394872
cuauuacagagggucucug

SEQ ID NO: 1394874 - RNA, 19 nt, Artificial Sequence
  Description of Artificial Sequence: Synthetic oligonucleotide
  Sense strand starting at position 1745 of SEQ ID NO: 1243099
cuguaauagggcugggaaa

SEQ ID NO: 1394875 - RNA, 19 nt, Artificial Sequence
  Description of Artificial Sequence: Synthetic oligonucleotide
  Antisense strand to SEQ ID NO: 1394874
uuucccagcccuauuacag

SEQ ID NO: 1394876 - RNA, 19 nt, Artificial Sequence
  Description of Artificial Sequence: Synthetic oligonucleotide
  Sense strand starting at position 1746 of SEQ ID NO: 1243099
uguaauagggcugggaaau

SEQ ID NO: 1394877 - RNA, 19 nt, Artificial Sequence
  Description of Artificial Sequence: Synthetic oligonucleotide
  Antisense strand to SEQ ID NO: 1394876
auuucccagcccuauuaca

SEQ ID NO: 1394878 - RNA, 19 nt, Artificial Sequence
  Description of Artificial Sequence: Synthetic oligonucleotide
  Sense strand starting at position 1747 of SEQ ID NO: 1243099
guaauagggcugggaaaug

SEQ ID NO: 1394879 - RNA, 19 nt, Artificial Sequence
  Description of Artificial Sequence: Synthetic oligonucleotide
  Antisense strand to SEQ ID NO: 1394878
cauuucccagcccuauuac

SEQ ID NO: 1394880 - RNA, 19 nt, Artificial Sequence
  Description of Artificial Sequence: Synthetic oligonucleotide
  Sense strand starting at position 2345 of SEQ ID NO: 1243099
gcgaguuguguucagaaca

SEQ ID NO: 1394881 - RNA, 19 nt, Artificial Sequence
  Description of Artificial Sequence: Synthetic oligonucleotide
  Antisense strand to SEQ ID NO: 1394880
uguucugaacacaacucgc

SEQ ID NO: 1394882 - RNA, 19 nt, Artificial Sequence
  Description of Artificial Sequence: Synthetic oligonucleotide
  Sense strand starting at position 2651 of SEQ ID NO: 1243099
ugcagacccugcuuuaaau

SEQ ID NO: 1394883 - RNA, 19 nt, Artificial Sequence
  Description of Artificial Sequence: Synthetic oligonucleotide
  Antisense strand to SEQ ID NO: 1394882
auuuaaagcagggucugca

SEQ ID NO: 1394884 - RNA, 19 nt, Artificial Sequence
  Description of Artificial Sequence: Synthetic oligonucleotide
  Sense strand starting at position 3237 of SEQ ID NO: 1243099
cuugcuuugugaucuuaaa

SEQ ID NO: 1394885 - RNA, 19 nt, Artificial Sequence
  Description of Artificial Sequence: Synthetic oligonucleotide
  Antisense strand to SEQ ID NO: 1394884
uuuaagaucacaaagcaag

SEQ ID NO: 1394886 - RNA, 19 nt, Artificial Sequence
  Description of Artificial Sequence: Synthetic oligonucleotide
  Sense strand starting at position 3377 of SEQ ID NO: 1243099
gaaaguguccauggaucaa

SEQ ID NO: 1394887 - RNA, 19 nt, Artificial Sequence
  Description of Artificial Sequence: Synthetic oligonucleotide
  Antisense strand to SEQ ID NO: 1394886
uugauccauggacacuuuc

SEQ ID NO: 1394888 - RNA, 19 nt, Artificial Sequence
  Description of Artificial Sequence: Synthetic oligonucleotide
  Sense strand starting at position 3409 of SEQ ID NO: 1243099
ccagguaugucaucagcac

SEQ ID NO: 1394889 - RNA, 19 nt, Artificial Sequence
  Description of Artificial Sequence: Synthetic oligonucleotide
  Antisense strand to SEQ ID NO: 1394888
gugcugaugacauaccugg

SEQ ID NO: 1394890 - RNA, 19 nt, Artificial Sequence
  Description of Artificial Sequence: Synthetic oligonucleotide
  Sense strand starting at position 3410 of SEQ ID NO: 1243099
cagguaugucaucagcacu

SEQ ID NO: 1394891 - RNA, 19 nt, Artificial Sequence
  Description of Artificial Sequence: Synthetic oligonucleotide
  Antisense strand to SEQ ID NO: 1394890
agugcugaugacauaccug

SEQ ID NO: 1394892 - RNA, 19 nt, Artificial Sequence
  Description of Artificial Sequence: Synthetic oligonucleotide
  Sense strand starting at position 3426 of SEQ ID NO: 1243099
acuucucucuugcuggaaa

SEQ ID NO: 1394893 - RNA, 19 nt, Artificial Sequence
  Description of Artificial Sequence: Synthetic oligonucleotide
  Antisense strand to SEQ ID NO: 1394892
uuuccagcaagagagaagu

SEQ ID NO: 1394894 - RNA, 19 nt, Artificial Sequence
  Description of Artificial Sequence: Synthetic oligonucleotide
  Sense strand starting at position 3428 of SEQ ID NO: 1243099
uucucucuugcuggaaauc

SEQ ID NO: 1394895 - RNA, 19 nt, Artificial Sequence
  Description of Artificial Sequence: Synthetic oligonucleotide
  Antisense strand to SEQ ID NO: 1394894
gauuuccagcaagagagaa

SEQ ID NO: 1394896 - RNA, 19 nt, Artificial Sequence
  Description of Artificial Sequence: Synthetic oligonucleotide
  Sense strand starting at position 3429 of SEQ ID NO: 1243099
ucucucuugcuggaaaucu

SEQ ID NO: 1394897 - RNA, 19 nt, Artificial Sequence
  Description of Artificial Sequence: Synthetic oligonucleotide
  Antisense strand to SEQ ID NO: 1394896
agauuuccagcaagagaga

SEQ ID NO: 1394898 - RNA, 19 nt, Artificial Sequence
  Description of Artificial Sequence: Synthetic oligonucleotide
  Sense strand starting at position 3594 of SEQ ID NO: 1243099
gcuaucuuguauguaugga

SEQ ID NO: 1394899 - RNA, 19 nt, Artificial Sequence
  Description of Artificial Sequence: Synthetic oligonucleotide
  Antisense strand to SEQ ID NO: 1394898
uccauacauacaagauagc

SEQ ID NO: 1394900 - RNA, 19 nt, Artificial Sequence
  Description of Artificial Sequence: Synthetic oligonucleotide
  Sense strand starting at position 3599 of SEQ ID NO: 1243099
cuuguauguauggauagga

SEQ ID NO: 1394901 - RNA, 19 nt, Artificial Sequence
  Description of Artificial Sequence: Synthetic oligonucleotide
  Antisense strand to SEQ ID NO: 1394900
uccuauccauacauacaag

SEQ ID NO: 1394902 - RNA, 19 nt, Artificial Sequence
  Description of Artificial Sequence: Synthetic oligonucleotide
  Sense strand starting at position 3761 of SEQ ID NO: 1243099
cagagaaucuugcucguag

SEQ ID NO: 1394903 - RNA, 19 nt, Artificial Sequence
  Description of Artificial Sequence: Synthetic oligonucleotide
  Antisense strand to SEQ ID NO: 1394902
cuacgagcaagauucucug

SEQ ID NO: 1394904 - RNA, 19 nt, Artificial Sequence
  Description of Artificial Sequence: Synthetic oligonucleotide
  Sense strand starting at position 3781 of SEQ ID NO: 1243099
uuaauaacccuguguugau

SEQ ID NO: 1394905 - RNA, 19 nt, Artificial Sequence
  Description of Artificial Sequence: Synthetic oligonucleotide
  Antisense strand to SEQ ID NO: 1394904
aucaacacaggguuauuaa

SEQ ID NO: 1394906 - RNA, 19 nt, Artificial Sequence
  Description of Artificial Sequence: Synthetic oligonucleotide
  Sense strand starting at position 3782 of SEQ ID NO: 1243099
uaauaacccuguguugaug

SEQ ID NO: 1394907 - RNA, 19 nt, Artificial Sequence
  Description of Artificial Sequence: Synthetic oligonucleotide
  Antisense strand to SEQ ID NO: 1394906
caucaacacaggguuauua

SEQ ID NO: 1394908 - RNA, 19 nt, Artificial Sequence
  Description of Artificial Sequence: Synthetic oligonucleotide
  Sense strand starting at position 3788 of SEQ ID NO: 1243099
cccuguguugaugaugauu

SEQ ID NO: 1394909 - RNA, 19 nt, Artificial Sequence
  Description of Artificial Sequence: Synthetic oligonucleotide
  Antisense strand to SEQ ID NO: 1394908
aaucaucaucaacacaggg

SEQ ID NO: 1394910 - RNA, 19 nt, Artificial Sequence
  Description of Artificial Sequence: Synthetic oligonucleotide
  Sense strand starting at position 3818 of SEQ ID NO: 1243099
gugaaugacucucuuugga

SEQ ID NO: 1394911 - RNA, 19 nt, Artificial Sequence
  Description of Artificial Sequence: Synthetic oligonucleotide
  Antisense strand to SEQ ID NO: 1394910
uccaaagagagucauucac

SEQ ID NO: 1394912 - RNA, 19 nt, Artificial Sequence
  Description of Artificial Sequence: Synthetic oligonucleotide
  Sense strand starting at position 3850 of SEQ ID NO: 1243099
guucauguggcagaugaca

SEQ ID NO: 1394913 - RNA, 19 nt, Artificial Sequence
  Description of Artificial Sequence: Synthetic oligonucleotide
  Antisense strand to SEQ ID NO: 1394912
ugucaucugccacaugaac

SEQ ID NO: 1394914 - RNA, 19 nt, Artificial Sequence
  Description of Artificial Sequence: Synthetic oligonucleotide
  Sense strand starting at position 3852 of SEQ ID NO: 1243099
ucauguggcagaugacaau

SEQ ID NO: 1394915 - RNA, 19 nt, Artificial Sequence
  Description of Artificial Sequence: Synthetic oligonucleotide
  Antisense strand to SEQ ID NO: 1394914
auugucaucugccacauga

SEQ ID NO: 1394916 - RNA, 19 nt, Artificial Sequence
  Description of Artificial Sequence: Synthetic oligonucleotide
  Sense strand starting at position 3904 of SEQ ID NO: 1243099
cuucuuugucuguaaguaa

SEQ ID NO: 1394917 - RNA, 19 nt, Artificial Sequence
  Description of Artificial Sequence: Synthetic oligonucleotide
  Antisense strand to SEQ ID NO: 1394916
uuacuuacagacaaagaag

SEQ ID NO: 1394918 - RNA, 19 nt, Artificial Sequence
  Description of Artificial Sequence: Synthetic oligonucleotide
  Sense strand starting at position 3907 of SEQ ID NO: 1243099
cuuugucuguaaguaaaua

SEQ ID NO: 1394919 - RNA, 19 nt, Artificial Sequence
  Description of Artificial Sequence: Synthetic oligonucleotide
  Antisense strand to SEQ ID NO: 1394918
uauuuacuuacagacaaag

SEQ ID NO: 1394920 - RNA, 19 nt, Artificial Sequence
  Description of Artificial Sequence: Synthetic oligonucleotide
  Sense strand starting at position 3930 of SEQ ID NO: 1243099
ccaugcgauguaugauuau

SEQ ID NO: 1394921 - RNA, 19 nt, Artificial Sequence
  Description of Artificial Sequence: Synthetic oligonucleotide
  Antisense strand to SEQ ID NO: 1394920
auaaucauacaucgcaugg

SEQ ID NO: 1394922 - RNA, 19 nt, Artificial Sequence
  Description of Artificial Sequence: Synthetic oligonucleotide
  Sense strand starting at position 3933 of SEQ ID NO: 1243099
ugcgauguaugauuauuau

SEQ ID NO: 1394923 - RNA, 19 nt, Artificial Sequence
  Description of Artificial Sequence: Synthetic oligonucleotide
  Antisense strand to SEQ ID NO: 1394922
auaauaaucauacaucgca

SEQ ID NO: 1394924 - RNA, 19 nt, Artificial Sequence
  Description of Artificial Sequence: Synthetic oligonucleotide
  Sense strand starting at position 3973 of SEQ ID NO: 1243099
gcuaauauuguagaaugcu

SEQ ID NO: 1394925 - RNA, 19 nt, Artificial Sequence
  Description of Artificial Sequence: Synthetic oligonucleotide
  Antisense strand to SEQ ID NO: 1394924
agcauucuacaauauuagc

SEQ ID NO: 1394926 - RNA, 19 nt, Artificial Sequence
  Description of Artificial Sequence: Synthetic oligonucleotide
  Sense strand starting at position 3979 of SEQ ID NO: 1243099
auuguagaaugcuugccaa

SEQ ID NO: 1394927 - RNA, 19 nt, Artificial Sequence
  Description of Artificial Sequence: Synthetic oligonucleotide
  Antisense strand to SEQ ID NO: 1394926
uuggcaagcauucuacaau

SEQ ID NO: 1394928 - RNA, 19 nt, Artificial Sequence
  Description of Artificial Sequence: Synthetic oligonucleotide
  Sense strand starting at position 4 of SEQ ID NO: 1243100
acaccuuguuaaguguuua

SEQ ID NO: 1394929 - RNA, 19 nt, Artificial Sequence
  Description of Artificial Sequence: Synthetic oligonucleotide
  Antisense strand to SEQ ID NO: 1394928
uaaacacuuaacaaggugu

SEQ ID NO: 1394930 - RNA, 19 nt, Artificial Sequence
  Description of Artificial Sequence: Synthetic oligonucleotide
  Sense strand starting at position 179 of SEQ ID NO: 1243100
ugacuuccaucauuaguau

SEQ ID NO: 1394931 - RNA, 19 nt, Artificial Sequence
  Description of Artificial Sequence: Synthetic oligonucleotide
  Antisense strand to SEQ ID NO: 1394930
auacuaaugauggaaguca

SEQ ID NO: 1394932 - RNA, 19 nt, Artificial Sequence
  Description of Artificial Sequence: Synthetic oligonucleotide
  Sense strand starting at position 211 of SEQ ID NO: 1243100
aagguuuagauguggaaug

SEQ ID NO: 1394933 - RNA, 19 nt, Artificial Sequence
  Description of Artificial Sequence: Synthetic oligonucleotide
  Antisense strand to SEQ ID NO: 1394932
cauuccacaucuaaaccuu

SEQ ID NO: 1394934 - RNA, 19 nt, Artificial Sequence
  Description of Artificial Sequence: Synthetic oligonucleotide
  Sense strand starting at position 223 of SEQ ID NO: 1243100
uggaauggauaggaauuaa

SEQ ID NO: 1394935 - RNA, 19 nt, Artificial Sequence
  Description of Artificial Sequence: Synthetic oligonucleotide
  Antisense strand to SEQ ID NO: 1394934
uuaauuccuauccauucca

SEQ ID NO: 1394936 - RNA, 19 nt, Artificial Sequence
  Description of Artificial Sequence: Synthetic oligonucleotide
  Sense strand starting at position 266 of SEQ ID NO: 1243100
ugagaagcccgguguagaa

SEQ ID NO: 1394937 - RNA, 19 nt, Artificial Sequence
  Description of Artificial Sequence: Synthetic oligonucleotide
  Antisense strand to SEQ ID NO: 1394936
uucuacaccgggcuucuca

SEQ ID NO: 1394938 - RNA, 19 nt, Artificial Sequence
  Description of Artificial Sequence: Synthetic oligonucleotide
  Sense strand starting at position 393 of SEQ ID NO: 1243100
ugagaaguuucugugccac

SEQ ID NO: 1394939 - RNA, 19 nt, Artificial Sequence
  Description of Artificial Sequence: Synthetic oligonucleotide
  Antisense strand to SEQ ID NO: 1394938
guggcacagaaacuucuca

SEQ ID NO: 1394940 - RNA, 19 nt, Artificial Sequence
  Description of Artificial Sequence: Synthetic oligonucleotide
  Sense strand starting at position 406 of SEQ ID NO: 1243100
ugccacauuugagaaugaa

SEQ ID NO: 1394941 - RNA, 19 nt, Artificial Sequence
  Description of Artificial Sequence: Synthetic oligonucleotide
  Antisense strand to SEQ ID NO: 1394940
uucauucucaaauguggca

SEQ ID NO: 1394942 - RNA, 19 nt, Artificial Sequence
  Description of Artificial Sequence: Synthetic oligonucleotide
  Sense strand starting at position 418 of SEQ ID NO: 1243100
gaaugaaggugauccugua

SEQ ID NO: 1394943 - RNA, 19 nt, Artificial Sequence
  Description of Artificial Sequence: Synthetic oligonucleotide
  Antisense strand to SEQ ID NO: 1394942
uacaggaucaccuucauuc

SEQ ID NO: 1394944 - RNA, 19 nt, Artificial Sequence
  Description of Artificial Sequence: Synthetic oligonucleotide
  Sense strand starting at position 426 of SEQ ID NO: 1243100
gugauccuguauucuggau

SEQ ID NO: 1394945 - RNA, 19 nt, Artificial Sequence
  Description of Artificial Sequence: Synthetic oligonucleotide
  Antisense strand to SEQ ID NO: 1394944
auccagaauacaggaucac

SEQ ID NO: 1394946 - RNA, 19 nt, Artificial Sequence
  Description of Artificial Sequence: Synthetic oligonucleotide
  Sense strand starting at position 460 of SEQ ID NO: 1243100
gaugaaguguuauuccauu

SEQ ID NO: 1394947 - RNA, 19 nt, Artificial Sequence
  Description of Artificial Sequence: Synthetic oligonucleotide
  Antisense strand to SEQ ID NO: 1394946
aauggaauaacacuucauc

SEQ ID NO: 1394948 - RNA, 19 nt, Artificial Sequence
  Description of Artificial Sequence: Synthetic oligonucleotide
  Sense strand starting at position 523 of SEQ ID NO: 1243100
gcacucugauuguuaggga

SEQ ID NO: 1394949 - RNA, 19 nt, Artificial Sequence
  Description of Artificial Sequence: Synthetic oligonucleotide
  Antisense strand to SEQ ID NO: 1394948
ucccuaacaaucagagugc

SEQ ID NO: 1394950 - RNA, 19 nt, Artificial Sequence
  Description of Artificial Sequence: Synthetic oligonucleotide
  Sense strand starting at position 982 of SEQ ID NO: 1243100
ggguauggcuuugucagga

SEQ ID NO: 1394951 - RNA, 19 nt, Artificial Sequence
  Description of Artificial Sequence: Synthetic oligonucleotide
  Antisense strand to SEQ ID NO: 1394950
uccugacaaagccauaccc

SEQ ID NO: 1394952 - RNA, 19 nt, Artificial Sequence
  Description of Artificial Sequence: Synthetic oligonucleotide
  Sense strand starting at position 987 of SEQ ID NO: 1243100
uggcuuugucaggagacaa

SEQ ID NO: 1394953 - RNA, 19 nt, Artificial Sequence
  Description of Artificial Sequence: Synthetic oligonucleotide
  Antisense strand to SEQ ID NO: 1394952
uugucuccugacaaagcca

SEQ ID NO: 1394954 - RNA, 19 nt, Artificial Sequence
  Description of Artificial Sequence: Synthetic oligonucleotide
  Sense strand starting at position 998 of SEQ ID NO: 1243100
ggagacaacugggaaauau

SEQ ID NO: 1394955 - RNA, 19 nt, Artificial Sequence
  Description of Artificial Sequence: Synthetic oligonucleotide
  Antisense strand to SEQ ID NO: 1394954
auauuucccaguugucucc

SEQ ID NO: 1394956 - RNA, 19 nt, Artificial Sequence
  Description of Artificial Sequence: Synthetic oligonucleotide
  Sense strand starting at position 1023 of SEQ ID NO: 1243100
ugggucuuccuaugagaaa

SEQ ID NO: 1394957 - RNA, 19 nt, Artificial Sequence
  Description of Artificial Sequence: Synthetic oligonucleotide
  Antisense strand to SEQ ID NO: 1394956
uuucucauaggaagaccca

SEQ ID NO: 1394958 - RNA, 19 nt, Artificial Sequence
  Description of Artificial Sequence: Synthetic oligonucleotide
  Sense strand starting at position 1261 of SEQ ID NO: 1243100
aggagacaccugcgagaaa

SEQ ID NO: 1394959 - RNA, 19 nt, Artificial Sequence
  Description of Artificial Sequence: Synthetic oligonucleotide
  Antisense strand to SEQ ID NO: 1394958
uuucucgcaggugucuccu

SEQ ID NO: 1394960 - RNA, 19 nt, Artificial Sequence
  Description of Artificial Sequence: Synthetic oligonucleotide
  Sense strand starting at position 1317 of SEQ ID NO: 1243100
gagguacagcagugaguua

SEQ ID NO: 1394961 - RNA, 19 nt, Artificial Sequence
  Description of Artificial Sequence: Synthetic oligonucleotide
  Antisense strand to SEQ ID NO: 1394960
uaacucacugcuguaccuc

SEQ ID NO: 1394962 - RNA, 19 nt, Artificial Sequence
  Description of Artificial Sequence: Synthetic oligonucleotide
  Sense strand starting at position 1328 of SEQ ID NO: 1243100
gugaguuaaugagucucca

SEQ ID NO: 1394963 - RNA, 19 nt, Artificial Sequence
  Description of Artificial Sequence: Synthetic oligonucleotide
  Antisense strand to SEQ ID NO: 1394962
uggagacucauuaacucac

SEQ ID NO: 1394964 - RNA, 19 nt, Artificial Sequence
  Description of Artificial Sequence: Synthetic oligonucleotide
  Sense strand starting at position 1457 of SEQ ID NO: 1243100
cuguuugcacuccaaagga

SEQ ID NO: 1394965 - RNA, 19 nt, Artificial Sequence
  Description of Artificial Sequence: Synthetic oligonucleotide
  Antisense strand to SEQ ID NO: 1394964
uccuuuggagugcaaacag

SEQ ID NO: 1394966 - RNA, 19 nt, Artificial Sequence
  Description of Artificial Sequence: Synthetic oligonucleotide
  Sense strand starting at position 1516 of SEQ ID NO: 1243100
ucgacuuucuguccugaac

SEQ ID NO: 1394967 - RNA, 19 nt, Artificial Sequence
  Description of Artificial Sequence: Synthetic oligonucleotide
  Antisense strand to SEQ ID NO: 1394966
guucaggacagaaagucga

SEQ ID NO: 1394968 - RNA, 19 nt, Artificial Sequence
  Description of Artificial Sequence: Synthetic oligonucleotide
  Sense strand starting at position 1575 of SEQ ID NO: 1243100
ugcucaaagccuggucaga

SEQ ID NO: 1394969 - RNA, 19 nt, Artificial Sequence
  Description of Artificial Sequence: Synthetic oligonucleotide
  Antisense strand to SEQ ID NO: 1394968
ucugaccaggcuuugagca

SEQ ID NO: 1394970 - RNA, 19 nt, Artificial Sequence
  Description of Artificial Sequence: Synthetic oligonucleotide
  Sense strand starting at position 2306 of SEQ ID NO: 1243100
guccuucgucaacagcuaa

SEQ ID NO: 1394971 - RNA, 19 nt, Artificial Sequence
  Description of Artificial Sequence: Synthetic oligonucleotide
  Antisense strand to SEQ ID NO: 1394970
uuagcuguugacgaaggac

SEQ ID NO: 1394972 - RNA, 19 nt, Artificial Sequence
  Description of Artificial Sequence: Synthetic oligonucleotide
  Sense strand starting at position 2401 of SEQ ID NO: 1243100
gggaguagugugcaaagga

SEQ ID NO: 1394973 - RNA, 19 nt, Artificial Sequence
  Description of Artificial Sequence: Synthetic oligonucleotide
  Antisense strand to SEQ ID NO: 1394972
uccuuugcacacuacuccc

SEQ ID NO: 1394974 - RNA, 19 nt, Artificial Sequence
  Description of Artificial Sequence: Synthetic oligonucleotide
  Sense strand starting at position 2402 of SEQ ID NO: 1243100
ggaguagugugcaaaggac

SEQ ID NO: 1394975 - RNA, 19 nt, Artificial Sequence
  Description of Artificial Sequence: Synthetic oligonucleotide
  Antisense strand to SEQ ID NO: 1394974
guccuuugcacacuacucc

SEQ ID NO: 1394976 - RNA, 19 nt, Artificial Sequence
  Description of Artificial Sequence: Synthetic oligonucleotide
  Sense strand starting at position 2428 of SEQ ID NO: 1243100
ggaugugaccuucggaucu

SEQ ID NO: 1394977 - RNA, 19 nt, Artificial Sequence
  Description of Artificial Sequence: Synthetic oligonucleotide
  Antisense strand to SEQ ID NO: 1394976
agauccgaaggucacaucc

SEQ ID NO: 1394978 - RNA, 19 nt, Artificial Sequence
  Description of Artificial Sequence: Synthetic oligonucleotide
  Sense strand starting at position 2473 of SEQ ID NO: 1243100
accucaguccuuuggccau

SEQ ID NO: 1394979 - RNA, 19 nt, Artificial Sequence
  Description of Artificial Sequence: Synthetic oligonucleotide
  Antisense strand to SEQ ID NO: 1394978
auggccaaaggacugaggu

SEQ ID NO: 1394980 - RNA, 19 nt, Artificial Sequence
  Description of Artificial Sequence: Synthetic oligonucleotide
  Sense strand starting at position 2489 of SEQ ID NO: 1243100
cauguuucuccugcgcaca

SEQ ID NO: 1394981 - RNA, 19 nt, Artificial Sequence
  Description of Artificial Sequence: Synthetic oligonucleotide
  Antisense strand to SEQ ID NO: 1394980
ugugcgcaggagaaacaug

SEQ ID NO: 1394982 - RNA, 19 nt, Artificial Sequence
  Description of Artificial Sequence: Synthetic oligonucleotide
  Sense strand starting at position 2585 of SEQ ID NO: 1243100
uggguccuccuuugcauaa

SEQ ID NO: 1394983 - RNA, 19 nt, Artificial Sequence
  Description of Artificial Sequence: Synthetic oligonucleotide
  Antisense strand to SEQ ID NO: 1394982
uuaugcaaaggaggaccca

SEQ ID NO: 1394984 - RNA, 19 nt, Artificial Sequence
  Description of Artificial Sequence: Synthetic oligonucleotide
  Sense strand starting at position 2586 of SEQ ID NO: 1243100
ggguccuccuuugcauaaa

SEQ ID NO: 1394985 - RNA, 19 nt, Artificial Sequence
  Description of Artificial Sequence: Synthetic oligonucleotide
  Antisense strand to SEQ ID NO: 1394984
uuuaugcaaaggaggaccc

SEQ ID NO: 1394986 - RNA, 19 nt, Artificial Sequence
  Description of Artificial Sequence: Synthetic oligonucleotide
  Sense strand starting at position 2894 of SEQ ID NO: 1243100
cuagcaauugcuuaagguu

SEQ ID NO: 1394987 - RNA, 19 nt, Artificial Sequence
  Description of Artificial Sequence: Synthetic oligonucleotide
  Antisense strand to SEQ ID NO: 1394986
aaccuuaagcaauugcuag

SEQ ID NO: 1394988 - RNA, 19 nt, Artificial Sequence
  Description of Artificial Sequence: Synthetic oligonucleotide
  Sense strand starting at position 3110 of SEQ ID NO: 1243100
ugaaauaaggcccagcuau

SEQ ID NO: 1394989 - RNA, 19 nt, Artificial Sequence
  Description of Artificial Sequence: Synthetic oligonucleotide
  Antisense strand to SEQ ID NO: 1394988
auagcugggccuuauuuca

SEQ ID NO: 1394990 - RNA, 19 nt, Artificial Sequence
  Description of Artificial Sequence: Synthetic oligonucleotide
  Sense strand starting at position 3123 of SEQ ID NO: 1243100
agcuaugucuucucuauug

SEQ ID NO: 1394991 - RNA, 19 nt, Artificial Sequence
  Description of Artificial Sequence: Synthetic oligonucleotide
  Antisense strand to SEQ ID NO: 1394990
caauagagaagacauagcu

SEQ ID NO: 1394992 - RNA, 19 nt, Artificial Sequence
  Description of Artificial Sequence: Synthetic oligonucleotide
  Sense strand starting at position 3148 of SEQ ID NO: 1243100
uucccuauggcuugaaauc

SEQ ID NO: 1394993 - RNA, 19 nt, Artificial Sequence
  Description of Artificial Sequence: Synthetic oligonucleotide
  Antisense strand to SEQ ID NO: 1394992
gauuucaagccauagggaa

SEQ ID NO: 1394994 - RNA, 19 nt, Artificial Sequence
  Description of Artificial Sequence: Synthetic oligonucleotide
  Sense strand starting at position 3149 of SEQ ID NO: 1243100
ucccuauggcuugaaaucu

SEQ ID NO: 1394995 - RNA, 19 nt, Artificial Sequence
  Description of Artificial Sequence: Synthetic oligonucleotide
  Antisense strand to SEQ ID NO: 1394994
agauuucaagccauaggga

SEQ ID NO: 1394996 - RNA, 19 nt, Artificial Sequence
  Description of Artificial Sequence: Synthetic oligonucleotide
  Sense strand starting at position 3697 of SEQ ID NO: 1243100
agcagaaauggcugucauu

SEQ ID NO: 1394997 - RNA, 19 nt, Artificial Sequence
  Description of Artificial Sequence: Synthetic oligonucleotide
  Antisense strand to SEQ ID NO: 1394996
aaugacagccauuucugcu

SEQ ID NO: 1394998 - RNA, 19 nt, Artificial Sequence
  Description of Artificial Sequence: Synthetic oligonucleotide
  Sense strand starting at position 3708 of SEQ ID NO: 1243100
cugucauucuauuugugac

SEQ ID NO: 1394999 - RNA, 19 nt, Artificial Sequence
  Description of Artificial Sequence: Synthetic oligonucleotide
  Antisense strand to SEQ ID NO: 1394998
gucacaaauagaaugacag

SEQ ID NO: 1395000 - RNA, 19 nt, Artificial Sequence
  Description of Artificial Sequence: Synthetic oligonucleotide
  Sense strand starting at position 3822 of SEQ ID NO: 1243100
uugagugguagaugacaau

SEQ ID NO: 1395001 - RNA, 19 nt, Artificial Sequence
  Description of Artificial Sequence: Synthetic oligonucleotide
  Antisense strand to SEQ ID NO: 1395000
auugucaucuaccacucaa

SEQ ID NO: 1395002 - RNA, 19 nt, Artificial Sequence
  Description of Artificial Sequence: Synthetic oligonucleotide
  Sense strand starting at position 3878 of SEQ ID NO: 1243100
ucugucugugaaugaacaa

SEQ ID NO: 1395003 - RNA, 19 nt, Artificial Sequence
  Description of Artificial Sequence: Synthetic oligonucleotide
  Antisense strand to SEQ ID NO: 1395002
uuguucauucacagacaga

SEQ ID NO: 1395004 - RNA, 19 nt, Artificial Sequence
  Description of Artificial Sequence: Synthetic oligonucleotide
  Sense strand starting at position 3904 of SEQ ID NO: 1243100
cuaugcuauguguauugau

SEQ ID NO: 1395005 - RNA, 19 nt, Artificial Sequence
  Description of Artificial Sequence: Synthetic oligonucleotide
  Antisense strand to SEQ ID NO: 1395004
aucaauacacauagcauag

SEQ ID NO: 1395006 - RNA, 19 nt, Artificial Sequence
  Description of Artificial Sequence: Synthetic oligonucleotide
  Sense strand starting at position 3941 of SEQ ID NO: 1243100
gcuaauauuguagacuacu

SEQ ID NO: 1395007 - RNA, 19 nt, Artificial Sequence
  Description of Artificial Sequence: Synthetic oligonucleotide
  Antisense strand to SEQ ID NO: 1395006
aguagucuacaauauuagc

SEQ ID NO: 1395008 - RNA, 19 nt, Artificial Sequence
  Description of Artificial Sequence: Synthetic oligonucleotide
  Sense strand starting at position 2 of SEQ ID NO: 1243101
gccugaugguuccucauga

SEQ ID NO: 1395009 - RNA, 19 nt, Artificial Sequence
  Description of Artificial Sequence: Synthetic oligonucleotide
  Antisense strand to SEQ ID NO: 1395008
ucaugaggaaccaucaggc

SEQ ID NO: 1395010 - RNA, 19 nt, Artificial Sequence
  Description of Artificial Sequence: Synthetic oligonucleotide
  Sense strand starting at position 139 of SEQ ID NO: 1243101
ucuguuauuucuguaugua

SEQ ID NO: 1395011 - RNA, 19 nt, Artificial Sequence
  Description of Artificial Sequence: Synthetic oligonucleotide
  Antisense strand to SEQ ID NO: 1395010
uacauacagaaauaacaga

SEQ ID NO: 1395012 - RNA, 19 nt, Artificial Sequence
  Description of Artificial Sequence: Synthetic oligonucleotide
  Sense strand starting at position 245 of SEQ ID NO: 1243101
aagguuuaggucugggaug

SEQ ID NO: 1395013 - RNA, 19 nt, Artificial Sequence
  Description of Artificial Sequence: Synthetic oligonucleotide
  Antisense strand to SEQ ID NO: 1395012
caucccagaccuaaaccuu

SEQ ID NO: 1395014 - RNA, 19 nt, Artificial Sequence
  Description of Artificial Sequence: Synthetic oligonucleotide
  Sense strand starting at position 247 of SEQ ID NO: 1243101
gguuuaggucugggaugga

SEQ ID NO: 1395015 - RNA, 19 nt, Artificial Sequence
  Description of Artificial Sequence: Synthetic oligonucleotide
  Antisense strand to SEQ ID NO: 1395014
uccaucccagaccuaaacc

SEQ ID NO: 1395016 - RNA, 19 nt, Artificial Sequence
  Description of Artificial Sequence: Synthetic oligonucleotide
  Sense strand starting at position 398 of SEQ ID NO: 1243101
agggaaaccugagaauaaa

SEQ ID NO: 1395017 - RNA, 19 nt, Artificial Sequence
  Description of Artificial Sequence: Synthetic oligonucleotide
  Antisense strand to SEQ ID NO: 1395016
uuuauucucagguuucccu

SEQ ID NO: 1395018 - RNA, 19 nt, Artificial Sequence
  Description of Artificial Sequence: Synthetic oligonucleotide
  Sense strand starting at position 426 of SEQ ID NO: 1243101
uggagaagucucuguacca

SEQ ID NO: 1395019 - RNA, 19 nt, Artificial Sequence
  Description of Artificial Sequence: Synthetic oligonucleotide
  Antisense strand to SEQ ID NO: 1395018
ugguacagagacuucucca

SEQ ID NO: 1395020 - RNA, 19 nt, Artificial Sequence
  Description of Artificial Sequence: Synthetic oligonucleotide
  Sense strand starting at position 427 of SEQ ID NO: 1243101
ggagaagucucuguaccac

SEQ ID NO: 1395021 - RNA, 19 nt, Artificial Sequence
  Description of Artificial Sequence: Synthetic oligonucleotide
  Antisense strand to SEQ ID NO: 1395020
gugguacagagacuucucc

SEQ ID NO: 1395022 - RNA, 19 nt, Artificial Sequence
  Description of Artificial Sequence: Synthetic oligonucleotide
  Sense strand starting at position 446 of SEQ ID NO: 1243101
guuuaaugaguggagcuga

SEQ ID NO: 1395023 - RNA, 19 nt, Artificial Sequence
  Description of Artificial Sequence: Synthetic oligonucleotide
  Antisense strand to SEQ ID NO: 1395022
ucagcuccacucauuaaac

SEQ ID NO: 1395024 - RNA, 19 nt, Artificial Sequence
  Description of Artificial Sequence: Synthetic oligonucleotide
  Sense strand starting at position 521 of SEQ ID NO: 1243101
gauggaggucagugaugua

SEQ ID NO: 1395025 - RNA, 19 nt, Artificial Sequence
  Description of Artificial Sequence: Synthetic oligonucleotide
  Antisense strand to SEQ ID NO: 1395024
uacaucacugaccuccauc

SEQ ID NO: 1395026 - RNA, 19 nt, Artificial Sequence
  Description of Artificial Sequence: Synthetic oligonucleotide
  Sense strand starting at position 665 of SEQ ID NO: 1243101
gggaaucaagucuaagugu

SEQ ID NO: 1395027 - RNA, 19 nt, Artificial Sequence
  Description of Artificial Sequence: Synthetic oligonucleotide
  Antisense strand to SEQ ID NO: 1395026
acacuuagacuugauuccc

SEQ ID NO: 1395028 - RNA, 19 nt, Artificial Sequence
  Description of Artificial Sequence: Synthetic oligonucleotide
  Sense strand starting at position 1057 of SEQ ID NO: 1243101
ugggucuuccuuugagaaa

SEQ ID NO: 1395029 - RNA, 19 nt, Artificial Sequence
  Description of Artificial Sequence: Synthetic oligonucleotide
  Antisense strand to SEQ ID NO: 1395028
uuucucaaaggaagaccca

SEQ ID NO: 1395030 - RNA, 19 nt, Artificial Sequence
  Description of Artificial Sequence: Synthetic oligonucleotide
  Sense strand starting at position 1088 of SEQ ID NO: 1243101
cacauaagcccuggaaagu

SEQ ID NO: 1395031 - RNA, 19 nt, Artificial Sequence
  Description of Artificial Sequence: Synthetic oligonucleotide
  Antisense strand to SEQ ID NO: 1395030
acuuuccagggcuuaugug

SEQ ID NO: 1395032 - RNA, 19 nt, Artificial Sequence
  Description of Artificial Sequence: Synthetic oligonucleotide
  Sense strand starting at position 1339 of SEQ ID NO: 1243101
cggugagugagaugcagaa

SEQ ID NO: 1395033 - RNA, 19 nt, Artificial Sequence
  Description of Artificial Sequence: Synthetic oligonucleotide
  Antisense strand to SEQ ID NO: 1395032
uucugcaucucacucaccg

SEQ ID NO: 1395034 - RNA, 19 nt, Artificial Sequence
  Description of Artificial Sequence: Synthetic oligonucleotide
  Sense strand starting at position 1538 of SEQ ID NO: 1243101
ccaggaagacuucgacuuu

SEQ ID NO: 1395035 - RNA, 19 nt, Artificial Sequence
  Description of Artificial Sequence: Synthetic oligonucleotide
  Antisense strand to SEQ ID NO: 1395034
aaagucgaagucuuccugg

SEQ ID NO: 1395036 - RNA, 19 nt, Artificial Sequence
  Description of Artificial Sequence: Synthetic oligonucleotide
  Sense strand starting at position 1549 of SEQ ID NO: 1243101
ucgacuuucuguccugaac

SEQ ID NO: 1395037 - RNA, 19 nt, Artificial Sequence
  Description of Artificial Sequence: Synthetic oligonucleotide
  Antisense strand to SEQ ID NO: 1395036
guucaggacagaaagucga

SEQ ID NO: 1395038 - RNA, 19 nt, Artificial Sequence
  Description of Artificial Sequence: Synthetic oligonucleotide
  Sense strand starting at position 1616 of SEQ ID NO: 1243101
guagcucagagucagguua

SEQ ID NO: 1395039 - RNA, 19 nt, Artificial Sequence
  Description of Artificial Sequence: Synthetic oligonucleotide
  Antisense strand to SEQ ID NO: 1395038
uaaccugacucugagcuac

SEQ ID NO: 1395040 - RNA, 19 nt, Artificial Sequence
  Description of Artificial Sequence: Synthetic oligonucleotide
  Sense strand starting at position 1844 of SEQ ID NO: 1243101
ucucuauggugucugggaa

SEQ ID NO: 1395041 - RNA, 19 nt, Artificial Sequence
  Description of Artificial Sequence: Synthetic oligonucleotide
  Antisense strand to SEQ ID NO: 1395040
uucccagacaccauagaga

SEQ ID NO: 1395042 - RNA, 19 nt, Artificial Sequence
  Description of Artificial Sequence: Synthetic oligonucleotide
  Sense strand starting at position 1845 of SEQ ID NO: 1243101
cucuauggugucugggaau

SEQ ID NO: 1395043 - RNA, 19 nt, Artificial Sequence
  Description of Artificial Sequence: Synthetic oligonucleotide
  Antisense strand to SEQ ID NO: 1395042
auucccagacaccauagag

SEQ ID NO: 1395044 - RNA, 19 nt, Artificial Sequence
  Description of Artificial Sequence: Synthetic oligonucleotide
  Sense strand starting at position 1848 of SEQ ID NO: 1243101
uauggugucugggaauuug

SEQ ID NO: 1395045 - RNA, 19 nt, Artificial Sequence
  Description of Artificial Sequence: Synthetic oligonucleotide
  Antisense strand to SEQ ID NO: 1395044
caaauucccagacaccaua

SEQ ID NO: 1395046 - RNA, 19 nt, Artificial Sequence
  Description of Artificial Sequence: Synthetic oligonucleotide
  Sense strand starting at position 1856 of SEQ ID NO: 1243101
cugggaauuuggcauccca

SEQ ID NO: 1395047 - RNA, 19 nt, Artificial Sequence
  Description of Artificial Sequence: Synthetic oligonucleotide
  Antisense strand to SEQ ID NO: 1395046
ugggaugccaaauucccag

SEQ ID NO: 1395048 - RNA, 19 nt, Artificial Sequence
  Description of Artificial Sequence: Synthetic oligonucleotide
  Sense strand starting at position 2345 of SEQ ID NO: 1243101
ccaggucucuagucaauag

SEQ ID NO: 1395049 - RNA, 19 nt, Artificial Sequence
  Description of Artificial Sequence: Synthetic oligonucleotide
  Antisense strand to SEQ ID NO: 1395048
cuauugacuagagaccugg

SEQ ID NO: 1395050 - RNA, 19 nt, Artificial Sequence
  Description of Artificial Sequence: Synthetic oligonucleotide
  Sense strand starting at position 2349 of SEQ ID NO: 1243101
gucucuagucaauagcuaa

SEQ ID NO: 1395051 - RNA, 19 nt, Artificial Sequence
  Description of Artificial Sequence: Synthetic oligonucleotide
  Antisense strand to SEQ ID NO: 1395050
uuagcuauugacuagagac

SEQ ID NO: 1395052 - RNA, 19 nt, Artificial Sequence
  Description of Artificial Sequence: Synthetic oligonucleotide
  Sense strand starting at position 2480 of SEQ ID NO: 1243101
uucgcaucucuggcaguau

SEQ ID NO: 1395053 - RNA, 19 nt, Artificial Sequence
  Description of Artificial Sequence: Synthetic oligonucleotide
  Antisense strand to SEQ ID NO: 1395052
auacugccagagaugcgaa

SEQ ID NO: 1395054 - RNA, 19 nt, Artificial Sequence
  Description of Artificial Sequence: Synthetic oligonucleotide
  Sense strand starting at position 2629 of SEQ ID NO: 1243101
agguccuccuuugcauaaa

SEQ ID NO: 1395055 - RNA, 19 nt, Artificial Sequence
  Description of Artificial Sequence: Synthetic oligonucleotide
  Antisense strand to SEQ ID NO: 1395054
uuuaugcaaaggaggaccu

SEQ ID NO: 1395056 - RNA, 19 nt, Artificial Sequence
  Description of Artificial Sequence: Synthetic oligonucleotide
  Sense strand starting at position 2641 of SEQ ID NO: 1243101
gcauaaaucucuccagggu

SEQ ID NO: 1395057 - RNA, 19 nt, Artificial Sequence
  Description of Artificial Sequence: Synthetic oligonucleotide
  Antisense strand to SEQ ID NO: 1395056
acccuggagagauuuaugc

SEQ ID NO: 1395058 - RNA, 19 nt, Artificial Sequence
  Description of Artificial Sequence: Synthetic oligonucleotide
  Sense strand starting at position 2711 of SEQ ID NO: 1243101
guggcaagucccuagaaga

SEQ ID NO: 1395059 - RNA, 19 nt, Artificial Sequence
  Description of Artificial Sequence: Synthetic oligonucleotide
  Antisense strand to SEQ ID NO: 1395058
ucuucuagggacuugccac

SEQ ID NO: 1395060 - RNA, 19 nt, Artificial Sequence
  Description of Artificial Sequence: Synthetic oligonucleotide
  Sense strand starting at position 2830 of SEQ ID NO: 1243101
cuguguuuggcccuguuua

SEQ ID NO: 1395061 - RNA, 19 nt, Artificial Sequence
  Description of Artificial Sequence: Synthetic oligonucleotide
  Antisense strand to SEQ ID NO: 1395060
uaaacagggccaaacacag

SEQ ID NO: 1395062 - RNA, 19 nt, Artificial Sequence
  Description of Artificial Sequence: Synthetic oligonucleotide
  Sense strand starting at position 3003 of SEQ ID NO: 1243101
cagcuucccuagguagaga

SEQ ID NO: 1395063 - RNA, 19 nt, Artificial Sequence
  Description of Artificial Sequence: Synthetic oligonucleotide
  Antisense strand to SEQ ID NO: 1395062
ucucuaccuagggaagcug

SEQ ID NO: 1395064 - RNA, 19 nt, Artificial Sequence
  Description of Artificial Sequence: Synthetic oligonucleotide
  Sense strand starting at position 3016 of SEQ ID NO: 1243101
uagagaggucagugaugaa

SEQ ID NO: 1395065 - RNA, 19 nt, Artificial Sequence
  Description of Artificial Sequence: Synthetic oligonucleotide
  Antisense strand to SEQ ID NO: 1395064
uucaucacugaccucucua

SEQ ID NO: 1395066 - RNA, 19 nt, Artificial Sequence
  Description of Artificial Sequence: Synthetic oligonucleotide
  Sense strand starting at position 3037 of SEQ ID NO: 1243101
uucucuauggccuagguau

SEQ ID NO: 1395067 - RNA, 19 nt, Artificial Sequence
  Description of Artificial Sequence: Synthetic oligonucleotide
  Antisense strand to SEQ ID NO: 1395066
auaccuaggccauagagaa

SEQ ID NO: 1395068 - RNA, 19 nt, Artificial Sequence
  Description of Artificial Sequence: Synthetic oligonucleotide
  Sense strand starting at position 3101 of SEQ ID NO: 1243101
acagucaguccuggaagca

SEQ ID NO: 1395069 - RNA, 19 nt, Artificial Sequence
  Description of Artificial Sequence: Synthetic oligonucleotide
  Antisense strand to SEQ ID NO: 1395068
ugcuuccaggacugacugu

SEQ ID NO: 1395070 - RNA, 19 nt, Artificial Sequence
  Description of Artificial Sequence: Synthetic oligonucleotide
  Sense strand starting at position 3102 of SEQ ID NO: 1243101
cagucaguccuggaagcaa

SEQ ID NO: 1395071 - RNA, 19 nt, Artificial Sequence
  Description of Artificial Sequence: Synthetic oligonucleotide
  Antisense strand to SEQ ID NO: 1395070
uugcuuccaggacugacug

SEQ ID NO: 1395072 - RNA, 19 nt, Artificial Sequence
  Description of Artificial Sequence: Synthetic oligonucleotide
  Sense strand starting at position 3142 of SEQ ID NO: 1243101
gaauaaguauacuuugaug

SEQ ID NO: 1395073 - RNA, 19 nt, Artificial Sequence
  Description of Artificial Sequence: Synthetic oligonucleotide
  Antisense strand to SEQ ID NO: 1395072
caucaaaguauacuuauuc

SEQ ID NO: 1395074 - RNA, 19 nt, Artificial Sequence
  Description of Artificial Sequence: Synthetic oligonucleotide
  Sense strand starting at position 3204 of SEQ ID NO: 1243101
gagaaacguggccgaagaa

SEQ ID NO: 1395075 - RNA, 19 nt, Artificial Sequence
  Description of Artificial Sequence: Synthetic oligonucleotide
  Antisense strand to SEQ ID NO: 1395074
uucuucggccacguuucuc

SEQ ID NO: 1395076 - RNA, 19 nt, Artificial Sequence
  Description of Artificial Sequence: Synthetic oligonucleotide
  Sense strand starting at position 3247 of SEQ ID NO: 1243101
caggcaaugccagagaucu

SEQ ID NO: 1395077 - RNA, 19 nt, Artificial Sequence
  Description of Artificial Sequence: Synthetic oligonucleotide
  Antisense strand to SEQ ID NO: 1395076
agaucucuggcauugccug

SEQ ID NO: 1395078 - RNA, 19 nt, Artificial Sequence
  Description of Artificial Sequence: Synthetic oligonucleotide
  Sense strand starting at position 3249 of SEQ ID NO: 1243101
ggcaaugccagagaucuga

SEQ ID NO: 1395079 - RNA, 19 nt, Artificial Sequence
  Description of Artificial Sequence: Synthetic oligonucleotide
  Antisense strand to SEQ ID NO: 1395078
ucagaucucuggcauugcc

SEQ ID NO: 1395080 - RNA, 19 nt, Artificial Sequence
  Description of Artificial Sequence: Synthetic oligonucleotide
  Sense strand starting at position 3253 of SEQ ID NO: 1243101
augccagagaucugaaggu

SEQ ID NO: 1395081 - RNA, 19 nt, Artificial Sequence
  Description of Artificial Sequence: Synthetic oligonucleotide
  Antisense strand to SEQ ID NO: 1395080
accuucagaucucuggcau

SEQ ID NO: 1395082 - RNA, 19 nt, Artificial Sequence
  Description of Artificial Sequence: Synthetic oligonucleotide
  Sense strand starting at position 3371 of SEQ ID NO: 1243101
ccaggaaagccuuagcugu

SEQ ID NO: 1395083 - RNA, 19 nt, Artificial Sequence
  Description of Artificial Sequence: Synthetic oligonucleotide
  Antisense strand to SEQ ID NO: 1395082
acagcuaaggcuuuccugg

SEQ ID NO: 1395084 - RNA, 19 nt, Artificial Sequence
  Description of Artificial Sequence: Synthetic oligonucleotide
  Sense strand starting at position 3899 of SEQ ID NO: 1243101
uagagagugucccuggguu

SEQ ID NO: 1395085 - RNA, 19 nt, Artificial Sequence
  Description of Artificial Sequence: Synthetic oligonucleotide
  Antisense strand to SEQ ID NO: 1395084
aacccagggacacucucua

SEQ ID NO: 1395086 - RNA, 19 nt, Artificial Sequence
  Description of Artificial Sequence: Synthetic oligonucleotide
  Sense strand starting at position 3912 of SEQ ID NO: 1243101
uggguuugaggaggucaua

SEQ ID NO: 1395087 - RNA, 19 nt, Artificial Sequence
  Description of Artificial Sequence: Synthetic oligonucleotide
  Antisense strand to SEQ ID NO: 1395086
uaugaccuccucaaaccca

SEQ ID NO: 1395088 - RNA, 19 nt, Artificial Sequence
  Description of Artificial Sequence: Synthetic oligonucleotide
  Sense strand starting at position 11 of SEQ ID NO: 1243102
gccugaugguuccucauga

SEQ ID NO: 1395089 - RNA, 19 nt, Artificial Sequence
  Description of Artificial Sequence: Synthetic oligonucleotide
  Antisense strand to SEQ ID NO: 1395088
ucaugaggaaccaucaggc

SEQ ID NO: 1395090 - RNA, 19 nt, Artificial Sequence
  Description of Artificial Sequence: Synthetic oligonucleotide
  Sense strand starting at position 150 of SEQ ID NO: 1243102
ucuguuauuucuguaugua

SEQ ID NO: 1395091 - RNA, 19 nt, Artificial Sequence
  Description of Artificial Sequence: Synthetic oligonucleotide
  Antisense strand to SEQ ID NO: 1395090
uacauacagaaauaacaga

SEQ ID NO: 1395092 - RNA, 19 nt, Artificial Sequence
  Description of Artificial Sequence: Synthetic oligonucleotide
  Sense strand starting at position 256 of SEQ ID NO: 1243102
aagguuuaggucugggaug

SEQ ID NO: 1395093 - RNA, 19 nt, Artificial Sequence
  Description of Artificial Sequence: Synthetic oligonucleotide
  Antisense strand to SEQ ID NO: 1395092
caucccagaccuaaaccuu

SEQ ID NO: 1395094 - RNA, 19 nt, Artificial Sequence
  Description of Artificial Sequence: Synthetic oligonucleotide
  Sense strand starting at position 258 of SEQ ID NO: 1243102
gguuuaggucugggaugga

SEQ ID NO: 1395095 - RNA, 19 nt, Artificial Sequence
  Description of Artificial Sequence: Synthetic oligonucleotide
  Antisense strand to SEQ ID NO: 1395094
uccaucccagaccuaaacc

SEQ ID NO: 1395096 - RNA, 19 nt, Artificial Sequence
  Description of Artificial Sequence: Synthetic oligonucleotide
  Sense strand starting at position 409 of SEQ ID NO: 1243102
agggaaaccugagaauaaa

SEQ ID NO: 1395097 - RNA, 19 nt, Artificial Sequence
  Description of Artificial Sequence: Synthetic oligonucleotide
  Antisense strand to SEQ ID NO: 1395096
uuuauucucagguuucccu

SEQ ID NO: 1395098 - RNA, 19 nt, Artificial Sequence
  Description of Artificial Sequence: Synthetic oligonucleotide
  Sense strand starting at position 438 of SEQ ID NO: 1243102
ggagaagucucuguaccac

SEQ ID NO: 1395099 - RNA, 19 nt, Artificial Sequence
  Description of Artificial Sequence: Synthetic oligonucleotide
  Antisense strand to SEQ ID NO: 1395098
gugguacagagacuucucc

SEQ ID NO: 1395100 - RNA, 19 nt, Artificial Sequence
  Description of Artificial Sequence: Synthetic oligonucleotide
  Sense strand starting at position 534 of SEQ ID NO: 1243102
gauggaggucagugaugua

SEQ ID NO: 1395101 - RNA, 19 nt, Artificial Sequence
  Description of Artificial Sequence: Synthetic oligonucleotide
  Antisense strand to SEQ ID NO: 1395100
uacaucacugaccuccauc

SEQ ID NO: 1395102 - RNA, 19 nt, Artificial Sequence
  Description of Artificial Sequence: Synthetic oligonucleotide
  Sense strand starting at position 604 of SEQ ID NO: 1243102
agagcccagucuuuaaacu

SEQ ID NO: 1395103 - RNA, 19 nt, Artificial Sequence
  Description of Artificial Sequence: Synthetic oligonucleotide
  Antisense strand to SEQ ID NO: 1395102
aguuuaaagacugggcucu

SEQ ID NO: 1395104 - RNA, 19 nt, Artificial Sequence
  Description of Artificial Sequence: Synthetic oligonucleotide
  Sense strand starting at position 681 of SEQ ID NO: 1243102
gggaaucaagucuaagugu

SEQ ID NO: 1395105 - RNA, 19 nt, Artificial Sequence
  Description of Artificial Sequence: Synthetic oligonucleotide
  Antisense strand to SEQ ID NO: 1395104
acacuuagacuugauuccc

SEQ ID NO: 1395106 - RNA, 19 nt, Artificial Sequence
  Description of Artificial Sequence: Synthetic oligonucleotide
  Sense strand starting at position 1068 of SEQ ID NO: 1243102
gggugagucuuccuaugag

SEQ ID NO: 1395107 - RNA, 19 nt, Artificial Sequence
  Description of Artificial Sequence: Synthetic oligonucleotide
  Antisense strand to SEQ ID NO: 1395106
cucauaggaagacucaccc

SEQ ID NO: 1395108 - RNA, 19 nt, Artificial Sequence
  Description of Artificial Sequence: Synthetic oligonucleotide
  Sense strand starting at position 1071 of SEQ ID NO: 1243102
ugagucuuccuaugagaga

SEQ ID NO: 1395109 - RNA, 19 nt, Artificial Sequence
  Description of Artificial Sequence: Synthetic oligonucleotide
  Antisense strand to SEQ ID NO: 1395108
ucucucauaggaagacuca

SEQ ID NO: 1395110 - RNA, 19 nt, Artificial Sequence
  Description of Artificial Sequence: Synthetic oligonucleotide
  Sense strand starting at position 1337 of SEQ ID NO: 1243102
uugugagugagaugcagaa

SEQ ID NO: 1395111 - RNA, 19 nt, Artificial Sequence
  Description of Artificial Sequence: Synthetic oligonucleotide
  Antisense strand to SEQ ID NO: 1395110
uucugcaucucacucacaa

SEQ ID NO: 1395112 - RNA, 19 nt, Artificial Sequence
  Description of Artificial Sequence: Synthetic oligonucleotide
  Sense strand starting at position 1339 of SEQ ID NO: 1243102
gugagugagaugcagaagu

SEQ ID NO: 1395113 - RNA, 19 nt, Artificial Sequence
  Description of Artificial Sequence: Synthetic oligonucleotide
  Antisense strand to SEQ ID NO: 1395112
acuucugcaucucacucac

SEQ ID NO: 1395114 - RNA, 19 nt, Artificial Sequence
  Description of Artificial Sequence: Synthetic oligonucleotide
  Sense strand starting at position 1341 of SEQ ID NO: 1243102
gagugagaugcagaaguua

SEQ ID NO: 1395115 - RNA, 19 nt, Artificial Sequence
  Description of Artificial Sequence: Synthetic oligonucleotide
  Antisense strand to SEQ ID NO: 1395114
uaacuucugcaucucacuc

SEQ ID NO: 1395116 - RNA, 19 nt, Artificial Sequence
  Description of Artificial Sequence: Synthetic oligonucleotide
  Sense strand starting at position 1621 of SEQ ID NO: 1243102
cucagagccugguuagaga

SEQ ID NO: 1395117 - RNA, 19 nt, Artificial Sequence
  Description of Artificial Sequence: Synthetic oligonucleotide
  Antisense strand to SEQ ID NO: 1395116
ucucuaaccaggcucugag

SEQ ID NO: 1395118 - RNA, 19 nt, Artificial Sequence
  Description of Artificial Sequence: Synthetic oligonucleotide
  Sense strand starting at position 1850 of SEQ ID NO: 1243102
uauggugucugggaauuug

SEQ ID NO: 1395119 - RNA, 19 nt, Artificial Sequence
  Description of Artificial Sequence: Synthetic oligonucleotide
  Antisense strand to SEQ ID NO: 1395118
caaauucccagacaccaua

SEQ ID NO: 1395120 - RNA, 19 nt, Artificial Sequence
  Description of Artificial Sequence: Synthetic oligonucleotide
  Sense strand starting at position 1858 of SEQ ID NO: 1243102
cugggaauuuggcauccua

SEQ ID NO: 1395121 - RNA, 19 nt, Artificial Sequence
  Description of Artificial Sequence: Synthetic oligonucleotide
  Antisense strand to SEQ ID NO: 1395120
uaggaugccaaauucccag

SEQ ID NO: 1395122 - RNA, 19 nt, Artificial Sequence
  Description of Artificial Sequence: Synthetic oligonucleotide
  Sense strand starting at position 2445 of SEQ ID NO: 1243102
gggaguagugugcaaggga

SEQ ID NO: 1395123 - RNA, 19 nt, Artificial Sequence
  Description of Artificial Sequence: Synthetic oligonucleotide
  Antisense strand to SEQ ID NO: 1395122
ucccuugcacacuacuccc

SEQ ID NO: 1395124 - RNA, 19 nt, Artificial Sequence
  Description of Artificial Sequence: Synthetic oligonucleotide
  Sense strand starting at position 2448 of SEQ ID NO: 1243102
aguagugugcaagggacau

SEQ ID NO: 1395125 - RNA, 19 nt, Artificial Sequence
  Description of Artificial Sequence: Synthetic oligonucleotide
  Antisense strand to SEQ ID NO: 1395124
augucccuugcacacuacu

SEQ ID NO: 1395126 - RNA, 19 nt, Artificial Sequence
  Description of Artificial Sequence: Synthetic oligonucleotide
  Sense strand starting at position 2812 of SEQ ID NO: 1243102
cucgucauuguccagauua

SEQ ID NO: 1395127 - RNA, 19 nt, Artificial Sequence
  Description of Artificial Sequence: Synthetic oligonucleotide
  Antisense strand to SEQ ID NO: 1395126
uaaucuggacaaugacgag

SEQ ID NO: 1395128 - RNA, 19 nt, Artificial Sequence
  Description of Artificial Sequence: Synthetic oligonucleotide
  Sense strand starting at position 2831 of SEQ ID NO: 1243102
ggaauacggguucgugaaa

SEQ ID NO: 1395129 - RNA, 19 nt, Artificial Sequence
  Description of Artificial Sequence: Synthetic oligonucleotide
  Antisense strand to SEQ ID NO: 1395128
uuucacgaacccguauucc

SEQ ID NO: 1395130 - RNA, 19 nt, Artificial Sequence
  Description of Artificial Sequence: Synthetic oligonucleotide
  Sense strand starting at position 2897 of SEQ ID NO: 1243102
gugauuaaacagggccaaa

SEQ ID NO: 1395131 - RNA, 19 nt, Artificial Sequence
  Description of Artificial Sequence: Synthetic oligonucleotide
  Antisense strand to SEQ ID NO: 1395130
uuuggcccuguuuaaucac

SEQ ID NO: 1395132 - RNA, 19 nt, Artificial Sequence
  Description of Artificial Sequence: Synthetic oligonucleotide
  Sense strand starting at position 2914 of SEQ ID NO: 1243102
aacacagacccguguaaca

SEQ ID NO: 1395133 - RNA, 19 nt, Artificial Sequence
  Description of Artificial Sequence: Synthetic oligonucleotide
  Antisense strand to SEQ ID NO: 1395132
uguuacacgggucuguguu

SEQ ID NO: 1395134 - RNA, 19 nt, Artificial Sequence
  Description of Artificial Sequence: Synthetic oligonucleotide
  Sense strand starting at position 2916 of SEQ ID NO: 1243102
cacagacccguguaacaua

SEQ ID NO: 1395135 - RNA, 19 nt, Artificial Sequence
  Description of Artificial Sequence: Synthetic oligonucleotide
  Antisense strand to SEQ ID NO: 1395134
uauguuacacgggucugug

SEQ ID NO: 1395136 - RNA, 19 nt, Artificial Sequence
  Description of Artificial Sequence: Synthetic oligonucleotide
  Sense strand starting at position 2921 of SEQ ID NO: 1243102
acccguguaacauagagua

SEQ ID NO: 1395137 - RNA, 19 nt, Artificial Sequence
  Description of Artificial Sequence: Synthetic oligonucleotide
  Antisense strand to SEQ ID NO: 1395136
uacucuauguuacacgggu

SEQ ID NO: 1395138 - RNA, 19 nt, Artificial Sequence
  Description of Artificial Sequence: Synthetic oligonucleotide
  Sense strand starting at position 2923 of SEQ ID NO: 1243102
ccguguaacauagaguaau

SEQ ID NO: 1395139 - RNA, 19 nt, Artificial Sequence
  Description of Artificial Sequence: Synthetic oligonucleotide
  Antisense strand to SEQ ID NO: 1395138
auuacucuauguuacacgg

SEQ ID NO: 1395140 - RNA, 19 nt, Artificial Sequence
  Description of Artificial Sequence: Synthetic oligonucleotide
  Sense strand starting at position 2966 of SEQ ID NO: 1243102
agcgcucuugcuuucuaau

SEQ ID NO: 1395141 - RNA, 19 nt, Artificial Sequence
  Description of Artificial Sequence: Synthetic oligonucleotide
  Antisense strand to SEQ ID NO: 1395140
auuagaaagcaagagcgcu

SEQ ID NO: 1395142 - RNA, 19 nt, Artificial Sequence
  Description of Artificial Sequence: Synthetic oligonucleotide
  Sense strand starting at position 2967 of SEQ ID NO: 1243102
gcgcucuugcuuucuaauu

SEQ ID NO: 1395143 - RNA, 19 nt, Artificial Sequence
  Description of Artificial Sequence: Synthetic oligonucleotide
  Antisense strand to SEQ ID NO: 1395142
aauuagaaagcaagagcgc

SEQ ID NO: 1395144 - RNA, 19 nt, Artificial Sequence
  Description of Artificial Sequence: Synthetic oligonucleotide
  Sense strand starting at position 2968 of SEQ ID NO: 1243102
cgcucuugcuuucuaauuu

SEQ ID NO: 1395145 - RNA, 19 nt, Artificial Sequence
  Description of Artificial Sequence: Synthetic oligonucleotide
  Antisense strand to SEQ ID NO: 1395144
aaauuagaaagcaagagcg

SEQ ID NO: 1395146 - RNA, 19 nt, Artificial Sequence
  Description of Artificial Sequence: Synthetic oligonucleotide
  Sense strand starting at position 3095 of SEQ ID NO: 1243102
uggagagauuuaugcaaag

SEQ ID NO: 1395147 - RNA, 19 nt, Artificial Sequence
  Description of Artificial Sequence: Synthetic oligonucleotide
  Antisense strand to SEQ ID NO: 1395146
cuuugcauaaaucucucca

SEQ ID NO: 1395148 - RNA, 19 nt, Artificial Sequence
  Description of Artificial Sequence: Synthetic oligonucleotide
  Sense strand starting at position 3142 of SEQ ID NO: 1243102
cuccucaagaguggagaau

SEQ ID NO: 1395149 - RNA, 19 nt, Artificial Sequence
  Description of Artificial Sequence: Synthetic oligonucleotide
  Antisense strand to SEQ ID NO: 1395148
auucuccacucuugaggag

SEQ ID NO: 1395150 - RNA, 19 nt, Artificial Sequence
  Description of Artificial Sequence: Synthetic oligonucleotide
  Sense strand starting at position 3169 of SEQ ID NO: 1243102
gaggcagaucacuguuucu

SEQ ID NO: 1395151 - RNA, 19 nt, Artificial Sequence
  Description of Artificial Sequence: Synthetic oligonucleotide
  Antisense strand to SEQ ID NO: 1395150
agaaacagugaucugccuc

SEQ ID NO: 1395152 - RNA, 19 nt, Artificial Sequence
  Description of Artificial Sequence: Synthetic oligonucleotide
  Sense strand starting at position 3372 of SEQ ID NO: 1243102
ccaggaaaggcuuagcuau

SEQ ID NO: 1395153 - RNA, 19 nt, Artificial Sequence
  Description of Artificial Sequence: Synthetic oligonucleotide
  Antisense strand to SEQ ID NO: 1395152
auagcuaagccuuuccugg

SEQ ID NO: 1395154 - RNA, 19 nt, Artificial Sequence
  Description of Artificial Sequence: Synthetic oligonucleotide
  Sense strand starting at position 3380 of SEQ ID NO: 1243102
ggcuuagcuauugacuaga

SEQ ID NO: 1395155 - RNA, 19 nt, Artificial Sequence
  Description of Artificial Sequence: Synthetic oligonucleotide
  Antisense strand to SEQ ID NO: 1395154
ucuagucaauagcuaagcc

SEQ ID NO: 1395156 - RNA, 19 nt, Artificial Sequence
  Description of Artificial Sequence: Synthetic oligonucleotide
  Sense strand starting at position 3382 of SEQ ID NO: 1243102
cuuagcuauugacuagaga

SEQ ID NO: 1395157 - RNA, 19 nt, Artificial Sequence
  Description of Artificial Sequence: Synthetic oligonucleotide
  Antisense strand to SEQ ID NO: 1395156
ucucuagucaauagcuaag

SEQ ID NO: 1395158 - RNA, 19 nt, Artificial Sequence
  Description of Artificial Sequence: Synthetic oligonucleotide
  Sense strand starting at position 3707 of SEQ ID NO: 1243102
cccgucuccugacuauaaa

SEQ ID NO: 1395159 - RNA, 19 nt, Artificial Sequence
  Description of Artificial Sequence: Synthetic oligonucleotide
  Antisense strand to SEQ ID NO: 1395158
uuuauagucaggagacggg

SEQ ID NO: 1395160 - RNA, 19 nt, Artificial Sequence
  Description of Artificial Sequence: Synthetic oligonucleotide
  Sense strand starting at position 3901 of SEQ ID NO: 1243102
uagagagugucccuggguu

SEQ ID NO: 1395161 - RNA, 19 nt, Artificial Sequence
  Description of Artificial Sequence: Synthetic oligonucleotide
  Antisense strand to SEQ ID NO: 1395160
aacccagggacacucucua

SEQ ID NO: 1395162 - RNA, 19 nt, Artificial Sequence
  Description of Artificial Sequence: Synthetic oligonucleotide
  Sense strand starting at position 3917 of SEQ ID NO: 1243102
guuugaggaggucguauuu

SEQ ID NO: 1395163 - RNA, 19 nt, Artificial Sequence
  Description of Artificial Sequence: Synthetic oligonucleotide
  Antisense strand to SEQ ID NO: 1395162
aaauacgaccuccucaaac

SEQ ID NO: 1395164 - RNA, 19 nt, Artificial Sequence
  Description of Artificial Sequence: Synthetic oligonucleotide
  Sense strand starting at position 3934 of SEQ ID NO: 1243102
uuugcuaucagagguaaag

SEQ ID NO: 1395165 - RNA, 19 nt, Artificial Sequence
  Description of Artificial Sequence: Synthetic oligonucleotide
  Antisense strand to SEQ ID NO: 1395164
cuuuaccucugauagcaaa

SEQ ID NO: 1395166 - RNA, 19 nt, Artificial Sequence
  Description of Artificial Sequence: Synthetic oligonucleotide
  Sense strand starting at position 3967 of SEQ ID NO: 1243102
gguccagugcuuuccuguu

SEQ ID NO: 1395167 - RNA, 19 nt, Artificial Sequence
  Description of Artificial Sequence: Synthetic oligonucleotide
  Antisense strand to SEQ ID NO: 1395166
aacaggaaagcacuggacc

SEQ ID NO: 1395168 - RNA, 19 nt, Artificial Sequence
  Description of Artificial Sequence: Synthetic oligonucleotide
  Sense strand starting at position 28 of SEQ ID NO: 1243103
aguuauuucucugaaguau

SEQ ID NO: 1395169 - RNA, 19 nt, Artificial Sequence
  Description of Artificial Sequence: Synthetic oligonucleotide
  Antisense strand to SEQ ID NO: 1395168
auacuucagagaaauaacu

SEQ ID NO: 1395170 - RNA, 19 nt, Artificial Sequence
  Description of Artificial Sequence: Synthetic oligonucleotide
  Sense strand starting at position 37 of SEQ ID NO: 1243103
ucugaaguauaccugacua

SEQ ID NO: 1395171 - RNA, 19 nt, Artificial Sequence
  Description of Artificial Sequence: Synthetic oligonucleotide
  Antisense strand to SEQ ID NO: 1395170
uagucagguauacuucaga

SEQ ID NO: 1395172 - RNA, 19 nt, Artificial Sequence
  Description of Artificial Sequence: Synthetic oligonucleotide
  Sense strand starting at position 276 of SEQ ID NO: 1243103
auagcacccguguaggauu

SEQ ID NO: 1395173 - RNA, 19 nt, Artificial Sequence
  Description of Artificial Sequence: Synthetic oligonucleotide
  Antisense strand to SEQ ID NO: 1395172
aauccuacacgggugcuau

SEQ ID NO: 1395174 - RNA, 19 nt, Artificial Sequence
  Description of Artificial Sequence: Synthetic oligonucleotide
  Sense strand starting at position 397 of SEQ ID NO: 1243103
gaugaaguuucuguaccac

SEQ ID NO: 1395175 - RNA, 19 nt, Artificial Sequence
  Description of Artificial Sequence: Synthetic oligonucleotide
  Antisense strand to SEQ ID NO: 1395174
gugguacagaaacuucauc

SEQ ID NO: 1395176 - RNA, 19 nt, Artificial Sequence
  Description of Artificial Sequence: Synthetic oligonucleotide
  Sense strand starting at position 454 of SEQ ID NO: 1243103
acccauauggugugcacaa

SEQ ID NO: 1395177 - RNA, 19 nt, Artificial Sequence
  Description of Artificial Sequence: Synthetic oligonucleotide
  Antisense strand to SEQ ID NO: 1395176
uugugcacaccauaugggu

SEQ ID NO: 1395178 - RNA, 19 nt, Artificial Sequence
  Description of Artificial Sequence: Synthetic oligonucleotide
  Sense strand starting at position 455 of SEQ ID NO: 1243103
cccauauggugugcacaau

SEQ ID NO: 1395179 - RNA, 19 nt, Artificial Sequence
  Description of Artificial Sequence: Synthetic oligonucleotide
  Antisense strand to SEQ ID NO: 1395178
auugugcacaccauauggg

SEQ ID NO: 1395180 - RNA, 19 nt, Artificial Sequence
  Description of Artificial Sequence: Synthetic oligonucleotide
  Sense strand starting at position 493 of SEQ ID NO: 1243103
gggugaacucagugaguaa

SEQ ID NO: 1395181 - RNA, 19 nt, Artificial Sequence
  Description of Artificial Sequence: Synthetic oligonucleotide
  Antisense strand to SEQ ID NO: 1395180
uuacucacugaguucaccc

SEQ ID NO: 1395182 - RNA, 19 nt, Artificial Sequence
  Description of Artificial Sequence: Synthetic oligonucleotide
  Sense strand starting at position 494 of SEQ ID NO: 1243103
ggugaacucagugaguaac

SEQ ID NO: 1395183 - RNA, 19 nt, Artificial Sequence
  Description of Artificial Sequence: Synthetic oligonucleotide
  Antisense strand to SEQ ID NO: 1395182
guuacucacugaguucacc

SEQ ID NO: 1395184 - RNA, 19 nt, Artificial Sequence
  Description of Artificial Sequence: Synthetic oligonucleotide
  Sense strand starting at position 559 of SEQ ID NO: 1243103
uccagagacuggucucuaa

SEQ ID NO: 1395185 - RNA, 19 nt, Artificial Sequence
  Description of Artificial Sequence: Synthetic oligonucleotide
  Antisense strand to SEQ ID NO: 1395184
uuagagaccagucucugga

SEQ ID NO: 1395186 - RNA, 19 nt, Artificial Sequence
  Description of Artificial Sequence: Synthetic oligonucleotide
  Sense strand starting at position 562 of SEQ ID NO: 1243103
agagacuggucucuaaacu

SEQ ID NO: 1395187 - RNA, 19 nt, Artificial Sequence
  Description of Artificial Sequence: Synthetic oligonucleotide
  Antisense strand to SEQ ID NO: 1395186
aguuuagagaccagucucu

SEQ ID NO: 1395188 - RNA, 19 nt, Artificial Sequence
  Description of Artificial Sequence: Synthetic oligonucleotide
  Sense strand starting at position 1011 of SEQ ID NO: 1243103
agaugcuacaguugggauu

SEQ ID NO: 1395189 - RNA, 19 nt, Artificial Sequence
  Description of Artificial Sequence: Synthetic oligonucleotide
  Antisense strand to SEQ ID NO: 1395188
aaucccaacuguagcaucu

SEQ ID NO: 1395190 - RNA, 19 nt, Artificial Sequence
  Description of Artificial Sequence: Synthetic oligonucleotide
  Sense strand starting at position 1025 of SEQ ID NO: 1243103
ggauuugugucccaagaga

SEQ ID NO: 1395191 - RNA, 19 nt, Artificial Sequence
  Description of Artificial Sequence: Synthetic oligonucleotide
  Antisense strand to SEQ ID NO: 1395190
ucucuugggacacaaaucc

SEQ ID NO: 1395192 - RNA, 19 nt, Artificial Sequence
  Description of Artificial Sequence: Synthetic oligonucleotide
  Sense strand starting at position 2085 of SEQ ID NO: 1243103
ggcugagcccagcauaagu

SEQ ID NO: 1395193 - RNA, 19 nt, Artificial Sequence
  Description of Artificial Sequence: Synthetic oligonucleotide
  Antisense strand to SEQ ID NO: 1395192
acuuaugcugggcucagcc

SEQ ID NO: 1395194 - RNA, 19 nt, Artificial Sequence
  Description of Artificial Sequence: Synthetic oligonucleotide
  Sense strand starting at position 2581 of SEQ ID NO: 1243103
uucucuucgccugagagga

SEQ ID NO: 1395195 - RNA, 19 nt, Artificial Sequence
  Description of Artificial Sequence: Synthetic oligonucleotide
  Antisense strand to SEQ ID NO: 1395194
uccucucaggcgaagagaa

SEQ ID NO: 1395196 - RNA, 19 nt, Artificial Sequence
  Description of Artificial Sequence: Synthetic oligonucleotide
  Sense strand starting at position 2619 of SEQ ID NO: 1243103
agguccuccuuugcagaua

SEQ ID NO: 1395197 - RNA, 19 nt, Artificial Sequence
  Description of Artificial Sequence: Synthetic oligonucleotide
  Antisense strand to SEQ ID NO: 1395196
uaucugcaaaggaggaccu

SEQ ID NO: 1395198 - RNA, 19 nt, Artificial Sequence
  Description of Artificial Sequence: Synthetic oligonucleotide
  Sense strand starting at position 2631 of SEQ ID NO: 1243103
gcagauaaaucuccaugcu

SEQ ID NO: 1395199 - RNA, 19 nt, Artificial Sequence
  Description of Artificial Sequence: Synthetic oligonucleotide
  Antisense strand to SEQ ID NO: 1395198
agcauggagauuuaucugc

SEQ ID NO: 1395200 - RNA, 19 nt, Artificial Sequence
  Description of Artificial Sequence: Synthetic oligonucleotide
  Sense strand starting at position 2736 of SEQ ID NO: 1243103
ugcagacucugcuuuaaau

SEQ ID NO: 1395201 - RNA, 19 nt, Artificial Sequence
  Description of Artificial Sequence: Synthetic oligonucleotide
  Antisense strand to SEQ ID NO: 1395200
auuuaaagcagagucugca

SEQ ID NO: 1395202 - RNA, 19 nt, Artificial Sequence
  Description of Artificial Sequence: Synthetic oligonucleotide
  Sense strand starting at position 2840 of SEQ ID NO: 1243103
guucgaguucugccuaguc

SEQ ID NO: 1395203 - RNA, 19 nt, Artificial Sequence
  Description of Artificial Sequence: Synthetic oligonucleotide
  Antisense strand to SEQ ID NO: 1395202
gacuaggcagaacucgaac

SEQ ID NO: 1395204 - RNA, 19 nt, Artificial Sequence
  Description of Artificial Sequence: Synthetic oligonucleotide
  Sense strand starting at position 2932 of SEQ ID NO: 1243103
cugacuauugcaugacauu

SEQ ID NO: 1395205 - RNA, 19 nt, Artificial Sequence
  Description of Artificial Sequence: Synthetic oligonucleotide
  Antisense strand to SEQ ID NO: 1395204
aaugucaugcaauagucag

SEQ ID NO: 1395206 - RNA, 19 nt, Artificial Sequence
  Description of Artificial Sequence: Synthetic oligonucleotide
  Sense strand starting at position 2933 of SEQ ID NO: 1243103
ugacuauugcaugacauug

SEQ ID NO: 1395207 - RNA, 19 nt, Artificial Sequence
  Description of Artificial Sequence: Synthetic oligonucleotide
  Antisense strand to SEQ ID NO: 1395206
caaugucaugcaauaguca

SEQ ID NO: 1395208 - RNA, 19 nt, Artificial Sequence
  Description of Artificial Sequence: Synthetic oligonucleotide
  Sense strand starting at position 2941 of SEQ ID NO: 1243103
gcaugacauugagucuaca

SEQ ID NO: 1395209 - RNA, 19 nt, Artificial Sequence
  Description of Artificial Sequence: Synthetic oligonucleotide
  Antisense strand to SEQ ID NO: 1395208
uguagacucaaugucaugc

SEQ ID NO: 1395210 - RNA, 19 nt, Artificial Sequence
  Description of Artificial Sequence: Synthetic oligonucleotide
  Sense strand starting at position 3079 of SEQ ID NO: 1243103
cuggucgucacagagcuaa

SEQ ID NO: 1395211 - RNA, 19 nt, Artificial Sequence
  Description of Artificial Sequence: Synthetic oligonucleotide
  Antisense strand to SEQ ID NO: 1395210
uuagcucugugacgaccag

SEQ ID NO: 1395212 - RNA, 19 nt, Artificial Sequence
  Description of Artificial Sequence: Synthetic oligonucleotide
  Sense strand starting at position 3134 of SEQ ID NO: 1243103
aaaggaaaguguccaugau

SEQ ID NO: 1395213 - RNA, 19 nt, Artificial Sequence
  Description of Artificial Sequence: Synthetic oligonucleotide
  Antisense strand to SEQ ID NO: 1395212
aucauggacacuuuccuuu

SEQ ID NO: 1395214 - RNA, 19 nt, Artificial Sequence
  Description of Artificial Sequence: Synthetic oligonucleotide
  Sense strand starting at position 3158 of SEQ ID NO: 1243103
cuuccuuugguccagauau

SEQ ID NO: 1395215 - RNA, 19 nt, Artificial Sequence
  Description of Artificial Sequence: Synthetic oligonucleotide
  Antisense strand to SEQ ID NO: 1395214
auaucuggaccaaaggaag

SEQ ID NO: 1395216 - RNA, 19 nt, Artificial Sequence
  Description of Artificial Sequence: Synthetic oligonucleotide
  Sense strand starting at position 3160 of SEQ ID NO: 1243103
uccuuugguccagauaugu

SEQ ID NO: 1395217 - RNA, 19 nt, Artificial Sequence
  Description of Artificial Sequence: Synthetic oligonucleotide
  Antisense strand to SEQ ID NO: 1395216
acauaucuggaccaaagga

SEQ ID NO: 1395218 - RNA, 19 nt, Artificial Sequence
  Description of Artificial Sequence: Synthetic oligonucleotide
  Sense strand starting at position 3170 of SEQ ID NO: 1243103
cagauaugucgucagcacu

SEQ ID NO: 1395219 - RNA, 19 nt, Artificial Sequence
  Description of Artificial Sequence: Synthetic oligonucleotide
  Antisense strand to SEQ ID NO: 1395218
agugcugacgacauaucug

SEQ ID NO: 1395220 - RNA, 19 nt, Artificial Sequence
  Description of Artificial Sequence: Synthetic oligonucleotide
  Sense strand starting at position 3186 of SEQ ID NO: 1243103
acuucucuauugcuggaaa

SEQ ID NO: 1395221 - RNA, 19 nt, Artificial Sequence
  Description of Artificial Sequence: Synthetic oligonucleotide
  Antisense strand to SEQ ID NO: 1395220
uuuccagcaauagagaagu

SEQ ID NO: 1395222 - RNA, 19 nt, Artificial Sequence
  Description of Artificial Sequence: Synthetic oligonucleotide
  Sense strand starting at position 3188 of SEQ ID NO: 1243103
uucucuauugcuggaaauc

SEQ ID NO: 1395223 - RNA, 19 nt, Artificial Sequence
  Description of Artificial Sequence: Synthetic oligonucleotide
  Antisense strand to SEQ ID NO: 1395222
gauuuccagcaauagagaa

SEQ ID NO: 1395224 - RNA, 19 nt, Artificial Sequence
  Description of Artificial Sequence: Synthetic oligonucleotide
  Sense strand starting at position 3189 of SEQ ID NO: 1243103
ucucuauugcuggaaaucu

SEQ ID NO: 1395225 - RNA, 19 nt, Artificial Sequence
  Description of Artificial Sequence: Synthetic oligonucleotide
  Antisense strand to SEQ ID NO: 1395224
agauuuccagcaauagaga

SEQ ID NO: 1395226 - RNA, 19 nt, Artificial Sequence
  Description of Artificial Sequence: Synthetic oligonucleotide
  Sense strand starting at position 3441 of SEQ ID NO: 1243103
ggcagauugggccauugua

SEQ ID NO: 1395227 - RNA, 19 nt, Artificial Sequence
  Description of Artificial Sequence: Synthetic oligonucleotide
  Antisense strand to SEQ ID NO: 1395226
uacaauggcccaaucugcc

SEQ ID NO: 1395228 - RNA, 19 nt, Artificial Sequence
  Description of Artificial Sequence: Synthetic oligonucleotide
  Sense strand starting at position 3567 of SEQ ID NO: 1243103
aguaauccauaaguguaau

SEQ ID NO: 1395229 - RNA, 19 nt, Artificial Sequence
  Description of Artificial Sequence: Synthetic oligonucleotide
  Antisense strand to SEQ ID NO: 1395228
auuacacuuauggauuacu

SEQ ID NO: 1395230 - RNA, 19 nt, Artificial Sequence
  Description of Artificial Sequence: Synthetic oligonucleotide
  Sense strand starting at position 3621 of SEQ ID NO: 1243103
aucuuccauguguaagaca

SEQ ID NO: 1395231 - RNA, 19 nt, Artificial Sequence
  Description of Artificial Sequence: Synthetic oligonucleotide
  Antisense strand to SEQ ID NO: 1395230
ugucuuacacauggaagau

SEQ ID NO: 1395232 - RNA, 19 nt, Artificial Sequence
  Description of Artificial Sequence: Synthetic oligonucleotide
  Sense strand starting at position 3768 of SEQ ID NO: 1243103
auucuucuguaucugacau

SEQ ID NO: 1395233 - RNA, 19 nt, Artificial Sequence
  Description of Artificial Sequence: Synthetic oligonucleotide
  Antisense strand to SEQ ID NO: 1395232
augucagauacagaagaau

SEQ ID NO: 1395234 - RNA, 19 nt, Artificial Sequence
  Description of Artificial Sequence: Synthetic oligonucleotide
  Sense strand starting at position 3809 of SEQ ID NO: 1243103
gcuuuauaacccuaguguu

SEQ ID NO: 1395235 - RNA, 19 nt, Artificial Sequence
  Description of Artificial Sequence: Synthetic oligonucleotide
  Antisense strand to SEQ ID NO: 1395234
aacacuaggguuauaaagc

SEQ ID NO: 1395236 - RNA, 19 nt, Artificial Sequence
  Description of Artificial Sequence: Synthetic oligonucleotide
  Sense strand starting at position 3849 of SEQ ID NO: 1243103
cugaauggcucucuuuaga

SEQ ID NO: 1395237 - RNA, 19 nt, Artificial Sequence
  Description of Artificial Sequence: Synthetic oligonucleotide
  Antisense strand to SEQ ID NO: 1395236
ucuaaagagagccauucag

SEQ ID NO: 1395238 - RNA, 19 nt, Artificial Sequence
  Description of Artificial Sequence: Synthetic oligonucleotide
  Sense strand starting at position 3879 of SEQ ID NO: 1243103
augcucaugcgguagauga

SEQ ID NO: 1395239 - RNA, 19 nt, Artificial Sequence
  Description of Artificial Sequence: Synthetic oligonucleotide
  Antisense strand to SEQ ID NO: 1395238
ucaucuaccgcaugagcau

SEQ ID NO: 1395240 - RNA, 19 nt, Artificial Sequence
  Description of Artificial Sequence: Synthetic oligonucleotide
  Sense strand starting at position 3927 of SEQ ID NO: 1243103
aggccuuuaugugcaaaua

SEQ ID NO: 1395241 - RNA, 19 nt, Artificial Sequence
  Description of Artificial Sequence: Synthetic oligonucleotide
  Antisense strand to SEQ ID NO: 1395240
uauuugcacauaaaggccu

SEQ ID NO: 1395242 - RNA, 19 nt, Artificial Sequence
  Description of Artificial Sequence: Synthetic oligonucleotide
  Sense strand starting at position 3928 of SEQ ID NO: 1243103
ggccuuuaugugcaaauaa

SEQ ID NO: 1395243 - RNA, 19 nt, Artificial Sequence
  Description of Artificial Sequence: Synthetic oligonucleotide
  Antisense strand to SEQ ID NO: 1395242
uuauuugcacauaaaggcc

SEQ ID NO: 1395244 - RNA, 19 nt, Artificial Sequence
  Description of Artificial Sequence: Synthetic oligonucleotide
  Sense strand starting at position 3956 of SEQ ID NO: 1243103
cccuaugcuccauagaaug

SEQ ID NO: 1395245 - RNA, 19 nt, Artificial Sequence
  Description of Artificial Sequence: Synthetic oligonucleotide
  Antisense strand to SEQ ID NO: 1395244
cauucuauggagcauaggg

SEQ ID NO: 1395246 - RNA, 19 nt, Artificial Sequence
  Description of Artificial Sequence: Synthetic oligonucleotide
  Sense strand starting at position 3961 of SEQ ID NO: 1243103
ugcuccauagaaugaacaa

SEQ ID NO: 1395247 - RNA, 19 nt, Artificial Sequence
  Description of Artificial Sequence: Synthetic oligonucleotide
  Antisense strand to SEQ ID NO: 1395246
uuguucauucuauggagca

SEQ ID NO: 1395248 - RNA, 19 nt, Artificial Sequence
  Description of Artificial Sequence: Synthetic oligonucleotide
  Sense strand starting at position 135 of SEQ ID NO: 1243104
gcaggauugcaggaaccuu

SEQ ID NO: 1395249 - RNA, 19 nt, Artificial Sequence
  Description of Artificial Sequence: Synthetic oligonucleotide
  Antisense strand to SEQ ID NO: 1395248
aagguuccugcaauccugc

SEQ ID NO: 1395250 - RNA, 19 nt, Artificial Sequence
  Description of Artificial Sequence: Synthetic oligonucleotide
  Sense strand starting at position 203 of SEQ ID NO: 1243104
cuggguuuccuacaaucca

SEQ ID NO: 1395251 - RNA, 19 nt, Artificial Sequence
  Description of Artificial Sequence: Synthetic oligonucleotide
  Antisense strand to SEQ ID NO: 1395250
uggauuguaggaaacccag

SEQ ID NO: 1395252 - RNA, 19 nt, Artificial Sequence
  Description of Artificial Sequence: Synthetic oligonucleotide
  Sense strand starting at position 266 of SEQ ID NO: 1243104
gagccagaauagucuagau

SEQ ID NO: 1395253 - RNA, 19 nt, Artificial Sequence
  Description of Artificial Sequence: Synthetic oligonucleotide
  Antisense strand to SEQ ID NO: 1395252
aucuagacuauucuggcuc

SEQ ID NO: 1395254 - RNA, 19 nt, Artificial Sequence
  Description of Artificial Sequence: Synthetic oligonucleotide
  Sense strand starting at position 628 of SEQ ID NO: 1243104
auggcauggcuuugucaga

SEQ ID NO: 1395255 - RNA, 19 nt, Artificial Sequence
  Description of Artificial Sequence: Synthetic oligonucleotide
  Antisense strand to SEQ ID NO: 1395254
ucugacaaagccaugccau

SEQ ID NO: 1395256 - RNA, 19 nt, Artificial Sequence
  Description of Artificial Sequence: Synthetic oligonucleotide
  Sense strand starting at position 629 of SEQ ID NO: 1243104
uggcauggcuuugucagaa

SEQ ID NO: 1395257 - RNA, 19 nt, Artificial Sequence
  Description of Artificial Sequence: Synthetic oligonucleotide
  Antisense strand to SEQ ID NO: 1395256
uucugacaaagccaugcca

SEQ ID NO: 1395258 - RNA, 19 nt, Artificial Sequence
  Description of Artificial Sequence: Synthetic oligonucleotide
  Sense strand starting at position 652 of SEQ ID NO: 1243104
acugguagaucuuugggau

SEQ ID NO: 1395259 - RNA, 19 nt, Artificial Sequence
  Description of Artificial Sequence: Synthetic oligonucleotide
  Antisense strand to SEQ ID NO: 1395258
aucccaaagaucuaccagu

SEQ ID NO: 1395260 - RNA, 19 nt, Artificial Sequence
  Description of Artificial Sequence: Synthetic oligonucleotide
  Sense strand starting at position 653 of SEQ ID NO: 1243104
cugguagaucuuugggaug

SEQ ID NO: 1395261 - RNA, 19 nt, Artificial Sequence
  Description of Artificial Sequence: Synthetic oligonucleotide
  Antisense strand to SEQ ID NO: 1395260
caucccaaagaucuaccag

SEQ ID NO: 1395262 - RNA, 19 nt, Artificial Sequence
  Description of Artificial Sequence: Synthetic oligonucleotide
  Sense strand starting at position 658 of SEQ ID NO: 1243104
agaucuuugggaugagggu

SEQ ID NO: 1395263 - RNA, 19 nt, Artificial Sequence
  Description of Artificial Sequence: Synthetic oligonucleotide
  Antisense strand to SEQ ID NO: 1395262
acccucaucccaaagaucu

SEQ ID NO: 1395264 - RNA, 19 nt, Artificial Sequence
  Description of Artificial Sequence: Synthetic oligonucleotide
  Sense strand starting at position 887 of SEQ ID NO: 1243104
aggacuggaucauuagguu

SEQ ID NO: 1395265 - RNA, 19 nt, Artificial Sequence
  Description of Artificial Sequence: Synthetic oligonucleotide
  Antisense strand to SEQ ID NO: 1395264
aaccuaaugauccaguccu

SEQ ID NO: 1395266 - RNA, 19 nt, Artificial Sequence
  Description of Artificial Sequence: Synthetic oligonucleotide
  Sense strand starting at position 891 of SEQ ID NO: 1243104
cuggaucauuagguuugaa

SEQ ID NO: 1395267 - RNA, 19 nt, Artificial Sequence
  Description of Artificial Sequence: Synthetic oligonucleotide
  Antisense strand to SEQ ID NO: 1395266
uucaaaccuaaugauccag

SEQ ID NO: 1395268 - RNA, 19 nt, Artificial Sequence
  Description of Artificial Sequence: Synthetic oligonucleotide
  Sense strand starting at position 894 of SEQ ID NO: 1243104
gaucauuagguuugaaauc

SEQ ID NO: 1395269 - RNA, 19 nt, Artificial Sequence
  Description of Artificial Sequence: Synthetic oligonucleotide
  Antisense strand to SEQ ID NO: 1395268
gauuucaaaccuaaugauc

SEQ ID NO: 1395270 - RNA, 19 nt, Artificial Sequence
  Description of Artificial Sequence: Synthetic oligonucleotide
  Sense strand starting at position 924 of SEQ ID NO: 1243104
uccagauccugggccuuaa

SEQ ID NO: 1395271 - RNA, 19 nt, Artificial Sequence
  Description of Artificial Sequence: Synthetic oligonucleotide
  Antisense strand to SEQ ID NO: 1395270
uuaaggcccaggaucugga

SEQ ID NO: 1395272 - RNA, 19 nt, Artificial Sequence
  Description of Artificial Sequence: Synthetic oligonucleotide
  Sense strand starting at position 1049 of SEQ ID NO: 1243104
caguuucuaguuugguaau

SEQ ID NO: 1395273 - RNA, 19 nt, Artificial Sequence
  Description of Artificial Sequence: Synthetic oligonucleotide
  Antisense strand to SEQ ID NO: 1395272
auuaccaaacuagaaacug

SEQ ID NO: 1395274 - RNA, 19 nt, Artificial Sequence
  Description of Artificial Sequence: Synthetic oligonucleotide
  Sense strand starting at position 1051 of SEQ ID NO: 1243104
guuucuaguuugguaauaa

SEQ ID NO: 1395275 - RNA, 19 nt, Artificial Sequence
  Description of Artificial Sequence: Synthetic oligonucleotide
  Antisense strand to SEQ ID NO: 1395274
uuauuaccaaacuagaaac

SEQ ID NO: 1395276 - RNA, 19 nt, Artificial Sequence
  Description of Artificial Sequence: Synthetic oligonucleotide
  Sense strand starting at position 1112 of SEQ ID NO: 1243104
uucugaaucagguguugaa

SEQ ID NO: 1395277 - RNA, 19 nt, Artificial Sequence
  Description of Artificial Sequence: Synthetic oligonucleotide
  Antisense strand to SEQ ID NO: 1395276
uucaacaccugauucagaa

SEQ ID NO: 1395278 - RNA, 19 nt, Artificial Sequence
  Description of Artificial Sequence: Synthetic oligonucleotide
  Sense strand starting at position 1334 of SEQ ID NO: 1243104
cguggagugagaugcagaa

SEQ ID NO: 1395279 - RNA, 19 nt, Artificial Sequence
  Description of Artificial Sequence: Synthetic oligonucleotide
  Antisense strand to SEQ ID NO: 1395278
uucugcaucucacuccacg

SEQ ID NO: 1395280 - RNA, 19 nt, Artificial Sequence
  Description of Artificial Sequence: Synthetic oligonucleotide
  Sense strand starting at position 1848 of SEQ ID NO: 1243104
cuguacuguggcugggaaa

SEQ ID NO: 1395281 - RNA, 19 nt, Artificial Sequence
  Description of Artificial Sequence: Synthetic oligonucleotide
  Antisense strand to SEQ ID NO: 1395280
uuucccagccacaguacag

SEQ ID NO: 1395282 - RNA, 19 nt, Artificial Sequence
  Description of Artificial Sequence: Synthetic oligonucleotide
  Sense strand starting at position 2025 of SEQ ID NO: 1243104
cuuuauaguccgggaagag

SEQ ID NO: 1395283 - RNA, 19 nt, Artificial Sequence
  Description of Artificial Sequence: Synthetic oligonucleotide
  Antisense strand to SEQ ID NO: 1395282
cucuucccggacuauaaag

SEQ ID NO: 1395284 - RNA, 19 nt, Artificial Sequence
  Description of Artificial Sequence: Synthetic oligonucleotide
  Sense strand starting at position 2171 of SEQ ID NO: 1243104
ggcuccaccucguugagaa

SEQ ID NO: 1395285 - RNA, 19 nt, Artificial Sequence
  Description of Artificial Sequence: Synthetic oligonucleotide
  Antisense strand to SEQ ID NO: 1395284
uucucaacgagguggagcc

SEQ ID NO: 1395286 - RNA, 19 nt, Artificial Sequence
  Description of Artificial Sequence: Synthetic oligonucleotide
  Sense strand starting at position 2213 of SEQ ID NO: 1243104
gcgucuugccugcccaauu

SEQ ID NO: 1395287 - RNA, 19 nt, Artificial Sequence
  Description of Artificial Sequence: Synthetic oligonucleotide
  Antisense strand to SEQ ID NO: 1395286
aauugggcaggcaagacgc

SEQ ID NO: 1395288 - RNA, 19 nt, Artificial Sequence
  Description of Artificial Sequence: Synthetic oligonucleotide
  Sense strand starting at position 2319 of SEQ ID NO: 1243104
cuguguguagcuuugcauu

SEQ ID NO: 1395289 - RNA, 19 nt, Artificial Sequence
  Description of Artificial Sequence: Synthetic oligonucleotide
  Antisense strand to SEQ ID NO: 1395288
aaugcaaagcuacacacag

SEQ ID NO: 1395290 - RNA, 19 nt, Artificial Sequence
  Description of Artificial Sequence: Synthetic oligonucleotide
  Sense strand starting at position 2390 of SEQ ID NO: 1243104
gagggagcagugugcaaau

SEQ ID NO: 1395291 - RNA, 19 nt, Artificial Sequence
  Description of Artificial Sequence: Synthetic oligonucleotide
  Antisense strand to SEQ ID NO: 1395290
auuugcacacugcucccuc

SEQ ID NO: 1395292 - RNA, 19 nt, Artificial Sequence
  Description of Artificial Sequence: Synthetic oligonucleotide
  Sense strand starting at position 2392 of SEQ ID NO: 1243104
gggagcagugugcaaauga

SEQ ID NO: 1395293 - RNA, 19 nt, Artificial Sequence
  Description of Artificial Sequence: Synthetic oligonucleotide
  Antisense strand to SEQ ID NO: 1395292
ucauuugcacacugcuccc

SEQ ID NO: 1395294 - RNA, 19 nt, Artificial Sequence
  Description of Artificial Sequence: Synthetic oligonucleotide
  Sense strand starting at position 2488 of SEQ ID NO: 1243104
uuucucuuaugucuaggga

SEQ ID NO: 1395295 - RNA, 19 nt, Artificial Sequence
  Description of Artificial Sequence: Synthetic oligonucleotide
  Antisense strand to SEQ ID NO: 1395294
ucccuagacauaagagaaa

SEQ ID NO: 1395296 - RNA, 19 nt, Artificial Sequence
  Description of Artificial Sequence: Synthetic oligonucleotide
  Sense strand starting at position 2701 of SEQ ID NO: 1243104
cggauuccggauuaaauua

SEQ ID NO: 1395297 - RNA, 19 nt, Artificial Sequence
  Description of Artificial Sequence: Synthetic oligonucleotide
  Antisense strand to SEQ ID NO: 1395296
uaauuuaauccggaauccg

SEQ ID NO: 1395298 - RNA, 19 nt, Artificial Sequence
  Description of Artificial Sequence: Synthetic oligonucleotide
  Sense strand starting at position 2722 of SEQ ID NO: 1243104
augcaagaaacaggguuau

SEQ ID NO: 1395299 - RNA, 19 nt, Artificial Sequence
  Description of Artificial Sequence: Synthetic oligonucleotide
  Antisense strand to SEQ ID NO: 1395298
auaacccuguuucuugcau

SEQ ID NO: 1395300 - RNA, 19 nt, Artificial Sequence
  Description of Artificial Sequence: Synthetic oligonucleotide
  Sense strand starting at position 2770 of SEQ ID NO: 1243104
uaacauuaauccguguuag

SEQ ID NO: 1395301 - RNA, 19 nt, Artificial Sequence
  Description of Artificial Sequence: Synthetic oligonucleotide
  Antisense strand to SEQ ID NO: 1395300
cuaacacggauuaauguua

SEQ ID NO: 1395302 - RNA, 19 nt, Artificial Sequence
  Description of Artificial Sequence: Synthetic oligonucleotide
  Sense strand starting at position 2771 of SEQ ID NO: 1243104
aacauuaauccguguuagg

SEQ ID NO: 1395303 - RNA, 19 nt, Artificial Sequence
  Description of Artificial Sequence: Synthetic oligonucleotide
  Antisense strand to SEQ ID NO: 1395302
ccuaacacggauuaauguu

SEQ ID NO: 1395304 - RNA, 19 nt, Artificial Sequence
  Description of Artificial Sequence: Synthetic oligonucleotide
  Sense strand starting at position 2943 of SEQ ID NO: 1243104
gucugaauccggucagcgu

SEQ ID NO: 1395305 - RNA, 19 nt, Artificial Sequence
  Description of Artificial Sequence: Synthetic oligonucleotide
  Antisense strand to SEQ ID NO: 1395304
acgcugaccggauucagac

SEQ ID NO: 1395306 - RNA, 19 nt, Artificial Sequence
  Description of Artificial Sequence: Synthetic oligonucleotide
  Sense strand starting at position 2960 of SEQ ID NO: 1243104
gucccaaagcaaugaugaa

SEQ ID NO: 1395307 - RNA, 19 nt, Artificial Sequence
  Description of Artificial Sequence: Synthetic oligonucleotide
  Antisense strand to SEQ ID NO: 1395306
uucaucauugcuuugggac

SEQ ID NO: 1395308 - RNA, 19 nt, Artificial Sequence
  Description of Artificial Sequence: Synthetic oligonucleotide
  Sense strand starting at position 2981 of SEQ ID NO: 1243104
uucccuuuggccuagauau

SEQ ID NO: 1395309 - RNA, 19 nt, Artificial Sequence
  Description of Artificial Sequence: Synthetic oligonucleotide
  Antisense strand to SEQ ID NO: 1395308
auaucuaggccaaagggaa

SEQ ID NO: 1395310 - RNA, 19 nt, Artificial Sequence
  Description of Artificial Sequence: Synthetic oligonucleotide
  Sense strand starting at position 2983 of SEQ ID NO: 1243104
cccuuuggccuagauauau

SEQ ID NO: 1395311 - RNA, 19 nt, Artificial Sequence
  Description of Artificial Sequence: Synthetic oligonucleotide
  Antisense strand to SEQ ID NO: 1395310
auauaucuaggccaaaggg

SEQ ID NO: 1395312 - RNA, 19 nt, Artificial Sequence
  Description of Artificial Sequence: Synthetic oligonucleotide
  Sense strand starting at position 3214 of SEQ ID NO: 1243104
cguuaagucacauauuggu

SEQ ID NO: 1395313 - RNA, 19 nt, Artificial Sequence
  Description of Artificial Sequence: Synthetic oligonucleotide
  Antisense strand to SEQ ID NO: 1395312
accaauaugugacuuaacg

SEQ ID NO: 1395314 - RNA, 19 nt, Artificial Sequence
  Description of Artificial Sequence: Synthetic oligonucleotide
  Sense strand starting at position 3373 of SEQ ID NO: 1243104
gcucauguggcugaugaga

SEQ ID NO: 1395315 - RNA, 19 nt, Artificial Sequence
  Description of Artificial Sequence: Synthetic oligonucleotide
  Antisense strand to SEQ ID NO: 1395314
ucucaucagccacaugagc

SEQ ID NO: 1395316 - RNA, 19 nt, Artificial Sequence
  Description of Artificial Sequence: Synthetic oligonucleotide
  Sense strand starting at position 3495 of SEQ ID NO: 1243104
gaugccuuagacuggguaa

SEQ ID NO: 1395317 - RNA, 19 nt, Artificial Sequence
  Description of Artificial Sequence: Synthetic oligonucleotide
  Antisense strand to SEQ ID NO: 1395316
uuacccagucuaaggcauc

SEQ ID NO: 1395318 - RNA, 19 nt, Artificial Sequence
  Description of Artificial Sequence: Synthetic oligonucleotide
  Sense strand starting at position 3536 of SEQ ID NO: 1243104
cucucaguucuggaagcau

SEQ ID NO: 1395319 - RNA, 19 nt, Artificial Sequence
  Description of Artificial Sequence: Synthetic oligonucleotide
  Antisense strand to SEQ ID NO: 1395318
augcuuccagaacugagag

SEQ ID NO: 1395320 - RNA, 19 nt, Artificial Sequence
  Description of Artificial Sequence: Synthetic oligonucleotide
  Sense strand starting at position 3706 of SEQ ID NO: 1243104
agcacuagguccucuuauu

SEQ ID NO: 1395321 - RNA, 19 nt, Artificial Sequence
  Description of Artificial Sequence: Synthetic oligonucleotide
  Antisense strand to SEQ ID NO: 1395320
aauaagaggaccuagugcu

SEQ ID NO: 1395322 - RNA, 19 nt, Artificial Sequence
  Description of Artificial Sequence: Synthetic oligonucleotide
  Sense strand starting at position 3862 of SEQ ID NO: 1243104
gaucauuugccaugugcaa

SEQ ID NO: 1395323 - RNA, 19 nt, Artificial Sequence
  Description of Artificial Sequence: Synthetic oligonucleotide
  Antisense strand to SEQ ID NO: 1395322
uugcacauggcaaaugauc

SEQ ID NO: 1395324 - RNA, 19 nt, Artificial Sequence
  Description of Artificial Sequence: Synthetic oligonucleotide
  Sense strand starting at position 3946 of SEQ ID NO: 1243104
ucauaugcugcuuagugau

SEQ ID NO: 1395325 - RNA, 19 nt, Artificial Sequence
  Description of Artificial Sequence: Synthetic oligonucleotide
  Antisense strand to SEQ ID NO: 1395324
aucacuaagcagcauauga

SEQ ID NO: 1395326 - RNA, 19 nt, Artificial Sequence
  Description of Artificial Sequence: Synthetic oligonucleotide
  Sense strand starting at position 3954 of SEQ ID NO: 1243104
ugcuuagugaugggaauac

SEQ ID NO: 1395327 - RNA, 19 nt, Artificial Sequence
  Description of Artificial Sequence: Synthetic oligonucleotide
  Antisense strand to SEQ ID NO: 1395326
guauucccaucacuaagca

SEQ ID NO: 1395328 - RNA, 19 nt, Artificial Sequence
  Description of Artificial Sequence: Synthetic oligonucleotide
  Sense strand starting at position 232 of SEQ ID NO: 1243105
gcugaaauuugagaggagu

SEQ ID NO: 1395329 - RNA, 19 nt, Artificial Sequence
  Description of Artificial Sequence: Synthetic oligonucleotide
  Antisense strand to SEQ ID NO: 1395328
acuccucucaaauuucagc

SEQ ID NO: 1395330 - RNA, 19 nt, Artificial Sequence
  Description of Artificial Sequence: Synthetic oligonucleotide
  Sense strand starting at position 435 of SEQ ID NO: 1243105
ugagaacuguuuccaggau

SEQ ID NO: 1395331 - RNA, 19 nt, Artificial Sequence
  Description of Artificial Sequence: Synthetic oligonucleotide
  Antisense strand to SEQ ID NO: 1395330
auccuggaaacaguucuca

SEQ ID NO: 1395332 - RNA, 19 nt, Artificial Sequence
  Description of Artificial Sequence: Synthetic oligonucleotide
  Sense strand starting at position 439 of SEQ ID NO: 1243105
aacuguuuccaggaugcaa

SEQ ID NO: 1395333 - RNA, 19 nt, Artificial Sequence
  Description of Artificial Sequence: Synthetic oligonucleotide
  Antisense strand to SEQ ID NO: 1395332
uugcauccuggaaacaguu

SEQ ID NO: 1395334 - RNA, 19 nt, Artificial Sequence
  Description of Artificial Sequence: Synthetic oligonucleotide
  Sense strand starting at position 468 of SEQ ID NO: 1243105
uggacaaauguguaguguu

SEQ ID NO: 1395335 - RNA, 19 nt, Artificial Sequence
  Description of Artificial Sequence: Synthetic oligonucleotide
  Antisense strand to SEQ ID NO: 1395334
aacacuacacauuugucca

SEQ ID NO: 1395336 - RNA, 19 nt, Artificial Sequence
  Description of Artificial Sequence: Synthetic oligonucleotide
  Sense strand starting at position 624 of SEQ ID NO: 1243105
uaggucugugacuaaugga

SEQ ID NO: 1395337 - RNA, 19 nt, Artificial Sequence
  Description of Artificial Sequence: Synthetic oligonucleotide
  Antisense strand to SEQ ID NO: 1395336
uccauuagucacagaccua

SEQ ID NO: 1395338 - RNA, 19 nt, Artificial Sequence
  Description of Artificial Sequence: Synthetic oligonucleotide
  Sense strand starting at position 689 of SEQ ID NO: 1243105
ugggaaaccggaugucaga

SEQ ID NO: 1395339 - RNA, 19 nt, Artificial Sequence
  Description of Artificial Sequence: Synthetic oligonucleotide
  Antisense strand to SEQ ID NO: 1395338
ucugacauccgguuuccca

SEQ ID NO: 1395340 - RNA, 19 nt, Artificial Sequence
  Description of Artificial Sequence: Synthetic oligonucleotide
  Sense strand starting at position 776 of SEQ ID NO: 1243105
ugaaguugggcagggaaau

SEQ ID NO: 1395341 - RNA, 19 nt, Artificial Sequence
  Description of Artificial Sequence: Synthetic oligonucleotide
  Antisense strand to SEQ ID NO: 1395340
auuucccugcccaacuuca

SEQ ID NO: 1395342 - RNA, 19 nt, Artificial Sequence
  Description of Artificial Sequence: Synthetic oligonucleotide
  Sense strand starting at position 777 of SEQ ID NO: 1243105
gaaguugggcagggaaauu

SEQ ID NO: 1395343 - RNA, 19 nt, Artificial Sequence
  Description of Artificial Sequence: Synthetic oligonucleotide
  Antisense strand to SEQ ID NO: 1395342
aauuucccugcccaacuuc

SEQ ID NO: 1395344 - RNA, 19 nt, Artificial Sequence
  Description of Artificial Sequence: Synthetic oligonucleotide
  Sense strand starting at position 845 of SEQ ID NO: 1243105
aacugaaagugaucaugua

SEQ ID NO: 1395345 - RNA, 19 nt, Artificial Sequence
  Description of Artificial Sequence: Synthetic oligonucleotide
  Antisense strand to SEQ ID NO: 1395344
uacaugaucacuuucaguu

SEQ ID NO: 1395346 - RNA, 19 nt, Artificial Sequence
  Description of Artificial Sequence: Synthetic oligonucleotide
  Sense strand starting at position 1394 of SEQ ID NO: 1243105
caacaauuuccgcgcaaug

SEQ ID NO: 1395347 - RNA, 19 nt, Artificial Sequence
  Description of Artificial Sequence: Synthetic oligonucleotide
  Antisense strand to SEQ ID NO: 1395346
cauugcgcggaaauuguug

SEQ ID NO: 1395348 - RNA, 19 nt, Artificial Sequence
  Description of Artificial Sequence: Synthetic oligonucleotide
  Sense strand starting at position 1598 of SEQ ID NO: 1243105
ugagaaccgucccuggaua

SEQ ID NO: 1395349 - RNA, 19 nt, Artificial Sequence
  Description of Artificial Sequence: Synthetic oligonucleotide
  Antisense strand to SEQ ID NO: 1395348
uauccagggacgguucuca

SEQ ID NO: 1395350 - RNA, 19 nt, Artificial Sequence
  Description of Artificial Sequence: Synthetic oligonucleotide
  Sense strand starting at position 1669 of SEQ ID NO: 1243105
aaccgauuccugggaacuu

SEQ ID NO: 1395351 - RNA, 19 nt, Artificial Sequence
  Description of Artificial Sequence: Synthetic oligonucleotide
  Antisense strand to SEQ ID NO: 1395350
aaguucccaggaaucgguu

SEQ ID NO: 1395352 - RNA, 19 nt, Artificial Sequence
  Description of Artificial Sequence: Synthetic oligonucleotide
  Sense strand starting at position 1687 of SEQ ID NO: 1243105
ugagcaagccauuaacuca

SEQ ID NO: 1395353 - RNA, 19 nt, Artificial Sequence
  Description of Artificial Sequence: Synthetic oligonucleotide
  Antisense strand to SEQ ID NO: 1395352
ugaguuaauggcuugcuca

SEQ ID NO: 1395354 - RNA, 19 nt, Artificial Sequence
  Description of Artificial Sequence: Synthetic oligonucleotide
  Sense strand starting at position 1702 of SEQ ID NO: 1243105
cucagaucuccuuaacggu

SEQ ID NO: 1395355 - RNA, 19 nt, Artificial Sequence
  Description of Artificial Sequence: Synthetic oligonucleotide
  Antisense strand to SEQ ID NO: 1395354
accguuaaggagaucugag

SEQ ID NO: 1395356 - RNA, 19 nt, Artificial Sequence
  Description of Artificial Sequence: Synthetic oligonucleotide
  Sense strand starting at position 1783 of SEQ ID NO: 1243105
agcaacuccuguccugaaa

SEQ ID NO: 1395357 - RNA, 19 nt, Artificial Sequence
  Description of Artificial Sequence: Synthetic oligonucleotide
  Antisense strand to SEQ ID NO: 1395356
uuucaggacaggaguugcu

SEQ ID NO: 1395358 - RNA, 19 nt, Artificial Sequence
  Description of Artificial Sequence: Synthetic oligonucleotide
  Sense strand starting at position 1791 of SEQ ID NO: 1243105
cuguccugaaauugaguga

SEQ ID NO: 1395359 - RNA, 19 nt, Artificial Sequence
  Description of Artificial Sequence: Synthetic oligonucleotide
  Antisense strand to SEQ ID NO: 1395358
ucacucaauuucaggacag

SEQ ID NO: 1395360 - RNA, 19 nt, Artificial Sequence
  Description of Artificial Sequence: Synthetic oligonucleotide
  Sense strand starting at position 1794 of SEQ ID NO: 1243105
uccugaaauugagugacca

SEQ ID NO: 1395361 - RNA, 19 nt, Artificial Sequence
  Description of Artificial Sequence: Synthetic oligonucleotide
  Antisense strand to SEQ ID NO: 1395360
uggucacucaauuucagga

SEQ ID NO: 1395362 - RNA, 19 nt, Artificial Sequence
  Description of Artificial Sequence: Synthetic oligonucleotide
  Sense strand starting at position 1994 of SEQ ID NO: 1243105
gcggcaagcaguguuuaua

SEQ ID NO: 1395363 - RNA, 19 nt, Artificial Sequence
  Description of Artificial Sequence: Synthetic oligonucleotide
  Antisense strand to SEQ ID NO: 1395362
uauaaacacugcuugccgc

SEQ ID NO: 1395364 - RNA, 19 nt, Artificial Sequence
  Description of Artificial Sequence: Synthetic oligonucleotide
  Sense strand starting at position 2003 of SEQ ID NO: 1243105
aguguuuauagcuagaaag

SEQ ID NO: 1395365 - RNA, 19 nt, Artificial Sequence
  Description of Artificial Sequence: Synthetic oligonucleotide
  Antisense strand to SEQ ID NO: 1395364
cuuucuagcuauaaacacu

SEQ ID NO: 1395366 - RNA, 19 nt, Artificial Sequence
  Description of Artificial Sequence: Synthetic oligonucleotide
  Sense strand starting at position 2414 of SEQ ID NO: 1243105
gcagccaaggcuuaauaau

SEQ ID NO: 1395367 - RNA, 19 nt, Artificial Sequence
  Description of Artificial Sequence: Synthetic oligonucleotide
  Antisense strand to SEQ ID NO: 1395366
auuauuaagccuuggcugc

SEQ ID NO: 1395368 - RNA, 19 nt, Artificial Sequence
  Description of Artificial Sequence: Synthetic oligonucleotide
  Sense strand starting at position 2428 of SEQ ID NO: 1243105
auaauugugcagcaucaca

SEQ ID NO: 1395369 - RNA, 19 nt, Artificial Sequence
  Description of Artificial Sequence: Synthetic oligonucleotide
  Antisense strand to SEQ ID NO: 1395368
ugugaugcugcacaauuau

SEQ ID NO: 1395370 - RNA, 19 nt, Artificial Sequence
  Description of Artificial Sequence: Synthetic oligonucleotide
  Sense strand starting at position 2472 of SEQ ID NO: 1243105
gacguauccguugcauguu

SEQ ID NO: 1395371 - RNA, 19 nt, Artificial Sequence
  Description of Artificial Sequence: Synthetic oligonucleotide
  Antisense strand to SEQ ID NO: 1395370
aacaugcaacggauacguc

SEQ ID NO: 1395372 - RNA, 19 nt, Artificial Sequence
  Description of Artificial Sequence: Synthetic oligonucleotide
  Sense strand starting at position 2555 of SEQ ID NO: 1243105
uguagcaacccauaagaua

SEQ ID NO: 1395373 - RNA, 19 nt, Artificial Sequence
  Description of Artificial Sequence: Synthetic oligonucleotide
  Antisense strand to SEQ ID NO: 1395372
uaucuuauggguugcuaca

SEQ ID NO: 1395374 - RNA, 19 nt, Artificial Sequence
  Description of Artificial Sequence: Synthetic oligonucleotide
  Sense strand starting at position 2583 of SEQ ID NO: 1243105
caguauucucauuguagag

SEQ ID NO: 1395375 - RNA, 19 nt, Artificial Sequence
  Description of Artificial Sequence: Synthetic oligonucleotide
  Antisense strand to SEQ ID NO: 1395374
cucuacaaugagaauacug

SEQ ID NO: 1395376 - RNA, 19 nt, Artificial Sequence
  Description of Artificial Sequence: Synthetic oligonucleotide
  Sense strand starting at position 2924 of SEQ ID NO: 1243105
cuggaaucgcccugagaca

SEQ ID NO: 1395377 - RNA, 19 nt, Artificial Sequence
  Description of Artificial Sequence: Synthetic oligonucleotide
  Antisense strand to SEQ ID NO: 1395376
ugucucagggcgauuccag

SEQ ID NO: 1395378 - RNA, 19 nt, Artificial Sequence
  Description of Artificial Sequence: Synthetic oligonucleotide
  Sense strand starting at position 2925 of SEQ ID NO: 1243105
uggaaucgcccugagacau

SEQ ID NO: 1395379 - RNA, 19 nt, Artificial Sequence
  Description of Artificial Sequence: Synthetic oligonucleotide
  Antisense strand to SEQ ID NO: 1395378
augucucagggcgauucca

SEQ ID NO: 1395380 - RNA, 19 nt, Artificial Sequence
  Description of Artificial Sequence: Synthetic oligonucleotide
  Sense strand starting at position 3013 of SEQ ID NO: 1243105
ccacauuccugucuggaga

SEQ ID NO: 1395381 - RNA, 19 nt, Artificial Sequence
  Description of Artificial Sequence: Synthetic oligonucleotide
  Antisense strand to SEQ ID NO: 1395380
ucuccagacaggaaugugg

SEQ ID NO: 1395382 - RNA, 19 nt, Artificial Sequence
  Description of Artificial Sequence: Synthetic oligonucleotide
  Sense strand starting at position 3102 of SEQ ID NO: 1243105
gcccgaagugugucaugcu

SEQ ID NO: 1395383 - RNA, 19 nt, Artificial Sequence
  Description of Artificial Sequence: Synthetic oligonucleotide
  Antisense strand to SEQ ID NO: 1395382
agcaugacacacuucgggc

SEQ ID NO: 1395384 - RNA, 19 nt, Artificial Sequence
  Description of Artificial Sequence: Synthetic oligonucleotide
  Sense strand starting at position 3109 of SEQ ID NO: 1243105
gugugucaugcuaggaguc

SEQ ID NO: 1395385 - RNA, 19 nt, Artificial Sequence
  Description of Artificial Sequence: Synthetic oligonucleotide
  Antisense strand to SEQ ID NO: 1395384
gacuccuagcaugacacac

SEQ ID NO: 1395386 - RNA, 19 nt, Artificial Sequence
  Description of Artificial Sequence: Synthetic oligonucleotide
  Sense strand starting at position 3241 of SEQ ID NO: 1243105
uaaguuccuguggaaaugu

SEQ ID NO: 1395387 - RNA, 19 nt, Artificial Sequence
  Description of Artificial Sequence: Synthetic oligonucleotide
  Antisense strand to SEQ ID NO: 1395386
acauuuccacaggaacuua

SEQ ID NO: 1395388 - RNA, 19 nt, Artificial Sequence
  Description of Artificial Sequence: Synthetic oligonucleotide
  Sense strand starting at position 3523 of SEQ ID NO: 1243105
gcaguagacgcuuaauaaa

SEQ ID NO: 1395389 - RNA, 19 nt, Artificial Sequence
  Description of Artificial Sequence: Synthetic oligonucleotide
  Antisense strand to SEQ ID NO: 1395388
uuuauuaagcgucuacugc

SEQ ID NO: 1395390 - RNA, 19 nt, Artificial Sequence
  Description of Artificial Sequence: Synthetic oligonucleotide
  Sense strand starting at position 3660 of SEQ ID NO: 1243105
cugcgugcucacucuugua

SEQ ID NO: 1395391 - RNA, 19 nt, Artificial Sequence
  Description of Artificial Sequence: Synthetic oligonucleotide
  Antisense strand to SEQ ID NO: 1395390
uacaagagugagcacgcag

SEQ ID NO: 1395392 - RNA, 19 nt, Artificial Sequence
  Description of Artificial Sequence: Synthetic oligonucleotide
  Sense strand starting at position 3662 of SEQ ID NO: 1243105
gcgugcucacucuuguaaa

SEQ ID NO: 1395393 - RNA, 19 nt, Artificial Sequence
  Description of Artificial Sequence: Synthetic oligonucleotide
  Antisense strand to SEQ ID NO: 1395392
uuuacaagagugagcacgc

SEQ ID NO: 1395394 - RNA, 19 nt, Artificial Sequence
  Description of Artificial Sequence: Synthetic oligonucleotide
  Sense strand starting at position 3703 of SEQ ID NO: 1243105
cgagcucucagauggacua

SEQ ID NO: 1395395 - RNA, 19 nt, Artificial Sequence
  Description of Artificial Sequence: Synthetic oligonucleotide
  Antisense strand to SEQ ID NO: 1395394
uaguccaucugagagcucg

SEQ ID NO: 1395396 - RNA, 19 nt, Artificial Sequence
  Description of Artificial Sequence: Synthetic oligonucleotide
  Sense strand starting at position 3704 of SEQ ID NO: 1243105
gagcucucagauggacuaa

SEQ ID NO: 1395397 - RNA, 19 nt, Artificial Sequence
  Description of Artificial Sequence: Synthetic oligonucleotide
  Antisense strand to SEQ ID NO: 1395396
uuaguccaucugagagcuc

SEQ ID NO: 1395398 - RNA, 19 nt, Artificial Sequence
  Description of Artificial Sequence: Synthetic oligonucleotide
  Sense strand starting at position 3814 of SEQ ID NO: 1243105
aaaugacuggguuguacua

SEQ ID NO: 1395399 - RNA, 19 nt, Artificial Sequence
  Description of Artificial Sequence: Synthetic oligonucleotide
  Antisense strand to SEQ ID NO: 1395398
uaguacaacccagucauuu

SEQ ID NO: 1395400 - RNA, 19 nt, Artificial Sequence
  Description of Artificial Sequence: Synthetic oligonucleotide
  Sense strand starting at position 3896 of SEQ ID NO: 1243105
gcagcucuguggaucgaga

SEQ ID NO: 1395401 - RNA, 19 nt, Artificial Sequence
  Description of Artificial Sequence: Synthetic oligonucleotide
  Antisense strand to SEQ ID NO: 1395400
ucucgauccacagagcugc

SEQ ID NO: 1395402 - RNA, 19 nt, Artificial Sequence
  Description of Artificial Sequence: Synthetic oligonucleotide
  Sense strand starting at position 3943 of SEQ ID NO: 1243105
guuguuauuuauguaugca

SEQ ID NO: 1395403 - RNA, 19 nt, Artificial Sequence
  Description of Artificial Sequence: Synthetic oligonucleotide
  Antisense strand to SEQ ID NO: 1395402
ugcauacauaaauaacaac

SEQ ID NO: 1395404 - RNA, 19 nt, Artificial Sequence
  Description of Artificial Sequence: Synthetic oligonucleotide
  Sense strand starting at position 3947 of SEQ ID NO: 1243105
uuauuuauguaugcacagu

SEQ ID NO: 1395405 - RNA, 19 nt, Artificial Sequence
  Description of Artificial Sequence: Synthetic oligonucleotide
  Antisense strand to SEQ ID NO: 1395404
acugugcauacauaaauaa

SEQ ID NO: 1395406 - RNA, 19 nt, Artificial Sequence
  Description of Artificial Sequence: Synthetic oligonucleotide
  Sense strand starting at position 3953 of SEQ ID NO: 1243105
auguaugcacaguauuaua

SEQ ID NO: 1395407 - RNA, 19 nt, Artificial Sequence
  Description of Artificial Sequence: Synthetic oligonucleotide
  Antisense strand to SEQ ID NO: 1395406
uauaauacugugcauacau

SEQ ID NO: 1395408 - RNA, 19 nt, Artificial Sequence
  Description of Artificial Sequence: Synthetic oligonucleotide
  Sense strand starting at position 192 of SEQ ID NO: 1243106
cuguguggcucccuuggaa

SEQ ID NO: 1395409 - RNA, 19 nt, Artificial Sequence
  Description of Artificial Sequence: Synthetic oligonucleotide
  Antisense strand to SEQ ID NO: 1395408
uuccaagggagccacacag

SEQ ID NO: 1395410 - RNA, 19 nt, Artificial Sequence
  Description of Artificial Sequence: Synthetic oligonucleotide
  Sense strand starting at position 253 of SEQ ID NO: 1243106
agaccaguccuuggcucau

SEQ ID NO: 1395411 - RNA, 19 nt, Artificial Sequence
  Description of Artificial Sequence: Synthetic oligonucleotide
  Antisense strand to SEQ ID NO: 1395410
augagccaaggacuggucu

SEQ ID NO: 1395412 - RNA, 19 nt, Artificial Sequence
  Description of Artificial Sequence: Synthetic oligonucleotide
  Sense strand starting at position 602 of SEQ ID NO: 1243106
gggagucauccugguucau

SEQ ID NO: 1395413 - RNA, 19 nt, Artificial Sequence
  Description of Artificial Sequence: Synthetic oligonucleotide
  Antisense strand to SEQ ID NO: 1395412
augaaccaggaugacuccc

SEQ ID NO: 1395414 - RNA, 19 nt, Artificial Sequence
  Description of Artificial Sequence: Synthetic oligonucleotide
  Sense strand starting at position 662 of SEQ ID NO: 1243106
ugcuuugacucagcaucua

SEQ ID NO: 1395415 - RNA, 19 nt, Artificial Sequence
  Description of Artificial Sequence: Synthetic oligonucleotide
  Antisense strand to SEQ ID NO: 1395414
uagaugcugagucaaagca

SEQ ID NO: 1395416 - RNA, 19 nt, Artificial Sequence
  Description of Artificial Sequence: Synthetic oligonucleotide
  Sense strand starting at position 816 of SEQ ID NO: 1243106
gagaaagcaucacagggua

SEQ ID NO: 1395417 - RNA, 19 nt, Artificial Sequence
  Description of Artificial Sequence: Synthetic oligonucleotide
  Antisense strand to SEQ ID NO: 1395416
uacccugugaugcuuucuc

SEQ ID NO: 1395418 - RNA, 19 nt, Artificial Sequence
  Description of Artificial Sequence: Synthetic oligonucleotide
  Sense strand starting at position 876 of SEQ ID NO: 1243106
gcagauauggugcagaugu

SEQ ID NO: 1395419 - RNA, 19 nt, Artificial Sequence
  Description of Artificial Sequence: Synthetic oligonucleotide
  Antisense strand to SEQ ID NO: 1395418
acaucugcaccauaucugc

SEQ ID NO: 1395420 - RNA, 19 nt, Artificial Sequence
  Description of Artificial Sequence: Synthetic oligonucleotide
  Sense strand starting at position 878 of SEQ ID NO: 1243106
agauauggugcagauguaa

SEQ ID NO: 1395421 - RNA, 19 nt, Artificial Sequence
  Description of Artificial Sequence: Synthetic oligonucleotide
  Antisense strand to SEQ ID NO: 1395420
uuacaucugcaccauaucu

SEQ ID NO: 1395422 - RNA, 19 nt, Artificial Sequence
  Description of Artificial Sequence: Synthetic oligonucleotide
  Sense strand starting at position 928 of SEQ ID NO: 1243106
ggaccugugccugguuuca

SEQ ID NO: 1395423 - RNA, 19 nt, Artificial Sequence
  Description of Artificial Sequence: Synthetic oligonucleotide
  Antisense strand to SEQ ID NO: 1395422
ugaaaccaggcacaggucc

SEQ ID NO: 1395424 - RNA, 19 nt, Artificial Sequence
  Description of Artificial Sequence: Synthetic oligonucleotide
  Sense strand starting at position 1132 of SEQ ID NO: 1243106
ugagggaugggucgggaaa

SEQ ID NO: 1395425 - RNA, 19 nt, Artificial Sequence
  Description of Artificial Sequence: Synthetic oligonucleotide
  Antisense strand to SEQ ID NO: 1395424
uuucccgacccaucccuca

SEQ ID NO: 1395426 - RNA, 19 nt, Artificial Sequence
  Description of Artificial Sequence: Synthetic oligonucleotide
  Sense strand starting at position 1235 of SEQ ID NO: 1243106
gccaucaauuccugggugu

SEQ ID NO: 1395427 - RNA, 19 nt, Artificial Sequence
  Description of Artificial Sequence: Synthetic oligonucleotide
  Antisense strand to SEQ ID NO: 1395426
acacccaggaauugauggc

SEQ ID NO: 1395428 - RNA, 19 nt, Artificial Sequence
  Description of Artificial Sequence: Synthetic oligonucleotide
  Sense strand starting at position 1292 of SEQ ID NO: 1243106
guucuauuccagcaagagu

SEQ ID NO: 1395429 - RNA, 19 nt, Artificial Sequence
  Description of Artificial Sequence: Synthetic oligonucleotide
  Antisense strand to SEQ ID NO: 1395428
acucuugcuggaauagaac

SEQ ID NO: 1395430 - RNA, 19 nt, Artificial Sequence
  Description of Artificial Sequence: Synthetic oligonucleotide
  Sense strand starting at position 1509 of SEQ ID NO: 1243106
aaggguuaauguggacgaa

SEQ ID NO: 1395431 - RNA, 19 nt, Artificial Sequence
  Description of Artificial Sequence: Synthetic oligonucleotide
  Antisense strand to SEQ ID NO: 1395430
uucguccacauuaacccuu

SEQ ID NO: 1395432 - RNA, 19 nt, Artificial Sequence
  Description of Artificial Sequence: Synthetic oligonucleotide
  Sense strand starting at position 1572 of SEQ ID NO: 1243106
cccuguucuccgcgacaca

SEQ ID NO: 1395433 - RNA, 19 nt, Artificial Sequence
  Description of Artificial Sequence: Synthetic oligonucleotide
  Antisense strand to SEQ ID NO: 1395432
ugugucgcggagaacaggg

SEQ ID NO: 1395434 - RNA, 19 nt, Artificial Sequence
  Description of Artificial Sequence: Synthetic oligonucleotide
  Sense strand starting at position 1642 of SEQ ID NO: 1243106
ccaaguguccuugagcgaa

SEQ ID NO: 1395435 - RNA, 19 nt, Artificial Sequence
  Description of Artificial Sequence: Synthetic oligonucleotide
  Antisense strand to SEQ ID NO: 1395434
uucgcucaaggacacuugg

SEQ ID NO: 1395436 - RNA, 19 nt, Artificial Sequence
  Description of Artificial Sequence: Synthetic oligonucleotide
  Sense strand starting at position 1671 of SEQ ID NO: 1243106
guggguuucuuugcaggua

SEQ ID NO: 1395437 - RNA, 19 nt, Artificial Sequence
  Description of Artificial Sequence: Synthetic oligonucleotide
  Antisense strand to SEQ ID NO: 1395436
uaccugcaaagaaacccac

SEQ ID NO: 1395438 - RNA, 19 nt, Artificial Sequence
  Description of Artificial Sequence: Synthetic oligonucleotide
  Sense strand starting at position 1674 of SEQ ID NO: 1243106
gguuucuuugcagguacaa

SEQ ID NO: 1395439 - RNA, 19 nt, Artificial Sequence
  Description of Artificial Sequence: Synthetic oligonucleotide
  Antisense strand to SEQ ID NO: 1395438
uuguaccugcaaagaaacc

SEQ ID NO: 1395440 - RNA, 19 nt, Artificial Sequence
  Description of Artificial Sequence: Synthetic oligonucleotide
  Sense strand starting at position 2292 of SEQ ID NO: 1243106
gaaagaaccugcucacgau

SEQ ID NO: 1395441 - RNA, 19 nt, Artificial Sequence
  Description of Artificial Sequence: Synthetic oligonucleotide
  Antisense strand to SEQ ID NO: 1395440
aucgugagcagguucuuuc

SEQ ID NO: 1395442 - RNA, 19 nt, Artificial Sequence
  Description of Artificial Sequence: Synthetic oligonucleotide
  Sense strand starting at position 2459 of SEQ ID NO: 1243106
gugccugggucccagaaua

SEQ ID NO: 1395443 - RNA, 19 nt, Artificial Sequence
  Description of Artificial Sequence: Synthetic oligonucleotide
  Antisense strand to SEQ ID NO: 1395442
uauucugggacccaggcac

SEQ ID NO: 1395444 - RNA, 19 nt, Artificial Sequence
  Description of Artificial Sequence: Synthetic oligonucleotide
  Sense strand starting at position 2513 of SEQ ID NO: 1243106
cagguaucuagagggauug

SEQ ID NO: 1395445 - RNA, 19 nt, Artificial Sequence
  Description of Artificial Sequence: Synthetic oligonucleotide
  Antisense strand to SEQ ID NO: 1395444
caaucccucuagauaccug

SEQ ID NO: 1395446 - RNA, 19 nt, Artificial Sequence
  Description of Artificial Sequence: Synthetic oligonucleotide
  Sense strand starting at position 2555 of SEQ ID NO: 1243106
aaggcaggucagugagauu

SEQ ID NO: 1395447 - RNA, 19 nt, Artificial Sequence
  Description of Artificial Sequence: Synthetic oligonucleotide
  Antisense strand to SEQ ID NO: 1395446
aaucucacugaccugccuu

SEQ ID NO: 1395448 - RNA, 19 nt, Artificial Sequence
  Description of Artificial Sequence: Synthetic oligonucleotide
  Sense strand starting at position 2995 of SEQ ID NO: 1243106
gccuuauugcacuacugca

SEQ ID NO: 1395449 - RNA, 19 nt, Artificial Sequence
  Description of Artificial Sequence: Synthetic oligonucleotide
  Antisense strand to SEQ ID NO: 1395448
ugcaguagugcaauaaggc

SEQ ID NO: 1395450 - RNA, 19 nt, Artificial Sequence
  Description of Artificial Sequence: Synthetic oligonucleotide
  Sense strand starting at position 3137 of SEQ ID NO: 1243106
cuaagcugccaaggagaau

SEQ ID NO: 1395451 - RNA, 19 nt, Artificial Sequence
  Description of Artificial Sequence: Synthetic oligonucleotide
  Antisense strand to SEQ ID NO: 1395450
auucuccuuggcagcuuag

SEQ ID NO: 1395452 - RNA, 19 nt, Artificial Sequence
  Description of Artificial Sequence: Synthetic oligonucleotide
  Sense strand starting at position 3150 of SEQ ID NO: 1243106
gagaaucauuugugacuga

SEQ ID NO: 1395453 - RNA, 19 nt, Artificial Sequence
  Description of Artificial Sequence: Synthetic oligonucleotide
  Antisense strand to SEQ ID NO: 1395452
ucagucacaaaugauucuc

SEQ ID NO: 1395454 - RNA, 19 nt, Artificial Sequence
  Description of Artificial Sequence: Synthetic oligonucleotide
  Sense strand starting at position 3172 of SEQ ID NO: 1243106
ggguagcgugagugagaau

SEQ ID NO: 1395455 - RNA, 19 nt, Artificial Sequence
  Description of Artificial Sequence: Synthetic oligonucleotide
  Antisense strand to SEQ ID NO: 1395454
auucucacucacgcuaccc

SEQ ID NO: 1395456 - RNA, 19 nt, Artificial Sequence
  Description of Artificial Sequence: Synthetic oligonucleotide
  Sense strand starting at position 3212 of SEQ ID NO: 1243106
gagagaggucauugcuccu

SEQ ID NO: 1395457 - RNA, 19 nt, Artificial Sequence
  Description of Artificial Sequence: Synthetic oligonucleotide
  Antisense strand to SEQ ID NO: 1395456
aggagcaaugaccucucuc

SEQ ID NO: 1395458 - RNA, 19 nt, Artificial Sequence
  Description of Artificial Sequence: Synthetic oligonucleotide
  Sense strand starting at position 3215 of SEQ ID NO: 1243106
agaggucauugcuccucaa

SEQ ID NO: 1395459 - RNA, 19 nt, Artificial Sequence
  Description of Artificial Sequence: Synthetic oligonucleotide
  Antisense strand to SEQ ID NO: 1395458
uugaggagcaaugaccucu

SEQ ID NO: 1395460 - RNA, 19 nt, Artificial Sequence
  Description of Artificial Sequence: Synthetic oligonucleotide
  Sense strand starting at position 3327 of SEQ ID NO: 1243106
aaauguuauugugaagugu

SEQ ID NO: 1395461 - RNA, 19 nt, Artificial Sequence
  Description of Artificial Sequence: Synthetic oligonucleotide
  Antisense strand to SEQ ID NO: 1395460
acacuucacaauaacauuu

SEQ ID NO: 1395462 - RNA, 19 nt, Artificial Sequence
  Description of Artificial Sequence: Synthetic oligonucleotide
  Sense strand starting at position 3331 of SEQ ID NO: 1243106
guuauugugaaguguguga

SEQ ID NO: 1395463 - RNA, 19 nt, Artificial Sequence
  Description of Artificial Sequence: Synthetic oligonucleotide
  Antisense strand to SEQ ID NO: 1395462
ucacacacuucacaauaac

SEQ ID NO: 1395464 - RNA, 19 nt, Artificial Sequence
  Description of Artificial Sequence: Synthetic oligonucleotide
  Sense strand starting at position 3333 of SEQ ID NO: 1243106
uauugugaagugugugagu

SEQ ID NO: 1395465 - RNA, 19 nt, Artificial Sequence
  Description of Artificial Sequence: Synthetic oligonucleotide
  Antisense strand to SEQ ID NO: 1395464
acucacacacuucacaaua

SEQ ID NO: 1395466 - RNA, 19 nt, Artificial Sequence
  Description of Artificial Sequence: Synthetic oligonucleotide
  Sense strand starting at position 3363 of SEQ ID NO: 1243106
ugcugucccucugagacuu

SEQ ID NO: 1395467 - RNA, 19 nt, Artificial Sequence
  Description of Artificial Sequence: Synthetic oligonucleotide
  Antisense strand to SEQ ID NO: 1395466
aagucucagagggacagca

SEQ ID NO: 1395468 - RNA, 19 nt, Artificial Sequence
  Description of Artificial Sequence: Synthetic oligonucleotide
  Sense strand starting at position 3442 of SEQ ID NO: 1243106
ggagcugagcauuaagaug

SEQ ID NO: 1395469 - RNA, 19 nt, Artificial Sequence
  Description of Artificial Sequence: Synthetic oligonucleotide
  Antisense strand to SEQ ID NO: 1395468
caucuuaaugcucagcucc

SEQ ID NO: 1395470 - RNA, 19 nt, Artificial Sequence
  Description of Artificial Sequence: Synthetic oligonucleotide
  Sense strand starting at position 3450 of SEQ ID NO: 1243106
gcauuaagaugacucccaa

SEQ ID NO: 1395471 - RNA, 19 nt, Artificial Sequence
  Description of Artificial Sequence: Synthetic oligonucleotide
  Antisense strand to SEQ ID NO: 1395470
uugggagucaucuuaaugc

SEQ ID NO: 1395472 - RNA, 19 nt, Artificial Sequence
  Description of Artificial Sequence: Synthetic oligonucleotide
  Sense strand starting at position 3483 of SEQ ID NO: 1243106
gucuguaaucccuaugcuu

SEQ ID NO: 1395473 - RNA, 19 nt, Artificial Sequence
  Description of Artificial Sequence: Synthetic oligonucleotide
  Antisense strand to SEQ ID NO: 1395472
aagcauagggauuacagac

SEQ ID NO: 1395474 - RNA, 19 nt, Artificial Sequence
  Description of Artificial Sequence: Synthetic oligonucleotide
  Sense strand starting at position 3725 of SEQ ID NO: 1243106
aacuguagccuggaugaca

SEQ ID NO: 1395475 - RNA, 19 nt, Artificial Sequence
  Description of Artificial Sequence: Synthetic oligonucleotide
  Antisense strand to SEQ ID NO: 1395474
ugucauccaggcuacaguu

SEQ ID NO: 1395476 - RNA, 19 nt, Artificial Sequence
  Description of Artificial Sequence: Synthetic oligonucleotide
  Sense strand starting at position 3801 of SEQ ID NO: 1243106
agaggagguguuugacaaa

SEQ ID NO: 1395477 - RNA, 19 nt, Artificial Sequence
  Description of Artificial Sequence: Synthetic oligonucleotide
  Antisense strand to SEQ ID NO: 1395476
uuugucaaacaccuccucu

SEQ ID NO: 1395478 - RNA, 19 nt, Artificial Sequence
  Description of Artificial Sequence: Synthetic oligonucleotide
  Sense strand starting at position 3804 of SEQ ID NO: 1243106
ggagguguuugacaaagaa

SEQ ID NO: 1395479 - RNA, 19 nt, Artificial Sequence
  Description of Artificial Sequence: Synthetic oligonucleotide
  Antisense strand to SEQ ID NO: 1395478
uucuuugucaaacaccucc

SEQ ID NO: 1395480 - RNA, 19 nt, Artificial Sequence
  Description of Artificial Sequence: Synthetic oligonucleotide
  Sense strand starting at position 3910 of SEQ ID NO: 1243106
gcugaaugcugugcuacca

SEQ ID NO: 1395481 - RNA, 19 nt, Artificial Sequence
  Description of Artificial Sequence: Synthetic oligonucleotide
  Antisense strand to SEQ ID NO: 1395480
ugguagcacagcauucagc

SEQ ID NO: 1395482 - RNA, 19 nt, Artificial Sequence
  Description of Artificial Sequence: Synthetic oligonucleotide
  Sense strand starting at position 71 of SEQ ID NO: 1243107
aacugugaaugguuuaaga

SEQ ID NO: 1395483 - RNA, 19 nt, Artificial Sequence
  Description of Artificial Sequence: Synthetic oligonucleotide
  Antisense strand to SEQ ID NO: 1395482
ucuuaaaccauucacaguu

SEQ ID NO: 1395484 - RNA, 19 nt, Artificial Sequence
  Description of Artificial Sequence: Synthetic oligonucleotide
  Sense strand starting at position 95 of SEQ ID NO: 1243107
caaggaacgucagugaacu

SEQ ID NO: 1395485 - RNA, 19 nt, Artificial Sequence
  Description of Artificial Sequence: Synthetic oligonucleotide
  Antisense strand to SEQ ID NO: 1395484
aguucacugacguuccuug

SEQ ID NO: 1395486 - RNA, 19 nt, Artificial Sequence
  Description of Artificial Sequence: Synthetic oligonucleotide
  Sense strand starting at position 666 of SEQ ID NO: 1243107
cuggcuaauuguuuaaagu

SEQ ID NO: 1395487 - RNA, 19 nt, Artificial Sequence
  Description of Artificial Sequence: Synthetic oligonucleotide
  Antisense strand to SEQ ID NO: 1395486
acuuuaaacaauuagccag

SEQ ID NO: 1395488 - RNA, 19 nt, Artificial Sequence
  Description of Artificial Sequence: Synthetic oligonucleotide
  Sense strand starting at position 667 of SEQ ID NO: 1243107
uggcuaauuguuuaaaguu

SEQ ID NO: 1395489 - RNA, 19 nt, Artificial Sequence
  Description of Artificial Sequence: Synthetic oligonucleotide
  Antisense strand to SEQ ID NO: 1395488
aacuuuaaacaauuagcca

SEQ ID NO: 1395490 - RNA, 19 nt, Artificial Sequence
  Description of Artificial Sequence: Synthetic oligonucleotide
  Sense strand starting at position 692 of SEQ ID NO: 1243107
gaaacagggccuuguuaua

SEQ ID NO: 1395491 - RNA, 19 nt, Artificial Sequence
  Description of Artificial Sequence: Synthetic oligonucleotide
  Antisense strand to SEQ ID NO: 1395490
uauaacaaggcccuguuuc

SEQ ID NO: 1395492 - RNA, 19 nt, Artificial Sequence
  Description of Artificial Sequence: Synthetic oligonucleotide
  Sense strand starting at position 730 of SEQ ID NO: 1243107
auuccuugggcauaaguga

SEQ ID NO: 1395493 - RNA, 19 nt, Artificial Sequence
  Description of Artificial Sequence: Synthetic oligonucleotide
  Antisense strand to SEQ ID NO: 1395492
ucacuuaugcccaaggaau

SEQ ID NO: 1395494 - RNA, 19 nt, Artificial Sequence
  Description of Artificial Sequence: Synthetic oligonucleotide
  Sense strand starting at position 737 of SEQ ID NO: 1243107
gggcauaagugaucauccu

SEQ ID NO: 1395495 - RNA, 19 nt, Artificial Sequence
  Description of Artificial Sequence: Synthetic oligonucleotide
  Antisense strand to SEQ ID NO: 1395494
aggaugaucacuuaugccc

SEQ ID NO: 1395496 - RNA, 19 nt, Artificial Sequence
  Description of Artificial Sequence: Synthetic oligonucleotide
  Sense strand starting at position 1027 of SEQ ID NO: 1243107
ggugcauuccuaguuugcu

SEQ ID NO: 1395497 - RNA, 19 nt, Artificial Sequence
  Description of Artificial Sequence: Synthetic oligonucleotide
  Antisense strand to SEQ ID NO: 1395496
agcaaacuaggaaugcacc

SEQ ID NO: 1395498 - RNA, 19 nt, Artificial Sequence
  Description of Artificial Sequence: Synthetic oligonucleotide
  Sense strand starting at position 1344 of SEQ ID NO: 1243107
cuaacaugcuccguggaau

SEQ ID NO: 1395499 - RNA, 19 nt, Artificial Sequence
  Description of Artificial Sequence: Synthetic oligonucleotide
  Antisense strand to SEQ ID NO: 1395498
auuccacggagcauguuag

SEQ ID NO: 1395500 - RNA, 19 nt, Artificial Sequence
  Description of Artificial Sequence: Synthetic oligonucleotide
  Sense strand starting at position 1345 of SEQ ID NO: 1243107
uaacaugcuccguggaauu

SEQ ID NO: 1395501 - RNA, 19 nt, Artificial Sequence
  Description of Artificial Sequence: Synthetic oligonucleotide
  Antisense strand to SEQ ID NO: 1395500
aauuccacggagcauguua

SEQ ID NO: 1395502 - RNA, 19 nt, Artificial Sequence
  Description of Artificial Sequence: Synthetic oligonucleotide
  Sense strand starting at position 1347 of SEQ ID NO: 1243107
acaugcuccguggaauuaa

SEQ ID NO: 1395503 - RNA, 19 nt, Artificial Sequence
  Description of Artificial Sequence: Synthetic oligonucleotide
  Antisense strand to SEQ ID NO: 1395502
uuaauuccacggagcaugu

SEQ ID NO: 1395504 - RNA, 19 nt, Artificial Sequence
  Description of Artificial Sequence: Synthetic oligonucleotide
  Sense strand starting at position 1470 of SEQ ID NO: 1243107
ugugguuggcugggaauaa

SEQ ID NO: 1395505 - RNA, 19 nt, Artificial Sequence
  Description of Artificial Sequence: Synthetic oligonucleotide
  Antisense strand to SEQ ID NO: 1395504
uuauucccagccaaccaca

SEQ ID NO: 1395506 - RNA, 19 nt, Artificial Sequence
  Description of Artificial Sequence: Synthetic oligonucleotide
  Sense strand starting at position 1495 of SEQ ID NO: 1243107
ucagucuacaggugaggaa

SEQ ID NO: 1395507 - RNA, 19 nt, Artificial Sequence
  Description of Artificial Sequence: Synthetic oligonucleotide
  Antisense strand to SEQ ID NO: 1395506
uuccucaccuguagacuga

SEQ ID NO: 1395508 - RNA, 19 nt, Artificial Sequence
  Description of Artificial Sequence: Synthetic oligonucleotide
  Sense strand starting at position 1576 of SEQ ID NO: 1243107
gccagauucugguuuagag

SEQ ID NO: 1395509 - RNA, 19 nt, Artificial Sequence
  Description of Artificial Sequence: Synthetic oligonucleotide
  Antisense strand to SEQ ID NO: 1395508
cucuaaaccagaaucuggc

SEQ ID NO: 1395510 - RNA, 19 nt, Artificial Sequence
  Description of Artificial Sequence: Synthetic oligonucleotide
  Sense strand starting at position 1666 of SEQ ID NO: 1243107
ucagccauucccugagcua

SEQ ID NO: 1395511 - RNA, 19 nt, Artificial Sequence
  Description of Artificial Sequence: Synthetic oligonucleotide
  Antisense strand to SEQ ID NO: 1395510
uagcucagggaauggcuga

SEQ ID NO: 1395512 - RNA, 19 nt, Artificial Sequence
  Description of Artificial Sequence: Synthetic oligonucleotide
  Sense strand starting at position 1999 of SEQ ID NO: 1243107
cauuuauagccaugugggu

SEQ ID NO: 1395513 - RNA, 19 nt, Artificial Sequence
  Description of Artificial Sequence: Synthetic oligonucleotide
  Antisense strand to SEQ ID NO: 1395512
acccacauggcuauaaaug

SEQ ID NO: 1395514 - RNA, 19 nt, Artificial Sequence
  Description of Artificial Sequence: Synthetic oligonucleotide
  Sense strand starting at position 2360 of SEQ ID NO: 1243107
auccuaucucccugguuga

SEQ ID NO: 1395515 - RNA, 19 nt, Artificial Sequence
  Description of Artificial Sequence: Synthetic oligonucleotide
  Antisense strand to SEQ ID NO: 1395514
ucaaccagggagauaggau

SEQ ID NO: 1395516 - RNA, 19 nt, Artificial Sequence
  Description of Artificial Sequence: Synthetic oligonucleotide
  Sense strand starting at position 2415 of SEQ ID NO: 1243107
uauccuuggcccugagauu

SEQ ID NO: 1395517 - RNA, 19 nt, Artificial Sequence
  Description of Artificial Sequence: Synthetic oligonucleotide
  Antisense strand to SEQ ID NO: 1395516
aaucucagggccaaggaua

SEQ ID NO: 1395518 - RNA, 19 nt, Artificial Sequence
  Description of Artificial Sequence: Synthetic oligonucleotide
  Sense strand starting at position 2424 of SEQ ID NO: 1243107
cccugagauuuagaaguuc

SEQ ID NO: 1395519 - RNA, 19 nt, Artificial Sequence
  Description of Artificial Sequence: Synthetic oligonucleotide
  Antisense strand to SEQ ID NO: 1395518
gaacuucuaaaucucaggg

SEQ ID NO: 1395520 - RNA, 19 nt, Artificial Sequence
  Description of Artificial Sequence: Synthetic oligonucleotide
  Sense strand starting at position 2499 of SEQ ID NO: 1243107
gggaguugugcccauccag

SEQ ID NO: 1395521 - RNA, 19 nt, Artificial Sequence
  Description of Artificial Sequence: Synthetic oligonucleotide
  Antisense strand to SEQ ID NO: 1395520
cuggaugggcacaacuccc

SEQ ID NO: 1395522 - RNA, 19 nt, Artificial Sequence
  Description of Artificial Sequence: Synthetic oligonucleotide
  Sense strand starting at position 2959 of SEQ ID NO: 1243107
uguaaagugcccuguagag

SEQ ID NO: 1395523 - RNA, 19 nt, Artificial Sequence
  Description of Artificial Sequence: Synthetic oligonucleotide
  Antisense strand to SEQ ID NO: 1395522
cucuacagggcacuuuaca

SEQ ID NO: 1395524 - RNA, 19 nt, Artificial Sequence
  Description of Artificial Sequence: Synthetic oligonucleotide
  Sense strand starting at position 2984 of SEQ ID NO: 1243107
gcuacuagcuucccugaca

SEQ ID NO: 1395525 - RNA, 19 nt, Artificial Sequence
  Description of Artificial Sequence: Synthetic oligonucleotide
  Antisense strand to SEQ ID NO: 1395524
ugucagggaagcuaguagc

SEQ ID NO: 1395526 - RNA, 19 nt, Artificial Sequence
  Description of Artificial Sequence: Synthetic oligonucleotide
  Sense strand starting at position 3016 of SEQ ID NO: 1243107
acccaaucgccauggagaa

SEQ ID NO: 1395527 - RNA, 19 nt, Artificial Sequence
  Description of Artificial Sequence: Synthetic oligonucleotide
  Antisense strand to SEQ ID NO: 1395526
uucuccauggcgauugggu

SEQ ID NO: 1395528 - RNA, 19 nt, Artificial Sequence
  Description of Artificial Sequence: Synthetic oligonucleotide
  Sense strand starting at position 3017 of SEQ ID NO: 1243107
cccaaucgccauggagaaa

SEQ ID NO: 1395529 - RNA, 19 nt, Artificial Sequence
  Description of Artificial Sequence: Synthetic oligonucleotide
  Antisense strand to SEQ ID NO: 1395528
uuucuccauggcgauuggg

SEQ ID NO: 1395530 - RNA, 19 nt, Artificial Sequence
  Description of Artificial Sequence: Synthetic oligonucleotide
  Sense strand starting at position 3040 of SEQ ID NO: 1243107
ggagcuggugcugauuaua

SEQ ID NO: 1395531 - RNA, 19 nt, Artificial Sequence
  Description of Artificial Sequence: Synthetic oligonucleotide
  Antisense strand to SEQ ID NO: 1395530
uauaaucagcaccagcucc

SEQ ID NO: 1395532 - RNA, 19 nt, Artificial Sequence
  Description of Artificial Sequence: Synthetic oligonucleotide
  Sense strand starting at position 3065 of SEQ ID NO: 1243107
ccaggaagcuaccucugau

SEQ ID NO: 1395533 - RNA, 19 nt, Artificial Sequence
  Description of Artificial Sequence: Synthetic oligonucleotide
  Antisense strand to SEQ ID NO: 1395532
aucagagguagcuuccugg

SEQ ID NO: 1395534 - RNA, 19 nt, Artificial Sequence
  Description of Artificial Sequence: Synthetic oligonucleotide
  Sense strand starting at position 3088 of SEQ ID NO: 1243107
cccuuucuuaguugggaga

SEQ ID NO: 1395535 - RNA, 19 nt, Artificial Sequence
  Description of Artificial Sequence: Synthetic oligonucleotide
  Antisense strand to SEQ ID NO: 1395534
ucucccaacuaagaaaggg

SEQ ID NO: 1395536 - RNA, 19 nt, Artificial Sequence
  Description of Artificial Sequence: Synthetic oligonucleotide
  Sense strand starting at position 3089 of SEQ ID NO: 1243107
ccuuucuuaguugggagaa

SEQ ID NO: 1395537 - RNA, 19 nt, Artificial Sequence
  Description of Artificial Sequence: Synthetic oligonucleotide
  Antisense strand to SEQ ID NO: 1395536
uucucccaacuaagaaagg

SEQ ID NO: 1395538 - RNA, 19 nt, Artificial Sequence
  Description of Artificial Sequence: Synthetic oligonucleotide
  Sense strand starting at position 3140 of SEQ ID NO: 1243107
cuguacauuucucaugaca

SEQ ID NO: 1395539 - RNA, 19 nt, Artificial Sequence
  Description of Artificial Sequence: Synthetic oligonucleotide
  Antisense strand to SEQ ID NO: 1395538
ugucaugagaaauguacag

SEQ ID NO: 1395540 - RNA, 19 nt, Artificial Sequence
  Description of Artificial Sequence: Synthetic oligonucleotide
  Sense strand starting at position 3171 of SEQ ID NO: 1243107
uaagcugcuguaugauuau

SEQ ID NO: 1395541 - RNA, 19 nt, Artificial Sequence
  Description of Artificial Sequence: Synthetic oligonucleotide
  Antisense strand to SEQ ID NO: 1395540
auaaucauacagcagcuua

SEQ ID NO: 1395542 - RNA, 19 nt, Artificial Sequence
  Description of Artificial Sequence: Synthetic oligonucleotide
  Sense strand starting at position 3177 of SEQ ID NO: 1243107
gcuguaugauuauuugucu

SEQ ID NO: 1395543 - RNA, 19 nt, Artificial Sequence
  Description of Artificial Sequence: Synthetic oligonucleotide
  Antisense strand to SEQ ID NO: 1395542
agacaaauaaucauacagc

SEQ ID NO: 1395544 - RNA, 19 nt, Artificial Sequence
  Description of Artificial Sequence: Synthetic oligonucleotide
  Sense strand starting at position 3178 of SEQ ID NO: 1243107
cuguaugauuauuugucuu

SEQ ID NO: 1395545 - RNA, 19 nt, Artificial Sequence
  Description of Artificial Sequence: Synthetic oligonucleotide
  Antisense strand to SEQ ID NO: 1395544
aagacaaauaaucauacag

SEQ ID NO: 1395546 - RNA, 19 nt, Artificial Sequence
  Description of Artificial Sequence: Synthetic oligonucleotide
  Sense strand starting at position 3353 of SEQ ID NO: 1243107
guggauauauaagugaaca

SEQ ID NO: 1395547 - RNA, 19 nt, Artificial Sequence
  Description of Artificial Sequence: Synthetic oligonucleotide
  Antisense strand to SEQ ID NO: 1395546
uguucacuuauauauccac

SEQ ID NO: 1395548 - RNA, 19 nt, Artificial Sequence
  Description of Artificial Sequence: Synthetic oligonucleotide
  Sense strand starting at position 3381 of SEQ ID NO: 1243107
gugagugacgaguggacaa

SEQ ID NO: 1395549 - RNA, 19 nt, Artificial Sequence
  Description of Artificial Sequence: Synthetic oligonucleotide
  Antisense strand to SEQ ID NO: 1395548
uuguccacucgucacucac

SEQ ID NO: 1395550 - RNA, 19 nt, Artificial Sequence
  Description of Artificial Sequence: Synthetic oligonucleotide
  Sense strand starting at position 3393 of SEQ ID NO: 1243107
uggacaaaugcauguaucu

SEQ ID NO: 1395551 - RNA, 19 nt, Artificial Sequence
  Description of Artificial Sequence: Synthetic oligonucleotide
  Antisense strand to SEQ ID NO: 1395550
agauacaugcauuugucca

SEQ ID NO: 1395552 - RNA, 19 nt, Artificial Sequence
  Description of Artificial Sequence: Synthetic oligonucleotide
  Sense strand starting at position 3484 of SEQ ID NO: 1243107
ggccauaaacaguggagau

SEQ ID NO: 1395553 - RNA, 19 nt, Artificial Sequence
  Description of Artificial Sequence: Synthetic oligonucleotide
  Antisense strand to SEQ ID NO: 1395552
aucuccacuguuuauggcc

SEQ ID NO: 1395554 - RNA, 19 nt, Artificial Sequence
  Description of Artificial Sequence: Synthetic oligonucleotide
  Sense strand starting at position 3485 of SEQ ID NO: 1243107
gccauaaacaguggagauc

SEQ ID NO: 1395555 - RNA, 19 nt, Artificial Sequence
  Description of Artificial Sequence: Synthetic oligonucleotide
  Antisense strand to SEQ ID NO: 1395554
gaucuccacuguuuauggc

SEQ ID NO: 1395556 - RNA, 19 nt, Artificial Sequence
  Description of Artificial Sequence: Synthetic oligonucleotide
  Sense strand starting at position 3497 of SEQ ID NO: 1243107
ggagaucauuccucccagu

SEQ ID NO: 1395557 - RNA, 19 nt, Artificial Sequence
  Description of Artificial Sequence: Synthetic oligonucleotide
  Antisense strand to SEQ ID NO: 1395556
acugggaggaaugaucucc

SEQ ID NO: 1395558 - RNA, 19 nt, Artificial Sequence
  Description of Artificial Sequence: Synthetic oligonucleotide
  Sense strand starting at position 3603 of SEQ ID NO: 1243107
agcuucuaacgaggagaaa

SEQ ID NO: 1395559 - RNA, 19 nt, Artificial Sequence
  Description of Artificial Sequence: Synthetic oligonucleotide
  Antisense strand to SEQ ID NO: 1395558
uuucuccucguuagaagcu

SEQ ID NO: 1395560 - RNA, 19 nt, Artificial Sequence
  Description of Artificial Sequence: Synthetic oligonucleotide
  Sense strand starting at position 3829 of SEQ ID NO: 1243107
ucagaaguuugggaggaca

SEQ ID NO: 1395561 - RNA, 19 nt, Artificial Sequence
  Description of Artificial Sequence: Synthetic oligonucleotide
  Antisense strand to SEQ ID NO: 1395560
uguccucccaaacuucuga

SEQ ID NO: 1395562 - RNA, 19 nt, Artificial Sequence
  Description of Artificial Sequence: Synthetic oligonucleotide
  Sense strand starting at position 550 of SEQ ID NO: 1243108
gcgggaucugcugggugaa

SEQ ID NO: 1395563 - RNA, 19 nt, Artificial Sequence
  Description of Artificial Sequence: Synthetic oligonucleotide
  Antisense strand to SEQ ID NO: 1395562
uucacccagcagaucccgc

SEQ ID NO: 1395564 - RNA, 19 nt, Artificial Sequence
  Description of Artificial Sequence: Synthetic oligonucleotide
  Sense strand starting at position 903 of SEQ ID NO: 1243108
gaagguuuguucuuugcaa

SEQ ID NO: 1395565 - RNA, 19 nt, Artificial Sequence
  Description of Artificial Sequence: Synthetic oligonucleotide
  Antisense strand to SEQ ID NO: 1395564
uugcaaagaacaaaccuuc

SEQ ID NO: 1395566 - RNA, 19 nt, Artificial Sequence
  Description of Artificial Sequence: Synthetic oligonucleotide
  Sense strand starting at position 904 of SEQ ID NO: 1243108
aagguuuguucuuugcaau

SEQ ID NO: 1395567 - RNA, 19 nt, Artificial Sequence
  Description of Artificial Sequence: Synthetic oligonucleotide
  Antisense strand to SEQ ID NO: 1395566
auugcaaagaacaaaccuu

SEQ ID NO: 1395568 - RNA, 19 nt, Artificial Sequence
  Description of Artificial Sequence: Synthetic oligonucleotide
  Sense strand starting at position 958 of SEQ ID NO: 1243108
gccuuugugagcugcaaca

SEQ ID NO: 1395569 - RNA, 19 nt, Artificial Sequence
  Description of Artificial Sequence: Synthetic oligonucleotide
  Antisense strand to SEQ ID NO: 1395568
uguugcagcucacaaaggc

SEQ ID NO: 1395570 - RNA, 19 nt, Artificial Sequence
  Description of Artificial Sequence: Synthetic oligonucleotide
  Sense strand starting at position 1266 of SEQ ID NO: 1243108
gccaaauggcuuugauuuc

SEQ ID NO: 1395571 - RNA, 19 nt, Artificial Sequence
  Description of Artificial Sequence: Synthetic oligonucleotide
  Antisense strand to SEQ ID NO: 1395570
gaaaucaaagccauuuggc

SEQ ID NO: 1395572 - RNA, 19 nt, Artificial Sequence
  Description of Artificial Sequence: Synthetic oligonucleotide
  Sense strand starting at position 1293 of SEQ ID NO: 1243108
gcucacugcucgccacauu

SEQ ID NO: 1395573 - RNA, 19 nt, Artificial Sequence
  Description of Artificial Sequence: Synthetic oligonucleotide
  Antisense strand to SEQ ID NO: 1395572
aauguggcgagcagugagc

SEQ ID NO: 1395574 - RNA, 19 nt, Artificial Sequence
  Description of Artificial Sequence: Synthetic oligonucleotide
  Sense strand starting at position 1394 of SEQ ID NO: 1243108
agaaauaugucaguaccuu

SEQ ID NO: 1395575 - RNA, 19 nt, Artificial Sequence
  Description of Artificial Sequence: Synthetic oligonucleotide
  Antisense strand to SEQ ID NO: 1395574
aagguacugacauauuucu

SEQ ID NO: 1395576 - RNA, 19 nt, Artificial Sequence
  Description of Artificial Sequence: Synthetic oligonucleotide
  Sense strand starting at position 1400 of SEQ ID NO: 1243108
augucaguaccuuaaaguu

SEQ ID NO: 1395577 - RNA, 19 nt, Artificial Sequence
  Description of Artificial Sequence: Synthetic oligonucleotide
  Antisense strand to SEQ ID NO: 1395576
aacuuuaagguacugacau

SEQ ID NO: 1395578 - RNA, 19 nt, Artificial Sequence
  Description of Artificial Sequence: Synthetic oligonucleotide
  Sense strand starting at position 1406 of SEQ ID NO: 1243108
guaccuuaaaguuggguau

SEQ ID NO: 1395579 - RNA, 19 nt, Artificial Sequence
  Description of Artificial Sequence: Synthetic oligonucleotide
  Antisense strand to SEQ ID NO: 1395578
auacccaacuuuaagguac

SEQ ID NO: 1395580 - RNA, 19 nt, Artificial Sequence
  Description of Artificial Sequence: Synthetic oligonucleotide
  Sense strand starting at position 1417 of SEQ ID NO: 1243108
uuggguauccugugaugaa

SEQ ID NO: 1395581 - RNA, 19 nt, Artificial Sequence
  Description of Artificial Sequence: Synthetic oligonucleotide
  Antisense strand to SEQ ID NO: 1395580
uucaucacaggauacccaa

SEQ ID NO: 1395582 - RNA, 19 nt, Artificial Sequence
  Description of Artificial Sequence: Synthetic oligonucleotide
  Sense strand starting at position 1418 of SEQ ID NO: 1243108
uggguauccugugaugaac

SEQ ID NO: 1395583 - RNA, 19 nt, Artificial Sequence
  Description of Artificial Sequence: Synthetic oligonucleotide
  Antisense strand to SEQ ID NO: 1395582
guucaucacaggauaccca

SEQ ID NO: 1395584 - RNA, 19 nt, Artificial Sequence
  Description of Artificial Sequence: Synthetic oligonucleotide
  Sense strand starting at position 1493 of SEQ ID NO: 1243108
guauguccuguuuggagac

SEQ ID NO: 1395585 - RNA, 19 nt, Artificial Sequence
  Description of Artificial Sequence: Synthetic oligonucleotide
  Antisense strand to SEQ ID NO: 1395584
gucuccaaacaggacauac

SEQ ID NO: 1395586 - RNA, 19 nt, Artificial Sequence
  Description of Artificial Sequence: Synthetic oligonucleotide
  Sense strand starting at position 1569 of SEQ ID NO: 1243108
gcugaaaccgcuuaacagu

SEQ ID NO: 1395587 - RNA, 19 nt, Artificial Sequence
  Description of Artificial Sequence: Synthetic oligonucleotide
  Antisense strand to SEQ ID NO: 1395586
acuguuaagcgguuucagc

SEQ ID NO: 1395588 - RNA, 19 nt, Artificial Sequence
  Description of Artificial Sequence: Synthetic oligonucleotide
  Sense strand starting at position 1575 of SEQ ID NO: 1243108
accgcuuaacaguaguuaa

SEQ ID NO: 1395589 - RNA, 19 nt, Artificial Sequence
  Description of Artificial Sequence: Synthetic oligonucleotide
  Antisense strand to SEQ ID NO: 1395588
uuaacuacuguuaagcggu

SEQ ID NO: 1395590 - RNA, 19 nt, Artificial Sequence
  Description of Artificial Sequence: Synthetic oligonucleotide
  Sense strand starting at position 1707 of SEQ ID NO: 1243108
cucgucuucucguuaucuu

SEQ ID NO: 1395591 - RNA, 19 nt, Artificial Sequence
  Description of Artificial Sequence: Synthetic oligonucleotide
  Antisense strand to SEQ ID NO: 1395590
aagauaacgagaagacgag

SEQ ID NO: 1395592 - RNA, 19 nt, Artificial Sequence
  Description of Artificial Sequence: Synthetic oligonucleotide
  Sense strand starting at position 1708 of SEQ ID NO: 1243108
ucgucuucucguuaucuuu

SEQ ID NO: 1395593 - RNA, 19 nt, Artificial Sequence
  Description of Artificial Sequence: Synthetic oligonucleotide
  Antisense strand to SEQ ID NO: 1395592
aaagauaacgagaagacga

SEQ ID NO: 1395594 - RNA, 19 nt, Artificial Sequence
  Description of Artificial Sequence: Synthetic oligonucleotide
  Sense strand starting at position 1710 of SEQ ID NO: 1243108
gucuucucguuaucuuuau

SEQ ID NO: 1395595 - RNA, 19 nt, Artificial Sequence
  Description of Artificial Sequence: Synthetic oligonucleotide
  Antisense strand to SEQ ID NO: 1395594
auaaagauaacgagaagac

SEQ ID NO: 1395596 - RNA, 19 nt, Artificial Sequence
  Description of Artificial Sequence: Synthetic oligonucleotide
  Sense strand starting at position 1711 of SEQ ID NO: 1243108
ucuucucguuaucuuuauu

SEQ ID NO: 1395597 - RNA, 19 nt, Artificial Sequence
  Description of Artificial Sequence: Synthetic oligonucleotide
  Antisense strand to SEQ ID NO: 1395596
aauaaagauaacgagaaga

SEQ ID NO: 1395598 - RNA, 19 nt, Artificial Sequence
  Description of Artificial Sequence: Synthetic oligonucleotide
  Sense strand starting at position 1734 of SEQ ID NO: 1243108
cugacaucuuucucgggau

SEQ ID NO: 1395599 - RNA, 19 nt, Artificial Sequence
  Description of Artificial Sequence: Synthetic oligonucleotide
  Antisense strand to SEQ ID NO: 1395598
aucccgagaaagaugucag

SEQ ID NO: 1395600 - RNA, 19 nt, Artificial Sequence
  Description of Artificial Sequence: Synthetic oligonucleotide
  Sense strand starting at position 1735 of SEQ ID NO: 1243108
ugacaucuuucucgggauu

SEQ ID NO: 1395601 - RNA, 19 nt, Artificial Sequence
  Description of Artificial Sequence: Synthetic oligonucleotide
  Antisense strand to SEQ ID NO: 1395600
aaucccgagaaagauguca

SEQ ID NO: 1395602 - RNA, 19 nt, Artificial Sequence
  Description of Artificial Sequence: Synthetic oligonucleotide
  Sense strand starting at position 1747 of SEQ ID NO: 1243108
cgggauuccgggcgagaga

SEQ ID NO: 1395603 - RNA, 19 nt, Artificial Sequence
  Description of Artificial Sequence: Synthetic oligonucleotide
  Antisense strand to SEQ ID NO: 1395602
ucucucgcccggaaucccg

SEQ ID NO: 1395604 - RNA, 19 nt, Artificial Sequence
  Description of Artificial Sequence: Synthetic oligonucleotide
  Sense strand starting at position 582 of SEQ ID NO: 1243109
gcgggaucugcugggugaa

SEQ ID NO: 1395605 - RNA, 19 nt, Artificial Sequence
  Description of Artificial Sequence: Synthetic oligonucleotide
  Antisense strand to SEQ ID NO: 1395604
uucacccagcagaucccgc

SEQ ID NO: 1395606 - RNA, 19 nt, Artificial Sequence
  Description of Artificial Sequence: Synthetic oligonucleotide
  Sense strand starting at position 935 of SEQ ID NO: 1243109
gaagguuuguucuuugcaa

SEQ ID NO: 1395607 - RNA, 19 nt, Artificial Sequence
  Description of Artificial Sequence: Synthetic oligonucleotide
  Antisense strand to SEQ ID NO: 1395606
uugcaaagaacaaaccuuc

SEQ ID NO: 1395608 - RNA, 19 nt, Artificial Sequence
  Description of Artificial Sequence: Synthetic oligonucleotide
  Sense strand starting at position 936 of SEQ ID NO: 1243109
aagguuuguucuuugcaau

SEQ ID NO: 1395609 - RNA, 19 nt, Artificial Sequence
  Description of Artificial Sequence: Synthetic oligonucleotide
  Antisense strand to SEQ ID NO: 1395608
auugcaaagaacaaaccuu

SEQ ID NO: 1395610 - RNA, 19 nt, Artificial Sequence
  Description of Artificial Sequence: Synthetic oligonucleotide
  Sense strand starting at position 990 of SEQ ID NO: 1243109
gccuuugugagcugcaaca

SEQ ID NO: 1395611 - RNA, 19 nt, Artificial Sequence
  Description of Artificial Sequence: Synthetic oligonucleotide
  Antisense strand to SEQ ID NO: 1395610
uguugcagcucacaaaggc

SEQ ID NO: 1395612 - RNA, 19 nt, Artificial Sequence
  Description of Artificial Sequence: Synthetic oligonucleotide
  Sense strand starting at position 1298 of SEQ ID NO: 1243109
gccaaauggcuuugauuuc

SEQ ID NO: 1395613 - RNA, 19 nt, Artificial Sequence
  Description of Artificial Sequence: Synthetic oligonucleotide
  Antisense strand to SEQ ID NO: 1395612
gaaaucaaagccauuuggc

SEQ ID NO: 1395614 - RNA, 19 nt, Artificial Sequence
  Description of Artificial Sequence: Synthetic oligonucleotide
  Sense strand starting at position 1325 of SEQ ID NO: 1243109
gcucacugcucgccacauu

SEQ ID NO: 1395615 - RNA, 19 nt, Artificial Sequence
  Description of Artificial Sequence: Synthetic oligonucleotide
  Antisense strand to SEQ ID NO: 1395614
aauguggcgagcagugagc

SEQ ID NO: 1395616 - RNA, 19 nt, Artificial Sequence
  Description of Artificial Sequence: Synthetic oligonucleotide
  Sense strand starting at position 1426 of SEQ ID NO: 1243109
agaaauaugucaguaccuu

SEQ ID NO: 1395617 - RNA, 19 nt, Artificial Sequence
  Description of Artificial Sequence: Synthetic oligonucleotide
  Antisense strand to SEQ ID NO: 1395616
aagguacugacauauuucu

SEQ ID NO: 1395618 - RNA, 19 nt, Artificial Sequence
  Description of Artificial Sequence: Synthetic oligonucleotide
  Sense strand starting at position 1432 of SEQ ID NO: 1243109
augucaguaccuuaaaguu

SEQ ID NO: 1395619 - RNA, 19 nt, Artificial Sequence
  Description of Artificial Sequence: Synthetic oligonucleotide
  Antisense strand to SEQ ID NO: 1395618
aacuuuaagguacugacau

SEQ ID NO: 1395620 - RNA, 19 nt, Artificial Sequence
  Description of Artificial Sequence: Synthetic oligonucleotide
  Sense strand starting at position 1438 of SEQ ID NO: 1243109
guaccuuaaaguuggguau

SEQ ID NO: 1395621 - RNA, 19 nt, Artificial Sequence
  Description of Artificial Sequence: Synthetic oligonucleotide
  Antisense strand to SEQ ID NO: 1395620
auacccaacuuuaagguac

SEQ ID NO: 1395622 - RNA, 19 nt, Artificial Sequence
  Description of Artificial Sequence: Synthetic oligonucleotide
  Sense strand starting at position 1449 of SEQ ID NO: 1243109
uuggguauccugugaugaa

SEQ ID NO: 1395623 - RNA, 19 nt, Artificial Sequence
  Description of Artificial Sequence: Synthetic oligonucleotide
  Antisense strand to SEQ ID NO: 1395622
uucaucacaggauacccaa

SEQ ID NO: 1395624 - RNA, 19 nt, Artificial Sequence
  Description of Artificial Sequence: Synthetic oligonucleotide
  Sense strand starting at position 1450 of SEQ ID NO: 1243109
uggguauccugugaugaac

SEQ ID NO: 1395625 - RNA, 19 nt, Artificial Sequence
  Description of Artificial Sequence: Synthetic oligonucleotide
  Antisense strand to SEQ ID NO: 1395624
guucaucacaggauaccca

SEQ ID NO: 1395626 - RNA, 19 nt, Artificial Sequence
  Description of Artificial Sequence: Synthetic oligonucleotide
  Sense strand starting at position 1525 of SEQ ID NO: 1243109
guauguccuguuuggagac

SEQ ID NO: 1395627 - RNA, 19 nt, Artificial Sequence
  Description of Artificial Sequence: Synthetic oligonucleotide
  Antisense strand to SEQ ID NO: 1395626
gucuccaaacaggacauac

SEQ ID NO: 1395628 - RNA, 19 nt, Artificial Sequence
  Description of Artificial Sequence: Synthetic oligonucleotide
  Sense strand starting at position 1601 of SEQ ID NO: 1243109
gcugaaaccgcuuaacagu

SEQ ID NO: 1395629 - RNA, 19 nt, Artificial Sequence
  Description of Artificial Sequence: Synthetic oligonucleotide
  Antisense strand to SEQ ID NO: 1395628
acuguuaagcgguuucagc

SEQ ID NO: 1395630 - RNA, 19 nt, Artificial Sequence
  Description of Artificial Sequence: Synthetic oligonucleotide
  Sense strand starting at position 1607 of SEQ ID NO: 1243109
accgcuuaacaguaguuaa

SEQ ID NO: 1395631 - RNA, 19 nt, Artificial Sequence
  Description of Artificial Sequence: Synthetic oligonucleotide
  Antisense strand to SEQ ID NO: 1395630
uuaacuacuguuaagcggu

SEQ ID NO: 1395632 - RNA, 19 nt, Artificial Sequence
  Description of Artificial Sequence: Synthetic oligonucleotide
  Sense strand starting at position 1739 of SEQ ID NO: 1243109
cucgucuucucguuaucuu

SEQ ID NO: 1395633 - RNA, 19 nt, Artificial Sequence
  Description of Artificial Sequence: Synthetic oligonucleotide
  Antisense strand to SEQ ID NO: 1395632
aagauaacgagaagacgag

SEQ ID NO: 1395634 - RNA, 19 nt, Artificial Sequence
  Description of Artificial Sequence: Synthetic oligonucleotide
  Sense strand starting at position 1740 of SEQ ID NO: 1243109
ucgucuucucguuaucuuu

SEQ ID NO: 1395635 - RNA, 19 nt, Artificial Sequence
  Description of Artificial Sequence: Synthetic oligonucleotide
  Antisense strand to SEQ ID NO: 1395634
aaagauaacgagaagacga

SEQ ID NO: 1395636 - RNA, 19 nt, Artificial Sequence
  Description of Artificial Sequence: Synthetic oligonucleotide
  Sense strand starting at position 1742 of SEQ ID NO: 1243109
gucuucucguuaucuuuau

SEQ ID NO: 1395637 - RNA, 19 nt, Artificial Sequence
  Description of Artificial Sequence: Synthetic oligonucleotide
  Antisense strand to SEQ ID NO: 1395636
auaaagauaacgagaagac

SEQ ID NO: 1395638 - RNA, 19 nt, Artificial Sequence
  Description of Artificial Sequence: Synthetic oligonucleotide
  Sense strand starting at position 1743 of SEQ ID NO: 1243109
ucuucucguuaucuuuauu

SEQ ID NO: 1395639 - RNA, 19 nt, Artificial Sequence
  Description of Artificial Sequence: Synthetic oligonucleotide
  Antisense strand to SEQ ID NO: 1395638
aauaaagauaacgagaaga

SEQ ID NO: 1395640 - RNA, 19 nt, Artificial Sequence
  Description of Artificial Sequence: Synthetic oligonucleotide
  Sense strand starting at position 1766 of SEQ ID NO: 1243109
cugacaucuuucucgggau

SEQ ID NO: 1395641 - RNA, 19 nt, Artificial Sequence
  Description of Artificial Sequence: Synthetic oligonucleotide
  Antisense strand to SEQ ID NO: 1395640
aucccgagaaagaugucag

SEQ ID NO: 1395642 - RNA, 19 nt, Artificial Sequence
  Description of Artificial Sequence: Synthetic oligonucleotide
  Sense strand starting at position 1767 of SEQ ID NO: 1243109
ugacaucuuucucgggauu

SEQ ID NO: 1395643 - RNA, 19 nt, Artificial Sequence
  Description of Artificial Sequence: Synthetic oligonucleotide
  Antisense strand to SEQ ID NO: 1395642
aaucccgagaaagauguca

SEQ ID NO: 1395644 - RNA, 19 nt, Artificial Sequence
  Description of Artificial Sequence: Synthetic oligonucleotide
  Sense strand starting at position 1779 of SEQ ID NO: 1243109
cgggauuccgggcgagaga

SEQ ID NO: 1395645 - RNA, 19 nt, Artificial Sequence
  Description of Artificial Sequence: Synthetic oligonucleotide
  Antisense strand to SEQ ID NO: 1395644
ucucucgcccggaaucccg

SEQ ID NO: 1395646 - RNA, 19 nt, Artificial Sequence
  Description of Artificial Sequence: Synthetic oligonucleotide
  Sense strand starting at position 172 of SEQ ID NO: 1243110
aaaggauaauggcuagagu

SEQ ID NO: 1395647 - RNA, 19 nt, Artificial Sequence
  Description of Artificial Sequence: Synthetic oligonucleotide
  Antisense strand to SEQ ID NO: 1395646
acucuagccauuauccuuu

SEQ ID NO: 1395648 - RNA, 19 nt, Artificial Sequence
  Description of Artificial Sequence: Synthetic oligonucleotide
  Sense strand starting at position 181 of SEQ ID NO: 1243110
uggcuagagugacuugaua

SEQ ID NO: 1395649 - RNA, 19 nt, Artificial Sequence
  Description of Artificial Sequence: Synthetic oligonucleotide
  Antisense strand to SEQ ID NO: 1395648
uaucaagucacucuagcca

SEQ ID NO: 1395650 - RNA, 19 nt, Artificial Sequence
  Description of Artificial Sequence: Synthetic oligonucleotide
  Sense strand starting at position 183 of SEQ ID NO: 1243110
gcuagagugacuugauaug

SEQ ID NO: 1395651 - RNA, 19 nt, Artificial Sequence
  Description of Artificial Sequence: Synthetic oligonucleotide
  Antisense strand to SEQ ID NO: 1395650
cauaucaagucacucuagc

SEQ ID NO: 1395652 - RNA, 19 nt, Artificial Sequence
  Description of Artificial Sequence: Synthetic oligonucleotide
  Sense strand starting at position 219 of SEQ ID NO: 1243110
gcuuguaaugugccgauua

SEQ ID NO: 1395653 - RNA, 19 nt, Artificial Sequence
  Description of Artificial Sequence: Synthetic oligonucleotide
  Antisense strand to SEQ ID NO: 1395652
uaaucggcacauuacaagc

SEQ ID NO: 1395654 - RNA, 19 nt, Artificial Sequence
  Description of Artificial Sequence: Synthetic oligonucleotide
  Sense strand starting at position 230 of SEQ ID NO: 1243110
gccgauuaguguguaauuu

SEQ ID NO: 1395655 - RNA, 19 nt, Artificial Sequence
  Description of Artificial Sequence: Synthetic oligonucleotide
  Antisense strand to SEQ ID NO: 1395654
aaauuacacacuaaucggc

SEQ ID NO: 1395656 - RNA, 19 nt, Artificial Sequence
  Description of Artificial Sequence: Synthetic oligonucleotide
  Sense strand starting at position 517 of SEQ ID NO: 1243110
cuuugcguaauuguaugua

SEQ ID NO: 1395657 - RNA, 19 nt, Artificial Sequence
  Description of Artificial Sequence: Synthetic oligonucleotide
  Antisense strand to SEQ ID NO: 1395656
uacauacaauuacgcaaag

SEQ ID NO: 1395658 - RNA, 19 nt, Artificial Sequence
  Description of Artificial Sequence: Synthetic oligonucleotide
  Sense strand starting at position 525 of SEQ ID NO: 1243110
aauuguauguagccuaaga

SEQ ID NO: 1395659 - RNA, 19 nt, Artificial Sequence
  Description of Artificial Sequence: Synthetic oligonucleotide
  Antisense strand to SEQ ID NO: 1395658
ucuuaggcuacauacaauu

SEQ ID NO: 1395660 - RNA, 19 nt, Artificial Sequence
  Description of Artificial Sequence: Synthetic oligonucleotide
  Sense strand starting at position 569 of SEQ ID NO: 1243110
uacuauagcgauuaaagug

SEQ ID NO: 1395661 - RNA, 19 nt, Artificial Sequence
  Description of Artificial Sequence: Synthetic oligonucleotide
  Antisense strand to SEQ ID NO: 1395660
cacuuuaaucgcuauagua

SEQ ID NO: 1395662 - RNA, 19 nt, Artificial Sequence
  Description of Artificial Sequence: Synthetic oligonucleotide
  Sense strand starting at position 575 of SEQ ID NO: 1243110
agcgauuaaagugguaaua

SEQ ID NO: 1395663 - RNA, 19 nt, Artificial Sequence
  Description of Artificial Sequence: Synthetic oligonucleotide
  Antisense strand to SEQ ID NO: 1395662
uauuaccacuuuaaucgcu

SEQ ID NO: 1395664 - RNA, 19 nt, Artificial Sequence
  Description of Artificial Sequence: Synthetic oligonucleotide
  Sense strand starting at position 590 of SEQ ID NO: 1243110
aauaauaaguaggagaaga

SEQ ID NO: 1395665 - RNA, 19 nt, Artificial Sequence
  Description of Artificial Sequence: Synthetic oligonucleotide
  Antisense strand to SEQ ID NO: 1395664
ucuucuccuacuuauuauu

SEQ ID NO: 1395666 - RNA, 19 nt, Artificial Sequence
  Description of Artificial Sequence: Synthetic oligonucleotide
  Sense strand starting at position 610 of SEQ ID NO: 1243110
ugauuauaggcauauuguu

SEQ ID NO: 1395667 - RNA, 19 nt, Artificial Sequence
  Description of Artificial Sequence: Synthetic oligonucleotide
  Antisense strand to SEQ ID NO: 1395666
aacaauaugccuauaauca

SEQ ID NO: 1395668 - RNA, 19 nt, Artificial Sequence
  Description of Artificial Sequence: Synthetic oligonucleotide
  Sense strand starting at position 733 of SEQ ID NO: 1243110
guuagauugagacagcauc

SEQ ID NO: 1395669 - RNA, 19 nt, Artificial Sequence
  Description of Artificial Sequence: Synthetic oligonucleotide
  Antisense strand to SEQ ID NO: 1395668
gaugcugucucaaucuaac

SEQ ID NO: 1395670 - RNA, 19 nt, Artificial Sequence
  Description of Artificial Sequence: Synthetic oligonucleotide
  Sense strand starting at position 988 of SEQ ID NO: 1243110
ugccguuaucccuaggaua

SEQ ID NO: 1395671 - RNA, 19 nt, Artificial Sequence
  Description of Artificial Sequence: Synthetic oligonucleotide
  Antisense strand to SEQ ID NO: 1395670
uauccuagggauaacggca

SEQ ID NO: 1395672 - RNA, 19 nt, Artificial Sequence
  Description of Artificial Sequence: Synthetic oligonucleotide
  Sense strand starting at position 990 of SEQ ID NO: 1243110
ccguuaucccuaggauaac

SEQ ID NO: 1395673 - RNA, 19 nt, Artificial Sequence
  Description of Artificial Sequence: Synthetic oligonucleotide
  Antisense strand to SEQ ID NO: 1395672
guuauccuagggauaacgg

SEQ ID NO: 1395674 - RNA, 19 nt, Artificial Sequence
  Description of Artificial Sequence: Synthetic oligonucleotide
  Sense strand starting at position 1042 of SEQ ID NO: 1243110
uguuaacuugcuuagacua

SEQ ID NO: 1395675 - RNA, 19 nt, Artificial Sequence
  Description of Artificial Sequence: Synthetic oligonucleotide
  Antisense strand to SEQ ID NO: 1395674
uagucuaagcaaguuaaca

SEQ ID NO: 1395676 - RNA, 19 nt, Artificial Sequence
  Description of Artificial Sequence: Synthetic oligonucleotide
  Sense strand starting at position 1057 of SEQ ID NO: 1243110
acuagugcggucuuaguuu

SEQ ID NO: 1395677 - RNA, 19 nt, Artificial Sequence
  Description of Artificial Sequence: Synthetic oligonucleotide
  Antisense strand to SEQ ID NO: 1395676
aaacuaagaccgcacuagu

SEQ ID NO: 1395678 - RNA, 19 nt, Artificial Sequence
  Description of Artificial Sequence: Synthetic oligonucleotide
  Sense strand starting at position 1079 of SEQ ID NO: 1243110
uaguuuggagguugaauua

SEQ ID NO: 1395679 - RNA, 19 nt, Artificial Sequence
  Description of Artificial Sequence: Synthetic oligonucleotide
  Antisense strand to SEQ ID NO: 1395678
uaauucaaccuccaaacua

SEQ ID NO: 1395680 - RNA, 19 nt, Artificial Sequence
  Description of Artificial Sequence: Synthetic oligonucleotide
  Sense strand starting at position 1089 of SEQ ID NO: 1243110
guugaauuaugcucugaaa

SEQ ID NO: 1395681 - RNA, 19 nt, Artificial Sequence
  Description of Artificial Sequence: Synthetic oligonucleotide
  Antisense strand to SEQ ID NO: 1395680
uuucagagcauaauucaac

SEQ ID NO: 1395682 - RNA, 19 nt, Artificial Sequence
  Description of Artificial Sequence: Synthetic oligonucleotide
  Sense strand starting at position 1091 of SEQ ID NO: 1243110
ugaauuaugcucugaaaua

SEQ ID NO: 1395683 - RNA, 19 nt, Artificial Sequence
  Description of Artificial Sequence: Synthetic oligonucleotide
  Antisense strand to SEQ ID NO: 1395682
uauuucagagcauaauuca

SEQ ID NO: 1395684 - RNA, 19 nt, Artificial Sequence
  Description of Artificial Sequence: Synthetic oligonucleotide
  Sense strand starting at position 1487 of SEQ ID NO: 1243110
uugaguuucuauuugcauu

SEQ ID NO: 1395685 - RNA, 19 nt, Artificial Sequence
  Description of Artificial Sequence: Synthetic oligonucleotide
  Antisense strand to SEQ ID NO: 1395684
aaugcaaauagaaacucaa

SEQ ID NO: 1395686 - RNA, 19 nt, Artificial Sequence
  Description of Artificial Sequence: Synthetic oligonucleotide
  Sense strand starting at position 1519 of SEQ ID NO: 1243110
ucuauagagucuucucauc

SEQ ID NO: 1395687 - RNA, 19 nt, Artificial Sequence
  Description of Artificial Sequence: Synthetic oligonucleotide
  Antisense strand to SEQ ID NO: 1395686
gaugagaagacucuauaga

SEQ ID NO: 1395688 - RNA, 19 nt, Artificial Sequence
  Description of Artificial Sequence: Synthetic oligonucleotide
  Sense strand starting at position 1524 of SEQ ID NO: 1243110
agagucuucucaucuuauu

SEQ ID NO: 1395689 - RNA, 19 nt, Artificial Sequence
  Description of Artificial Sequence: Synthetic oligonucleotide
  Antisense strand to SEQ ID NO: 1395688
aauaagaugagaagacucu

SEQ ID NO: 1395690 - RNA, 19 nt, Artificial Sequence
  Description of Artificial Sequence: Synthetic oligonucleotide
  Sense strand starting at position 1714 of SEQ ID NO: 1243110
gccucuaauacuggugaag

SEQ ID NO: 1395691 - RNA, 19 nt, Artificial Sequence
  Description of Artificial Sequence: Synthetic oligonucleotide
  Antisense strand to SEQ ID NO: 1395690
cuucaccaguauuagaggc

SEQ ID NO: 1395692 - RNA, 19 nt, Artificial Sequence
  Description of Artificial Sequence: Synthetic oligonucleotide
  Sense strand starting at position 1772 of SEQ ID NO: 1243110
ucccgaguuccuuauacuu

SEQ ID NO: 1395693 - RNA, 19 nt, Artificial Sequence
  Description of Artificial Sequence: Synthetic oligonucleotide
  Antisense strand to SEQ ID NO: 1395692
aaguauaaggaacucggga

SEQ ID NO: 1395694 - RNA, 19 nt, Artificial Sequence
  Description of Artificial Sequence: Synthetic oligonucleotide
  Sense strand starting at position 1872 of SEQ ID NO: 1243110
uguuaacuaucaguggauu

SEQ ID NO: 1395695 - RNA, 19 nt, Artificial Sequence
  Description of Artificial Sequence: Synthetic oligonucleotide
  Antisense strand to SEQ ID NO: 1395694
aauccacugauaguuaaca

SEQ ID NO: 1395696 - RNA, 19 nt, Artificial Sequence
  Description of Artificial Sequence: Synthetic oligonucleotide
  Sense strand starting at position 1873 of SEQ ID NO: 1243110
guuaacuaucaguggauuc

SEQ ID NO: 1395697 - RNA, 19 nt, Artificial Sequence
  Description of Artificial Sequence: Synthetic oligonucleotide
  Antisense strand to SEQ ID NO: 1395696
gaauccacugauaguuaac

SEQ ID NO: 1395698 - RNA, 19 nt, Artificial Sequence
  Description of Artificial Sequence: Synthetic oligonucleotide
  Sense strand starting at position 1883 of SEQ ID NO: 1243110
aguggauucugguuugaua

SEQ ID NO: 1395699 - RNA, 19 nt, Artificial Sequence
  Description of Artificial Sequence: Synthetic oligonucleotide
  Antisense strand to SEQ ID NO: 1395698
uaucaaaccagaauccacu

SEQ ID NO: 1395700 - RNA, 19 nt, Artificial Sequence
  Description of Artificial Sequence: Synthetic oligonucleotide
  Sense strand starting at position 1896 of SEQ ID NO: 1243110
uugauauaagcuuaugcaa

SEQ ID NO: 1395701 - RNA, 19 nt, Artificial Sequence
  Description of Artificial Sequence: Synthetic oligonucleotide
  Antisense strand to SEQ ID NO: 1395700
uugcauaagcuuauaucaa

SEQ ID NO: 1395702 - RNA, 19 nt, Artificial Sequence
  Description of Artificial Sequence: Synthetic oligonucleotide
  Sense strand starting at position 1963 of SEQ ID NO: 1243110
guaauagauuagucuaaug

SEQ ID NO: 1395703 - RNA, 19 nt, Artificial Sequence
  Description of Artificial Sequence: Synthetic oligonucleotide
  Antisense strand to SEQ ID NO: 1395702
cauuagacuaaucuauuac

SEQ ID NO: 1395704 - RNA, 19 nt, Artificial Sequence
  Description of Artificial Sequence: Synthetic oligonucleotide
  Sense strand starting at position 2022 of SEQ ID NO: 1243110
auuggauguugagcuugaa

SEQ ID NO: 1395705 - RNA, 19 nt, Artificial Sequence
  Description of Artificial Sequence: Synthetic oligonucleotide
  Antisense strand to SEQ ID NO: 1395704
uucaagcucaacauccaau

SEQ ID NO: 1395706 - RNA, 19 nt, Artificial Sequence
  Description of Artificial Sequence: Synthetic oligonucleotide
  Sense strand starting at position 2026 of SEQ ID NO: 1243110
gauguugagcuugaaagcu

SEQ ID NO: 1395707 - RNA, 19 nt, Artificial Sequence
  Description of Artificial Sequence: Synthetic oligonucleotide
  Antisense strand to SEQ ID NO: 1395706
agcuuucaagcucaacauc

SEQ ID NO: 1395708 - RNA, 19 nt, Artificial Sequence
  Description of Artificial Sequence: Synthetic oligonucleotide
  Sense strand starting at position 2461 of SEQ ID NO: 1243110
gagggacaauauuaaggau

SEQ ID NO: 1395709 - RNA, 19 nt, Artificial Sequence
  Description of Artificial Sequence: Synthetic oligonucleotide
  Antisense strand to SEQ ID NO: 1395708
auccuuaauauugucccuc

SEQ ID NO: 1395710 - RNA, 19 nt, Artificial Sequence
  Description of Artificial Sequence: Synthetic oligonucleotide
  Sense strand starting at position 2470 of SEQ ID NO: 1243110
uauuaaggaugggagauuu

SEQ ID NO: 1395711 - RNA, 19 nt, Artificial Sequence
  Description of Artificial Sequence: Synthetic oligonucleotide
  Antisense strand to SEQ ID NO: 1395710
aaaucucccauccuuaaua

SEQ ID NO: 1395712 - RNA, 19 nt, Artificial Sequence
  Description of Artificial Sequence: Synthetic oligonucleotide
  Sense strand starting at position 2547 of SEQ ID NO: 1243110
gaaugagaaucugcugguu

SEQ ID NO: 1395713 - RNA, 19 nt, Artificial Sequence
  Description of Artificial Sequence: Synthetic oligonucleotide
  Antisense strand to SEQ ID NO: 1395712
aaccagcagauucucauuc

SEQ ID NO: 1395714 - RNA, 19 nt, Artificial Sequence
  Description of Artificial Sequence: Synthetic oligonucleotide
  Sense strand starting at position 2677 of SEQ ID NO: 1243110
gcuggcuuucugcucgaga

SEQ ID NO: 1395715 - RNA, 19 nt, Artificial Sequence
  Description of Artificial Sequence: Synthetic oligonucleotide
  Antisense strand to SEQ ID NO: 1395714
ucucgagcagaaagccagc

SEQ ID NO: 1395716 - RNA, 19 nt, Artificial Sequence
  Description of Artificial Sequence: Synthetic oligonucleotide
  Sense strand starting at position 3341 of SEQ ID NO: 1243110
cccgguuacaagugagaac

SEQ ID NO: 1395717 - RNA, 19 nt, Artificial Sequence
  Description of Artificial Sequence: Synthetic oligonucleotide
  Antisense strand to SEQ ID NO: 1395716
guucucacuuguaaccggg

SEQ ID NO: 1395718 - RNA, 19 nt, Artificial Sequence
  Description of Artificial Sequence: Synthetic oligonucleotide
  Sense strand starting at position 3342 of SEQ ID NO: 1243110
ccgguuacaagugagaaca

SEQ ID NO: 1395719 - RNA, 19 nt, Artificial Sequence
  Description of Artificial Sequence: Synthetic oligonucleotide
  Antisense strand to SEQ ID NO: 1395718
uguucucacuuguaaccgg

SEQ ID NO: 1395720 - RNA, 19 nt, Artificial Sequence
  Description of Artificial Sequence: Synthetic oligonucleotide
  Sense strand starting at position 3358 of SEQ ID NO: 1243110
acacguguuauuuggguuu

SEQ ID NO: 1395721 - RNA, 19 nt, Artificial Sequence
  Description of Artificial Sequence: Synthetic oligonucleotide
  Antisense strand to SEQ ID NO: 1395720
aaacccaaauaacacgugu

SEQ ID NO: 1395722 - RNA, 19 nt, Artificial Sequence
  Description of Artificial Sequence: Synthetic oligonucleotide
  Sense strand starting at position 3599 of SEQ ID NO: 1243110
guagaacgauuauuccuuu

SEQ ID NO: 1395723 - RNA, 19 nt, Artificial Sequence
  Description of Artificial Sequence: Synthetic oligonucleotide
  Antisense strand to SEQ ID NO: 1395722
aaaggaauaaucguucuac

SEQ ID NO: 1395724 - RNA, 19 nt, Artificial Sequence
  Description of Artificial Sequence: Synthetic oligonucleotide
  Sense strand starting at position 3976 of SEQ ID NO: 1243110
ucaggaaucucuguuacca

SEQ ID NO: 1395725 - RNA, 19 nt, Artificial Sequence
  Description of Artificial Sequence: Synthetic oligonucleotide
  Antisense strand to SEQ ID NO: 1395724
ugguaacagagauuccuga

SEQ ID NO: 1395726 - RNA, 19 nt, Artificial Sequence
  Description of Artificial Sequence: Synthetic oligonucleotide
  Sense strand starting at position 36 of SEQ ID NO: 1243111
gagagacuguccuagucca

SEQ ID NO: 1395727 - RNA, 19 nt, Artificial Sequence
  Description of Artificial Sequence: Synthetic oligonucleotide
  Antisense strand to SEQ ID NO: 1395726
uggacuaggacagucucuc

SEQ ID NO: 1395728 - RNA, 19 nt, Artificial Sequence
  Description of Artificial Sequence: Synthetic oligonucleotide
  Sense strand starting at position 50 of SEQ ID NO: 1243111
guccacuuccacgagcaaa

SEQ ID NO: 1395729 - RNA, 19 nt, Artificial Sequence
  Description of Artificial Sequence: Synthetic oligonucleotide
  Antisense strand to SEQ ID NO: 1395728
uuugcucguggaaguggac

SEQ ID NO: 1395730 - RNA, 19 nt, Artificial Sequence
  Description of Artificial Sequence: Synthetic oligonucleotide
  Sense strand starting at position 216 of SEQ ID NO: 1243111
ggcugugauguccacagga

SEQ ID NO: 1395731 - RNA, 19 nt, Artificial Sequence
  Description of Artificial Sequence: Synthetic oligonucleotide
  Antisense strand to SEQ ID NO: 1395730
uccuguggacaucacagcc

SEQ ID NO: 1395732 - RNA, 19 nt, Artificial Sequence
  Description of Artificial Sequence: Synthetic oligonucleotide
  Sense strand starting at position 271 of SEQ ID NO: 1243111
gauguacaguugcaagaga

SEQ ID NO: 1395733 - RNA, 19 nt, Artificial Sequence
  Description of Artificial Sequence: Synthetic oligonucleotide
  Antisense strand to SEQ ID NO: 1395732
ucucuugcaacuguacauc

SEQ ID NO: 1395734 - RNA, 19 nt, Artificial Sequence
  Description of Artificial Sequence: Synthetic oligonucleotide
  Sense strand starting at position 550 of SEQ ID NO: 1243111
uguugugcacuuggagaau

SEQ ID NO: 1395735 - RNA, 19 nt, Artificial Sequence
  Description of Artificial Sequence: Synthetic oligonucleotide
  Antisense strand to SEQ ID NO: 1395734
auucuccaagugcacaaca

SEQ ID NO: 1395736 - RNA, 19 nt, Artificial Sequence
  Description of Artificial Sequence: Synthetic oligonucleotide
  Sense strand starting at position 852 of SEQ ID NO: 1243111
guccaauagucuccuuagu

SEQ ID NO: 1395737 - RNA, 19 nt, Artificial Sequence
  Description of Artificial Sequence: Synthetic oligonucleotide
  Antisense strand to SEQ ID NO: 1395736
acuaaggagacuauuggac

SEQ ID NO: 1395738 - RNA, 19 nt, Artificial Sequence
  Description of Artificial Sequence: Synthetic oligonucleotide
  Sense strand starting at position 854 of SEQ ID NO: 1243111
ccaauagucuccuuaguga

SEQ ID NO: 1395739 - RNA, 19 nt, Artificial Sequence
  Description of Artificial Sequence: Synthetic oligonucleotide
  Antisense strand to SEQ ID NO: 1395738
ucacuaaggagacuauugg

SEQ ID NO: 1395740 - RNA, 19 nt, Artificial Sequence
  Description of Artificial Sequence: Synthetic oligonucleotide
  Sense strand starting at position 865 of SEQ ID NO: 1243111
cuuagugaccuugagccau

SEQ ID NO: 1395741 - RNA, 19 nt, Artificial Sequence
  Description of Artificial Sequence: Synthetic oligonucleotide
  Antisense strand to SEQ ID NO: 1395740
auggcucaaggucacuaag

SEQ ID NO: 1395742 - RNA, 19 nt, Artificial Sequence
  Description of Artificial Sequence: Synthetic oligonucleotide
  Sense strand starting at position 877 of SEQ ID NO: 1243111
gagccauuuccaggccuca

SEQ ID NO: 1395743 - RNA, 19 nt, Artificial Sequence
  Description of Artificial Sequence: Synthetic oligonucleotide
  Antisense strand to SEQ ID NO: 1395742
ugaggccuggaaauggcuc

SEQ ID NO: 1395744 - RNA, 19 nt, Artificial Sequence
  Description of Artificial Sequence: Synthetic oligonucleotide
  Sense strand starting at position 919 of SEQ ID NO: 1243111
gaaugaaugggugguugga

SEQ ID NO: 1395745 - RNA, 19 nt, Artificial Sequence
  Description of Artificial Sequence: Synthetic oligonucleotide
  Antisense strand to SEQ ID NO: 1395744
uccaaccacccauucauuc

SEQ ID NO: 1395746 - RNA, 19 nt, Artificial Sequence
  Description of Artificial Sequence: Synthetic oligonucleotide
  Sense strand starting at position 951 of SEQ ID NO: 1243111
uaagcaauccugggagaca

SEQ ID NO: 1395747 - RNA, 19 nt, Artificial Sequence
  Description of Artificial Sequence: Synthetic oligonucleotide
  Antisense strand to SEQ ID NO: 1395746
ugucucccaggauugcuua

SEQ ID NO: 1395748 - RNA, 19 nt, Artificial Sequence
  Description of Artificial Sequence: Synthetic oligonucleotide
  Sense strand starting at position 952 of SEQ ID NO: 1243111
aagcaauccugggagacaa

SEQ ID NO: 1395749 - RNA, 19 nt, Artificial Sequence
  Description of Artificial Sequence: Synthetic oligonucleotide
  Antisense strand to SEQ ID NO: 1395748
uugucucccaggauugcuu

SEQ ID NO: 1395750 - RNA, 19 nt, Artificial Sequence
  Description of Artificial Sequence: Synthetic oligonucleotide
  Sense strand starting at position 1071 of SEQ ID NO: 1243111
ggugaugaucaaggccuau

SEQ ID NO: 1395751 - RNA, 19 nt, Artificial Sequence
  Description of Artificial Sequence: Synthetic oligonucleotide
  Antisense strand to SEQ ID NO: 1395750
auaggccuugaucaucacc

SEQ ID NO: 1395752 - RNA, 19 nt, Artificial Sequence
  Description of Artificial Sequence: Synthetic oligonucleotide
  Sense strand starting at position 1083 of SEQ ID NO: 1243111
ggccuauccuugggaugca

SEQ ID NO: 1395753 - RNA, 19 nt, Artificial Sequence
  Description of Artificial Sequence: Synthetic oligonucleotide
  Antisense strand to SEQ ID NO: 1395752
ugcaucccaaggauaggcc

SEQ ID NO: 1395754 - RNA, 19 nt, Artificial Sequence
  Description of Artificial Sequence: Synthetic oligonucleotide
  Sense strand starting at position 1225 of SEQ ID NO: 1243111
cgguucuccgcuuuauuau

SEQ ID NO: 1395755 - RNA, 19 nt, Artificial Sequence
  Description of Artificial Sequence: Synthetic oligonucleotide
  Antisense strand to SEQ ID NO: 1395754
auaauaaagcggagaaccg

SEQ ID NO: 1395756 - RNA, 19 nt, Artificial Sequence
  Description of Artificial Sequence: Synthetic oligonucleotide
  Sense strand starting at position 1226 of SEQ ID NO: 1243111
gguucuccgcuuuauuauu

SEQ ID NO: 1395757 - RNA, 19 nt, Artificial Sequence
  Description of Artificial Sequence: Synthetic oligonucleotide
  Antisense strand to SEQ ID NO: 1395756
aauaauaaagcggagaacc

SEQ ID NO: 1395758 - RNA, 19 nt, Artificial Sequence
  Description of Artificial Sequence: Synthetic oligonucleotide
  Sense strand starting at position 1682 of SEQ ID NO: 1243111
uugacuauggccuggaaga

SEQ ID NO: 1395759 - RNA, 19 nt, Artificial Sequence
  Description of Artificial Sequence: Synthetic oligonucleotide
  Antisense strand to SEQ ID NO: 1395758
ucuuccaggccauagucaa

SEQ ID NO: 1395760 - RNA, 19 nt, Artificial Sequence
  Description of Artificial Sequence: Synthetic oligonucleotide
  Sense strand starting at position 2317 of SEQ ID NO: 1243111
cacgauaucuucuggccuu

SEQ ID NO: 1395761 - RNA, 19 nt, Artificial Sequence
  Description of Artificial Sequence: Synthetic oligonucleotide
  Antisense strand to SEQ ID NO: 1395760
aaggccagaagauaucgug

SEQ ID NO: 1395762 - RNA, 19 nt, Artificial Sequence
  Description of Artificial Sequence: Synthetic oligonucleotide
  Sense strand starting at position 2318 of SEQ ID NO: 1243111
acgauaucuucuggccuuu

SEQ ID NO: 1395763 - RNA, 19 nt, Artificial Sequence
  Description of Artificial Sequence: Synthetic oligonucleotide
  Antisense strand to SEQ ID NO: 1395762
aaaggccagaagauaucgu

SEQ ID NO: 1395764 - RNA, 19 nt, Artificial Sequence
  Description of Artificial Sequence: Synthetic oligonucleotide
  Sense strand starting at position 2350 of SEQ ID NO: 1243111
gggcuucucgcgcuucuaa

SEQ ID NO: 1395765 - RNA, 19 nt, Artificial Sequence
  Description of Artificial Sequence: Synthetic oligonucleotide
  Antisense strand to SEQ ID NO: 1395764
uuagaagcgcgagaagccc

SEQ ID NO: 1395766 - RNA, 19 nt, Artificial Sequence
  Description of Artificial Sequence: Synthetic oligonucleotide
  Sense strand starting at position 2351 of SEQ ID NO: 1243111
ggcuucucgcgcuucuaaa

SEQ ID NO: 1395767 - RNA, 19 nt, Artificial Sequence
  Description of Artificial Sequence: Synthetic oligonucleotide
  Antisense strand to SEQ ID NO: 1395766
uuuagaagcgcgagaagcc

SEQ ID NO: 1395768 - RNA, 19 nt, Artificial Sequence
  Description of Artificial Sequence: Synthetic oligonucleotide
  Sense strand starting at position 2670 of SEQ ID NO: 1243111
gcuggaguguccuuggucu

SEQ ID NO: 1395769 - RNA, 19 nt, Artificial Sequence
  Description of Artificial Sequence: Synthetic oligonucleotide
  Antisense strand to SEQ ID NO: 1395768
agaccaaggacacuccagc

SEQ ID NO: 1395770 - RNA, 19 nt, Artificial Sequence
  Description of Artificial Sequence: Synthetic oligonucleotide
  Sense strand starting at position 3030 of SEQ ID NO: 1243111
cugcaaaguguucugcagu

SEQ ID NO: 1395771 - RNA, 19 nt, Artificial Sequence
  Description of Artificial Sequence: Synthetic oligonucleotide
  Antisense strand to SEQ ID NO: 1395770
acugcagaacacuuugcag

SEQ ID NO: 1395772 - RNA, 19 nt, Artificial Sequence
  Description of Artificial Sequence: Synthetic oligonucleotide
  Sense strand starting at position 3035 of SEQ ID NO: 1243111
aaguguucugcagugugca

SEQ ID NO: 1395773 - RNA, 19 nt, Artificial Sequence
  Description of Artificial Sequence: Synthetic oligonucleotide
  Antisense strand to SEQ ID NO: 1395772
ugcacacugcagaacacuu

SEQ ID NO: 1395774 - RNA, 19 nt, Artificial Sequence
  Description of Artificial Sequence: Synthetic oligonucleotide
  Sense strand starting at position 3036 of SEQ ID NO: 1243111
aguguucugcagugugcau

SEQ ID NO: 1395775 - RNA, 19 nt, Artificial Sequence
  Description of Artificial Sequence: Synthetic oligonucleotide
  Antisense strand to SEQ ID NO: 1395774
augcacacugcagaacacu

SEQ ID NO: 1395776 - RNA, 19 nt, Artificial Sequence
  Description of Artificial Sequence: Synthetic oligonucleotide
  Sense strand starting at position 3312 of SEQ ID NO: 1243111
acccgaucuccaggacaga

SEQ ID NO: 1395777 - RNA, 19 nt, Artificial Sequence
  Description of Artificial Sequence: Synthetic oligonucleotide
  Antisense strand to SEQ ID NO: 1395776
ucuguccuggagaucgggu

SEQ ID NO: 1395778 - RNA, 19 nt, Artificial Sequence
  Description of Artificial Sequence: Synthetic oligonucleotide
  Sense strand starting at position 3494 of SEQ ID NO: 1243111
acaggcauguguucacgua

SEQ ID NO: 1395779 - RNA, 19 nt, Artificial Sequence
  Description of Artificial Sequence: Synthetic oligonucleotide
  Antisense strand to SEQ ID NO: 1395778
uacgugaacacaugccugu

SEQ ID NO: 1395780 - RNA, 19 nt, Artificial Sequence
  Description of Artificial Sequence: Synthetic oligonucleotide
  Sense strand starting at position 3498 of SEQ ID NO: 1243111
gcauguguucacguaugua

SEQ ID NO: 1395781 - RNA, 19 nt, Artificial Sequence
  Description of Artificial Sequence: Synthetic oligonucleotide
  Antisense strand to SEQ ID NO: 1395780
uacauacgugaacacaugc

SEQ ID NO: 1395782 - RNA, 19 nt, Artificial Sequence
  Description of Artificial Sequence: Synthetic oligonucleotide
  Sense strand starting at position 3501 of SEQ ID NO: 1243111
uguguucacguauguauac

SEQ ID NO: 1395783 - RNA, 19 nt, Artificial Sequence
  Description of Artificial Sequence: Synthetic oligonucleotide
  Antisense strand to SEQ ID NO: 1395782
guauacauacgugaacaca

SEQ ID NO: 1395784 - RNA, 19 nt, Artificial Sequence
  Description of Artificial Sequence: Synthetic oligonucleotide
  Sense strand starting at position 3502 of SEQ ID NO: 1243111
guguucacguauguauaca

SEQ ID NO: 1395785 - RNA, 19 nt, Artificial Sequence
  Description of Artificial Sequence: Synthetic oligonucleotide
  Antisense strand to SEQ ID NO: 1395784
uguauacauacgugaacac

SEQ ID NO: 1395786 - RNA, 19 nt, Artificial Sequence
  Description of Artificial Sequence: Synthetic oligonucleotide
  Sense strand starting at position 3574 of SEQ ID NO: 1243111
ccaagaggguauuagaaag

SEQ ID NO: 1395787 - RNA, 19 nt, Artificial Sequence
  Description of Artificial Sequence: Synthetic oligonucleotide
  Antisense strand to SEQ ID NO: 1395786
cuuucuaauacccucuugg

SEQ ID NO: 1395788 - RNA, 19 nt, Artificial Sequence
  Description of Artificial Sequence: Synthetic oligonucleotide
  Sense strand starting at position 3582 of SEQ ID NO: 1243111
guauuagaaagagguugau

SEQ ID NO: 1395789 - RNA, 19 nt, Artificial Sequence
  Description of Artificial Sequence: Synthetic oligonucleotide
  Antisense strand to SEQ ID NO: 1395788
aucaaccucuuucuaauac

SEQ ID NO: 1395790 - RNA, 19 nt, Artificial Sequence
  Description of Artificial Sequence: Synthetic oligonucleotide
  Sense strand starting at position 3591 of SEQ ID NO: 1243111
agagguugauuccagagga

SEQ ID NO: 1395791 - RNA, 19 nt, Artificial Sequence
  Description of Artificial Sequence: Synthetic oligonucleotide
  Antisense strand to SEQ ID NO: 1395790
uccucuggaaucaaccucu

SEQ ID NO: 1395792 - RNA, 19 nt, Artificial Sequence
  Description of Artificial Sequence: Synthetic oligonucleotide
  Sense strand starting at position 3595 of SEQ ID NO: 1243111
guugauuccagaggaugag

SEQ ID NO: 1395793 - RNA, 19 nt, Artificial Sequence
  Description of Artificial Sequence: Synthetic oligonucleotide
  Antisense strand to SEQ ID NO: 1395792
cucauccucuggaaucaac

SEQ ID NO: 1395794 - RNA, 19 nt, Artificial Sequence
  Description of Artificial Sequence: Synthetic oligonucleotide
  Sense strand starting at position 3605 of SEQ ID NO: 1243111
gaggaugaguggucucuga

SEQ ID NO: 1395795 - RNA, 19 nt, Artificial Sequence
  Description of Artificial Sequence: Synthetic oligonucleotide
  Antisense strand to SEQ ID NO: 1395794
ucagagaccacucauccuc

SEQ ID NO: 1395796 - RNA, 19 nt, Artificial Sequence
  Description of Artificial Sequence: Synthetic oligonucleotide
  Sense strand starting at position 3609 of SEQ ID NO: 1243111
augaguggucucugaggcu

SEQ ID NO: 1395797 - RNA, 19 nt, Artificial Sequence
  Description of Artificial Sequence: Synthetic oligonucleotide
  Antisense strand to SEQ ID NO: 1395796
agccucagagaccacucau

SEQ ID NO: 1395798 - RNA, 19 nt, Artificial Sequence
  Description of Artificial Sequence: Synthetic oligonucleotide
  Sense strand starting at position 3612 of SEQ ID NO: 1243111
aguggucucugaggcuaua

SEQ ID NO: 1395799 - RNA, 19 nt, Artificial Sequence
  Description of Artificial Sequence: Synthetic oligonucleotide
  Antisense strand to SEQ ID NO: 1395798
uauagccucagagaccacu

SEQ ID NO: 1395800 - RNA, 19 nt, Artificial Sequence
  Description of Artificial Sequence: Synthetic oligonucleotide
  Sense strand starting at position 3647 of SEQ ID NO: 1243111
gcagccagcucugugagaa

SEQ ID NO: 1395801 - RNA, 19 nt, Artificial Sequence
  Description of Artificial Sequence: Synthetic oligonucleotide
  Antisense strand to SEQ ID NO: 1395800
uucucacagagcuggcugc

SEQ ID NO: 1395802 - RNA, 19 nt, Artificial Sequence
  Description of Artificial Sequence: Synthetic oligonucleotide
  Sense strand starting at position 3816 of SEQ ID NO: 1243111
gcgugacgacccuuagugu

SEQ ID NO: 1395803 - RNA, 19 nt, Artificial Sequence
  Description of Artificial Sequence: Synthetic oligonucleotide
  Antisense strand to SEQ ID NO: 1395802
acacuaagggucgucacgc

SEQ ID NO: 1395804 - RNA, 19 nt, Artificial Sequence
  Description of Artificial Sequence: Synthetic oligonucleotide
  Sense strand starting at position 3972 of SEQ ID NO: 1243111
gcagcucugcguagucgau

SEQ ID NO: 1395805 - RNA, 19 nt, Artificial Sequence
  Description of Artificial Sequence: Synthetic oligonucleotide
  Antisense strand to SEQ ID NO: 1395804
aucgacuacgcagagcugc

SEQ ID NO: 1395806 - RNA, 19 nt, Artificial Sequence
  Description of Artificial Sequence: Synthetic oligonucleotide
  Sense strand starting at position 209 of SEQ ID NO: 1243112
gcucuuuguuaagaggaca

SEQ ID NO: 1395807 - RNA, 19 nt, Artificial Sequence
  Description of Artificial Sequence: Synthetic oligonucleotide
  Antisense strand to SEQ ID NO: 1395806
uguccucuuaacaaagagc

SEQ ID NO: 1395808 - RNA, 19 nt, Artificial Sequence
  Description of Artificial Sequence: Synthetic oligonucleotide
  Sense strand starting at position 230 of SEQ ID NO: 1243112
aagauuagcuaguuuggga

SEQ ID NO: 1395809 - RNA, 19 nt, Artificial Sequence
  Description of Artificial Sequence: Synthetic oligonucleotide
  Antisense strand to SEQ ID NO: 1395808
ucccaaacuagcuaaucuu

SEQ ID NO: 1395810 - RNA, 19 nt, Artificial Sequence
  Description of Artificial Sequence: Synthetic oligonucleotide
  Sense strand starting at position 234 of SEQ ID NO: 1243112
uuagcuaguuugggagaca

SEQ ID NO: 1395811 - RNA, 19 nt, Artificial Sequence
  Description of Artificial Sequence: Synthetic oligonucleotide
  Antisense strand to SEQ ID NO: 1395810
ugucucccaaacuagcuaa

SEQ ID NO: 1395812 - RNA, 19 nt, Artificial Sequence
  Description of Artificial Sequence: Synthetic oligonucleotide
  Sense strand starting at position 235 of SEQ ID NO: 1243112
uagcuaguuugggagacaa

SEQ ID NO: 1395813 - RNA, 19 nt, Artificial Sequence
  Description of Artificial Sequence: Synthetic oligonucleotide
  Antisense strand to SEQ ID NO: 1395812
uugucucccaaacuagcua

SEQ ID NO: 1395814 - RNA, 19 nt, Artificial Sequence
  Description of Artificial Sequence: Synthetic oligonucleotide
  Sense strand starting at position 437 of SEQ ID NO: 1243112
uagaauguguaaugaacuc

SEQ ID NO: 1395815 - RNA, 19 nt, Artificial Sequence
  Description of Artificial Sequence: Synthetic oligonucleotide
  Antisense strand to SEQ ID NO: 1395814
gaguucauuacacauucua

SEQ ID NO: 1395816 - RNA, 19 nt, Artificial Sequence
  Description of Artificial Sequence: Synthetic oligonucleotide
  Sense strand starting at position 693 of SEQ ID NO: 1243112
ucugcaucaccguagggau

SEQ ID NO: 1395817 - RNA, 19 nt, Artificial Sequence
  Description of Artificial Sequence: Synthetic oligonucleotide
  Antisense strand to SEQ ID NO: 1395816
aucccuacggugaugcaga

SEQ ID NO: 1395818 - RNA, 19 nt, Artificial Sequence
  Description of Artificial Sequence: Synthetic oligonucleotide
  Sense strand starting at position 807 of SEQ ID NO: 1243112
acaucuauauagguguaua

SEQ ID NO: 1395819 - RNA, 19 nt, Artificial Sequence
  Description of Artificial Sequence: Synthetic oligonucleotide
  Antisense strand to SEQ ID NO: 1395818
uauacaccuauauagaugu

SEQ ID NO: 1395820 - RNA, 19 nt, Artificial Sequence
  Description of Artificial Sequence: Synthetic oligonucleotide
  Sense strand starting at position 810 of SEQ ID NO: 1243112
ucuauauagguguauacau

SEQ ID NO: 1395821 - RNA, 19 nt, Artificial Sequence
  Description of Artificial Sequence: Synthetic oligonucleotide
  Antisense strand to SEQ ID NO: 1395820
auguauacaccuauauaga

SEQ ID NO: 1395822 - RNA, 19 nt, Artificial Sequence
  Description of Artificial Sequence: Synthetic oligonucleotide
  Sense strand starting at position 844 of SEQ ID NO: 1243112
ucuauacagguguauauau

SEQ ID NO: 1395823 - RNA, 19 nt, Artificial Sequence
  Description of Artificial Sequence: Synthetic oligonucleotide
  Antisense strand to SEQ ID NO: 1395822
auauauacaccuguauaga

SEQ ID NO: 1395824 - RNA, 19 nt, Artificial Sequence
  Description of Artificial Sequence: Synthetic oligonucleotide
  Sense strand starting at position 1023 of SEQ ID NO: 1243112
auggcagcuuuauugguaa

SEQ ID NO: 1395825 - RNA, 19 nt, Artificial Sequence
  Description of Artificial Sequence: Synthetic oligonucleotide
  Antisense strand to SEQ ID NO: 1395824
uuaccaauaaagcugccau

SEQ ID NO: 1395826 - RNA, 19 nt, Artificial Sequence
  Description of Artificial Sequence: Synthetic oligonucleotide
  Sense strand starting at position 1027 of SEQ ID NO: 1243112
cagcuuuauugguaaggga

SEQ ID NO: 1395827 - RNA, 19 nt, Artificial Sequence
  Description of Artificial Sequence: Synthetic oligonucleotide
  Antisense strand to SEQ ID NO: 1395826
ucccuuaccaauaaagcug

SEQ ID NO: 1395828 - RNA, 19 nt, Artificial Sequence
  Description of Artificial Sequence: Synthetic oligonucleotide
  Sense strand starting at position 1128 of SEQ ID NO: 1243112
gggugaggccuuggcuaga

SEQ ID NO: 1395829 - RNA, 19 nt, Artificial Sequence
  Description of Artificial Sequence: Synthetic oligonucleotide
  Antisense strand to SEQ ID NO: 1395828
ucuagccaaggccucaccc

SEQ ID NO: 1395830 - RNA, 19 nt, Artificial Sequence
  Description of Artificial Sequence: Synthetic oligonucleotide
  Sense strand starting at position 1149 of SEQ ID NO: 1243112
gagggugguccauggauuc

SEQ ID NO: 1395831 - RNA, 19 nt, Artificial Sequence
  Description of Artificial Sequence: Synthetic oligonucleotide
  Antisense strand to SEQ ID NO: 1395830
gaauccauggaccacccuc

SEQ ID NO: 1395832 - RNA, 19 nt, Artificial Sequence
  Description of Artificial Sequence: Synthetic oligonucleotide
  Sense strand starting at position 1221 of SEQ ID NO: 1243112
guccacauucuaugcugaa

SEQ ID NO: 1395833 - RNA, 19 nt, Artificial Sequence
  Description of Artificial Sequence: Synthetic oligonucleotide
  Antisense strand to SEQ ID NO: 1395832
uucagcauagaauguggac

SEQ ID NO: 1395834 - RNA, 19 nt, Artificial Sequence
  Description of Artificial Sequence: Synthetic oligonucleotide
  Sense strand starting at position 1228 of SEQ ID NO: 1243112
uucuaugcugaaugaaaua

SEQ ID NO: 1395835 - RNA, 19 nt, Artificial Sequence
  Description of Artificial Sequence: Synthetic oligonucleotide
  Antisense strand to SEQ ID NO: 1395834
uauuucauucagcauagaa

SEQ ID NO: 1395836 - RNA, 19 nt, Artificial Sequence
  Description of Artificial Sequence: Synthetic oligonucleotide
  Sense strand starting at position 1271 of SEQ ID NO: 1243112
gggccacauaacugcgauu

SEQ ID NO: 1395837 - RNA, 19 nt, Artificial Sequence
  Description of Artificial Sequence: Synthetic oligonucleotide
  Antisense strand to SEQ ID NO: 1395836
aaucgcaguuauguggccc

SEQ ID NO: 1395838 - RNA, 19 nt, Artificial Sequence
  Description of Artificial Sequence: Synthetic oligonucleotide
  Sense strand starting at position 1274 of SEQ ID NO: 1243112
ccacauaacugcgauucca

SEQ ID NO: 1395839 - RNA, 19 nt, Artificial Sequence
  Description of Artificial Sequence: Synthetic oligonucleotide
  Antisense strand to SEQ ID NO: 1395838
uggaaucgcaguuaugugg

SEQ ID NO: 1395840 - RNA, 19 nt, Artificial Sequence
  Description of Artificial Sequence: Synthetic oligonucleotide
  Sense strand starting at position 1319 of SEQ ID NO: 1243112
acagaaaugaguggucagu

SEQ ID NO: 1395841 - RNA, 19 nt, Artificial Sequence
  Description of Artificial Sequence: Synthetic oligonucleotide
  Antisense strand to SEQ ID NO: 1395840
acugaccacucauuucugu

SEQ ID NO: 1395842 - RNA, 19 nt, Artificial Sequence
  Description of Artificial Sequence: Synthetic oligonucleotide
  Sense strand starting at position 1449 of SEQ ID NO: 1243112
ggagguuaccgcugggaga

SEQ ID NO: 1395843 - RNA, 19 nt, Artificial Sequence
  Description of Artificial Sequence: Synthetic oligonucleotide
  Antisense strand to SEQ ID NO: 1395842
ucucccagcgguaaccucc

SEQ ID NO: 1395844 - RNA, 19 nt, Artificial Sequence
  Description of Artificial Sequence: Synthetic oligonucleotide
  Sense strand starting at position 1450 of SEQ ID NO: 1243112
gagguuaccgcugggagaa

SEQ ID NO: 1395845 - RNA, 19 nt, Artificial Sequence
  Description of Artificial Sequence: Synthetic oligonucleotide
  Antisense strand to SEQ ID NO: 1395844
uucucccagcgguaaccuc

SEQ ID NO: 1395846 - RNA, 19 nt, Artificial Sequence
  Description of Artificial Sequence: Synthetic oligonucleotide
  Sense strand starting at position 1451 of SEQ ID NO: 1243112
agguuaccgcugggagaaa

SEQ ID NO: 1395847 - RNA, 19 nt, Artificial Sequence
  Description of Artificial Sequence: Synthetic oligonucleotide
  Antisense strand to SEQ ID NO: 1395846
uuucucccagcgguaaccu

SEQ ID NO: 1395848 - RNA, 19 nt, Artificial Sequence
  Description of Artificial Sequence: Synthetic oligonucleotide
  Sense strand starting at position 1613 of SEQ ID NO: 1243112
gcggauucuuacgauucau

SEQ ID NO: 1395849 - RNA, 19 nt, Artificial Sequence
  Description of Artificial Sequence: Synthetic oligonucleotide
  Antisense strand to SEQ ID NO: 1395848
augaaucguaagaauccgc

SEQ ID NO: 1395850 - RNA, 19 nt, Artificial Sequence
  Description of Artificial Sequence: Synthetic oligonucleotide
  Sense strand starting at position 1642 of SEQ ID NO: 1243112
gauugaugauuucgauagu

SEQ ID NO: 1395851 - RNA, 19 nt, Artificial Sequence
  Description of Artificial Sequence: Synthetic oligonucleotide
  Antisense strand to SEQ ID NO: 1395850
acuaucgaaaucaucaauc

SEQ ID NO: 1395852 - RNA, 19 nt, Artificial Sequence
  Description of Artificial Sequence: Synthetic oligonucleotide
  Sense strand starting at position 1643 of SEQ ID NO: 1243112
auugaugauuucgauaguu

SEQ ID NO: 1395853 - RNA, 19 nt, Artificial Sequence
  Description of Artificial Sequence: Synthetic oligonucleotide
  Antisense strand to SEQ ID NO: 1395852
aacuaucgaaaucaucaau

SEQ ID NO: 1395854 - RNA, 19 nt, Artificial Sequence
  Description of Artificial Sequence: Synthetic oligonucleotide
  Sense strand starting at position 1648 of SEQ ID NO: 1243112
ugauuucgauaguucggua

SEQ ID NO: 1395855 - RNA, 19 nt, Artificial Sequence
  Description of Artificial Sequence: Synthetic oligonucleotide
  Antisense strand to SEQ ID NO: 1395854
uaccgaacuaucgaaauca

SEQ ID NO: 1395856 - RNA, 19 nt, Artificial Sequence
  Description of Artificial Sequence: Synthetic oligonucleotide
  Sense strand starting at position 1656 of SEQ ID NO: 1243112
auaguucgguaaucgcuaa

SEQ ID NO: 1395857 - RNA, 19 nt, Artificial Sequence
  Description of Artificial Sequence: Synthetic oligonucleotide
  Antisense strand to SEQ ID NO: 1395856
uuagcgauuaccgaacuau

SEQ ID NO: 1395858 - RNA, 19 nt, Artificial Sequence
  Description of Artificial Sequence: Synthetic oligonucleotide
  Sense strand starting at position 1735 of SEQ ID NO: 1243112
gagcuugucacgcgaagga

SEQ ID NO: 1395859 - RNA, 19 nt, Artificial Sequence
  Description of Artificial Sequence: Synthetic oligonucleotide
  Antisense strand to SEQ ID NO: 1395858
uccuucgcgugacaagcuc

SEQ ID NO: 1395860 - RNA, 19 nt, Artificial Sequence
  Description of Artificial Sequence: Synthetic oligonucleotide
  Sense strand starting at position 1927 of SEQ ID NO: 1243112
acuugaugaccgcgauguu

SEQ ID NO: 1395861 - RNA, 19 nt, Artificial Sequence
  Description of Artificial Sequence: Synthetic oligonucleotide
  Antisense strand to SEQ ID NO: 1395860
aacaucgcggucaucaagu

SEQ ID NO: 1395862 - RNA, 19 nt, Artificial Sequence
  Description of Artificial Sequence: Synthetic oligonucleotide
  Sense strand starting at position 2766 of SEQ ID NO: 1243112
gaggauguaucccgggauc

SEQ ID NO: 1395863 - RNA, 19 nt, Artificial Sequence
  Description of Artificial Sequence: Synthetic oligonucleotide
  Antisense strand to SEQ ID NO: 1395862
gaucccgggauacauccuc

SEQ ID NO: 1395864 - RNA, 19 nt, Artificial Sequence
  Description of Artificial Sequence: Synthetic oligonucleotide
  Sense strand starting at position 2768 of SEQ ID NO: 1243112
ggauguaucccgggaucca

SEQ ID NO: 1395865 - RNA, 19 nt, Artificial Sequence
  Description of Artificial Sequence: Synthetic oligonucleotide
  Antisense strand to SEQ ID NO: 1395864
uggaucccgggauacaucc

SEQ ID NO: 1395866 - RNA, 19 nt, Artificial Sequence
  Description of Artificial Sequence: Synthetic oligonucleotide
  Sense strand starting at position 2769 of SEQ ID NO: 1243112
gauguaucccgggauccac

SEQ ID NO: 1395867 - RNA, 19 nt, Artificial Sequence
  Description of Artificial Sequence: Synthetic oligonucleotide
  Antisense strand to SEQ ID NO: 1395866
guggaucccgggauacauc

SEQ ID NO: 1395868 - RNA, 19 nt, Artificial Sequence
  Description of Artificial Sequence: Synthetic oligonucleotide
  Sense strand starting at position 3015 of SEQ ID NO: 1243112
auugacuucuccugugaaa

SEQ ID NO: 1395869 - RNA, 19 nt, Artificial Sequence
  Description of Artificial Sequence: Synthetic oligonucleotide
  Antisense strand to SEQ ID NO: 1395868
uuucacaggagaagucaau

SEQ ID NO: 1395870 - RNA, 19 nt, Artificial Sequence
  Description of Artificial Sequence: Synthetic oligonucleotide
  Sense strand starting at position 3017 of SEQ ID NO: 1243112
ugacuucuccugugaaacg

SEQ ID NO: 1395871 - RNA, 19 nt, Artificial Sequence
  Description of Artificial Sequence: Synthetic oligonucleotide
  Antisense strand to SEQ ID NO: 1395870
cguuucacaggagaaguca

SEQ ID NO: 1395872 - RNA, 19 nt, Artificial Sequence
  Description of Artificial Sequence: Synthetic oligonucleotide
  Sense strand starting at position 3018 of SEQ ID NO: 1243112
gacuucuccugugaaacgu

SEQ ID NO: 1395873 - RNA, 19 nt, Artificial Sequence
  Description of Artificial Sequence: Synthetic oligonucleotide
  Antisense strand to SEQ ID NO: 1395872
acguuucacaggagaaguc

SEQ ID NO: 1395874 - RNA, 19 nt, Artificial Sequence
  Description of Artificial Sequence: Synthetic oligonucleotide
  Sense strand starting at position 3536 of SEQ ID NO: 1243112
gggaguaugcagugugaag

SEQ ID NO: 1395875 - RNA, 19 nt, Artificial Sequence
  Description of Artificial Sequence: Synthetic oligonucleotide
  Antisense strand to SEQ ID NO: 1395874
cuucacacugcauacuccc

SEQ ID NO: 1395876 - RNA, 19 nt, Artificial Sequence
  Description of Artificial Sequence: Synthetic oligonucleotide
  Sense strand starting at position 3739 of SEQ ID NO: 1243112
ucaguuuccucaguaguug

SEQ ID NO: 1395877 - RNA, 19 nt, Artificial Sequence
  Description of Artificial Sequence: Synthetic oligonucleotide
  Antisense strand to SEQ ID NO: 1395876
caacuacugaggaaacuga

SEQ ID NO: 1395878 - RNA, 19 nt, Artificial Sequence
  Description of Artificial Sequence: Synthetic oligonucleotide
  Sense strand starting at position 3929 of SEQ ID NO: 1243112
ccugucaauucuuugugua

SEQ ID NO: 1395879 - RNA, 19 nt, Artificial Sequence
  Description of Artificial Sequence: Synthetic oligonucleotide
  Antisense strand to SEQ ID NO: 1395878
uacacaaagaauugacagg

SEQ ID NO: 1395880 - RNA, 19 nt, Artificial Sequence
  Description of Artificial Sequence: Synthetic oligonucleotide
  Sense strand starting at position 3930 of SEQ ID NO: 1243112
cugucaauucuuuguguau

SEQ ID NO: 1395881 - RNA, 19 nt, Artificial Sequence
  Description of Artificial Sequence: Synthetic oligonucleotide
  Antisense strand to SEQ ID NO: 1395880
auacacaaagaauugacag

SEQ ID NO: 1395882 - RNA, 19 nt, Artificial Sequence
  Description of Artificial Sequence: Synthetic oligonucleotide
  Sense strand starting at position 3931 of SEQ ID NO: 1243112
ugucaauucuuuguguauu

SEQ ID NO: 1395883 - RNA, 19 nt, Artificial Sequence
  Description of Artificial Sequence: Synthetic oligonucleotide
  Antisense strand to SEQ ID NO: 1395882
aauacacaaagaauugaca

SEQ ID NO: 1395884 - RNA, 19 nt, Artificial Sequence
  Description of Artificial Sequence: Synthetic oligonucleotide
  Sense strand starting at position 3932 of SEQ ID NO: 1243112
gucaauucuuuguguauuu

SEQ ID NO: 1395885 - RNA, 19 nt, Artificial Sequence
  Description of Artificial Sequence: Synthetic oligonucleotide
  Antisense strand to SEQ ID NO: 1395884
aaauacacaaagaauugac

SEQ ID NO: 1395886 - RNA, 19 nt, Artificial Sequence
  Description of Artificial Sequence: Synthetic oligonucleotide
  Sense strand starting at position 137 of SEQ ID NO: 1243113
cuuccaguuagccgagauu

SEQ ID NO: 1395887 - RNA, 19 nt, Artificial Sequence
  Description of Artificial Sequence: Synthetic oligonucleotide
  Antisense strand to SEQ ID NO: 1395886
aaucucggcuaacuggaag

SEQ ID NO: 1395888 - RNA, 19 nt, Artificial Sequence
  Description of Artificial Sequence: Synthetic oligonucleotide
  Sense strand starting at position 140 of SEQ ID NO: 1243113
ccaguuagccgagauuaug

SEQ ID NO: 1395889 - RNA, 19 nt, Artificial Sequence
  Description of Artificial Sequence: Synthetic oligonucleotide
  Antisense strand to SEQ ID NO: 1395888
cauaaucucggcuaacugg

SEQ ID NO: 1395890 - RNA, 19 nt, Artificial Sequence
  Description of Artificial Sequence: Synthetic oligonucleotide
  Sense strand starting at position 253 of SEQ ID NO: 1243113
uggauuccuuaaggguuau

SEQ ID NO: 1395891 - RNA, 19 nt, Artificial Sequence
  Description of Artificial Sequence: Synthetic oligonucleotide
  Antisense strand to SEQ ID NO: 1395890
auaacccuuaaggaaucca

SEQ ID NO: 1395892 - RNA, 19 nt, Artificial Sequence
  Description of Artificial Sequence: Synthetic oligonucleotide
  Sense strand starting at position 254 of SEQ ID NO: 1243113
ggauuccuuaaggguuauu

SEQ ID NO: 1395893 - RNA, 19 nt, Artificial Sequence
  Description of Artificial Sequence: Synthetic oligonucleotide
  Antisense strand to SEQ ID NO: 1395892
aauaacccuuaaggaaucc

SEQ ID NO: 1395894 - RNA, 19 nt, Artificial Sequence
  Description of Artificial Sequence: Synthetic oligonucleotide
  Sense strand starting at position 263 of SEQ ID NO: 1243113
aaggguuauugucuuaauc

SEQ ID NO: 1395895 - RNA, 19 nt, Artificial Sequence
  Description of Artificial Sequence: Synthetic oligonucleotide
  Antisense strand to SEQ ID NO: 1395894
gauuaagacaauaacccuu

SEQ ID NO: 1395896 - RNA, 19 nt, Artificial Sequence
  Description of Artificial Sequence: Synthetic oligonucleotide
  Sense strand starting at position 265 of SEQ ID NO: 1243113
ggguuauugucuuaaucau

SEQ ID NO: 1395897 - RNA, 19 nt, Artificial Sequence
  Description of Artificial Sequence: Synthetic oligonucleotide
  Antisense strand to SEQ ID NO: 1395896
augauuaagacaauaaccc

SEQ ID NO: 1395898 - RNA, 19 nt, Artificial Sequence
  Description of Artificial Sequence: Synthetic oligonucleotide
  Sense strand starting at position 339 of SEQ ID NO: 1243113
ggacaugaaugucucuaaa

SEQ ID NO: 1395899 - RNA, 19 nt, Artificial Sequence
  Description of Artificial Sequence: Synthetic oligonucleotide
  Antisense strand to SEQ ID NO: 1395898
uuuagagacauucaugucc

SEQ ID NO: 1395900 - RNA, 19 nt, Artificial Sequence
  Description of Artificial Sequence: Synthetic oligonucleotide
  Sense strand starting at position 394 of SEQ ID NO: 1243113
agcagcacugguuaguaaa

SEQ ID NO: 1395901 - RNA, 19 nt, Artificial Sequence
  Description of Artificial Sequence: Synthetic oligonucleotide
  Antisense strand to SEQ ID NO: 1395900
uuuacuaaccagugcugcu

SEQ ID NO: 1395902 - RNA, 19 nt, Artificial Sequence
  Description of Artificial Sequence: Synthetic oligonucleotide
  Sense strand starting at position 405 of SEQ ID NO: 1243113
uuaguaaagucaguaagaa

SEQ ID NO: 1395903 - RNA, 19 nt, Artificial Sequence
  Description of Artificial Sequence: Synthetic oligonucleotide
  Antisense strand to SEQ ID NO: 1395902
uucuuacugacuuuacuaa

SEQ ID NO: 1395904 - RNA, 19 nt, Artificial Sequence
  Description of Artificial Sequence: Synthetic oligonucleotide
  Sense strand starting at position 711 of SEQ ID NO: 1243113
ugugauggcuucuccuaga

SEQ ID NO: 1395905 - RNA, 19 nt, Artificial Sequence
  Description of Artificial Sequence: Synthetic oligonucleotide
  Antisense strand to SEQ ID NO: 1395904
ucuaggagaagccaucaca

SEQ ID NO: 1395906 - RNA, 19 nt, Artificial Sequence
  Description of Artificial Sequence: Synthetic oligonucleotide
  Sense strand starting at position 796 of SEQ ID NO: 1243113
gggugaaugaacugcuuaa

SEQ ID NO: 1395907 - RNA, 19 nt, Artificial Sequence
  Description of Artificial Sequence: Synthetic oligonucleotide
  Antisense strand to SEQ ID NO: 1395906
uuaagcaguucauucaccc

SEQ ID NO: 1395908 - RNA, 19 nt, Artificial Sequence
  Description of Artificial Sequence: Synthetic oligonucleotide
  Sense strand starting at position 807 of SEQ ID NO: 1243113
cugcuuaaccuuggcacau

SEQ ID NO: 1395909 - RNA, 19 nt, Artificial Sequence
  Description of Artificial Sequence: Synthetic oligonucleotide
  Antisense strand to SEQ ID NO: 1395908
augugccaagguuaagcag

SEQ ID NO: 1395910 - RNA, 19 nt, Artificial Sequence
  Description of Artificial Sequence: Synthetic oligonucleotide
  Sense strand starting at position 816 of SEQ ID NO: 1243113
cuuggcacaugucauuuaa

SEQ ID NO: 1395911 - RNA, 19 nt, Artificial Sequence
  Description of Artificial Sequence: Synthetic oligonucleotide
  Antisense strand to SEQ ID NO: 1395910
uuaaaugacaugugccaag

SEQ ID NO: 1395912 - RNA, 19 nt, Artificial Sequence
  Description of Artificial Sequence: Synthetic oligonucleotide
  Sense strand starting at position 889 of SEQ ID NO: 1243113
ggccaacaguucucagaaa

SEQ ID NO: 1395913 - RNA, 19 nt, Artificial Sequence
  Description of Artificial Sequence: Synthetic oligonucleotide
  Antisense strand to SEQ ID NO: 1395912
uuucugagaacuguuggcc

SEQ ID NO: 1395914 - RNA, 19 nt, Artificial Sequence
  Description of Artificial Sequence: Synthetic oligonucleotide
  Sense strand starting at position 963 of SEQ ID NO: 1243113
gagguacagugagucaauu

SEQ ID NO: 1395915 - RNA, 19 nt, Artificial Sequence
  Description of Artificial Sequence: Synthetic oligonucleotide
  Antisense strand to SEQ ID NO: 1395914
aauugacucacuguaccuc

SEQ ID NO: 1395916 - RNA, 19 nt, Artificial Sequence
  Description of Artificial Sequence: Synthetic oligonucleotide
  Sense strand starting at position 2057 of SEQ ID NO: 1243113
gcaugaaucuggugacaga

SEQ ID NO: 1395917 - RNA, 19 nt, Artificial Sequence
  Description of Artificial Sequence: Synthetic oligonucleotide
  Antisense strand to SEQ ID NO: 1395916
ucugucaccagauucaugc

SEQ ID NO: 1395918 - RNA, 19 nt, Artificial Sequence
  Description of Artificial Sequence: Synthetic oligonucleotide
  Sense strand starting at position 2071 of SEQ ID NO: 1243113
acagacucugggugggaua

SEQ ID NO: 1395919 - RNA, 19 nt, Artificial Sequence
  Description of Artificial Sequence: Synthetic oligonucleotide
  Antisense strand to SEQ ID NO: 1395918
uaucccacccagagucugu

SEQ ID NO: 1395920 - RNA, 19 nt, Artificial Sequence
  Description of Artificial Sequence: Synthetic oligonucleotide
  Sense strand starting at position 2206 of SEQ ID NO: 1243113
ccaagaacugcuugaugca

SEQ ID NO: 1395921 - RNA, 19 nt, Artificial Sequence
  Description of Artificial Sequence: Synthetic oligonucleotide
  Antisense strand to SEQ ID NO: 1395920
ugcaucaagcaguucuugg

SEQ ID NO: 1395922 - RNA, 19 nt, Artificial Sequence
  Description of Artificial Sequence: Synthetic oligonucleotide
  Sense strand starting at position 2338 of SEQ ID NO: 1243113
gucucuuacgguggagaga

SEQ ID NO: 1395923 - RNA, 19 nt, Artificial Sequence
  Description of Artificial Sequence: Synthetic oligonucleotide
  Antisense strand to SEQ ID NO: 1395922
ucucuccaccguaagagac

SEQ ID NO: 1395924 - RNA, 19 nt, Artificial Sequence
  Description of Artificial Sequence: Synthetic oligonucleotide
  Sense strand starting at position 2339 of SEQ ID NO: 1243113
ucucuuacgguggagagau

SEQ ID NO: 1395925 - RNA, 19 nt, Artificial Sequence
  Description of Artificial Sequence: Synthetic oligonucleotide
  Antisense strand to SEQ ID NO: 1395924
aucucuccaccguaagaga

SEQ ID NO: 1395926 - RNA, 19 nt, Artificial Sequence
  Description of Artificial Sequence: Synthetic oligonucleotide
  Sense strand starting at position 2520 of SEQ ID NO: 1243113
gccaaagaauaucuguaug

SEQ ID NO: 1395927 - RNA, 19 nt, Artificial Sequence
  Description of Artificial Sequence: Synthetic oligonucleotide
  Antisense strand to SEQ ID NO: 1395926
cauacagauauucuuuggc

SEQ ID NO: 1395928 - RNA, 19 nt, Artificial Sequence
  Description of Artificial Sequence: Synthetic oligonucleotide
  Sense strand starting at position 2525 of SEQ ID NO: 1243113
agaauaucuguaugccuca

SEQ ID NO: 1395929 - RNA, 19 nt, Artificial Sequence
  Description of Artificial Sequence: Synthetic oligonucleotide
  Antisense strand to SEQ ID NO: 1395928
ugaggcauacagauauucu

SEQ ID NO: 1395930 - RNA, 19 nt, Artificial Sequence
  Description of Artificial Sequence: Synthetic oligonucleotide
  Sense strand starting at position 2554 of SEQ ID NO: 1243113
uggcuaggauucggccaua

SEQ ID NO: 1395931 - RNA, 19 nt, Artificial Sequence
  Description of Artificial Sequence: Synthetic oligonucleotide
  Antisense strand to SEQ ID NO: 1395930
uauggccgaauccuagcca

SEQ ID NO: 1395932 - RNA, 19 nt, Artificial Sequence
  Description of Artificial Sequence: Synthetic oligonucleotide
  Sense strand starting at position 2557 of SEQ ID NO: 1243113
cuaggauucggccauaaac

SEQ ID NO: 1395933 - RNA, 19 nt, Artificial Sequence
  Description of Artificial Sequence: Synthetic oligonucleotide
  Antisense strand to SEQ ID NO: 1395932
guuuauggccgaauccuag

SEQ ID NO: 1395934 - RNA, 19 nt, Artificial Sequence
  Description of Artificial Sequence: Synthetic oligonucleotide
  Sense strand starting at position 2581 of SEQ ID NO: 1243113
gaauguuuacaugagcugu

SEQ ID NO: 1395935 - RNA, 19 nt, Artificial Sequence
  Description of Artificial Sequence: Synthetic oligonucleotide
  Antisense strand to SEQ ID NO: 1395934
acagcucauguaaacauuc

SEQ ID NO: 1395936 - RNA, 19 nt, Artificial Sequence
  Description of Artificial Sequence: Synthetic oligonucleotide
  Sense strand starting at position 2587 of SEQ ID NO: 1243113
uuacaugagcugugucuau

SEQ ID NO: 1395937 - RNA, 19 nt, Artificial Sequence
  Description of Artificial Sequence: Synthetic oligonucleotide
  Antisense strand to SEQ ID NO: 1395936
auagacacagcucauguaa

SEQ ID NO: 1395938 - RNA, 19 nt, Artificial Sequence
  Description of Artificial Sequence: Synthetic oligonucleotide
  Sense strand starting at position 2628 of SEQ ID NO: 1243113
uuuaguaauccugggcuga

SEQ ID NO: 1395939 - RNA, 19 nt, Artificial Sequence
  Description of Artificial Sequence: Synthetic oligonucleotide
  Antisense strand to SEQ ID NO: 1395938
ucagcccaggauuacuaaa

SEQ ID NO: 1395940 - RNA, 19 nt, Artificial Sequence
  Description of Artificial Sequence: Synthetic oligonucleotide
  Sense strand starting at position 2629 of SEQ ID NO: 1243113
uuaguaauccugggcugaa

SEQ ID NO: 1395941 - RNA, 19 nt, Artificial Sequence
  Description of Artificial Sequence: Synthetic oligonucleotide
  Antisense strand to SEQ ID NO: 1395940
uucagcccaggauuacuaa

SEQ ID NO: 1395942 - RNA, 19 nt, Artificial Sequence
  Description of Artificial Sequence: Synthetic oligonucleotide
  Sense strand starting at position 2630 of SEQ ID NO: 1243113
uaguaauccugggcugaau

SEQ ID NO: 1395943 - RNA, 19 nt, Artificial Sequence
  Description of Artificial Sequence: Synthetic oligonucleotide
  Antisense strand to SEQ ID NO: 1395942
auucagcccaggauuacua

SEQ ID NO: 1395944 - RNA, 19 nt, Artificial Sequence
  Description of Artificial Sequence: Synthetic oligonucleotide
  Sense strand starting at position 2821 of SEQ ID NO: 1243113
ggaugauuaucauguucca

SEQ ID NO: 1395945 - RNA, 19 nt, Artificial Sequence
  Description of Artificial Sequence: Synthetic oligonucleotide
  Antisense strand to SEQ ID NO: 1395944
uggaacaugauaaucaucc

SEQ ID NO: 1395946 - RNA, 19 nt, Artificial Sequence
  Description of Artificial Sequence: Synthetic oligonucleotide
  Sense strand starting at position 2856 of SEQ ID NO: 1243113
gcuucugaauccugaguag

SEQ ID NO: 1395947 - RNA, 19 nt, Artificial Sequence
  Description of Artificial Sequence: Synthetic oligonucleotide
  Antisense strand to SEQ ID NO: 1395946
cuacucaggauucagaagc

SEQ ID NO: 1395948 - RNA, 19 nt, Artificial Sequence
  Description of Artificial Sequence: Synthetic oligonucleotide
  Sense strand starting at position 2859 of SEQ ID NO: 1243113
ucugaauccugaguaguuu

SEQ ID NO: 1395949 - RNA, 19 nt, Artificial Sequence
  Description of Artificial Sequence: Synthetic oligonucleotide
  Antisense strand to SEQ ID NO: 1395948
aaacuacucaggauucaga

SEQ ID NO: 1395950 - RNA, 19 nt, Artificial Sequence
  Description of Artificial Sequence: Synthetic oligonucleotide
  Sense strand starting at position 3018 of SEQ ID NO: 1243113
uuaagagacucaggucaga

SEQ ID NO: 1395951 - RNA, 19 nt, Artificial Sequence
  Description of Artificial Sequence: Synthetic oligonucleotide
  Antisense strand to SEQ ID NO: 1395950
ucugaccugagucucuuaa

SEQ ID NO: 1395952 - RNA, 19 nt, Artificial Sequence
  Description of Artificial Sequence: Synthetic oligonucleotide
  Sense strand starting at position 3442 of SEQ ID NO: 1243113
agugguuccucaucaauuc

SEQ ID NO: 1395953 - RNA, 19 nt, Artificial Sequence
  Description of Artificial Sequence: Synthetic oligonucleotide
  Antisense strand to SEQ ID NO: 1395952
gaauugaugaggaaccacu

SEQ ID NO: 1395954 - RNA, 19 nt, Artificial Sequence
  Description of Artificial Sequence: Synthetic oligonucleotide
  Sense strand starting at position 3541 of SEQ ID NO: 1243113
gcaggagccacagauuaca

SEQ ID NO: 1395955 - RNA, 19 nt, Artificial Sequence
  Description of Artificial Sequence: Synthetic oligonucleotide
  Antisense strand to SEQ ID NO: 1395954
uguaaucuguggcuccugc

SEQ ID NO: 1395956 - RNA, 19 nt, Artificial Sequence
  Description of Artificial Sequence: Synthetic oligonucleotide
  Sense strand starting at position 3628 of SEQ ID NO: 1243113
uuguuuagaaauugugagu

SEQ ID NO: 1395957 - RNA, 19 nt, Artificial Sequence
  Description of Artificial Sequence: Synthetic oligonucleotide
  Antisense strand to SEQ ID NO: 1395956
acucacaauuucuaaacaa

SEQ ID NO: 1395958 - RNA, 19 nt, Artificial Sequence
  Description of Artificial Sequence: Synthetic oligonucleotide
  Sense strand starting at position 3631 of SEQ ID NO: 1243113
uuuagaaauugugagucuu

SEQ ID NO: 1395959 - RNA, 19 nt, Artificial Sequence
  Description of Artificial Sequence: Synthetic oligonucleotide
  Antisense strand to SEQ ID NO: 1395958
aagacucacaauuucuaaa

SEQ ID NO: 1395960 - RNA, 19 nt, Artificial Sequence
  Description of Artificial Sequence: Synthetic oligonucleotide
  Sense strand starting at position 3782 of SEQ ID NO: 1243113
gccuuacagcuaugccauu

SEQ ID NO: 1395961 - RNA, 19 nt, Artificial Sequence
  Description of Artificial Sequence: Synthetic oligonucleotide
  Antisense strand to SEQ ID NO: 1395960
aauggcauagcuguaaggc

SEQ ID NO: 1395962 - RNA, 19 nt, Artificial Sequence
  Description of Artificial Sequence: Synthetic oligonucleotide
  Sense strand starting at position 3804 of SEQ ID NO: 1243113
cugcccagcucuuguuuaa

SEQ ID NO: 1395963 - RNA, 19 nt, Artificial Sequence
  Description of Artificial Sequence: Synthetic oligonucleotide
  Antisense strand to SEQ ID NO: 1395962
uuaaacaagagcugggcag

SEQ ID NO: 1395964 - RNA, 19 nt, Artificial Sequence
  Description of Artificial Sequence: Synthetic oligonucleotide
  Sense strand starting at position 2830 of SEQ ID NO: 1243114
ggcugagcuuccuggagaa

SEQ ID NO: 1395965 - RNA, 19 nt, Artificial Sequence
  Description of Artificial Sequence: Synthetic oligonucleotide
  Antisense strand to SEQ ID NO: 1395964
uucuccaggaagcucagcc

SEQ ID NO: 1395966 - RNA, 19 nt, Artificial Sequence
  Description of Artificial Sequence: Synthetic oligonucleotide
  Sense strand starting at position 2848 of SEQ ID NO: 1243114
agaggaagguaagauacau

SEQ ID NO: 1395967 - RNA, 19 nt, Artificial Sequence
  Description of Artificial Sequence: Synthetic oligonucleotide
  Antisense strand to SEQ ID NO: 1395966
auguaucuuaccuuccucu

SEQ ID NO: 1395968 - RNA, 19 nt, Artificial Sequence
  Description of Artificial Sequence: Synthetic oligonucleotide
  Sense strand starting at position 2948 of SEQ ID NO: 1243114
aggccucugucuuggagga

SEQ ID NO: 1395969 - RNA, 19 nt, Artificial Sequence
  Description of Artificial Sequence: Synthetic oligonucleotide
  Antisense strand to SEQ ID NO: 1395968
uccuccaagacagaggccu

SEQ ID NO: 1395970 - RNA, 19 nt, Artificial Sequence
  Description of Artificial Sequence: Synthetic oligonucleotide
  Sense strand starting at position 3009 of SEQ ID NO: 1243114
gaucuugauugacaggaag

SEQ ID NO: 1395971 - RNA, 19 nt, Artificial Sequence
  Description of Artificial Sequence: Synthetic oligonucleotide
  Antisense strand to SEQ ID NO: 1395970
cuuccugucaaucaagauc

SEQ ID NO: 1395972 - RNA, 19 nt, Artificial Sequence
  Description of Artificial Sequence: Synthetic oligonucleotide
  Sense strand starting at position 3446 of SEQ ID NO: 1243114
cuuggauucuccuuugaca

SEQ ID NO: 1395973 - RNA, 19 nt, Artificial Sequence
  Description of Artificial Sequence: Synthetic oligonucleotide
  Antisense strand to SEQ ID NO: 1395972
ugucaaaggagaauccaag

SEQ ID NO: 1395974 - RNA, 19 nt, Artificial Sequence
  Description of Artificial Sequence: Synthetic oligonucleotide
  Sense strand starting at position 3448 of SEQ ID NO: 1243114
uggauucuccuuugacaug

SEQ ID NO: 1395975 - RNA, 19 nt, Artificial Sequence
  Description of Artificial Sequence: Synthetic oligonucleotide
  Antisense strand to SEQ ID NO: 1395974
caugucaaaggagaaucca

SEQ ID NO: 1395976 - RNA, 19 nt, Artificial Sequence
  Description of Artificial Sequence: Synthetic oligonucleotide
  Sense strand starting at position 3464 of SEQ ID NO: 1243114
augcucuucccuggcaaga

SEQ ID NO: 1395977 - RNA, 19 nt, Artificial Sequence
  Description of Artificial Sequence: Synthetic oligonucleotide
  Antisense strand to SEQ ID NO: 1395976
ucuugccagggaagagcau

SEQ ID NO: 1395978 - RNA, 19 nt, Artificial Sequence
  Description of Artificial Sequence: Synthetic oligonucleotide
  Sense strand starting at position 3466 of SEQ ID NO: 1243114
gcucuucccuggcaagaug

SEQ ID NO: 1395979 - RNA, 19 nt, Artificial Sequence
  Description of Artificial Sequence: Synthetic oligonucleotide
  Antisense strand to SEQ ID NO: 1395978
caucuugccagggaagagc

SEQ ID NO: 1395980 - RNA, 19 nt, Artificial Sequence
  Description of Artificial Sequence: Synthetic oligonucleotide
  Sense strand starting at position 3520 of SEQ ID NO: 1243114
cgauuuauggcugagugca

SEQ ID NO: 1395981 - RNA, 19 nt, Artificial Sequence
  Description of Artificial Sequence: Synthetic oligonucleotide
  Antisense strand to SEQ ID NO: 1395980
ugcacucagccauaaaucg

SEQ ID NO: 1395982 - RNA, 19 nt, Artificial Sequence
  Description of Artificial Sequence: Synthetic oligonucleotide
  Sense strand starting at position 3592 of SEQ ID NO: 1243114
gaagcuuuaggucaggagu

SEQ ID NO: 1395983 - RNA, 19 nt, Artificial Sequence
  Description of Artificial Sequence: Synthetic oligonucleotide
  Antisense strand to SEQ ID NO: 1395982
acuccugaccuaaagcuuc

SEQ ID NO: 1395984 - RNA, 19 nt, Artificial Sequence
  Description of Artificial Sequence: Synthetic oligonucleotide
  Sense strand starting at position 3677 of SEQ ID NO: 1243114
guggugacguguccuugua

SEQ ID NO: 1395985 - RNA, 19 nt, Artificial Sequence
  Description of Artificial Sequence: Synthetic oligonucleotide
  Antisense strand to SEQ ID NO: 1395984
uacaaggacacgucaccac

SEQ ID NO: 1395986 - RNA, 19 nt, Artificial Sequence
  Description of Artificial Sequence: Synthetic oligonucleotide
  Sense strand starting at position 3679 of SEQ ID NO: 1243114
ggugacguguccuuguaau

SEQ ID NO: 1395987 - RNA, 19 nt, Artificial Sequence
  Description of Artificial Sequence: Synthetic oligonucleotide
  Antisense strand to SEQ ID NO: 1395986
auuacaaggacacgucacc

SEQ ID NO: 1395988 - RNA, 19 nt, Artificial Sequence
  Description of Artificial Sequence: Synthetic oligonucleotide
  Sense strand starting at position 3939 of SEQ ID NO: 1243114
ggaugugguauugaaagug

SEQ ID NO: 1395989 - RNA, 19 nt, Artificial Sequence
  Description of Artificial Sequence: Synthetic oligonucleotide
  Antisense strand to SEQ ID NO: 1395988
cacuuucaauaccacaucc

SEQ ID NO: 1395990 - RNA, 19 nt, Artificial Sequence
  Description of Artificial Sequence: Synthetic oligonucleotide
  Sense strand starting at position 3964 of SEQ ID NO: 1243114
agcagagguacuuggaaau

SEQ ID NO: 1395991 - RNA, 19 nt, Artificial Sequence
  Description of Artificial Sequence: Synthetic oligonucleotide
  Antisense strand to SEQ ID NO: 1395990
auuuccaaguaccucugcu

SEQ ID NO: 1395992 - RNA, 19 nt, Artificial Sequence
  Description of Artificial Sequence: Synthetic oligonucleotide
  Sense strand starting at position 3970 of SEQ ID NO: 1243114
gguacuuggaaauguacau

SEQ ID NO: 1395993 - RNA, 19 nt, Artificial Sequence
  Description of Artificial Sequence: Synthetic oligonucleotide
  Antisense strand to SEQ ID NO: 1395992
auguacauuuccaaguacc

SEQ ID NO: 1395994 - RNA, 19 nt, Artificial Sequence
  Description of Artificial Sequence: Synthetic oligonucleotide
  Sense strand starting at position 17 of SEQ ID NO: 1243115
uccauaaaugggcauguuu

SEQ ID NO: 1395995 - RNA, 19 nt, Artificial Sequence
  Description of Artificial Sequence: Synthetic oligonucleotide
  Antisense strand to SEQ ID NO: 1395994
aaacaugcccauuuaugga

SEQ ID NO: 1395996 - RNA, 19 nt, Artificial Sequence
  Description of Artificial Sequence: Synthetic oligonucleotide
  Sense strand starting at position 86 of SEQ ID NO: 1243115
agauaccuuguacggaaua

SEQ ID NO: 1395997 - RNA, 19 nt, Artificial Sequence
  Description of Artificial Sequence: Synthetic oligonucleotide
  Antisense strand to SEQ ID NO: 1395996
uauuccguacaagguaucu

SEQ ID NO: 1395998 - RNA, 19 nt, Artificial Sequence
  Description of Artificial Sequence: Synthetic oligonucleotide
  Sense strand starting at position 107 of SEQ ID NO: 1243115
acaucuauuucggacauga

SEQ ID NO: 1395999 - RNA, 19 nt, Artificial Sequence
  Description of Artificial Sequence: Synthetic oligonucleotide
  Antisense strand to SEQ ID NO: 1395998
ucauguccgaaauagaugu

SEQ ID NO: 1396000 - RNA, 19 nt, Artificial Sequence
  Description of Artificial Sequence: Synthetic oligonucleotide
  Sense strand starting at position 383 of SEQ ID NO: 1243115
caaguuuguguccauggua

SEQ ID NO: 1396001 - RNA, 19 nt, Artificial Sequence
  Description of Artificial Sequence: Synthetic oligonucleotide
  Antisense strand to SEQ ID NO: 1396000
uaccauggacacaaacuug

SEQ ID NO: 1396002 - RNA, 19 nt, Artificial Sequence
  Description of Artificial Sequence: Synthetic oligonucleotide
  Sense strand starting at position 418 of SEQ ID NO: 1243115
gggucaaggguaugaacuu

SEQ ID NO: 1396003 - RNA, 19 nt, Artificial Sequence
  Description of Artificial Sequence: Synthetic oligonucleotide
  Antisense strand to SEQ ID NO: 1396002
aaguucauacccuugaccc

SEQ ID NO: 1396004 - RNA, 19 nt, Artificial Sequence
  Description of Artificial Sequence: Synthetic oligonucleotide
  Sense strand starting at position 425 of SEQ ID NO: 1243115
ggguaugaacuuggacuca

SEQ ID NO: 1396005 - RNA, 19 nt, Artificial Sequence
  Description of Artificial Sequence: Synthetic oligonucleotide
  Antisense strand to SEQ ID NO: 1396004
ugaguccaaguucauaccc

SEQ ID NO: 1396006 - RNA, 19 nt, Artificial Sequence
  Description of Artificial Sequence: Synthetic oligonucleotide
  Sense strand starting at position 502 of SEQ ID NO: 1243115
gccucagcugccuuguaua

SEQ ID NO: 1396007 - RNA, 19 nt, Artificial Sequence
  Description of Artificial Sequence: Synthetic oligonucleotide
  Antisense strand to SEQ ID NO: 1396006
uauacaaggcagcugaggc

SEQ ID NO: 1396008 - RNA, 19 nt, Artificial Sequence
  Description of Artificial Sequence: Synthetic oligonucleotide
  Sense strand starting at position 507 of SEQ ID NO: 1243115
agcugccuuguauacuaaa

SEQ ID NO: 1396009 - RNA, 19 nt, Artificial Sequence
  Description of Artificial Sequence: Synthetic oligonucleotide
  Antisense strand to SEQ ID NO: 1396008
uuuaguauacaaggcagcu

SEQ ID NO: 1396010 - RNA, 19 nt, Artificial Sequence
  Description of Artificial Sequence: Synthetic oligonucleotide
  Sense strand starting at position 719 of SEQ ID NO: 1243115
cgucaaguuccgucucuga

SEQ ID NO: 1396011 - RNA, 19 nt, Artificial Sequence
  Description of Artificial Sequence: Synthetic oligonucleotide
  Antisense strand to SEQ ID NO: 1396010
ucagagacggaacuugacg

SEQ ID NO: 1396012 - RNA, 19 nt, Artificial Sequence
  Description of Artificial Sequence: Synthetic oligonucleotide
  Sense strand starting at position 722 of SEQ ID NO: 1243115
caaguuccgucucugaaca

SEQ ID NO: 1396013 - RNA, 19 nt, Artificial Sequence
  Description of Artificial Sequence: Synthetic oligonucleotide
  Antisense strand to SEQ ID NO: 1396012
uguucagagacggaacuug

SEQ ID NO: 1396014 - RNA, 19 nt, Artificial Sequence
  Description of Artificial Sequence: Synthetic oligonucleotide
  Sense strand starting at position 723 of SEQ ID NO: 1243115
aaguuccgucucugaacaa

SEQ ID NO: 1396015 - RNA, 19 nt, Artificial Sequence
  Description of Artificial Sequence: Synthetic oligonucleotide
  Antisense strand to SEQ ID NO: 1396014
uuguucagagacggaacuu

SEQ ID NO: 1396016 - RNA, 19 nt, Artificial Sequence
  Description of Artificial Sequence: Synthetic oligonucleotide
  Sense strand starting at position 748 of SEQ ID NO: 1243115
aauaguaucguugaguaaa

SEQ ID NO: 1396017 - RNA, 19 nt, Artificial Sequence
  Description of Artificial Sequence: Synthetic oligonucleotide
  Antisense strand to SEQ ID NO: 1396016
uuuacucaacgauacuauu

SEQ ID NO: 1396018 - RNA, 19 nt, Artificial Sequence
  Description of Artificial Sequence: Synthetic oligonucleotide
  Sense strand starting at position 751 of SEQ ID NO: 1243115
aguaucguugaguaaauca

SEQ ID NO: 1396019 - RNA, 19 nt, Artificial Sequence
  Description of Artificial Sequence: Synthetic oligonucleotide
  Antisense strand to SEQ ID NO: 1396018
ugauuuacucaacgauacu

SEQ ID NO: 1396020 - RNA, 19 nt, Artificial Sequence
  Description of Artificial Sequence: Synthetic oligonucleotide
  Sense strand starting at position 1087 of SEQ ID NO: 1243115
aguguaaucuuaccuaacg

SEQ ID NO: 1396021 - RNA, 19 nt, Artificial Sequence
  Description of Artificial Sequence: Synthetic oligonucleotide
  Antisense strand to SEQ ID NO: 1396020
cguuagguaagauuacacu

SEQ ID NO: 1396022 - RNA, 19 nt, Artificial Sequence
  Description of Artificial Sequence: Synthetic oligonucleotide
  Sense strand starting at position 1170 of SEQ ID NO: 1243115
gggucaaccugggugaguu

SEQ ID NO: 1396023 - RNA, 19 nt, Artificial Sequence
  Description of Artificial Sequence: Synthetic oligonucleotide
  Antisense strand to SEQ ID NO: 1396022
aacucacccagguugaccc

SEQ ID NO: 1396024 - RNA, 19 nt, Artificial Sequence
  Description of Artificial Sequence: Synthetic oligonucleotide
  Sense strand starting at position 1432 of SEQ ID NO: 1243115
ugugauagcaagugacuuu

SEQ ID NO: 1396025 - RNA, 19 nt, Artificial Sequence
  Description of Artificial Sequence: Synthetic oligonucleotide
  Antisense strand to SEQ ID NO: 1396024
aaagucacuugcuaucaca

SEQ ID NO: 1396026 - RNA, 19 nt, Artificial Sequence
  Description of Artificial Sequence: Synthetic oligonucleotide
  Sense strand starting at position 1494 of SEQ ID NO: 1243115
gugagaugccuugauuguc

SEQ ID NO: 1396027 - RNA, 19 nt, Artificial Sequence
  Description of Artificial Sequence: Synthetic oligonucleotide
  Antisense strand to SEQ ID NO: 1396026
gacaaucaaggcaucucac

SEQ ID NO: 1396028 - RNA, 19 nt, Artificial Sequence
  Description of Artificial Sequence: Synthetic oligonucleotide
  Sense strand starting at position 1523 of SEQ ID NO: 1243115
cucugagauuuccaaggga

SEQ ID NO: 1396029 - RNA, 19 nt, Artificial Sequence
  Description of Artificial Sequence: Synthetic oligonucleotide
  Antisense strand to SEQ ID NO: 1396028
ucccuuggaaaucucagag

SEQ ID NO: 1396030 - RNA, 19 nt, Artificial Sequence
  Description of Artificial Sequence: Synthetic oligonucleotide
  Sense strand starting at position 1538 of SEQ ID NO: 1243115
gggagcauaucuccuggau

SEQ ID NO: 1396031 - RNA, 19 nt, Artificial Sequence
  Description of Artificial Sequence: Synthetic oligonucleotide
  Antisense strand to SEQ ID NO: 1396030
auccaggagauaugcuccc

SEQ ID NO: 1396032 - RNA, 19 nt, Artificial Sequence
  Description of Artificial Sequence: Synthetic oligonucleotide
  Sense strand starting at position 1541 of SEQ ID NO: 1243115
agcauaucuccuggauuag

SEQ ID NO: 1396033 - RNA, 19 nt, Artificial Sequence
  Description of Artificial Sequence: Synthetic oligonucleotide
  Antisense strand to SEQ ID NO: 1396032
cuaauccaggagauaugcu

SEQ ID NO: 1396034 - RNA, 19 nt, Artificial Sequence
  Description of Artificial Sequence: Synthetic oligonucleotide
  Sense strand starting at position 1568 of SEQ ID NO: 1243115
caagaaucacucgggacua

SEQ ID NO: 1396035 - RNA, 19 nt, Artificial Sequence
  Description of Artificial Sequence: Synthetic oligonucleotide
  Antisense strand to SEQ ID NO: 1396034
uagucccgagugauucuug

SEQ ID NO: 1396036 - RNA, 19 nt, Artificial Sequence
  Description of Artificial Sequence: Synthetic oligonucleotide
  Sense strand starting at position 1652 of SEQ ID NO: 1243115
cauugauaucguuaauaag

SEQ ID NO: 1396037 - RNA, 19 nt, Artificial Sequence
  Description of Artificial Sequence: Synthetic oligonucleotide
  Antisense strand to SEQ ID NO: 1396036
cuuauuaacgauaucaaug

SEQ ID NO: 1396038 - RNA, 19 nt, Artificial Sequence
  Description of Artificial Sequence: Synthetic oligonucleotide
  Sense strand starting at position 1682 of SEQ ID NO: 1243115
ugguacuucucacuggcaa

SEQ ID NO: 1396039 - RNA, 19 nt, Artificial Sequence
  Description of Artificial Sequence: Synthetic oligonucleotide
  Antisense strand to SEQ ID NO: 1396038
uugccagugagaaguacca

SEQ ID NO: 1396040 - RNA, 19 nt, Artificial Sequence
  Description of Artificial Sequence: Synthetic oligonucleotide
  Sense strand starting at position 1683 of SEQ ID NO: 1243115
gguacuucucacuggcaau

SEQ ID NO: 1396041 - RNA, 19 nt, Artificial Sequence
  Description of Artificial Sequence: Synthetic oligonucleotide
  Antisense strand to SEQ ID NO: 1396040
auugccagugagaaguacc

SEQ ID NO: 1396042 - RNA, 19 nt, Artificial Sequence
  Description of Artificial Sequence: Synthetic oligonucleotide
  Sense strand starting at position 2012 of SEQ ID NO: 1243115
ggacgccucucuuuauaga

SEQ ID NO: 1396043 - RNA, 19 nt, Artificial Sequence
  Description of Artificial Sequence: Synthetic oligonucleotide
  Antisense strand to SEQ ID NO: 1396042
ucuauaaagagaggcgucc

SEQ ID NO: 1396044 - RNA, 19 nt, Artificial Sequence
  Description of Artificial Sequence: Synthetic oligonucleotide
  Sense strand starting at position 2316 of SEQ ID NO: 1243115
uugagaacgucuucccuga

SEQ ID NO: 1396045 - RNA, 19 nt, Artificial Sequence
  Description of Artificial Sequence: Synthetic oligonucleotide
  Antisense strand to SEQ ID NO: 1396044
ucagggaagacguucucaa

SEQ ID NO: 1396046 - RNA, 19 nt, Artificial Sequence
  Description of Artificial Sequence: Synthetic oligonucleotide
  Sense strand starting at position 2318 of SEQ ID NO: 1243115
gagaacgucuucccugagu

SEQ ID NO: 1396047 - RNA, 19 nt, Artificial Sequence
  Description of Artificial Sequence: Synthetic oligonucleotide
  Antisense strand to SEQ ID NO: 1396046
acucagggaagacguucuc

SEQ ID NO: 1396048 - RNA, 19 nt, Artificial Sequence
  Description of Artificial Sequence: Synthetic oligonucleotide
  Sense strand starting at position 2388 of SEQ ID NO: 1243115
guggaucugacuugacauc

SEQ ID NO: 1396049 - RNA, 19 nt, Artificial Sequence
  Description of Artificial Sequence: Synthetic oligonucleotide
  Antisense strand to SEQ ID NO: 1396048
gaugucaagucagauccac

SEQ ID NO: 1396050 - RNA, 19 nt, Artificial Sequence
  Description of Artificial Sequence: Synthetic oligonucleotide
  Sense strand starting at position 2729 of SEQ ID NO: 1243115
ugguguccauagcuacaaa

SEQ ID NO: 1396051 - RNA, 19 nt, Artificial Sequence
  Description of Artificial Sequence: Synthetic oligonucleotide
  Antisense strand to SEQ ID NO: 1396050
uuuguagcuauggacacca

SEQ ID NO: 1396052 - RNA, 19 nt, Artificial Sequence
  Description of Artificial Sequence: Synthetic oligonucleotide
  Sense strand starting at position 2774 of SEQ ID NO: 1243115
uuacguuauuuacaagaug

SEQ ID NO: 1396053 - RNA, 19 nt, Artificial Sequence
  Description of Artificial Sequence: Synthetic oligonucleotide
  Antisense strand to SEQ ID NO: 1396052
caucuuguaaauaacguaa

SEQ ID NO: 1396054 - RNA, 19 nt, Artificial Sequence
  Description of Artificial Sequence: Synthetic oligonucleotide
  Sense strand starting at position 2785 of SEQ ID NO: 1243115
acaagaugcaagugucaag

SEQ ID NO: 1396055 - RNA, 19 nt, Artificial Sequence
  Description of Artificial Sequence: Synthetic oligonucleotide
  Antisense strand to SEQ ID NO: 1396054
cuugacacuugcaucuugu

SEQ ID NO: 1396056 - RNA, 19 nt, Artificial Sequence
  Description of Artificial Sequence: Synthetic oligonucleotide
  Sense strand starting at position 3011 of SEQ ID NO: 1243115
ucuagaucugucgauguau

SEQ ID NO: 1396057 - RNA, 19 nt, Artificial Sequence
  Description of Artificial Sequence: Synthetic oligonucleotide
  Antisense strand to SEQ ID NO: 1396056
auacaucgacagaucuaga

SEQ ID NO: 1396058 - RNA, 19 nt, Artificial Sequence
  Description of Artificial Sequence: Synthetic oligonucleotide
  Sense strand starting at position 3816 of SEQ ID NO: 1243115
ccaagcucucacugggaca

SEQ ID NO: 1396059 - RNA, 19 nt, Artificial Sequence
  Description of Artificial Sequence: Synthetic oligonucleotide
  Antisense strand to SEQ ID NO: 1396058
ugucccagugagagcuugg

SEQ ID NO: 1396060 - RNA, 19 nt, Artificial Sequence
  Description of Artificial Sequence: Synthetic oligonucleotide
  Sense strand starting at position 3827 of SEQ ID NO: 1243115
cugggacagucauugauug

SEQ ID NO: 1396061 - RNA, 19 nt, Artificial Sequence
  Description of Artificial Sequence: Synthetic oligonucleotide
  Antisense strand to SEQ ID NO: 1396060
caaucaaugacugucccag

SEQ ID NO: 1396062 - RNA, 19 nt, Artificial Sequence
  Description of Artificial Sequence: Synthetic oligonucleotide
  Sense strand starting at position 3829 of SEQ ID NO: 1243115
gggacagucauugauuggu

SEQ ID NO: 1396063 - RNA, 19 nt, Artificial Sequence
  Description of Artificial Sequence: Synthetic oligonucleotide
  Antisense strand to SEQ ID NO: 1396062
accaaucaaugacuguccc

SEQ ID NO: 1396064 - RNA, 19 nt, Artificial Sequence
  Description of Artificial Sequence: Synthetic oligonucleotide
  Sense strand starting at position 3943 of SEQ ID NO: 1243115
uguaucugagaguagaugu

SEQ ID NO: 1396065 - RNA, 19 nt, Artificial Sequence
  Description of Artificial Sequence: Synthetic oligonucleotide
  Antisense strand to SEQ ID NO: 1396064
acaucuacucucagauaca

SEQ ID NO: 1396066 - RNA, 19 nt, Artificial Sequence
  Description of Artificial Sequence: Synthetic oligonucleotide
  Sense strand starting at position 3950 of SEQ ID NO: 1243115
gagaguagaugucuggcuu

SEQ ID NO: 1396067 - RNA, 19 nt, Artificial Sequence
  Description of Artificial Sequence: Synthetic oligonucleotide
  Antisense strand to SEQ ID NO: 1396066
aagccagacaucuacucuc

SEQ ID NO: 1396068 - RNA, 19 nt, Artificial Sequence
  Description of Artificial Sequence: Synthetic oligonucleotide
  Sense strand starting at position 3951 of SEQ ID NO: 1243115
agaguagaugucuggcuuu

SEQ ID NO: 1396069 - RNA, 19 nt, Artificial Sequence
  Description of Artificial Sequence: Synthetic oligonucleotide
  Antisense strand to SEQ ID NO: 1396068
aaagccagacaucuacucu

SEQ ID NO: 1396070 - RNA, 19 nt, Artificial Sequence
  Description of Artificial Sequence: Synthetic oligonucleotide
  Sense strand starting at position 3954 of SEQ ID NO: 1243115
guagaugucuggcuuugaa

SEQ ID NO: 1396071 - RNA, 19 nt, Artificial Sequence
  Description of Artificial Sequence: Synthetic oligonucleotide
  Antisense strand to SEQ ID NO: 1396070
uucaaagccagacaucuac

SEQ ID NO: 1396072 - RNA, 19 nt, Artificial Sequence
  Description of Artificial Sequence: Synthetic oligonucleotide
  Sense strand starting at position 3957 of SEQ ID NO: 1243115
gaugucuggcuuugaaucu

SEQ ID NO: 1396073 - RNA, 19 nt, Artificial Sequence
  Description of Artificial Sequence: Synthetic oligonucleotide
  Antisense strand to SEQ ID NO: 1396072
agauucaaagccagacauc

SEQ ID NO: 1396074 - RNA, 19 nt, Artificial Sequence
  Description of Artificial Sequence: Synthetic oligonucleotide
  Sense strand starting at position 90 of SEQ ID NO: 1243116
ggcugacuauaauuaaauu

SEQ ID NO: 1396075 - RNA, 19 nt, Artificial Sequence
  Description of Artificial Sequence: Synthetic oligonucleotide
  Antisense strand to SEQ ID NO: 1396074
aauuuaauuauagucagcc

SEQ ID NO: 1396076 - RNA, 19 nt, Artificial Sequence
  Description of Artificial Sequence: Synthetic oligonucleotide
  Sense strand starting at position 260 of SEQ ID NO: 1243116
ugccacaaugccugguaaa

SEQ ID NO: 1396077 - RNA, 19 nt, Artificial Sequence
  Description of Artificial Sequence: Synthetic oligonucleotide
  Antisense strand to SEQ ID NO: 1396076
uuuaccaggcauuguggca

SEQ ID NO: 1396078 - RNA, 19 nt, Artificial Sequence
  Description of Artificial Sequence: Synthetic oligonucleotide
  Sense strand starting at position 261 of SEQ ID NO: 1243116
gccacaaugccugguaaau

SEQ ID NO: 1396079 - RNA, 19 nt, Artificial Sequence
  Description of Artificial Sequence: Synthetic oligonucleotide
  Antisense strand to SEQ ID NO: 1396078
auuuaccaggcauuguggc

SEQ ID NO: 1396080 - RNA, 19 nt, Artificial Sequence
  Description of Artificial Sequence: Synthetic oligonucleotide
  Sense strand starting at position 463 of SEQ ID NO: 1243116
caggccaaguccucagaaa

SEQ ID NO: 1396081 - RNA, 19 nt, Artificial Sequence
  Description of Artificial Sequence: Synthetic oligonucleotide
  Antisense strand to SEQ ID NO: 1396080
uuucugaggacuuggccug

SEQ ID NO: 1396082 - RNA, 19 nt, Artificial Sequence
  Description of Artificial Sequence: Synthetic oligonucleotide
  Sense strand starting at position 707 of SEQ ID NO: 1243116
ccagguugucugaguguug

SEQ ID NO: 1396083 - RNA, 19 nt, Artificial Sequence
  Description of Artificial Sequence: Synthetic oligonucleotide
  Antisense strand to SEQ ID NO: 1396082
caacacucagacaaccugg

SEQ ID NO: 1396084 - RNA, 19 nt, Artificial Sequence
  Description of Artificial Sequence: Synthetic oligonucleotide
  Sense strand starting at position 710 of SEQ ID NO: 1243116
gguugucugaguguugcua

SEQ ID NO: 1396085 - RNA, 19 nt, Artificial Sequence
  Description of Artificial Sequence: Synthetic oligonucleotide
  Antisense strand to SEQ ID NO: 1396084
uagcaacacucagacaacc

SEQ ID NO: 1396086 - RNA, 19 nt, Artificial Sequence
  Description of Artificial Sequence: Synthetic oligonucleotide
  Sense strand starting at position 758 of SEQ ID NO: 1243116
ggguguucccucuacagac

SEQ ID NO: 1396087 - RNA, 19 nt, Artificial Sequence
  Description of Artificial Sequence: Synthetic oligonucleotide
  Antisense strand to SEQ ID NO: 1396086
gucuguagagggaacaccc

SEQ ID NO: 1396088 - RNA, 19 nt, Artificial Sequence
  Description of Artificial Sequence: Synthetic oligonucleotide
  Sense strand starting at position 812 of SEQ ID NO: 1243116
uccauuagccugcaggauu

SEQ ID NO: 1396089 - RNA, 19 nt, Artificial Sequence
  Description of Artificial Sequence: Synthetic oligonucleotide
  Antisense strand to SEQ ID NO: 1396088
aauccugcaggcuaaugga

SEQ ID NO: 1396090 - RNA, 19 nt, Artificial Sequence
  Description of Artificial Sequence: Synthetic oligonucleotide
  Sense strand starting at position 1228 of SEQ ID NO: 1243116
caguguccggacuggaaau

SEQ ID NO: 1396091 - RNA, 19 nt, Artificial Sequence
  Description of Artificial Sequence: Synthetic oligonucleotide
  Antisense strand to SEQ ID NO: 1396090
auuuccaguccggacacug

SEQ ID NO: 1396092 - RNA, 19 nt, Artificial Sequence
  Description of Artificial Sequence: Synthetic oligonucleotide
  Sense strand starting at position 1249 of SEQ ID NO: 1243116
accuaugaccuguaaguuu

SEQ ID NO: 1396093 - RNA, 19 nt, Artificial Sequence
  Description of Artificial Sequence: Synthetic oligonucleotide
  Antisense strand to SEQ ID NO: 1396092
aaacuuacaggucauaggu

SEQ ID NO: 1396094 - RNA, 19 nt, Artificial Sequence
  Description of Artificial Sequence: Synthetic oligonucleotide
  Sense strand starting at position 1462 of SEQ ID NO: 1243116
gaggaaauccgccaccuuu

SEQ ID NO: 1396095 - RNA, 19 nt, Artificial Sequence
  Description of Artificial Sequence: Synthetic oligonucleotide
  Antisense strand to SEQ ID NO: 1396094
aaagguggcggauuuccuc

SEQ ID NO: 1396096 - RNA, 19 nt, Artificial Sequence
  Description of Artificial Sequence: Synthetic oligonucleotide
  Sense strand starting at position 1733 of SEQ ID NO: 1243116
ugcaacuucucugugacau

SEQ ID NO: 1396097 - RNA, 19 nt, Artificial Sequence
  Description of Artificial Sequence: Synthetic oligonucleotide
  Antisense strand to SEQ ID NO: 1396096
augucacagagaaguugca

SEQ ID NO: 1396098 - RNA, 19 nt, Artificial Sequence
  Description of Artificial Sequence: Synthetic oligonucleotide
  Sense strand starting at position 1734 of SEQ ID NO: 1243116
gcaacuucucugugacauc

SEQ ID NO: 1396099 - RNA, 19 nt, Artificial Sequence
  Description of Artificial Sequence: Synthetic oligonucleotide
  Antisense strand to SEQ ID NO: 1396098
gaugucacagagaaguugc

SEQ ID NO: 1396100 - RNA, 19 nt, Artificial Sequence
  Description of Artificial Sequence: Synthetic oligonucleotide
  Sense strand starting at position 1744 of SEQ ID NO: 1243116
ugugacaucuucuuggaag

SEQ ID NO: 1396101 - RNA, 19 nt, Artificial Sequence
  Description of Artificial Sequence: Synthetic oligonucleotide
  Antisense strand to SEQ ID NO: 1396100
cuuccaagaagaugucaca

SEQ ID NO: 1396102 - RNA, 19 nt, Artificial Sequence
  Description of Artificial Sequence: Synthetic oligonucleotide
  Sense strand starting at position 2189 of SEQ ID NO: 1243116
gcugcugaugggcaaauau

SEQ ID NO: 1396103 - RNA, 19 nt, Artificial Sequence
  Description of Artificial Sequence: Synthetic oligonucleotide
  Antisense strand to SEQ ID NO: 1396102
auauuugcccaucagcagc

SEQ ID NO: 1396104 - RNA, 19 nt, Artificial Sequence
  Description of Artificial Sequence: Synthetic oligonucleotide
  Sense strand starting at position 2207 of SEQ ID NO: 1243116
uguuaagaaucugcccaga

SEQ ID NO: 1396105 - RNA, 19 nt, Artificial Sequence
  Description of Artificial Sequence: Synthetic oligonucleotide
  Antisense strand to SEQ ID NO: 1396104
ucugggcagauucuuaaca

SEQ ID NO: 1396106 - RNA, 19 nt, Artificial Sequence
  Description of Artificial Sequence: Synthetic oligonucleotide
  Sense strand starting at position 2242 of SEQ ID NO: 1243116
caacuaaugguucggagga

SEQ ID NO: 1396107 - RNA, 19 nt, Artificial Sequence
  Description of Artificial Sequence: Synthetic oligonucleotide
  Antisense strand to SEQ ID NO: 1396106
uccuccgaaccauuaguug

SEQ ID NO: 1396108 - RNA, 19 nt, Artificial Sequence
  Description of Artificial Sequence: Synthetic oligonucleotide
  Sense strand starting at position 2408 of SEQ ID NO: 1243116
gagaccacucagcaaaguu

SEQ ID NO: 1396109 - RNA, 19 nt, Artificial Sequence
  Description of Artificial Sequence: Synthetic oligonucleotide
  Antisense strand to SEQ ID NO: 1396108
aacuuugcugaguggucuc

SEQ ID NO: 1396110 - RNA, 19 nt, Artificial Sequence
  Description of Artificial Sequence: Synthetic oligonucleotide
  Sense strand starting at position 2428 of SEQ ID NO: 1243116
ugacuucugccaugaugaa

SEQ ID NO: 1396111 - RNA, 19 nt, Artificial Sequence
  Description of Artificial Sequence: Synthetic oligonucleotide
  Antisense strand to SEQ ID NO: 1396110
uucaucauggcagaaguca

SEQ ID NO: 1396112 - RNA, 19 nt, Artificial Sequence
  Description of Artificial Sequence: Synthetic oligonucleotide
  Sense strand starting at position 2450 of SEQ ID NO: 1243116
uuugaugcuucugcaaauu

SEQ ID NO: 1396113 - RNA, 19 nt, Artificial Sequence
  Description of Artificial Sequence: Synthetic oligonucleotide
  Antisense strand to SEQ ID NO: 1396112
aauuugcagaagcaucaaa

SEQ ID NO: 1396114 - RNA, 19 nt, Artificial Sequence
  Description of Artificial Sequence: Synthetic oligonucleotide
  Sense strand starting at position 2506 of SEQ ID NO: 1243116
cagaacauguguuuagacu

SEQ ID NO: 1396115 - RNA, 19 nt, Artificial Sequence
  Description of Artificial Sequence: Synthetic oligonucleotide
  Antisense strand to SEQ ID NO: 1396114
agucuaaacacauguucug

SEQ ID NO: 1396116 - RNA, 19 nt, Artificial Sequence
  Description of Artificial Sequence: Synthetic oligonucleotide
  Sense strand starting at position 2569 of SEQ ID NO: 1243116
ugacuagucccuuguaccu

SEQ ID NO: 1396117 - RNA, 19 nt, Artificial Sequence
  Description of Artificial Sequence: Synthetic oligonucleotide
  Antisense strand to SEQ ID NO: 1396116
agguacaagggacuaguca

SEQ ID NO: 1396118 - RNA, 19 nt, Artificial Sequence
  Description of Artificial Sequence: Synthetic oligonucleotide
  Sense strand starting at position 2710 of SEQ ID NO: 1243116
gcagguaucagacaugcaa

SEQ ID NO: 1396119 - RNA, 19 nt, Artificial Sequence
  Description of Artificial Sequence: Synthetic oligonucleotide
  Antisense strand to SEQ ID NO: 1396118
uugcaugucugauaccugc

SEQ ID NO: 1396120 - RNA, 19 nt, Artificial Sequence
  Description of Artificial Sequence: Synthetic oligonucleotide
  Sense strand starting at position 2838 of SEQ ID NO: 1243116
acagaaguaucagucaaua

SEQ ID NO: 1396121 - RNA, 19 nt, Artificial Sequence
  Description of Artificial Sequence: Synthetic oligonucleotide
  Antisense strand to SEQ ID NO: 1396120
uauugacugauacuucugu

SEQ ID NO: 1396122 - RNA, 19 nt, Artificial Sequence
  Description of Artificial Sequence: Synthetic oligonucleotide
  Sense strand starting at position 2843 of SEQ ID NO: 1243116
aguaucagucaauaaagca

SEQ ID NO: 1396123 - RNA, 19 nt, Artificial Sequence
  Description of Artificial Sequence: Synthetic oligonucleotide
  Antisense strand to SEQ ID NO: 1396122
ugcuuuauugacugauacu

SEQ ID NO: 1396124 - RNA, 19 nt, Artificial Sequence
  Description of Artificial Sequence: Synthetic oligonucleotide
  Sense strand starting at position 3144 of SEQ ID NO: 1243116
ccuggacauuuggaaucua

SEQ ID NO: 1396125 - RNA, 19 nt, Artificial Sequence
  Description of Artificial Sequence: Synthetic oligonucleotide
  Antisense strand to SEQ ID NO: 1396124
uagauuccaaauguccagg

SEQ ID NO: 1396126 - RNA, 19 nt, Artificial Sequence
  Description of Artificial Sequence: Synthetic oligonucleotide
  Sense strand starting at position 3220 of SEQ ID NO: 1243116
ggcggauugcuugugucca

SEQ ID NO: 1396127 - RNA, 19 nt, Artificial Sequence
  Description of Artificial Sequence: Synthetic oligonucleotide
  Antisense strand to SEQ ID NO: 1396126
uggacacaagcaauccgcc

SEQ ID NO: 1396128 - RNA, 19 nt, Artificial Sequence
  Description of Artificial Sequence: Synthetic oligonucleotide
  Sense strand starting at position 3484 of SEQ ID NO: 1243116
cuaucaaugcagugagcuu

SEQ ID NO: 1396129 - RNA, 19 nt, Artificial Sequence
  Description of Artificial Sequence: Synthetic oligonucleotide
  Antisense strand to SEQ ID NO: 1396128
aagcucacugcauugauag

SEQ ID NO: 1396130 - RNA, 19 nt, Artificial Sequence
  Description of Artificial Sequence: Synthetic oligonucleotide
  Sense strand starting at position 3496 of SEQ ID NO: 1243116
ugagcuugcuaugcaaaug

SEQ ID NO: 1396131 - RNA, 19 nt, Artificial Sequence
  Description of Artificial Sequence: Synthetic oligonucleotide
  Antisense strand to SEQ ID NO: 1396130
cauuugcauagcaagcuca

SEQ ID NO: 1396132 - RNA, 19 nt, Artificial Sequence
  Description of Artificial Sequence: Synthetic oligonucleotide
  Sense strand starting at position 3542 of SEQ ID NO: 1243116
cccuucuaucccgauaguu

SEQ ID NO: 1396133 - RNA, 19 nt, Artificial Sequence
  Description of Artificial Sequence: Synthetic oligonucleotide
  Antisense strand to SEQ ID NO: 1396132
aacuaucgggauagaaggg

SEQ ID NO: 1396134 - RNA, 19 nt, Artificial Sequence
  Description of Artificial Sequence: Synthetic oligonucleotide
  Sense strand starting at position 3612 of SEQ ID NO: 1243116
cugggugucauugguggaa

SEQ ID NO: 1396135 - RNA, 19 nt, Artificial Sequence
  Description of Artificial Sequence: Synthetic oligonucleotide
  Antisense strand to SEQ ID NO: 1396134
uuccaccaaugacacccag

SEQ ID NO: 1396136 - RNA, 19 nt, Artificial Sequence
  Description of Artificial Sequence: Synthetic oligonucleotide
  Sense strand starting at position 3615 of SEQ ID NO: 1243116
ggugucauugguggaauga

SEQ ID NO: 1396137 - RNA, 19 nt, Artificial Sequence
  Description of Artificial Sequence: Synthetic oligonucleotide
  Antisense strand to SEQ ID NO: 1396136
ucauuccaccaaugacacc

SEQ ID NO: 1396138 - RNA, 19 nt, Artificial Sequence
  Description of Artificial Sequence: Synthetic oligonucleotide
  Sense strand starting at position 3616 of SEQ ID NO: 1243116
gugucauugguggaaugac

SEQ ID NO: 1396139 - RNA, 19 nt, Artificial Sequence
  Description of Artificial Sequence: Synthetic oligonucleotide
  Antisense strand to SEQ ID NO: 1396138
gucauuccaccaaugacac

SEQ ID NO: 1396140 - RNA, 19 nt, Artificial Sequence
  Description of Artificial Sequence: Synthetic oligonucleotide
  Sense strand starting at position 3650 of SEQ ID NO: 1243116
aagagcagggucuguuaua

SEQ ID NO: 1396141 - RNA, 19 nt, Artificial Sequence
  Description of Artificial Sequence: Synthetic oligonucleotide
  Antisense strand to SEQ ID NO: 1396140
uauaacagacccugcucuu

SEQ ID NO: 1396142 - RNA, 19 nt, Artificial Sequence
  Description of Artificial Sequence: Synthetic oligonucleotide
  Sense strand starting at position 3651 of SEQ ID NO: 1243116
agagcagggucuguuauau

SEQ ID NO: 1396143 - RNA, 19 nt, Artificial Sequence
  Description of Artificial Sequence: Synthetic oligonucleotide
  Antisense strand to SEQ ID NO: 1396142
auauaacagacccugcucu

SEQ ID NO: 1396144 - RNA, 19 nt, Artificial Sequence
  Description of Artificial Sequence: Synthetic oligonucleotide
  Sense strand starting at position 3784 of SEQ ID NO: 1243116
ccucaucugccacagaaga

SEQ ID NO: 1396145 - RNA, 19 nt, Artificial Sequence
  Description of Artificial Sequence: Synthetic oligonucleotide
  Antisense strand to SEQ ID NO: 1396144
ucuucuguggcagaugagg

SEQ ID NO: 1396146 - RNA, 19 nt, Artificial Sequence
  Description of Artificial Sequence: Synthetic oligonucleotide
  Sense strand starting at position 3848 of SEQ ID NO: 1243116
uuagcacuucccugcagau

SEQ ID NO: 1396147 - RNA, 19 nt, Artificial Sequence
  Description of Artificial Sequence: Synthetic oligonucleotide
  Antisense strand to SEQ ID NO: 1396146
aucugcagggaagugcuaa

SEQ ID NO: 1396148 - RNA, 19 nt, Artificial Sequence
  Description of Artificial Sequence: Synthetic oligonucleotide
  Sense strand starting at position 3877 of SEQ ID NO: 1243116
ugggccaaccuuugggaaa

SEQ ID NO: 1396149 - RNA, 19 nt, Artificial Sequence
  Description of Artificial Sequence: Synthetic oligonucleotide
  Antisense strand to SEQ ID NO: 1396148
uuucccaaagguuggccca

SEQ ID NO: 1396150 - RNA, 19 nt, Artificial Sequence
  Description of Artificial Sequence: Synthetic oligonucleotide
  Sense strand starting at position 3891 of SEQ ID NO: 1243116
ggaaauggcugcuuagaga

SEQ ID NO: 1396151 - RNA, 19 nt, Artificial Sequence
  Description of Artificial Sequence: Synthetic oligonucleotide
  Antisense strand to SEQ ID NO: 1396150
ucucuaagcagccauuucc

SEQ ID NO: 1396152 - RNA, 19 nt, Artificial Sequence
  Description of Artificial Sequence: Synthetic oligonucleotide
  Sense strand starting at position 3911 of SEQ ID NO: 1243116
gucucagaagucuaacaca

SEQ ID NO: 1396153 - RNA, 19 nt, Artificial Sequence
  Description of Artificial Sequence: Synthetic oligonucleotide
  Antisense strand to SEQ ID NO: 1396152
uguguuagacuucugagac

SEQ ID NO: 1396154 - RNA, 19 nt, Artificial Sequence
  Description of Artificial Sequence: Synthetic oligonucleotide
  Sense strand starting at position 219 of SEQ ID NO: 1243117
cccugaagggucugggaaa

SEQ ID NO: 1396155 - RNA, 19 nt, Artificial Sequence
  Description of Artificial Sequence: Synthetic oligonucleotide
  Antisense strand to SEQ ID NO: 1396154
uuucccagacccuucaggg

SEQ ID NO: 1396156 - RNA, 19 nt, Artificial Sequence
  Description of Artificial Sequence: Synthetic oligonucleotide
  Sense strand starting at position 1048 of SEQ ID NO: 1243117
gauuaagagucagaauucu

SEQ ID NO: 1396157 - RNA, 19 nt, Artificial Sequence
  Description of Artificial Sequence: Synthetic oligonucleotide
  Antisense strand to SEQ ID NO: 1396156
agaauucugacucuuaauc

SEQ ID NO: 1396158 - RNA, 19 nt, Artificial Sequence
  Description of Artificial Sequence: Synthetic oligonucleotide
  Sense strand starting at position 1054 of SEQ ID NO: 1243117
gagucagaauucuucgagu

SEQ ID NO: 1396159 - RNA, 19 nt, Artificial Sequence
  Description of Artificial Sequence: Synthetic oligonucleotide
  Antisense strand to SEQ ID NO: 1396158
acucgaagaauucugacuc

SEQ ID NO: 1396160 - RNA, 19 nt, Artificial Sequence
  Description of Artificial Sequence: Synthetic oligonucleotide
  Sense strand starting at position 1056 of SEQ ID NO: 1243117
gucagaauucuucgagucc

SEQ ID NO: 1396161 - RNA, 19 nt, Artificial Sequence
  Description of Artificial Sequence: Synthetic oligonucleotide
  Antisense strand to SEQ ID NO: 1396160
ggacucgaagaauucugac

SEQ ID NO: 1396162 - RNA, 19 nt, Artificial Sequence
  Description of Artificial Sequence: Synthetic oligonucleotide
  Sense strand starting at position 1067 of SEQ ID NO: 1243117
ucgagucccuguuccuaaa

SEQ ID NO: 1396163 - RNA, 19 nt, Artificial Sequence
  Description of Artificial Sequence: Synthetic oligonucleotide
  Antisense strand to SEQ ID NO: 1396162
uuuaggaacagggacucga

SEQ ID NO: 1396164 - RNA, 19 nt, Artificial Sequence
  Description of Artificial Sequence: Synthetic oligonucleotide
  Sense strand starting at position 1209 of SEQ ID NO: 1243117
gguggaagcuuccuuaucu

SEQ ID NO: 1396165 - RNA, 19 nt, Artificial Sequence
  Description of Artificial Sequence: Synthetic oligonucleotide
  Antisense strand to SEQ ID NO: 1396164
agauaaggaagcuuccacc

SEQ ID NO: 1396166 - RNA, 19 nt, Artificial Sequence
  Description of Artificial Sequence: Synthetic oligonucleotide
  Sense strand starting at position 1285 of SEQ ID NO: 1243117
acucauuugcccuguuuga

SEQ ID NO: 1396167 - RNA, 19 nt, Artificial Sequence
  Description of Artificial Sequence: Synthetic oligonucleotide
  Antisense strand to SEQ ID NO: 1396166
ucaaacagggcaaaugagu

SEQ ID NO: 1396168 - RNA, 19 nt, Artificial Sequence
  Description of Artificial Sequence: Synthetic oligonucleotide
  Sense strand starting at position 1655 of SEQ ID NO: 1243117
gaguuauugccuggcuggu

SEQ ID NO: 1396169 - RNA, 19 nt, Artificial Sequence
  Description of Artificial Sequence: Synthetic oligonucleotide
  Antisense strand to SEQ ID NO: 1396168
accagccaggcaauaacuc

SEQ ID NO: 1396170 - RNA, 19 nt, Artificial Sequence
  Description of Artificial Sequence: Synthetic oligonucleotide
  Sense strand starting at position 1746 of SEQ ID NO: 1243117
guugaaugucugggcggau

SEQ ID NO: 1396171 - RNA, 19 nt, Artificial Sequence
  Description of Artificial Sequence: Synthetic oligonucleotide
  Antisense strand to SEQ ID NO: 1396170
auccgcccagacauucaac

SEQ ID NO: 1396172 - RNA, 19 nt, Artificial Sequence
  Description of Artificial Sequence: Synthetic oligonucleotide
  Sense strand starting at position 1747 of SEQ ID NO: 1243117
uugaaugucugggcggauu

SEQ ID NO: 1396173 - RNA, 19 nt, Artificial Sequence
  Description of Artificial Sequence: Synthetic oligonucleotide
  Antisense strand to SEQ ID NO: 1396172
aauccgcccagacauucaa

SEQ ID NO: 1396174 - RNA, 19 nt, Artificial Sequence
  Description of Artificial Sequence: Synthetic oligonucleotide
  Sense strand starting at position 1749 of SEQ ID NO: 1243117
gaaugucugggcggauuau

SEQ ID NO: 1396175 - RNA, 19 nt, Artificial Sequence
  Description of Artificial Sequence: Synthetic oligonucleotide
  Antisense strand to SEQ ID NO: 1396174
auaauccgcccagacauuc

SEQ ID NO: 1396176 - RNA, 19 nt, Artificial Sequence
  Description of Artificial Sequence: Synthetic oligonucleotide
  Sense strand starting at position 1758 of SEQ ID NO: 1243117
ggcggauuaucauugauug

SEQ ID NO: 1396177 - RNA, 19 nt, Artificial Sequence
  Description of Artificial Sequence: Synthetic oligonucleotide
  Antisense strand to SEQ ID NO: 1396176
caaucaaugauaauccgcc

SEQ ID NO: 1396178 - RNA, 19 nt, Artificial Sequence
  Description of Artificial Sequence: Synthetic oligonucleotide
  Sense strand starting at position 1762 of SEQ ID NO: 1243117
gauuaucauugauuggauc

SEQ ID NO: 1396179 - RNA, 19 nt, Artificial Sequence
  Description of Artificial Sequence: Synthetic oligonucleotide
  Antisense strand to SEQ ID NO: 1396178
gauccaaucaaugauaauc

SEQ ID NO: 1396180 - RNA, 19 nt, Artificial Sequence
  Description of Artificial Sequence: Synthetic oligonucleotide
  Sense strand starting at position 1809 of SEQ ID NO: 1243117
aucagugaugccgagaaag

SEQ ID NO: 1396181 - RNA, 19 nt, Artificial Sequence
  Description of Artificial Sequence: Synthetic oligonucleotide
  Antisense strand to SEQ ID NO: 1396180
cuuucucggcaucacugau

SEQ ID NO: 1396182 - RNA, 19 nt, Artificial Sequence
  Description of Artificial Sequence: Synthetic oligonucleotide
  Sense strand starting at position 1811 of SEQ ID NO: 1243117
cagugaugccgagaaagag

SEQ ID NO: 1396183 - RNA, 19 nt, Artificial Sequence
  Description of Artificial Sequence: Synthetic oligonucleotide
  Antisense strand to SEQ ID NO: 1396182
cucuuucucggcaucacug

SEQ ID NO: 1396184 - RNA, 19 nt, Artificial Sequence
  Description of Artificial Sequence: Synthetic oligonucleotide
  Sense strand starting at position 1819 of SEQ ID NO: 1243117
ccgagaaagagaugagcau

SEQ ID NO: 1396185 - RNA, 19 nt, Artificial Sequence
  Description of Artificial Sequence: Synthetic oligonucleotide
  Antisense strand to SEQ ID NO: 1396184
augcucaucucuuucucgg

SEQ ID NO: 1396186 - RNA, 19 nt, Artificial Sequence
  Description of Artificial Sequence: Synthetic oligonucleotide
  Sense strand starting at position 1923 of SEQ ID NO: 1243117
guuggaggauucucacuca

SEQ ID NO: 1396187 - RNA, 19 nt, Artificial Sequence
  Description of Artificial Sequence: Synthetic oligonucleotide
  Antisense strand to SEQ ID NO: 1396186
ugagugagaauccuccaac

SEQ ID NO: 1396188 - RNA, 19 nt, Artificial Sequence
  Description of Artificial Sequence: Synthetic oligonucleotide
  Sense strand starting at position 1926 of SEQ ID NO: 1243117
ggaggauucucacucacca

SEQ ID NO: 1396189 - RNA, 19 nt, Artificial Sequence
  Description of Artificial Sequence: Synthetic oligonucleotide
  Antisense strand to SEQ ID NO: 1396188
uggugagugagaauccucc

SEQ ID NO: 1396190 - RNA, 19 nt, Artificial Sequence
  Description of Artificial Sequence: Synthetic oligonucleotide
  Sense strand starting at position 2177 of SEQ ID NO: 1243117
caugucuugcgaugcaugu

SEQ ID NO: 1396191 - RNA, 19 nt, Artificial Sequence
  Description of Artificial Sequence: Synthetic oligonucleotide
  Antisense strand to SEQ ID NO: 1396190
acaugcaucgcaagacaug

SEQ ID NO: 1396192 - RNA, 19 nt, Artificial Sequence
  Description of Artificial Sequence: Synthetic oligonucleotide
  Sense strand starting at position 2183 of SEQ ID NO: 1243117
uugcgaugcaugucucacu

SEQ ID NO: 1396193 - RNA, 19 nt, Artificial Sequence
  Description of Artificial Sequence: Synthetic oligonucleotide
  Antisense strand to SEQ ID NO: 1396192
agugagacaugcaucgcaa

SEQ ID NO: 1396194 - RNA, 19 nt, Artificial Sequence
  Description of Artificial Sequence: Synthetic oligonucleotide
  Sense strand starting at position 2184 of SEQ ID NO: 1243117
ugcgaugcaugucucacua

SEQ ID NO: 1396195 - RNA, 19 nt, Artificial Sequence
  Description of Artificial Sequence: Synthetic oligonucleotide
  Antisense strand to SEQ ID NO: 1396194
uagugagacaugcaucgca

SEQ ID NO: 1396196 - RNA, 19 nt, Artificial Sequence
  Description of Artificial Sequence: Synthetic oligonucleotide
  Sense strand starting at position 2222 of SEQ ID NO: 1243117
uguucuuucucccaaagag

SEQ ID NO: 1396197 - RNA, 19 nt, Artificial Sequence
  Description of Artificial Sequence: Synthetic oligonucleotide
  Antisense strand to SEQ ID NO: 1396196
cucuuugggagaaagaaca

SEQ ID NO: 1396198 - RNA, 19 nt, Artificial Sequence
  Description of Artificial Sequence: Synthetic oligonucleotide
  Sense strand starting at position 2245 of SEQ ID NO: 1243117
uggaaugugccagaguuua

SEQ ID NO: 1396199 - RNA, 19 nt, Artificial Sequence
  Description of Artificial Sequence: Synthetic oligonucleotide
  Antisense strand to SEQ ID NO: 1396198
uaaacucuggcacauucca

SEQ ID NO: 1396200 - RNA, 19 nt, Artificial Sequence
  Description of Artificial Sequence: Synthetic oligonucleotide
  Sense strand starting at position 2279 of SEQ ID NO: 1243117
aaggcaucauucugggaga

SEQ ID NO: 1396201 - RNA, 19 nt, Artificial Sequence
  Description of Artificial Sequence: Synthetic oligonucleotide
  Antisense strand to SEQ ID NO: 1396200
ucucccagaaugaugccuu

SEQ ID NO: 1396202 - RNA, 19 nt, Artificial Sequence
  Description of Artificial Sequence: Synthetic oligonucleotide
  Sense strand starting at position 2280 of SEQ ID NO: 1243117
aggcaucauucugggagau

SEQ ID NO: 1396203 - RNA, 19 nt, Artificial Sequence
  Description of Artificial Sequence: Synthetic oligonucleotide
  Antisense strand to SEQ ID NO: 1396202
aucucccagaaugaugccu

SEQ ID NO: 1396204 - RNA, 19 nt, Artificial Sequence
  Description of Artificial Sequence: Synthetic oligonucleotide
  Sense strand starting at position 2281 of SEQ ID NO: 1243117
ggcaucauucugggagaua

SEQ ID NO: 1396205 - RNA, 19 nt, Artificial Sequence
  Description of Artificial Sequence: Synthetic oligonucleotide
  Antisense strand to SEQ ID NO: 1396204
uaucucccagaaugaugcc

SEQ ID NO: 1396206 - RNA, 19 nt, Artificial Sequence
  Description of Artificial Sequence: Synthetic oligonucleotide
  Sense strand starting at position 2282 of SEQ ID NO: 1243117
gcaucauucugggagauaa

SEQ ID NO: 1396207 - RNA, 19 nt, Artificial Sequence
  Description of Artificial Sequence: Synthetic oligonucleotide
  Antisense strand to SEQ ID NO: 1396206
uuaucucccagaaugaugc

SEQ ID NO: 1396208 - RNA, 19 nt, Artificial Sequence
  Description of Artificial Sequence: Synthetic oligonucleotide
  Sense strand starting at position 2514 of SEQ ID NO: 1243117
gcuagagugccaguagugu

SEQ ID NO: 1396209 - RNA, 19 nt, Artificial Sequence
  Description of Artificial Sequence: Synthetic oligonucleotide
  Antisense strand to SEQ ID NO: 1396208
acacuacuggcacucuagc

SEQ ID NO: 1396210 - RNA, 19 nt, Artificial Sequence
  Description of Artificial Sequence: Synthetic oligonucleotide
  Sense strand starting at position 2523 of SEQ ID NO: 1243117
ccaguagugugaucucggu

SEQ ID NO: 1396211 - RNA, 19 nt, Artificial Sequence
  Description of Artificial Sequence: Synthetic oligonucleotide
  Antisense strand to SEQ ID NO: 1396210
accgagaucacacuacugg

SEQ ID NO: 1396212 - RNA, 19 nt, Artificial Sequence
  Description of Artificial Sequence: Synthetic oligonucleotide
  Sense strand starting at position 2679 of SEQ ID NO: 1243117
cggccagaguggucucaau

SEQ ID NO: 1396213 - RNA, 19 nt, Artificial Sequence
  Description of Artificial Sequence: Synthetic oligonucleotide
  Antisense strand to SEQ ID NO: 1396212
auugagaccacucuggccg

SEQ ID NO: 1396214 - RNA, 19 nt, Artificial Sequence
  Description of Artificial Sequence: Synthetic oligonucleotide
  Sense strand starting at position 2850 of SEQ ID NO: 1243117
gggcuuuguggauguacuu

SEQ ID NO: 1396215 - RNA, 19 nt, Artificial Sequence
  Description of Artificial Sequence: Synthetic oligonucleotide
  Antisense strand to SEQ ID NO: 1396214
aaguacauccacaaagccc

SEQ ID NO: 1396216 - RNA, 19 nt, Artificial Sequence
  Description of Artificial Sequence: Synthetic oligonucleotide
  Sense strand starting at position 2857 of SEQ ID NO: 1243117
guggauguacuuuggcaga

SEQ ID NO: 1396217 - RNA, 19 nt, Artificial Sequence
  Description of Artificial Sequence: Synthetic oligonucleotide
  Antisense strand to SEQ ID NO: 1396216
ucugccaaaguacauccac

SEQ ID NO: 1396218 - RNA, 19 nt, Artificial Sequence
  Description of Artificial Sequence: Synthetic oligonucleotide
  Sense strand starting at position 2859 of SEQ ID NO: 1243117
ggauguacuuuggcagaca

SEQ ID NO: 1396219 - RNA, 19 nt, Artificial Sequence
  Description of Artificial Sequence: Synthetic oligonucleotide
  Antisense strand to SEQ ID NO: 1396218
ugucugccaaaguacaucc

SEQ ID NO: 1396220 - RNA, 19 nt, Artificial Sequence
  Description of Artificial Sequence: Synthetic oligonucleotide
  Sense strand starting at position 2862 of SEQ ID NO: 1243117
uguacuuuggcagacacaa

SEQ ID NO: 1396221 - RNA, 19 nt, Artificial Sequence
  Description of Artificial Sequence: Synthetic oligonucleotide
  Antisense strand to SEQ ID NO: 1396220
uugugucugccaaaguaca

SEQ ID NO: 1396222 - RNA, 19 nt, Artificial Sequence
  Description of Artificial Sequence: Synthetic oligonucleotide
  Sense strand starting at position 3654 of SEQ ID NO: 1243117
gcaagaugcuuuguggucu

SEQ ID NO: 1396223 - RNA, 19 nt, Artificial Sequence
  Description of Artificial Sequence: Synthetic oligonucleotide
  Antisense strand to SEQ ID NO: 1396222
agaccacaaagcaucuugc

SEQ ID NO: 1396224 - RNA, 19 nt, Artificial Sequence
  Description of Artificial Sequence: Synthetic oligonucleotide
  Sense strand starting at position 3714 of SEQ ID NO: 1243117
agauguaguucccauccca

SEQ ID NO: 1396225 - RNA, 19 nt, Artificial Sequence
  Description of Artificial Sequence: Synthetic oligonucleotide
  Antisense strand to SEQ ID NO: 1396224
ugggaugggaacuacaucu

SEQ ID NO: 1396226 - RNA, 19 nt, Artificial Sequence
  Description of Artificial Sequence: Synthetic oligonucleotide
  Sense strand starting at position 3823 of SEQ ID NO: 1243117
cagcccugucuaggaguau

SEQ ID NO: 1396227 - RNA, 19 nt, Artificial Sequence
  Description of Artificial Sequence: Synthetic oligonucleotide
  Antisense strand to SEQ ID NO: 1396226
auacuccuagacagggcug

SEQ ID NO: 1396228 - RNA, 19 nt, Artificial Sequence
  Description of Artificial Sequence: Synthetic oligonucleotide
  Sense strand starting at position 3945 of SEQ ID NO: 1243117
aaguguucagguggccaga

SEQ ID NO: 1396229 - RNA, 19 nt, Artificial Sequence
  Description of Artificial Sequence: Synthetic oligonucleotide
  Antisense strand to SEQ ID NO: 1396228
ucuggccaccugaacacuu

SEQ ID NO: 1396230 - RNA, 19 nt, Artificial Sequence
  Description of Artificial Sequence: Synthetic oligonucleotide
  Sense strand starting at position 3947 of SEQ ID NO: 1243117
guguucagguggccagaau

SEQ ID NO: 1396231 - RNA, 19 nt, Artificial Sequence
  Description of Artificial Sequence: Synthetic oligonucleotide
  Antisense strand to SEQ ID NO: 1396230
auucuggccaccugaacac

SEQ ID NO: 1396232 - RNA, 19 nt, Artificial Sequence
  Description of Artificial Sequence: Synthetic oligonucleotide
  Sense strand starting at position 3948 of SEQ ID NO: 1243117
uguucagguggccagaauu

SEQ ID NO: 1396233 - RNA, 19 nt, Artificial Sequence
  Description of Artificial Sequence: Synthetic oligonucleotide
  Antisense strand to SEQ ID NO: 1396232
aauucuggccaccugaaca

SEQ ID NO: 1396234 - RNA, 19 nt, Artificial Sequence
  Description of Artificial Sequence: Synthetic oligonucleotide
  Sense strand starting at position 142 of SEQ ID NO: 1243118
gucuccuuuaaggauguga

SEQ ID NO: 1396235 - RNA, 19 nt, Artificial Sequence
  Description of Artificial Sequence: Synthetic oligonucleotide
  Antisense strand to SEQ ID NO: 1396234
ucacauccuuaaaggagac

SEQ ID NO: 1396236 - RNA, 19 nt, Artificial Sequence
  Description of Artificial Sequence: Synthetic oligonucleotide
  Sense strand starting at position 144 of SEQ ID NO: 1243118
cuccuuuaaggaugugaaa

SEQ ID NO: 1396237 - RNA, 19 nt, Artificial Sequence
  Description of Artificial Sequence: Synthetic oligonucleotide
  Antisense strand to SEQ ID NO: 1396236
uuucacauccuuaaaggag

SEQ ID NO: 1396238 - RNA, 19 nt, Artificial Sequence
  Description of Artificial Sequence: Synthetic oligonucleotide
  Sense strand starting at position 146 of SEQ ID NO: 1243118
ccuuuaaggaugugaaaug

SEQ ID NO: 1396239 - RNA, 19 nt, Artificial Sequence
  Description of Artificial Sequence: Synthetic oligonucleotide
  Antisense strand to SEQ ID NO: 1396238
cauuucacauccuuaaagg

SEQ ID NO: 1396240 - RNA, 19 nt, Artificial Sequence
  Description of Artificial Sequence: Synthetic oligonucleotide
  Sense strand starting at position 205 of SEQ ID NO: 1243118
agauacgacuacucagauu

SEQ ID NO: 1396241 - RNA, 19 nt, Artificial Sequence
  Description of Artificial Sequence: Synthetic oligonucleotide
  Antisense strand to SEQ ID NO: 1396240
aaucugaguagucguaucu

SEQ ID NO: 1396242 - RNA, 19 nt, Artificial Sequence
  Description of Artificial Sequence: Synthetic oligonucleotide
  Sense strand starting at position 286 of SEQ ID NO: 1243118
gcagacagggcucaucaua

SEQ ID NO: 1396243 - RNA, 19 nt, Artificial Sequence
  Description of Artificial Sequence: Synthetic oligonucleotide
  Antisense strand to SEQ ID NO: 1396242
uaugaugagcccugucugc

SEQ ID NO: 1396244 - RNA, 19 nt, Artificial Sequence
  Description of Artificial Sequence: Synthetic oligonucleotide
  Sense strand starting at position 322 of SEQ ID NO: 1243118
gaacgaaggcucuggaaac

SEQ ID NO: 1396245 - RNA, 19 nt, Artificial Sequence
  Description of Artificial Sequence: Synthetic oligonucleotide
  Antisense strand to SEQ ID NO: 1396244
guuuccagagccuucguuc

SEQ ID NO: 1396246 - RNA, 19 nt, Artificial Sequence
  Description of Artificial Sequence: Synthetic oligonucleotide
  Sense strand starting at position 391 of SEQ ID NO: 1243118
uagagaaacuugguuaccu

SEQ ID NO: 1396247 - RNA, 19 nt, Artificial Sequence
  Description of Artificial Sequence: Synthetic oligonucleotide
  Antisense strand to SEQ ID NO: 1396246
agguaaccaaguuucucua

SEQ ID NO: 1396248 - RNA, 19 nt, Artificial Sequence
  Description of Artificial Sequence: Synthetic oligonucleotide
  Sense strand starting at position 392 of SEQ ID NO: 1243118
agagaaacuugguuaccua

SEQ ID NO: 1396249 - RNA, 19 nt, Artificial Sequence
  Description of Artificial Sequence: Synthetic oligonucleotide
  Antisense strand to SEQ ID NO: 1396248
uagguaaccaaguuucucu

SEQ ID NO: 1396250 - RNA, 19 nt, Artificial Sequence
  Description of Artificial Sequence: Synthetic oligonucleotide
  Sense strand starting at position 395 of SEQ ID NO: 1243118
gaaacuugguuaccuagga

SEQ ID NO: 1396251 - RNA, 19 nt, Artificial Sequence
  Description of Artificial Sequence: Synthetic oligonucleotide
  Antisense strand to SEQ ID NO: 1396250
uccuagguaaccaaguuuc

SEQ ID NO: 1396252 - RNA, 19 nt, Artificial Sequence
  Description of Artificial Sequence: Synthetic oligonucleotide
  Sense strand starting at position 457 of SEQ ID NO: 1243118
aguagauagaggugcugaa

SEQ ID NO: 1396253 - RNA, 19 nt, Artificial Sequence
  Description of Artificial Sequence: Synthetic oligonucleotide
  Antisense strand to SEQ ID NO: 1396252
uucagcaccucuaucuacu

SEQ ID NO: 1396254 - RNA, 19 nt, Artificial Sequence
  Description of Artificial Sequence: Synthetic oligonucleotide
  Sense strand starting at position 470 of SEQ ID NO: 1243118
gcugaagaggucugaaaug

SEQ ID NO: 1396255 - RNA, 19 nt, Artificial Sequence
  Description of Artificial Sequence: Synthetic oligonucleotide
  Antisense strand to SEQ ID NO: 1396254
cauuucagaccucuucagc

SEQ ID NO: 1396256 - RNA, 19 nt, Artificial Sequence
  Description of Artificial Sequence: Synthetic oligonucleotide
  Sense strand starting at position 475 of SEQ ID NO: 1243118
agaggucugaaaugcugau

SEQ ID NO: 1396257 - RNA, 19 nt, Artificial Sequence
  Description of Artificial Sequence: Synthetic oligonucleotide
  Antisense strand to SEQ ID NO: 1396256
aucagcauuucagaccucu

SEQ ID NO: 1396258 - RNA, 19 nt, Artificial Sequence
  Description of Artificial Sequence: Synthetic oligonucleotide
  Sense strand starting at position 501 of SEQ ID NO: 1243118
gaaggugagucaccacuuu

SEQ ID NO: 1396259 - RNA, 19 nt, Artificial Sequence
  Description of Artificial Sequence: Synthetic oligonucleotide
  Antisense strand to SEQ ID NO: 1396258
aaaguggugacucaccuuc

SEQ ID NO: 1396260 - RNA, 19 nt, Artificial Sequence
  Description of Artificial Sequence: Synthetic oligonucleotide
  Sense strand starting at position 643 of SEQ ID NO: 1243118
uguucuuaagcguuaugua

SEQ ID NO: 1396261 - RNA, 19 nt, Artificial Sequence
  Description of Artificial Sequence: Synthetic oligonucleotide
  Antisense strand to SEQ ID NO: 1396260
uacauaacgcuuaagaaca

SEQ ID NO: 1396262 - RNA, 19 nt, Artificial Sequence
  Description of Artificial Sequence: Synthetic oligonucleotide
  Sense strand starting at position 665 of SEQ ID NO: 1243118
guuaguuguagguaauauc

SEQ ID NO: 1396263 - RNA, 19 nt, Artificial Sequence
  Description of Artificial Sequence: Synthetic oligonucleotide
  Antisense strand to SEQ ID NO: 1396262
gauauuaccuacaacuaac

SEQ ID NO: 1396264 - RNA, 19 nt, Artificial Sequence
  Description of Artificial Sequence: Synthetic oligonucleotide
  Sense strand starting at position 1385 of SEQ ID NO: 1243118
ggaucaagccgcuauccaa

SEQ ID NO: 1396265 - RNA, 19 nt, Artificial Sequence
  Description of Artificial Sequence: Synthetic oligonucleotide
  Antisense strand to SEQ ID NO: 1396264
uuggauagcggcuugaucc

SEQ ID NO: 1396266 - RNA, 19 nt, Artificial Sequence
  Description of Artificial Sequence: Synthetic oligonucleotide
  Sense strand starting at position 2182 of SEQ ID NO: 1243118
ggaucugguggauguagau

SEQ ID NO: 1396267 - RNA, 19 nt, Artificial Sequence
  Description of Artificial Sequence: Synthetic oligonucleotide
  Antisense strand to SEQ ID NO: 1396266
aucuacauccaccagaucc

SEQ ID NO: 1396268 - RNA, 19 nt, Artificial Sequence
  Description of Artificial Sequence: Synthetic oligonucleotide
  Sense strand starting at position 2192 of SEQ ID NO: 1243118
gauguagauauauggguuu

SEQ ID NO: 1396269 - RNA, 19 nt, Artificial Sequence
  Description of Artificial Sequence: Synthetic oligonucleotide
  Antisense strand to SEQ ID NO: 1396268
aaacccauauaucuacauc

SEQ ID NO: 1396270 - RNA, 19 nt, Artificial Sequence
  Description of Artificial Sequence: Synthetic oligonucleotide
  Sense strand starting at position 2195 of SEQ ID NO: 1243118
guagauauauggguuuaua

SEQ ID NO: 1396271 - RNA, 19 nt, Artificial Sequence
  Description of Artificial Sequence: Synthetic oligonucleotide
  Antisense strand to SEQ ID NO: 1396270
uauaaacccauauaucuac

SEQ ID NO: 1396272 - RNA, 19 nt, Artificial Sequence
  Description of Artificial Sequence: Synthetic oligonucleotide
  Sense strand starting at position 2198 of SEQ ID NO: 1243118
gauauauggguuuauaguu

SEQ ID NO: 1396273 - RNA, 19 nt, Artificial Sequence
  Description of Artificial Sequence: Synthetic oligonucleotide
  Antisense strand to SEQ ID NO: 1396272
aacuauaaacccauauauc

SEQ ID NO: 1396274 - RNA, 19 nt, Artificial Sequence
  Description of Artificial Sequence: Synthetic oligonucleotide
  Sense strand starting at position 2288 of SEQ ID NO: 1243118
cgcucaaaccaggauucua

SEQ ID NO: 1396275 - RNA, 19 nt, Artificial Sequence
  Description of Artificial Sequence: Synthetic oligonucleotide
  Antisense strand to SEQ ID NO: 1396274
uagaauccugguuugagcg

SEQ ID NO: 1396276 - RNA, 19 nt, Artificial Sequence
  Description of Artificial Sequence: Synthetic oligonucleotide
  Sense strand starting at position 2301 of SEQ ID NO: 1243118
auucuagcaguugaguuau

SEQ ID NO: 1396277 - RNA, 19 nt, Artificial Sequence
  Description of Artificial Sequence: Synthetic oligonucleotide
  Antisense strand to SEQ ID NO: 1396276
auaacucaacugcuagaau

SEQ ID NO: 1396278 - RNA, 19 nt, Artificial Sequence
  Description of Artificial Sequence: Synthetic oligonucleotide
  Sense strand starting at position 2476 of SEQ ID NO: 1243118
ggcauacuuacggagaauu

SEQ ID NO: 1396279 - RNA, 19 nt, Artificial Sequence
  Description of Artificial Sequence: Synthetic oligonucleotide
  Antisense strand to SEQ ID NO: 1396278
aauucuccguaaguaugcc

SEQ ID NO: 1396280 - RNA, 19 nt, Artificial Sequence
  Description of Artificial Sequence: Synthetic oligonucleotide
  Sense strand starting at position 2885 of SEQ ID NO: 1243118
gauuucuucugugagggaa

SEQ ID NO: 1396281 - RNA, 19 nt, Artificial Sequence
  Description of Artificial Sequence: Synthetic oligonucleotide
  Antisense strand to SEQ ID NO: 1396280
uucccucacagaagaaauc

SEQ ID NO: 1396282 - RNA, 19 nt, Artificial Sequence
  Description of Artificial Sequence: Synthetic oligonucleotide
  Sense strand starting at position 2888 of SEQ ID NO: 1243118
uucuucugugagggaagaa

SEQ ID NO: 1396283 - RNA, 19 nt, Artificial Sequence
  Description of Artificial Sequence: Synthetic oligonucleotide
  Antisense strand to SEQ ID NO: 1396282
uucuucccucacagaagaa

SEQ ID NO: 1396284 - RNA, 19 nt, Artificial Sequence
  Description of Artificial Sequence: Synthetic oligonucleotide
  Sense strand starting at position 2958 of SEQ ID NO: 1243118
caugaucuucccugggacu

SEQ ID NO: 1396285 - RNA, 19 nt, Artificial Sequence
  Description of Artificial Sequence: Synthetic oligonucleotide
  Antisense strand to SEQ ID NO: 1396284
agucccagggaagaucaug

SEQ ID NO: 1396286 - RNA, 19 nt, Artificial Sequence
  Description of Artificial Sequence: Synthetic oligonucleotide
  Sense strand starting at position 3032 of SEQ ID NO: 1243118
agaguacacucaguuaucu

SEQ ID NO: 1396287 - RNA, 19 nt, Artificial Sequence
  Description of Artificial Sequence: Synthetic oligonucleotide
  Antisense strand to SEQ ID NO: 1396286
agauaacugaguguacucu

SEQ ID NO: 1396288 - RNA, 19 nt, Artificial Sequence
  Description of Artificial Sequence: Synthetic oligonucleotide
  Sense strand starting at position 3137 of SEQ ID NO: 1243118
aaauauuguggcuauagua

SEQ ID NO: 1396289 - RNA, 19 nt, Artificial Sequence
  Description of Artificial Sequence: Synthetic oligonucleotide
  Antisense strand to SEQ ID NO: 1396288
uacuauagccacaauauuu

SEQ ID NO: 1396290 - RNA, 19 nt, Artificial Sequence
  Description of Artificial Sequence: Synthetic oligonucleotide
  Sense strand starting at position 3260 of SEQ ID NO: 1243118
acuguaagugcucacugaa

SEQ ID NO: 1396291 - RNA, 19 nt, Artificial Sequence
  Description of Artificial Sequence: Synthetic oligonucleotide
  Antisense strand to SEQ ID NO: 1396290
uucagugagcacuuacagu

SEQ ID NO: 1396292 - RNA, 19 nt, Artificial Sequence
  Description of Artificial Sequence: Synthetic oligonucleotide
  Sense strand starting at position 3267 of SEQ ID NO: 1243118
gugcucacugaacauuauu

SEQ ID NO: 1396293 - RNA, 19 nt, Artificial Sequence
  Description of Artificial Sequence: Synthetic oligonucleotide
  Antisense strand to SEQ ID NO: 1396292
aauaauguucagugagcac

SEQ ID NO: 1396294 - RNA, 19 nt, Artificial Sequence
  Description of Artificial Sequence: Synthetic oligonucleotide
  Sense strand starting at position 3333 of SEQ ID NO: 1243118
cuuuguguggauuaugcaa

SEQ ID NO: 1396295 - RNA, 19 nt, Artificial Sequence
  Description of Artificial Sequence: Synthetic oligonucleotide
  Antisense strand to SEQ ID NO: 1396294
uugcauaauccacacaaag

SEQ ID NO: 1396296 - RNA, 19 nt, Artificial Sequence
  Description of Artificial Sequence: Synthetic oligonucleotide
  Sense strand starting at position 3375 of SEQ ID NO: 1243118
gagucugugccaucugugu

SEQ ID NO: 1396297 - RNA, 19 nt, Artificial Sequence
  Description of Artificial Sequence: Synthetic oligonucleotide
  Antisense strand to SEQ ID NO: 1396296
acacagauggcacagacuc

SEQ ID NO: 1396298 - RNA, 19 nt, Artificial Sequence
  Description of Artificial Sequence: Synthetic oligonucleotide
  Sense strand starting at position 3428 of SEQ ID NO: 1243118
agaugcuguaguuggaaau

SEQ ID NO: 1396299 - RNA, 19 nt, Artificial Sequence
  Description of Artificial Sequence: Synthetic oligonucleotide
  Antisense strand to SEQ ID NO: 1396298
auuuccaacuacagcaucu

SEQ ID NO: 1396300 - RNA, 19 nt, Artificial Sequence
  Description of Artificial Sequence: Synthetic oligonucleotide
  Sense strand starting at position 3454 of SEQ ID NO: 1243118
gggaauggucucuguagga

SEQ ID NO: 1396301 - RNA, 19 nt, Artificial Sequence
  Description of Artificial Sequence: Synthetic oligonucleotide
  Antisense strand to SEQ ID NO: 1396300
uccuacagagaccauuccc

SEQ ID NO: 1396302 - RNA, 19 nt, Artificial Sequence
  Description of Artificial Sequence: Synthetic oligonucleotide
  Sense strand starting at position 3495 of SEQ ID NO: 1243118
augagagauccaggcuucu

SEQ ID NO: 1396303 - RNA, 19 nt, Artificial Sequence
  Description of Artificial Sequence: Synthetic oligonucleotide
  Antisense strand to SEQ ID NO: 1396302
agaagccuggaucucucau

SEQ ID NO: 1396304 - RNA, 19 nt, Artificial Sequence
  Description of Artificial Sequence: Synthetic oligonucleotide
  Sense strand starting at position 3518 of SEQ ID NO: 1243118
guuuccauaugucucagaa

SEQ ID NO: 1396305 - RNA, 19 nt, Artificial Sequence
  Description of Artificial Sequence: Synthetic oligonucleotide
  Antisense strand to SEQ ID NO: 1396304
uucugagacauauggaaac

SEQ ID NO: 1396306 - RNA, 19 nt, Artificial Sequence
  Description of Artificial Sequence: Synthetic oligonucleotide
  Sense strand starting at position 3714 of SEQ ID NO: 1243118
gcgaguguggcauugcuga

SEQ ID NO: 1396307 - RNA, 19 nt, Artificial Sequence
  Description of Artificial Sequence: Synthetic oligonucleotide
  Antisense strand to SEQ ID NO: 1396306
ucagcaaugccacacucgc

SEQ ID NO: 1396308 - RNA, 19 nt, Artificial Sequence
  Description of Artificial Sequence: Synthetic oligonucleotide
  Sense strand starting at position 3787 of SEQ ID NO: 1243118
guuauuuccugccuuauug

SEQ ID NO: 1396309 - RNA, 19 nt, Artificial Sequence
  Description of Artificial Sequence: Synthetic oligonucleotide
  Antisense strand to SEQ ID NO: 1396308
caauaaggcaggaaauaac

SEQ ID NO: 1396310 - RNA, 19 nt, Artificial Sequence
  Description of Artificial Sequence: Synthetic oligonucleotide
  Sense strand starting at position 3836 of SEQ ID NO: 1243118
agugauuagacagggcuuu

SEQ ID NO: 1396311 - RNA, 19 nt, Artificial Sequence
  Description of Artificial Sequence: Synthetic oligonucleotide
  Antisense strand to SEQ ID NO: 1396310
aaagcccugucuaaucacu

SEQ ID NO: 1396312 - RNA, 19 nt, Artificial Sequence
  Description of Artificial Sequence: Synthetic oligonucleotide
  Sense strand starting at position 3931 of SEQ ID NO: 1243118
gagggaggcugccuugaaa

SEQ ID NO: 1396313 - RNA, 19 nt, Artificial Sequence
  Description of Artificial Sequence: Synthetic oligonucleotide
  Antisense strand to SEQ ID NO: 1396312
uuucaaggcagccucccuc

SEQ ID NO: 1396314 - RNA, 19 nt, Artificial Sequence
  Description of Artificial Sequence: Synthetic oligonucleotide
  Sense strand starting at position 100 of SEQ ID NO: 1243119
cuaagcaacccagauaagu

SEQ ID NO: 1396315 - RNA, 19 nt, Artificial Sequence
  Description of Artificial Sequence: Synthetic oligonucleotide
  Antisense strand to SEQ ID NO: 1396314
acuuaucuggguugcuuag

SEQ ID NO: 1396316 - RNA, 19 nt, Artificial Sequence
  Description of Artificial Sequence: Synthetic oligonucleotide
  Sense strand starting at position 300 of SEQ ID NO: 1243119
aguguaaaccauugucaca

SEQ ID NO: 1396317 - RNA, 19 nt, Artificial Sequence
  Description of Artificial Sequence: Synthetic oligonucleotide
  Antisense strand to SEQ ID NO: 1396316
ugugacaaugguuuacacu

SEQ ID NO: 1396318 - RNA, 19 nt, Artificial Sequence
  Description of Artificial Sequence: Synthetic oligonucleotide
  Sense strand starting at position 302 of SEQ ID NO: 1243119
uguaaaccauugucacaga

SEQ ID NO: 1396319 - RNA, 19 nt, Artificial Sequence
  Description of Artificial Sequence: Synthetic oligonucleotide
  Antisense strand to SEQ ID NO: 1396318
ucugugacaaugguuuaca

SEQ ID NO: 1396320 - RNA, 19 nt, Artificial Sequence
  Description of Artificial Sequence: Synthetic oligonucleotide
  Sense strand starting at position 397 of SEQ ID NO: 1243119
agggcagaucugcacauua

SEQ ID NO: 1396321 - RNA, 19 nt, Artificial Sequence
  Description of Artificial Sequence: Synthetic oligonucleotide
  Antisense strand to SEQ ID NO: 1396320
uaaugugcagaucugcccu

SEQ ID NO: 1396322 - RNA, 19 nt, Artificial Sequence
  Description of Artificial Sequence: Synthetic oligonucleotide
  Sense strand starting at position 399 of SEQ ID NO: 1243119
ggcagaucugcacauuaau

SEQ ID NO: 1396323 - RNA, 19 nt, Artificial Sequence
  Description of Artificial Sequence: Synthetic oligonucleotide
  Antisense strand to SEQ ID NO: 1396322
auuaaugugcagaucugcc

SEQ ID NO: 1396324 - RNA, 19 nt, Artificial Sequence
  Description of Artificial Sequence: Synthetic oligonucleotide
  Sense strand starting at position 402 of SEQ ID NO: 1243119
agaucugcacauuaaugua

SEQ ID NO: 1396325 - RNA, 19 nt, Artificial Sequence
  Description of Artificial Sequence: Synthetic oligonucleotide
  Antisense strand to SEQ ID NO: 1396324
uacauuaaugugcagaucu

SEQ ID NO: 1396326 - RNA, 19 nt, Artificial Sequence
  Description of Artificial Sequence: Synthetic oligonucleotide
  Sense strand starting at position 469 of SEQ ID NO: 1243119
gaaccugucuguuuggaaa

SEQ ID NO: 1396327 - RNA, 19 nt, Artificial Sequence
  Description of Artificial Sequence: Synthetic oligonucleotide
  Antisense strand to SEQ ID NO: 1396326
uuuccaaacagacagguuc

SEQ ID NO: 1396328 - RNA, 19 nt, Artificial Sequence
  Description of Artificial Sequence: Synthetic oligonucleotide
  Sense strand starting at position 520 of SEQ ID NO: 1243119
aguuucuucuggucuuuaa

SEQ ID NO: 1396329 - RNA, 19 nt, Artificial Sequence
  Description of Artificial Sequence: Synthetic oligonucleotide
  Antisense strand to SEQ ID NO: 1396328
uuaaagaccagaagaaacu

SEQ ID NO: 1396330 - RNA, 19 nt, Artificial Sequence
  Description of Artificial Sequence: Synthetic oligonucleotide
  Sense strand starting at position 571 of SEQ ID NO: 1243119
cacugauauguguguauuu

SEQ ID NO: 1396331 - RNA, 19 nt, Artificial Sequence
  Description of Artificial Sequence: Synthetic oligonucleotide
  Antisense strand to SEQ ID NO: 1396330
aaauacacacauaucagug

SEQ ID NO: 1396332 - RNA, 19 nt, Artificial Sequence
  Description of Artificial Sequence: Synthetic oligonucleotide
  Sense strand starting at position 652 of SEQ ID NO: 1243119
ugugaacacugacccauau

SEQ ID NO: 1396333 - RNA, 19 nt, Artificial Sequence
  Description of Artificial Sequence: Synthetic oligonucleotide
  Antisense strand to SEQ ID NO: 1396332
auaugggucaguguucaca

SEQ ID NO: 1396334 - RNA, 19 nt, Artificial Sequence
  Description of Artificial Sequence: Synthetic oligonucleotide
  Sense strand starting at position 682 of SEQ ID NO: 1243119
ucuacaucacagugcuaca

SEQ ID NO: 1396335 - RNA, 19 nt, Artificial Sequence
  Description of Artificial Sequence: Synthetic oligonucleotide
  Antisense strand to SEQ ID NO: 1396334
uguagcacugugauguaga

SEQ ID NO: 1396336 - RNA, 19 nt, Artificial Sequence
  Description of Artificial Sequence: Synthetic oligonucleotide
  Sense strand starting at position 707 of SEQ ID NO: 1243119
gccgcauuucuagagucga

SEQ ID NO: 1396337 - RNA, 19 nt, Artificial Sequence
  Description of Artificial Sequence: Synthetic oligonucleotide
  Antisense strand to SEQ ID NO: 1396336
ucgacucuagaaaugcggc

SEQ ID NO: 1396338 - RNA, 19 nt, Artificial Sequence
  Description of Artificial Sequence: Synthetic oligonucleotide
  Sense strand starting at position 987 of SEQ ID NO: 1243119
ccacguuuacugcagagua

SEQ ID NO: 1396339 - RNA, 19 nt, Artificial Sequence
  Description of Artificial Sequence: Synthetic oligonucleotide
  Antisense strand to SEQ ID NO: 1396338
uacucugcaguaaacgugg

SEQ ID NO: 1396340 - RNA, 19 nt, Artificial Sequence
  Description of Artificial Sequence: Synthetic oligonucleotide
  Sense strand starting at position 1040 of SEQ ID NO: 1243119
uccguuugggcacacagau

SEQ ID NO: 1396341 - RNA, 19 nt, Artificial Sequence
  Description of Artificial Sequence: Synthetic oligonucleotide
  Antisense strand to SEQ ID NO: 1396340
aucugugugcccaaacgga

SEQ ID NO: 1396342 - RNA, 19 nt, Artificial Sequence
  Description of Artificial Sequence: Synthetic oligonucleotide
  Sense strand starting at position 1062 of SEQ ID NO: 1243119
uggguggucguccagagaa

SEQ ID NO: 1396343 - RNA, 19 nt, Artificial Sequence
  Description of Artificial Sequence: Synthetic oligonucleotide
  Antisense strand to SEQ ID NO: 1396342
uucucuggacgaccaccca

SEQ ID NO: 1396344 - RNA, 19 nt, Artificial Sequence
  Description of Artificial Sequence: Synthetic oligonucleotide
  Sense strand starting at position 1137 of SEQ ID NO: 1243119
ucccuuuacucccugggaa

SEQ ID NO: 1396345 - RNA, 19 nt, Artificial Sequence
  Description of Artificial Sequence: Synthetic oligonucleotide
  Antisense strand to SEQ ID NO: 1396344
uucccagggaguaaaggga

SEQ ID NO: 1396346 - RNA, 19 nt, Artificial Sequence
  Description of Artificial Sequence: Synthetic oligonucleotide
  Sense strand starting at position 1138 of SEQ ID NO: 1243119
cccuuuacucccugggaag

SEQ ID NO: 1396347 - RNA, 19 nt, Artificial Sequence
  Description of Artificial Sequence: Synthetic oligonucleotide
  Antisense strand to SEQ ID NO: 1396346
cuucccagggaguaaaggg

SEQ ID NO: 1396348 - RNA, 19 nt, Artificial Sequence
  Description of Artificial Sequence: Synthetic oligonucleotide
  Sense strand starting at position 1139 of SEQ ID NO: 1243119
ccuuuacucccugggaagu

SEQ ID NO: 1396349 - RNA, 19 nt, Artificial Sequence
  Description of Artificial Sequence: Synthetic oligonucleotide
  Antisense strand to SEQ ID NO: 1396348
acuucccagggaguaaagg

SEQ ID NO: 1396350 - RNA, 19 nt, Artificial Sequence
  Description of Artificial Sequence: Synthetic oligonucleotide
  Sense strand starting at position 1140 of SEQ ID NO: 1243119
cuuuacucccugggaagua

SEQ ID NO: 1396351 - RNA, 19 nt, Artificial Sequence
  Description of Artificial Sequence: Synthetic oligonucleotide
  Antisense strand to SEQ ID NO: 1396350
uacuucccagggaguaaag

SEQ ID NO: 1396352 - RNA, 19 nt, Artificial Sequence
  Description of Artificial Sequence: Synthetic oligonucleotide
  Sense strand starting at position 1222 of SEQ ID NO: 1243119
ccaggaacguaaggaauuu

SEQ ID NO: 1396353 - RNA, 19 nt, Artificial Sequence
  Description of Artificial Sequence: Synthetic oligonucleotide
  Antisense strand to SEQ ID NO: 1396352
aaauuccuuacguuccugg

SEQ ID NO: 1396354 - RNA, 19 nt, Artificial Sequence
  Description of Artificial Sequence: Synthetic oligonucleotide
  Sense strand starting at position 1233 of SEQ ID NO: 1243119
aggaauuugucuuaacaac

SEQ ID NO: 1396355 - RNA, 19 nt, Artificial Sequence
  Description of Artificial Sequence: Synthetic oligonucleotide
  Antisense strand to SEQ ID NO: 1396354
guuguuaagacaaauuccu

SEQ ID NO: 1396356 - RNA, 19 nt, Artificial Sequence
  Description of Artificial Sequence: Synthetic oligonucleotide
  Sense strand starting at position 1248 of SEQ ID NO: 1243119
caacgaaagcugggagaau

SEQ ID NO: 1396357 - RNA, 19 nt, Artificial Sequence
  Description of Artificial Sequence: Synthetic oligonucleotide
  Antisense strand to SEQ ID NO: 1396356
auucucccagcuuucguug

SEQ ID NO: 1396358 - RNA, 19 nt, Artificial Sequence
  Description of Artificial Sequence: Synthetic oligonucleotide
  Sense strand starting at position 1323 of SEQ ID NO: 1243119
aaacaagucgcagaugacu

SEQ ID NO: 1396359 - RNA, 19 nt, Artificial Sequence
  Description of Artificial Sequence: Synthetic oligonucleotide
  Antisense strand to SEQ ID NO: 1396358
agucaucugcgacuuguuu

SEQ ID NO: 1396360 - RNA, 19 nt, Artificial Sequence
  Description of Artificial Sequence: Synthetic oligonucleotide
  Sense strand starting at position 1490 of SEQ ID NO: 1243119
gcaaauugucccgaccacu

SEQ ID NO: 1396361 - RNA, 19 nt, Artificial Sequence
  Description of Artificial Sequence: Synthetic oligonucleotide
  Antisense strand to SEQ ID NO: 1396360
aguggucgggacaauuugc

SEQ ID NO: 1396362 - RNA, 19 nt, Artificial Sequence
  Description of Artificial Sequence: Synthetic oligonucleotide
  Sense strand starting at position 2458 of SEQ ID NO: 1243119
uagggcugucccugaguaa

SEQ ID NO: 1396363 - RNA, 19 nt, Artificial Sequence
  Description of Artificial Sequence: Synthetic oligonucleotide
  Antisense strand to SEQ ID NO: 1396362
uuacucagggacagcccua

SEQ ID NO: 1396364 - RNA, 19 nt, Artificial Sequence
  Description of Artificial Sequence: Synthetic oligonucleotide
  Sense strand starting at position 2459 of SEQ ID NO: 1243119
agggcugucccugaguaaa

SEQ ID NO: 1396365 - RNA, 19 nt, Artificial Sequence
  Description of Artificial Sequence: Synthetic oligonucleotide
  Antisense strand to SEQ ID NO: 1396364
uuuacucagggacagcccu

SEQ ID NO: 1396366 - RNA, 19 nt, Artificial Sequence
  Description of Artificial Sequence: Synthetic oligonucleotide
  Sense strand starting at position 2523 of SEQ ID NO: 1243119
aagaucuaacgcgaaguuu

SEQ ID NO: 1396367 - RNA, 19 nt, Artificial Sequence
  Description of Artificial Sequence: Synthetic oligonucleotide
  Antisense strand to SEQ ID NO: 1396366
aaacuucgcguuagaucuu

SEQ ID NO: 1396368 - RNA, 19 nt, Artificial Sequence
  Description of Artificial Sequence: Synthetic oligonucleotide
  Sense strand starting at position 2711 of SEQ ID NO: 1243119
uagggaugggaaugucauu

SEQ ID NO: 1396369 - RNA, 19 nt, Artificial Sequence
  Description of Artificial Sequence: Synthetic oligonucleotide
  Antisense strand to SEQ ID NO: 1396368
aaugacauucccaucccua

SEQ ID NO: 1396370 - RNA, 19 nt, Artificial Sequence
  Description of Artificial Sequence: Synthetic oligonucleotide
  Sense strand starting at position 2717 of SEQ ID NO: 1243119
ugggaaugucauuauguug

SEQ ID NO: 1396371 - RNA, 19 nt, Artificial Sequence
  Description of Artificial Sequence: Synthetic oligonucleotide
  Antisense strand to SEQ ID NO: 1396370
caacauaaugacauuccca

SEQ ID NO: 1396372 - RNA, 19 nt, Artificial Sequence
  Description of Artificial Sequence: Synthetic oligonucleotide
  Sense strand starting at position 2849 of SEQ ID NO: 1243119
ccgagcuuuccagaaucca

SEQ ID NO: 1396373 - RNA, 19 nt, Artificial Sequence
  Description of Artificial Sequence: Synthetic oligonucleotide
  Antisense strand to SEQ ID NO: 1396372
uggauucuggaaagcucgg

SEQ ID NO: 1396374 - RNA, 19 nt, Artificial Sequence
  Description of Artificial Sequence: Synthetic oligonucleotide
  Sense strand starting at position 2869 of SEQ ID NO: 1243119
uuugaagagaacugguuau

SEQ ID NO: 1396375 - RNA, 19 nt, Artificial Sequence
  Description of Artificial Sequence: Synthetic oligonucleotide
  Antisense strand to SEQ ID NO: 1396374
auaaccaguucucuucaaa

SEQ ID NO: 1396376 - RNA, 19 nt, Artificial Sequence
  Description of Artificial Sequence: Synthetic oligonucleotide
  Sense strand starting at position 2882 of SEQ ID NO: 1243119
gguuauaagauucgagucu

SEQ ID NO: 1396377 - RNA, 19 nt, Artificial Sequence
  Description of Artificial Sequence: Synthetic oligonucleotide
  Antisense strand to SEQ ID NO: 1396376
agacucgaaucuuauaacc

SEQ ID NO: 1396378 - RNA, 19 nt, Artificial Sequence
  Description of Artificial Sequence: Synthetic oligonucleotide
  Sense strand starting at position 3195 of SEQ ID NO: 1243119
aagauuugagucugcgugu

SEQ ID NO: 1396379 - RNA, 19 nt, Artificial Sequence
  Description of Artificial Sequence: Synthetic oligonucleotide
  Antisense strand to SEQ ID NO: 1396378
acacgcagacucaaaucuu

SEQ ID NO: 1396380 - RNA, 19 nt, Artificial Sequence
  Description of Artificial Sequence: Synthetic oligonucleotide
  Sense strand starting at position 3198 of SEQ ID NO: 1243119
auuugagucugcgugucaa

SEQ ID NO: 1396381 - RNA, 19 nt, Artificial Sequence
  Description of Artificial Sequence: Synthetic oligonucleotide
  Antisense strand to SEQ ID NO: 1396380
uugacacgcagacucaaau

SEQ ID NO: 1396382 - RNA, 19 nt, Artificial Sequence
  Description of Artificial Sequence: Synthetic oligonucleotide
  Sense strand starting at position 3224 of SEQ ID NO: 1243119
ccuaguauccauuguccua

SEQ ID NO: 1396383 - RNA, 19 nt, Artificial Sequence
  Description of Artificial Sequence: Synthetic oligonucleotide
  Antisense strand to SEQ ID NO: 1396382
uaggacaauggauacuagg

SEQ ID NO: 1396384 - RNA, 19 nt, Artificial Sequence
  Description of Artificial Sequence: Synthetic oligonucleotide
  Sense strand starting at position 3274 of SEQ ID NO: 1243119
gcuuuaucaucaucuagua

SEQ ID NO: 1396385 - RNA, 19 nt, Artificial Sequence
  Description of Artificial Sequence: Synthetic oligonucleotide
  Antisense strand to SEQ ID NO: 1396384
uacuagaugaugauaaagc

SEQ ID NO: 1396386 - RNA, 19 nt, Artificial Sequence
  Description of Artificial Sequence: Synthetic oligonucleotide
  Sense strand starting at position 3317 of SEQ ID NO: 1243119
caggcagaucacugucaag

SEQ ID NO: 1396387 - RNA, 19 nt, Artificial Sequence
  Description of Artificial Sequence: Synthetic oligonucleotide
  Antisense strand to SEQ ID NO: 1396386
cuugacagugaucugccug

SEQ ID NO: 1396388 - RNA, 19 nt, Artificial Sequence
  Description of Artificial Sequence: Synthetic oligonucleotide
  Sense strand starting at position 3463 of SEQ ID NO: 1243119
uuguuaacaacuggugaag

SEQ ID NO: 1396389 - RNA, 19 nt, Artificial Sequence
  Description of Artificial Sequence: Synthetic oligonucleotide
  Antisense strand to SEQ ID NO: 1396388
cuucaccaguuguuaacaa

SEQ ID NO: 1396390 - RNA, 19 nt, Artificial Sequence
  Description of Artificial Sequence: Synthetic oligonucleotide
  Sense strand starting at position 3472 of SEQ ID NO: 1243119
acuggugaagcgcauuauu

SEQ ID NO: 1396391 - RNA, 19 nt, Artificial Sequence
  Description of Artificial Sequence: Synthetic oligonucleotide
  Antisense strand to SEQ ID NO: 1396390
aauaaugcgcuucaccagu

SEQ ID NO: 1396392 - RNA, 19 nt, Artificial Sequence
  Description of Artificial Sequence: Synthetic oligonucleotide
  Sense strand starting at position 3548 of SEQ ID NO: 1243119
aaaggaaauugcucgcucu

SEQ ID NO: 1396393 - RNA, 19 nt, Artificial Sequence
  Description of Artificial Sequence: Synthetic oligonucleotide
  Antisense strand to SEQ ID NO: 1396392
agagcgagcaauuuccuuu

SEQ ID NO: 1396394 - RNA, 19 nt, Artificial Sequence
  Description of Artificial Sequence: Synthetic oligonucleotide
  Sense strand starting at position 4 of SEQ ID NO: 1243120
ucucuuguucuuggugaaa

SEQ ID NO: 1396395 - RNA, 19 nt, Artificial Sequence
  Description of Artificial Sequence: Synthetic oligonucleotide
  Antisense strand to SEQ ID NO: 1396394
uuucaccaagaacaagaga

SEQ ID NO: 1396396 - RNA, 19 nt, Artificial Sequence
  Description of Artificial Sequence: Synthetic oligonucleotide
  Sense strand starting at position 7 of SEQ ID NO: 1243120
cuuguucuuggugaaagag

SEQ ID NO: 1396397 - RNA, 19 nt, Artificial Sequence
  Description of Artificial Sequence: Synthetic oligonucleotide
  Antisense strand to SEQ ID NO: 1396396
cucuuucaccaagaacaag

SEQ ID NO: 1396398 - RNA, 19 nt, Artificial Sequence
  Description of Artificial Sequence: Synthetic oligonucleotide
  Sense strand starting at position 41 of SEQ ID NO: 1243120
aggagaaucucagaccaca

SEQ ID NO: 1396399 - RNA, 19 nt, Artificial Sequence
  Description of Artificial Sequence: Synthetic oligonucleotide
  Antisense strand to SEQ ID NO: 1396398
uguggucugagauucuccu

SEQ ID NO: 1396400 - RNA, 19 nt, Artificial Sequence
  Description of Artificial Sequence: Synthetic oligonucleotide
  Sense strand starting at position 61 of SEQ ID NO: 1243120
ugagacagugcugauguaa

SEQ ID NO: 1396401 - RNA, 19 nt, Artificial Sequence
  Description of Artificial Sequence: Synthetic oligonucleotide
  Antisense strand to SEQ ID NO: 1396400
uuacaucagcacugucuca

SEQ ID NO: 1396402 - RNA, 19 nt, Artificial Sequence
  Description of Artificial Sequence: Synthetic oligonucleotide
  Sense strand starting at position 416 of SEQ ID NO: 1243120
gaaagaugacuacgugaac

SEQ ID NO: 1396403 - RNA, 19 nt, Artificial Sequence
  Description of Artificial Sequence: Synthetic oligonucleotide
  Antisense strand to SEQ ID NO: 1396402
guucacguagucaucuuuc

SEQ ID NO: 1396404 - RNA, 19 nt, Artificial Sequence
  Description of Artificial Sequence: Synthetic oligonucleotide
  Sense strand starting at position 441 of SEQ ID NO: 1243120
gugacucaaccaugaacau

SEQ ID NO: 1396405 - RNA, 19 nt, Artificial Sequence
  Description of Artificial Sequence: Synthetic oligonucleotide
  Antisense strand to SEQ ID NO: 1396404
auguucaugguugagucac

SEQ ID NO: 1396406 - RNA, 19 nt, Artificial Sequence
  Description of Artificial Sequence: Synthetic oligonucleotide
  Sense strand starting at position 639 of SEQ ID NO: 1243120
guuagcugucaagagauau

SEQ ID NO: 1396407 - RNA, 19 nt, Artificial Sequence
  Description of Artificial Sequence: Synthetic oligonucleotide
  Antisense strand to SEQ ID NO: 1396406
auaucucuugacagcuaac

SEQ ID NO: 1396408 - RNA, 19 nt, Artificial Sequence
  Description of Artificial Sequence: Synthetic oligonucleotide
  Sense strand starting at position 668 of SEQ ID NO: 1243120
agauacugcuaguuucuua

SEQ ID NO: 1396409 - RNA, 19 nt, Artificial Sequence
  Description of Artificial Sequence: Synthetic oligonucleotide
  Antisense strand to SEQ ID NO: 1396408
uaagaaacuagcaguaucu

SEQ ID NO: 1396410 - RNA, 19 nt, Artificial Sequence
  Description of Artificial Sequence: Synthetic oligonucleotide
  Sense strand starting at position 745 of SEQ ID NO: 1243120
gguagauuaucaagggagg

SEQ ID NO: 1396411 - RNA, 19 nt, Artificial Sequence
  Description of Artificial Sequence: Synthetic oligonucleotide
  Antisense strand to SEQ ID NO: 1396410
ccucccuugauaaucuacc

SEQ ID NO: 1396412 - RNA, 19 nt, Artificial Sequence
  Description of Artificial Sequence: Synthetic oligonucleotide
  Sense strand starting at position 827 of SEQ ID NO: 1243120
gguaauaacuaguuuagga

SEQ ID NO: 1396413 - RNA, 19 nt, Artificial Sequence
  Description of Artificial Sequence: Synthetic oligonucleotide
  Antisense strand to SEQ ID NO: 1396412
uccuaaacuaguuauuacc

SEQ ID NO: 1396414 - RNA, 19 nt, Artificial Sequence
  Description of Artificial Sequence: Synthetic oligonucleotide
  Sense strand starting at position 836 of SEQ ID NO: 1243120
uaguuuaggauggguacau

SEQ ID NO: 1396415 - RNA, 19 nt, Artificial Sequence
  Description of Artificial Sequence: Synthetic oligonucleotide
  Antisense strand to SEQ ID NO: 1396414
auguacccauccuaaacua

SEQ ID NO: 1396416 - RNA, 19 nt, Artificial Sequence
  Description of Artificial Sequence: Synthetic oligonucleotide
  Sense strand starting at position 858 of SEQ ID NO: 1243120
acaauacaugucuguauau

SEQ ID NO: 1396417 - RNA, 19 nt, Artificial Sequence
  Description of Artificial Sequence: Synthetic oligonucleotide
  Antisense strand to SEQ ID NO: 1396416
auauacagacauguauugu

SEQ ID NO: 1396418 - RNA, 19 nt, Artificial Sequence
  Description of Artificial Sequence: Synthetic oligonucleotide
  Sense strand starting at position 975 of SEQ ID NO: 1243120
uguaacugcucuuugaaca

SEQ ID NO: 1396419 - RNA, 19 nt, Artificial Sequence
  Description of Artificial Sequence: Synthetic oligonucleotide
  Antisense strand to SEQ ID NO: 1396418
uguucaaagagcaguuaca

SEQ ID NO: 1396420 - RNA, 19 nt, Artificial Sequence
  Description of Artificial Sequence: Synthetic oligonucleotide
  Sense strand starting at position 976 of SEQ ID NO: 1243120
guaacugcucuuugaacau

SEQ ID NO: 1396421 - RNA, 19 nt, Artificial Sequence
  Description of Artificial Sequence: Synthetic oligonucleotide
  Antisense strand to SEQ ID NO: 1396420
auguucaaagagcaguuac

SEQ ID NO: 1396422 - RNA, 19 nt, Artificial Sequence
  Description of Artificial Sequence: Synthetic oligonucleotide
  Sense strand starting at position 1014 of SEQ ID NO: 1243120
uuacuuguagcugaaacua

SEQ ID NO: 1396423 - RNA, 19 nt, Artificial Sequence
  Description of Artificial Sequence: Synthetic oligonucleotide
  Antisense strand to SEQ ID NO: 1396422
uaguuucagcuacaaguaa

SEQ ID NO: 1396424 - RNA, 19 nt, Artificial Sequence
  Description of Artificial Sequence: Synthetic oligonucleotide
  Sense strand starting at position 1060 of SEQ ID NO: 1243120
uuaccuaaguugucaaauc

SEQ ID NO: 1396425 - RNA, 19 nt, Artificial Sequence
  Description of Artificial Sequence: Synthetic oligonucleotide
  Antisense strand to SEQ ID NO: 1396424
gauuugacaacuuagguaa

SEQ ID NO: 1396426 - RNA, 19 nt, Artificial Sequence
  Description of Artificial Sequence: Synthetic oligonucleotide
  Sense strand starting at position 1068 of SEQ ID NO: 1243120
guugucaaaucuccuaaua

SEQ ID NO: 1396427 - RNA, 19 nt, Artificial Sequence
  Description of Artificial Sequence: Synthetic oligonucleotide
  Antisense strand to SEQ ID NO: 1396426
uauuaggagauuugacaac

SEQ ID NO: 1396428 - RNA, 19 nt, Artificial Sequence
  Description of Artificial Sequence: Synthetic oligonucleotide
  Sense strand starting at position 1339 of SEQ ID NO: 1243120
guuguaaacuggccaagau

SEQ ID NO: 1396429 - RNA, 19 nt, Artificial Sequence
  Description of Artificial Sequence: Synthetic oligonucleotide
  Antisense strand to SEQ ID NO: 1396428
aucuuggccaguuuacaac

SEQ ID NO: 1396430 - RNA, 19 nt, Artificial Sequence
  Description of Artificial Sequence: Synthetic oligonucleotide
  Sense strand starting at position 1340 of SEQ ID NO: 1243120
uuguaaacuggccaagauu

SEQ ID NO: 1396431 - RNA, 19 nt, Artificial Sequence
  Description of Artificial Sequence: Synthetic oligonucleotide
  Antisense strand to SEQ ID NO: 1396430
aaucuuggccaguuuacaa

SEQ ID NO: 1396432 - RNA, 19 nt, Artificial Sequence
  Description of Artificial Sequence: Synthetic oligonucleotide
  Sense strand starting at position 1601 of SEQ ID NO: 1243120
acguaaugccucuauaaca

SEQ ID NO: 1396433 - RNA, 19 nt, Artificial Sequence
  Description of Artificial Sequence: Synthetic oligonucleotide
  Antisense strand to SEQ ID NO: 1396432
uguuauagaggcauuacgu

SEQ ID NO: 1396434 - RNA, 19 nt, Artificial Sequence
  Description of Artificial Sequence: Synthetic oligonucleotide
  Sense strand starting at position 1665 of SEQ ID NO: 1243120
ugugaacguacacaaagau

SEQ ID NO: 1396435 - RNA, 19 nt, Artificial Sequence
  Description of Artificial Sequence: Synthetic oligonucleotide
  Antisense strand to SEQ ID NO: 1396434
aucuuuguguacguucaca

SEQ ID NO: 1396436 - RNA, 19 nt, Artificial Sequence
  Description of Artificial Sequence: Synthetic oligonucleotide
  Sense strand starting at position 1987 of SEQ ID NO: 1243120
cggaaaugguugcuuagag

SEQ ID NO: 1396437 - RNA, 19 nt, Artificial Sequence
  Description of Artificial Sequence: Synthetic oligonucleotide
  Antisense strand to SEQ ID NO: 1396436
cucuaagcaaccauuuccg

SEQ ID NO: 1396438 - RNA, 19 nt, Artificial Sequence
  Description of Artificial Sequence: Synthetic oligonucleotide
  Sense strand starting at position 2099 of SEQ ID NO: 1243120
ucgggagaacuucgaccaa

SEQ ID NO: 1396439 - RNA, 19 nt, Artificial Sequence
  Description of Artificial Sequence: Synthetic oligonucleotide
  Antisense strand to SEQ ID NO: 1396438
uuggucgaaguucucccga

SEQ ID NO: 1396440 - RNA, 19 nt, Artificial Sequence
  Description of Artificial Sequence: Synthetic oligonucleotide
  Sense strand starting at position 2281 of SEQ ID NO: 1243120
gcgcgaggccuguuauuaa

SEQ ID NO: 1396441 - RNA, 19 nt, Artificial Sequence
  Description of Artificial Sequence: Synthetic oligonucleotide
  Antisense strand to SEQ ID NO: 1396440
uuaauaacaggccucgcgc

SEQ ID NO: 1396442 - RNA, 19 nt, Artificial Sequence
  Description of Artificial Sequence: Synthetic oligonucleotide
  Sense strand starting at position 2345 of SEQ ID NO: 1243120
ggagcagucggcguagguu

SEQ ID NO: 1396443 - RNA, 19 nt, Artificial Sequence
  Description of Artificial Sequence: Synthetic oligonucleotide
  Antisense strand to SEQ ID NO: 1396442
aaccuacgccgacugcucc

SEQ ID NO: 1396444 - RNA, 19 nt, Artificial Sequence
  Description of Artificial Sequence: Synthetic oligonucleotide
  Sense strand starting at position 2411 of SEQ ID NO: 1243120
ggaacuuggcagcggaauu

SEQ ID NO: 1396445 - RNA, 19 nt, Artificial Sequence
  Description of Artificial Sequence: Synthetic oligonucleotide
  Antisense strand to SEQ ID NO: 1396444
aauuccgcugccaaguucc

SEQ ID NO: 1396446 - RNA, 19 nt, Artificial Sequence
  Description of Artificial Sequence: Synthetic oligonucleotide
  Sense strand starting at position 2423 of SEQ ID NO: 1243120
cggaauuggucccuuuaag

SEQ ID NO: 1396447 - RNA, 19 nt, Artificial Sequence
  Description of Artificial Sequence: Synthetic oligonucleotide
  Antisense strand to SEQ ID NO: 1396446
cuuaaagggaccaauuccg

SEQ ID NO: 1396448 - RNA, 19 nt, Artificial Sequence
  Description of Artificial Sequence: Synthetic oligonucleotide
  Sense strand starting at position 2475 of SEQ ID NO: 1243120
gucccuguggcgucuugaa

SEQ ID NO: 1396449 - RNA, 19 nt, Artificial Sequence
  Description of Artificial Sequence: Synthetic oligonucleotide
  Antisense strand to SEQ ID NO: 1396448
uucaagacgccacagggac

SEQ ID NO: 1396450 - RNA, 19 nt, Artificial Sequence
  Description of Artificial Sequence: Synthetic oligonucleotide
  Sense strand starting at position 2608 of SEQ ID NO: 1243120
ccuccuuuggaggagaguu

SEQ ID NO: 1396451 - RNA, 19 nt, Artificial Sequence
  Description of Artificial Sequence: Synthetic oligonucleotide
  Antisense strand to SEQ ID NO: 1396450
aacucuccuccaaaggagg

SEQ ID NO: 1396452 - RNA, 19 nt, Artificial Sequence
  Description of Artificial Sequence: Synthetic oligonucleotide
  Sense strand starting at position 2764 of SEQ ID NO: 1243120
ggaggaaucucugagagag

SEQ ID NO: 1396453 - RNA, 19 nt, Artificial Sequence
  Description of Artificial Sequence: Synthetic oligonucleotide
  Antisense strand to SEQ ID NO: 1396452
cucucucagagauuccucc

SEQ ID NO: 1396454 - RNA, 19 nt, Artificial Sequence
  Description of Artificial Sequence: Synthetic oligonucleotide
  Sense strand starting at position 2774 of SEQ ID NO: 1243120
cugagagaguuucucaaug

SEQ ID NO: 1396455 - RNA, 19 nt, Artificial Sequence
  Description of Artificial Sequence: Synthetic oligonucleotide
  Antisense strand to SEQ ID NO: 1396454
cauugagaaacucucucag

SEQ ID NO: 1396456 - RNA, 19 nt, Artificial Sequence
  Description of Artificial Sequence: Synthetic oligonucleotide
  Sense strand starting at position 2779 of SEQ ID NO: 1243120
agaguuucucaaugucuua

SEQ ID NO: 1396457 - RNA, 19 nt, Artificial Sequence
  Description of Artificial Sequence: Synthetic oligonucleotide
  Antisense strand to SEQ ID NO: 1396456
uaagacauugagaaacucu

SEQ ID NO: 1396458 - RNA, 19 nt, Artificial Sequence
  Description of Artificial Sequence: Synthetic oligonucleotide
  Sense strand starting at position 2865 of SEQ ID NO: 1243120
gagugcagugcugauauca

SEQ ID NO: 1396459 - RNA, 19 nt, Artificial Sequence
  Description of Artificial Sequence: Synthetic oligonucleotide
  Antisense strand to SEQ ID NO: 1396458
ugauaucagcacugcacuc

SEQ ID NO: 1396460 - RNA, 19 nt, Artificial Sequence
  Description of Artificial Sequence: Synthetic oligonucleotide
  Sense strand starting at position 3375 of SEQ ID NO: 1243120
agugacuuucuggaauggu

SEQ ID NO: 1396461 - RNA, 19 nt, Artificial Sequence
  Description of Artificial Sequence: Synthetic oligonucleotide
  Antisense strand to SEQ ID NO: 1396460
accauuccagaaagucacu

SEQ ID NO: 1396462 - RNA, 19 nt, Artificial Sequence
  Description of Artificial Sequence: Synthetic oligonucleotide
  Sense strand starting at position 3461 of SEQ ID NO: 1243120
uccacacucguugaguaau

SEQ ID NO: 1396463 - RNA, 19 nt, Artificial Sequence
  Description of Artificial Sequence: Synthetic oligonucleotide
  Antisense strand to SEQ ID NO: 1396462
auuacucaacgagugugga

SEQ ID NO: 1396464 - RNA, 19 nt, Artificial Sequence
  Description of Artificial Sequence: Synthetic oligonucleotide
  Sense strand starting at position 3463 of SEQ ID NO: 1243120
cacacucguugaguaauaa

SEQ ID NO: 1396465 - RNA, 19 nt, Artificial Sequence
  Description of Artificial Sequence: Synthetic oligonucleotide
  Antisense strand to SEQ ID NO: 1396464
uuauuacucaacgagugug

SEQ ID NO: 1396466 - RNA, 19 nt, Artificial Sequence
  Description of Artificial Sequence: Synthetic oligonucleotide
  Sense strand starting at position 3464 of SEQ ID NO: 1243120
acacucguugaguaauaau

SEQ ID NO: 1396467 - RNA, 19 nt, Artificial Sequence
  Description of Artificial Sequence: Synthetic oligonucleotide
  Antisense strand to SEQ ID NO: 1396466
auuauuacucaacgagugu

SEQ ID NO: 1396468 - RNA, 19 nt, Artificial Sequence
  Description of Artificial Sequence: Synthetic oligonucleotide
  Sense strand starting at position 3501 of SEQ ID NO: 1243120
uuaucacaccguuagagaa

SEQ ID NO: 1396469 - RNA, 19 nt, Artificial Sequence
  Description of Artificial Sequence: Synthetic oligonucleotide
  Antisense strand to SEQ ID NO: 1396468
uucucuaacggugugauaa

SEQ ID NO: 1396470 - RNA, 19 nt, Artificial Sequence
  Description of Artificial Sequence: Synthetic oligonucleotide
  Sense strand starting at position 3534 of SEQ ID NO: 1243120
ggaugaagugcuggaguga

SEQ ID NO: 1396471 - RNA, 19 nt, Artificial Sequence
  Description of Artificial Sequence: Synthetic oligonucleotide
  Antisense strand to SEQ ID NO: 1396470
ucacuccagcacuucaucc

SEQ ID NO: 1396472 - RNA, 19 nt, Artificial Sequence
  Description of Artificial Sequence: Synthetic oligonucleotide
  Sense strand starting at position 3632 of SEQ ID NO: 1243120
uuaugauucuuccugggcu

SEQ ID NO: 1396473 - RNA, 19 nt, Artificial Sequence
  Description of Artificial Sequence: Synthetic oligonucleotide
  Antisense strand to SEQ ID NO: 1396472
agcccaggaagaaucauaa

SEQ ID NO: 1396474 - RNA, 19 nt, Artificial Sequence
  Description of Artificial Sequence: Synthetic oligonucleotide
  Sense strand starting at position 105 of SEQ ID NO: 1243121
gcccaacuaacgugaagua

SEQ ID NO: 1396475 - RNA, 19 nt, Artificial Sequence
  Description of Artificial Sequence: Synthetic oligonucleotide
  Antisense strand to SEQ ID NO: 1396474
uacuucacguuaguugggc

SEQ ID NO: 1396476 - RNA, 19 nt, Artificial Sequence
  Description of Artificial Sequence: Synthetic oligonucleotide
  Sense strand starting at position 106 of SEQ ID NO: 1243121
cccaacuaacgugaaguaa

SEQ ID NO: 1396477 - RNA, 19 nt, Artificial Sequence
  Description of Artificial Sequence: Synthetic oligonucleotide
  Antisense strand to SEQ ID NO: 1396476
uuacuucacguuaguuggg

SEQ ID NO: 1396478 - RNA, 19 nt, Artificial Sequence
  Description of Artificial Sequence: Synthetic oligonucleotide
  Sense strand starting at position 198 of SEQ ID NO: 1243121
gaaaguaaaguuugggacu

SEQ ID NO: 1396479 - RNA, 19 nt, Artificial Sequence
  Description of Artificial Sequence: Synthetic oligonucleotide
  Antisense strand to SEQ ID NO: 1396478
agucccaaacuuuacuuuc

SEQ ID NO: 1396480 - RNA, 19 nt, Artificial Sequence
  Description of Artificial Sequence: Synthetic oligonucleotide
  Sense strand starting at position 220 of SEQ ID NO: 1243121
auggaaugcccucagcaaa

SEQ ID NO: 1396481 - RNA, 19 nt, Artificial Sequence
  Description of Artificial Sequence: Synthetic oligonucleotide
  Antisense strand to SEQ ID NO: 1396480
uuugcugagggcauuccau

SEQ ID NO: 1396482 - RNA, 19 nt, Artificial Sequence
  Description of Artificial Sequence: Synthetic oligonucleotide
  Sense strand starting at position 250 of SEQ ID NO: 1243121
guuagaguugcuuaguaac

SEQ ID NO: 1396483 - RNA, 19 nt, Artificial Sequence
  Description of Artificial Sequence: Synthetic oligonucleotide
  Antisense strand to SEQ ID NO: 1396482
guuacuaagcaacucuaac

SEQ ID NO: 1396484 - RNA, 19 nt, Artificial Sequence
  Description of Artificial Sequence: Synthetic oligonucleotide
  Sense strand starting at position 252 of SEQ ID NO: 1243121
uagaguugcuuaguaaccu

SEQ ID NO: 1396485 - RNA, 19 nt, Artificial Sequence
  Description of Artificial Sequence: Synthetic oligonucleotide
  Antisense strand to SEQ ID NO: 1396484
agguuacuaagcaacucua

SEQ ID NO: 1396486 - RNA, 19 nt, Artificial Sequence
  Description of Artificial Sequence: Synthetic oligonucleotide
  Sense strand starting at position 284 of SEQ ID NO: 1243121
agcucugucauguacaguu

SEQ ID NO: 1396487 - RNA, 19 nt, Artificial Sequence
  Description of Artificial Sequence: Synthetic oligonucleotide
  Antisense strand to SEQ ID NO: 1396486
aacuguacaugacagagcu

SEQ ID NO: 1396488 - RNA, 19 nt, Artificial Sequence
  Description of Artificial Sequence: Synthetic oligonucleotide
  Sense strand starting at position 286 of SEQ ID NO: 1243121
cucugucauguacaguuau

SEQ ID NO: 1396489 - RNA, 19 nt, Artificial Sequence
  Description of Artificial Sequence: Synthetic oligonucleotide
  Antisense strand to SEQ ID NO: 1396488
auaacuguacaugacagag

SEQ ID NO: 1396490 - RNA, 19 nt, Artificial Sequence
  Description of Artificial Sequence: Synthetic oligonucleotide
  Sense strand starting at position 346 of SEQ ID NO: 1243121
aaccuaaguugguuauaag

SEQ ID NO: 1396491 - RNA, 19 nt, Artificial Sequence
  Description of Artificial Sequence: Synthetic oligonucleotide
  Antisense strand to SEQ ID NO: 1396490
cuuauaaccaacuuagguu

SEQ ID NO: 1396492 - RNA, 19 nt, Artificial Sequence
  Description of Artificial Sequence: Synthetic oligonucleotide
  Sense strand starting at position 401 of SEQ ID NO: 1243121
gcaggauguaacugaguac

SEQ ID NO: 1396493 - RNA, 19 nt, Artificial Sequence
  Description of Artificial Sequence: Synthetic oligonucleotide
  Antisense strand to SEQ ID NO: 1396492
guacucaguuacauccugc

SEQ ID NO: 1396494 - RNA, 19 nt, Artificial Sequence
  Description of Artificial Sequence: Synthetic oligonucleotide
  Sense strand starting at position 433 of SEQ ID NO: 1243121
agaagagccuuaguuuaca

SEQ ID NO: 1396495 - RNA, 19 nt, Artificial Sequence
  Description of Artificial Sequence: Synthetic oligonucleotide
  Antisense strand to SEQ ID NO: 1396494
uguaaacuaaggcucuucu

SEQ ID NO: 1396496 - RNA, 19 nt, Artificial Sequence
  Description of Artificial Sequence: Synthetic oligonucleotide
  Sense strand starting at position 444 of SEQ ID NO: 1243121
aguuuacauccuggcucaa

SEQ ID NO: 1396497 - RNA, 19 nt, Artificial Sequence
  Description of Artificial Sequence: Synthetic oligonucleotide
  Antisense strand to SEQ ID NO: 1396496
uugagccaggauguaaacu

SEQ ID NO: 1396498 - RNA, 19 nt, Artificial Sequence
  Description of Artificial Sequence: Synthetic oligonucleotide
  Sense strand starting at position 734 of SEQ ID NO: 1243121
uggguagugcaaggagaaa

SEQ ID NO: 1396499 - RNA, 19 nt, Artificial Sequence
  Description of Artificial Sequence: Synthetic oligonucleotide
  Antisense strand to SEQ ID NO: 1396498
uuucuccuugcacuaccca

SEQ ID NO: 1396500 - RNA, 19 nt, Artificial Sequence
  Description of Artificial Sequence: Synthetic oligonucleotide
  Sense strand starting at position 800 of SEQ ID NO: 1243121
ugcacuguccauuaaggua

SEQ ID NO: 1396501 - RNA, 19 nt, Artificial Sequence
  Description of Artificial Sequence: Synthetic oligonucleotide
  Antisense strand to SEQ ID NO: 1396500
uaccuuaauggacagugca

SEQ ID NO: 1396502 - RNA, 19 nt, Artificial Sequence
  Description of Artificial Sequence: Synthetic oligonucleotide
  Sense strand starting at position 857 of SEQ ID NO: 1243121
gcuaguguuaacugagaug

SEQ ID NO: 1396503 - RNA, 19 nt, Artificial Sequence
  Description of Artificial Sequence: Synthetic oligonucleotide
  Antisense strand to SEQ ID NO: 1396502
caucucaguuaacacuagc

SEQ ID NO: 1396504 - RNA, 19 nt, Artificial Sequence
  Description of Artificial Sequence: Synthetic oligonucleotide
  Sense strand starting at position 1460 of SEQ ID NO: 1243121
cucacaugagacuagcauu

SEQ ID NO: 1396505 - RNA, 19 nt, Artificial Sequence
  Description of Artificial Sequence: Synthetic oligonucleotide
  Antisense strand to SEQ ID NO: 1396504
aaugcuagucucaugugag

SEQ ID NO: 1396506 - RNA, 19 nt, Artificial Sequence
  Description of Artificial Sequence: Synthetic oligonucleotide
  Sense strand starting at position 2237 of SEQ ID NO: 1243121
cacuuaacuggcugugaga

SEQ ID NO: 1396507 - RNA, 19 nt, Artificial Sequence
  Description of Artificial Sequence: Synthetic oligonucleotide
  Antisense strand to SEQ ID NO: 1396506
ucucacagccaguuaagug

SEQ ID NO: 1396508 - RNA, 19 nt, Artificial Sequence
  Description of Artificial Sequence: Synthetic oligonucleotide
  Sense strand starting at position 2246 of SEQ ID NO: 1243121
ggcugugagaucuacucuu

SEQ ID NO: 1396509 - RNA, 19 nt, Artificial Sequence
  Description of Artificial Sequence: Synthetic oligonucleotide
  Antisense strand to SEQ ID NO: 1396508
aagaguagaucucacagcc

SEQ ID NO: 1396510 - RNA, 19 nt, Artificial Sequence
  Description of Artificial Sequence: Synthetic oligonucleotide
  Sense strand starting at position 2505 of SEQ ID NO: 1243121
agggcucuguucuuggaga

SEQ ID NO: 1396511 - RNA, 19 nt, Artificial Sequence
  Description of Artificial Sequence: Synthetic oligonucleotide
  Antisense strand to SEQ ID NO: 1396510
ucuccaagaacagagcccu

SEQ ID NO: 1396512 - RNA, 19 nt, Artificial Sequence
  Description of Artificial Sequence: Synthetic oligonucleotide
  Sense strand starting at position 2510 of SEQ ID NO: 1243121
ucuguucuuggagaguuua

SEQ ID NO: 1396513 - RNA, 19 nt, Artificial Sequence
  Description of Artificial Sequence: Synthetic oligonucleotide
  Antisense strand to SEQ ID NO: 1396512
uaaacucuccaagaacaga

SEQ ID NO: 1396514 - RNA, 19 nt, Artificial Sequence
  Description of Artificial Sequence: Synthetic oligonucleotide
  Sense strand starting at position 2518 of SEQ ID NO: 1243121
uggagaguuuagucucaug

SEQ ID NO: 1396515 - RNA, 19 nt, Artificial Sequence
  Description of Artificial Sequence: Synthetic oligonucleotide
  Antisense strand to SEQ ID NO: 1396514
caugagacuaaacucucca

SEQ ID NO: 1396516 - RNA, 19 nt, Artificial Sequence
  Description of Artificial Sequence: Synthetic oligonucleotide
  Sense strand starting at position 2577 of SEQ ID NO: 1243121
ggccuuccucuagauagag

SEQ ID NO: 1396517 - RNA, 19 nt, Artificial Sequence
  Description of Artificial Sequence: Synthetic oligonucleotide
  Antisense strand to SEQ ID NO: 1396516
cucuaucuagaggaaggcc

SEQ ID NO: 1396518 - RNA, 19 nt, Artificial Sequence
  Description of Artificial Sequence: Synthetic oligonucleotide
  Sense strand starting at position 2655 of SEQ ID NO: 1243121
uuucaugugguuuggagau

SEQ ID NO: 1396519 - RNA, 19 nt, Artificial Sequence
  Description of Artificial Sequence: Synthetic oligonucleotide
  Antisense strand to SEQ ID NO: 1396518
aucuccaaaccacaugaaa

SEQ ID NO: 1396520 - RNA, 19 nt, Artificial Sequence
  Description of Artificial Sequence: Synthetic oligonucleotide
  Sense strand starting at position 3021 of SEQ ID NO: 1243121
gugccaucucuaggaagca

SEQ ID NO: 1396521 - RNA, 19 nt, Artificial Sequence
  Description of Artificial Sequence: Synthetic oligonucleotide
  Antisense strand to SEQ ID NO: 1396520
ugcuuccuagagauggcac

SEQ ID NO: 1396522 - RNA, 19 nt, Artificial Sequence
  Description of Artificial Sequence: Synthetic oligonucleotide
  Sense strand starting at position 3067 of SEQ ID NO: 1243121
agaguaaguuuggucaggu

SEQ ID NO: 1396523 - RNA, 19 nt, Artificial Sequence
  Description of Artificial Sequence: Synthetic oligonucleotide
  Antisense strand to SEQ ID NO: 1396522
accugaccaaacuuacucu

SEQ ID NO: 1396524 - RNA, 19 nt, Artificial Sequence
  Description of Artificial Sequence: Synthetic oligonucleotide
  Sense strand starting at position 3068 of SEQ ID NO: 1243121
gaguaaguuuggucaggug

SEQ ID NO: 1396525 - RNA, 19 nt, Artificial Sequence
  Description of Artificial Sequence: Synthetic oligonucleotide
  Antisense strand to SEQ ID NO: 1396524
caccugaccaaacuuacuc

SEQ ID NO: 1396526 - RNA, 19 nt, Artificial Sequence
  Description of Artificial Sequence: Synthetic oligonucleotide
  Sense strand starting at position 3097 of SEQ ID NO: 1243121
agugguugagaagguuuga

SEQ ID NO: 1396527 - RNA, 19 nt, Artificial Sequence
  Description of Artificial Sequence: Synthetic oligonucleotide
  Antisense strand to SEQ ID NO: 1396526
ucaaaccuucucaaccacu

SEQ ID NO: 1396528 - RNA, 19 nt, Artificial Sequence
  Description of Artificial Sequence: Synthetic oligonucleotide
  Sense strand starting at position 3138 of SEQ ID NO: 1243121
uucugaagacugugaacau

SEQ ID NO: 1396529 - RNA, 19 nt, Artificial Sequence
  Description of Artificial Sequence: Synthetic oligonucleotide
  Antisense strand to SEQ ID NO: 1396528
auguucacagucuucagaa

SEQ ID NO: 1396530 - RNA, 19 nt, Artificial Sequence
  Description of Artificial Sequence: Synthetic oligonucleotide
  Sense strand starting at position 3371 of SEQ ID NO: 1243121
guuaauaacugccugaaau

SEQ ID NO: 1396531 - RNA, 19 nt, Artificial Sequence
  Description of Artificial Sequence: Synthetic oligonucleotide
  Antisense strand to SEQ ID NO: 1396530
auuucaggcaguuauuaac

SEQ ID NO: 1396532 - RNA, 19 nt, Artificial Sequence
  Description of Artificial Sequence: Synthetic oligonucleotide
  Sense strand starting at position 3460 of SEQ ID NO: 1243121
augguaaugaugcagugau

SEQ ID NO: 1396533 - RNA, 19 nt, Artificial Sequence
  Description of Artificial Sequence: Synthetic oligonucleotide
  Antisense strand to SEQ ID NO: 1396532
aucacugcaucauuaccau

SEQ ID NO: 1396534 - RNA, 19 nt, Artificial Sequence
  Description of Artificial Sequence: Synthetic oligonucleotide
  Sense strand starting at position 3618 of SEQ ID NO: 1243121
uguguuugugcugucacau

SEQ ID NO: 1396535 - RNA, 19 nt, Artificial Sequence
  Description of Artificial Sequence: Synthetic oligonucleotide
  Antisense strand to SEQ ID NO: 1396534
augugacagcacaaacaca

SEQ ID NO: 1396536 - RNA, 19 nt, Artificial Sequence
  Description of Artificial Sequence: Synthetic oligonucleotide
  Sense strand starting at position 3677 of SEQ ID NO: 1243121
aaauacacuccgggaaagu

SEQ ID NO: 1396537 - RNA, 19 nt, Artificial Sequence
  Description of Artificial Sequence: Synthetic oligonucleotide
  Antisense strand to SEQ ID NO: 1396536
acuuucccggaguguauuu

SEQ ID NO: 1396538 - RNA, 19 nt, Artificial Sequence
  Description of Artificial Sequence: Synthetic oligonucleotide
  Sense strand starting at position 3779 of SEQ ID NO: 1243121
uugguagaaggcuagucau

SEQ ID NO: 1396539 - RNA, 19 nt, Artificial Sequence
  Description of Artificial Sequence: Synthetic oligonucleotide
  Antisense strand to SEQ ID NO: 1396538
augacuagccuucuaccaa

SEQ ID NO: 1396540 - RNA, 19 nt, Artificial Sequence
  Description of Artificial Sequence: Synthetic oligonucleotide
  Sense strand starting at position 3782 of SEQ ID NO: 1243121
guagaaggcuagucauauu

SEQ ID NO: 1396541 - RNA, 19 nt, Artificial Sequence
  Description of Artificial Sequence: Synthetic oligonucleotide
  Antisense strand to SEQ ID NO: 1396540
aauaugacuagccuucuac

SEQ ID NO: 1396542 - RNA, 19 nt, Artificial Sequence
  Description of Artificial Sequence: Synthetic oligonucleotide
  Sense strand starting at position 3794 of SEQ ID NO: 1243121
ucauauugcccgugaagaa

SEQ ID NO: 1396543 - RNA, 19 nt, Artificial Sequence
  Description of Artificial Sequence: Synthetic oligonucleotide
  Antisense strand to SEQ ID NO: 1396542
uucuucacgggcaauauga

SEQ ID NO: 1396544 - RNA, 19 nt, Artificial Sequence
  Description of Artificial Sequence: Synthetic oligonucleotide
  Sense strand starting at position 3795 of SEQ ID NO: 1243121
cauauugcccgugaagaag

SEQ ID NO: 1396545 - RNA, 19 nt, Artificial Sequence
  Description of Artificial Sequence: Synthetic oligonucleotide
  Antisense strand to SEQ ID NO: 1396544
cuucuucacgggcaauaug

SEQ ID NO: 1396546 - RNA, 19 nt, Artificial Sequence
  Description of Artificial Sequence: Synthetic oligonucleotide
  Sense strand starting at position 3855 of SEQ ID NO: 1243121
augauaccucaggguauca

SEQ ID NO: 1396547 - RNA, 19 nt, Artificial Sequence
  Description of Artificial Sequence: Synthetic oligonucleotide
  Antisense strand to SEQ ID NO: 1396546
ugauacccugagguaucau

SEQ ID NO: 1396548 - RNA, 19 nt, Artificial Sequence
  Description of Artificial Sequence: Synthetic oligonucleotide
  Sense strand starting at position 3867 of SEQ ID NO: 1243121
gguaucaguuuccuaggaa

SEQ ID NO: 1396549 - RNA, 19 nt, Artificial Sequence
  Description of Artificial Sequence: Synthetic oligonucleotide
  Antisense strand to SEQ ID NO: 1396548
uuccuaggaaacugauacc

SEQ ID NO: 1396550 - RNA, 19 nt, Artificial Sequence
  Description of Artificial Sequence: Synthetic oligonucleotide
  Sense strand starting at position 3870 of SEQ ID NO: 1243121
aucaguuuccuaggaaugu

SEQ ID NO: 1396551 - RNA, 19 nt, Artificial Sequence
  Description of Artificial Sequence: Synthetic oligonucleotide
  Antisense strand to SEQ ID NO: 1396550
acauuccuaggaaacugau

SEQ ID NO: 1396552 - RNA, 19 nt, Artificial Sequence
  Description of Artificial Sequence: Synthetic oligonucleotide
  Sense strand starting at position 3955 of SEQ ID NO: 1243121
gcuggaagucuacaaucaa

SEQ ID NO: 1396553 - RNA, 19 nt, Artificial Sequence
  Description of Artificial Sequence: Synthetic oligonucleotide
  Antisense strand to SEQ ID NO: 1396552
uugauuguagacuuccagc

SEQ ID NO: 1396554 - RNA, 19 nt, Artificial Sequence
  Description of Artificial Sequence: Synthetic oligonucleotide
  Sense strand starting at position 100 of SEQ ID NO: 1243122
cuaggaaucucccuguugu

SEQ ID NO: 1396555 - RNA, 19 nt, Artificial Sequence
  Description of Artificial Sequence: Synthetic oligonucleotide
  Antisense strand to SEQ ID NO: 1396554
acaacagggagauuccuag

SEQ ID NO: 1396556 - RNA, 19 nt, Artificial Sequence
  Description of Artificial Sequence: Synthetic oligonucleotide
  Sense strand starting at position 101 of SEQ ID NO: 1243122
uaggaaucucccuguuguc

SEQ ID NO: 1396557 - RNA, 19 nt, Artificial Sequence
  Description of Artificial Sequence: Synthetic oligonucleotide
  Antisense strand to SEQ ID NO: 1396556
gacaacagggagauuccua

SEQ ID NO: 1396558 - RNA, 19 nt, Artificial Sequence
  Description of Artificial Sequence: Synthetic oligonucleotide
  Sense strand starting at position 750 of SEQ ID NO: 1243122
aucaucagucuugaugagu

SEQ ID NO: 1396559 - RNA, 19 nt, Artificial Sequence
  Description of Artificial Sequence: Synthetic oligonucleotide
  Antisense strand to SEQ ID NO: 1396558
acucaucaagacugaugau

SEQ ID NO: 1396560 - RNA, 19 nt, Artificial Sequence
  Description of Artificial Sequence: Synthetic oligonucleotide
  Sense strand starting at position 753 of SEQ ID NO: 1243122
aucagucuugaugaguuga

SEQ ID NO: 1396561 - RNA, 19 nt, Artificial Sequence
  Description of Artificial Sequence: Synthetic oligonucleotide
  Antisense strand to SEQ ID NO: 1396560
ucaacucaucaagacugau

SEQ ID NO: 1396562 - RNA, 19 nt, Artificial Sequence
  Description of Artificial Sequence: Synthetic oligonucleotide
  Sense strand starting at position 755 of SEQ ID NO: 1243122
cagucuugaugaguugaug

SEQ ID NO: 1396563 - RNA, 19 nt, Artificial Sequence
  Description of Artificial Sequence: Synthetic oligonucleotide
  Antisense strand to SEQ ID NO: 1396562
caucaacucaucaagacug

SEQ ID NO: 1396564 - RNA, 19 nt, Artificial Sequence
  Description of Artificial Sequence: Synthetic oligonucleotide
  Sense strand starting at position 758 of SEQ ID NO: 1243122
ucuugaugaguugauguuu

SEQ ID NO: 1396565 - RNA, 19 nt, Artificial Sequence
  Description of Artificial Sequence: Synthetic oligonucleotide
  Antisense strand to SEQ ID NO: 1396564
aaacaucaacucaucaaga

SEQ ID NO: 1396566 - RNA, 19 nt, Artificial Sequence
  Description of Artificial Sequence: Synthetic oligonucleotide
  Sense strand starting at position 937 of SEQ ID NO: 1243122
ggagaggcguguuccagau

SEQ ID NO: 1396567 - RNA, 19 nt, Artificial Sequence
  Description of Artificial Sequence: Synthetic oligonucleotide
  Antisense strand to SEQ ID NO: 1396566
aucuggaacacgccucucc

SEQ ID NO: 1396568 - RNA, 19 nt, Artificial Sequence
  Description of Artificial Sequence: Synthetic oligonucleotide
  Sense strand starting at position 1020 of SEQ ID NO: 1243122
cagcaaucagaauguaugu

SEQ ID NO: 1396569 - RNA, 19 nt, Artificial Sequence
  Description of Artificial Sequence: Synthetic oligonucleotide
  Antisense strand to SEQ ID NO: 1396568
acauacauucugauugcug

SEQ ID NO: 1396570 - RNA, 19 nt, Artificial Sequence
  Description of Artificial Sequence: Synthetic oligonucleotide
  Sense strand starting at position 1029 of SEQ ID NO: 1243122
gaauguauguuagcuauuu

SEQ ID NO: 1396571 - RNA, 19 nt, Artificial Sequence
  Description of Artificial Sequence: Synthetic oligonucleotide
  Antisense strand to SEQ ID NO: 1396570
aaauagcuaacauacauuc

SEQ ID NO: 1396572 - RNA, 19 nt, Artificial Sequence
  Description of Artificial Sequence: Synthetic oligonucleotide
  Sense strand starting at position 1092 of SEQ ID NO: 1243122
aggcaaagacuguguuguu

SEQ ID NO: 1396573 - RNA, 19 nt, Artificial Sequence
  Description of Artificial Sequence: Synthetic oligonucleotide
  Antisense strand to SEQ ID NO: 1396572
aacaacacagucuuugccu

SEQ ID NO: 1396574 - RNA, 19 nt, Artificial Sequence
  Description of Artificial Sequence: Synthetic oligonucleotide
  Sense strand starting at position 1132 of SEQ ID NO: 1243122
cggcacauugccugauaca

SEQ ID NO: 1396575 - RNA, 19 nt, Artificial Sequence
  Description of Artificial Sequence: Synthetic oligonucleotide
  Antisense strand to SEQ ID NO: 1396574
uguaucaggcaaugugccg

SEQ ID NO: 1396576 - RNA, 19 nt, Artificial Sequence
  Description of Artificial Sequence: Synthetic oligonucleotide
  Sense strand starting at position 1133 of SEQ ID NO: 1243122
ggcacauugccugauacaa

SEQ ID NO: 1396577 - RNA, 19 nt, Artificial Sequence
  Description of Artificial Sequence: Synthetic oligonucleotide
  Antisense strand to SEQ ID NO: 1396576
uuguaucaggcaaugugcc

SEQ ID NO: 1396578 - RNA, 19 nt, Artificial Sequence
  Description of Artificial Sequence: Synthetic oligonucleotide
  Sense strand starting at position 1148 of SEQ ID NO: 1243122
acaagcaagugcucaauga

SEQ ID NO: 1396579 - RNA, 19 nt, Artificial Sequence
  Description of Artificial Sequence: Synthetic oligonucleotide
  Antisense strand to SEQ ID NO: 1396578
ucauugagcacuugcuugu

SEQ ID NO: 1396580 - RNA, 19 nt, Artificial Sequence
  Description of Artificial Sequence: Synthetic oligonucleotide
  Sense strand starting at position 1152 of SEQ ID NO: 1243122
gcaagugcucaaugauacu

SEQ ID NO: 1396581 - RNA, 19 nt, Artificial Sequence
  Description of Artificial Sequence: Synthetic oligonucleotide
  Antisense strand to SEQ ID NO: 1396580
aguaucauugagcacuugc

SEQ ID NO: 1396582 - RNA, 19 nt, Artificial Sequence
  Description of Artificial Sequence: Synthetic oligonucleotide
  Sense strand starting at position 1165 of SEQ ID NO: 1243122
gauacuggaugaugaauaa

SEQ ID NO: 1396583 - RNA, 19 nt, Artificial Sequence
  Description of Artificial Sequence: Synthetic oligonucleotide
  Antisense strand to SEQ ID NO: 1396582
uuauucaucauccaguauc

SEQ ID NO: 1396584 - RNA, 19 nt, Artificial Sequence
  Description of Artificial Sequence: Synthetic oligonucleotide
  Sense strand starting at position 1233 of SEQ ID NO: 1243122
gggcucagcuugguuaagu

SEQ ID NO: 1396585 - RNA, 19 nt, Artificial Sequence
  Description of Artificial Sequence: Synthetic oligonucleotide
  Antisense strand to SEQ ID NO: 1396584
acuuaaccaagcugagccc

SEQ ID NO: 1396586 - RNA, 19 nt, Artificial Sequence
  Description of Artificial Sequence: Synthetic oligonucleotide
  Sense strand starting at position 1244 of SEQ ID NO: 1243122
gguuaagugacuugaacac

SEQ ID NO: 1396587 - RNA, 19 nt, Artificial Sequence
  Description of Artificial Sequence: Synthetic oligonucleotide
  Antisense strand to SEQ ID NO: 1396586
guguucaagucacuuaacc

SEQ ID NO: 1396588 - RNA, 19 nt, Artificial Sequence
  Description of Artificial Sequence: Synthetic oligonucleotide
  Sense strand starting at position 1439 of SEQ ID NO: 1243122
cgaguucaugcggaagaag

SEQ ID NO: 1396589 - RNA, 19 nt, Artificial Sequence
  Description of Artificial Sequence: Synthetic oligonucleotide
  Antisense strand to SEQ ID NO: 1396588
cuucuuccgcaugaacucg

SEQ ID NO: 1396590 - RNA, 19 nt, Artificial Sequence
  Description of Artificial Sequence: Synthetic oligonucleotide
  Sense strand starting at position 2183 of SEQ ID NO: 1243122
cauguuuagcagugguuua

SEQ ID NO: 1396591 - RNA, 19 nt, Artificial Sequence
  Description of Artificial Sequence: Synthetic oligonucleotide
  Antisense strand to SEQ ID NO: 1396590
uaaaccacugcuaaacaug

SEQ ID NO: 1396592 - RNA, 19 nt, Artificial Sequence
  Description of Artificial Sequence: Synthetic oligonucleotide
  Sense strand starting at position 2196 of SEQ ID NO: 1243122
gguuuaggcuugccugauu

SEQ ID NO: 1396593 - RNA, 19 nt, Artificial Sequence
  Description of Artificial Sequence: Synthetic oligonucleotide
  Antisense strand to SEQ ID NO: 1396592
aaucaggcaagccuaaacc

SEQ ID NO: 1396594 - RNA, 19 nt, Artificial Sequence
  Description of Artificial Sequence: Synthetic oligonucleotide
  Sense strand starting at position 2270 of SEQ ID NO: 1243122
ugcagaugucaugauccuu

SEQ ID NO: 1396595 - RNA, 19 nt, Artificial Sequence
  Description of Artificial Sequence: Synthetic oligonucleotide
  Antisense strand to SEQ ID NO: 1396594
aaggaucaugacaucugca

SEQ ID NO: 1396596 - RNA, 19 nt, Artificial Sequence
  Description of Artificial Sequence: Synthetic oligonucleotide
  Sense strand starting at position 2292 of SEQ ID NO: 1243122
cccauaccucgccaugaau

SEQ ID NO: 1396597 - RNA, 19 nt, Artificial Sequence
  Description of Artificial Sequence: Synthetic oligonucleotide
  Antisense strand to SEQ ID NO: 1396596
auucauggcgagguauggg

SEQ ID NO: 1396598 - RNA, 19 nt, Artificial Sequence
  Description of Artificial Sequence: Synthetic oligonucleotide
  Sense strand starting at position 2301 of SEQ ID NO: 1243122
cgccaugaaucuccuaaga

SEQ ID NO: 1396599 - RNA, 19 nt, Artificial Sequence
  Description of Artificial Sequence: Synthetic oligonucleotide
  Antisense strand to SEQ ID NO: 1396598
ucuuaggagauucauggcg

SEQ ID NO: 1396600 - RNA, 19 nt, Artificial Sequence
  Description of Artificial Sequence: Synthetic oligonucleotide
  Sense strand starting at position 2343 of SEQ ID NO: 1243122
gggcaaauaucauuaggac

SEQ ID NO: 1396601 - RNA, 19 nt, Artificial Sequence
  Description of Artificial Sequence: Synthetic oligonucleotide
  Antisense strand to SEQ ID NO: 1396600
guccuaaugauauuugccc

SEQ ID NO: 1396602 - RNA, 19 nt, Artificial Sequence
  Description of Artificial Sequence: Synthetic oligonucleotide
  Sense strand starting at position 2368 of SEQ ID NO: 1243122
cauugacauuucugugaug

SEQ ID NO: 1396603 - RNA, 19 nt, Artificial Sequence
  Description of Artificial Sequence: Synthetic oligonucleotide
  Antisense strand to SEQ ID NO: 1396602
caucacagaaaugucaaug

SEQ ID NO: 1396604 - RNA, 19 nt, Artificial Sequence
  Description of Artificial Sequence: Synthetic oligonucleotide
  Sense strand starting at position 2371 of SEQ ID NO: 1243122
ugacauuucugugauguca

SEQ ID NO: 1396605 - RNA, 19 nt, Artificial Sequence
  Description of Artificial Sequence: Synthetic oligonucleotide
  Antisense strand to SEQ ID NO: 1396604
ugacaucacagaaauguca

SEQ ID NO: 1396606 - RNA, 19 nt, Artificial Sequence
  Description of Artificial Sequence: Synthetic oligonucleotide
  Sense strand starting at position 2382 of SEQ ID NO: 1243122
ugaugucauccacagcuaa

SEQ ID NO: 1396607 - RNA, 19 nt, Artificial Sequence
  Description of Artificial Sequence: Synthetic oligonucleotide
  Antisense strand to SEQ ID NO: 1396606
uuagcuguggaugacauca

SEQ ID NO: 1396608 - RNA, 19 nt, Artificial Sequence
  Description of Artificial Sequence: Synthetic oligonucleotide
  Sense strand starting at position 2482 of SEQ ID NO: 1243122
guugucaugucucuuugau

SEQ ID NO: 1396609 - RNA, 19 nt, Artificial Sequence
  Description of Artificial Sequence: Synthetic oligonucleotide
  Antisense strand to SEQ ID NO: 1396608
aucaaagagacaugacaac

SEQ ID NO: 1396610 - RNA, 19 nt, Artificial Sequence
  Description of Artificial Sequence: Synthetic oligonucleotide
  Sense strand starting at position 2571 of SEQ ID NO: 1243122
caugauuugugugacucaa

SEQ ID NO: 1396611 - RNA, 19 nt, Artificial Sequence
  Description of Artificial Sequence: Synthetic oligonucleotide
  Antisense strand to SEQ ID NO: 1396610
uugagucacacaaaucaug

SEQ ID NO: 1396612 - RNA, 19 nt, Artificial Sequence
  Description of Artificial Sequence: Synthetic oligonucleotide
  Sense strand starting at position 2702 of SEQ ID NO: 1243122
ugaagcuggcccugaguau

SEQ ID NO: 1396613 - RNA, 19 nt, Artificial Sequence
  Description of Artificial Sequence: Synthetic oligonucleotide
  Antisense strand to SEQ ID NO: 1396612
auacucagggccagcuuca

SEQ ID NO: 1396614 - RNA, 19 nt, Artificial Sequence
  Description of Artificial Sequence: Synthetic oligonucleotide
  Sense strand starting at position 2703 of SEQ ID NO: 1243122
gaagcuggcccugaguaua

SEQ ID NO: 1396615 - RNA, 19 nt, Artificial Sequence
  Description of Artificial Sequence: Synthetic oligonucleotide
  Antisense strand to SEQ ID NO: 1396614
uauacucagggccagcuuc

SEQ ID NO: 1396616 - RNA, 19 nt, Artificial Sequence
  Description of Artificial Sequence: Synthetic oligonucleotide
  Sense strand starting at position 2761 of SEQ ID NO: 1243122
uugagaggauucuucucuu

SEQ ID NO: 1396617 - RNA, 19 nt, Artificial Sequence
  Description of Artificial Sequence: Synthetic oligonucleotide
  Antisense strand to SEQ ID NO: 1396616
aagagaagaauccucucaa

SEQ ID NO: 1396618 - RNA, 19 nt, Artificial Sequence
  Description of Artificial Sequence: Synthetic oligonucleotide
  Sense strand starting at position 2865 of SEQ ID NO: 1243122
aagucuaauuggcuugaua

SEQ ID NO: 1396619 - RNA, 19 nt, Artificial Sequence
  Description of Artificial Sequence: Synthetic oligonucleotide
  Antisense strand to SEQ ID NO: 1396618
uaucaagccaauuagacuu

SEQ ID NO: 1396620 - RNA, 19 nt, Artificial Sequence
  Description of Artificial Sequence: Synthetic oligonucleotide
  Sense strand starting at position 2867 of SEQ ID NO: 1243122
gucuaauuggcuugauacu

SEQ ID NO: 1396621 - RNA, 19 nt, Artificial Sequence
  Description of Artificial Sequence: Synthetic oligonucleotide
  Antisense strand to SEQ ID NO: 1396620
aguaucaagccaauuagac

SEQ ID NO: 1396622 - RNA, 19 nt, Artificial Sequence
  Description of Artificial Sequence: Synthetic oligonucleotide
  Sense strand starting at position 2897 of SEQ ID NO: 1243122
gccagugcaccuuaauaua

SEQ ID NO: 1396623 - RNA, 19 nt, Artificial Sequence
  Description of Artificial Sequence: Synthetic oligonucleotide
  Antisense strand to SEQ ID NO: 1396622
uauauuaaggugcacuggc

SEQ ID NO: 1396624 - RNA, 19 nt, Artificial Sequence
  Description of Artificial Sequence: Synthetic oligonucleotide
  Sense strand starting at position 3436 of SEQ ID NO: 1243122
ccugguaacugaguaacuu

SEQ ID NO: 1396625 - RNA, 19 nt, Artificial Sequence
  Description of Artificial Sequence: Synthetic oligonucleotide
  Antisense strand to SEQ ID NO: 1396624
aaguuacucaguuaccagg

SEQ ID NO: 1396626 - RNA, 19 nt, Artificial Sequence
  Description of Artificial Sequence: Synthetic oligonucleotide
  Sense strand starting at position 3440 of SEQ ID NO: 1243122
guaacugaguaacuucuua

SEQ ID NO: 1396627 - RNA, 19 nt, Artificial Sequence
  Description of Artificial Sequence: Synthetic oligonucleotide
  Antisense strand to SEQ ID NO: 1396626
uaagaaguuacucaguuac

SEQ ID NO: 1396628 - RNA, 19 nt, Artificial Sequence
  Description of Artificial Sequence: Synthetic oligonucleotide
  Sense strand starting at position 3444 of SEQ ID NO: 1243122
cugaguaacuucuuaccag

SEQ ID NO: 1396629 - RNA, 19 nt, Artificial Sequence
  Description of Artificial Sequence: Synthetic oligonucleotide
  Antisense strand to SEQ ID NO: 1396628
cugguaagaaguuacucag

SEQ ID NO: 1396630 - RNA, 19 nt, Artificial Sequence
  Description of Artificial Sequence: Synthetic oligonucleotide
  Sense strand starting at position 3447 of SEQ ID NO: 1243122
aguaacuucuuaccaguaa

SEQ ID NO: 1396631 - RNA, 19 nt, Artificial Sequence
  Description of Artificial Sequence: Synthetic oligonucleotide
  Antisense strand to SEQ ID NO: 1396630
uuacugguaagaaguuacu

SEQ ID NO: 1396632 - RNA, 19 nt, Artificial Sequence
  Description of Artificial Sequence: Synthetic oligonucleotide
  Sense strand starting at position 3954 of SEQ ID NO: 1243122
cacggugaggguuagugaa

SEQ ID NO: 1396633 - RNA, 19 nt, Artificial Sequence
  Description of Artificial Sequence: Synthetic oligonucleotide
  Antisense strand to SEQ ID NO: 1396632
uucacuaacccucaccgug

SEQ ID NO: 1396634 - RNA, 19 nt, Artificial Sequence
  Description of Artificial Sequence: Synthetic oligonucleotide
  Sense strand starting at position 505 of SEQ ID NO: 1243123
gcaggugaauucgaccagu

SEQ ID NO: 1396635 - RNA, 19 nt, Artificial Sequence
  Description of Artificial Sequence: Synthetic oligonucleotide
  Antisense strand to SEQ ID NO: 1396634
acuggucgaauucaccugc

SEQ ID NO: 1396636 - RNA, 19 nt, Artificial Sequence
  Description of Artificial Sequence: Synthetic oligonucleotide
  Sense strand starting at position 511 of SEQ ID NO: 1243123
gaauucgaccagugggaaa

SEQ ID NO: 1396637 - RNA, 19 nt, Artificial Sequence
  Description of Artificial Sequence: Synthetic oligonucleotide
  Antisense strand to SEQ ID NO: 1396636
uuucccacuggucgaauuc

SEQ ID NO: 1396638 - RNA, 19 nt, Artificial Sequence
  Description of Artificial Sequence: Synthetic oligonucleotide
  Sense strand starting at position 636 of SEQ ID NO: 1243123
ugugccuuacuugguuaau

SEQ ID NO: 1396639 - RNA, 19 nt, Artificial Sequence
  Description of Artificial Sequence: Synthetic oligonucleotide
  Antisense strand to SEQ ID NO: 1396638
auuaaccaaguaaggcaca

SEQ ID NO: 1396640 - RNA, 19 nt, Artificial Sequence
  Description of Artificial Sequence: Synthetic oligonucleotide
  Sense strand starting at position 637 of SEQ ID NO: 1243123
gugccuuacuugguuaauu

SEQ ID NO: 1396641 - RNA, 19 nt, Artificial Sequence
  Description of Artificial Sequence: Synthetic oligonucleotide
  Antisense strand to SEQ ID NO: 1396640
aauuaaccaaguaaggcac

SEQ ID NO: 1396642 - RNA, 19 nt, Artificial Sequence
  Description of Artificial Sequence: Synthetic oligonucleotide
  Sense strand starting at position 638 of SEQ ID NO: 1243123
ugccuuacuugguuaauuu

SEQ ID NO: 1396643 - RNA, 19 nt, Artificial Sequence
  Description of Artificial Sequence: Synthetic oligonucleotide
  Antisense strand to SEQ ID NO: 1396642
aaauuaaccaaguaaggca

SEQ ID NO: 1396644 - RNA, 19 nt, Artificial Sequence
  Description of Artificial Sequence: Synthetic oligonucleotide
  Sense strand starting at position 645 of SEQ ID NO: 1243123
cuugguuaauuuggaagua

SEQ ID NO: 1396645 - RNA, 19 nt, Artificial Sequence
  Description of Artificial Sequence: Synthetic oligonucleotide
  Antisense strand to SEQ ID NO: 1396644
uacuuccaaauuaaccaag

SEQ ID NO: 1396646 - RNA, 19 nt, Artificial Sequence
  Description of Artificial Sequence: Synthetic oligonucleotide
  Sense strand starting at position 1097 of SEQ ID NO: 1243123
gugcuuggaucuguuugga

SEQ ID NO: 1396647 - RNA, 19 nt, Artificial Sequence
  Description of Artificial Sequence: Synthetic oligonucleotide
  Antisense strand to SEQ ID NO: 1396646
uccaaacagauccaagcac

SEQ ID NO: 1396648 - RNA, 19 nt, Artificial Sequence
  Description of Artificial Sequence: Synthetic oligonucleotide
  Sense strand starting at position 1100 of SEQ ID NO: 1243123
cuuggaucuguuuggagac

SEQ ID NO: 1396649 - RNA, 19 nt, Artificial Sequence
  Description of Artificial Sequence: Synthetic oligonucleotide
  Antisense strand to SEQ ID NO: 1396648
gucuccaaacagauccaag

SEQ ID NO: 1396650 - RNA, 19 nt, Artificial Sequence
  Description of Artificial Sequence: Synthetic oligonucleotide
  Sense strand starting at position 1446 of SEQ ID NO: 1243123
cccguuuaugcagaugcaa

SEQ ID NO: 1396651 - RNA, 19 nt, Artificial Sequence
  Description of Artificial Sequence: Synthetic oligonucleotide
  Antisense strand to SEQ ID NO: 1396650
uugcaucugcauaaacggg

SEQ ID NO: 1396652 - RNA, 19 nt, Artificial Sequence
  Description of Artificial Sequence: Synthetic oligonucleotide
  Sense strand starting at position 1448 of SEQ ID NO: 1243123
cguuuaugcagaugcaaag

SEQ ID NO: 1396653 - RNA, 19 nt, Artificial Sequence
  Description of Artificial Sequence: Synthetic oligonucleotide
  Antisense strand to SEQ ID NO: 1396652
cuuugcaucugcauaaacg

SEQ ID NO: 1396654 - RNA, 19 nt, Artificial Sequence
  Description of Artificial Sequence: Synthetic oligonucleotide
  Sense strand starting at position 1726 of SEQ ID NO: 1243123
aguuuccuuguugguaaga

SEQ ID NO: 1396655 - RNA, 19 nt, Artificial Sequence
  Description of Artificial Sequence: Synthetic oligonucleotide
  Antisense strand to SEQ ID NO: 1396654
ucuuaccaacaaggaaacu

SEQ ID NO: 1396656 - RNA, 19 nt, Artificial Sequence
  Description of Artificial Sequence: Synthetic oligonucleotide
  Sense strand starting at position 1727 of SEQ ID NO: 1243123
guuuccuuguugguaagaa

SEQ ID NO: 1396657 - RNA, 19 nt, Artificial Sequence
  Description of Artificial Sequence: Synthetic oligonucleotide
  Antisense strand to SEQ ID NO: 1396656
uucuuaccaacaaggaaac

SEQ ID NO: 1396658 - RNA, 19 nt, Artificial Sequence
  Description of Artificial Sequence: Synthetic oligonucleotide
  Sense strand starting at position 1728 of SEQ ID NO: 1243123
uuuccuuguugguaagaag

SEQ ID NO: 1396659 - RNA, 19 nt, Artificial Sequence
  Description of Artificial Sequence: Synthetic oligonucleotide
  Antisense strand to SEQ ID NO: 1396658
cuucuuaccaacaaggaaa

SEQ ID NO: 1396660 - RNA, 19 nt, Artificial Sequence
  Description of Artificial Sequence: Synthetic oligonucleotide
  Sense strand starting at position 2494 of SEQ ID NO: 1243123
ucuguuaucuuggagacca

SEQ ID NO: 1396661 - RNA, 19 nt, Artificial Sequence
  Description of Artificial Sequence: Synthetic oligonucleotide
  Antisense strand to SEQ ID NO: 1396660
uggucuccaagauaacaga

SEQ ID NO: 1396662 - RNA, 19 nt, Artificial Sequence
  Description of Artificial Sequence: Synthetic oligonucleotide
  Sense strand starting at position 2496 of SEQ ID NO: 1243123
uguuaucuuggagaccagu

SEQ ID NO: 1396663 - RNA, 19 nt, Artificial Sequence
  Description of Artificial Sequence: Synthetic oligonucleotide
  Antisense strand to SEQ ID NO: 1396662
acuggucuccaagauaaca

SEQ ID NO: 1396664 - RNA, 19 nt, Artificial Sequence
  Description of Artificial Sequence: Synthetic oligonucleotide
  Sense strand starting at position 3033 of SEQ ID NO: 1243123
gccauugcauccggcuaau

SEQ ID NO: 1396665 - RNA, 19 nt, Artificial Sequence
  Description of Artificial Sequence: Synthetic oligonucleotide
  Antisense strand to SEQ ID NO: 1396664
auuagccggaugcaauggc

SEQ ID NO: 1396666 - RNA, 19 nt, Artificial Sequence
  Description of Artificial Sequence: Synthetic oligonucleotide
  Sense strand starting at position 3036 of SEQ ID NO: 1243123
auugcauccggcuaauguu

SEQ ID NO: 1396667 - RNA, 19 nt, Artificial Sequence
  Description of Artificial Sequence: Synthetic oligonucleotide
  Antisense strand to SEQ ID NO: 1396666
aacauuagccggaugcaau

SEQ ID NO: 1396668 - RNA, 19 nt, Artificial Sequence
  Description of Artificial Sequence: Synthetic oligonucleotide
  Sense strand starting at position 3187 of SEQ ID NO: 1243123
acauguauaucuggcauca

SEQ ID NO: 1396669 - RNA, 19 nt, Artificial Sequence
  Description of Artificial Sequence: Synthetic oligonucleotide
  Antisense strand to SEQ ID NO: 1396668
ugaugccagauauacaugu

SEQ ID NO: 1396670 - RNA, 19 nt, Artificial Sequence
  Description of Artificial Sequence: Synthetic oligonucleotide
  Sense strand starting at position 3189 of SEQ ID NO: 1243123
auguauaucuggcaucaua

SEQ ID NO: 1396671 - RNA, 19 nt, Artificial Sequence
  Description of Artificial Sequence: Synthetic oligonucleotide
  Antisense strand to SEQ ID NO: 1396670
uaugaugccagauauacau

SEQ ID NO: 1396672 - RNA, 19 nt, Artificial Sequence
  Description of Artificial Sequence: Synthetic oligonucleotide
  Sense strand starting at position 3199 of SEQ ID NO: 1243123
ggcaucauauggccaguua

SEQ ID NO: 1396673 - RNA, 19 nt, Artificial Sequence
  Description of Artificial Sequence: Synthetic oligonucleotide
  Antisense strand to SEQ ID NO: 1396672
uaacuggccauaugaugcc

SEQ ID NO: 1396674 - RNA, 19 nt, Artificial Sequence
  Description of Artificial Sequence: Synthetic oligonucleotide
  Sense strand starting at position 3250 of SEQ ID NO: 1243123
caggaaacuccuggaucga

SEQ ID NO: 1396675 - RNA, 19 nt, Artificial Sequence
  Description of Artificial Sequence: Synthetic oligonucleotide
  Antisense strand to SEQ ID NO: 1396674
ucgauccaggaguuuccug

SEQ ID NO: 1396676 - RNA, 19 nt, Artificial Sequence
  Description of Artificial Sequence: Synthetic oligonucleotide
  Sense strand starting at position 3370 of SEQ ID NO: 1243123
cccugauucugaccacaug

SEQ ID NO: 1396677 - RNA, 19 nt, Artificial Sequence
  Description of Artificial Sequence: Synthetic oligonucleotide
  Antisense strand to SEQ ID NO: 1396676
cauguggucagaaucaggg

SEQ ID NO: 1396678 - RNA, 19 nt, Artificial Sequence
  Description of Artificial Sequence: Synthetic oligonucleotide
  Sense strand starting at position 355 of SEQ ID NO: 1243124
aaggaaaugugucugcauu

SEQ ID NO: 1396679 - RNA, 19 nt, Artificial Sequence
  Description of Artificial Sequence: Synthetic oligonucleotide
  Antisense strand to SEQ ID NO: 1396678
aaugcagacacauuuccuu

SEQ ID NO: 1396680 - RNA, 19 nt, Artificial Sequence
  Description of Artificial Sequence: Synthetic oligonucleotide
  Sense strand starting at position 356 of SEQ ID NO: 1243124
aggaaaugugucugcauuc

SEQ ID NO: 1396681 - RNA, 19 nt, Artificial Sequence
  Description of Artificial Sequence: Synthetic oligonucleotide
  Antisense strand to SEQ ID NO: 1396680
gaaugcagacacauuuccu

SEQ ID NO: 1396682 - RNA, 19 nt, Artificial Sequence
  Description of Artificial Sequence: Synthetic oligonucleotide
  Sense strand starting at position 461 of SEQ ID NO: 1243124
auggcuuguguugaaacau

SEQ ID NO: 1396683 - RNA, 19 nt, Artificial Sequence
  Description of Artificial Sequence: Synthetic oligonucleotide
  Antisense strand to SEQ ID NO: 1396682
auguuucaacacaagccau

SEQ ID NO: 1396684 - RNA, 19 nt, Artificial Sequence
  Description of Artificial Sequence: Synthetic oligonucleotide
  Sense strand starting at position 514 of SEQ ID NO: 1243124
ugaagaguagcguauuugu

SEQ ID NO: 1396685 - RNA, 19 nt, Artificial Sequence
  Description of Artificial Sequence: Synthetic oligonucleotide
  Antisense strand to SEQ ID NO: 1396684
acaaauacgcuacucuuca

SEQ ID NO: 1396686 - RNA, 19 nt, Artificial Sequence
  Description of Artificial Sequence: Synthetic oligonucleotide
  Sense strand starting at position 522 of SEQ ID NO: 1243124
agcguauuuguuugguacu

SEQ ID NO: 1396687 - RNA, 19 nt, Artificial Sequence
  Description of Artificial Sequence: Synthetic oligonucleotide
  Antisense strand to SEQ ID NO: 1396686
aguaccaaacaaauacgcu

SEQ ID NO: 1396688 - RNA, 19 nt, Artificial Sequence
  Description of Artificial Sequence: Synthetic oligonucleotide
  Sense strand starting at position 524 of SEQ ID NO: 1243124
cguauuuguuugguacuuu

SEQ ID NO: 1396689 - RNA, 19 nt, Artificial Sequence
  Description of Artificial Sequence: Synthetic oligonucleotide
  Antisense strand to SEQ ID NO: 1396688
aaaguaccaaacaaauacg

SEQ ID NO: 1396690 - RNA, 19 nt, Artificial Sequence
  Description of Artificial Sequence: Synthetic oligonucleotide
  Sense strand starting at position 528 of SEQ ID NO: 1243124
uuuguuugguacuuugaaa

SEQ ID NO: 1396691 - RNA, 19 nt, Artificial Sequence
  Description of Artificial Sequence: Synthetic oligonucleotide
  Antisense strand to SEQ ID NO: 1396690
uuucaaaguaccaaacaaa

SEQ ID NO: 1396692 - RNA, 19 nt, Artificial Sequence
  Description of Artificial Sequence: Synthetic oligonucleotide
  Sense strand starting at position 707 of SEQ ID NO: 1243124
aagagauccucccuccgua

SEQ ID NO: 1396693 - RNA, 19 nt, Artificial Sequence
  Description of Artificial Sequence: Synthetic oligonucleotide
  Antisense strand to SEQ ID NO: 1396692
uacggagggaggaucucuu

SEQ ID NO: 1396694 - RNA, 19 nt, Artificial Sequence
  Description of Artificial Sequence: Synthetic oligonucleotide
  Sense strand starting at position 784 of SEQ ID NO: 1243124
uuuagucagcaguaauaaa

SEQ ID NO: 1396695 - RNA, 19 nt, Artificial Sequence
  Description of Artificial Sequence: Synthetic oligonucleotide
  Antisense strand to SEQ ID NO: 1396694
uuuauuacugcugacuaaa

SEQ ID NO: 1396696 - RNA, 19 nt, Artificial Sequence
  Description of Artificial Sequence: Synthetic oligonucleotide
  Sense strand starting at position 919 of SEQ ID NO: 1243124
ggauguuuacagggaugug

SEQ ID NO: 1396697 - RNA, 19 nt, Artificial Sequence
  Description of Artificial Sequence: Synthetic oligonucleotide
  Antisense strand to SEQ ID NO: 1396696
cacaucccuguaaacaucc

SEQ ID NO: 1396698 - RNA, 19 nt, Artificial Sequence
  Description of Artificial Sequence: Synthetic oligonucleotide
  Sense strand starting at position 920 of SEQ ID NO: 1243124
gauguuuacagggaugugu

SEQ ID NO: 1396699 - RNA, 19 nt, Artificial Sequence
  Description of Artificial Sequence: Synthetic oligonucleotide
  Antisense strand to SEQ ID NO: 1396698
acacaucccuguaaacauc

SEQ ID NO: 1396700 - RNA, 19 nt, Artificial Sequence
  Description of Artificial Sequence: Synthetic oligonucleotide
  Sense strand starting at position 922 of SEQ ID NO: 1243124
uguuuacagggauguguua

SEQ ID NO: 1396701 - RNA, 19 nt, Artificial Sequence
  Description of Artificial Sequence: Synthetic oligonucleotide
  Antisense strand to SEQ ID NO: 1396700
uaacacaucccuguaaaca

SEQ ID NO: 1396702 - RNA, 19 nt, Artificial Sequence
  Description of Artificial Sequence: Synthetic oligonucleotide
  Sense strand starting at position 924 of SEQ ID NO: 1243124
uuuacagggauguguuaau

SEQ ID NO: 1396703 - RNA, 19 nt, Artificial Sequence
  Description of Artificial Sequence: Synthetic oligonucleotide
  Antisense strand to SEQ ID NO: 1396702
auuaacacaucccuguaaa

SEQ ID NO: 1396704 - RNA, 19 nt, Artificial Sequence
  Description of Artificial Sequence: Synthetic oligonucleotide
  Sense strand starting at position 1050 of SEQ ID NO: 1243124
acuuguuucugggcaaacu

SEQ ID NO: 1396705 - RNA, 19 nt, Artificial Sequence
  Description of Artificial Sequence: Synthetic oligonucleotide
  Antisense strand to SEQ ID NO: 1396704
aguuugcccagaaacaagu

SEQ ID NO: 1396706 - RNA, 19 nt, Artificial Sequence
  Description of Artificial Sequence: Synthetic oligonucleotide
  Sense strand starting at position 1051 of SEQ ID NO: 1243124
cuuguuucugggcaaacuu

SEQ ID NO: 1396707 - RNA, 19 nt, Artificial Sequence
  Description of Artificial Sequence: Synthetic oligonucleotide
  Antisense strand to SEQ ID NO: 1396706
aaguuugcccagaaacaag

SEQ ID NO: 1396708 - RNA, 19 nt, Artificial Sequence
  Description of Artificial Sequence: Synthetic oligonucleotide
  Sense strand starting at position 1246 of SEQ ID NO: 1243124
agggaaacgugaagauugu

SEQ ID NO: 1396709 - RNA, 19 nt, Artificial Sequence
  Description of Artificial Sequence: Synthetic oligonucleotide
  Antisense strand to SEQ ID NO: 1396708
acaaucuucacguuucccu

SEQ ID NO: 1396710 - RNA, 19 nt, Artificial Sequence
  Description of Artificial Sequence: Synthetic oligonucleotide
  Sense strand starting at position 1299 of SEQ ID NO: 1243124
agcauaucuggccaccuaa

SEQ ID NO: 1396711 - RNA, 19 nt, Artificial Sequence
  Description of Artificial Sequence: Synthetic oligonucleotide
  Antisense strand to SEQ ID NO: 1396710
uuagguggccagauaugcu

SEQ ID NO: 1396712 - RNA, 19 nt, Artificial Sequence
  Description of Artificial Sequence: Synthetic oligonucleotide
  Sense strand starting at position 1319 of SEQ ID NO: 1243124
acacaaaguguuugaaacu

SEQ ID NO: 1396713 - RNA, 19 nt, Artificial Sequence
  Description of Artificial Sequence: Synthetic oligonucleotide
  Antisense strand to SEQ ID NO: 1396712
aguuucaaacacuuugugu

SEQ ID NO: 1396714 - RNA, 19 nt, Artificial Sequence
  Description of Artificial Sequence: Synthetic oligonucleotide
  Sense strand starting at position 2247 of SEQ ID NO: 1243124
agaggugaguuugcagaca

SEQ ID NO: 1396715 - RNA, 19 nt, Artificial Sequence
  Description of Artificial Sequence: Synthetic oligonucleotide
  Antisense strand to SEQ ID NO: 1396714
ugucugcaaacucaccucu

SEQ ID NO: 1396716 - RNA, 19 nt, Artificial Sequence
  Description of Artificial Sequence: Synthetic oligonucleotide
  Sense strand starting at position 2656 of SEQ ID NO: 1243124
uagucucaggguugacaau

SEQ ID NO: 1396717 - RNA, 19 nt, Artificial Sequence
  Description of Artificial Sequence: Synthetic oligonucleotide
  Antisense strand to SEQ ID NO: 1396716
auugucaacccugagacua

SEQ ID NO: 1396718 - RNA, 19 nt, Artificial Sequence
  Description of Artificial Sequence: Synthetic oligonucleotide
  Sense strand starting at position 2755 of SEQ ID NO: 1243124
cgguauuaccaagagcugu

SEQ ID NO: 1396719 - RNA, 19 nt, Artificial Sequence
  Description of Artificial Sequence: Synthetic oligonucleotide
  Antisense strand to SEQ ID NO: 1396718
acagcucuugguaauaccg

SEQ ID NO: 1396720 - RNA, 19 nt, Artificial Sequence
  Description of Artificial Sequence: Synthetic oligonucleotide
  Sense strand starting at position 2796 of SEQ ID NO: 1243124
gacuucucugagcgguaaa

SEQ ID NO: 1396721 - RNA, 19 nt, Artificial Sequence
  Description of Artificial Sequence: Synthetic oligonucleotide
  Antisense strand to SEQ ID NO: 1396720
uuuaccgcucagagaaguc

SEQ ID NO: 1396722 - RNA, 19 nt, Artificial Sequence
  Description of Artificial Sequence: Synthetic oligonucleotide
  Sense strand starting at position 2799 of SEQ ID NO: 1243124
uucucugagcgguaaauau

SEQ ID NO: 1396723 - RNA, 19 nt, Artificial Sequence
  Description of Artificial Sequence: Synthetic oligonucleotide
  Antisense strand to SEQ ID NO: 1396722
auauuuaccgcucagagaa

SEQ ID NO: 1396724 - RNA, 19 nt, Artificial Sequence
  Description of Artificial Sequence: Synthetic oligonucleotide
  Sense strand starting at position 2828 of SEQ ID NO: 1243124
ugcauaucgguguauugaa

SEQ ID NO: 1396725 - RNA, 19 nt, Artificial Sequence
  Description of Artificial Sequence: Synthetic oligonucleotide
  Antisense strand to SEQ ID NO: 1396724
uucaauacaccgauaugca

SEQ ID NO: 1396726 - RNA, 19 nt, Artificial Sequence
  Description of Artificial Sequence: Synthetic oligonucleotide
  Sense strand starting at position 3085 of SEQ ID NO: 1243124
agacuagauugggugcuaa

SEQ ID NO: 1396727 - RNA, 19 nt, Artificial Sequence
  Description of Artificial Sequence: Synthetic oligonucleotide
  Antisense strand to SEQ ID NO: 1396726
uuagcacccaaucuagucu

SEQ ID NO: 1396728 - RNA, 19 nt, Artificial Sequence
  Description of Artificial Sequence: Synthetic oligonucleotide
  Sense strand starting at position 3130 of SEQ ID NO: 1243124
cguggauuaccucauguaa

SEQ ID NO: 1396729 - RNA, 19 nt, Artificial Sequence
  Description of Artificial Sequence: Synthetic oligonucleotide
  Antisense strand to SEQ ID NO: 1396728
uuacaugagguaauccacg

SEQ ID NO: 1396730 - RNA, 19 nt, Artificial Sequence
  Description of Artificial Sequence: Synthetic oligonucleotide
  Sense strand starting at position 3242 of SEQ ID NO: 1243124
gcugcaccgcagucaaauu

SEQ ID NO: 1396731 - RNA, 19 nt, Artificial Sequence
  Description of Artificial Sequence: Synthetic oligonucleotide
  Antisense strand to SEQ ID NO: 1396730
aauuugacugcggugcagc

SEQ ID NO: 1396732 - RNA, 19 nt, Artificial Sequence
  Description of Artificial Sequence: Synthetic oligonucleotide
  Sense strand starting at position 3343 of SEQ ID NO: 1243124
gagacugucgcucaaguca

SEQ ID NO: 1396733 - RNA, 19 nt, Artificial Sequence
  Description of Artificial Sequence: Synthetic oligonucleotide
  Antisense strand to SEQ ID NO: 1396732
ugacuugagcgacagucuc

SEQ ID NO: 1396734 - RNA, 19 nt, Artificial Sequence
  Description of Artificial Sequence: Synthetic oligonucleotide
  Sense strand starting at position 3388 of SEQ ID NO: 1243124
guugcuucguggaugguau

SEQ ID NO: 1396735 - RNA, 19 nt, Artificial Sequence
  Description of Artificial Sequence: Synthetic oligonucleotide
  Antisense strand to SEQ ID NO: 1396734
auaccauccacgaagcaac

SEQ ID NO: 1396736 - RNA, 19 nt, Artificial Sequence
  Description of Artificial Sequence: Synthetic oligonucleotide
  Sense strand starting at position 3399 of SEQ ID NO: 1243124
gaugguauuugggaaguuu

SEQ ID NO: 1396737 - RNA, 19 nt, Artificial Sequence
  Description of Artificial Sequence: Synthetic oligonucleotide
  Antisense strand to SEQ ID NO: 1396736
aaacuucccaaauaccauc

SEQ ID NO: 1396738 - RNA, 19 nt, Artificial Sequence
  Description of Artificial Sequence: Synthetic oligonucleotide
  Sense strand starting at position 3458 of SEQ ID NO: 1243124
uguauugagcaguauugaa

SEQ ID NO: 1396739 - RNA, 19 nt, Artificial Sequence
  Description of Artificial Sequence: Synthetic oligonucleotide
  Antisense strand to SEQ ID NO: 1396738
uucaauacugcucaauaca

SEQ ID NO: 1396740 - RNA, 19 nt, Artificial Sequence
  Description of Artificial Sequence: Synthetic oligonucleotide
  Sense strand starting at position 3500 of SEQ ID NO: 1243124
ggugaacaagccuaaucuu

SEQ ID NO: 1396741 - RNA, 19 nt, Artificial Sequence
  Description of Artificial Sequence: Synthetic oligonucleotide
  Antisense strand to SEQ ID NO: 1396740
aagauuaggcuuguucacc

SEQ ID NO: 1396742 - RNA, 19 nt, Artificial Sequence
  Description of Artificial Sequence: Synthetic oligonucleotide
  Sense strand starting at position 3761 of SEQ ID NO: 1243124
uagauuauacugugaaugu

SEQ ID NO: 1396743 - RNA, 19 nt, Artificial Sequence
  Description of Artificial Sequence: Synthetic oligonucleotide
  Antisense strand to SEQ ID NO: 1396742
acauucacaguauaaucua

SEQ ID NO: 1396744 - RNA, 19 nt, Artificial Sequence
  Description of Artificial Sequence: Synthetic oligonucleotide
  Sense strand starting at position 3793 of SEQ ID NO: 1243124
ggauuuggcuuugaagaag

SEQ ID NO: 1396745 - RNA, 19 nt, Artificial Sequence
  Description of Artificial Sequence: Synthetic oligonucleotide
  Antisense strand to SEQ ID NO: 1396744
cuucuucaaagccaaaucc

SEQ ID NO: 1396746 - RNA, 19 nt, Artificial Sequence
  Description of Artificial Sequence: Synthetic oligonucleotide
  Sense strand starting at position 3805 of SEQ ID NO: 1243124
gaagaaguuugagagaaug

SEQ ID NO: 1396747 - RNA, 19 nt, Artificial Sequence
  Description of Artificial Sequence: Synthetic oligonucleotide
  Antisense strand to SEQ ID NO: 1396746
cauucucucaaacuucuuc

SEQ ID NO: 1396748 - RNA, 19 nt, Artificial Sequence
  Description of Artificial Sequence: Synthetic oligonucleotide
  Sense strand starting at position 3813 of SEQ ID NO: 1243124
uugagagaauguuuaaguu

SEQ ID NO: 1396749 - RNA, 19 nt, Artificial Sequence
  Description of Artificial Sequence: Synthetic oligonucleotide
  Antisense strand to SEQ ID NO: 1396748
aacuuaaacauucucucaa

SEQ ID NO: 1396750 - RNA, 19 nt, Artificial Sequence
  Description of Artificial Sequence: Synthetic oligonucleotide
  Sense strand starting at position 3817 of SEQ ID NO: 1243124
gagaauguuuaaguuauga

SEQ ID NO: 1396751 - RNA, 19 nt, Artificial Sequence
  Description of Artificial Sequence: Synthetic oligonucleotide
  Antisense strand to SEQ ID NO: 1396750
ucauaacuuaaacauucuc

SEQ ID NO: 1396752 - RNA, 19 nt, Artificial Sequence
  Description of Artificial Sequence: Synthetic oligonucleotide
  Sense strand starting at position 3828 of SEQ ID NO: 1243124
aguuaugaacacugugaau

SEQ ID NO: 1396753 - RNA, 19 nt, Artificial Sequence
  Description of Artificial Sequence: Synthetic oligonucleotide
  Antisense strand to SEQ ID NO: 1396752
auucacaguguucauaacu

SEQ ID NO: 1396754 - RNA, 19 nt, Artificial Sequence
  Description of Artificial Sequence: Synthetic oligonucleotide
  Sense strand starting at position 3830 of SEQ ID NO: 1243124
uuaugaacacugugaauau

SEQ ID NO: 1396755 - RNA, 19 nt, Artificial Sequence
  Description of Artificial Sequence: Synthetic oligonucleotide
  Antisense strand to SEQ ID NO: 1396754
auauucacaguguucauaa

SEQ ID NO: 1396756 - RNA, 19 nt, Artificial Sequence
  Description of Artificial Sequence: Synthetic oligonucleotide
  Sense strand starting at position 3912 of SEQ ID NO: 1243124
agacaagaaucguaauuua

SEQ ID NO: 1396757 - RNA, 19 nt, Artificial Sequence
  Description of Artificial Sequence: Synthetic oligonucleotide
  Antisense strand to SEQ ID NO: 1396756
uaaauuacgauucuugucu

SEQ ID NO: 1396758 - RNA, 19 nt, Artificial Sequence
  Description of Artificial Sequence: Synthetic oligonucleotide
  Sense strand starting at position 854 of SEQ ID NO: 1243125
aggaguagcugggaucuaa

SEQ ID NO: 1396759 - RNA, 19 nt, Artificial Sequence
  Description of Artificial Sequence: Synthetic oligonucleotide
  Antisense strand to SEQ ID NO: 1396758
uuagaucccagcuacuccu

SEQ ID NO: 1396760 - RNA, 19 nt, Artificial Sequence
  Description of Artificial Sequence: Synthetic oligonucleotide
  Sense strand starting at position 858 of SEQ ID NO: 1243125
guagcugggaucuaauuaa

SEQ ID NO: 1396761 - RNA, 19 nt, Artificial Sequence
  Description of Artificial Sequence: Synthetic oligonucleotide
  Antisense strand to SEQ ID NO: 1396760
uuaauuagaucccagcuac

SEQ ID NO: 1396762 - RNA, 19 nt, Artificial Sequence
  Description of Artificial Sequence: Synthetic oligonucleotide
  Sense strand starting at position 906 of SEQ ID NO: 1243125
augccauccuaugcuagaa

SEQ ID NO: 1396763 - RNA, 19 nt, Artificial Sequence
  Description of Artificial Sequence: Synthetic oligonucleotide
  Antisense strand to SEQ ID NO: 1396762
uucuagcauaggauggcau

SEQ ID NO: 1396764 - RNA, 19 nt, Artificial Sequence
  Description of Artificial Sequence: Synthetic oligonucleotide
  Sense strand starting at position 908 of SEQ ID NO: 1243125
gccauccuaugcuagaaua

SEQ ID NO: 1396765 - RNA, 19 nt, Artificial Sequence
  Description of Artificial Sequence: Synthetic oligonucleotide
  Antisense strand to SEQ ID NO: 1396764
uauucuagcauaggauggc

SEQ ID NO: 1396766 - RNA, 19 nt, Artificial Sequence
  Description of Artificial Sequence: Synthetic oligonucleotide
  Sense strand starting at position 1001 of SEQ ID NO: 1243125
gggccugaggcucaaagua

SEQ ID NO: 1396767 - RNA, 19 nt, Artificial Sequence
  Description of Artificial Sequence: Synthetic oligonucleotide
  Antisense strand to SEQ ID NO: 1396766
uacuuugagccucaggccc

SEQ ID NO: 1396768 - RNA, 19 nt, Artificial Sequence
  Description of Artificial Sequence: Synthetic oligonucleotide
  Sense strand starting at position 1040 of SEQ ID NO: 1243125
gguaguaaccacggacaaa

SEQ ID NO: 1396769 - RNA, 19 nt, Artificial Sequence
  Description of Artificial Sequence: Synthetic oligonucleotide
  Antisense strand to SEQ ID NO: 1396768
uuuguccgugguuacuacc

SEQ ID NO: 1396770 - RNA, 19 nt, Artificial Sequence
  Description of Artificial Sequence: Synthetic oligonucleotide
  Sense strand starting at position 1097 of SEQ ID NO: 1243125
cugagauggcucggagaag

SEQ ID NO: 1396771 - RNA, 19 nt, Artificial Sequence
  Description of Artificial Sequence: Synthetic oligonucleotide
  Antisense strand to SEQ ID NO: 1396770
cuucuccgagccaucucag

SEQ ID NO: 1396772 - RNA, 19 nt, Artificial Sequence
  Description of Artificial Sequence: Synthetic oligonucleotide
  Sense strand starting at position 1098 of SEQ ID NO: 1243125
ugagauggcucggagaaga

SEQ ID NO: 1396773 - RNA, 19 nt, Artificial Sequence
  Description of Artificial Sequence: Synthetic oligonucleotide
  Antisense strand to SEQ ID NO: 1396772
ucuucuccgagccaucuca

SEQ ID NO: 1396774 - RNA, 19 nt, Artificial Sequence
  Description of Artificial Sequence: Synthetic oligonucleotide
  Sense strand starting at position 1175 of SEQ ID NO: 1243125
agacucagguccucaguga

SEQ ID NO: 1396775 - RNA, 19 nt, Artificial Sequence
  Description of Artificial Sequence: Synthetic oligonucleotide
  Antisense strand to SEQ ID NO: 1396774
ucacugaggaccugagucu

SEQ ID NO: 1396776 - RNA, 19 nt, Artificial Sequence
  Description of Artificial Sequence: Synthetic oligonucleotide
  Sense strand starting at position 1324 of SEQ ID NO: 1243125
aaacguguucccggaggga

SEQ ID NO: 1396777 - RNA, 19 nt, Artificial Sequence
  Description of Artificial Sequence: Synthetic oligonucleotide
  Antisense strand to SEQ ID NO: 1396776
ucccuccgggaacacguuu

SEQ ID NO: 1396778 - RNA, 19 nt, Artificial Sequence
  Description of Artificial Sequence: Synthetic oligonucleotide
  Sense strand starting at position 1696 of SEQ ID NO: 1243125
gcacucagugccuaacuuu

SEQ ID NO: 1396779 - RNA, 19 nt, Artificial Sequence
  Description of Artificial Sequence: Synthetic oligonucleotide
  Antisense strand to SEQ ID NO: 1396778
aaaguuaggcacugagugc

SEQ ID NO: 1396780 - RNA, 19 nt, Artificial Sequence
  Description of Artificial Sequence: Synthetic oligonucleotide
  Sense strand starting at position 2097 of SEQ ID NO: 1243125
agagcagcgucguuuggaa

SEQ ID NO: 1396781 - RNA, 19 nt, Artificial Sequence
  Description of Artificial Sequence: Synthetic oligonucleotide
  Antisense strand to SEQ ID NO: 1396780
uuccaaacgacgcugcucu

SEQ ID NO: 1396782 - RNA, 19 nt, Artificial Sequence
  Description of Artificial Sequence: Synthetic oligonucleotide
  Sense strand starting at position 2101 of SEQ ID NO: 1243125
cagcgucguuuggaaacuu

SEQ ID NO: 1396783 - RNA, 19 nt, Artificial Sequence
  Description of Artificial Sequence: Synthetic oligonucleotide
  Antisense strand to SEQ ID NO: 1396782
aaguuuccaaacgacgcug

SEQ ID NO: 1396784 - RNA, 19 nt, Artificial Sequence
  Description of Artificial Sequence: Synthetic oligonucleotide
  Sense strand starting at position 2474 of SEQ ID NO: 1243125
aacguagugcaccagaauu

SEQ ID NO: 1396785 - RNA, 19 nt, Artificial Sequence
  Description of Artificial Sequence: Synthetic oligonucleotide
  Antisense strand to SEQ ID NO: 1396784
aauucuggugcacuacguu

SEQ ID NO: 1396786 - RNA, 19 nt, Artificial Sequence
  Description of Artificial Sequence: Synthetic oligonucleotide
  Sense strand starting at position 2482 of SEQ ID NO: 1243125
gcaccagaauuuggucaua

SEQ ID NO: 1396787 - RNA, 19 nt, Artificial Sequence
  Description of Artificial Sequence: Synthetic oligonucleotide
  Antisense strand to SEQ ID NO: 1396786
uaugaccaaauucuggugc

SEQ ID NO: 1396788 - RNA, 19 nt, Artificial Sequence
  Description of Artificial Sequence: Synthetic oligonucleotide
  Sense strand starting at position 2487 of SEQ ID NO: 1243125
agaauuuggucauaaacuu

SEQ ID NO: 1396789 - RNA, 19 nt, Artificial Sequence
  Description of Artificial Sequence: Synthetic oligonucleotide
  Antisense strand to SEQ ID NO: 1396788
aaguuuaugaccaaauucu

SEQ ID NO: 1396790 - RNA, 19 nt, Artificial Sequence
  Description of Artificial Sequence: Synthetic oligonucleotide
  Sense strand starting at position 2495 of SEQ ID NO: 1243125
gucauaaacuuggcuuuga

SEQ ID NO: 1396791 - RNA, 19 nt, Artificial Sequence
  Description of Artificial Sequence: Synthetic oligonucleotide
  Antisense strand to SEQ ID NO: 1396790
ucaaagccaaguuuaugac

SEQ ID NO: 1396792 - RNA, 19 nt, Artificial Sequence
  Description of Artificial Sequence: Synthetic oligonucleotide
  Sense strand starting at position 2506 of SEQ ID NO: 1243125
ggcuuugaguccuaguccu

SEQ ID NO: 1396793 - RNA, 19 nt, Artificial Sequence
  Description of Artificial Sequence: Synthetic oligonucleotide
  Antisense strand to SEQ ID NO: 1396792
aggacuaggacucaaagcc

SEQ ID NO: 1396794 - RNA, 19 nt, Artificial Sequence
  Description of Artificial Sequence: Synthetic oligonucleotide
  Sense strand starting at position 2530 of SEQ ID NO: 1243125
uuacuaacuguguggucuu

SEQ ID NO: 1396795 - RNA, 19 nt, Artificial Sequence
  Description of Artificial Sequence: Synthetic oligonucleotide
  Antisense strand to SEQ ID NO: 1396794
aagaccacacaguuaguaa

SEQ ID NO: 1396796 - RNA, 19 nt, Artificial Sequence
  Description of Artificial Sequence: Synthetic oligonucleotide
  Sense strand starting at position 2551 of SEQ ID NO: 1243125
gaaaguuguuuagccucua

SEQ ID NO: 1396797 - RNA, 19 nt, Artificial Sequence
  Description of Artificial Sequence: Synthetic oligonucleotide
  Antisense strand to SEQ ID NO: 1396796
uagaggcuaaacaacuuuc

SEQ ID NO: 1396798 - RNA, 19 nt, Artificial Sequence
  Description of Artificial Sequence: Synthetic oligonucleotide
  Sense strand starting at position 2556 of SEQ ID NO: 1243125
uuguuuagccucuaugacu

SEQ ID NO: 1396799 - RNA, 19 nt, Artificial Sequence
  Description of Artificial Sequence: Synthetic oligonucleotide
  Antisense strand to SEQ ID NO: 1396798
agucauagaggcuaaacaa

SEQ ID NO: 1396800 - RNA, 19 nt, Artificial Sequence
  Description of Artificial Sequence: Synthetic oligonucleotide
  Sense strand starting at position 2905 of SEQ ID NO: 1243125
cgacauuaugcagaggacu

SEQ ID NO: 1396801 - RNA, 19 nt, Artificial Sequence
  Description of Artificial Sequence: Synthetic oligonucleotide
  Antisense strand to SEQ ID NO: 1396800
aguccucugcauaaugucg

SEQ ID NO: 1396802 - RNA, 19 nt, Artificial Sequence
  Description of Artificial Sequence: Synthetic oligonucleotide
  Sense strand starting at position 2967 of SEQ ID NO: 1243125
ugaacuuaguaaguacaau

SEQ ID NO: 1396803 - RNA, 19 nt, Artificial Sequence
  Description of Artificial Sequence: Synthetic oligonucleotide
  Antisense strand to SEQ ID NO: 1396802
auuguacuuacuaaguuca

SEQ ID NO: 1396804 - RNA, 19 nt, Artificial Sequence
  Description of Artificial Sequence: Synthetic oligonucleotide
  Sense strand starting at position 3514 of SEQ ID NO: 1243125
gucuuagucucccuaguag

SEQ ID NO: 1396805 - RNA, 19 nt, Artificial Sequence
  Description of Artificial Sequence: Synthetic oligonucleotide
  Antisense strand to SEQ ID NO: 1396804
cuacuagggagacuaagac

SEQ ID NO: 1396806 - RNA, 19 nt, Artificial Sequence
  Description of Artificial Sequence: Synthetic oligonucleotide
  Sense strand starting at position 3675 of SEQ ID NO: 1243125
aggcgugagccauguaacu

SEQ ID NO: 1396807 - RNA, 19 nt, Artificial Sequence
  Description of Artificial Sequence: Synthetic oligonucleotide
  Antisense strand to SEQ ID NO: 1396806
aguuacauggcucacgccu

SEQ ID NO: 1396808 - RNA, 19 nt, Artificial Sequence
  Description of Artificial Sequence: Synthetic oligonucleotide
  Sense strand starting at position 3677 of SEQ ID NO: 1243125
gcgugagccauguaacuca

SEQ ID NO: 1396809 - RNA, 19 nt, Artificial Sequence
  Description of Artificial Sequence: Synthetic oligonucleotide
  Antisense strand to SEQ ID NO: 1396808
ugaguuacauggcucacgc

SEQ ID NO: 1396810 - RNA, 19 nt, Artificial Sequence
  Description of Artificial Sequence: Synthetic oligonucleotide
  Sense strand starting at position 3684 of SEQ ID NO: 1243125
ccauguaacucagaaggca

SEQ ID NO: 1396811 - RNA, 19 nt, Artificial Sequence
  Description of Artificial Sequence: Synthetic oligonucleotide
  Antisense strand to SEQ ID NO: 1396810
ugccuucugaguuacaugg

SEQ ID NO: 1396812 - RNA, 19 nt, Artificial Sequence
  Description of Artificial Sequence: Synthetic oligonucleotide
  Sense strand starting at position 3799 of SEQ ID NO: 1243125
ccaugcuuggcuggaauuu

SEQ ID NO: 1396813 - RNA, 19 nt, Artificial Sequence
  Description of Artificial Sequence: Synthetic oligonucleotide
  Antisense strand to SEQ ID NO: 1396812
aaauuccagccaagcaugg

SEQ ID NO: 1396814 - RNA, 19 nt, Artificial Sequence
  Description of Artificial Sequence: Synthetic oligonucleotide
  Sense strand starting at position 3874 of SEQ ID NO: 1243125
accgaacauucugguuagu

SEQ ID NO: 1396815 - RNA, 19 nt, Artificial Sequence
  Description of Artificial Sequence: Synthetic oligonucleotide
  Antisense strand to SEQ ID NO: 1396814
acuaaccagaauguucggu

SEQ ID NO: 1396816 - RNA, 19 nt, Artificial Sequence
  Description of Artificial Sequence: Synthetic oligonucleotide
  Sense strand starting at position 3883 of SEQ ID NO: 1243125
ucugguuaguggguacaaa

SEQ ID NO: 1396817 - RNA, 19 nt, Artificial Sequence
  Description of Artificial Sequence: Synthetic oligonucleotide
  Antisense strand to SEQ ID NO: 1396816
uuuguacccacuaaccaga

SEQ ID NO: 1396818 - RNA, 19 nt, Artificial Sequence
  Description of Artificial Sequence: Synthetic oligonucleotide
  Sense strand starting at position 3924 of SEQ ID NO: 1243125
ucuaguauuugggagcaca

SEQ ID NO: 1396819 - RNA, 19 nt, Artificial Sequence
  Description of Artificial Sequence: Synthetic oligonucleotide
  Antisense strand to SEQ ID NO: 1396818
ugugcucccaaauacuaga

SEQ ID NO: 1396820 - RNA, 19 nt, Artificial Sequence
  Description of Artificial Sequence: Synthetic oligonucleotide
  Sense strand starting at position 266 of SEQ ID NO: 1243126
gucaguuuccaguguccca

SEQ ID NO: 1396821 - RNA, 19 nt, Artificial Sequence
  Description of Artificial Sequence: Synthetic oligonucleotide
  Antisense strand to SEQ ID NO: 1396820
ugggacacuggaaacugac

SEQ ID NO: 1396822 - RNA, 19 nt, Artificial Sequence
  Description of Artificial Sequence: Synthetic oligonucleotide
  Sense strand starting at position 312 of SEQ ID NO: 1243126
caagucugucacgagcuau

SEQ ID NO: 1396823 - RNA, 19 nt, Artificial Sequence
  Description of Artificial Sequence: Synthetic oligonucleotide
  Antisense strand to SEQ ID NO: 1396822
auagcucgugacagacuug

SEQ ID NO: 1396824 - RNA, 19 nt, Artificial Sequence
  Description of Artificial Sequence: Synthetic oligonucleotide
  Sense strand starting at position 322 of SEQ ID NO: 1243126
acgagcuauugcugauuua

SEQ ID NO: 1396825 - RNA, 19 nt, Artificial Sequence
  Description of Artificial Sequence: Synthetic oligonucleotide
  Antisense strand to SEQ ID NO: 1396824
uaaaucagcaauagcucgu

SEQ ID NO: 1396826 - RNA, 19 nt, Artificial Sequence
  Description of Artificial Sequence: Synthetic oligonucleotide
  Sense strand starting at position 473 of SEQ ID NO: 1243126
ccugcuacugccgauuuaa

SEQ ID NO: 1396827 - RNA, 19 nt, Artificial Sequence
  Description of Artificial Sequence: Synthetic oligonucleotide
  Antisense strand to SEQ ID NO: 1396826
uuaaaucggcaguagcagg

SEQ ID NO: 1396828 - RNA, 19 nt, Artificial Sequence
  Description of Artificial Sequence: Synthetic oligonucleotide
  Sense strand starting at position 618 of SEQ ID NO: 1243126
gggccauucccuugauccu

SEQ ID NO: 1396829 - RNA, 19 nt, Artificial Sequence
  Description of Artificial Sequence: Synthetic oligonucleotide
  Antisense strand to SEQ ID NO: 1396828
aggaucaagggaauggccc

SEQ ID NO: 1396830 - RNA, 19 nt, Artificial Sequence
  Description of Artificial Sequence: Synthetic oligonucleotide
  Sense strand starting at position 854 of SEQ ID NO: 1243126
acuggaaucugugcucauc

SEQ ID NO: 1396831 - RNA, 19 nt, Artificial Sequence
  Description of Artificial Sequence: Synthetic oligonucleotide
  Antisense strand to SEQ ID NO: 1396830
gaugagcacagauuccagu

SEQ ID NO: 1396832 - RNA, 19 nt, Artificial Sequence
  Description of Artificial Sequence: Synthetic oligonucleotide
  Sense strand starting at position 857 of SEQ ID NO: 1243126
ggaaucugugcucaucuga

SEQ ID NO: 1396833 - RNA, 19 nt, Artificial Sequence
  Description of Artificial Sequence: Synthetic oligonucleotide
  Antisense strand to SEQ ID NO: 1396832
ucagaugagcacagauucc

SEQ ID NO: 1396834 - RNA, 19 nt, Artificial Sequence
  Description of Artificial Sequence: Synthetic oligonucleotide
  Sense strand starting at position 892 of SEQ ID NO: 1243126
accuauaagucccagagcu

SEQ ID NO: 1396835 - RNA, 19 nt, Artificial Sequence
  Description of Artificial Sequence: Synthetic oligonucleotide
  Antisense strand to SEQ ID NO: 1396834
agcucugggacuuauaggu

SEQ ID NO: 1396836 - RNA, 19 nt, Artificial Sequence
  Description of Artificial Sequence: Synthetic oligonucleotide
  Sense strand starting at position 972 of SEQ ID NO: 1243126
agaagucacuccucgaauc

SEQ ID NO: 1396837 - RNA, 19 nt, Artificial Sequence
  Description of Artificial Sequence: Synthetic oligonucleotide
  Antisense strand to SEQ ID NO: 1396836
gauucgaggagugacuucu

SEQ ID NO: 1396838 - RNA, 19 nt, Artificial Sequence
  Description of Artificial Sequence: Synthetic oligonucleotide
  Sense strand starting at position 2762 of SEQ ID NO: 1243126
gccguagucuuuguuuaga

SEQ ID NO: 1396839 - RNA, 19 nt, Artificial Sequence
  Description of Artificial Sequence: Synthetic oligonucleotide
  Antisense strand to SEQ ID NO: 1396838
ucuaaacaaagacuacggc

SEQ ID NO: 1396840 - RNA, 19 nt, Artificial Sequence
  Description of Artificial Sequence: Synthetic oligonucleotide
  Sense strand starting at position 2764 of SEQ ID NO: 1243126
cguagucuuuguuuagacu

SEQ ID NO: 1396841 - RNA, 19 nt, Artificial Sequence
  Description of Artificial Sequence: Synthetic oligonucleotide
  Antisense strand to SEQ ID NO: 1396840
agucuaaacaaagacuacg

SEQ ID NO: 1396842 - RNA, 19 nt, Artificial Sequence
  Description of Artificial Sequence: Synthetic oligonucleotide
  Sense strand starting at position 2887 of SEQ ID NO: 1243126
cccuuagggucgggaagaa

SEQ ID NO: 1396843 - RNA, 19 nt, Artificial Sequence
  Description of Artificial Sequence: Synthetic oligonucleotide
  Antisense strand to SEQ ID NO: 1396842
uucuucccgacccuaaggg

SEQ ID NO: 1396844 - RNA, 19 nt, Artificial Sequence
  Description of Artificial Sequence: Synthetic oligonucleotide
  Sense strand starting at position 2960 of SEQ ID NO: 1243126
cgaggguguccuugaggaa

SEQ ID NO: 1396845 - RNA, 19 nt, Artificial Sequence
  Description of Artificial Sequence: Synthetic oligonucleotide
  Antisense strand to SEQ ID NO: 1396844
uuccucaaggacacccucg

SEQ ID NO: 1396846 - RNA, 19 nt, Artificial Sequence
  Description of Artificial Sequence: Synthetic oligonucleotide
  Sense strand starting at position 2975 of SEQ ID NO: 1243126
ggaacuugugcaggaguga

SEQ ID NO: 1396847 - RNA, 19 nt, Artificial Sequence
  Description of Artificial Sequence: Synthetic oligonucleotide
  Antisense strand to SEQ ID NO: 1396846
ucacuccugcacaaguucc

SEQ ID NO: 1396848 - RNA, 19 nt, Artificial Sequence
  Description of Artificial Sequence: Synthetic oligonucleotide
  Sense strand starting at position 3079 of SEQ ID NO: 1243126
uccauuaucugagcgggaa

SEQ ID NO: 1396849 - RNA, 19 nt, Artificial Sequence
  Description of Artificial Sequence: Synthetic oligonucleotide
  Antisense strand to SEQ ID NO: 1396848
uucccgcucagauaaugga

SEQ ID NO: 1396850 - RNA, 19 nt, Artificial Sequence
  Description of Artificial Sequence: Synthetic oligonucleotide
  Sense strand starting at position 3080 of SEQ ID NO: 1243126
ccauuaucugagcgggaaa

SEQ ID NO: 1396851 - RNA, 19 nt, Artificial Sequence
  Description of Artificial Sequence: Synthetic oligonucleotide
  Antisense strand to SEQ ID NO: 1396850
uuucccgcucagauaaugg

SEQ ID NO: 1396852 - RNA, 19 nt, Artificial Sequence
  Description of Artificial Sequence: Synthetic oligonucleotide
  Sense strand starting at position 3081 of SEQ ID NO: 1243126
cauuaucugagcgggaaag

SEQ ID NO: 1396853 - RNA, 19 nt, Artificial Sequence
  Description of Artificial Sequence: Synthetic oligonucleotide
  Antisense strand to SEQ ID NO: 1396852
cuuucccgcucagauaaug

SEQ ID NO: 1396854 - RNA, 19 nt, Artificial Sequence
  Description of Artificial Sequence: Synthetic oligonucleotide
  Sense strand starting at position 3186 of SEQ ID NO: 1243126
cuccuuuggucccagauga

SEQ ID NO: 1396855 - RNA, 19 nt, Artificial Sequence
  Description of Artificial Sequence: Synthetic oligonucleotide
  Antisense strand to SEQ ID NO: 1396854
ucaucugggaccaaaggag

SEQ ID NO: 1396856 - RNA, 19 nt, Artificial Sequence
  Description of Artificial Sequence: Synthetic oligonucleotide
  Sense strand starting at position 3224 of SEQ ID NO: 1243126
cggaaaucugauggccuga

SEQ ID NO: 1396857 - RNA, 19 nt, Artificial Sequence
  Description of Artificial Sequence: Synthetic oligonucleotide
  Antisense strand to SEQ ID NO: 1396856
ucaggccaucagauuuccg

SEQ ID NO: 1396858 - RNA, 19 nt, Artificial Sequence
  Description of Artificial Sequence: Synthetic oligonucleotide
  Sense strand starting at position 3515 of SEQ ID NO: 1243126
gggcuguggccgugaauua

SEQ ID NO: 1396859 - RNA, 19 nt, Artificial Sequence
  Description of Artificial Sequence: Synthetic oligonucleotide
  Antisense strand to SEQ ID NO: 1396858
uaauucacggccacagccc

SEQ ID NO: 1396860 - RNA, 19 nt, Artificial Sequence
  Description of Artificial Sequence: Synthetic oligonucleotide
  Sense strand starting at position 3516 of SEQ ID NO: 1243126
ggcuguggccgugaauuaa

SEQ ID NO: 1396861 - RNA, 19 nt, Artificial Sequence
  Description of Artificial Sequence: Synthetic oligonucleotide
  Antisense strand to SEQ ID NO: 1396860
uuaauucacggccacagcc

SEQ ID NO: 1396862 - RNA, 19 nt, Artificial Sequence
  Description of Artificial Sequence: Synthetic oligonucleotide
  Sense strand starting at position 3524 of SEQ ID NO: 1243126
ccgugaauuaaccgaucca

SEQ ID NO: 1396863 - RNA, 19 nt, Artificial Sequence
  Description of Artificial Sequence: Synthetic oligonucleotide
  Antisense strand to SEQ ID NO: 1396862
uggaucgguuaauucacgg

SEQ ID NO: 1396864 - RNA, 19 nt, Artificial Sequence
  Description of Artificial Sequence: Synthetic oligonucleotide
  Sense strand starting at position 3525 of SEQ ID NO: 1243126
cgugaauuaaccgauccac

SEQ ID NO: 1396865 - RNA, 19 nt, Artificial Sequence
  Description of Artificial Sequence: Synthetic oligonucleotide
  Antisense strand to SEQ ID NO: 1396864
guggaucgguuaauucacg

SEQ ID NO: 1396866 - RNA, 19 nt, Artificial Sequence
  Description of Artificial Sequence: Synthetic oligonucleotide
  Sense strand starting at position 3548 of SEQ ID NO: 1243126
ugaggaagcugguaagauu

SEQ ID NO: 1396867 - RNA, 19 nt, Artificial Sequence
  Description of Artificial Sequence: Synthetic oligonucleotide
  Antisense strand to SEQ ID NO: 1396866
aaucuuaccagcuuccuca

SEQ ID NO: 1396868 - RNA, 19 nt, Artificial Sequence
  Description of Artificial Sequence: Synthetic oligonucleotide
  Sense strand starting at position 3601 of SEQ ID NO: 1243126
ggguuacagcuuuguccuu

SEQ ID NO: 1396869 - RNA, 19 nt, Artificial Sequence
  Description of Artificial Sequence: Synthetic oligonucleotide
  Antisense strand to SEQ ID NO: 1396868
aaggacaaagcuguaaccc

SEQ ID NO: 1396870 - RNA, 19 nt, Artificial Sequence
  Description of Artificial Sequence: Synthetic oligonucleotide
  Sense strand starting at position 3607 of SEQ ID NO: 1243126
cagcuuuguccuuggguua

SEQ ID NO: 1396871 - RNA, 19 nt, Artificial Sequence
  Description of Artificial Sequence: Synthetic oligonucleotide
  Antisense strand to SEQ ID NO: 1396870
uaacccaaggacaaagcug

SEQ ID NO: 1396872 - RNA, 19 nt, Artificial Sequence
  Description of Artificial Sequence: Synthetic oligonucleotide
  Sense strand starting at position 3639 of SEQ ID NO: 1243126
gggugcaguguauaaauca

SEQ ID NO: 1396873 - RNA, 19 nt, Artificial Sequence
  Description of Artificial Sequence: Synthetic oligonucleotide
  Antisense strand to SEQ ID NO: 1396872
ugauuuauacacugcaccc

SEQ ID NO: 1396874 - RNA, 19 nt, Artificial Sequence
  Description of Artificial Sequence: Synthetic oligonucleotide
  Sense strand starting at position 3648 of SEQ ID NO: 1243126
guauaaaucacaggaggca

SEQ ID NO: 1396875 - RNA, 19 nt, Artificial Sequence
  Description of Artificial Sequence: Synthetic oligonucleotide
  Antisense strand to SEQ ID NO: 1396874
ugccuccugugauuuauac

SEQ ID NO: 1396876 - RNA, 19 nt, Artificial Sequence
  Description of Artificial Sequence: Synthetic oligonucleotide
  Sense strand starting at position 3664 of SEQ ID NO: 1243126
gcagcaauuuggguuccuu

SEQ ID NO: 1396877 - RNA, 19 nt, Artificial Sequence
  Description of Artificial Sequence: Synthetic oligonucleotide
  Antisense strand to SEQ ID NO: 1396876
aaggaacccaaauugcugc

SEQ ID NO: 1396878 - RNA, 19 nt, Artificial Sequence
  Description of Artificial Sequence: Synthetic oligonucleotide
  Sense strand starting at position 3675 of SEQ ID NO: 1243126
gguuccuugcucugcggaa

SEQ ID NO: 1396879 - RNA, 19 nt, Artificial Sequence
  Description of Artificial Sequence: Synthetic oligonucleotide
  Antisense strand to SEQ ID NO: 1396878
uuccgcagagcaaggaacc

SEQ ID NO: 1396880 - RNA, 19 nt, Artificial Sequence
  Description of Artificial Sequence: Synthetic oligonucleotide
  Sense strand starting at position 3677 of SEQ ID NO: 1243126
uuccuugcucugcggaaau

SEQ ID NO: 1396881 - RNA, 19 nt, Artificial Sequence
  Description of Artificial Sequence: Synthetic oligonucleotide
  Antisense strand to SEQ ID NO: 1396880
auuuccgcagagcaaggaa

SEQ ID NO: 1396882 - RNA, 19 nt, Artificial Sequence
  Description of Artificial Sequence: Synthetic oligonucleotide
  Sense strand starting at position 3854 of SEQ ID NO: 1243126
guggaauguuuggcaagcu

SEQ ID NO: 1396883 - RNA, 19 nt, Artificial Sequence
  Description of Artificial Sequence: Synthetic oligonucleotide
  Antisense strand to SEQ ID NO: 1396882
agcuugccaaacauuccac

SEQ ID NO: 1396884 - RNA, 19 nt, Artificial Sequence
  Description of Artificial Sequence: Synthetic oligonucleotide
  Sense strand starting at position 3894 of SEQ ID NO: 1243126
augucauacucugugaaau

SEQ ID NO: 1396885 - RNA, 19 nt, Artificial Sequence
  Description of Artificial Sequence: Synthetic oligonucleotide
  Antisense strand to SEQ ID NO: 1396884
auuucacagaguaugacau

SEQ ID NO: 1396886 - RNA, 19 nt, Artificial Sequence
  Description of Artificial Sequence: Synthetic oligonucleotide
  Sense strand starting at position 3895 of SEQ ID NO: 1243126
ugucauacucugugaaauu

SEQ ID NO: 1396887 - RNA, 19 nt, Artificial Sequence
  Description of Artificial Sequence: Synthetic oligonucleotide
  Antisense strand to SEQ ID NO: 1396886
aauuucacagaguaugaca

SEQ ID NO: 1396888 - RNA, 19 nt, Artificial Sequence
  Description of Artificial Sequence: Synthetic oligonucleotide
  Sense strand starting at position 3896 of SEQ ID NO: 1243126
gucauacucugugaaauug

SEQ ID NO: 1396889 - RNA, 19 nt, Artificial Sequence
  Description of Artificial Sequence: Synthetic oligonucleotide
  Antisense strand to SEQ ID NO: 1396888
caauuucacagaguaugac

SEQ ID NO: 1396890 - RNA, 19 nt, Artificial Sequence
  Description of Artificial Sequence: Synthetic oligonucleotide
  Sense strand starting at position 3906 of SEQ ID NO: 1243126
gugaaauugggaugaugcu

SEQ ID NO: 1396891 - RNA, 19 nt, Artificial Sequence
  Description of Artificial Sequence: Synthetic oligonucleotide
  Antisense strand to SEQ ID NO: 1396890
agcaucaucccaauuucac

SEQ ID NO: 1396892 - RNA, 19 nt, Artificial Sequence
  Description of Artificial Sequence: Synthetic oligonucleotide
  Sense strand starting at position 3918 of SEQ ID NO: 1243126
ugaugcugaccucaggauu

SEQ ID NO: 1396893 - RNA, 19 nt, Artificial Sequence
  Description of Artificial Sequence: Synthetic oligonucleotide
  Antisense strand to SEQ ID NO: 1396892
aauccugaggucagcauca

SEQ ID NO: 1396894 - RNA, 19 nt, Artificial Sequence
  Description of Artificial Sequence: Synthetic oligonucleotide
  Sense strand starting at position 3926 of SEQ ID NO: 1243126
accucaggauuccuguaaa

SEQ ID NO: 1396895 - RNA, 19 nt, Artificial Sequence
  Description of Artificial Sequence: Synthetic oligonucleotide
  Antisense strand to SEQ ID NO: 1396894
uuuacaggaauccugaggu

SEQ ID NO: 1396896 - RNA, 19 nt, Artificial Sequence
  Description of Artificial Sequence: Synthetic oligonucleotide
  Sense strand starting at position 3976 of SEQ ID NO: 1243126
aauauagugccagacgcau

SEQ ID NO: 1396897 - RNA, 19 nt, Artificial Sequence
  Description of Artificial Sequence: Synthetic oligonucleotide
  Antisense strand to SEQ ID NO: 1396896
augcgucuggcacuauauu

SEQ ID NO: 1396898 - RNA, 19 nt, Artificial Sequence
  Description of Artificial Sequence: Synthetic oligonucleotide
  Sense strand starting at position 3982 of SEQ ID NO: 1243126
gugccagacgcaugacuua

SEQ ID NO: 1396899 - RNA, 19 nt, Artificial Sequence
  Description of Artificial Sequence: Synthetic oligonucleotide
  Antisense strand to SEQ ID NO: 1396898
uaagucaugcgucuggcac

SEQ ID NO: 1396900 - RNA, 19 nt, Artificial Sequence
  Description of Artificial Sequence: Synthetic oligonucleotide
  Sense strand starting at position 72 of SEQ ID NO: 1243127
gcugcauguucacaggaga

SEQ ID NO: 1396901 - RNA, 19 nt, Artificial Sequence
  Description of Artificial Sequence: Synthetic oligonucleotide
  Antisense strand to SEQ ID NO: 1396900
ucuccugugaacaugcagc

SEQ ID NO: 1396902 - RNA, 19 nt, Artificial Sequence
  Description of Artificial Sequence: Synthetic oligonucleotide
  Sense strand starting at position 472 of SEQ ID NO: 1243127
uacgaaguccagugaccuu

SEQ ID NO: 1396903 - RNA, 19 nt, Artificial Sequence
  Description of Artificial Sequence: Synthetic oligonucleotide
  Antisense strand to SEQ ID NO: 1396902
aaggucacuggacuucgua

SEQ ID NO: 1396904 - RNA, 19 nt, Artificial Sequence
  Description of Artificial Sequence: Synthetic oligonucleotide
  Sense strand starting at position 479 of SEQ ID NO: 1243127
uccagugaccuucgcugaa

SEQ ID NO: 1396905 - RNA, 19 nt, Artificial Sequence
  Description of Artificial Sequence: Synthetic oligonucleotide
  Antisense strand to SEQ ID NO: 1396904
uucagcgaaggucacugga

SEQ ID NO: 1396906 - RNA, 19 nt, Artificial Sequence
  Description of Artificial Sequence: Synthetic oligonucleotide
  Sense strand starting at position 879 of SEQ ID NO: 1243127
gccugucagccgcaucaau

SEQ ID NO: 1396907 - RNA, 19 nt, Artificial Sequence
  Description of Artificial Sequence: Synthetic oligonucleotide
  Antisense strand to SEQ ID NO: 1396906
auugaugcggcugacaggc

SEQ ID NO: 1396908 - RNA, 19 nt, Artificial Sequence
  Description of Artificial Sequence: Synthetic oligonucleotide
  Sense strand starting at position 963 of SEQ ID NO: 1243127
ugaccuaucgucugcggaa

SEQ ID NO: 1396909 - RNA, 19 nt, Artificial Sequence
  Description of Artificial Sequence: Synthetic oligonucleotide
  Antisense strand to SEQ ID NO: 1396908
uuccgcagacgauagguca

SEQ ID NO: 1396910 - RNA, 19 nt, Artificial Sequence
  Description of Artificial Sequence: Synthetic oligonucleotide
  Sense strand starting at position 964 of SEQ ID NO: 1243127
gaccuaucgucugcggaac

SEQ ID NO: 1396911 - RNA, 19 nt, Artificial Sequence
  Description of Artificial Sequence: Synthetic oligonucleotide
  Antisense strand to SEQ ID NO: 1396910
guuccgcagacgauagguc

SEQ ID NO: 1396912 - RNA, 19 nt, Artificial Sequence
  Description of Artificial Sequence: Synthetic oligonucleotide
  Sense strand starting at position 1031 of SEQ ID NO: 1243127
gccucucccuccugaggaa

SEQ ID NO: 1396913 - RNA, 19 nt, Artificial Sequence
  Description of Artificial Sequence: Synthetic oligonucleotide
  Antisense strand to SEQ ID NO: 1396912
uuccucaggagggagaggc

SEQ ID NO: 1396914 - RNA, 19 nt, Artificial Sequence
  Description of Artificial Sequence: Synthetic oligonucleotide
  Sense strand starting at position 1291 of SEQ ID NO: 1243127
ugagguggcuccuaaggaa

SEQ ID NO: 1396915 - RNA, 19 nt, Artificial Sequence
  Description of Artificial Sequence: Synthetic oligonucleotide
  Antisense strand to SEQ ID NO: 1396914
uuccuuaggagccaccuca

SEQ ID NO: 1396916 - RNA, 19 nt, Artificial Sequence
  Description of Artificial Sequence: Synthetic oligonucleotide
  Sense strand starting at position 1594 of SEQ ID NO: 1243127
cguuccauuuccugcagau

SEQ ID NO: 1396917 - RNA, 19 nt, Artificial Sequence
  Description of Artificial Sequence: Synthetic oligonucleotide
  Antisense strand to SEQ ID NO: 1396916
aucugcaggaaauggaacg

SEQ ID NO: 1396918 - RNA, 19 nt, Artificial Sequence
  Description of Artificial Sequence: Synthetic oligonucleotide
  Sense strand starting at position 1809 of SEQ ID NO: 1243127
ugcggugggucauaaggau

SEQ ID NO: 1396919 - RNA, 19 nt, Artificial Sequence
  Description of Artificial Sequence: Synthetic oligonucleotide
  Antisense strand to SEQ ID NO: 1396918
auccuuaugacccaccgca

SEQ ID NO: 1396920 - RNA, 19 nt, Artificial Sequence
  Description of Artificial Sequence: Synthetic oligonucleotide
  Sense strand starting at position 2204 of SEQ ID NO: 1243127
acacaucauccuugauggu

SEQ ID NO: 1396921 - RNA, 19 nt, Artificial Sequence
  Description of Artificial Sequence: Synthetic oligonucleotide
  Antisense strand to SEQ ID NO: 1396920
accaucaaggaugaugugu

SEQ ID NO: 1396922 - RNA, 19 nt, Artificial Sequence
  Description of Artificial Sequence: Synthetic oligonucleotide
  Sense strand starting at position 2280 of SEQ ID NO: 1243127
acgggauccuccgaauaca

SEQ ID NO: 1396923 - RNA, 19 nt, Artificial Sequence
  Description of Artificial Sequence: Synthetic oligonucleotide
  Antisense strand to SEQ ID NO: 1396922
uguauucggaggaucccgu

SEQ ID NO: 1396924 - RNA, 19 nt, Artificial Sequence
  Description of Artificial Sequence: Synthetic oligonucleotide
  Sense strand starting at position 2518 of SEQ ID NO: 1243127
gguuccaucgcuuaaccuu

SEQ ID NO: 1396925 - RNA, 19 nt, Artificial Sequence
  Description of Artificial Sequence: Synthetic oligonucleotide
  Antisense strand to SEQ ID NO: 1396924
aagguuaagcgauggaacc

SEQ ID NO: 1396926 - RNA, 19 nt, Artificial Sequence
  Description of Artificial Sequence: Synthetic oligonucleotide
  Sense strand starting at position 2819 of SEQ ID NO: 1243127
gaggcagcuugcugacauu

SEQ ID NO: 1396927 - RNA, 19 nt, Artificial Sequence
  Description of Artificial Sequence: Synthetic oligonucleotide
  Antisense strand to SEQ ID NO: 1396926
aaugucagcaagcugccuc

SEQ ID NO: 1396928 - RNA, 19 nt, Artificial Sequence
  Description of Artificial Sequence: Synthetic oligonucleotide
  Sense strand starting at position 2920 of SEQ ID NO: 1243127
agcagaacacuaggucuau

SEQ ID NO: 1396929 - RNA, 19 nt, Artificial Sequence
  Description of Artificial Sequence: Synthetic oligonucleotide
  Antisense strand to SEQ ID NO: 1396928
auagaccuaguguucugcu

SEQ ID NO: 1396930 - RNA, 19 nt, Artificial Sequence
  Description of Artificial Sequence: Synthetic oligonucleotide
  Sense strand starting at position 3153 of SEQ ID NO: 1243127
ccaugaagauuauauguau

SEQ ID NO: 1396931 - RNA, 19 nt, Artificial Sequence
  Description of Artificial Sequence: Synthetic oligonucleotide
  Antisense strand to SEQ ID NO: 1396930
auacauauaaucuucaugg

SEQ ID NO: 1396932 - RNA, 19 nt, Artificial Sequence
  Description of Artificial Sequence: Synthetic oligonucleotide
  Sense strand starting at position 3165 of SEQ ID NO: 1243127
uauguauuaucguugcaac

SEQ ID NO: 1396933 - RNA, 19 nt, Artificial Sequence
  Description of Artificial Sequence: Synthetic oligonucleotide
  Antisense strand to SEQ ID NO: 1396932
guugcaacgauaauacaua

SEQ ID NO: 1396934 - RNA, 19 nt, Artificial Sequence
  Description of Artificial Sequence: Synthetic oligonucleotide
  Sense strand starting at position 3166 of SEQ ID NO: 1243127
auguauuaucguugcaacu

SEQ ID NO: 1396935 - RNA, 19 nt, Artificial Sequence
  Description of Artificial Sequence: Synthetic oligonucleotide
  Antisense strand to SEQ ID NO: 1396934
aguugcaacgauaauacau

SEQ ID NO: 1396936 - RNA, 19 nt, Artificial Sequence
  Description of Artificial Sequence: Synthetic oligonucleotide
  Sense strand starting at position 3202 of SEQ ID NO: 1243127
ugcuguuucucccauuuau

SEQ ID NO: 1396937 - RNA, 19 nt, Artificial Sequence
  Description of Artificial Sequence: Synthetic oligonucleotide
  Antisense strand to SEQ ID NO: 1396936
auaaaugggagaaacagca

SEQ ID NO: 1396938 - RNA, 19 nt, Artificial Sequence
  Description of Artificial Sequence: Synthetic oligonucleotide
  Sense strand starting at position 3296 of SEQ ID NO: 1243127
caggguuuggcuggcaaga

SEQ ID NO: 1396939 - RNA, 19 nt, Artificial Sequence
  Description of Artificial Sequence: Synthetic oligonucleotide
  Antisense strand to SEQ ID NO: 1396938
ucuugccagccaaacccug

SEQ ID NO: 1396940 - RNA, 19 nt, Artificial Sequence
  Description of Artificial Sequence: Synthetic oligonucleotide
  Sense strand starting at position 3323 of SEQ ID NO: 1243127
ugccuugucuggccacgau

SEQ ID NO: 1396941 - RNA, 19 nt, Artificial Sequence
  Description of Artificial Sequence: Synthetic oligonucleotide
  Antisense strand to SEQ ID NO: 1396940
aucguggccagacaaggca

SEQ ID NO: 1396942 - RNA, 19 nt, Artificial Sequence
  Description of Artificial Sequence: Synthetic oligonucleotide
  Sense strand starting at position 3327 of SEQ ID NO: 1243127
uugucuggccacgauaacu

SEQ ID NO: 1396943 - RNA, 19 nt, Artificial Sequence
  Description of Artificial Sequence: Synthetic oligonucleotide
  Antisense strand to SEQ ID NO: 1396942
aguuaucguggccagacaa

SEQ ID NO: 1396944 - RNA, 19 nt, Artificial Sequence
  Description of Artificial Sequence: Synthetic oligonucleotide
  Sense strand starting at position 3335 of SEQ ID NO: 1243127
ccacgauaacugcacaacu

SEQ ID NO: 1396945 - RNA, 19 nt, Artificial Sequence
  Description of Artificial Sequence: Synthetic oligonucleotide
  Antisense strand to SEQ ID NO: 1396944
aguugugcaguuaucgugg

SEQ ID NO: 1396946 - RNA, 19 nt, Artificial Sequence
  Description of Artificial Sequence: Synthetic oligonucleotide
  Sense strand starting at position 3437 of SEQ ID NO: 1243127
gggcacagagccugagaua

SEQ ID NO: 1396947 - RNA, 19 nt, Artificial Sequence
  Description of Artificial Sequence: Synthetic oligonucleotide
  Antisense strand to SEQ ID NO: 1396946
uaucucaggcucugugccc

SEQ ID NO: 1396948 - RNA, 19 nt, Artificial Sequence
  Description of Artificial Sequence: Synthetic oligonucleotide
  Sense strand starting at position 3448 of SEQ ID NO: 1243127
cugagauagcccuaguguc

SEQ ID NO: 1396949 - RNA, 19 nt, Artificial Sequence
  Description of Artificial Sequence: Synthetic oligonucleotide
  Antisense strand to SEQ ID NO: 1396948
gacacuagggcuaucucag

SEQ ID NO: 1396950 - RNA, 19 nt, Artificial Sequence
  Description of Artificial Sequence: Synthetic oligonucleotide
  Sense strand starting at position 3586 of SEQ ID NO: 1243127
cucccugucuugcugaaga

SEQ ID NO: 1396951 - RNA, 19 nt, Artificial Sequence
  Description of Artificial Sequence: Synthetic oligonucleotide
  Antisense strand to SEQ ID NO: 1396950
ucuucagcaagacagggag

SEQ ID NO: 1396952 - RNA, 19 nt, Artificial Sequence
  Description of Artificial Sequence: Synthetic oligonucleotide
  Sense strand starting at position 3588 of SEQ ID NO: 1243127
cccugucuugcugaagaag

SEQ ID NO: 1396953 - RNA, 19 nt, Artificial Sequence
  Description of Artificial Sequence: Synthetic oligonucleotide
  Antisense strand to SEQ ID NO: 1396952
cuucuucagcaagacaggg

SEQ ID NO: 1396954 - RNA, 19 nt, Artificial Sequence
  Description of Artificial Sequence: Synthetic oligonucleotide
  Sense strand starting at position 3653 of SEQ ID NO: 1243127
cuggcugcccuuggagaaa

SEQ ID NO: 1396955 - RNA, 19 nt, Artificial Sequence
  Description of Artificial Sequence: Synthetic oligonucleotide
  Antisense strand to SEQ ID NO: 1396954
uuucuccaagggcagccag

SEQ ID NO: 1396956 - RNA, 19 nt, Artificial Sequence
  Description of Artificial Sequence: Synthetic oligonucleotide
  Sense strand starting at position 3724 of SEQ ID NO: 1243127
guacacuauugcuggucau

SEQ ID NO: 1396957 - RNA, 19 nt, Artificial Sequence
  Description of Artificial Sequence: Synthetic oligonucleotide
  Antisense strand to SEQ ID NO: 1396956
augaccagcaauaguguac

SEQ ID NO: 1396958 - RNA, 19 nt, Artificial Sequence
  Description of Artificial Sequence: Synthetic oligonucleotide
  Sense strand starting at position 28 of SEQ ID NO: 1243128
ccugcuacugccgauuuaa

SEQ ID NO: 1396959 - RNA, 19 nt, Artificial Sequence
  Description of Artificial Sequence: Synthetic oligonucleotide
  Antisense strand to SEQ ID NO: 1396958
uuaaaucggcaguagcagg

SEQ ID NO: 1396960 - RNA, 19 nt, Artificial Sequence
  Description of Artificial Sequence: Synthetic oligonucleotide
  Sense strand starting at position 173 of SEQ ID NO: 1243128
gggccauucccuugauccu

SEQ ID NO: 1396961 - RNA, 19 nt, Artificial Sequence
  Description of Artificial Sequence: Synthetic oligonucleotide
  Antisense strand to SEQ ID NO: 1396960
aggaucaagggaauggccc

SEQ ID NO: 1396962 - RNA, 19 nt, Artificial Sequence
  Description of Artificial Sequence: Synthetic oligonucleotide
  Sense strand starting at position 409 of SEQ ID NO: 1243128
acuggaaucugugcucauc

SEQ ID NO: 1396963 - RNA, 19 nt, Artificial Sequence
  Description of Artificial Sequence: Synthetic oligonucleotide
  Antisense strand to SEQ ID NO: 1396962
gaugagcacagauuccagu

SEQ ID NO: 1396964 - RNA, 19 nt, Artificial Sequence
  Description of Artificial Sequence: Synthetic oligonucleotide
  Sense strand starting at position 412 of SEQ ID NO: 1243128
ggaaucugugcucaucuga

SEQ ID NO: 1396965 - RNA, 19 nt, Artificial Sequence
  Description of Artificial Sequence: Synthetic oligonucleotide
  Antisense strand to SEQ ID NO: 1396964
ucagaugagcacagauucc

SEQ ID NO: 1396966 - RNA, 19 nt, Artificial Sequence
  Description of Artificial Sequence: Synthetic oligonucleotide
  Sense strand starting at position 527 of SEQ ID NO: 1243128
agaagucacuccucgaauc

SEQ ID NO: 1396967 - RNA, 19 nt, Artificial Sequence
  Description of Artificial Sequence: Synthetic oligonucleotide
  Antisense strand to SEQ ID NO: 1396966
gauucgaggagugacuucu

SEQ ID NO: 1396968 - RNA, 19 nt, Artificial Sequence
  Description of Artificial Sequence: Synthetic oligonucleotide
  Sense strand starting at position 2319 of SEQ ID NO: 1243128
cguagucuuuguuuagacu

SEQ ID NO: 1396969 - RNA, 19 nt, Artificial Sequence
  Description of Artificial Sequence: Synthetic oligonucleotide
  Antisense strand to SEQ ID NO: 1396968
agucuaaacaaagacuacg

SEQ ID NO: 1396970 - RNA, 19 nt, Artificial Sequence
  Description of Artificial Sequence: Synthetic oligonucleotide
  Sense strand starting at position 2515 of SEQ ID NO: 1243128
cgaggguguccuugaggaa

SEQ ID NO: 1396971 - RNA, 19 nt, Artificial Sequence
  Description of Artificial Sequence: Synthetic oligonucleotide
  Antisense strand to SEQ ID NO: 1396970
uuccucaaggacacccucg

SEQ ID NO: 1396972 - RNA, 19 nt, Artificial Sequence
  Description of Artificial Sequence: Synthetic oligonucleotide
  Sense strand starting at position 2530 of SEQ ID NO: 1243128
ggaacuugugcaggaguga

SEQ ID NO: 1396973 - RNA, 19 nt, Artificial Sequence
  Description of Artificial Sequence: Synthetic oligonucleotide
  Antisense strand to SEQ ID NO: 1396972
ucacuccugcacaaguucc

SEQ ID NO: 1396974 - RNA, 19 nt, Artificial Sequence
  Description of Artificial Sequence: Synthetic oligonucleotide
  Sense strand starting at position 2634 of SEQ ID NO: 1243128
uccauuaucugagcgggaa

SEQ ID NO: 1396975 - RNA, 19 nt, Artificial Sequence
  Description of Artificial Sequence: Synthetic oligonucleotide
  Antisense strand to SEQ ID NO: 1396974
uucccgcucagauaaugga

SEQ ID NO: 1396976 - RNA, 19 nt, Artificial Sequence
  Description of Artificial Sequence: Synthetic oligonucleotide
  Sense strand starting at position 2635 of SEQ ID NO: 1243128
ccauuaucugagcgggaaa

SEQ ID NO: 1396977 - RNA, 19 nt, Artificial Sequence
  Description of Artificial Sequence: Synthetic oligonucleotide
  Antisense strand to SEQ ID NO: 1396976
uuucccgcucagauaaugg

SEQ ID NO: 1396978 - RNA, 19 nt, Artificial Sequence
  Description of Artificial Sequence: Synthetic oligonucleotide
  Sense strand starting at position 2636 of SEQ ID NO: 1243128
cauuaucugagcgggaaag

SEQ ID NO: 1396979 - RNA, 19 nt, Artificial Sequence
  Description of Artificial Sequence: Synthetic oligonucleotide
  Antisense strand to SEQ ID NO: 1396978
cuuucccgcucagauaaug

SEQ ID NO: 1396980 - RNA, 19 nt, Artificial Sequence
  Description of Artificial Sequence: Synthetic oligonucleotide
  Sense strand starting at position 2779 of SEQ ID NO: 1243128
cggaaaucugauggccuga

SEQ ID NO: 1396981 - RNA, 19 nt, Artificial Sequence
  Description of Artificial Sequence: Synthetic oligonucleotide
  Antisense strand to SEQ ID NO: 1396980
ucaggccaucagauuuccg

SEQ ID NO: 1396982 - RNA, 19 nt, Artificial Sequence
  Description of Artificial Sequence: Synthetic oligonucleotide
  Sense strand starting at position 3071 of SEQ ID NO: 1243128
ggcuguggccgugaauuaa

SEQ ID NO: 1396983 - RNA, 19 nt, Artificial Sequence
  Description of Artificial Sequence: Synthetic oligonucleotide
  Antisense strand to SEQ ID NO: 1396982
uuaauucacggccacagcc

SEQ ID NO: 1396984 - RNA, 19 nt, Artificial Sequence
  Description of Artificial Sequence: Synthetic oligonucleotide
  Sense strand starting at position 3079 of SEQ ID NO: 1243128
ccgugaauuaaccgaucca

SEQ ID NO: 1396985 - RNA, 19 nt, Artificial Sequence
  Description of Artificial Sequence: Synthetic oligonucleotide
  Antisense strand to SEQ ID NO: 1396984
uggaucgguuaauucacgg

SEQ ID NO: 1396986 - RNA, 19 nt, Artificial Sequence
  Description of Artificial Sequence: Synthetic oligonucleotide
  Sense strand starting at position 3080 of SEQ ID NO: 1243128
cgugaauuaaccgauccac

SEQ ID NO: 1396987 - RNA, 19 nt, Artificial Sequence
  Description of Artificial Sequence: Synthetic oligonucleotide
  Antisense strand to SEQ ID NO: 1396986
guggaucgguuaauucacg

SEQ ID NO: 1396988 - RNA, 19 nt, Artificial Sequence
  Description of Artificial Sequence: Synthetic oligonucleotide
  Sense strand starting at position 3103 of SEQ ID NO: 1243128
ugaggaagcugguaagauu

SEQ ID NO: 1396989 - RNA, 19 nt, Artificial Sequence
  Description of Artificial Sequence: Synthetic oligonucleotide
  Antisense strand to SEQ ID NO: 1396988
aaucuuaccagcuuccuca

SEQ ID NO: 1396990 - RNA, 19 nt, Artificial Sequence
  Description of Artificial Sequence: Synthetic oligonucleotide
  Sense strand starting at position 3156 of SEQ ID NO: 1243128
ggguuacagcuuuguccuu

SEQ ID NO: 1396991 - RNA, 19 nt, Artificial Sequence
  Description of Artificial Sequence: Synthetic oligonucleotide
  Antisense strand to SEQ ID NO: 1396990
aaggacaaagcuguaaccc

SEQ ID NO: 1396992 - RNA, 19 nt, Artificial Sequence
  Description of Artificial Sequence: Synthetic oligonucleotide
  Sense strand starting at position 3162 of SEQ ID NO: 1243128
cagcuuuguccuuggguua

SEQ ID NO: 1396993 - RNA, 19 nt, Artificial Sequence
  Description of Artificial Sequence: Synthetic oligonucleotide
  Antisense strand to SEQ ID NO: 1396992
uaacccaaggacaaagcug

SEQ ID NO: 1396994 - RNA, 19 nt, Artificial Sequence
  Description of Artificial Sequence: Synthetic oligonucleotide
  Sense strand starting at position 3194 of SEQ ID NO: 1243128
gggugcaguguauaaauca

SEQ ID NO: 1396995 - RNA, 19 nt, Artificial Sequence
  Description of Artificial Sequence: Synthetic oligonucleotide
  Antisense strand to SEQ ID NO: 1396994
ugauuuauacacugcaccc

SEQ ID NO: 1396996 - RNA, 19 nt, Artificial Sequence
  Description of Artificial Sequence: Synthetic oligonucleotide
  Sense strand starting at position 3203 of SEQ ID NO: 1243128
guauaaaucacaggaggca

SEQ ID NO: 1396997 - RNA, 19 nt, Artificial Sequence
  Description of Artificial Sequence: Synthetic oligonucleotide
  Antisense strand to SEQ ID NO: 1396996
ugccuccugugauuuauac

SEQ ID NO: 1396998 - RNA, 19 nt, Artificial Sequence
  Description of Artificial Sequence: Synthetic oligonucleotide
  Sense strand starting at position 3219 of SEQ ID NO: 1243128
gcagcaauuuggguuccuu

SEQ ID NO: 1396999 - RNA, 19 nt, Artificial Sequence
  Description of Artificial Sequence: Synthetic oligonucleotide
  Antisense strand to SEQ ID NO: 1396998
aaggaacccaaauugcugc

SEQ ID NO: 1397000 - RNA, 19 nt, Artificial Sequence
  Description of Artificial Sequence: Synthetic oligonucleotide
  Sense strand starting at position 3232 of SEQ ID NO: 1243128
uuccuugcucugcggaaau

SEQ ID NO: 1397001 - RNA, 19 nt, Artificial Sequence
  Description of Artificial Sequence: Synthetic oligonucleotide
  Antisense strand to SEQ ID NO: 1397000
auuuccgcagagcaaggaa

SEQ ID NO: 1397002 - RNA, 19 nt, Artificial Sequence
  Description of Artificial Sequence: Synthetic oligonucleotide
  Sense strand starting at position 3409 of SEQ ID NO: 1243128
guggaauguuuggcaagcu

SEQ ID NO: 1397003 - RNA, 19 nt, Artificial Sequence
  Description of Artificial Sequence: Synthetic oligonucleotide
  Antisense strand to SEQ ID NO: 1397002
agcuugccaaacauuccac

SEQ ID NO: 1397004 - RNA, 19 nt, Artificial Sequence
  Description of Artificial Sequence: Synthetic oligonucleotide
  Sense strand starting at position 3449 of SEQ ID NO: 1243128
augucauacucugugaaau

SEQ ID NO: 1397005 - RNA, 19 nt, Artificial Sequence
  Description of Artificial Sequence: Synthetic oligonucleotide
  Antisense strand to SEQ ID NO: 1397004
auuucacagaguaugacau

SEQ ID NO: 1397006 - RNA, 19 nt, Artificial Sequence
  Description of Artificial Sequence: Synthetic oligonucleotide
  Sense strand starting at position 3450 of SEQ ID NO: 1243128
ugucauacucugugaaauu

SEQ ID NO: 1397007 - RNA, 19 nt, Artificial Sequence
  Description of Artificial Sequence: Synthetic oligonucleotide
  Antisense strand to SEQ ID NO: 1397006
aauuucacagaguaugaca

SEQ ID NO: 1397008 - RNA, 19 nt, Artificial Sequence
  Description of Artificial Sequence: Synthetic oligonucleotide
  Sense strand starting at position 3461 of SEQ ID NO: 1243128
gugaaauugggaugaugcu

SEQ ID NO: 1397009 - RNA, 19 nt, Artificial Sequence
  Description of Artificial Sequence: Synthetic oligonucleotide
  Antisense strand to SEQ ID NO: 1397008
agcaucaucccaauuucac

SEQ ID NO: 1397010 - RNA, 19 nt, Artificial Sequence
  Description of Artificial Sequence: Synthetic oligonucleotide
  Sense strand starting at position 3473 of SEQ ID NO: 1243128
ugaugcugaccucaggauu

SEQ ID NO: 1397011 - RNA, 19 nt, Artificial Sequence
  Description of Artificial Sequence: Synthetic oligonucleotide
  Antisense strand to SEQ ID NO: 1397010
aauccugaggucagcauca

SEQ ID NO: 1397012 - RNA, 19 nt, Artificial Sequence
  Description of Artificial Sequence: Synthetic oligonucleotide
  Sense strand starting at position 3481 of SEQ ID NO: 1243128
accucaggauuccuguaaa

SEQ ID NO: 1397013 - RNA, 19 nt, Artificial Sequence
  Description of Artificial Sequence: Synthetic oligonucleotide
  Antisense strand to SEQ ID NO: 1397012
uuuacaggaauccugaggu

SEQ ID NO: 1397014 - RNA, 19 nt, Artificial Sequence
  Description of Artificial Sequence: Synthetic oligonucleotide
  Sense strand starting at position 3531 of SEQ ID NO: 1243128
aauauagugccagacgcau

SEQ ID NO: 1397015 - RNA, 19 nt, Artificial Sequence
  Description of Artificial Sequence: Synthetic oligonucleotide
  Antisense strand to SEQ ID NO: 1397014
augcgucuggcacuauauu

SEQ ID NO: 1397016 - RNA, 19 nt, Artificial Sequence
  Description of Artificial Sequence: Synthetic oligonucleotide
  Sense strand starting at position 3537 of SEQ ID NO: 1243128
gugccagacgcaugacuua

SEQ ID NO: 1397017 - RNA, 19 nt, Artificial Sequence
  Description of Artificial Sequence: Synthetic oligonucleotide
  Antisense strand to SEQ ID NO: 1397016
uaagucaugcgucuggcac

SEQ ID NO: 1397018 - RNA, 19 nt, Artificial Sequence
  Description of Artificial Sequence: Synthetic oligonucleotide
  Sense strand starting at position 3542 of SEQ ID NO: 1243128
agacgcaugacuuaaguuu

SEQ ID NO: 1397019 - RNA, 19 nt, Artificial Sequence
  Description of Artificial Sequence: Synthetic oligonucleotide
  Antisense strand to SEQ ID NO: 1397018
aaacuuaagucaugcgucu

SEQ ID NO: 1397020 - RNA, 19 nt, Artificial Sequence
  Description of Artificial Sequence: Synthetic oligonucleotide
  Sense strand starting at position 3604 of SEQ ID NO: 1243128
guuauuaucgcaugagaga

SEQ ID NO: 1397021 - RNA, 19 nt, Artificial Sequence
  Description of Artificial Sequence: Synthetic oligonucleotide
  Antisense strand to SEQ ID NO: 1397020
ucucucaugcgauaauaac

SEQ ID NO: 1397022 - RNA, 19 nt, Artificial Sequence
  Description of Artificial Sequence: Synthetic oligonucleotide
  Sense strand starting at position 3605 of SEQ ID NO: 1243128
uuauuaucgcaugagagau

SEQ ID NO: 1397023 - RNA, 19 nt, Artificial Sequence
  Description of Artificial Sequence: Synthetic oligonucleotide
  Antisense strand to SEQ ID NO: 1397022
aucucucaugcgauaauaa

SEQ ID NO: 1397024 - RNA, 19 nt, Artificial Sequence
  Description of Artificial Sequence: Synthetic oligonucleotide
  Sense strand starting at position 3664 of SEQ ID NO: 1243128
cagacuuugucauuggaca

SEQ ID NO: 1397025 - RNA, 19 nt, Artificial Sequence
  Description of Artificial Sequence: Synthetic oligonucleotide
  Antisense strand to SEQ ID NO: 1397024
uguccaaugacaaagucug

SEQ ID NO: 1397026 - RNA, 19 nt, Artificial Sequence
  Description of Artificial Sequence: Synthetic oligonucleotide
  Sense strand starting at position 3665 of SEQ ID NO: 1243128
agacuuugucauuggacaa

SEQ ID NO: 1397027 - RNA, 19 nt, Artificial Sequence
  Description of Artificial Sequence: Synthetic oligonucleotide
  Antisense strand to SEQ ID NO: 1397026
uuguccaaugacaaagucu

SEQ ID NO: 1397028 - RNA, 19 nt, Artificial Sequence
  Description of Artificial Sequence: Synthetic oligonucleotide
  Sense strand starting at position 3779 of SEQ ID NO: 1243128
gagacauggugucugcagu

SEQ ID NO: 1397029 - RNA, 19 nt, Artificial Sequence
  Description of Artificial Sequence: Synthetic oligonucleotide
  Antisense strand to SEQ ID NO: 1397028
acugcagacaccaugucuc

SEQ ID NO: 1397030 - RNA, 19 nt, Artificial Sequence
  Description of Artificial Sequence: Synthetic oligonucleotide
  Sense strand starting at position 3812 of SEQ ID NO: 1243128
gcagacuauccauguagcu

SEQ ID NO: 1397031 - RNA, 19 nt, Artificial Sequence
  Description of Artificial Sequence: Synthetic oligonucleotide
  Antisense strand to SEQ ID NO: 1397030
agcuacauggauagucugc

SEQ ID NO: 1397032 - RNA, 19 nt, Artificial Sequence
  Description of Artificial Sequence: Synthetic oligonucleotide
  Sense strand starting at position 3840 of SEQ ID NO: 1243128
caugaacuccugugagcau

SEQ ID NO: 1397033 - RNA, 19 nt, Artificial Sequence
  Description of Artificial Sequence: Synthetic oligonucleotide
  Antisense strand to SEQ ID NO: 1397032
augcucacaggaguucaug

SEQ ID NO: 1397034 - RNA, 19 nt, Artificial Sequence
  Description of Artificial Sequence: Synthetic oligonucleotide
  Sense strand starting at position 3852 of SEQ ID NO: 1243128
ugagcauuccagugaguca

SEQ ID NO: 1397035 - RNA, 19 nt, Artificial Sequence
  Description of Artificial Sequence: Synthetic oligonucleotide
  Antisense strand to SEQ ID NO: 1397034
ugacucacuggaaugcuca

SEQ ID NO: 1397036 - RNA, 19 nt, Artificial Sequence
  Description of Artificial Sequence: Synthetic oligonucleotide
  Sense strand starting at position 3853 of SEQ ID NO: 1243128
gagcauuccagugagucag

SEQ ID NO: 1397037 - RNA, 19 nt, Artificial Sequence
  Description of Artificial Sequence: Synthetic oligonucleotide
  Antisense strand to SEQ ID NO: 1397036
cugacucacuggaaugcuc

SEQ ID NO: 1397038 - RNA, 19 nt, Artificial Sequence
  Description of Artificial Sequence: Synthetic oligonucleotide
  Sense strand starting at position 5 of SEQ ID NO: 1243129
uuccaucuuuaagaugaga

SEQ ID NO: 1397039 - RNA, 19 nt, Artificial Sequence
  Description of Artificial Sequence: Synthetic oligonucleotide
  Antisense strand to SEQ ID NO: 1397038
ucucaucuuaaagauggaa

SEQ ID NO: 1397040 - RNA, 19 nt, Artificial Sequence
  Description of Artificial Sequence: Synthetic oligonucleotide
  Sense strand starting at position 24 of SEQ ID NO: 1243129
gggcugaagucugagaggu

SEQ ID NO: 1397041 - RNA, 19 nt, Artificial Sequence
  Description of Artificial Sequence: Synthetic oligonucleotide
  Antisense strand to SEQ ID NO: 1397040
accucucagacuucagccc

SEQ ID NO: 1397042 - RNA, 19 nt, Artificial Sequence
  Description of Artificial Sequence: Synthetic oligonucleotide
  Sense strand starting at position 26 of SEQ ID NO: 1243129
gcugaagucugagagguua

SEQ ID NO: 1397043 - RNA, 19 nt, Artificial Sequence
  Description of Artificial Sequence: Synthetic oligonucleotide
  Antisense strand to SEQ ID NO: 1397042
uaaccucucagacuucagc

SEQ ID NO: 1397044 - RNA, 19 nt, Artificial Sequence
  Description of Artificial Sequence: Synthetic oligonucleotide
  Sense strand starting at position 28 of SEQ ID NO: 1243129
ugaagucugagagguuaag

SEQ ID NO: 1397045 - RNA, 19 nt, Artificial Sequence
  Description of Artificial Sequence: Synthetic oligonucleotide
  Antisense strand to SEQ ID NO: 1397044
cuuaaccucucagacuuca

SEQ ID NO: 1397046 - RNA, 19 nt, Artificial Sequence
  Description of Artificial Sequence: Synthetic oligonucleotide
  Sense strand starting at position 40 of SEQ ID NO: 1243129
gguuaagcaaccugucuga

SEQ ID NO: 1397047 - RNA, 19 nt, Artificial Sequence
  Description of Artificial Sequence: Synthetic oligonucleotide
  Antisense strand to SEQ ID NO: 1397046
ucagacagguugcuuaacc

SEQ ID NO: 1397048 - RNA, 19 nt, Artificial Sequence
  Description of Artificial Sequence: Synthetic oligonucleotide
  Sense strand starting at position 43 of SEQ ID NO: 1243129
uaagcaaccugucugaagu

SEQ ID NO: 1397049 - RNA, 19 nt, Artificial Sequence
  Description of Artificial Sequence: Synthetic oligonucleotide
  Antisense strand to SEQ ID NO: 1397048
acuucagacagguugcuua

SEQ ID NO: 1397050 - RNA, 19 nt, Artificial Sequence
  Description of Artificial Sequence: Synthetic oligonucleotide
  Sense strand starting at position 88 of SEQ ID NO: 1243129
gaguuagaaucccgaucug

SEQ ID NO: 1397051 - RNA, 19 nt, Artificial Sequence
  Description of Artificial Sequence: Synthetic oligonucleotide
  Antisense strand to SEQ ID NO: 1397050
cagaucgggauucuaacuc

SEQ ID NO: 1397052 - RNA, 19 nt, Artificial Sequence
  Description of Artificial Sequence: Synthetic oligonucleotide
  Sense strand starting at position 93 of SEQ ID NO: 1243129
agaaucccgaucugugaga

SEQ ID NO: 1397053 - RNA, 19 nt, Artificial Sequence
  Description of Artificial Sequence: Synthetic oligonucleotide
  Antisense strand to SEQ ID NO: 1397052
ucucacagaucgggauucu

SEQ ID NO: 1397054 - RNA, 19 nt, Artificial Sequence
  Description of Artificial Sequence: Synthetic oligonucleotide
  Sense strand starting at position 94 of SEQ ID NO: 1243129
gaaucccgaucugugagaa

SEQ ID NO: 1397055 - RNA, 19 nt, Artificial Sequence
  Description of Artificial Sequence: Synthetic oligonucleotide
  Antisense strand to SEQ ID NO: 1397054
uucucacagaucgggauuc

SEQ ID NO: 1397056 - RNA, 19 nt, Artificial Sequence
  Description of Artificial Sequence: Synthetic oligonucleotide
  Sense strand starting at position 95 of SEQ ID NO: 1243129
aaucccgaucugugagaaa

SEQ ID NO: 1397057 - RNA, 19 nt, Artificial Sequence
  Description of Artificial Sequence: Synthetic oligonucleotide
  Antisense strand to SEQ ID NO: 1397056
uuucucacagaucgggauu

SEQ ID NO: 1397058 - RNA, 19 nt, Artificial Sequence
  Description of Artificial Sequence: Synthetic oligonucleotide
  Sense strand starting at position 207 of SEQ ID NO: 1243129
ggcggagccugugacugau

SEQ ID NO: 1397059 - RNA, 19 nt, Artificial Sequence
  Description of Artificial Sequence: Synthetic oligonucleotide
  Antisense strand to SEQ ID NO: 1397058
aucagucacaggcuccgcc

SEQ ID NO: 1397060 - RNA, 19 nt, Artificial Sequence
  Description of Artificial Sequence: Synthetic oligonucleotide
  Sense strand starting at position 213 of SEQ ID NO: 1243129
gccugugacugaugacagu

SEQ ID NO: 1397061 - RNA, 19 nt, Artificial Sequence
  Description of Artificial Sequence: Synthetic oligonucleotide
  Antisense strand to SEQ ID NO: 1397060
acugucaucagucacaggc

SEQ ID NO: 1397062 - RNA, 19 nt, Artificial Sequence
  Description of Artificial Sequence: Synthetic oligonucleotide
  Sense strand starting at position 395 of SEQ ID NO: 1243129
acaugucuccugugagcau

SEQ ID NO: 1397063 - RNA, 19 nt, Artificial Sequence
  Description of Artificial Sequence: Synthetic oligonucleotide
  Antisense strand to SEQ ID NO: 1397062
augcucacaggagacaugu

SEQ ID NO: 1397064 - RNA, 19 nt, Artificial Sequence
  Description of Artificial Sequence: Synthetic oligonucleotide
  Sense strand starting at position 396 of SEQ ID NO: 1243129
caugucuccugugagcauu

SEQ ID NO: 1397065 - RNA, 19 nt, Artificial Sequence
  Description of Artificial Sequence: Synthetic oligonucleotide
  Antisense strand to SEQ ID NO: 1397064
aaugcucacaggagacaug

SEQ ID NO: 1397066 - RNA, 19 nt, Artificial Sequence
  Description of Artificial Sequence: Synthetic oligonucleotide
  Sense strand starting at position 701 of SEQ ID NO: 1243129
aucccuugauccugggaga

SEQ ID NO: 1397067 - RNA, 19 nt, Artificial Sequence
  Description of Artificial Sequence: Synthetic oligonucleotide
  Antisense strand to SEQ ID NO: 1397066
ucucccaggaucaagggau

SEQ ID NO: 1397068 - RNA, 19 nt, Artificial Sequence
  Description of Artificial Sequence: Synthetic oligonucleotide
  Sense strand starting at position 998 of SEQ ID NO: 1243129
gucaguuuccaguguccca

SEQ ID NO: 1397069 - RNA, 19 nt, Artificial Sequence
  Description of Artificial Sequence: Synthetic oligonucleotide
  Antisense strand to SEQ ID NO: 1397068
ugggacacuggaaacugac

SEQ ID NO: 1397070 - RNA, 19 nt, Artificial Sequence
  Description of Artificial Sequence: Synthetic oligonucleotide
  Sense strand starting at position 1043 of SEQ ID NO: 1243129
acaagucugucacgagcua

SEQ ID NO: 1397071 - RNA, 19 nt, Artificial Sequence
  Description of Artificial Sequence: Synthetic oligonucleotide
  Antisense strand to SEQ ID NO: 1397070
uagcucgugacagacuugu

SEQ ID NO: 1397072 - RNA, 19 nt, Artificial Sequence
  Description of Artificial Sequence: Synthetic oligonucleotide
  Sense strand starting at position 1044 of SEQ ID NO: 1243129
caagucugucacgagcuau

SEQ ID NO: 1397073 - RNA, 19 nt, Artificial Sequence
  Description of Artificial Sequence: Synthetic oligonucleotide
  Antisense strand to SEQ ID NO: 1397072
auagcucgugacagacuug

SEQ ID NO: 1397074 - RNA, 19 nt, Artificial Sequence
  Description of Artificial Sequence: Synthetic oligonucleotide
  Sense strand starting at position 1054 of SEQ ID NO: 1243129
acgagcuauugcugauuua

SEQ ID NO: 1397075 - RNA, 19 nt, Artificial Sequence
  Description of Artificial Sequence: Synthetic oligonucleotide
  Antisense strand to SEQ ID NO: 1397074
uaaaucagcaauagcucgu

SEQ ID NO: 1397076 - RNA, 19 nt, Artificial Sequence
  Description of Artificial Sequence: Synthetic oligonucleotide
  Sense strand starting at position 1204 of SEQ ID NO: 1243129
gccugcuacugccgauuua

SEQ ID NO: 1397077 - RNA, 19 nt, Artificial Sequence
  Description of Artificial Sequence: Synthetic oligonucleotide
  Antisense strand to SEQ ID NO: 1397076
uaaaucggcaguagcaggc

SEQ ID NO: 1397078 - RNA, 19 nt, Artificial Sequence
  Description of Artificial Sequence: Synthetic oligonucleotide
  Sense strand starting at position 1205 of SEQ ID NO: 1243129
ccugcuacugccgauuuaa

SEQ ID NO: 1397079 - RNA, 19 nt, Artificial Sequence
  Description of Artificial Sequence: Synthetic oligonucleotide
  Antisense strand to SEQ ID NO: 1397078
uuaaaucggcaguagcagg

SEQ ID NO: 1397080 - RNA, 19 nt, Artificial Sequence
  Description of Artificial Sequence: Synthetic oligonucleotide
  Sense strand starting at position 1350 of SEQ ID NO: 1243129
gggccauucccuugauccu

SEQ ID NO: 1397081 - RNA, 19 nt, Artificial Sequence
  Description of Artificial Sequence: Synthetic oligonucleotide
  Antisense strand to SEQ ID NO: 1397080
aggaucaagggaauggccc

SEQ ID NO: 1397082 - RNA, 19 nt, Artificial Sequence
  Description of Artificial Sequence: Synthetic oligonucleotide
  Sense strand starting at position 1515 of SEQ ID NO: 1243129
gcucccucaucggacauua

SEQ ID NO: 1397083 - RNA, 19 nt, Artificial Sequence
  Description of Artificial Sequence: Synthetic oligonucleotide
  Antisense strand to SEQ ID NO: 1397082
uaauguccgaugagggagc

SEQ ID NO: 1397084 - RNA, 19 nt, Artificial Sequence
  Description of Artificial Sequence: Synthetic oligonucleotide
  Sense strand starting at position 1586 of SEQ ID NO: 1243129
acuggaaucugugcucauc

SEQ ID NO: 1397085 - RNA, 19 nt, Artificial Sequence
  Description of Artificial Sequence: Synthetic oligonucleotide
  Antisense strand to SEQ ID NO: 1397084
gaugagcacagauuccagu

SEQ ID NO: 1397086 - RNA, 19 nt, Artificial Sequence
  Description of Artificial Sequence: Synthetic oligonucleotide
  Sense strand starting at position 1589 of SEQ ID NO: 1243129
ggaaucugugcucaucuga

SEQ ID NO: 1397087 - RNA, 19 nt, Artificial Sequence
  Description of Artificial Sequence: Synthetic oligonucleotide
  Antisense strand to SEQ ID NO: 1397086
ucagaugagcacagauucc

SEQ ID NO: 1397088 - RNA, 19 nt, Artificial Sequence
  Description of Artificial Sequence: Synthetic oligonucleotide
  Sense strand starting at position 1624 of SEQ ID NO: 1243129
accuauaagucccagagcu

SEQ ID NO: 1397089 - RNA, 19 nt, Artificial Sequence
  Description of Artificial Sequence: Synthetic oligonucleotide
  Antisense strand to SEQ ID NO: 1397088
agcucugggacuuauaggu

SEQ ID NO: 1397090 - RNA, 19 nt, Artificial Sequence
  Description of Artificial Sequence: Synthetic oligonucleotide
  Sense strand starting at position 1704 of SEQ ID NO: 1243129
agaagucacuccucgaauc

SEQ ID NO: 1397091 - RNA, 19 nt, Artificial Sequence
  Description of Artificial Sequence: Synthetic oligonucleotide
  Antisense strand to SEQ ID NO: 1397090
gauucgaggagugacuucu

SEQ ID NO: 1397092 - RNA, 19 nt, Artificial Sequence
  Description of Artificial Sequence: Synthetic oligonucleotide
  Sense strand starting at position 3494 of SEQ ID NO: 1243129
gccguagucuuuguuuaga

SEQ ID NO: 1397093 - RNA, 19 nt, Artificial Sequence
  Description of Artificial Sequence: Synthetic oligonucleotide
  Antisense strand to SEQ ID NO: 1397092
ucuaaacaaagacuacggc

SEQ ID NO: 1397094 - RNA, 19 nt, Artificial Sequence
  Description of Artificial Sequence: Synthetic oligonucleotide
  Sense strand starting at position 3496 of SEQ ID NO: 1243129
cguagucuuuguuuagacu

SEQ ID NO: 1397095 - RNA, 19 nt, Artificial Sequence
  Description of Artificial Sequence: Synthetic oligonucleotide
  Antisense strand to SEQ ID NO: 1397094
agucuaaacaaagacuacg

SEQ ID NO: 1397096 - RNA, 19 nt, Artificial Sequence
  Description of Artificial Sequence: Synthetic oligonucleotide
  Sense strand starting at position 3619 of SEQ ID NO: 1243129
cccuuagggucgggaagaa

SEQ ID NO: 1397097 - RNA, 19 nt, Artificial Sequence
  Description of Artificial Sequence: Synthetic oligonucleotide
  Antisense strand to SEQ ID NO: 1397096
uucuucccgacccuaaggg

SEQ ID NO: 1397098 - RNA, 19 nt, Artificial Sequence
  Description of Artificial Sequence: Synthetic oligonucleotide
  Sense strand starting at position 3692 of SEQ ID NO: 1243129
cgaggguguccuugaggaa

SEQ ID NO: 1397099 - RNA, 19 nt, Artificial Sequence
  Description of Artificial Sequence: Synthetic oligonucleotide
  Antisense strand to SEQ ID NO: 1397098
uuccucaaggacacccucg

SEQ ID NO: 1397100 - RNA, 19 nt, Artificial Sequence
  Description of Artificial Sequence: Synthetic oligonucleotide
  Sense strand starting at position 3695 of SEQ ID NO: 1243129
ggguguccuugaggaacuu

SEQ ID NO: 1397101 - RNA, 19 nt, Artificial Sequence
  Description of Artificial Sequence: Synthetic oligonucleotide
  Antisense strand to SEQ ID NO: 1397100
aaguuccucaaggacaccc

SEQ ID NO: 1397102 - RNA, 19 nt, Artificial Sequence
  Description of Artificial Sequence: Synthetic oligonucleotide
  Sense strand starting at position 3707 of SEQ ID NO: 1243129
ggaacuugugcaggaguga

SEQ ID NO: 1397103 - RNA, 19 nt, Artificial Sequence
  Description of Artificial Sequence: Synthetic oligonucleotide
  Antisense strand to SEQ ID NO: 1397102
ucacuccugcacaaguucc

SEQ ID NO: 1397104 - RNA, 19 nt, Artificial Sequence
  Description of Artificial Sequence: Synthetic oligonucleotide
  Sense strand starting at position 3811 of SEQ ID NO: 1243129
uccauuaucugagcgggaa

SEQ ID NO: 1397105 - RNA, 19 nt, Artificial Sequence
  Description of Artificial Sequence: Synthetic oligonucleotide
  Antisense strand to SEQ ID NO: 1397104
uucccgcucagauaaugga

SEQ ID NO: 1397106 - RNA, 19 nt, Artificial Sequence
  Description of Artificial Sequence: Synthetic oligonucleotide
  Sense strand starting at position 3812 of SEQ ID NO: 1243129
ccauuaucugagcgggaaa

SEQ ID NO: 1397107 - RNA, 19 nt, Artificial Sequence
  Description of Artificial Sequence: Synthetic oligonucleotide
  Antisense strand to SEQ ID NO: 1397106
uuucccgcucagauaaugg

SEQ ID NO: 1397108 - RNA, 19 nt, Artificial Sequence
  Description of Artificial Sequence: Synthetic oligonucleotide
  Sense strand starting at position 3813 of SEQ ID NO: 1243129
cauuaucugagcgggaaag

SEQ ID NO: 1397109 - RNA, 19 nt, Artificial Sequence
  Description of Artificial Sequence: Synthetic oligonucleotide
  Antisense strand to SEQ ID NO: 1397108
cuuucccgcucagauaaug

SEQ ID NO: 1397110 - RNA, 19 nt, Artificial Sequence
  Description of Artificial Sequence: Synthetic oligonucleotide
  Sense strand starting at position 3918 of SEQ ID NO: 1243129
cuccuuuggucccagauga

SEQ ID NO: 1397111 - RNA, 19 nt, Artificial Sequence
  Description of Artificial Sequence: Synthetic oligonucleotide
  Antisense strand to SEQ ID NO: 1397110
ucaucugggaccaaaggag

SEQ ID NO: 1397112 - RNA, 19 nt, Artificial Sequence
  Description of Artificial Sequence: Synthetic oligonucleotide
  Sense strand starting at position 3956 of SEQ ID NO: 1243129
cggaaaucugauggccuga

SEQ ID NO: 1397113 - RNA, 19 nt, Artificial Sequence
  Description of Artificial Sequence: Synthetic oligonucleotide
  Antisense strand to SEQ ID NO: 1397112
ucaggccaucagauuuccg

SEQ ID NO: 1397114 - RNA, 19 nt, Artificial Sequence
  Description of Artificial Sequence: Synthetic oligonucleotide
  Sense strand starting at position 18 of SEQ ID NO: 1243130
cuucuagauucugucgauc

SEQ ID NO: 1397115 - RNA, 19 nt, Artificial Sequence
  Description of Artificial Sequence: Synthetic oligonucleotide
  Antisense strand to SEQ ID NO: 1397114
gaucgacagaaucuagaag

SEQ ID NO: 1397116 - RNA, 19 nt, Artificial Sequence
  Description of Artificial Sequence: Synthetic oligonucleotide
  Sense strand starting at position 519 of SEQ ID NO: 1243130
uuaccugaagucuaugacu

SEQ ID NO: 1397117 - RNA, 19 nt, Artificial Sequence
  Description of Artificial Sequence: Synthetic oligonucleotide
  Antisense strand to SEQ ID NO: 1397116
agucauagacuucagguaa

SEQ ID NO: 1397118 - RNA, 19 nt, Artificial Sequence
  Description of Artificial Sequence: Synthetic oligonucleotide
  Sense strand starting at position 521 of SEQ ID NO: 1243130
accugaagucuaugacuuu

SEQ ID NO: 1397119 - RNA, 19 nt, Artificial Sequence
  Description of Artificial Sequence: Synthetic oligonucleotide
  Antisense strand to SEQ ID NO: 1397118
aaagucauagacuucaggu

SEQ ID NO: 1397120 - RNA, 19 nt, Artificial Sequence
  Description of Artificial Sequence: Synthetic oligonucleotide
  Sense strand starting at position 524 of SEQ ID NO: 1243130
ugaagucuaugacuuugaa

SEQ ID NO: 1397121 - RNA, 19 nt, Artificial Sequence
  Description of Artificial Sequence: Synthetic oligonucleotide
  Antisense strand to SEQ ID NO: 1397120
uucaaagucauagacuuca

SEQ ID NO: 1397122 - RNA, 19 nt, Artificial Sequence
  Description of Artificial Sequence: Synthetic oligonucleotide
  Sense strand starting at position 553 of SEQ ID NO: 1243130
auaacuugaccuugggagu

SEQ ID NO: 1397123 - RNA, 19 nt, Artificial Sequence
  Description of Artificial Sequence: Synthetic oligonucleotide
  Antisense strand to SEQ ID NO: 1397122
acucccaaggucaaguuau

SEQ ID NO: 1397124 - RNA, 19 nt, Artificial Sequence
  Description of Artificial Sequence: Synthetic oligonucleotide
  Sense strand starting at position 577 of SEQ ID NO: 1243130
cuaccuuaagacgguuauu

SEQ ID NO: 1397125 - RNA, 19 nt, Artificial Sequence
  Description of Artificial Sequence: Synthetic oligonucleotide
  Antisense strand to SEQ ID NO: 1397124
aauaaccgucuuaagguag

SEQ ID NO: 1397126 - RNA, 19 nt, Artificial Sequence
  Description of Artificial Sequence: Synthetic oligonucleotide
  Sense strand starting at position 1049 of SEQ ID NO: 1243130
cuugguauuugcgcagauu

SEQ ID NO: 1397127 - RNA, 19 nt, Artificial Sequence
  Description of Artificial Sequence: Synthetic oligonucleotide
  Antisense strand to SEQ ID NO: 1397126
aaucugcgcaaauaccaag

SEQ ID NO: 1397128 - RNA, 19 nt, Artificial Sequence
  Description of Artificial Sequence: Synthetic oligonucleotide
  Sense strand starting at position 1052 of SEQ ID NO: 1243130
gguauuugcgcagauuggu

SEQ ID NO: 1397129 - RNA, 19 nt, Artificial Sequence
  Description of Artificial Sequence: Synthetic oligonucleotide
  Antisense strand to SEQ ID NO: 1397128
accaaucugcgcaaauacc

SEQ ID NO: 1397130 - RNA, 19 nt, Artificial Sequence
  Description of Artificial Sequence: Synthetic oligonucleotide
  Sense strand starting at position 1125 of SEQ ID NO: 1243130
cuugcagaauccgcuuaua

SEQ ID NO: 1397131 - RNA, 19 nt, Artificial Sequence
  Description of Artificial Sequence: Synthetic oligonucleotide
  Antisense strand to SEQ ID NO: 1397130
uauaagcggauucugcaag

SEQ ID NO: 1397132 - RNA, 19 nt, Artificial Sequence
  Description of Artificial Sequence: Synthetic oligonucleotide
  Sense strand starting at position 1128 of SEQ ID NO: 1243130
gcagaauccgcuuauagga

SEQ ID NO: 1397133 - RNA, 19 nt, Artificial Sequence
  Description of Artificial Sequence: Synthetic oligonucleotide
  Antisense strand to SEQ ID NO: 1397132
uccuauaagcggauucugc

SEQ ID NO: 1397134 - RNA, 19 nt, Artificial Sequence
  Description of Artificial Sequence: Synthetic oligonucleotide
  Sense strand starting at position 1246 of SEQ ID NO: 1243130
auccuuauuggucaaaggu

SEQ ID NO: 1397135 - RNA, 19 nt, Artificial Sequence
  Description of Artificial Sequence: Synthetic oligonucleotide
  Antisense strand to SEQ ID NO: 1397134
accuuugaccaauaaggau

SEQ ID NO: 1397136 - RNA, 19 nt, Artificial Sequence
  Description of Artificial Sequence: Synthetic oligonucleotide
  Sense strand starting at position 1267 of SEQ ID NO: 1243130
cuuggcuuguuuccuagaa

SEQ ID NO: 1397137 - RNA, 19 nt, Artificial Sequence
  Description of Artificial Sequence: Synthetic oligonucleotide
  Antisense strand to SEQ ID NO: 1397136
uucuaggaaacaagccaag

SEQ ID NO: 1397138 - RNA, 19 nt, Artificial Sequence
  Description of Artificial Sequence: Synthetic oligonucleotide
  Sense strand starting at position 1268 of SEQ ID NO: 1243130
uuggcuuguuuccuagaau

SEQ ID NO: 1397139 - RNA, 19 nt, Artificial Sequence
  Description of Artificial Sequence: Synthetic oligonucleotide
  Antisense strand to SEQ ID NO: 1397138
auucuaggaaacaagccaa

SEQ ID NO: 1397140 - RNA, 19 nt, Artificial Sequence
  Description of Artificial Sequence: Synthetic oligonucleotide
  Sense strand starting at position 1271 of SEQ ID NO: 1243130
gcuuguuuccuagaauuac

SEQ ID NO: 1397141 - RNA, 19 nt, Artificial Sequence
  Description of Artificial Sequence: Synthetic oligonucleotide
  Antisense strand to SEQ ID NO: 1397140
guaauucuaggaaacaagc

SEQ ID NO: 1397142 - RNA, 19 nt, Artificial Sequence
  Description of Artificial Sequence: Synthetic oligonucleotide
  Sense strand starting at position 1281 of SEQ ID NO: 1243130
uagaauuacuuccaggagu

SEQ ID NO: 1397143 - RNA, 19 nt, Artificial Sequence
  Description of Artificial Sequence: Synthetic oligonucleotide
  Antisense strand to SEQ ID NO: 1397142
acuccuggaaguaauucua

SEQ ID NO: 1397144 - RNA, 19 nt, Artificial Sequence
  Description of Artificial Sequence: Synthetic oligonucleotide
  Sense strand starting at position 1450 of SEQ ID NO: 1243130
ggugcucuagccgcauuaa

SEQ ID NO: 1397145 - RNA, 19 nt, Artificial Sequence
  Description of Artificial Sequence: Synthetic oligonucleotide
  Antisense strand to SEQ ID NO: 1397144
uuaaugcggcuagagcacc

SEQ ID NO: 1397146 - RNA, 19 nt, Artificial Sequence
  Description of Artificial Sequence: Synthetic oligonucleotide
  Sense strand starting at position 1483 of SEQ ID NO: 1243130
auugcuacuccgcaaggua

SEQ ID NO: 1397147 - RNA, 19 nt, Artificial Sequence
  Description of Artificial Sequence: Synthetic oligonucleotide
  Antisense strand to SEQ ID NO: 1397146
uaccuugcggaguagcaau

SEQ ID NO: 1397148 - RNA, 19 nt, Artificial Sequence
  Description of Artificial Sequence: Synthetic oligonucleotide
  Sense strand starting at position 1542 of SEQ ID NO: 1243130
cuaggagacuuguccaaag

SEQ ID NO: 1397149 - RNA, 19 nt, Artificial Sequence
  Description of Artificial Sequence: Synthetic oligonucleotide
  Antisense strand to SEQ ID NO: 1397148
cuuuggacaagucuccuag

SEQ ID NO: 1397150 - RNA, 19 nt, Artificial Sequence
  Description of Artificial Sequence: Synthetic oligonucleotide
  Sense strand starting at position 1601 of SEQ ID NO: 1243130
gugcucuugcucguuauua

SEQ ID NO: 1397151 - RNA, 19 nt, Artificial Sequence
  Description of Artificial Sequence: Synthetic oligonucleotide
  Antisense strand to SEQ ID NO: 1397150
uaauaacgagcaagagcac

SEQ ID NO: 1397152 - RNA, 19 nt, Artificial Sequence
  Description of Artificial Sequence: Synthetic oligonucleotide
  Sense strand starting at position 2180 of SEQ ID NO: 1243130
gccgucuuucccuaaacga

SEQ ID NO: 1397153 - RNA, 19 nt, Artificial Sequence
  Description of Artificial Sequence: Synthetic oligonucleotide
  Antisense strand to SEQ ID NO: 1397152
ucguuuagggaaagacggc

SEQ ID NO: 1397154 - RNA, 19 nt, Artificial Sequence
  Description of Artificial Sequence: Synthetic oligonucleotide
  Sense strand starting at position 2229 of SEQ ID NO: 1243130
aucugaaaguucugaaaua

SEQ ID NO: 1397155 - RNA, 19 nt, Artificial Sequence
  Description of Artificial Sequence: Synthetic oligonucleotide
  Antisense strand to SEQ ID NO: 1397154
uauuucagaacuuucagau

SEQ ID NO: 1397156 - RNA, 19 nt, Artificial Sequence
  Description of Artificial Sequence: Synthetic oligonucleotide
  Sense strand starting at position 2230 of SEQ ID NO: 1243130
ucugaaaguucugaaauac

SEQ ID NO: 1397157 - RNA, 19 nt, Artificial Sequence
  Description of Artificial Sequence: Synthetic oligonucleotide
  Antisense strand to SEQ ID NO: 1397156
guauuucagaacuuucaga

SEQ ID NO: 1397158 - RNA, 19 nt, Artificial Sequence
  Description of Artificial Sequence: Synthetic oligonucleotide
  Sense strand starting at position 2366 of SEQ ID NO: 1243130
cggcaagacuccgucucua

SEQ ID NO: 1397159 - RNA, 19 nt, Artificial Sequence
  Description of Artificial Sequence: Synthetic oligonucleotide
  Antisense strand to SEQ ID NO: 1397158
uagagacggagucuugccg

SEQ ID NO: 1397160 - RNA, 19 nt, Artificial Sequence
  Description of Artificial Sequence: Synthetic oligonucleotide
  Sense strand starting at position 2371 of SEQ ID NO: 1243130
agacuccgucucuauuaca

SEQ ID NO: 1397161 - RNA, 19 nt, Artificial Sequence
  Description of Artificial Sequence: Synthetic oligonucleotide
  Antisense strand to SEQ ID NO: 1397160
uguaauagagacggagucu

SEQ ID NO: 1397162 - RNA, 19 nt, Artificial Sequence
  Description of Artificial Sequence: Synthetic oligonucleotide
  Sense strand starting at position 2565 of SEQ ID NO: 1243130
cuugacaguguauaauaua

SEQ ID NO: 1397163 - RNA, 19 nt, Artificial Sequence
  Description of Artificial Sequence: Synthetic oligonucleotide
  Antisense strand to SEQ ID NO: 1397162
uauauuauacacugucaag

SEQ ID NO: 1397164 - RNA, 19 nt, Artificial Sequence
  Description of Artificial Sequence: Synthetic oligonucleotide
  Sense strand starting at position 2574 of SEQ ID NO: 1243130
guauaauauagcugucagg

SEQ ID NO: 1397165 - RNA, 19 nt, Artificial Sequence
  Description of Artificial Sequence: Synthetic oligonucleotide
  Antisense strand to SEQ ID NO: 1397164
ccugacagcuauauuauac

SEQ ID NO: 1397166 - RNA, 19 nt, Artificial Sequence
  Description of Artificial Sequence: Synthetic oligonucleotide
  Sense strand starting at position 2585 of SEQ ID NO: 1243130
cugucagguccacgacuau

SEQ ID NO: 1397167 - RNA, 19 nt, Artificial Sequence
  Description of Artificial Sequence: Synthetic oligonucleotide
  Antisense strand to SEQ ID NO: 1397166
auagucguggaccugacag

SEQ ID NO: 1397168 - RNA, 19 nt, Artificial Sequence
  Description of Artificial Sequence: Synthetic oligonucleotide
  Sense strand starting at position 2633 of SEQ ID NO: 1243130
agcccauaucgaggucuga

SEQ ID NO: 1397169 - RNA, 19 nt, Artificial Sequence
  Description of Artificial Sequence: Synthetic oligonucleotide
  Antisense strand to SEQ ID NO: 1397168
ucagaccucgauaugggcu

SEQ ID NO: 1397170 - RNA, 19 nt, Artificial Sequence
  Description of Artificial Sequence: Synthetic oligonucleotide
  Sense strand starting at position 2950 of SEQ ID NO: 1243130
caguaucagcagggcaauu

SEQ ID NO: 1397171 - RNA, 19 nt, Artificial Sequence
  Description of Artificial Sequence: Synthetic oligonucleotide
  Antisense strand to SEQ ID NO: 1397170
aauugcccugcugauacug

SEQ ID NO: 1397172 - RNA, 19 nt, Artificial Sequence
  Description of Artificial Sequence: Synthetic oligonucleotide
  Sense strand starting at position 2952 of SEQ ID NO: 1243130
guaucagcagggcaauuau

SEQ ID NO: 1397173 - RNA, 19 nt, Artificial Sequence
  Description of Artificial Sequence: Synthetic oligonucleotide
  Antisense strand to SEQ ID NO: 1397172
auaauugcccugcugauac

SEQ ID NO: 1397174 - RNA, 19 nt, Artificial Sequence
  Description of Artificial Sequence: Synthetic oligonucleotide
  Sense strand starting at position 3023 of SEQ ID NO: 1243130
ugccuacauggcugugaua

SEQ ID NO: 1397175 - RNA, 19 nt, Artificial Sequence
  Description of Artificial Sequence: Synthetic oligonucleotide
  Antisense strand to SEQ ID NO: 1397174
uaucacagccauguaggca

SEQ ID NO: 1397176 - RNA, 19 nt, Artificial Sequence
  Description of Artificial Sequence: Synthetic oligonucleotide
  Sense strand starting at position 3025 of SEQ ID NO: 1243130
ccuacauggcugugauaac

SEQ ID NO: 1397177 - RNA, 19 nt, Artificial Sequence
  Description of Artificial Sequence: Synthetic oligonucleotide
  Antisense strand to SEQ ID NO: 1397176
guuaucacagccauguagg

SEQ ID NO: 1397178 - RNA, 19 nt, Artificial Sequence
  Description of Artificial Sequence: Synthetic oligonucleotide
  Sense strand starting at position 3051 of SEQ ID NO: 1243130
guuauacgccucugucuaa

SEQ ID NO: 1397179 - RNA, 19 nt, Artificial Sequence
  Description of Artificial Sequence: Synthetic oligonucleotide
  Antisense strand to SEQ ID NO: 1397178
uuagacagaggcguauaac

SEQ ID NO: 1397180 - RNA, 19 nt, Artificial Sequence
  Description of Artificial Sequence: Synthetic oligonucleotide
  Sense strand starting at position 3052 of SEQ ID NO: 1243130
uuauacgccucugucuaaa

SEQ ID NO: 1397181 - RNA, 19 nt, Artificial Sequence
  Description of Artificial Sequence: Synthetic oligonucleotide
  Antisense strand to SEQ ID NO: 1397180
uuuagacagaggcguauaa

SEQ ID NO: 1397182 - RNA, 19 nt, Artificial Sequence
  Description of Artificial Sequence: Synthetic oligonucleotide
  Sense strand starting at position 3075 of SEQ ID NO: 1243130
cugagucacgcaggaugua

SEQ ID NO: 1397183 - RNA, 19 nt, Artificial Sequence
  Description of Artificial Sequence: Synthetic oligonucleotide
  Antisense strand to SEQ ID NO: 1397182
uacauccugcgugacucag

SEQ ID NO: 1397184 - RNA, 19 nt, Artificial Sequence
  Description of Artificial Sequence: Synthetic oligonucleotide
  Sense strand starting at position 3171 of SEQ ID NO: 1243130
ggaggaguuuaagaaggcu

SEQ ID NO: 1397185 - RNA, 19 nt, Artificial Sequence
  Description of Artificial Sequence: Synthetic oligonucleotide
  Antisense strand to SEQ ID NO: 1397184
agccuucuuaaacuccucc

SEQ ID NO: 1397186 - RNA, 19 nt, Artificial Sequence
  Description of Artificial Sequence: Synthetic oligonucleotide
  Sense strand starting at position 3174 of SEQ ID NO: 1243130
ggaguuuaagaaggcuaau

SEQ ID NO: 1397187 - RNA, 19 nt, Artificial Sequence
  Description of Artificial Sequence: Synthetic oligonucleotide
  Antisense strand to SEQ ID NO: 1397186
auuagccuucuuaaacucc

SEQ ID NO: 1397188 - RNA, 19 nt, Artificial Sequence
  Description of Artificial Sequence: Synthetic oligonucleotide
  Sense strand starting at position 3262 of SEQ ID NO: 1243130
ucugaaaucugccugaaug

SEQ ID NO: 1397189 - RNA, 19 nt, Artificial Sequence
  Description of Artificial Sequence: Synthetic oligonucleotide
  Antisense strand to SEQ ID NO: 1397188
cauucaggcagauuucaga

SEQ ID NO: 1397190 - RNA, 19 nt, Artificial Sequence
  Description of Artificial Sequence: Synthetic oligonucleotide
  Sense strand starting at position 3263 of SEQ ID NO: 1243130
cugaaaucugccugaauga

SEQ ID NO: 1397191 - RNA, 19 nt, Artificial Sequence
  Description of Artificial Sequence: Synthetic oligonucleotide
  Antisense strand to SEQ ID NO: 1397190
ucauucaggcagauuucag

SEQ ID NO: 1397192 - RNA, 19 nt, Artificial Sequence
  Description of Artificial Sequence: Synthetic oligonucleotide
  Sense strand starting at position 3287 of SEQ ID NO: 1243130
ccaauaaugucaccaguuu

SEQ ID NO: 1397193 - RNA, 19 nt, Artificial Sequence
  Description of Artificial Sequence: Synthetic oligonucleotide
  Antisense strand to SEQ ID NO: 1397192
aaacuggugacauuauugg

SEQ ID NO: 1397194 - RNA, 19 nt, Artificial Sequence
  Description of Artificial Sequence: Synthetic oligonucleotide
  Sense strand starting at position 13 of SEQ ID NO: 1243131
cgacuuugcugguggagaa

SEQ ID NO: 1397195 - RNA, 19 nt, Artificial Sequence
  Description of Artificial Sequence: Synthetic oligonucleotide
  Antisense strand to SEQ ID NO: 1397194
uucuccaccagcaaagucg

SEQ ID NO: 1397196 - RNA, 19 nt, Artificial Sequence
  Description of Artificial Sequence: Synthetic oligonucleotide
  Sense strand starting at position 14 of SEQ ID NO: 1243131
gacuuugcugguggagaaa

SEQ ID NO: 1397197 - RNA, 19 nt, Artificial Sequence
  Description of Artificial Sequence: Synthetic oligonucleotide
  Antisense strand to SEQ ID NO: 1397196
uuucuccaccagcaaaguc

SEQ ID NO: 1397198 - RNA, 19 nt, Artificial Sequence
  Description of Artificial Sequence: Synthetic oligonucleotide
  Sense strand starting at position 42 of SEQ ID NO: 1243131
agaggcuaaucacaaggaa

SEQ ID NO: 1397199 - RNA, 19 nt, Artificial Sequence
  Description of Artificial Sequence: Synthetic oligonucleotide
  Antisense strand to SEQ ID NO: 1397198
uuccuugugauuagccucu

SEQ ID NO: 1397200 - RNA, 19 nt, Artificial Sequence
  Description of Artificial Sequence: Synthetic oligonucleotide
  Sense strand starting at position 65 of SEQ ID NO: 1243131
uuuccuguacccugugaga

SEQ ID NO: 1397201 - RNA, 19 nt, Artificial Sequence
  Description of Artificial Sequence: Synthetic oligonucleotide
  Antisense strand to SEQ ID NO: 1397200
ucucacaggguacaggaaa

SEQ ID NO: 1397202 - RNA, 19 nt, Artificial Sequence
  Description of Artificial Sequence: Synthetic oligonucleotide
  Sense strand starting at position 67 of SEQ ID NO: 1243131
uccuguacccugugagaac

SEQ ID NO: 1397203 - RNA, 19 nt, Artificial Sequence
  Description of Artificial Sequence: Synthetic oligonucleotide
  Antisense strand to SEQ ID NO: 1397202
guucucacaggguacagga

SEQ ID NO: 1397204 - RNA, 19 nt, Artificial Sequence
  Description of Artificial Sequence: Synthetic oligonucleotide
  Sense strand starting at position 68 of SEQ ID NO: 1243131
ccuguacccugugagaaca

SEQ ID NO: 1397205 - RNA, 19 nt, Artificial Sequence
  Description of Artificial Sequence: Synthetic oligonucleotide
  Antisense strand to SEQ ID NO: 1397204
uguucucacaggguacagg

SEQ ID NO: 1397206 - RNA, 19 nt, Artificial Sequence
  Description of Artificial Sequence: Synthetic oligonucleotide
  Sense strand starting at position 70 of SEQ ID NO: 1243131
uguacccugugagaacaau

SEQ ID NO: 1397207 - RNA, 19 nt, Artificial Sequence
  Description of Artificial Sequence: Synthetic oligonucleotide
  Antisense strand to SEQ ID NO: 1397206
auuguucucacaggguaca

SEQ ID NO: 1397208 - RNA, 19 nt, Artificial Sequence
  Description of Artificial Sequence: Synthetic oligonucleotide
  Sense strand starting at position 387 of SEQ ID NO: 1243131
ucaaaugccucaucgguuu

SEQ ID NO: 1397209 - RNA, 19 nt, Artificial Sequence
  Description of Artificial Sequence: Synthetic oligonucleotide
  Antisense strand to SEQ ID NO: 1397208
aaaccgaugaggcauuuga

SEQ ID NO: 1397210 - RNA, 19 nt, Artificial Sequence
  Description of Artificial Sequence: Synthetic oligonucleotide
  Sense strand starting at position 456 of SEQ ID NO: 1243131
aggagaacuuccugagugu

SEQ ID NO: 1397211 - RNA, 19 nt, Artificial Sequence
  Description of Artificial Sequence: Synthetic oligonucleotide
  Antisense strand to SEQ ID NO: 1397210
acacucaggaaguucuccu

SEQ ID NO: 1397212 - RNA, 19 nt, Artificial Sequence
  Description of Artificial Sequence: Synthetic oligonucleotide
  Sense strand starting at position 460 of SEQ ID NO: 1243131
gaacuuccugaguguucca

SEQ ID NO: 1397213 - RNA, 19 nt, Artificial Sequence
  Description of Artificial Sequence: Synthetic oligonucleotide
  Antisense strand to SEQ ID NO: 1397212
uggaacacucaggaaguuc

SEQ ID NO: 1397214 - RNA, 19 nt, Artificial Sequence
  Description of Artificial Sequence: Synthetic oligonucleotide
  Sense strand starting at position 465 of SEQ ID NO: 1243131
uccugaguguuccagcguu

SEQ ID NO: 1397215 - RNA, 19 nt, Artificial Sequence
  Description of Artificial Sequence: Synthetic oligonucleotide
  Antisense strand to SEQ ID NO: 1397214
aacgcuggaacacucagga

SEQ ID NO: 1397216 - RNA, 19 nt, Artificial Sequence
  Description of Artificial Sequence: Synthetic oligonucleotide
  Sense strand starting at position 467 of SEQ ID NO: 1243131
cugaguguuccagcguuua

SEQ ID NO: 1397217 - RNA, 19 nt, Artificial Sequence
  Description of Artificial Sequence: Synthetic oligonucleotide
  Antisense strand to SEQ ID NO: 1397216
uaaacgcuggaacacucag

SEQ ID NO: 1397218 - RNA, 19 nt, Artificial Sequence
  Description of Artificial Sequence: Synthetic oligonucleotide
  Sense strand starting at position 492 of SEQ ID NO: 1243131
agcaauucgucucucuaag

SEQ ID NO: 1397219 - RNA, 19 nt, Artificial Sequence
  Description of Artificial Sequence: Synthetic oligonucleotide
  Antisense strand to SEQ ID NO: 1397218
cuuagagagacgaauugcu

SEQ ID NO: 1397220 - RNA, 19 nt, Artificial Sequence
  Description of Artificial Sequence: Synthetic oligonucleotide
  Sense strand starting at position 576 of SEQ ID NO: 1243131
caggcaucauccucagagu

SEQ ID NO: 1397221 - RNA, 19 nt, Artificial Sequence
  Description of Artificial Sequence: Synthetic oligonucleotide
  Antisense strand to SEQ ID NO: 1397220
acucugaggaugaugccug

SEQ ID NO: 1397222 - RNA, 19 nt, Artificial Sequence
  Description of Artificial Sequence: Synthetic oligonucleotide
  Sense strand starting at position 577 of SEQ ID NO: 1243131
aggcaucauccucagaguu

SEQ ID NO: 1397223 - RNA, 19 nt, Artificial Sequence
  Description of Artificial Sequence: Synthetic oligonucleotide
  Antisense strand to SEQ ID NO: 1397222
aacucugaggaugaugccu

SEQ ID NO: 1397224 - RNA, 19 nt, Artificial Sequence
  Description of Artificial Sequence: Synthetic oligonucleotide
  Sense strand starting at position 587 of SEQ ID NO: 1243131
cucagaguuccacaugcau

SEQ ID NO: 1397225 - RNA, 19 nt, Artificial Sequence
  Description of Artificial Sequence: Synthetic oligonucleotide
  Antisense strand to SEQ ID NO: 1397224
augcauguggaacucugag

SEQ ID NO: 1397226 - RNA, 19 nt, Artificial Sequence
  Description of Artificial Sequence: Synthetic oligonucleotide
  Sense strand starting at position 637 of SEQ ID NO: 1243131
ggcagcugcuucucacaga

SEQ ID NO: 1397227 - RNA, 19 nt, Artificial Sequence
  Description of Artificial Sequence: Synthetic oligonucleotide
  Antisense strand to SEQ ID NO: 1397226
ucugugagaagcagcugcc

SEQ ID NO: 1397228 - RNA, 19 nt, Artificial Sequence
  Description of Artificial Sequence: Synthetic oligonucleotide
  Sense strand starting at position 638 of SEQ ID NO: 1243131
gcagcugcuucucacagau

SEQ ID NO: 1397229 - RNA, 19 nt, Artificial Sequence
  Description of Artificial Sequence: Synthetic oligonucleotide
  Antisense strand to SEQ ID NO: 1397228
aucugugagaagcagcugc

SEQ ID NO: 1397230 - RNA, 19 nt, Artificial Sequence
  Description of Artificial Sequence: Synthetic oligonucleotide
  Sense strand starting at position 778 of SEQ ID NO: 1243131
ucagcuuccucacugggaa

SEQ ID NO: 1397231 - RNA, 19 nt, Artificial Sequence
  Description of Artificial Sequence: Synthetic oligonucleotide
  Antisense strand to SEQ ID NO: 1397230
uucccagugaggaagcuga

SEQ ID NO: 1397232 - RNA, 19 nt, Artificial Sequence
  Description of Artificial Sequence: Synthetic oligonucleotide
  Sense strand starting at position 912 of SEQ ID NO: 1243131
ggguuugauuuggagacuu

SEQ ID NO: 1397233 - RNA, 19 nt, Artificial Sequence
  Description of Artificial Sequence: Synthetic oligonucleotide
  Antisense strand to SEQ ID NO: 1397232
aagucuccaaaucaaaccc

SEQ ID NO: 1397234 - RNA, 19 nt, Artificial Sequence
  Description of Artificial Sequence: Synthetic oligonucleotide
  Sense strand starting at position 1317 of SEQ ID NO: 1243131
cccgguucguuccagagau

SEQ ID NO: 1397235 - RNA, 19 nt, Artificial Sequence
  Description of Artificial Sequence: Synthetic oligonucleotide
  Antisense strand to SEQ ID NO: 1397234
aucucuggaacgaaccggg

SEQ ID NO: 1397236 - RNA, 19 nt, Artificial Sequence
  Description of Artificial Sequence: Synthetic oligonucleotide
  Sense strand starting at position 1318 of SEQ ID NO: 1243131
ccgguucguuccagagaug

SEQ ID NO: 1397237 - RNA, 19 nt, Artificial Sequence
  Description of Artificial Sequence: Synthetic oligonucleotide
  Antisense strand to SEQ ID NO: 1397236
caucucuggaacgaaccgg

SEQ ID NO: 1397238 - RNA, 19 nt, Artificial Sequence
  Description of Artificial Sequence: Synthetic oligonucleotide
  Sense strand starting at position 2178 of SEQ ID NO: 1243131
ccggacagauuccugcuua

SEQ ID NO: 1397239 - RNA, 19 nt, Artificial Sequence
  Description of Artificial Sequence: Synthetic oligonucleotide
  Antisense strand to SEQ ID NO: 1397238
uaagcaggaaucuguccgg

SEQ ID NO: 1397240 - RNA, 19 nt, Artificial Sequence
  Description of Artificial Sequence: Synthetic oligonucleotide
  Sense strand starting at position 2179 of SEQ ID NO: 1243131
cggacagauuccugcuuac

SEQ ID NO: 1397241 - RNA, 19 nt, Artificial Sequence
  Description of Artificial Sequence: Synthetic oligonucleotide
  Antisense strand to SEQ ID NO: 1397240
guaagcaggaaucuguccg

SEQ ID NO: 1397242 - RNA, 19 nt, Artificial Sequence
  Description of Artificial Sequence: Synthetic oligonucleotide
  Sense strand starting at position 2182 of SEQ ID NO: 1243131
acagauuccugcuuacgau

SEQ ID NO: 1397243 - RNA, 19 nt, Artificial Sequence
  Description of Artificial Sequence: Synthetic oligonucleotide
  Antisense strand to SEQ ID NO: 1397242
aucguaagcaggaaucugu

SEQ ID NO: 1397244 - RNA, 19 nt, Artificial Sequence
  Description of Artificial Sequence: Synthetic oligonucleotide
  Sense strand starting at position 2183 of SEQ ID NO: 1243131
cagauuccugcuuacgaug

SEQ ID NO: 1397245 - RNA, 19 nt, Artificial Sequence
  Description of Artificial Sequence: Synthetic oligonucleotide
  Antisense strand to SEQ ID NO: 1397244
caucguaagcaggaaucug

SEQ ID NO: 1397246 - RNA, 19 nt, Artificial Sequence
  Description of Artificial Sequence: Synthetic oligonucleotide
  Sense strand starting at position 2185 of SEQ ID NO: 1243131
gauuccugcuuacgaugaa

SEQ ID NO: 1397247 - RNA, 19 nt, Artificial Sequence
  Description of Artificial Sequence: Synthetic oligonucleotide
  Antisense strand to SEQ ID NO: 1397246
uucaucguaagcaggaauc

SEQ ID NO: 1397248 - RNA, 19 nt, Artificial Sequence
  Description of Artificial Sequence: Synthetic oligonucleotide
  Sense strand starting at position 2186 of SEQ ID NO: 1243131
auuccugcuuacgaugaaa

SEQ ID NO: 1397249 - RNA, 19 nt, Artificial Sequence
  Description of Artificial Sequence: Synthetic oligonucleotide
  Antisense strand to SEQ ID NO: 1397248
uuucaucguaagcaggaau

SEQ ID NO: 1397250 - RNA, 19 nt, Artificial Sequence
  Description of Artificial Sequence: Synthetic oligonucleotide
  Sense strand starting at position 2188 of SEQ ID NO: 1243131
uccugcuuacgaugaaaga

SEQ ID NO: 1397251 - RNA, 19 nt, Artificial Sequence
  Description of Artificial Sequence: Synthetic oligonucleotide
  Antisense strand to SEQ ID NO: 1397250
ucuuucaucguaagcagga

SEQ ID NO: 1397252 - RNA, 19 nt, Artificial Sequence
  Description of Artificial Sequence: Synthetic oligonucleotide
  Sense strand starting at position 2189 of SEQ ID NO: 1243131
ccugcuuacgaugaaagaa

SEQ ID NO: 1397253 - RNA, 19 nt, Artificial Sequence
  Description of Artificial Sequence: Synthetic oligonucleotide
  Antisense strand to SEQ ID NO: 1397252
uucuuucaucguaagcagg

SEQ ID NO: 1397254 - RNA, 19 nt, Artificial Sequence
  Description of Artificial Sequence: Synthetic oligonucleotide
  Sense strand starting at position 2299 of SEQ ID NO: 1243131
gauaaacugugauggagaa

SEQ ID NO: 1397255 - RNA, 19 nt, Artificial Sequence
  Description of Artificial Sequence: Synthetic oligonucleotide
  Antisense strand to SEQ ID NO: 1397254
uucuccaucacaguuuauc

SEQ ID NO: 1397256 - RNA, 19 nt, Artificial Sequence
  Description of Artificial Sequence: Synthetic oligonucleotide
  Sense strand starting at position 2348 of SEQ ID NO: 1243131
gaacaaauagcacgcgauu

SEQ ID NO: 1397257 - RNA, 19 nt, Artificial Sequence
  Description of Artificial Sequence: Synthetic oligonucleotide
  Antisense strand to SEQ ID NO: 1397256
aaucgcgugcuauuuguuc

SEQ ID NO: 1397258 - RNA, 19 nt, Artificial Sequence
  Description of Artificial Sequence: Synthetic oligonucleotide
  Sense strand starting at position 3605 of SEQ ID NO: 1243131
uagcuaaucuggugaggau

SEQ ID NO: 1397259 - RNA, 19 nt, Artificial Sequence
  Description of Artificial Sequence: Synthetic oligonucleotide
  Antisense strand to SEQ ID NO: 1397258
auccucaccagauuagcua

SEQ ID NO: 1397260 - RNA, 19 nt, Artificial Sequence
  Description of Artificial Sequence: Synthetic oligonucleotide
  Sense strand starting at position 3877 of SEQ ID NO: 1243131
acacucaaccgcgaagauu

SEQ ID NO: 1397261 - RNA, 19 nt, Artificial Sequence
  Description of Artificial Sequence: Synthetic oligonucleotide
  Antisense strand to SEQ ID NO: 1397260
aaucuucgcgguugagugu

SEQ ID NO: 1397262 - RNA, 19 nt, Artificial Sequence
  Description of Artificial Sequence: Synthetic oligonucleotide
  Sense strand starting at position 3907 of SEQ ID NO: 1243131
uccugaagccagugagauu

SEQ ID NO: 1397263 - RNA, 19 nt, Artificial Sequence
  Description of Artificial Sequence: Synthetic oligonucleotide
  Antisense strand to SEQ ID NO: 1397262
aaucucacuggcuucagga

SEQ ID NO: 1397264 - RNA, 19 nt, Artificial Sequence
  Description of Artificial Sequence: Synthetic oligonucleotide
  Sense strand starting at position 3908 of SEQ ID NO: 1243131
ccugaagccagugagauua

SEQ ID NO: 1397265 - RNA, 19 nt, Artificial Sequence
  Description of Artificial Sequence: Synthetic oligonucleotide
  Antisense strand to SEQ ID NO: 1397264
uaaucucacuggcuucagg

SEQ ID NO: 1397266 - RNA, 19 nt, Artificial Sequence
  Description of Artificial Sequence: Synthetic oligonucleotide
  Sense strand starting at position 364 of SEQ ID NO: 1243132
agggcugacaccugguaau

SEQ ID NO: 1397267 - RNA, 19 nt, Artificial Sequence
  Description of Artificial Sequence: Synthetic oligonucleotide
  Antisense strand to SEQ ID NO: 1397266
auuaccaggugucagcccu

SEQ ID NO: 1397268 - RNA, 19 nt, Artificial Sequence
  Description of Artificial Sequence: Synthetic oligonucleotide
  Sense strand starting at position 626 of SEQ ID NO: 1243132
agugcgugagugugugaau

SEQ ID NO: 1397269 - RNA, 19 nt, Artificial Sequence
  Description of Artificial Sequence: Synthetic oligonucleotide
  Antisense strand to SEQ ID NO: 1397268
auucacacacucacgcacu

SEQ ID NO: 1397270 - RNA, 19 nt, Artificial Sequence
  Description of Artificial Sequence: Synthetic oligonucleotide
  Sense strand starting at position 927 of SEQ ID NO: 1243132
gcacucucugcugggagaa

SEQ ID NO: 1397271 - RNA, 19 nt, Artificial Sequence
  Description of Artificial Sequence: Synthetic oligonucleotide
  Antisense strand to SEQ ID NO: 1397270
uucucccagcagagagugc

SEQ ID NO: 1397272 - RNA, 19 nt, Artificial Sequence
  Description of Artificial Sequence: Synthetic oligonucleotide
  Sense strand starting at position 1018 of SEQ ID NO: 1243132
uucccagagaugggugauu

SEQ ID NO: 1397273 - RNA, 19 nt, Artificial Sequence
  Description of Artificial Sequence: Synthetic oligonucleotide
  Antisense strand to SEQ ID NO: 1397272
aaucacccaucucugggaa

SEQ ID NO: 1397274 - RNA, 19 nt, Artificial Sequence
  Description of Artificial Sequence: Synthetic oligonucleotide
  Sense strand starting at position 1066 of SEQ ID NO: 1243132
gggugagucugguccauga

SEQ ID NO: 1397275 - RNA, 19 nt, Artificial Sequence
  Description of Artificial Sequence: Synthetic oligonucleotide
  Antisense strand to SEQ ID NO: 1397274
ucauggaccagacucaccc

SEQ ID NO: 1397276 - RNA, 19 nt, Artificial Sequence
  Description of Artificial Sequence: Synthetic oligonucleotide
  Sense strand starting at position 1068 of SEQ ID NO: 1243132
gugagucugguccaugaag

SEQ ID NO: 1397277 - RNA, 19 nt, Artificial Sequence
  Description of Artificial Sequence: Synthetic oligonucleotide
  Antisense strand to SEQ ID NO: 1397276
cuucauggaccagacucac

SEQ ID NO: 1397278 - RNA, 19 nt, Artificial Sequence
  Description of Artificial Sequence: Synthetic oligonucleotide
  Sense strand starting at position 1196 of SEQ ID NO: 1243132
ggcgauggcucuggcucaa

SEQ ID NO: 1397279 - RNA, 19 nt, Artificial Sequence
  Description of Artificial Sequence: Synthetic oligonucleotide
  Antisense strand to SEQ ID NO: 1397278
uugagccagagccaucgcc

SEQ ID NO: 1397280 - RNA, 19 nt, Artificial Sequence
  Description of Artificial Sequence: Synthetic oligonucleotide
  Sense strand starting at position 1284 of SEQ ID NO: 1243132
agggucuuugagcgugaga

SEQ ID NO: 1397281 - RNA, 19 nt, Artificial Sequence
  Description of Artificial Sequence: Synthetic oligonucleotide
  Antisense strand to SEQ ID NO: 1397280
ucucacgcucaaagacccu

SEQ ID NO: 1397282 - RNA, 19 nt, Artificial Sequence
  Description of Artificial Sequence: Synthetic oligonucleotide
  Sense strand starting at position 1286 of SEQ ID NO: 1243132
ggucuuugagcgugagaug

SEQ ID NO: 1397283 - RNA, 19 nt, Artificial Sequence
  Description of Artificial Sequence: Synthetic oligonucleotide
  Antisense strand to SEQ ID NO: 1397282
caucucacgcucaaagacc

SEQ ID NO: 1397284 - RNA, 19 nt, Artificial Sequence
  Description of Artificial Sequence: Synthetic oligonucleotide
  Sense strand starting at position 1287 of SEQ ID NO: 1243132
gucuuugagcgugagauga

SEQ ID NO: 1397285 - RNA, 19 nt, Artificial Sequence
  Description of Artificial Sequence: Synthetic oligonucleotide
  Antisense strand to SEQ ID NO: 1397284
ucaucucacgcucaaagac

SEQ ID NO: 1397286 - RNA, 19 nt, Artificial Sequence
  Description of Artificial Sequence: Synthetic oligonucleotide
  Sense strand starting at position 2657 of SEQ ID NO: 1243132
ugccuacccguccaucaau

SEQ ID NO: 1397287 - RNA, 19 nt, Artificial Sequence
  Description of Artificial Sequence: Synthetic oligonucleotide
  Antisense strand to SEQ ID NO: 1397286
auugauggacggguaggca

SEQ ID NO: 1397288 - RNA, 19 nt, Artificial Sequence
  Description of Artificial Sequence: Synthetic oligonucleotide
  Sense strand starting at position 3823 of SEQ ID NO: 1243132
ggguuugugucagaagagg

SEQ ID NO: 1397289 - RNA, 19 nt, Artificial Sequence
  Description of Artificial Sequence: Synthetic oligonucleotide
  Antisense strand to SEQ ID NO: 1397288
ccucuucugacacaaaccc

SEQ ID NO: 1397290 - RNA, 19 nt, Artificial Sequence
  Description of Artificial Sequence: Synthetic oligonucleotide
  Sense strand starting at position 3851 of SEQ ID NO: 1243132
ggaagugauucuuaugcug

SEQ ID NO: 1397291 - RNA, 19 nt, Artificial Sequence
  Description of Artificial Sequence: Synthetic oligonucleotide
  Antisense strand to SEQ ID NO: 1397290
cagcauaagaaucacuucc

SEQ ID NO: 1397292 - RNA, 19 nt, Artificial Sequence
  Description of Artificial Sequence: Synthetic oligonucleotide
  Sense strand starting at position 3853 of SEQ ID NO: 1243132
aagugauucuuaugcugag

SEQ ID NO: 1397293 - RNA, 19 nt, Artificial Sequence
  Description of Artificial Sequence: Synthetic oligonucleotide
  Antisense strand to SEQ ID NO: 1397292
cucagcauaagaaucacuu

SEQ ID NO: 1397294 - RNA, 19 nt, Artificial Sequence
  Description of Artificial Sequence: Synthetic oligonucleotide
  Sense strand starting at position 3854 of SEQ ID NO: 1243132
agugauucuuaugcugaga

SEQ ID NO: 1397295 - RNA, 19 nt, Artificial Sequence
  Description of Artificial Sequence: Synthetic oligonucleotide
  Antisense strand to SEQ ID NO: 1397294
ucucagcauaagaaucacu

SEQ ID NO: 1397296 - RNA, 19 nt, Artificial Sequence
  Description of Artificial Sequence: Synthetic oligonucleotide
  Sense strand starting at position 3856 of SEQ ID NO: 1243132
ugauucuuaugcugagaca

SEQ ID NO: 1397297 - RNA, 19 nt, Artificial Sequence
  Description of Artificial Sequence: Synthetic oligonucleotide
  Antisense strand to SEQ ID NO: 1397296
ugucucagcauaagaauca

SEQ ID NO: 1397298 - RNA, 19 nt, Artificial Sequence
  Description of Artificial Sequence: Synthetic oligonucleotide
  Sense strand starting at position 3857 of SEQ ID NO: 1243132
gauucuuaugcugagacau

SEQ ID NO: 1397299 - RNA, 19 nt, Artificial Sequence
  Description of Artificial Sequence: Synthetic oligonucleotide
  Antisense strand to SEQ ID NO: 1397298
augucucagcauaagaauc

SEQ ID NO: 1397300 - RNA, 19 nt, Artificial Sequence
  Description of Artificial Sequence: Synthetic oligonucleotide
  Sense strand starting at position 107 of SEQ ID NO: 1243133
acgguuuaucacgaaagag

SEQ ID NO: 1397301 - RNA, 19 nt, Artificial Sequence
  Description of Artificial Sequence: Synthetic oligonucleotide
  Antisense strand to SEQ ID NO: 1397300
cucuuucgugauaaaccgu

SEQ ID NO: 1397302 - RNA, 19 nt, Artificial Sequence
  Description of Artificial Sequence: Synthetic oligonucleotide
  Sense strand starting at position 133 of SEQ ID NO: 1243133
auuccuuucccaggaauga

SEQ ID NO: 1397303 - RNA, 19 nt, Artificial Sequence
  Description of Artificial Sequence: Synthetic oligonucleotide
  Antisense strand to SEQ ID NO: 1397302
ucauuccugggaaaggaau

SEQ ID NO: 1397304 - RNA, 19 nt, Artificial Sequence
  Description of Artificial Sequence: Synthetic oligonucleotide
  Sense strand starting at position 188 of SEQ ID NO: 1243133
ggaugaauuucagaguugu

SEQ ID NO: 1397305 - RNA, 19 nt, Artificial Sequence
  Description of Artificial Sequence: Synthetic oligonucleotide
  Antisense strand to SEQ ID NO: 1397304
acaacucugaaauucaucc

SEQ ID NO: 1397306 - RNA, 19 nt, Artificial Sequence
  Description of Artificial Sequence: Synthetic oligonucleotide
  Sense strand starting at position 222 of SEQ ID NO: 1243133
agaaaucacuacggauuua

SEQ ID NO: 1397307 - RNA, 19 nt, Artificial Sequence
  Description of Artificial Sequence: Synthetic oligonucleotide
  Antisense strand to SEQ ID NO: 1397306
uaaauccguagugauuucu

SEQ ID NO: 1397308 - RNA, 19 nt, Artificial Sequence
  Description of Artificial Sequence: Synthetic oligonucleotide
  Sense strand starting at position 270 of SEQ ID NO: 1243133
guccuagguuaccuuagua

SEQ ID NO: 1397309 - RNA, 19 nt, Artificial Sequence
  Description of Artificial Sequence: Synthetic oligonucleotide
  Antisense strand to SEQ ID NO: 1397308
uacuaagguaaccuaggac

SEQ ID NO: 1397310 - RNA, 19 nt, Artificial Sequence
  Description of Artificial Sequence: Synthetic oligonucleotide
  Sense strand starting at position 294 of SEQ ID NO: 1243133
uguagauacguuuacagug

SEQ ID NO: 1397311 - RNA, 19 nt, Artificial Sequence
  Description of Artificial Sequence: Synthetic oligonucleotide
  Antisense strand to SEQ ID NO: 1397310
cacuguaaacguaucuaca

SEQ ID NO: 1397312 - RNA, 19 nt, Artificial Sequence
  Description of Artificial Sequence: Synthetic oligonucleotide
  Sense strand starting at position 324 of SEQ ID NO: 1243133
cguuucgaauuacugaaau

SEQ ID NO: 1397313 - RNA, 19 nt, Artificial Sequence
  Description of Artificial Sequence: Synthetic oligonucleotide
  Antisense strand to SEQ ID NO: 1397312
auuucaguaauucgaaacg

SEQ ID NO: 1397314 - RNA, 19 nt, Artificial Sequence
  Description of Artificial Sequence: Synthetic oligonucleotide
  Sense strand starting at position 348 of SEQ ID NO: 1243133
uuacgaauuuaggaauaug

SEQ ID NO: 1397315 - RNA, 19 nt, Artificial Sequence
  Description of Artificial Sequence: Synthetic oligonucleotide
  Antisense strand to SEQ ID NO: 1397314
cauauuccuaaauucguaa

SEQ ID NO: 1397316 - RNA, 19 nt, Artificial Sequence
  Description of Artificial Sequence: Synthetic oligonucleotide
  Sense strand starting at position 358 of SEQ ID NO: 1243133
aggaauauguggagaguag

SEQ ID NO: 1397317 - RNA, 19 nt, Artificial Sequence
  Description of Artificial Sequence: Synthetic oligonucleotide
  Antisense strand to SEQ ID NO: 1397316
cuacucuccacauauuccu

SEQ ID NO: 1397318 - RNA, 19 nt, Artificial Sequence
  Description of Artificial Sequence: Synthetic oligonucleotide
  Sense strand starting at position 487 of SEQ ID NO: 1243133
agauacagugcugaguuau

SEQ ID NO: 1397319 - RNA, 19 nt, Artificial Sequence
  Description of Artificial Sequence: Synthetic oligonucleotide
  Antisense strand to SEQ ID NO: 1397318
auaacucagcacuguaucu

SEQ ID NO: 1397320 - RNA, 19 nt, Artificial Sequence
  Description of Artificial Sequence: Synthetic oligonucleotide
  Sense strand starting at position 530 of SEQ ID NO: 1243133
agccguacccucgaaauuu

SEQ ID NO: 1397321 - RNA, 19 nt, Artificial Sequence
  Description of Artificial Sequence: Synthetic oligonucleotide
  Antisense strand to SEQ ID NO: 1397320
aaauuucgaggguacggcu

SEQ ID NO: 1397322 - RNA, 19 nt, Artificial Sequence
  Description of Artificial Sequence: Synthetic oligonucleotide
  Sense strand starting at position 748 of SEQ ID NO: 1243133
uuaccaccuccugggaaau

SEQ ID NO: 1397323 - RNA, 19 nt, Artificial Sequence
  Description of Artificial Sequence: Synthetic oligonucleotide
  Antisense strand to SEQ ID NO: 1397322
auuucccaggaggugguaa

SEQ ID NO: 1397324 - RNA, 19 nt, Artificial Sequence
  Description of Artificial Sequence: Synthetic oligonucleotide
  Sense strand starting at position 1126 of SEQ ID NO: 1243133
auuguucucguggaauuac

SEQ ID NO: 1397325 - RNA, 19 nt, Artificial Sequence
  Description of Artificial Sequence: Synthetic oligonucleotide
  Antisense strand to SEQ ID NO: 1397324
guaauuccacgagaacaau

SEQ ID NO: 1397326 - RNA, 19 nt, Artificial Sequence
  Description of Artificial Sequence: Synthetic oligonucleotide
  Sense strand starting at position 1210 of SEQ ID NO: 1243133
aagggaugcgcggaauucu

SEQ ID NO: 1397327 - RNA, 19 nt, Artificial Sequence
  Description of Artificial Sequence: Synthetic oligonucleotide
  Antisense strand to SEQ ID NO: 1397326
agaauuccgcgcaucccuu

SEQ ID NO: 1397328 - RNA, 19 nt, Artificial Sequence
  Description of Artificial Sequence: Synthetic oligonucleotide
  Sense strand starting at position 1545 of SEQ ID NO: 1243133
gguccuuaccuuugaggac

SEQ ID NO: 1397329 - RNA, 19 nt, Artificial Sequence
  Description of Artificial Sequence: Synthetic oligonucleotide
  Antisense strand to SEQ ID NO: 1397328
guccucaaagguaaggacc

SEQ ID NO: 1397330 - RNA, 19 nt, Artificial Sequence
  Description of Artificial Sequence: Synthetic oligonucleotide
  Sense strand starting at position 2787 of SEQ ID NO: 1243133
cgguuaucacacugauaug

SEQ ID NO: 1397331 - RNA, 19 nt, Artificial Sequence
  Description of Artificial Sequence: Synthetic oligonucleotide
  Antisense strand to SEQ ID NO: 1397330
cauaucagugugauaaccg

SEQ ID NO: 1397332 - RNA, 19 nt, Artificial Sequence
  Description of Artificial Sequence: Synthetic oligonucleotide
  Sense strand starting at position 2930 of SEQ ID NO: 1243133
uguuaauuaugugcagaag

SEQ ID NO: 1397333 - RNA, 19 nt, Artificial Sequence
  Description of Artificial Sequence: Synthetic oligonucleotide
  Antisense strand to SEQ ID NO: 1397332
cuucugcacauaauuaaca

SEQ ID NO: 1397334 - RNA, 19 nt, Artificial Sequence
  Description of Artificial Sequence: Synthetic oligonucleotide
  Sense strand starting at position 2931 of SEQ ID NO: 1243133
guuaauuaugugcagaaga

SEQ ID NO: 1397335 - RNA, 19 nt, Artificial Sequence
  Description of Artificial Sequence: Synthetic oligonucleotide
  Antisense strand to SEQ ID NO: 1397334
ucuucugcacauaauuaac

SEQ ID NO: 1397336 - RNA, 19 nt, Artificial Sequence
  Description of Artificial Sequence: Synthetic oligonucleotide
  Sense strand starting at position 2952 of SEQ ID NO: 1243133
augauuggugcuggagaua

SEQ ID NO: 1397337 - RNA, 19 nt, Artificial Sequence
  Description of Artificial Sequence: Synthetic oligonucleotide
  Antisense strand to SEQ ID NO: 1397336
uaucuccagcaccaaucau

SEQ ID NO: 1397338 - RNA, 19 nt, Artificial Sequence
  Description of Artificial Sequence: Synthetic oligonucleotide
  Sense strand starting at position 2964 of SEQ ID NO: 1243133
ggagauaacaaccgugauc

SEQ ID NO: 1397339 - RNA, 19 nt, Artificial Sequence
  Description of Artificial Sequence: Synthetic oligonucleotide
  Antisense strand to SEQ ID NO: 1397338
gaucacgguuguuaucucc

SEQ ID NO: 1397340 - RNA, 19 nt, Artificial Sequence
  Description of Artificial Sequence: Synthetic oligonucleotide
  Sense strand starting at position 2966 of SEQ ID NO: 1243133
agauaacaaccgugaucaa

SEQ ID NO: 1397341 - RNA, 19 nt, Artificial Sequence
  Description of Artificial Sequence: Synthetic oligonucleotide
  Antisense strand to SEQ ID NO: 1397340
uugaucacgguuguuaucu

SEQ ID NO: 1397342 - RNA, 19 nt, Artificial Sequence
  Description of Artificial Sequence: Synthetic oligonucleotide
  Sense strand starting at position 2973 of SEQ ID NO: 1243133
aaccgugaucaaggccuua

SEQ ID NO: 1397343 - RNA, 19 nt, Artificial Sequence
  Description of Artificial Sequence: Synthetic oligonucleotide
  Antisense strand to SEQ ID NO: 1397342
uaaggccuugaucacgguu

SEQ ID NO: 1397344 - RNA, 19 nt, Artificial Sequence
  Description of Artificial Sequence: Synthetic oligonucleotide
  Sense strand starting at position 2978 of SEQ ID NO: 1243133
ugaucaaggccuuaccaua

SEQ ID NO: 1397345 - RNA, 19 nt, Artificial Sequence
  Description of Artificial Sequence: Synthetic oligonucleotide
  Antisense strand to SEQ ID NO: 1397344
uaugguaaggccuugauca

SEQ ID NO: 1397346 - RNA, 19 nt, Artificial Sequence
  Description of Artificial Sequence: Synthetic oligonucleotide
  Sense strand starting at position 3027 of SEQ ID NO: 1243133
guaggaacucuguaaacgu

SEQ ID NO: 1397347 - RNA, 19 nt, Artificial Sequence
  Description of Artificial Sequence: Synthetic oligonucleotide
  Antisense strand to SEQ ID NO: 1397346
acguuuacagaguuccuac

SEQ ID NO: 1397348 - RNA, 19 nt, Artificial Sequence
  Description of Artificial Sequence: Synthetic oligonucleotide
  Sense strand starting at position 3195 of SEQ ID NO: 1243133
ccaauuaauaucgaggugu

SEQ ID NO: 1397349 - RNA, 19 nt, Artificial Sequence
  Description of Artificial Sequence: Synthetic oligonucleotide
  Antisense strand to SEQ ID NO: 1397348
acaccucgauauuaauugg

SEQ ID NO: 1397350 - RNA, 19 nt, Artificial Sequence
  Description of Artificial Sequence: Synthetic oligonucleotide
  Sense strand starting at position 3197 of SEQ ID NO: 1243133
aauuaauaucgagguguuu

SEQ ID NO: 1397351 - RNA, 19 nt, Artificial Sequence
  Description of Artificial Sequence: Synthetic oligonucleotide
  Antisense strand to SEQ ID NO: 1397350
aaacaccucgauauuaauu

SEQ ID NO: 1397352 - RNA, 19 nt, Artificial Sequence
  Description of Artificial Sequence: Synthetic oligonucleotide
  Sense strand starting at position 3255 of SEQ ID NO: 1243133
ggguaaguuuggguuccua

SEQ ID NO: 1397353 - RNA, 19 nt, Artificial Sequence
  Description of Artificial Sequence: Synthetic oligonucleotide
  Antisense strand to SEQ ID NO: 1397352
uaggaacccaaacuuaccc

SEQ ID NO: 1397354 - RNA, 19 nt, Artificial Sequence
  Description of Artificial Sequence: Synthetic oligonucleotide
  Sense strand starting at position 3309 of SEQ ID NO: 1243133
agaaccaauuaggaaauaa

SEQ ID NO: 1397355 - RNA, 19 nt, Artificial Sequence
  Description of Artificial Sequence: Synthetic oligonucleotide
  Antisense strand to SEQ ID NO: 1397354
uuauuuccuaauugguucu

SEQ ID NO: 1397356 - RNA, 19 nt, Artificial Sequence
  Description of Artificial Sequence: Synthetic oligonucleotide
  Sense strand starting at position 3603 of SEQ ID NO: 1243133
aaugauguagcauauuagu

SEQ ID NO: 1397357 - RNA, 19 nt, Artificial Sequence
  Description of Artificial Sequence: Synthetic oligonucleotide
  Antisense strand to SEQ ID NO: 1397356
acuaauaugcuacaucauu

SEQ ID NO: 1397358 - RNA, 19 nt, Artificial Sequence
  Description of Artificial Sequence: Synthetic oligonucleotide
  Sense strand starting at position 3608 of SEQ ID NO: 1243133
uguagcauauuaguagaau

SEQ ID NO: 1397359 - RNA, 19 nt, Artificial Sequence
  Description of Artificial Sequence: Synthetic oligonucleotide
  Antisense strand to SEQ ID NO: 1397358
auucuacuaauaugcuaca

SEQ ID NO: 1397360 - RNA, 19 nt, Artificial Sequence
  Description of Artificial Sequence: Synthetic oligonucleotide
  Sense strand starting at position 3727 of SEQ ID NO: 1243133
ugugaaguuguugacugaa

SEQ ID NO: 1397361 - RNA, 19 nt, Artificial Sequence
  Description of Artificial Sequence: Synthetic oligonucleotide
  Antisense strand to SEQ ID NO: 1397360
uucagucaacaacuucaca

SEQ ID NO: 1397362 - RNA, 19 nt, Artificial Sequence
  Description of Artificial Sequence: Synthetic oligonucleotide
  Sense strand starting at position 3757 of SEQ ID NO: 1243133
cgugucaugucaucagaga

SEQ ID NO: 1397363 - RNA, 19 nt, Artificial Sequence
  Description of Artificial Sequence: Synthetic oligonucleotide
  Antisense strand to SEQ ID NO: 1397362
ucucugaugacaugacacg

SEQ ID NO: 1397364 - RNA, 19 nt, Artificial Sequence
  Description of Artificial Sequence: Synthetic oligonucleotide
  Sense strand starting at position 3758 of SEQ ID NO: 1243133
gugucaugucaucagagaa

SEQ ID NO: 1397365 - RNA, 19 nt, Artificial Sequence
  Description of Artificial Sequence: Synthetic oligonucleotide
  Antisense strand to SEQ ID NO: 1397364
uucucugaugacaugacac

SEQ ID NO: 1397366 - RNA, 19 nt, Artificial Sequence
  Description of Artificial Sequence: Synthetic oligonucleotide
  Sense strand starting at position 3896 of SEQ ID NO: 1243133
uuguguuugguauaaagag

SEQ ID NO: 1397367 - RNA, 19 nt, Artificial Sequence
  Description of Artificial Sequence: Synthetic oligonucleotide
  Antisense strand to SEQ ID NO: 1397366
cucuuuauaccaaacacaa

SEQ ID NO: 1397368 - RNA, 19 nt, Artificial Sequence
  Description of Artificial Sequence: Synthetic oligonucleotide
  Sense strand starting at position 3905 of SEQ ID NO: 1243133
guauaaagagguuggacau

SEQ ID NO: 1397369 - RNA, 19 nt, Artificial Sequence
  Description of Artificial Sequence: Synthetic oligonucleotide
  Antisense strand to SEQ ID NO: 1397368
auguccaaccucuuuauac

SEQ ID NO: 1397370 - RNA, 19 nt, Artificial Sequence
  Description of Artificial Sequence: Synthetic oligonucleotide
  Sense strand starting at position 3921 of SEQ ID NO: 1243133
cauggugggcuuugauuau

SEQ ID NO: 1397371 - RNA, 19 nt, Artificial Sequence
  Description of Artificial Sequence: Synthetic oligonucleotide
  Antisense strand to SEQ ID NO: 1397370
auaaucaaagcccaccaug

SEQ ID NO: 1397372 - RNA, 19 nt, Artificial Sequence
  Description of Artificial Sequence: Synthetic oligonucleotide
  Sense strand starting at position 3940 of SEQ ID NO: 1243133
ggagauaggugcucaaaug

SEQ ID NO: 1397373 - RNA, 19 nt, Artificial Sequence
  Description of Artificial Sequence: Synthetic oligonucleotide
  Antisense strand to SEQ ID NO: 1397372
cauuugagcaccuaucucc

SEQ ID NO: 1397374 - RNA, 19 nt, Artificial Sequence
  Description of Artificial Sequence: Synthetic oligonucleotide
  Sense strand starting at position 3951 of SEQ ID NO: 1243133
cucaaaugcuaguuaggua

SEQ ID NO: 1397375 - RNA, 19 nt, Artificial Sequence
  Description of Artificial Sequence: Synthetic oligonucleotide
  Antisense strand to SEQ ID NO: 1397374
uaccuaacuagcauuugag

SEQ ID NO: 1397376 - RNA, 19 nt, Artificial Sequence
  Description of Artificial Sequence: Synthetic oligonucleotide
  Sense strand starting at position 3956 of SEQ ID NO: 1243133
augcuaguuagguaaauga

SEQ ID NO: 1397377 - RNA, 19 nt, Artificial Sequence
  Description of Artificial Sequence: Synthetic oligonucleotide
  Antisense strand to SEQ ID NO: 1397376
ucauuuaccuaacuagcau

SEQ ID NO: 1397378 - RNA, 19 nt, Artificial Sequence
  Description of Artificial Sequence: Synthetic oligonucleotide
  Sense strand starting at position 3981 of SEQ ID NO: 1243133
uuaauagugcaguaaugga

SEQ ID NO: 1397379 - RNA, 19 nt, Artificial Sequence
  Description of Artificial Sequence: Synthetic oligonucleotide
  Antisense strand to SEQ ID NO: 1397378
uccauuacugcacuauuaa

SEQ ID NO: 1397380 - RNA, 19 nt, Artificial Sequence
  Description of Artificial Sequence: Synthetic oligonucleotide
  Sense strand starting at position 7 of SEQ ID NO: 1243134
ucucuacauuggucucgaa

SEQ ID NO: 1397381 - RNA, 19 nt, Artificial Sequence
  Description of Artificial Sequence: Synthetic oligonucleotide
  Antisense strand to SEQ ID NO: 1397380
uucgagaccaauguagaga

SEQ ID NO: 1397382 - RNA, 19 nt, Artificial Sequence
  Description of Artificial Sequence: Synthetic oligonucleotide
  Sense strand starting at position 11 of SEQ ID NO: 1243134
uacauuggucucgaagcua

SEQ ID NO: 1397383 - RNA, 19 nt, Artificial Sequence
  Description of Artificial Sequence: Synthetic oligonucleotide
  Antisense strand to SEQ ID NO: 1397382
uagcuucgagaccaaugua

SEQ ID NO: 1397384 - RNA, 19 nt, Artificial Sequence
  Description of Artificial Sequence: Synthetic oligonucleotide
  Sense strand starting at position 94 of SEQ ID NO: 1243134
guuaaugucuuggcuauuu

SEQ ID NO: 1397385 - RNA, 19 nt, Artificial Sequence
  Description of Artificial Sequence: Synthetic oligonucleotide
  Antisense strand to SEQ ID NO: 1397384
aaauagccaagacauuaac

SEQ ID NO: 1397386 - RNA, 19 nt, Artificial Sequence
  Description of Artificial Sequence: Synthetic oligonucleotide
  Sense strand starting at position 134 of SEQ ID NO: 1243134
uuagcccugcucuaagaau

SEQ ID NO: 1397387 - RNA, 19 nt, Artificial Sequence
  Description of Artificial Sequence: Synthetic oligonucleotide
  Antisense strand to SEQ ID NO: 1397386
auucuuagagcagggcuaa

SEQ ID NO: 1397388 - RNA, 19 nt, Artificial Sequence
  Description of Artificial Sequence: Synthetic oligonucleotide
  Sense strand starting at position 202 of SEQ ID NO: 1243134
ucuaaaguaccucagguaa

SEQ ID NO: 1397389 - RNA, 19 nt, Artificial Sequence
  Description of Artificial Sequence: Synthetic oligonucleotide
  Antisense strand to SEQ ID NO: 1397388
uuaccugagguacuuuaga

SEQ ID NO: 1397390 - RNA, 19 nt, Artificial Sequence
  Description of Artificial Sequence: Synthetic oligonucleotide
  Sense strand starting at position 258 of SEQ ID NO: 1243134
aacuaaagucauuggagca

SEQ ID NO: 1397391 - RNA, 19 nt, Artificial Sequence
  Description of Artificial Sequence: Synthetic oligonucleotide
  Antisense strand to SEQ ID NO: 1397390
ugcuccaaugacuuuaguu

SEQ ID NO: 1397392 - RNA, 19 nt, Artificial Sequence
  Description of Artificial Sequence: Synthetic oligonucleotide
  Sense strand starting at position 301 of SEQ ID NO: 1243134
guaggacucuguguacaaa

SEQ ID NO: 1397393 - RNA, 19 nt, Artificial Sequence
  Description of Artificial Sequence: Synthetic oligonucleotide
  Antisense strand to SEQ ID NO: 1397392
uuuguacacagaguccuac

SEQ ID NO: 1397394 - RNA, 19 nt, Artificial Sequence
  Description of Artificial Sequence: Synthetic oligonucleotide
  Sense strand starting at position 319 of SEQ ID NO: 1243134
aaucaauggucagucugua

SEQ ID NO: 1397395 - RNA, 19 nt, Artificial Sequence
  Description of Artificial Sequence: Synthetic oligonucleotide
  Antisense strand to SEQ ID NO: 1397394
uacagacugaccauugauu

SEQ ID NO: 1397396 - RNA, 19 nt, Artificial Sequence
  Description of Artificial Sequence: Synthetic oligonucleotide
  Sense strand starting at position 323 of SEQ ID NO: 1243134
aauggucagucuguaaagu

SEQ ID NO: 1397397 - RNA, 19 nt, Artificial Sequence
  Description of Artificial Sequence: Synthetic oligonucleotide
  Antisense strand to SEQ ID NO: 1397396
acuuuacagacugaccauu

SEQ ID NO: 1397398 - RNA, 19 nt, Artificial Sequence
  Description of Artificial Sequence: Synthetic oligonucleotide
  Sense strand starting at position 607 of SEQ ID NO: 1243134
cagggaaccuguucugaca

SEQ ID NO: 1397399 - RNA, 19 nt, Artificial Sequence
  Description of Artificial Sequence: Synthetic oligonucleotide
  Antisense strand to SEQ ID NO: 1397398
ugucagaacagguucccug

SEQ ID NO: 1397400 - RNA, 19 nt, Artificial Sequence
  Description of Artificial Sequence: Synthetic oligonucleotide
  Sense strand starting at position 629 of SEQ ID NO: 1243134
ucuugugguguccaguaaa

SEQ ID NO: 1397401 - RNA, 19 nt, Artificial Sequence
  Description of Artificial Sequence: Synthetic oligonucleotide
  Antisense strand to SEQ ID NO: 1397400
uuuacuggacaccacaaga

SEQ ID NO: 1397402 - RNA, 19 nt, Artificial Sequence
  Description of Artificial Sequence: Synthetic oligonucleotide
  Sense strand starting at position 632 of SEQ ID NO: 1243134
ugugguguccaguaaagga

SEQ ID NO: 1397403 - RNA, 19 nt, Artificial Sequence
  Description of Artificial Sequence: Synthetic oligonucleotide
  Antisense strand to SEQ ID NO: 1397402
uccuuuacuggacaccaca

SEQ ID NO: 1397404 - RNA, 19 nt, Artificial Sequence
  Description of Artificial Sequence: Synthetic oligonucleotide
  Sense strand starting at position 971 of SEQ ID NO: 1243134
ggcccuuuccagcaagaag

SEQ ID NO: 1397405 - RNA, 19 nt, Artificial Sequence
  Description of Artificial Sequence: Synthetic oligonucleotide
  Antisense strand to SEQ ID NO: 1397404
cuucuugcuggaaagggcc

SEQ ID NO: 1397406 - RNA, 19 nt, Artificial Sequence
  Description of Artificial Sequence: Synthetic oligonucleotide
  Sense strand starting at position 1179 of SEQ ID NO: 1243134
ggagggucccgguaagaga

SEQ ID NO: 1397407 - RNA, 19 nt, Artificial Sequence
  Description of Artificial Sequence: Synthetic oligonucleotide
  Antisense strand to SEQ ID NO: 1397406
ucucuuaccgggacccucc

SEQ ID NO: 1397408 - RNA, 19 nt, Artificial Sequence
  Description of Artificial Sequence: Synthetic oligonucleotide
  Sense strand starting at position 1586 of SEQ ID NO: 1243134
gacucaccucgcgaguaga

SEQ ID NO: 1397409 - RNA, 19 nt, Artificial Sequence
  Description of Artificial Sequence: Synthetic oligonucleotide
  Antisense strand to SEQ ID NO: 1397408
ucuacucgcgaggugaguc

SEQ ID NO: 1397410 - RNA, 19 nt, Artificial Sequence
  Description of Artificial Sequence: Synthetic oligonucleotide
  Sense strand starting at position 2462 of SEQ ID NO: 1243134
guacaaagggacugucaaa

SEQ ID NO: 1397411 - RNA, 19 nt, Artificial Sequence
  Description of Artificial Sequence: Synthetic oligonucleotide
  Antisense strand to SEQ ID NO: 1397410
uuugacagucccuuuguac

SEQ ID NO: 1397412 - RNA, 19 nt, Artificial Sequence
  Description of Artificial Sequence: Synthetic oligonucleotide
  Sense strand starting at position 2576 of SEQ ID NO: 1243134
accuuuggaggcugaaauu

SEQ ID NO: 1397413 - RNA, 19 nt, Artificial Sequence
  Description of Artificial Sequence: Synthetic oligonucleotide
  Antisense strand to SEQ ID NO: 1397412
aauuucagccuccaaaggu

SEQ ID NO: 1397414 - RNA, 19 nt, Artificial Sequence
  Description of Artificial Sequence: Synthetic oligonucleotide
  Sense strand starting at position 2606 of SEQ ID NO: 1243134
aaacgaucucucugauugu

SEQ ID NO: 1397415 - RNA, 19 nt, Artificial Sequence
  Description of Artificial Sequence: Synthetic oligonucleotide
  Antisense strand to SEQ ID NO: 1397414
acaaucagagagaucguuu

SEQ ID NO: 1397416 - RNA, 19 nt, Artificial Sequence
  Description of Artificial Sequence: Synthetic oligonucleotide
  Sense strand starting at position 2638 of SEQ ID NO: 1243134
gguuauucggagugggaca

SEQ ID NO: 1397417 - RNA, 19 nt, Artificial Sequence
  Description of Artificial Sequence: Synthetic oligonucleotide
  Antisense strand to SEQ ID NO: 1397416
ugucccacuccgaauaacc

SEQ ID NO: 1397418 - RNA, 19 nt, Artificial Sequence
  Description of Artificial Sequence: Synthetic oligonucleotide
  Sense strand starting at position 2639 of SEQ ID NO: 1243134
guuauucggagugggacau

SEQ ID NO: 1397419 - RNA, 19 nt, Artificial Sequence
  Description of Artificial Sequence: Synthetic oligonucleotide
  Antisense strand to SEQ ID NO: 1397418
augucccacuccgaauaac

SEQ ID NO: 1397420 - RNA, 19 nt, Artificial Sequence
  Description of Artificial Sequence: Synthetic oligonucleotide
  Sense strand starting at position 2694 of SEQ ID NO: 1243134
cuggcuguucuagaggaaa

SEQ ID NO: 1397421 - RNA, 19 nt, Artificial Sequence
  Description of Artificial Sequence: Synthetic oligonucleotide
  Antisense strand to SEQ ID NO: 1397420
uuuccucuagaacagccag

SEQ ID NO: 1397422 - RNA, 19 nt, Artificial Sequence
  Description of Artificial Sequence: Synthetic oligonucleotide
  Sense strand starting at position 2920 of SEQ ID NO: 1243134
auagacuucugagaaauuu

SEQ ID NO: 1397423 - RNA, 19 nt, Artificial Sequence
  Description of Artificial Sequence: Synthetic oligonucleotide
  Antisense strand to SEQ ID NO: 1397422
aaauuucucagaagucuau

SEQ ID NO: 1397424 - RNA, 19 nt, Artificial Sequence
  Description of Artificial Sequence: Synthetic oligonucleotide
  Sense strand starting at position 2951 of SEQ ID NO: 1243134
uugaaauauuaccuggagu

SEQ ID NO: 1397425 - RNA, 19 nt, Artificial Sequence
  Description of Artificial Sequence: Synthetic oligonucleotide
  Antisense strand to SEQ ID NO: 1397424
acuccagguaauauuucaa

SEQ ID NO: 1397426 - RNA, 19 nt, Artificial Sequence
  Description of Artificial Sequence: Synthetic oligonucleotide
  Sense strand starting at position 2952 of SEQ ID NO: 1243134
ugaaauauuaccuggagug

SEQ ID NO: 1397427 - RNA, 19 nt, Artificial Sequence
  Description of Artificial Sequence: Synthetic oligonucleotide
  Antisense strand to SEQ ID NO: 1397426
cacuccagguaauauuuca

SEQ ID NO: 1397428 - RNA, 19 nt, Artificial Sequence
  Description of Artificial Sequence: Synthetic oligonucleotide
  Sense strand starting at position 2954 of SEQ ID NO: 1243134
aaauauuaccuggagugca

SEQ ID NO: 1397429 - RNA, 19 nt, Artificial Sequence
  Description of Artificial Sequence: Synthetic oligonucleotide
  Antisense strand to SEQ ID NO: 1397428
ugcacuccagguaauauuu

SEQ ID NO: 1397430 - RNA, 19 nt, Artificial Sequence
  Description of Artificial Sequence: Synthetic oligonucleotide
  Sense strand starting at position 2996 of SEQ ID NO: 1243134
uuuaaucuuguguggaaua

SEQ ID NO: 1397431 - RNA, 19 nt, Artificial Sequence
  Description of Artificial Sequence: Synthetic oligonucleotide
  Antisense strand to SEQ ID NO: 1397430
uauuccacacaagauuaaa

SEQ ID NO: 1397432 - RNA, 19 nt, Artificial Sequence
  Description of Artificial Sequence: Synthetic oligonucleotide
  Sense strand starting at position 2998 of SEQ ID NO: 1243134
uaaucuuguguggaauauu

SEQ ID NO: 1397433 - RNA, 19 nt, Artificial Sequence
  Description of Artificial Sequence: Synthetic oligonucleotide
  Antisense strand to SEQ ID NO: 1397432
aauauuccacacaagauua

SEQ ID NO: 1397434 - RNA, 19 nt, Artificial Sequence
  Description of Artificial Sequence: Synthetic oligonucleotide
  Sense strand starting at position 3001 of SEQ ID NO: 1243134
ucuuguguggaauauugau

SEQ ID NO: 1397435 - RNA, 19 nt, Artificial Sequence
  Description of Artificial Sequence: Synthetic oligonucleotide
  Antisense strand to SEQ ID NO: 1397434
aucaauauuccacacaaga

SEQ ID NO: 1397436 - RNA, 19 nt, Artificial Sequence
  Description of Artificial Sequence: Synthetic oligonucleotide
  Sense strand starting at position 3207 of SEQ ID NO: 1243134
caugaaauugagcaguucu

SEQ ID NO: 1397437 - RNA, 19 nt, Artificial Sequence
  Description of Artificial Sequence: Synthetic oligonucleotide
  Antisense strand to SEQ ID NO: 1397436
agaacugcucaauuucaug

SEQ ID NO: 1397438 - RNA, 19 nt, Artificial Sequence
  Description of Artificial Sequence: Synthetic oligonucleotide
  Sense strand starting at position 3282 of SEQ ID NO: 1243134
acagaugucgcugaggcaa

SEQ ID NO: 1397439 - RNA, 19 nt, Artificial Sequence
  Description of Artificial Sequence: Synthetic oligonucleotide
  Antisense strand to SEQ ID NO: 1397438
uugccucagcgacaucugu

SEQ ID NO: 1397440 - RNA, 19 nt, Artificial Sequence
  Description of Artificial Sequence: Synthetic oligonucleotide
  Sense strand starting at position 3329 of SEQ ID NO: 1243134
cuagaauuuaaacgugugu

SEQ ID NO: 1397441 - RNA, 19 nt, Artificial Sequence
  Description of Artificial Sequence: Synthetic oligonucleotide
  Antisense strand to SEQ ID NO: 1397440
acacacguuuaaauucuag

SEQ ID NO: 1397442 - RNA, 19 nt, Artificial Sequence
  Description of Artificial Sequence: Synthetic oligonucleotide
  Sense strand starting at position 3333 of SEQ ID NO: 1243134
aauuuaaacgugugucauc

SEQ ID NO: 1397443 - RNA, 19 nt, Artificial Sequence
  Description of Artificial Sequence: Synthetic oligonucleotide
  Antisense strand to SEQ ID NO: 1397442
gaugacacacguuuaaauu

SEQ ID NO: 1397444 - RNA, 19 nt, Artificial Sequence
  Description of Artificial Sequence: Synthetic oligonucleotide
  Sense strand starting at position 3334 of SEQ ID NO: 1243134
auuuaaacgugugucauca

SEQ ID NO: 1397445 - RNA, 19 nt, Artificial Sequence
  Description of Artificial Sequence: Synthetic oligonucleotide
  Antisense strand to SEQ ID NO: 1397444
ugaugacacacguuuaaau

SEQ ID NO: 1397446 - RNA, 19 nt, Artificial Sequence
  Description of Artificial Sequence: Synthetic oligonucleotide
  Sense strand starting at position 3346 of SEQ ID NO: 1243134
gucaucagagcucaccuau

SEQ ID NO: 1397447 - RNA, 19 nt, Artificial Sequence
  Description of Artificial Sequence: Synthetic oligonucleotide
  Antisense strand to SEQ ID NO: 1397446
auaggugagcucugaugac

SEQ ID NO: 1397448 - RNA, 19 nt, Artificial Sequence
  Description of Artificial Sequence: Synthetic oligonucleotide
  Sense strand starting at position 3407 of SEQ ID NO: 1243134
cugaauuguguguaguaau

SEQ ID NO: 1397449 - RNA, 19 nt, Artificial Sequence
  Description of Artificial Sequence: Synthetic oligonucleotide
  Antisense strand to SEQ ID NO: 1397448
auuacuacacacaauucag

SEQ ID NO: 1397450 - RNA, 19 nt, Artificial Sequence
  Description of Artificial Sequence: Synthetic oligonucleotide
  Sense strand starting at position 3414 of SEQ ID NO: 1243134
guguguaguaaucaauccu

SEQ ID NO: 1397451 - RNA, 19 nt, Artificial Sequence
  Description of Artificial Sequence: Synthetic oligonucleotide
  Antisense strand to SEQ ID NO: 1397450
aggauugauuacuacacac

SEQ ID NO: 1397452 - RNA, 19 nt, Artificial Sequence
  Description of Artificial Sequence: Synthetic oligonucleotide
  Sense strand starting at position 3655 of SEQ ID NO: 1243134
agcuucugaauuggaguaa

SEQ ID NO: 1397453 - RNA, 19 nt, Artificial Sequence
  Description of Artificial Sequence: Synthetic oligonucleotide
  Antisense strand to SEQ ID NO: 1397452
uuacuccaauucagaagcu

SEQ ID NO: 1397454 - RNA, 19 nt, Artificial Sequence
  Description of Artificial Sequence: Synthetic oligonucleotide
  Sense strand starting at position 3703 of SEQ ID NO: 1243134
acccauuagucaguauaca

SEQ ID NO: 1397455 - RNA, 19 nt, Artificial Sequence
  Description of Artificial Sequence: Synthetic oligonucleotide
  Antisense strand to SEQ ID NO: 1397454
uguauacugacuaaugggu

SEQ ID NO: 1397456 - RNA, 19 nt, Artificial Sequence
  Description of Artificial Sequence: Synthetic oligonucleotide
  Sense strand starting at position 3704 of SEQ ID NO: 1243134
cccauuagucaguauacag

SEQ ID NO: 1397457 - RNA, 19 nt, Artificial Sequence
  Description of Artificial Sequence: Synthetic oligonucleotide
  Antisense strand to SEQ ID NO: 1397456
cuguauacugacuaauggg

SEQ ID NO: 1397458 - RNA, 19 nt, Artificial Sequence
  Description of Artificial Sequence: Synthetic oligonucleotide
  Sense strand starting at position 3851 of SEQ ID NO: 1243134
cgguucugacccuaauuaa

SEQ ID NO: 1397459 - RNA, 19 nt, Artificial Sequence
  Description of Artificial Sequence: Synthetic oligonucleotide
  Antisense strand to SEQ ID NO: 1397458
uuaauuagggucagaaccg

SEQ ID NO: 1397460 - RNA, 19 nt, Artificial Sequence
  Description of Artificial Sequence: Synthetic oligonucleotide
  Sense strand starting at position 110 of SEQ ID NO: 1243135
gugggaauuagucagcuac

SEQ ID NO: 1397461 - RNA, 19 nt, Artificial Sequence
  Description of Artificial Sequence: Synthetic oligonucleotide
  Antisense strand to SEQ ID NO: 1397460
guagcugacuaauucccac

SEQ ID NO: 1397462 - RNA, 19 nt, Artificial Sequence
  Description of Artificial Sequence: Synthetic oligonucleotide
  Sense strand starting at position 112 of SEQ ID NO: 1243135
gggaauuagucagcuacug

SEQ ID NO: 1397463 - RNA, 19 nt, Artificial Sequence
  Description of Artificial Sequence: Synthetic oligonucleotide
  Antisense strand to SEQ ID NO: 1397462
caguagcugacuaauuccc

SEQ ID NO: 1397464 - RNA, 19 nt, Artificial Sequence
  Description of Artificial Sequence: Synthetic oligonucleotide
  Sense strand starting at position 313 of SEQ ID NO: 1243135
acuguacucccucauggua

SEQ ID NO: 1397465 - RNA, 19 nt, Artificial Sequence
  Description of Artificial Sequence: Synthetic oligonucleotide
  Antisense strand to SEQ ID NO: 1397464
uaccaugagggaguacagu

SEQ ID NO: 1397466 - RNA, 19 nt, Artificial Sequence
  Description of Artificial Sequence: Synthetic oligonucleotide
  Sense strand starting at position 329 of SEQ ID NO: 1243135
guacaagagucuuggucca

SEQ ID NO: 1397467 - RNA, 19 nt, Artificial Sequence
  Description of Artificial Sequence: Synthetic oligonucleotide
  Antisense strand to SEQ ID NO: 1397466
uggaccaagacucuuguac

SEQ ID NO: 1397468 - RNA, 19 nt, Artificial Sequence
  Description of Artificial Sequence: Synthetic oligonucleotide
  Sense strand starting at position 331 of SEQ ID NO: 1243135
acaagagucuugguccaag

SEQ ID NO: 1397469 - RNA, 19 nt, Artificial Sequence
  Description of Artificial Sequence: Synthetic oligonucleotide
  Antisense strand to SEQ ID NO: 1397468
cuuggaccaagacucuugu

SEQ ID NO: 1397470 - RNA, 19 nt, Artificial Sequence
  Description of Artificial Sequence: Synthetic oligonucleotide
  Sense strand starting at position 452 of SEQ ID NO: 1243135
gggcaucccugauaagauu

SEQ ID NO: 1397471 - RNA, 19 nt, Artificial Sequence
  Description of Artificial Sequence: Synthetic oligonucleotide
  Antisense strand to SEQ ID NO: 1397470
aaucuuaucagggaugccc

SEQ ID NO: 1397472 - RNA, 19 nt, Artificial Sequence
  Description of Artificial Sequence: Synthetic oligonucleotide
  Sense strand starting at position 486 of SEQ ID NO: 1243135
uggcuccaguguucccaaa

SEQ ID NO: 1397473 - RNA, 19 nt, Artificial Sequence
  Description of Artificial Sequence: Synthetic oligonucleotide
  Antisense strand to SEQ ID NO: 1397472
uuugggaacacuggagcca

SEQ ID NO: 1397474 - RNA, 19 nt, Artificial Sequence
  Description of Artificial Sequence: Synthetic oligonucleotide
  Sense strand starting at position 488 of SEQ ID NO: 1243135
gcuccaguguucccaaaga

SEQ ID NO: 1397475 - RNA, 19 nt, Artificial Sequence
  Description of Artificial Sequence: Synthetic oligonucleotide
  Antisense strand to SEQ ID NO: 1397474
ucuuugggaacacuggagc

SEQ ID NO: 1397476 - RNA, 19 nt, Artificial Sequence
  Description of Artificial Sequence: Synthetic oligonucleotide
  Sense strand starting at position 505 of SEQ ID NO: 1243135
gaacuugcugcagauguaa

SEQ ID NO: 1397477 - RNA, 19 nt, Artificial Sequence
  Description of Artificial Sequence: Synthetic oligonucleotide
  Antisense strand to SEQ ID NO: 1397476
uuacaucugcagcaaguuc

SEQ ID NO: 1397478 - RNA, 19 nt, Artificial Sequence
  Description of Artificial Sequence: Synthetic oligonucleotide
  Sense strand starting at position 520 of SEQ ID NO: 1243135
guaacaagaugucacagau

SEQ ID NO: 1397479 - RNA, 19 nt, Artificial Sequence
  Description of Artificial Sequence: Synthetic oligonucleotide
  Antisense strand to SEQ ID NO: 1397478
aucugugacaucuuguuac

SEQ ID NO: 1397480 - RNA, 19 nt, Artificial Sequence
  Description of Artificial Sequence: Synthetic oligonucleotide
  Sense strand starting at position 932 of SEQ ID NO: 1243135
ggguaauucuucccugaca

SEQ ID NO: 1397481 - RNA, 19 nt, Artificial Sequence
  Description of Artificial Sequence: Synthetic oligonucleotide
  Antisense strand to SEQ ID NO: 1397480
ugucagggaagaauuaccc

SEQ ID NO: 1397482 - RNA, 19 nt, Artificial Sequence
  Description of Artificial Sequence: Synthetic oligonucleotide
  Sense strand starting at position 1068 of SEQ ID NO: 1243135
cuaagacacucugaaaugu

SEQ ID NO: 1397483 - RNA, 19 nt, Artificial Sequence
  Description of Artificial Sequence: Synthetic oligonucleotide
  Antisense strand to SEQ ID NO: 1397482
acauuucagagugucuuag

SEQ ID NO: 1397484 - RNA, 19 nt, Artificial Sequence
  Description of Artificial Sequence: Synthetic oligonucleotide
  Sense strand starting at position 2045 of SEQ ID NO: 1243135
gcgacuuucgccuugcauu

SEQ ID NO: 1397485 - RNA, 19 nt, Artificial Sequence
  Description of Artificial Sequence: Synthetic oligonucleotide
  Antisense strand to SEQ ID NO: 1397484
aaugcaaggcgaaagucgc

SEQ ID NO: 1397486 - RNA, 19 nt, Artificial Sequence
  Description of Artificial Sequence: Synthetic oligonucleotide
  Sense strand starting at position 2052 of SEQ ID NO: 1243135
ucgccuugcauuggacaaa

SEQ ID NO: 1397487 - RNA, 19 nt, Artificial Sequence
  Description of Artificial Sequence: Synthetic oligonucleotide
  Antisense strand to SEQ ID NO: 1397486
uuuguccaaugcaaggcga

SEQ ID NO: 1397488 - RNA, 19 nt, Artificial Sequence
  Description of Artificial Sequence: Synthetic oligonucleotide
  Sense strand starting at position 2201 of SEQ ID NO: 1243135
gcacaaucaccguagcuuu

SEQ ID NO: 1397489 - RNA, 19 nt, Artificial Sequence
  Description of Artificial Sequence: Synthetic oligonucleotide
  Antisense strand to SEQ ID NO: 1397488
aaagcuacggugauugugc

SEQ ID NO: 1397490 - RNA, 19 nt, Artificial Sequence
  Description of Artificial Sequence: Synthetic oligonucleotide
  Sense strand starting at position 2298 of SEQ ID NO: 1243135
ccgucuuccggcuugguua

SEQ ID NO: 1397491 - RNA, 19 nt, Artificial Sequence
  Description of Artificial Sequence: Synthetic oligonucleotide
  Antisense strand to SEQ ID NO: 1397490
uaaccaagccggaagacgg

SEQ ID NO: 1397492 - RNA, 19 nt, Artificial Sequence
  Description of Artificial Sequence: Synthetic oligonucleotide
  Sense strand starting at position 2338 of SEQ ID NO: 1243135
uguaguccucgagcgguaa

SEQ ID NO: 1397493 - RNA, 19 nt, Artificial Sequence
  Description of Artificial Sequence: Synthetic oligonucleotide
  Antisense strand to SEQ ID NO: 1397492
uuaccgcucgaggacuaca

SEQ ID NO: 1397494 - RNA, 19 nt, Artificial Sequence
  Description of Artificial Sequence: Synthetic oligonucleotide
  Sense strand starting at position 2342 of SEQ ID NO: 1243135
guccucgagcgguaagguu

SEQ ID NO: 1397495 - RNA, 19 nt, Artificial Sequence
  Description of Artificial Sequence: Synthetic oligonucleotide
  Antisense strand to SEQ ID NO: 1397494
aaccuuaccgcucgaggac

SEQ ID NO: 1397496 - RNA, 19 nt, Artificial Sequence
  Description of Artificial Sequence: Synthetic oligonucleotide
  Sense strand starting at position 2351 of SEQ ID NO: 1243135
cgguaagguuuccgggaga

SEQ ID NO: 1397497 - RNA, 19 nt, Artificial Sequence
  Description of Artificial Sequence: Synthetic oligonucleotide
  Antisense strand to SEQ ID NO: 1397496
ucucccggaaaccuuaccg

SEQ ID NO: 1397498 - RNA, 19 nt, Artificial Sequence
  Description of Artificial Sequence: Synthetic oligonucleotide
  Sense strand starting at position 2381 of SEQ ID NO: 1243135
ccuggaauucccuguggaa

SEQ ID NO: 1397499 - RNA, 19 nt, Artificial Sequence
  Description of Artificial Sequence: Synthetic oligonucleotide
  Antisense strand to SEQ ID NO: 1397498
uuccacagggaauuccagg

SEQ ID NO: 1397500 - RNA, 19 nt, Artificial Sequence
  Description of Artificial Sequence: Synthetic oligonucleotide
  Sense strand starting at position 2383 of SEQ ID NO: 1243135
uggaauucccuguggaaac

SEQ ID NO: 1397501 - RNA, 19 nt, Artificial Sequence
  Description of Artificial Sequence: Synthetic oligonucleotide
  Antisense strand to SEQ ID NO: 1397500
guuuccacagggaauucca

SEQ ID NO: 1397502 - RNA, 19 nt, Artificial Sequence
  Description of Artificial Sequence: Synthetic oligonucleotide
  Sense strand starting at position 2393 of SEQ ID NO: 1243135
uguggaaaccgcggauuua

SEQ ID NO: 1397503 - RNA, 19 nt, Artificial Sequence
  Description of Artificial Sequence: Synthetic oligonucleotide
  Antisense strand to SEQ ID NO: 1397502
uaaauccgcgguuuccaca

SEQ ID NO: 1397504 - RNA, 19 nt, Artificial Sequence
  Description of Artificial Sequence: Synthetic oligonucleotide
  Sense strand starting at position 45 of SEQ ID NO: 1243136
cuacuuauguagucacaca

SEQ ID NO: 1397505 - RNA, 19 nt, Artificial Sequence
  Description of Artificial Sequence: Synthetic oligonucleotide
  Antisense strand to SEQ ID NO: 1397504
ugugugacuacauaaguag

SEQ ID NO: 1397506 - RNA, 19 nt, Artificial Sequence
  Description of Artificial Sequence: Synthetic oligonucleotide
  Sense strand starting at position 77 of SEQ ID NO: 1243136
ucauauguuugguuaacac

SEQ ID NO: 1397507 - RNA, 19 nt, Artificial Sequence
  Description of Artificial Sequence: Synthetic oligonucleotide
  Antisense strand to SEQ ID NO: 1397506
guguuaaccaaacauauga

SEQ ID NO: 1397508 - RNA, 19 nt, Artificial Sequence
  Description of Artificial Sequence: Synthetic oligonucleotide
  Sense strand starting at position 87 of SEQ ID NO: 1243136
gguuaacacccuuaucgau

SEQ ID NO: 1397509 - RNA, 19 nt, Artificial Sequence
  Description of Artificial Sequence: Synthetic oligonucleotide
  Antisense strand to SEQ ID NO: 1397508
aucgauaaggguguuaacc

SEQ ID NO: 1397510 - RNA, 19 nt, Artificial Sequence
  Description of Artificial Sequence: Synthetic oligonucleotide
  Sense strand starting at position 317 of SEQ ID NO: 1243136
uuccuaguaguacaguuau

SEQ ID NO: 1397511 - RNA, 19 nt, Artificial Sequence
  Description of Artificial Sequence: Synthetic oligonucleotide
  Antisense strand to SEQ ID NO: 1397510
auaacuguacuacuaggaa

SEQ ID NO: 1397512 - RNA, 19 nt, Artificial Sequence
  Description of Artificial Sequence: Synthetic oligonucleotide
  Sense strand starting at position 346 of SEQ ID NO: 1243136
augugucuccuccaacuau

SEQ ID NO: 1397513 - RNA, 19 nt, Artificial Sequence
  Description of Artificial Sequence: Synthetic oligonucleotide
  Antisense strand to SEQ ID NO: 1397512
auaguuggaggagacacau

SEQ ID NO: 1397514 - RNA, 19 nt, Artificial Sequence
  Description of Artificial Sequence: Synthetic oligonucleotide
  Sense strand starting at position 389 of SEQ ID NO: 1243136
aguccucugccucaucaua

SEQ ID NO: 1397515 - RNA, 19 nt, Artificial Sequence
  Description of Artificial Sequence: Synthetic oligonucleotide
  Antisense strand to SEQ ID NO: 1397514
uaugaugaggcagaggacu

SEQ ID NO: 1397516 - RNA, 19 nt, Artificial Sequence
  Description of Artificial Sequence: Synthetic oligonucleotide
  Sense strand starting at position 428 of SEQ ID NO: 1243136
gugguucgacguaauaggu

SEQ ID NO: 1397517 - RNA, 19 nt, Artificial Sequence
  Description of Artificial Sequence: Synthetic oligonucleotide
  Antisense strand to SEQ ID NO: 1397516
accuauuacgucgaaccac

SEQ ID NO: 1397518 - RNA, 19 nt, Artificial Sequence
  Description of Artificial Sequence: Synthetic oligonucleotide
  Sense strand starting at position 438 of SEQ ID NO: 1243136
guaauaggugcucaaauua

SEQ ID NO: 1397519 - RNA, 19 nt, Artificial Sequence
  Description of Artificial Sequence: Synthetic oligonucleotide
  Antisense strand to SEQ ID NO: 1397518
uaauuugagcaccuauuac

SEQ ID NO: 1397520 - RNA, 19 nt, Artificial Sequence
  Description of Artificial Sequence: Synthetic oligonucleotide
  Sense strand starting at position 561 of SEQ ID NO: 1243136
auaaguaccgccuagagaa

SEQ ID NO: 1397521 - RNA, 19 nt, Artificial Sequence
  Description of Artificial Sequence: Synthetic oligonucleotide
  Antisense strand to SEQ ID NO: 1397520
uucucuaggcgguacuuau

SEQ ID NO: 1397522 - RNA, 19 nt, Artificial Sequence
  Description of Artificial Sequence: Synthetic oligonucleotide
  Sense strand starting at position 823 of SEQ ID NO: 1243136
uccugauuggucugaccug

SEQ ID NO: 1397523 - RNA, 19 nt, Artificial Sequence
  Description of Artificial Sequence: Synthetic oligonucleotide
  Antisense strand to SEQ ID NO: 1397522
caggucagaccaaucagga

SEQ ID NO: 1397524 - RNA, 19 nt, Artificial Sequence
  Description of Artificial Sequence: Synthetic oligonucleotide
  Sense strand starting at position 830 of SEQ ID NO: 1243136
uggucugaccugcaagcau

SEQ ID NO: 1397525 - RNA, 19 nt, Artificial Sequence
  Description of Artificial Sequence: Synthetic oligonucleotide
  Antisense strand to SEQ ID NO: 1397524
augcuugcaggucagacca

SEQ ID NO: 1397526 - RNA, 19 nt, Artificial Sequence
  Description of Artificial Sequence: Synthetic oligonucleotide
  Sense strand starting at position 1039 of SEQ ID NO: 1243136
acaguuacacuucgaauua

SEQ ID NO: 1397527 - RNA, 19 nt, Artificial Sequence
  Description of Artificial Sequence: Synthetic oligonucleotide
  Antisense strand to SEQ ID NO: 1397526
uaauucgaaguguaacugu

SEQ ID NO: 1397528 - RNA, 19 nt, Artificial Sequence
  Description of Artificial Sequence: Synthetic oligonucleotide
  Sense strand starting at position 1052 of SEQ ID NO: 1243136
gaauuaauugugggucaua

SEQ ID NO: 1397529 - RNA, 19 nt, Artificial Sequence
  Description of Artificial Sequence: Synthetic oligonucleotide
  Antisense strand to SEQ ID NO: 1397528
uaugacccacaauuaauuc

SEQ ID NO: 1397530 - RNA, 19 nt, Artificial Sequence
  Description of Artificial Sequence: Synthetic oligonucleotide
  Sense strand starting at position 1053 of SEQ ID NO: 1243136
aauuaauugugggucauaa

SEQ ID NO: 1397531 - RNA, 19 nt, Artificial Sequence
  Description of Artificial Sequence: Synthetic oligonucleotide
  Antisense strand to SEQ ID NO: 1397530
uuaugacccacaauuaauu

SEQ ID NO: 1397532 - RNA, 19 nt, Artificial Sequence
  Description of Artificial Sequence: Synthetic oligonucleotide
  Sense strand starting at position 1055 of SEQ ID NO: 1243136
uuaauugugggucauaaac

SEQ ID NO: 1397533 - RNA, 19 nt, Artificial Sequence
  Description of Artificial Sequence: Synthetic oligonucleotide
  Antisense strand to SEQ ID NO: 1397532
guuuaugacccacaauuaa

SEQ ID NO: 1397534 - RNA, 19 nt, Artificial Sequence
  Description of Artificial Sequence: Synthetic oligonucleotide
  Sense strand starting at position 1063 of SEQ ID NO: 1243136
gggucauaaacuugcacga

SEQ ID NO: 1397535 - RNA, 19 nt, Artificial Sequence
  Description of Artificial Sequence: Synthetic oligonucleotide
  Antisense strand to SEQ ID NO: 1397534
ucgugcaaguuuaugaccc

SEQ ID NO: 1397536 - RNA, 19 nt, Artificial Sequence
  Description of Artificial Sequence: Synthetic oligonucleotide
  Sense strand starting at position 1084 of SEQ ID NO: 1243136
ggacguuaacucgaaagca

SEQ ID NO: 1397537 - RNA, 19 nt, Artificial Sequence
  Description of Artificial Sequence: Synthetic oligonucleotide
  Antisense strand to SEQ ID NO: 1397536
ugcuuucgaguuaacgucc

SEQ ID NO: 1397538 - RNA, 19 nt, Artificial Sequence
  Description of Artificial Sequence: Synthetic oligonucleotide
  Sense strand starting at position 1092 of SEQ ID NO: 1243136
acucgaaagcauuacucuu

SEQ ID NO: 1397539 - RNA, 19 nt, Artificial Sequence
  Description of Artificial Sequence: Synthetic oligonucleotide
  Antisense strand to SEQ ID NO: 1397538
aagaguaaugcuuucgagu

SEQ ID NO: 1397540 - RNA, 19 nt, Artificial Sequence
  Description of Artificial Sequence: Synthetic oligonucleotide
  Sense strand starting at position 1414 of SEQ ID NO: 1243136
acgccuccucagcgauuua

SEQ ID NO: 1397541 - RNA, 19 nt, Artificial Sequence
  Description of Artificial Sequence: Synthetic oligonucleotide
  Antisense strand to SEQ ID NO: 1397540
uaaaucgcugaggaggcgu

SEQ ID NO: 1397542 - RNA, 19 nt, Artificial Sequence
  Description of Artificial Sequence: Synthetic oligonucleotide
  Sense strand starting at position 1415 of SEQ ID NO: 1243136
cgccuccucagcgauuuaa

SEQ ID NO: 1397543 - RNA, 19 nt, Artificial Sequence
  Description of Artificial Sequence: Synthetic oligonucleotide
  Antisense strand to SEQ ID NO: 1397542
uuaaaucgcugaggaggcg

SEQ ID NO: 1397544 - RNA, 19 nt, Artificial Sequence
  Description of Artificial Sequence: Synthetic oligonucleotide
  Sense strand starting at position 2111 of SEQ ID NO: 1243136
ucggucuccgcgagaagga

SEQ ID NO: 1397545 - RNA, 19 nt, Artificial Sequence
  Description of Artificial Sequence: Synthetic oligonucleotide
  Antisense strand to SEQ ID NO: 1397544
uccuucucgcggagaccga

SEQ ID NO: 1397546 - RNA, 19 nt, Artificial Sequence
  Description of Artificial Sequence: Synthetic oligonucleotide
  Sense strand starting at position 2180 of SEQ ID NO: 1243136
cagcuaccucucgggaauu

SEQ ID NO: 1397547 - RNA, 19 nt, Artificial Sequence
  Description of Artificial Sequence: Synthetic oligonucleotide
  Antisense strand to SEQ ID NO: 1397546
aauucccgagagguagcug

SEQ ID NO: 1397548 - RNA, 19 nt, Artificial Sequence
  Description of Artificial Sequence: Synthetic oligonucleotide
  Sense strand starting at position 2182 of SEQ ID NO: 1243136
gcuaccucucgggaauugu

SEQ ID NO: 1397549 - RNA, 19 nt, Artificial Sequence
  Description of Artificial Sequence: Synthetic oligonucleotide
  Antisense strand to SEQ ID NO: 1397548
acaauucccgagagguagc

SEQ ID NO: 1397550 - RNA, 19 nt, Artificial Sequence
  Description of Artificial Sequence: Synthetic oligonucleotide
  Sense strand starting at position 2250 of SEQ ID NO: 1243136
ggccguuagccucucuaau

SEQ ID NO: 1397551 - RNA, 19 nt, Artificial Sequence
  Description of Artificial Sequence: Synthetic oligonucleotide
  Antisense strand to SEQ ID NO: 1397550
auuagagaggcuaacggcc

SEQ ID NO: 1397552 - RNA, 19 nt, Artificial Sequence
  Description of Artificial Sequence: Synthetic oligonucleotide
  Sense strand starting at position 2251 of SEQ ID NO: 1243136
gccguuagccucucuaauu

SEQ ID NO: 1397553 - RNA, 19 nt, Artificial Sequence
  Description of Artificial Sequence: Synthetic oligonucleotide
  Antisense strand to SEQ ID NO: 1397552
aauuagagaggcuaacggc

SEQ ID NO: 1397554 - RNA, 19 nt, Artificial Sequence
  Description of Artificial Sequence: Synthetic oligonucleotide
  Sense strand starting at position 2548 of SEQ ID NO: 1243136
gagacagauugcgcgacaa

SEQ ID NO: 1397555 - RNA, 19 nt, Artificial Sequence
  Description of Artificial Sequence: Synthetic oligonucleotide
  Antisense strand to SEQ ID NO: 1397554
uugucgcgcaaucugucuc

SEQ ID NO: 1397556 - RNA, 19 nt, Artificial Sequence
  Description of Artificial Sequence: Synthetic oligonucleotide
  Sense strand starting at position 2688 of SEQ ID NO: 1243136
gcguuugaggccucagcga

SEQ ID NO: 1397557 - RNA, 19 nt, Artificial Sequence
  Description of Artificial Sequence: Synthetic oligonucleotide
  Antisense strand to SEQ ID NO: 1397556
ucgcugaggccucaaacgc

SEQ ID NO: 1397558 - RNA, 19 nt, Artificial Sequence
  Description of Artificial Sequence: Synthetic oligonucleotide
  Sense strand starting at position 2733 of SEQ ID NO: 1243136
gcuggaaguugaguagauu

SEQ ID NO: 1397559 - RNA, 19 nt, Artificial Sequence
  Description of Artificial Sequence: Synthetic oligonucleotide
  Antisense strand to SEQ ID NO: 1397558
aaucuacucaacuuccagc

SEQ ID NO: 1397560 - RNA, 19 nt, Artificial Sequence
  Description of Artificial Sequence: Synthetic oligonucleotide
  Sense strand starting at position 2754 of SEQ ID NO: 1243136
gcgggaaagcccguuguga

SEQ ID NO: 1397561 - RNA, 19 nt, Artificial Sequence
  Description of Artificial Sequence: Synthetic oligonucleotide
  Antisense strand to SEQ ID NO: 1397560
ucacaacgggcuuucccgc

SEQ ID NO: 1397562 - RNA, 19 nt, Artificial Sequence
  Description of Artificial Sequence: Synthetic oligonucleotide
  Sense strand starting at position 2765 of SEQ ID NO: 1243136
cguugugagcucgugccaa

SEQ ID NO: 1397563 - RNA, 19 nt, Artificial Sequence
  Description of Artificial Sequence: Synthetic oligonucleotide
  Antisense strand to SEQ ID NO: 1397562
uuggcacgagcucacaacg

SEQ ID NO: 1397564 - RNA, 19 nt, Artificial Sequence
  Description of Artificial Sequence: Synthetic oligonucleotide
  Sense strand starting at position 2767 of SEQ ID NO: 1243136
uugugagcucgugccaauc

SEQ ID NO: 1397565 - RNA, 19 nt, Artificial Sequence
  Description of Artificial Sequence: Synthetic oligonucleotide
  Antisense strand to SEQ ID NO: 1397564
gauuggcacgagcucacaa

SEQ ID NO: 1397566 - RNA, 19 nt, Artificial Sequence
  Description of Artificial Sequence: Synthetic oligonucleotide
  Sense strand starting at position 2874 of SEQ ID NO: 1243136
aagugacacugccuaaaga

SEQ ID NO: 1397567 - RNA, 19 nt, Artificial Sequence
  Description of Artificial Sequence: Synthetic oligonucleotide
  Antisense strand to SEQ ID NO: 1397566
ucuuuaggcagugucacuu

SEQ ID NO: 1397568 - RNA, 19 nt, Artificial Sequence
  Description of Artificial Sequence: Synthetic oligonucleotide
  Sense strand starting at position 3106 of SEQ ID NO: 1243136
ggcauagcaucccuagaug

SEQ ID NO: 1397569 - RNA, 19 nt, Artificial Sequence
  Description of Artificial Sequence: Synthetic oligonucleotide
  Antisense strand to SEQ ID NO: 1397568
caucuagggaugcuaugcc

SEQ ID NO: 1397570 - RNA, 19 nt, Artificial Sequence
  Description of Artificial Sequence: Synthetic oligonucleotide
  Sense strand starting at position 3309 of SEQ ID NO: 1243136
aagggaagcucuuugccga

SEQ ID NO: 1397571 - RNA, 19 nt, Artificial Sequence
  Description of Artificial Sequence: Synthetic oligonucleotide
  Antisense strand to SEQ ID NO: 1397570
ucggcaaagagcuucccuu

SEQ ID NO: 1397572 - RNA, 19 nt, Artificial Sequence
  Description of Artificial Sequence: Synthetic oligonucleotide
  Sense strand starting at position 3340 of SEQ ID NO: 1243136
uggacugacacuugagcua

SEQ ID NO: 1397573 - RNA, 19 nt, Artificial Sequence
  Description of Artificial Sequence: Synthetic oligonucleotide
  Antisense strand to SEQ ID NO: 1397572
uagcucaagugucagucca

SEQ ID NO: 1397574 - RNA, 19 nt, Artificial Sequence
  Description of Artificial Sequence: Synthetic oligonucleotide
  Sense strand starting at position 3655 of SEQ ID NO: 1243136
acaagaagugagcaaguuu

SEQ ID NO: 1397575 - RNA, 19 nt, Artificial Sequence
  Description of Artificial Sequence: Synthetic oligonucleotide
  Antisense strand to SEQ ID NO: 1397574
aaacuugcucacuucuugu

SEQ ID NO: 1397576 - RNA, 19 nt, Artificial Sequence
  Description of Artificial Sequence: Synthetic oligonucleotide
  Sense strand starting at position 3752 of SEQ ID NO: 1243136
ccggaugagugggcagaau

SEQ ID NO: 1397577 - RNA, 19 nt, Artificial Sequence
  Description of Artificial Sequence: Synthetic oligonucleotide
  Antisense strand to SEQ ID NO: 1397576
auucugcccacucauccgg

SEQ ID NO: 1397578 - RNA, 19 nt, Artificial Sequence
  Description of Artificial Sequence: Synthetic oligonucleotide
  Sense strand starting at position 3795 of SEQ ID NO: 1243136
ggacuuuauccugacggca

SEQ ID NO: 1397579 - RNA, 19 nt, Artificial Sequence
  Description of Artificial Sequence: Synthetic oligonucleotide
  Antisense strand to SEQ ID NO: 1397578
ugccgucaggauaaagucc

SEQ ID NO: 1397580 - RNA, 19 nt, Artificial Sequence
  Description of Artificial Sequence: Synthetic oligonucleotide
  Sense strand starting at position 3949 of SEQ ID NO: 1243136
gcauuagacggguggacua

SEQ ID NO: 1397581 - RNA, 19 nt, Artificial Sequence
  Description of Artificial Sequence: Synthetic oligonucleotide
  Antisense strand to SEQ ID NO: 1397580
uaguccacccgucuaaugc

SEQ ID NO: 1397582 - RNA, 19 nt, Artificial Sequence
  Description of Artificial Sequence: Synthetic oligonucleotide
  Sense strand starting at position 3959 of SEQ ID NO: 1243136
gguggacuauccuucccaa

SEQ ID NO: 1397583 - RNA, 19 nt, Artificial Sequence
  Description of Artificial Sequence: Synthetic oligonucleotide
  Antisense strand to SEQ ID NO: 1397582
uugggaaggauaguccacc

SEQ ID NO: 1397584 - RNA, 19 nt, Artificial Sequence
  Description of Artificial Sequence: Synthetic oligonucleotide
  Sense strand starting at position 1748 of SEQ ID NO: 1243137
aauccaucugccuguggaa

SEQ ID NO: 1397585 - RNA, 19 nt, Artificial Sequence
  Description of Artificial Sequence: Synthetic oligonucleotide
  Antisense strand to SEQ ID NO: 1397584
uuccacaggcagauggauu

SEQ ID NO: 1397586 - RNA, 19 nt, Artificial Sequence
  Description of Artificial Sequence: Synthetic oligonucleotide
  Sense strand starting at position 2073 of SEQ ID NO: 1243137
ugaagcuucuaugaaagaa

SEQ ID NO: 1397587 - RNA, 19 nt, Artificial Sequence
  Description of Artificial Sequence: Synthetic oligonucleotide
  Antisense strand to SEQ ID NO: 1397586
uucuuucauagaagcuuca

SEQ ID NO: 1397588 - RNA, 19 nt, Artificial Sequence
  Description of Artificial Sequence: Synthetic oligonucleotide
  Sense strand starting at position 2716 of SEQ ID NO: 1243137
augcuaucucccugguagu

SEQ ID NO: 1397589 - RNA, 19 nt, Artificial Sequence
  Description of Artificial Sequence: Synthetic oligonucleotide
  Antisense strand to SEQ ID NO: 1397588
acuaccagggagauagcau

SEQ ID NO: 1397590 - RNA, 19 nt, Artificial Sequence
  Description of Artificial Sequence: Synthetic oligonucleotide
  Sense strand starting at position 2717 of SEQ ID NO: 1243137
ugcuaucucccugguaguu

SEQ ID NO: 1397591 - RNA, 19 nt, Artificial Sequence
  Description of Artificial Sequence: Synthetic oligonucleotide
  Antisense strand to SEQ ID NO: 1397590
aacuaccagggagauagca

SEQ ID NO: 1397592 - RNA, 19 nt, Artificial Sequence
  Description of Artificial Sequence: Synthetic oligonucleotide
  Sense strand starting at position 2719 of SEQ ID NO: 1243137
cuaucucccugguaguuaa

SEQ ID NO: 1397593 - RNA, 19 nt, Artificial Sequence
  Description of Artificial Sequence: Synthetic oligonucleotide
  Antisense strand to SEQ ID NO: 1397592
uuaacuaccagggagauag

SEQ ID NO: 1397594 - RNA, 19 nt, Artificial Sequence
  Description of Artificial Sequence: Synthetic oligonucleotide
  Sense strand starting at position 2863 of SEQ ID NO: 1243137
ccagcucucccaggagaga

SEQ ID NO: 1397595 - RNA, 19 nt, Artificial Sequence
  Description of Artificial Sequence: Synthetic oligonucleotide
  Antisense strand to SEQ ID NO: 1397594
ucucuccugggagagcugg

SEQ ID NO: 1397596 - RNA, 19 nt, Artificial Sequence
  Description of Artificial Sequence: Synthetic oligonucleotide
  Sense strand starting at position 2981 of SEQ ID NO: 1243137
ugugaaggcugauaccuau

SEQ ID NO: 1397597 - RNA, 19 nt, Artificial Sequence
  Description of Artificial Sequence: Synthetic oligonucleotide
  Antisense strand to SEQ ID NO: 1397596
auagguaucagccuucaca

SEQ ID NO: 1397598 - RNA, 19 nt, Artificial Sequence
  Description of Artificial Sequence: Synthetic oligonucleotide
  Sense strand starting at position 3076 of SEQ ID NO: 1243137
accguuuaaccgcaggaga

SEQ ID NO: 1397599 - RNA, 19 nt, Artificial Sequence
  Description of Artificial Sequence: Synthetic oligonucleotide
  Antisense strand to SEQ ID NO: 1397598
ucuccugcgguuaaacggu

SEQ ID NO: 1397600 - RNA, 19 nt, Artificial Sequence
  Description of Artificial Sequence: Synthetic oligonucleotide
  Sense strand starting at position 3338 of SEQ ID NO: 1243137
ggccgagucugaagacaga

SEQ ID NO: 1397601 - RNA, 19 nt, Artificial Sequence
  Description of Artificial Sequence: Synthetic oligonucleotide
  Antisense strand to SEQ ID NO: 1397600
ucugucuucagacucggcc

SEQ ID NO: 1397602 - RNA, 19 nt, Artificial Sequence
  Description of Artificial Sequence: Synthetic oligonucleotide
  Sense strand starting at position 3460 of SEQ ID NO: 1243137
cggcgugugugaacaguuu

SEQ ID NO: 1397603 - RNA, 19 nt, Artificial Sequence
  Description of Artificial Sequence: Synthetic oligonucleotide
  Antisense strand to SEQ ID NO: 1397602
aaacuguucacacacgccg

SEQ ID NO: 1397604 - RNA, 19 nt, Artificial Sequence
  Description of Artificial Sequence: Synthetic oligonucleotide
  Sense strand starting at position 21 of SEQ ID NO: 1243138
ucaauaugcccauauugag

SEQ ID NO: 1397605 - RNA, 19 nt, Artificial Sequence
  Description of Artificial Sequence: Synthetic oligonucleotide
  Antisense strand to SEQ ID NO: 1397604
cucaauaugggcauauuga

SEQ ID NO: 1397606 - RNA, 19 nt, Artificial Sequence
  Description of Artificial Sequence: Synthetic oligonucleotide
  Sense strand starting at position 31 of SEQ ID NO: 1243138
cauauugagggcuggaaau

SEQ ID NO: 1397607 - RNA, 19 nt, Artificial Sequence
  Description of Artificial Sequence: Synthetic oligonucleotide
  Antisense strand to SEQ ID NO: 1397606
auuuccagcccucaauaug

SEQ ID NO: 1397608 - RNA, 19 nt, Artificial Sequence
  Description of Artificial Sequence: Synthetic oligonucleotide
  Sense strand starting at position 148 of SEQ ID NO: 1243138
gaauaagaguacuugaguu

SEQ ID NO: 1397609 - RNA, 19 nt, Artificial Sequence
  Description of Artificial Sequence: Synthetic oligonucleotide
  Antisense strand to SEQ ID NO: 1397608
aacucaaguacucuuauuc

SEQ ID NO: 1397610 - RNA, 19 nt, Artificial Sequence
  Description of Artificial Sequence: Synthetic oligonucleotide
  Sense strand starting at position 150 of SEQ ID NO: 1243138
auaagaguacuugaguucu

SEQ ID NO: 1397611 - RNA, 19 nt, Artificial Sequence
  Description of Artificial Sequence: Synthetic oligonucleotide
  Antisense strand to SEQ ID NO: 1397610
agaacucaaguacucuuau

SEQ ID NO: 1397612 - RNA, 19 nt, Artificial Sequence
  Description of Artificial Sequence: Synthetic oligonucleotide
  Sense strand starting at position 152 of SEQ ID NO: 1243138
aagaguacuugaguucugu

SEQ ID NO: 1397613 - RNA, 19 nt, Artificial Sequence
  Description of Artificial Sequence: Synthetic oligonucleotide
  Antisense strand to SEQ ID NO: 1397612
acagaacucaaguacucuu

SEQ ID NO: 1397614 - RNA, 19 nt, Artificial Sequence
  Description of Artificial Sequence: Synthetic oligonucleotide
  Sense strand starting at position 158 of SEQ ID NO: 1243138
acuugaguucuguaacagc

SEQ ID NO: 1397615 - RNA, 19 nt, Artificial Sequence
  Description of Artificial Sequence: Synthetic oligonucleotide
  Antisense strand to SEQ ID NO: 1397614
gcuguuacagaacucaagu

SEQ ID NO: 1397616 - RNA, 19 nt, Artificial Sequence
  Description of Artificial Sequence: Synthetic oligonucleotide
  Sense strand starting at position 398 of SEQ ID NO: 1243138
agcugcuggaucugugaau

SEQ ID NO: 1397617 - RNA, 19 nt, Artificial Sequence
  Description of Artificial Sequence: Synthetic oligonucleotide
  Antisense strand to SEQ ID NO: 1397616
auucacagauccagcagcu

SEQ ID NO: 1397618 - RNA, 19 nt, Artificial Sequence
  Description of Artificial Sequence: Synthetic oligonucleotide
  Sense strand starting at position 399 of SEQ ID NO: 1243138
gcugcuggaucugugaaua

SEQ ID NO: 1397619 - RNA, 19 nt, Artificial Sequence
  Description of Artificial Sequence: Synthetic oligonucleotide
  Antisense strand to SEQ ID NO: 1397618
uauucacagauccagcagc

SEQ ID NO: 1397620 - RNA, 19 nt, Artificial Sequence
  Description of Artificial Sequence: Synthetic oligonucleotide
  Sense strand starting at position 470 of SEQ ID NO: 1243138
ugucuaucuccugaacaga

SEQ ID NO: 1397621 - RNA, 19 nt, Artificial Sequence
  Description of Artificial Sequence: Synthetic oligonucleotide
  Antisense strand to SEQ ID NO: 1397620
ucuguucaggagauagaca

SEQ ID NO: 1397622 - RNA, 19 nt, Artificial Sequence
  Description of Artificial Sequence: Synthetic oligonucleotide
  Sense strand starting at position 483 of SEQ ID NO: 1243138
aacagaaaugcaggaaguu

SEQ ID NO: 1397623 - RNA, 19 nt, Artificial Sequence
  Description of Artificial Sequence: Synthetic oligonucleotide
  Antisense strand to SEQ ID NO: 1397622
aacuuccugcauuucuguu

SEQ ID NO: 1397624 - RNA, 19 nt, Artificial Sequence
  Description of Artificial Sequence: Synthetic oligonucleotide
  Sense strand starting at position 756 of SEQ ID NO: 1243138
gagugaaacugugucagga

SEQ ID NO: 1397625 - RNA, 19 nt, Artificial Sequence
  Description of Artificial Sequence: Synthetic oligonucleotide
  Antisense strand to SEQ ID NO: 1397624
uccugacacaguuucacuc

SEQ ID NO: 1397626 - RNA, 19 nt, Artificial Sequence
  Description of Artificial Sequence: Synthetic oligonucleotide
  Sense strand starting at position 963 of SEQ ID NO: 1243138
ucuucuacuucgcuggaga

SEQ ID NO: 1397627 - RNA, 19 nt, Artificial Sequence
  Description of Artificial Sequence: Synthetic oligonucleotide
  Antisense strand to SEQ ID NO: 1397626
ucuccagcgaaguagaaga

SEQ ID NO: 1397628 - RNA, 19 nt, Artificial Sequence
  Description of Artificial Sequence: Synthetic oligonucleotide
  Sense strand starting at position 964 of SEQ ID NO: 1243138
cuucuacuucgcuggagaa

SEQ ID NO: 1397629 - RNA, 19 nt, Artificial Sequence
  Description of Artificial Sequence: Synthetic oligonucleotide
  Antisense strand to SEQ ID NO: 1397628
uucuccagcgaaguagaag

SEQ ID NO: 1397630 - RNA, 19 nt, Artificial Sequence
  Description of Artificial Sequence: Synthetic oligonucleotide
  Sense strand starting at position 965 of SEQ ID NO: 1243138
uucuacuucgcuggagaaa

SEQ ID NO: 1397631 - RNA, 19 nt, Artificial Sequence
  Description of Artificial Sequence: Synthetic oligonucleotide
  Antisense strand to SEQ ID NO: 1397630
uuucuccagcgaaguagaa

SEQ ID NO: 1397632 - RNA, 19 nt, Artificial Sequence
  Description of Artificial Sequence: Synthetic oligonucleotide
  Sense strand starting at position 1055 of SEQ ID NO: 1243138
acaucuccaugugcugaaa

SEQ ID NO: 1397633 - RNA, 19 nt, Artificial Sequence
  Description of Artificial Sequence: Synthetic oligonucleotide
  Antisense strand to SEQ ID NO: 1397632
uuucagcacauggagaugu

SEQ ID NO: 1397634 - RNA, 19 nt, Artificial Sequence
  Description of Artificial Sequence: Synthetic oligonucleotide
  Sense strand starting at position 1094 of SEQ ID NO: 1243138
gggacucugugggagagaa

SEQ ID NO: 1397635 - RNA, 19 nt, Artificial Sequence
  Description of Artificial Sequence: Synthetic oligonucleotide
  Antisense strand to SEQ ID NO: 1397634
uucucucccacagaguccc

SEQ ID NO: 1397636 - RNA, 19 nt, Artificial Sequence
  Description of Artificial Sequence: Synthetic oligonucleotide
  Sense strand starting at position 1107 of SEQ ID NO: 1243138
agagaagcugccggacaau

SEQ ID NO: 1397637 - RNA, 19 nt, Artificial Sequence
  Description of Artificial Sequence: Synthetic oligonucleotide
  Antisense strand to SEQ ID NO: 1397636
auuguccggcagcuucucu

SEQ ID NO: 1397638 - RNA, 19 nt, Artificial Sequence
  Description of Artificial Sequence: Synthetic oligonucleotide
  Sense strand starting at position 1116 of SEQ ID NO: 1243138
gccggacaaucugccuaau

SEQ ID NO: 1397639 - RNA, 19 nt, Artificial Sequence
  Description of Artificial Sequence: Synthetic oligonucleotide
  Antisense strand to SEQ ID NO: 1397638
auuaggcagauuguccggc

SEQ ID NO: 1397640 - RNA, 19 nt, Artificial Sequence
  Description of Artificial Sequence: Synthetic oligonucleotide
  Sense strand starting at position 1119 of SEQ ID NO: 1243138
ggacaaucugccuaauccu

SEQ ID NO: 1397641 - RNA, 19 nt, Artificial Sequence
  Description of Artificial Sequence: Synthetic oligonucleotide
  Antisense strand to SEQ ID NO: 1397640
aggauuaggcagauugucc

SEQ ID NO: 1397642 - RNA, 19 nt, Artificial Sequence
  Description of Artificial Sequence: Synthetic oligonucleotide
  Sense strand starting at position 2199 of SEQ ID NO: 1243138
gcgacuuggccuucgcuaa

SEQ ID NO: 1397643 - RNA, 19 nt, Artificial Sequence
  Description of Artificial Sequence: Synthetic oligonucleotide
  Antisense strand to SEQ ID NO: 1397642
uuagcgaaggccaagucgc

SEQ ID NO: 1397644 - RNA, 19 nt, Artificial Sequence
  Description of Artificial Sequence: Synthetic oligonucleotide
  Sense strand starting at position 2385 of SEQ ID NO: 1243138
cauuuacgaugguagaaau

SEQ ID NO: 1397645 - RNA, 19 nt, Artificial Sequence
  Description of Artificial Sequence: Synthetic oligonucleotide
  Antisense strand to SEQ ID NO: 1397644
auuucuaccaucguaaaug

SEQ ID NO: 1397646 - RNA, 19 nt, Artificial Sequence
  Description of Artificial Sequence: Synthetic oligonucleotide
  Sense strand starting at position 2439 of SEQ ID NO: 1243138
cucugcugagcgcuuuauu

SEQ ID NO: 1397647 - RNA, 19 nt, Artificial Sequence
  Description of Artificial Sequence: Synthetic oligonucleotide
  Antisense strand to SEQ ID NO: 1397646
aauaaagcgcucagcagag

SEQ ID NO: 1397648 - RNA, 19 nt, Artificial Sequence
  Description of Artificial Sequence: Synthetic oligonucleotide
  Sense strand starting at position 2440 of SEQ ID NO: 1243138
ucugcugagcgcuuuauua

SEQ ID NO: 1397649 - RNA, 19 nt, Artificial Sequence
  Description of Artificial Sequence: Synthetic oligonucleotide
  Antisense strand to SEQ ID NO: 1397648
uaauaaagcgcucagcaga

SEQ ID NO: 1397650 - RNA, 19 nt, Artificial Sequence
  Description of Artificial Sequence: Synthetic oligonucleotide
  Sense strand starting at position 2448 of SEQ ID NO: 1243138
gcgcuuuauuaauccauuu

SEQ ID NO: 1397651 - RNA, 19 nt, Artificial Sequence
  Description of Artificial Sequence: Synthetic oligonucleotide
  Antisense strand to SEQ ID NO: 1397650
aaauggauuaauaaagcgc

SEQ ID NO: 1397652 - RNA, 19 nt, Artificial Sequence
  Description of Artificial Sequence: Synthetic oligonucleotide
  Sense strand starting at position 2482 of SEQ ID NO: 1243138
cuucgagauagguacuguu

SEQ ID NO: 1397653 - RNA, 19 nt, Artificial Sequence
  Description of Artificial Sequence: Synthetic oligonucleotide
  Antisense strand to SEQ ID NO: 1397652
aacaguaccuaucucgaag

SEQ ID NO: 1397654 - RNA, 19 nt, Artificial Sequence
  Description of Artificial Sequence: Synthetic oligonucleotide
  Sense strand starting at position 2716 of SEQ ID NO: 1243138
ugggauggucucgaucuuu

SEQ ID NO: 1397655 - RNA, 19 nt, Artificial Sequence
  Description of Artificial Sequence: Synthetic oligonucleotide
  Antisense strand to SEQ ID NO: 1397654
aaagaucgagaccauccca

SEQ ID NO: 1397656 - RNA, 19 nt, Artificial Sequence
  Description of Artificial Sequence: Synthetic oligonucleotide
  Sense strand starting at position 2819 of SEQ ID NO: 1243138
uuuacauaugagcaaguca

SEQ ID NO: 1397657 - RNA, 19 nt, Artificial Sequence
  Description of Artificial Sequence: Synthetic oligonucleotide
  Antisense strand to SEQ ID NO: 1397656
ugacuugcucauauguaaa

SEQ ID NO: 1397658 - RNA, 19 nt, Artificial Sequence
  Description of Artificial Sequence: Synthetic oligonucleotide
  Sense strand starting at position 2966 of SEQ ID NO: 1243138
uauuaucgggucugacaca

SEQ ID NO: 1397659 - RNA, 19 nt, Artificial Sequence
  Description of Artificial Sequence: Synthetic oligonucleotide
  Antisense strand to SEQ ID NO: 1397658
ugugucagacccgauaaua

SEQ ID NO: 1397660 - RNA, 19 nt, Artificial Sequence
  Description of Artificial Sequence: Synthetic oligonucleotide
  Sense strand starting at position 2971 of SEQ ID NO: 1243138
ucgggucugacacaguuaa

SEQ ID NO: 1397661 - RNA, 19 nt, Artificial Sequence
  Description of Artificial Sequence: Synthetic oligonucleotide
  Antisense strand to SEQ ID NO: 1397660
uuaacugugucagacccga

SEQ ID NO: 1397662 - RNA, 19 nt, Artificial Sequence
  Description of Artificial Sequence: Synthetic oligonucleotide
  Sense strand starting at position 2985 of SEQ ID NO: 1243138
guuaacauuauagguguga

SEQ ID NO: 1397663 - RNA, 19 nt, Artificial Sequence
  Description of Artificial Sequence: Synthetic oligonucleotide
  Antisense strand to SEQ ID NO: 1397662
ucacaccuauaauguuaac

SEQ ID NO: 1397664 - RNA, 19 nt, Artificial Sequence
  Description of Artificial Sequence: Synthetic oligonucleotide
  Sense strand starting at position 2994 of SEQ ID NO: 1243138
auaggugugagcugaauau

SEQ ID NO: 1397665 - RNA, 19 nt, Artificial Sequence
  Description of Artificial Sequence: Synthetic oligonucleotide
  Antisense strand to SEQ ID NO: 1397664
auauucagcucacaccuau

SEQ ID NO: 1397666 - RNA, 19 nt, Artificial Sequence
  Description of Artificial Sequence: Synthetic oligonucleotide
  Sense strand starting at position 2998 of SEQ ID NO: 1243138
gugugagcugaauauaugu

SEQ ID NO: 1397667 - RNA, 19 nt, Artificial Sequence
  Description of Artificial Sequence: Synthetic oligonucleotide
  Antisense strand to SEQ ID NO: 1397666
acauauauucagcucacac

SEQ ID NO: 1397668 - RNA, 19 nt, Artificial Sequence
  Description of Artificial Sequence: Synthetic oligonucleotide
  Sense strand starting at position 3005 of SEQ ID NO: 1243138
cugaauauaugugcacauu

SEQ ID NO: 1397669 - RNA, 19 nt, Artificial Sequence
  Description of Artificial Sequence: Synthetic oligonucleotide
  Antisense strand to SEQ ID NO: 1397668
aaugugcacauauauucag

SEQ ID NO: 1397670 - RNA, 19 nt, Artificial Sequence
  Description of Artificial Sequence: Synthetic oligonucleotide
  Sense strand starting at position 3098 of SEQ ID NO: 1243138
aggaaauccucgcauuuga

SEQ ID NO: 1397671 - RNA, 19 nt, Artificial Sequence
  Description of Artificial Sequence: Synthetic oligonucleotide
  Antisense strand to SEQ ID NO: 1397670
ucaaaugcgaggauuuccu

SEQ ID NO: 1397672 - RNA, 19 nt, Artificial Sequence
  Description of Artificial Sequence: Synthetic oligonucleotide
  Sense strand starting at position 3778 of SEQ ID NO: 1243138
aguccuuugugagucauau

SEQ ID NO: 1397673 - RNA, 19 nt, Artificial Sequence
  Description of Artificial Sequence: Synthetic oligonucleotide
  Antisense strand to SEQ ID NO: 1397672
auaugacucacaaaggacu

SEQ ID NO: 1397674 - RNA, 19 nt, Artificial Sequence
  Description of Artificial Sequence: Synthetic oligonucleotide
  Sense strand starting at position 3790 of SEQ ID NO: 1243138
gucauauucugucuccauu

SEQ ID NO: 1397675 - RNA, 19 nt, Artificial Sequence
  Description of Artificial Sequence: Synthetic oligonucleotide
  Antisense strand to SEQ ID NO: 1397674
aauggagacagaauaugac

SEQ ID NO: 1397676 - RNA, 19 nt, Artificial Sequence
  Description of Artificial Sequence: Synthetic oligonucleotide
  Sense strand starting at position 3896 of SEQ ID NO: 1243138
uuccaugcuccagaauaga

SEQ ID NO: 1397677 - RNA, 19 nt, Artificial Sequence
  Description of Artificial Sequence: Synthetic oligonucleotide
  Antisense strand to SEQ ID NO: 1397676
ucuauucuggagcauggaa

SEQ ID NO: 1397678 - RNA, 19 nt, Artificial Sequence
  Description of Artificial Sequence: Synthetic oligonucleotide
  Sense strand starting at position 3928 of SEQ ID NO: 1243138
aaagcaggucucugcaaau

SEQ ID NO: 1397679 - RNA, 19 nt, Artificial Sequence
  Description of Artificial Sequence: Synthetic oligonucleotide
  Antisense strand to SEQ ID NO: 1397678
auuugcagagaccugcuuu

SEQ ID NO: 1397680 - RNA, 19 nt, Artificial Sequence
  Description of Artificial Sequence: Synthetic oligonucleotide
  Sense strand starting at position 3940 of SEQ ID NO: 1243138
ugcaaauauggagaagugu

SEQ ID NO: 1397681 - RNA, 19 nt, Artificial Sequence
  Description of Artificial Sequence: Synthetic oligonucleotide
  Antisense strand to SEQ ID NO: 1397680
acacuucuccauauuugca

SEQ ID NO: 1397682 - RNA, 19 nt, Artificial Sequence
  Description of Artificial Sequence: Synthetic oligonucleotide
  Sense strand starting at position 3983 of SEQ ID NO: 1243138
augguugaacauuagcaua

SEQ ID NO: 1397683 - RNA, 19 nt, Artificial Sequence
  Description of Artificial Sequence: Synthetic oligonucleotide
  Antisense strand to SEQ ID NO: 1397682
uaugcuaauguucaaccau

SEQ ID NO: 1397684 - RNA, 19 nt, Artificial Sequence
  Description of Artificial Sequence: Synthetic oligonucleotide
  Sense strand starting at position 445 of SEQ ID NO: 1243139
uuugaaugcugguggcaga

SEQ ID NO: 1397685 - RNA, 19 nt, Artificial Sequence
  Description of Artificial Sequence: Synthetic oligonucleotide
  Antisense strand to SEQ ID NO: 1397684
ucugccaccagcauucaaa

SEQ ID NO: 1397686 - RNA, 19 nt, Artificial Sequence
  Description of Artificial Sequence: Synthetic oligonucleotide
  Sense strand starting at position 680 of SEQ ID NO: 1243139
gcaggaaagugcucaaagu

SEQ ID NO: 1397687 - RNA, 19 nt, Artificial Sequence
  Description of Artificial Sequence: Synthetic oligonucleotide
  Antisense strand to SEQ ID NO: 1397686
acuuugagcacuuuccugc

SEQ ID NO: 1397688 - RNA, 19 nt, Artificial Sequence
  Description of Artificial Sequence: Synthetic oligonucleotide
  Sense strand starting at position 681 of SEQ ID NO: 1243139
caggaaagugcucaaaguu

SEQ ID NO: 1397689 - RNA, 19 nt, Artificial Sequence
  Description of Artificial Sequence: Synthetic oligonucleotide
  Antisense strand to SEQ ID NO: 1397688
aacuuugagcacuuuccug

SEQ ID NO: 1397690 - RNA, 19 nt, Artificial Sequence
  Description of Artificial Sequence: Synthetic oligonucleotide
  Sense strand starting at position 767 of SEQ ID NO: 1243139
gaaucauacccgggugcuu

SEQ ID NO: 1397691 - RNA, 19 nt, Artificial Sequence
  Description of Artificial Sequence: Synthetic oligonucleotide
  Antisense strand to SEQ ID NO: 1397690
aagcacccggguaugauuc

SEQ ID NO: 1397692 - RNA, 19 nt, Artificial Sequence
  Description of Artificial Sequence: Synthetic oligonucleotide
  Sense strand starting at position 2183 of SEQ ID NO: 1243139
ggcguauugggacagaaca

SEQ ID NO: 1397693 - RNA, 19 nt, Artificial Sequence
  Description of Artificial Sequence: Synthetic oligonucleotide
  Antisense strand to SEQ ID NO: 1397692
uguucugucccaauacgcc

SEQ ID NO: 1397694 - RNA, 19 nt, Artificial Sequence
  Description of Artificial Sequence: Synthetic oligonucleotide
  Sense strand starting at position 2238 of SEQ ID NO: 1243139
gcuccacguucucucuaaa

SEQ ID NO: 1397695 - RNA, 19 nt, Artificial Sequence
  Description of Artificial Sequence: Synthetic oligonucleotide
  Antisense strand to SEQ ID NO: 1397694
uuuagagagaacguggagc

SEQ ID NO: 1397696 - RNA, 19 nt, Artificial Sequence
  Description of Artificial Sequence: Synthetic oligonucleotide
  Sense strand starting at position 2362 of SEQ ID NO: 1243139
ccagucuucccacgaccua

SEQ ID NO: 1397697 - RNA, 19 nt, Artificial Sequence
  Description of Artificial Sequence: Synthetic oligonucleotide
  Antisense strand to SEQ ID NO: 1397696
uaggucgugggaagacugg

SEQ ID NO: 1397698 - RNA, 19 nt, Artificial Sequence
  Description of Artificial Sequence: Synthetic oligonucleotide
  Sense strand starting at position 2374 of SEQ ID NO: 1243139
cgaccuaccuucugcagaa

SEQ ID NO: 1397699 - RNA, 19 nt, Artificial Sequence
  Description of Artificial Sequence: Synthetic oligonucleotide
  Antisense strand to SEQ ID NO: 1397698
uucugcagaagguaggucg

SEQ ID NO: 1397700 - RNA, 19 nt, Artificial Sequence
  Description of Artificial Sequence: Synthetic oligonucleotide
  Sense strand starting at position 2432 of SEQ ID NO: 1243139
gcacuccucuaguuucuua

SEQ ID NO: 1397701 - RNA, 19 nt, Artificial Sequence
  Description of Artificial Sequence: Synthetic oligonucleotide
  Antisense strand to SEQ ID NO: 1397700
uaagaaacuagaggagugc

SEQ ID NO: 1397702 - RNA, 19 nt, Artificial Sequence
  Description of Artificial Sequence: Synthetic oligonucleotide
  Sense strand starting at position 2639 of SEQ ID NO: 1243139
cgcugagucuuugaucuuc

SEQ ID NO: 1397703 - RNA, 19 nt, Artificial Sequence
  Description of Artificial Sequence: Synthetic oligonucleotide
  Antisense strand to SEQ ID NO: 1397702
gaagaucaaagacucagcg

SEQ ID NO: 1397704 - RNA, 19 nt, Artificial Sequence
  Description of Artificial Sequence: Synthetic oligonucleotide
  Sense strand starting at position 2647 of SEQ ID NO: 1243139
cuuugaucuuccuugguuu

SEQ ID NO: 1397705 - RNA, 19 nt, Artificial Sequence
  Description of Artificial Sequence: Synthetic oligonucleotide
  Antisense strand to SEQ ID NO: 1397704
aaaccaaggaagaucaaag

SEQ ID NO: 1397706 - RNA, 19 nt, Artificial Sequence
  Description of Artificial Sequence: Synthetic oligonucleotide
  Sense strand starting at position 2862 of SEQ ID NO: 1243139
gcagcucuggcgugggaaa

SEQ ID NO: 1397707 - RNA, 19 nt, Artificial Sequence
  Description of Artificial Sequence: Synthetic oligonucleotide
  Antisense strand to SEQ ID NO: 1397706
uuucccacgccagagcugc

SEQ ID NO: 1397708 - RNA, 19 nt, Artificial Sequence
  Description of Artificial Sequence: Synthetic oligonucleotide
  Sense strand starting at position 2913 of SEQ ID NO: 1243139
cgaccuuuggagugaauua

SEQ ID NO: 1397709 - RNA, 19 nt, Artificial Sequence
  Description of Artificial Sequence: Synthetic oligonucleotide
  Antisense strand to SEQ ID NO: 1397708
uaauucacuccaaaggucg

SEQ ID NO: 1397710 - RNA, 19 nt, Artificial Sequence
  Description of Artificial Sequence: Synthetic oligonucleotide
  Sense strand starting at position 2924 of SEQ ID NO: 1243139
gugaauuaccugugcucag

SEQ ID NO: 1397711 - RNA, 19 nt, Artificial Sequence
  Description of Artificial Sequence: Synthetic oligonucleotide
  Antisense strand to SEQ ID NO: 1397710
cugagcacagguaauucac

SEQ ID NO: 1397712 - RNA, 19 nt, Artificial Sequence
  Description of Artificial Sequence: Synthetic oligonucleotide
  Sense strand starting at position 2925 of SEQ ID NO: 1243139
ugaauuaccugugcucagu

SEQ ID NO: 1397713 - RNA, 19 nt, Artificial Sequence
  Description of Artificial Sequence: Synthetic oligonucleotide
  Antisense strand to SEQ ID NO: 1397712
acugagcacagguaauuca

SEQ ID NO: 1397714 - RNA, 19 nt, Artificial Sequence
  Description of Artificial Sequence: Synthetic oligonucleotide
  Sense strand starting at position 2945 of SEQ ID NO: 1243139
uugugaucuguauaaugga

SEQ ID NO: 1397715 - RNA, 19 nt, Artificial Sequence
  Description of Artificial Sequence: Synthetic oligonucleotide
  Antisense strand to SEQ ID NO: 1397714
uccauuauacagaucacaa

SEQ ID NO: 1397716 - RNA, 19 nt, Artificial Sequence
  Description of Artificial Sequence: Synthetic oligonucleotide
  Sense strand starting at position 3024 of SEQ ID NO: 1243139
gugggccacauuuguaauu

SEQ ID NO: 1397717 - RNA, 19 nt, Artificial Sequence
  Description of Artificial Sequence: Synthetic oligonucleotide
  Antisense strand to SEQ ID NO: 1397716
aauuacaaauguggcccac

SEQ ID NO: 1397718 - RNA, 19 nt, Artificial Sequence
  Description of Artificial Sequence: Synthetic oligonucleotide
  Sense strand starting at position 3487 of SEQ ID NO: 1243139
uuuguauugcgcuaagucu

SEQ ID NO: 1397719 - RNA, 19 nt, Artificial Sequence
  Description of Artificial Sequence: Synthetic oligonucleotide
  Antisense strand to SEQ ID NO: 1397718
agacuuagcgcaauacaaa

SEQ ID NO: 1397720 - RNA, 19 nt, Artificial Sequence
  Description of Artificial Sequence: Synthetic oligonucleotide
  Sense strand starting at position 3602 of SEQ ID NO: 1243139
gcagcaucgcucuggaaga

SEQ ID NO: 1397721 - RNA, 19 nt, Artificial Sequence
  Description of Artificial Sequence: Synthetic oligonucleotide
  Antisense strand to SEQ ID NO: 1397720
ucuuccagagcgaugcugc

SEQ ID NO: 1397722 - RNA, 19 nt, Artificial Sequence
  Description of Artificial Sequence: Synthetic oligonucleotide
  Sense strand starting at position 3603 of SEQ ID NO: 1243139
cagcaucgcucuggaagau

SEQ ID NO: 1397723 - RNA, 19 nt, Artificial Sequence
  Description of Artificial Sequence: Synthetic oligonucleotide
  Antisense strand to SEQ ID NO: 1397722
aucuuccagagcgaugcug

SEQ ID NO: 1397724 - RNA, 19 nt, Artificial Sequence
  Description of Artificial Sequence: Synthetic oligonucleotide
  Sense strand starting at position 3732 of SEQ ID NO: 1243139
gguggaaacgaaggcuaau

SEQ ID NO: 1397725 - RNA, 19 nt, Artificial Sequence
  Description of Artificial Sequence: Synthetic oligonucleotide
  Antisense strand to SEQ ID NO: 1397724
auuagccuucguuuccacc

SEQ ID NO: 1397726 - RNA, 19 nt, Artificial Sequence
  Description of Artificial Sequence: Synthetic oligonucleotide
  Sense strand starting at position 3738 of SEQ ID NO: 1243139
aacgaaggcuaauguuaua

SEQ ID NO: 1397727 - RNA, 19 nt, Artificial Sequence
  Description of Artificial Sequence: Synthetic oligonucleotide
  Antisense strand to SEQ ID NO: 1397726
uauaacauuagccuucguu

SEQ ID NO: 1397728 - RNA, 19 nt, Artificial Sequence
  Description of Artificial Sequence: Synthetic oligonucleotide
  Sense strand starting at position 3786 of SEQ ID NO: 1243139
gugguuucauuugaagagu

SEQ ID NO: 1397729 - RNA, 19 nt, Artificial Sequence
  Description of Artificial Sequence: Synthetic oligonucleotide
  Antisense strand to SEQ ID NO: 1397728
acucuucaaaugaaaccac

SEQ ID NO: 1397730 - RNA, 19 nt, Artificial Sequence
  Description of Artificial Sequence: Synthetic oligonucleotide
  Sense strand starting at position 3860 of SEQ ID NO: 1243139
caguacuucugaugugcca

SEQ ID NO: 1397731 - RNA, 19 nt, Artificial Sequence
  Description of Artificial Sequence: Synthetic oligonucleotide
  Antisense strand to SEQ ID NO: 1397730
uggcacaucagaaguacug

SEQ ID NO: 1397732 - RNA, 19 nt, Artificial Sequence
  Description of Artificial Sequence: Synthetic oligonucleotide
  Sense strand starting at position 3893 of SEQ ID NO: 1243139
ucauguguagcccucgcaa

SEQ ID NO: 1397733 - RNA, 19 nt, Artificial Sequence
  Description of Artificial Sequence: Synthetic oligonucleotide
  Antisense strand to SEQ ID NO: 1397732
uugcgagggcuacacauga

SEQ ID NO: 1397734 - RNA, 19 nt, Artificial Sequence
  Description of Artificial Sequence: Synthetic oligonucleotide
  Sense strand starting at position 3921 of SEQ ID NO: 1243139
gaugcagacucauacuugu

SEQ ID NO: 1397735 - RNA, 19 nt, Artificial Sequence
  Description of Artificial Sequence: Synthetic oligonucleotide
  Antisense strand to SEQ ID NO: 1397734
acaaguaugagucugcauc

SEQ ID NO: 1397736 - RNA, 19 nt, Artificial Sequence
  Description of Artificial Sequence: Synthetic oligonucleotide
  Sense strand starting at position 3930 of SEQ ID NO: 1243139
ucauacuuguucuagaaag

SEQ ID NO: 1397737 - RNA, 19 nt, Artificial Sequence
  Description of Artificial Sequence: Synthetic oligonucleotide
  Antisense strand to SEQ ID NO: 1397736
cuuucuagaacaaguauga

SEQ ID NO: 1397738 - RNA, 19 nt, Artificial Sequence
  Description of Artificial Sequence: Synthetic oligonucleotide
  Sense strand starting at position 188 of SEQ ID NO: 1243140
ccuagagcuuugucuguga

SEQ ID NO: 1397739 - RNA, 19 nt, Artificial Sequence
  Description of Artificial Sequence: Synthetic oligonucleotide
  Antisense strand to SEQ ID NO: 1397738
ucacagacaaagcucuagg

SEQ ID NO: 1397740 - RNA, 19 nt, Artificial Sequence
  Description of Artificial Sequence: Synthetic oligonucleotide
  Sense strand starting at position 192 of SEQ ID NO: 1243140
gagcuuugucugugagcga

SEQ ID NO: 1397741 - RNA, 19 nt, Artificial Sequence
  Description of Artificial Sequence: Synthetic oligonucleotide
  Antisense strand to SEQ ID NO: 1397740
ucgcucacagacaaagcuc

SEQ ID NO: 1397742 - RNA, 19 nt, Artificial Sequence
  Description of Artificial Sequence: Synthetic oligonucleotide
  Sense strand starting at position 193 of SEQ ID NO: 1243140
agcuuugucugugagcgaa

SEQ ID NO: 1397743 - RNA, 19 nt, Artificial Sequence
  Description of Artificial Sequence: Synthetic oligonucleotide
  Antisense strand to SEQ ID NO: 1397742
uucgcucacagacaaagcu

SEQ ID NO: 1397744 - RNA, 19 nt, Artificial Sequence
  Description of Artificial Sequence: Synthetic oligonucleotide
  Sense strand starting at position 280 of SEQ ID NO: 1243140
gcugccucauuccugagaa

SEQ ID NO: 1397745 - RNA, 19 nt, Artificial Sequence
  Description of Artificial Sequence: Synthetic oligonucleotide
  Antisense strand to SEQ ID NO: 1397744
uucucaggaaugaggcagc

SEQ ID NO: 1397746 - RNA, 19 nt, Artificial Sequence
  Description of Artificial Sequence: Synthetic oligonucleotide
  Sense strand starting at position 281 of SEQ ID NO: 1243140
cugccucauuccugagaag

SEQ ID NO: 1397747 - RNA, 19 nt, Artificial Sequence
  Description of Artificial Sequence: Synthetic oligonucleotide
  Antisense strand to SEQ ID NO: 1397746
cuucucaggaaugaggcag

SEQ ID NO: 1397748 - RNA, 19 nt, Artificial Sequence
  Description of Artificial Sequence: Synthetic oligonucleotide
  Sense strand starting at position 284 of SEQ ID NO: 1243140
ccucauuccugagaagccu

SEQ ID NO: 1397749 - RNA, 19 nt, Artificial Sequence
  Description of Artificial Sequence: Synthetic oligonucleotide
  Antisense strand to SEQ ID NO: 1397748
aggcuucucaggaaugagg

SEQ ID NO: 1397750 - RNA, 19 nt, Artificial Sequence
  Description of Artificial Sequence: Synthetic oligonucleotide
  Sense strand starting at position 552 of SEQ ID NO: 1243140
gcaucaucacuugagcuca

SEQ ID NO: 1397751 - RNA, 19 nt, Artificial Sequence
  Description of Artificial Sequence: Synthetic oligonucleotide
  Antisense strand to SEQ ID NO: 1397750
ugagcucaagugaugaugc

SEQ ID NO: 1397752 - RNA, 19 nt, Artificial Sequence
  Description of Artificial Sequence: Synthetic oligonucleotide
  Sense strand starting at position 573 of SEQ ID NO: 1243140
agccuucccgaaggaagaa

SEQ ID NO: 1397753 - RNA, 19 nt, Artificial Sequence
  Description of Artificial Sequence: Synthetic oligonucleotide
  Antisense strand to SEQ ID NO: 1397752
uucuuccuucgggaaggcu

SEQ ID NO: 1397754 - RNA, 19 nt, Artificial Sequence
  Description of Artificial Sequence: Synthetic oligonucleotide
  Sense strand starting at position 720 of SEQ ID NO: 1243140
gccugugauggccaacagu

SEQ ID NO: 1397755 - RNA, 19 nt, Artificial Sequence
  Description of Artificial Sequence: Synthetic oligonucleotide
  Antisense strand to SEQ ID NO: 1397754
acuguuggccaucacaggc

SEQ ID NO: 1397756 - RNA, 19 nt, Artificial Sequence
  Description of Artificial Sequence: Synthetic oligonucleotide
  Sense strand starting at position 852 of SEQ ID NO: 1243140
uggcacuucuuccgagaag

SEQ ID NO: 1397757 - RNA, 19 nt, Artificial Sequence
  Description of Artificial Sequence: Synthetic oligonucleotide
  Antisense strand to SEQ ID NO: 1397756
cuucucggaagaagugcca

SEQ ID NO: 1397758 - RNA, 19 nt, Artificial Sequence
  Description of Artificial Sequence: Synthetic oligonucleotide
  Sense strand starting at position 1220 of SEQ ID NO: 1243140
gggccauucuuaguuaccu

SEQ ID NO: 1397759 - RNA, 19 nt, Artificial Sequence
  Description of Artificial Sequence: Synthetic oligonucleotide
  Antisense strand to SEQ ID NO: 1397758
agguaacuaagaauggccc

SEQ ID NO: 1397760 - RNA, 19 nt, Artificial Sequence
  Description of Artificial Sequence: Synthetic oligonucleotide
  Sense strand starting at position 1289 of SEQ ID NO: 1243140
cgcuuugucacccaggauu

SEQ ID NO: 1397761 - RNA, 19 nt, Artificial Sequence
  Description of Artificial Sequence: Synthetic oligonucleotide
  Antisense strand to SEQ ID NO: 1397760
aauccugggugacaaagcg

SEQ ID NO: 1397762 - RNA, 19 nt, Artificial Sequence
  Description of Artificial Sequence: Synthetic oligonucleotide
  Sense strand starting at position 1291 of SEQ ID NO: 1243140
cuuugucacccaggauuga

SEQ ID NO: 1397763 - RNA, 19 nt, Artificial Sequence
  Description of Artificial Sequence: Synthetic oligonucleotide
  Antisense strand to SEQ ID NO: 1397762
ucaauccugggugacaaag

SEQ ID NO: 1397764 - RNA, 19 nt, Artificial Sequence
  Description of Artificial Sequence: Synthetic oligonucleotide
  Sense strand starting at position 1605 of SEQ ID NO: 1243140
ggagacagcuucuuggagu

SEQ ID NO: 1397765 - RNA, 19 nt, Artificial Sequence
  Description of Artificial Sequence: Synthetic oligonucleotide
  Antisense strand to SEQ ID NO: 1397764
acuccaagaagcugucucc

SEQ ID NO: 1397766 - RNA, 19 nt, Artificial Sequence
  Description of Artificial Sequence: Synthetic oligonucleotide
  Sense strand starting at position 1652 of SEQ ID NO: 1243140
cagaguagcucaggccuua

SEQ ID NO: 1397767 - RNA, 19 nt, Artificial Sequence
  Description of Artificial Sequence: Synthetic oligonucleotide
  Antisense strand to SEQ ID NO: 1397766
uaaggccugagcuacucug

SEQ ID NO: 1397768 - RNA, 19 nt, Artificial Sequence
  Description of Artificial Sequence: Synthetic oligonucleotide
  Sense strand starting at position 1844 of SEQ ID NO: 1243140
gguagaugcccugggaauc

SEQ ID NO: 1397769 - RNA, 19 nt, Artificial Sequence
  Description of Artificial Sequence: Synthetic oligonucleotide
  Antisense strand to SEQ ID NO: 1397768
gauucccagggcaucuacc

SEQ ID NO: 1397770 - RNA, 19 nt, Artificial Sequence
  Description of Artificial Sequence: Synthetic oligonucleotide
  Sense strand starting at position 2038 of SEQ ID NO: 1243140
cuuccuuccugucugauuu

SEQ ID NO: 1397771 - RNA, 19 nt, Artificial Sequence
  Description of Artificial Sequence: Synthetic oligonucleotide
  Antisense strand to SEQ ID NO: 1397770
aaaucagacaggaaggaag

SEQ ID NO: 1397772 - RNA, 19 nt, Artificial Sequence
  Description of Artificial Sequence: Synthetic oligonucleotide
  Sense strand starting at position 2150 of SEQ ID NO: 1243140
gggucuugacucugggauu

SEQ ID NO: 1397773 - RNA, 19 nt, Artificial Sequence
  Description of Artificial Sequence: Synthetic oligonucleotide
  Antisense strand to SEQ ID NO: 1397772
aaucccagagucaagaccc

SEQ ID NO: 1397774 - RNA, 19 nt, Artificial Sequence
  Description of Artificial Sequence: Synthetic oligonucleotide
  Sense strand starting at position 2151 of SEQ ID NO: 1243140
ggucuugacucugggauua

SEQ ID NO: 1397775 - RNA, 19 nt, Artificial Sequence
  Description of Artificial Sequence: Synthetic oligonucleotide
  Antisense strand to SEQ ID NO: 1397774
uaaucccagagucaagacc

SEQ ID NO: 1397776 - RNA, 19 nt, Artificial Sequence
  Description of Artificial Sequence: Synthetic oligonucleotide
  Sense strand starting at position 2153 of SEQ ID NO: 1243140
ucuugacucugggauuaag

SEQ ID NO: 1397777 - RNA, 19 nt, Artificial Sequence
  Description of Artificial Sequence: Synthetic oligonucleotide
  Antisense strand to SEQ ID NO: 1397776
cuuaaucccagagucaaga

SEQ ID NO: 1397778 - RNA, 19 nt, Artificial Sequence
  Description of Artificial Sequence: Synthetic oligonucleotide
  Sense strand starting at position 2163 of SEQ ID NO: 1243140
gggauuaagugucccugca

SEQ ID NO: 1397779 - RNA, 19 nt, Artificial Sequence
  Description of Artificial Sequence: Synthetic oligonucleotide
  Antisense strand to SEQ ID NO: 1397778
ugcagggacacuuaauccc

SEQ ID NO: 1397780 - RNA, 19 nt, Artificial Sequence
  Description of Artificial Sequence: Synthetic oligonucleotide
  Sense strand starting at position 2183 of SEQ ID NO: 1243140
guggcaugcucaggauaaa

SEQ ID NO: 1397781 - RNA, 19 nt, Artificial Sequence
  Description of Artificial Sequence: Synthetic oligonucleotide
  Antisense strand to SEQ ID NO: 1397780
uuuauccugagcaugccac

SEQ ID NO: 1397782 - RNA, 19 nt, Artificial Sequence
  Description of Artificial Sequence: Synthetic oligonucleotide
  Sense strand starting at position 2184 of SEQ ID NO: 1243140
uggcaugcucaggauaaag

SEQ ID NO: 1397783 - RNA, 19 nt, Artificial Sequence
  Description of Artificial Sequence: Synthetic oligonucleotide
  Antisense strand to SEQ ID NO: 1397782
cuuuauccugagcaugcca

SEQ ID NO: 1397784 - RNA, 19 nt, Artificial Sequence
  Description of Artificial Sequence: Synthetic oligonucleotide
  Sense strand starting at position 2287 of SEQ ID NO: 1243140
gcggguggucaggaaauca

SEQ ID NO: 1397785 - RNA, 19 nt, Artificial Sequence
  Description of Artificial Sequence: Synthetic oligonucleotide
  Antisense strand to SEQ ID NO: 1397784
ugauuuccugaccacccgc

SEQ ID NO: 1397786 - RNA, 19 nt, Artificial Sequence
  Description of Artificial Sequence: Synthetic oligonucleotide
  Sense strand starting at position 2934 of SEQ ID NO: 1243140
acaucuuccugugagcaaa

SEQ ID NO: 1397787 - RNA, 19 nt, Artificial Sequence
  Description of Artificial Sequence: Synthetic oligonucleotide
  Antisense strand to SEQ ID NO: 1397786
uuugcucacaggaagaugu

SEQ ID NO: 1397788 - RNA, 19 nt, Artificial Sequence
  Description of Artificial Sequence: Synthetic oligonucleotide
  Sense strand starting at position 3127 of SEQ ID NO: 1243140
acaauaaaguaugggacau

SEQ ID NO: 1397789 - RNA, 19 nt, Artificial Sequence
  Description of Artificial Sequence: Synthetic oligonucleotide
  Antisense strand to SEQ ID NO: 1397788
augucccauacuuuauugu

SEQ ID NO: 1397790 - RNA, 19 nt, Artificial Sequence
  Description of Artificial Sequence: Synthetic oligonucleotide
  Sense strand starting at position 3650 of SEQ ID NO: 1243140
guggguauccgucacauaa

SEQ ID NO: 1397791 - RNA, 19 nt, Artificial Sequence
  Description of Artificial Sequence: Synthetic oligonucleotide
  Antisense strand to SEQ ID NO: 1397790
uuaugugacggauacccac

SEQ ID NO: 1397792 - RNA, 19 nt, Artificial Sequence
  Description of Artificial Sequence: Synthetic oligonucleotide
  Sense strand starting at position 3739 of SEQ ID NO: 1243140
gccucauccacgggaucuu

SEQ ID NO: 1397793 - RNA, 19 nt, Artificial Sequence
  Description of Artificial Sequence: Synthetic oligonucleotide
  Antisense strand to SEQ ID NO: 1397792
aagaucccguggaugaggc

SEQ ID NO: 1397794 - RNA, 19 nt, Artificial Sequence
  Description of Artificial Sequence: Synthetic oligonucleotide
  Sense strand starting at position 77 of SEQ ID NO: 1243141
ggacucuaaccuuggcaaa

SEQ ID NO: 1397795 - RNA, 19 nt, Artificial Sequence
  Description of Artificial Sequence: Synthetic oligonucleotide
  Antisense strand to SEQ ID NO: 1397794
uuugccaagguuagagucc

SEQ ID NO: 1397796 - RNA, 19 nt, Artificial Sequence
  Description of Artificial Sequence: Synthetic oligonucleotide
  Sense strand starting at position 94 of SEQ ID NO: 1243141
aacgaucaugaacguauau

SEQ ID NO: 1397797 - RNA, 19 nt, Artificial Sequence
  Description of Artificial Sequence: Synthetic oligonucleotide
  Antisense strand to SEQ ID NO: 1397796
auauacguucaugaucguu

SEQ ID NO: 1397798 - RNA, 19 nt, Artificial Sequence
  Description of Artificial Sequence: Synthetic oligonucleotide
  Sense strand starting at position 96 of SEQ ID NO: 1243141
cgaucaugaacguauauac

SEQ ID NO: 1397799 - RNA, 19 nt, Artificial Sequence
  Description of Artificial Sequence: Synthetic oligonucleotide
  Antisense strand to SEQ ID NO: 1397798
guauauacguucaugaucg

SEQ ID NO: 1397800 - RNA, 19 nt, Artificial Sequence
  Description of Artificial Sequence: Synthetic oligonucleotide
  Sense strand starting at position 130 of SEQ ID NO: 1243141
agaugcucacugcaagauu

SEQ ID NO: 1397801 - RNA, 19 nt, Artificial Sequence
  Description of Artificial Sequence: Synthetic oligonucleotide
  Antisense strand to SEQ ID NO: 1397800
aaucuugcagugagcaucu

SEQ ID NO: 1397802 - RNA, 19 nt, Artificial Sequence
  Description of Artificial Sequence: Synthetic oligonucleotide
  Sense strand starting at position 133 of SEQ ID NO: 1243141
ugcucacugcaagauuauu

SEQ ID NO: 1397803 - RNA, 19 nt, Artificial Sequence
  Description of Artificial Sequence: Synthetic oligonucleotide
  Antisense strand to SEQ ID NO: 1397802
aauaaucuugcagugagca

SEQ ID NO: 1397804 - RNA, 19 nt, Artificial Sequence
  Description of Artificial Sequence: Synthetic oligonucleotide
  Sense strand starting at position 205 of SEQ ID NO: 1243141
caacuaaauggugguccau

SEQ ID NO: 1397805 - RNA, 19 nt, Artificial Sequence
  Description of Artificial Sequence: Synthetic oligonucleotide
  Antisense strand to SEQ ID NO: 1397804
auggaccaccauuuaguug

SEQ ID NO: 1397806 - RNA, 19 nt, Artificial Sequence
  Description of Artificial Sequence: Synthetic oligonucleotide
  Sense strand starting at position 207 of SEQ ID NO: 1243141
acuaaauggugguccauca

SEQ ID NO: 1397807 - RNA, 19 nt, Artificial Sequence
  Description of Artificial Sequence: Synthetic oligonucleotide
  Antisense strand to SEQ ID NO: 1397806
ugauggaccaccauuuagu

SEQ ID NO: 1397808 - RNA, 19 nt, Artificial Sequence
  Description of Artificial Sequence: Synthetic oligonucleotide
  Sense strand starting at position 232 of SEQ ID NO: 1243141
ggacuaugcuaucacauuu

SEQ ID NO: 1397809 - RNA, 19 nt, Artificial Sequence
  Description of Artificial Sequence: Synthetic oligonucleotide
  Antisense strand to SEQ ID NO: 1397808
aaaugugauagcauagucc

SEQ ID NO: 1397810 - RNA, 19 nt, Artificial Sequence
  Description of Artificial Sequence: Synthetic oligonucleotide
  Sense strand starting at position 287 of SEQ ID NO: 1243141
gcaguacacacuuggaaag

SEQ ID NO: 1397811 - RNA, 19 nt, Artificial Sequence
  Description of Artificial Sequence: Synthetic oligonucleotide
  Antisense strand to SEQ ID NO: 1397810
cuuuccaaguguguacugc

SEQ ID NO: 1397812 - RNA, 19 nt, Artificial Sequence
  Description of Artificial Sequence: Synthetic oligonucleotide
  Sense strand starting at position 301 of SEQ ID NO: 1243141
gaaagcacucacuguguau

SEQ ID NO: 1397813 - RNA, 19 nt, Artificial Sequence
  Description of Artificial Sequence: Synthetic oligonucleotide
  Antisense strand to SEQ ID NO: 1397812
auacacagugagugcuuuc

SEQ ID NO: 1397814 - RNA, 19 nt, Artificial Sequence
  Description of Artificial Sequence: Synthetic oligonucleotide
  Sense strand starting at position 328 of SEQ ID NO: 1243141
gucuaagugcuuuauauac

SEQ ID NO: 1397815 - RNA, 19 nt, Artificial Sequence
  Description of Artificial Sequence: Synthetic oligonucleotide
  Antisense strand to SEQ ID NO: 1397814
guauauaaagcacuuagac

SEQ ID NO: 1397816 - RNA, 19 nt, Artificial Sequence
  Description of Artificial Sequence: Synthetic oligonucleotide
  Sense strand starting at position 558 of SEQ ID NO: 1243141
agcaauagguccucacuca

SEQ ID NO: 1397817 - RNA, 19 nt, Artificial Sequence
  Description of Artificial Sequence: Synthetic oligonucleotide
  Antisense strand to SEQ ID NO: 1397816
ugagugaggaccuauugcu

SEQ ID NO: 1397818 - RNA, 19 nt, Artificial Sequence
  Description of Artificial Sequence: Synthetic oligonucleotide
  Sense strand starting at position 579 of SEQ ID NO: 1243141
cagagagucuuagaauuua

SEQ ID NO: 1397819 - RNA, 19 nt, Artificial Sequence
  Description of Artificial Sequence: Synthetic oligonucleotide
  Antisense strand to SEQ ID NO: 1397818
uaaauucuaagacucucug

SEQ ID NO: 1397820 - RNA, 19 nt, Artificial Sequence
  Description of Artificial Sequence: Synthetic oligonucleotide
  Sense strand starting at position 798 of SEQ ID NO: 1243141
aaggcuaagucccuggauu

SEQ ID NO: 1397821 - RNA, 19 nt, Artificial Sequence
  Description of Artificial Sequence: Synthetic oligonucleotide
  Antisense strand to SEQ ID NO: 1397820
aauccagggacuuagccuu

SEQ ID NO: 1397822 - RNA, 19 nt, Artificial Sequence
  Description of Artificial Sequence: Synthetic oligonucleotide
  Sense strand starting at position 891 of SEQ ID NO: 1243141
ccaugcuacccaugaagaa

SEQ ID NO: 1397823 - RNA, 19 nt, Artificial Sequence
  Description of Artificial Sequence: Synthetic oligonucleotide
  Antisense strand to SEQ ID NO: 1397822
uucuucauggguagcaugg

SEQ ID NO: 1397824 - RNA, 19 nt, Artificial Sequence
  Description of Artificial Sequence: Synthetic oligonucleotide
  Sense strand starting at position 1021 of SEQ ID NO: 1243141
cuuuguuuccaucauuagu

SEQ ID NO: 1397825 - RNA, 19 nt, Artificial Sequence
  Description of Artificial Sequence: Synthetic oligonucleotide
  Antisense strand to SEQ ID NO: 1397824
acuaaugauggaaacaaag

SEQ ID NO: 1397826 - RNA, 19 nt, Artificial Sequence
  Description of Artificial Sequence: Synthetic oligonucleotide
  Sense strand starting at position 1105 of SEQ ID NO: 1243141
auggcaucauuaucaguca

SEQ ID NO: 1397827 - RNA, 19 nt, Artificial Sequence
  Description of Artificial Sequence: Synthetic oligonucleotide
  Antisense strand to SEQ ID NO: 1397826
ugacugauaaugaugccau

SEQ ID NO: 1397828 - RNA, 19 nt, Artificial Sequence
  Description of Artificial Sequence: Synthetic oligonucleotide
  Sense strand starting at position 1108 of SEQ ID NO: 1243141
gcaucauuaucagucauug

SEQ ID NO: 1397829 - RNA, 19 nt, Artificial Sequence
  Description of Artificial Sequence: Synthetic oligonucleotide
  Antisense strand to SEQ ID NO: 1397828
caaugacugauaaugaugc

SEQ ID NO: 1397830 - RNA, 19 nt, Artificial Sequence
  Description of Artificial Sequence: Synthetic oligonucleotide
  Sense strand starting at position 1113 of SEQ ID NO: 1243141
auuaucagucauugagauu

SEQ ID NO: 1397831 - RNA, 19 nt, Artificial Sequence
  Description of Artificial Sequence: Synthetic oligonucleotide
  Antisense strand to SEQ ID NO: 1397830
aaucucaaugacugauaau

SEQ ID NO: 1397832 - RNA, 19 nt, Artificial Sequence
  Description of Artificial Sequence: Synthetic oligonucleotide
  Sense strand starting at position 1139 of SEQ ID NO: 1243141
ggaauaaucuuggagacag

SEQ ID NO: 1397833 - RNA, 19 nt, Artificial Sequence
  Description of Artificial Sequence: Synthetic oligonucleotide
  Antisense strand to SEQ ID NO: 1397832
cugucuccaagauuauucc

SEQ ID NO: 1397834 - RNA, 19 nt, Artificial Sequence
  Description of Artificial Sequence: Synthetic oligonucleotide
  Sense strand starting at position 1159 of SEQ ID NO: 1243141
ggacgaugguugaaagauc

SEQ ID NO: 1397835 - RNA, 19 nt, Artificial Sequence
  Description of Artificial Sequence: Synthetic oligonucleotide
  Antisense strand to SEQ ID NO: 1397834
gaucuuucaaccaucgucc

SEQ ID NO: 1397836 - RNA, 19 nt, Artificial Sequence
  Description of Artificial Sequence: Synthetic oligonucleotide
  Sense strand starting at position 1168 of SEQ ID NO: 1243141
uugaaagauccauggccca

SEQ ID NO: 1397837 - RNA, 19 nt, Artificial Sequence
  Description of Artificial Sequence: Synthetic oligonucleotide
  Antisense strand to SEQ ID NO: 1397836
ugggccauggaucuuucaa

SEQ ID NO: 1397838 - RNA, 19 nt, Artificial Sequence
  Description of Artificial Sequence: Synthetic oligonucleotide
  Sense strand starting at position 1193 of SEQ ID NO: 1243141
uuacuaauucucuguggua

SEQ ID NO: 1397839 - RNA, 19 nt, Artificial Sequence
  Description of Artificial Sequence: Synthetic oligonucleotide
  Antisense strand to SEQ ID NO: 1397838
uaccacagagaauuaguaa

SEQ ID NO: 1397840 - RNA, 19 nt, Artificial Sequence
  Description of Artificial Sequence: Synthetic oligonucleotide
  Sense strand starting at position 1194 of SEQ ID NO: 1243141
uacuaauucucugugguag

SEQ ID NO: 1397841 - RNA, 19 nt, Artificial Sequence
  Description of Artificial Sequence: Synthetic oligonucleotide
  Antisense strand to SEQ ID NO: 1397840
cuaccacagagaauuagua

SEQ ID NO: 1397842 - RNA, 19 nt, Artificial Sequence
  Description of Artificial Sequence: Synthetic oligonucleotide
  Sense strand starting at position 1311 of SEQ ID NO: 1243141
ugcuuuggucaaugaaaca

SEQ ID NO: 1397843 - RNA, 19 nt, Artificial Sequence
  Description of Artificial Sequence: Synthetic oligonucleotide
  Antisense strand to SEQ ID NO: 1397842
uguuucauugaccaaagca

SEQ ID NO: 1397844 - RNA, 19 nt, Artificial Sequence
  Description of Artificial Sequence: Synthetic oligonucleotide
  Sense strand starting at position 1542 of SEQ ID NO: 1243141
ccaugagucacugggacuu

SEQ ID NO: 1397845 - RNA, 19 nt, Artificial Sequence
  Description of Artificial Sequence: Synthetic oligonucleotide
  Antisense strand to SEQ ID NO: 1397844
aagucccagugacucaugg

SEQ ID NO: 1397846 - RNA, 19 nt, Artificial Sequence
  Description of Artificial Sequence: Synthetic oligonucleotide
  Sense strand starting at position 1714 of SEQ ID NO: 1243141
ugugucugaucauuacauu

SEQ ID NO: 1397847 - RNA, 19 nt, Artificial Sequence
  Description of Artificial Sequence: Synthetic oligonucleotide
  Antisense strand to SEQ ID NO: 1397846
aauguaaugaucagacaca

SEQ ID NO: 1397848 - RNA, 19 nt, Artificial Sequence
  Description of Artificial Sequence: Synthetic oligonucleotide
  Sense strand starting at position 1715 of SEQ ID NO: 1243141
gugucugaucauuacauuc

SEQ ID NO: 1397849 - RNA, 19 nt, Artificial Sequence
  Description of Artificial Sequence: Synthetic oligonucleotide
  Antisense strand to SEQ ID NO: 1397848
gaauguaaugaucagacac

SEQ ID NO: 1397850 - RNA, 19 nt, Artificial Sequence
  Description of Artificial Sequence: Synthetic oligonucleotide
  Sense strand starting at position 1802 of SEQ ID NO: 1243141
gggaccagucuuggcagua

SEQ ID NO: 1397851 - RNA, 19 nt, Artificial Sequence
  Description of Artificial Sequence: Synthetic oligonucleotide
  Antisense strand to SEQ ID NO: 1397850
uacugccaagacugguccc

SEQ ID NO: 1397852 - RNA, 19 nt, Artificial Sequence
  Description of Artificial Sequence: Synthetic oligonucleotide
  Sense strand starting at position 1807 of SEQ ID NO: 1243141
cagucuuggcaguaggaga

SEQ ID NO: 1397853 - RNA, 19 nt, Artificial Sequence
  Description of Artificial Sequence: Synthetic oligonucleotide
  Antisense strand to SEQ ID NO: 1397852
ucuccuacugccaagacug

SEQ ID NO: 1397854 - RNA, 19 nt, Artificial Sequence
  Description of Artificial Sequence: Synthetic oligonucleotide
  Sense strand starting at position 2094 of SEQ ID NO: 1243141
ggagacacaucugagaaca

SEQ ID NO: 1397855 - RNA, 19 nt, Artificial Sequence
  Description of Artificial Sequence: Synthetic oligonucleotide
  Antisense strand to SEQ ID NO: 1397854
uguucucagaugugucucc

SEQ ID NO: 1397856 - RNA, 19 nt, Artificial Sequence
  Description of Artificial Sequence: Synthetic oligonucleotide
  Sense strand starting at position 2309 of SEQ ID NO: 1243141
ccugcaagucagcaaaguu

SEQ ID NO: 1397857 - RNA, 19 nt, Artificial Sequence
  Description of Artificial Sequence: Synthetic oligonucleotide
  Antisense strand to SEQ ID NO: 1397856
aacuuugcugacuugcagg

SEQ ID NO: 1397858 - RNA, 19 nt, Artificial Sequence
  Description of Artificial Sequence: Synthetic oligonucleotide
  Sense strand starting at position 2430 of SEQ ID NO: 1243141
cuuccuauuuaguuaguuu

SEQ ID NO: 1397859 - RNA, 19 nt, Artificial Sequence
  Description of Artificial Sequence: Synthetic oligonucleotide
  Antisense strand to SEQ ID NO: 1397858
aaacuaacuaaauaggaag

SEQ ID NO: 1397860 - RNA, 19 nt, Artificial Sequence
  Description of Artificial Sequence: Synthetic oligonucleotide
  Sense strand starting at position 2498 of SEQ ID NO: 1243141
auugauagcugcucacaga

SEQ ID NO: 1397861 - RNA, 19 nt, Artificial Sequence
  Description of Artificial Sequence: Synthetic oligonucleotide
  Antisense strand to SEQ ID NO: 1397860
ucugugagcagcuaucaau

SEQ ID NO: 1397862 - RNA, 19 nt, Artificial Sequence
  Description of Artificial Sequence: Synthetic oligonucleotide
  Sense strand starting at position 2499 of SEQ ID NO: 1243141
uugauagcugcucacagaa

SEQ ID NO: 1397863 - RNA, 19 nt, Artificial Sequence
  Description of Artificial Sequence: Synthetic oligonucleotide
  Antisense strand to SEQ ID NO: 1397862
uucugugagcagcuaucaa

SEQ ID NO: 1397864 - RNA, 19 nt, Artificial Sequence
  Description of Artificial Sequence: Synthetic oligonucleotide
  Sense strand starting at position 2687 of SEQ ID NO: 1243141
agaguuccaugacuuuaga

SEQ ID NO: 1397865 - RNA, 19 nt, Artificial Sequence
  Description of Artificial Sequence: Synthetic oligonucleotide
  Antisense strand to SEQ ID NO: 1397864
ucuaaagucauggaacucu

SEQ ID NO: 1397866 - RNA, 19 nt, Artificial Sequence
  Description of Artificial Sequence: Synthetic oligonucleotide
  Sense strand starting at position 2732 of SEQ ID NO: 1243141
ugacauaauggagguggua

SEQ ID NO: 1397867 - RNA, 19 nt, Artificial Sequence
  Description of Artificial Sequence: Synthetic oligonucleotide
  Antisense strand to SEQ ID NO: 1397866
uaccaccuccauuauguca

SEQ ID NO: 1397868 - RNA, 19 nt, Artificial Sequence
  Description of Artificial Sequence: Synthetic oligonucleotide
  Sense strand starting at position 2752 of SEQ ID NO: 1243141
guaguaugguaauuagaaa

SEQ ID NO: 1397869 - RNA, 19 nt, Artificial Sequence
  Description of Artificial Sequence: Synthetic oligonucleotide
  Antisense strand to SEQ ID NO: 1397868
uuucuaauuaccauacuac

SEQ ID NO: 1397870 - RNA, 19 nt, Artificial Sequence
  Description of Artificial Sequence: Synthetic oligonucleotide
  Sense strand starting at position 3779 of SEQ ID NO: 1243141
cgaagugauuaggucaaga

SEQ ID NO: 1397871 - RNA, 19 nt, Artificial Sequence
  Description of Artificial Sequence: Synthetic oligonucleotide
  Antisense strand to SEQ ID NO: 1397870
ucuugaccuaaucacuucg

SEQ ID NO: 1397872 - RNA, 19 nt, Artificial Sequence
  Description of Artificial Sequence: Synthetic oligonucleotide
  Sense strand starting at position 3815 of SEQ ID NO: 1243141
ugggauuacugcccucaca

SEQ ID NO: 1397873 - RNA, 19 nt, Artificial Sequence
  Description of Artificial Sequence: Synthetic oligonucleotide
  Antisense strand to SEQ ID NO: 1397872
ugugagggcaguaauccca

SEQ ID NO: 1397874 - RNA, 19 nt, Artificial Sequence
  Description of Artificial Sequence: Synthetic oligonucleotide
  Sense strand starting at position 612 of SEQ ID NO: 1243142
gccuguuccugggcccaaa

SEQ ID NO: 1397875 - RNA, 19 nt, Artificial Sequence
  Description of Artificial Sequence: Synthetic oligonucleotide
  Antisense strand to SEQ ID NO: 1397874
uuugggcccaggaacaggc

SEQ ID NO: 1397876 - RNA, 19 nt, Artificial Sequence
  Description of Artificial Sequence: Synthetic oligonucleotide
  Sense strand starting at position 1032 of SEQ ID NO: 1243142
ccgagucgcugccgugaau

SEQ ID NO: 1397877 - RNA, 19 nt, Artificial Sequence
  Description of Artificial Sequence: Synthetic oligonucleotide
  Antisense strand to SEQ ID NO: 1397876
auucacggcagcgacucgg

SEQ ID NO: 1397878 - RNA, 19 nt, Artificial Sequence
  Description of Artificial Sequence: Synthetic oligonucleotide
  Sense strand starting at position 1072 of SEQ ID NO: 1243142
cgcgugugagcgugggaaa

SEQ ID NO: 1397879 - RNA, 19 nt, Artificial Sequence
  Description of Artificial Sequence: Synthetic oligonucleotide
  Antisense strand to SEQ ID NO: 1397878
uuucccacgcucacacgcg

SEQ ID NO: 1397880 - RNA, 19 nt, Artificial Sequence
  Description of Artificial Sequence: Synthetic oligonucleotide
  Sense strand starting at position 1786 of SEQ ID NO: 1243142
ggaagagguuagcgaagau

SEQ ID NO: 1397881 - RNA, 19 nt, Artificial Sequence
  Description of Artificial Sequence: Synthetic oligonucleotide
  Antisense strand to SEQ ID NO: 1397880
aucuucgcuaaccucuucc

SEQ ID NO: 1397882 - RNA, 19 nt, Artificial Sequence
  Description of Artificial Sequence: Synthetic oligonucleotide
  Sense strand starting at position 2417 of SEQ ID NO: 1243142
gaggcagacucggguguaa

SEQ ID NO: 1397883 - RNA, 19 nt, Artificial Sequence
  Description of Artificial Sequence: Synthetic oligonucleotide
  Antisense strand to SEQ ID NO: 1397882
uuacacccgagucugccuc

SEQ ID NO: 1397884 - RNA, 19 nt, Artificial Sequence
  Description of Artificial Sequence: Synthetic oligonucleotide
  Sense strand starting at position 2558 of SEQ ID NO: 1243142
ggguaaucccaggguucca

SEQ ID NO: 1397885 - RNA, 19 nt, Artificial Sequence
  Description of Artificial Sequence: Synthetic oligonucleotide
  Antisense strand to SEQ ID NO: 1397884
uggaacccugggauuaccc

SEQ ID NO: 1397886 - RNA, 19 nt, Artificial Sequence
  Description of Artificial Sequence: Synthetic oligonucleotide
  Sense strand starting at position 2576 of SEQ ID NO: 1243142
augcguauccucugcacau

SEQ ID NO: 1397887 - RNA, 19 nt, Artificial Sequence
  Description of Artificial Sequence: Synthetic oligonucleotide
  Antisense strand to SEQ ID NO: 1397886
augugcagaggauacgcau

SEQ ID NO: 1397888 - RNA, 19 nt, Artificial Sequence
  Description of Artificial Sequence: Synthetic oligonucleotide
  Sense strand starting at position 2577 of SEQ ID NO: 1243142
ugcguauccucugcacauu

SEQ ID NO: 1397889 - RNA, 19 nt, Artificial Sequence
  Description of Artificial Sequence: Synthetic oligonucleotide
  Antisense strand to SEQ ID NO: 1397888
aaugugcagaggauacgca

SEQ ID NO: 1397890 - RNA, 19 nt, Artificial Sequence
  Description of Artificial Sequence: Synthetic oligonucleotide
  Sense strand starting at position 2630 of SEQ ID NO: 1243142
uucugucguucugcgauaa

SEQ ID NO: 1397891 - RNA, 19 nt, Artificial Sequence
  Description of Artificial Sequence: Synthetic oligonucleotide
  Antisense strand to SEQ ID NO: 1397890
uuaucgcagaacgacagaa

SEQ ID NO: 1397892 - RNA, 19 nt, Artificial Sequence
  Description of Artificial Sequence: Synthetic oligonucleotide
  Sense strand starting at position 2631 of SEQ ID NO: 1243142
ucugucguucugcgauaau

SEQ ID NO: 1397893 - RNA, 19 nt, Artificial Sequence
  Description of Artificial Sequence: Synthetic oligonucleotide
  Antisense strand to SEQ ID NO: 1397892
auuaucgcagaacgacaga

SEQ ID NO: 1397894 - RNA, 19 nt, Artificial Sequence
  Description of Artificial Sequence: Synthetic oligonucleotide
  Sense strand starting at position 2634 of SEQ ID NO: 1243142
gucguucugcgauaaucau

SEQ ID NO: 1397895 - RNA, 19 nt, Artificial Sequence
  Description of Artificial Sequence: Synthetic oligonucleotide
  Antisense strand to SEQ ID NO: 1397894
augauuaucgcagaacgac

SEQ ID NO: 1397896 - RNA, 19 nt, Artificial Sequence
  Description of Artificial Sequence: Synthetic oligonucleotide
  Sense strand starting at position 2759 of SEQ ID NO: 1243142
ugguacaugacguguucga

SEQ ID NO: 1397897 - RNA, 19 nt, Artificial Sequence
  Description of Artificial Sequence: Synthetic oligonucleotide
  Antisense strand to SEQ ID NO: 1397896
ucgaacacgucauguacca

SEQ ID NO: 1397898 - RNA, 19 nt, Artificial Sequence
  Description of Artificial Sequence: Synthetic oligonucleotide
  Sense strand starting at position 2794 of SEQ ID NO: 1243142
cucagucuucccugaugaa

SEQ ID NO: 1397899 - RNA, 19 nt, Artificial Sequence
  Description of Artificial Sequence: Synthetic oligonucleotide
  Antisense strand to SEQ ID NO: 1397898
uucaucagggaagacugag

SEQ ID NO: 1397900 - RNA, 19 nt, Artificial Sequence
  Description of Artificial Sequence: Synthetic oligonucleotide
  Sense strand starting at position 2795 of SEQ ID NO: 1243142
ucagucuucccugaugaag

SEQ ID NO: 1397901 - RNA, 19 nt, Artificial Sequence
  Description of Artificial Sequence: Synthetic oligonucleotide
  Antisense strand to SEQ ID NO: 1397900
cuucaucagggaagacuga

SEQ ID NO: 1397902 - RNA, 19 nt, Artificial Sequence
  Description of Artificial Sequence: Synthetic oligonucleotide
  Sense strand starting at position 2797 of SEQ ID NO: 1243142
agucuucccugaugaagaa

SEQ ID NO: 1397903 - RNA, 19 nt, Artificial Sequence
  Description of Artificial Sequence: Synthetic oligonucleotide
  Antisense strand to SEQ ID NO: 1397902
uucuucaucagggaagacu

SEQ ID NO: 1397904 - RNA, 19 nt, Artificial Sequence
  Description of Artificial Sequence: Synthetic oligonucleotide
  Sense strand starting at position 2886 of SEQ ID NO: 1243142
gagccuuaccuuugaaggu

SEQ ID NO: 1397905 - RNA, 19 nt, Artificial Sequence
  Description of Artificial Sequence: Synthetic oligonucleotide
  Antisense strand to SEQ ID NO: 1397904
accuucaaagguaaggcuc

SEQ ID NO: 1397906 - RNA, 19 nt, Artificial Sequence
  Description of Artificial Sequence: Synthetic oligonucleotide
  Sense strand starting at position 3457 of SEQ ID NO: 1243142
gccggugucccaggcuaaa

SEQ ID NO: 1397907 - RNA, 19 nt, Artificial Sequence
  Description of Artificial Sequence: Synthetic oligonucleotide
  Antisense strand to SEQ ID NO: 1397906
uuuagccugggacaccggc

SEQ ID NO: 1397908 - RNA, 19 nt, Artificial Sequence
  Description of Artificial Sequence: Synthetic oligonucleotide
  Sense strand starting at position 718 of SEQ ID NO: 1243143
cgacuuuccacaugaggaa

SEQ ID NO: 1397909 - RNA, 19 nt, Artificial Sequence
  Description of Artificial Sequence: Synthetic oligonucleotide
  Antisense strand to SEQ ID NO: 1397908
uuccucauguggaaagucg

SEQ ID NO: 1397910 - RNA, 19 nt, Artificial Sequence
  Description of Artificial Sequence: Synthetic oligonucleotide
  Sense strand starting at position 751 of SEQ ID NO: 1243143
cccugugucugaggugaau

SEQ ID NO: 1397911 - RNA, 19 nt, Artificial Sequence
  Description of Artificial Sequence: Synthetic oligonucleotide
  Antisense strand to SEQ ID NO: 1397910
auucaccucagacacaggg

SEQ ID NO: 1397912 - RNA, 19 nt, Artificial Sequence
  Description of Artificial Sequence: Synthetic oligonucleotide
  Sense strand starting at position 2428 of SEQ ID NO: 1243143
gggugaaauucccacguga

SEQ ID NO: 1397913 - RNA, 19 nt, Artificial Sequence
  Description of Artificial Sequence: Synthetic oligonucleotide
  Antisense strand to SEQ ID NO: 1397912
ucacgugggaauuucaccc

SEQ ID NO: 1397914 - RNA, 19 nt, Artificial Sequence
  Description of Artificial Sequence: Synthetic oligonucleotide
  Sense strand starting at position 2430 of SEQ ID NO: 1243143
gugaaauucccacgugagc

SEQ ID NO: 1397915 - RNA, 19 nt, Artificial Sequence
  Description of Artificial Sequence: Synthetic oligonucleotide
  Antisense strand to SEQ ID NO: 1397914
gcucacgugggaauuucac

SEQ ID NO: 1397916 - RNA, 19 nt, Artificial Sequence
  Description of Artificial Sequence: Synthetic oligonucleotide
  Sense strand starting at position 2654 of SEQ ID NO: 1243143
augugagccuggucuguga

SEQ ID NO: 1397917 - RNA, 19 nt, Artificial Sequence
  Description of Artificial Sequence: Synthetic oligonucleotide
  Antisense strand to SEQ ID NO: 1397916
ucacagaccaggcucacau

SEQ ID NO: 1397918 - RNA, 19 nt, Artificial Sequence
  Description of Artificial Sequence: Synthetic oligonucleotide
  Sense strand starting at position 2656 of SEQ ID NO: 1243143
gugagccuggucugugaau

SEQ ID NO: 1397919 - RNA, 19 nt, Artificial Sequence
  Description of Artificial Sequence: Synthetic oligonucleotide
  Antisense strand to SEQ ID NO: 1397918
auucacagaccaggcucac

SEQ ID NO: 1397920 - RNA, 19 nt, Artificial Sequence
  Description of Artificial Sequence: Synthetic oligonucleotide
  Sense strand starting at position 2657 of SEQ ID NO: 1243143
ugagccuggucugugaauu

SEQ ID NO: 1397921 - RNA, 19 nt, Artificial Sequence
  Description of Artificial Sequence: Synthetic oligonucleotide
  Antisense strand to SEQ ID NO: 1397920
aauucacagaccaggcuca

SEQ ID NO: 1397922 - RNA, 19 nt, Artificial Sequence
  Description of Artificial Sequence: Synthetic oligonucleotide
  Sense strand starting at position 2658 of SEQ ID NO: 1243143
gagccuggucugugaauuu

SEQ ID NO: 1397923 - RNA, 19 nt, Artificial Sequence
  Description of Artificial Sequence: Synthetic oligonucleotide
  Antisense strand to SEQ ID NO: 1397922
aaauucacagaccaggcuc

SEQ ID NO: 1397924 - RNA, 19 nt, Artificial Sequence
  Description of Artificial Sequence: Synthetic oligonucleotide
  Sense strand starting at position 2692 of SEQ ID NO: 1243143
cgaccuuuauucucaaaug

SEQ ID NO: 1397925 - RNA, 19 nt, Artificial Sequence
  Description of Artificial Sequence: Synthetic oligonucleotide
  Antisense strand to SEQ ID NO: 1397924
cauuugagaauaaaggucg

SEQ ID NO: 1397926 - RNA, 19 nt, Artificial Sequence
  Description of Artificial Sequence: Synthetic oligonucleotide
  Sense strand starting at position 2720 of SEQ ID NO: 1243143
gugacugcauuccucuaau

SEQ ID NO: 1397927 - RNA, 19 nt, Artificial Sequence
  Description of Artificial Sequence: Synthetic oligonucleotide
  Antisense strand to SEQ ID NO: 1397926
auuagaggaaugcagucac

SEQ ID NO: 1397928 - RNA, 19 nt, Artificial Sequence
  Description of Artificial Sequence: Synthetic oligonucleotide
  Sense strand starting at position 2820 of SEQ ID NO: 1243143
acgguaauauuuggguaga

SEQ ID NO: 1397929 - RNA, 19 nt, Artificial Sequence
  Description of Artificial Sequence: Synthetic oligonucleotide
  Antisense strand to SEQ ID NO: 1397928
ucuacccaaauauuaccgu

SEQ ID NO: 1397930 - RNA, 19 nt, Artificial Sequence
  Description of Artificial Sequence: Synthetic oligonucleotide
  Sense strand starting at position 2821 of SEQ ID NO: 1243143
cgguaauauuuggguagau

SEQ ID NO: 1397931 - RNA, 19 nt, Artificial Sequence
  Description of Artificial Sequence: Synthetic oligonucleotide
  Antisense strand to SEQ ID NO: 1397930
aucuacccaaauauuaccg

SEQ ID NO: 1397932 - RNA, 19 nt, Artificial Sequence
  Description of Artificial Sequence: Synthetic oligonucleotide
  Sense strand starting at position 2843 of SEQ ID NO: 1243143
acagcaugcuacuauuuga

SEQ ID NO: 1397933 - RNA, 19 nt, Artificial Sequence
  Description of Artificial Sequence: Synthetic oligonucleotide
  Antisense strand to SEQ ID NO: 1397932
ucaaauaguagcaugcugu

SEQ ID NO: 1397934 - RNA, 19 nt, Artificial Sequence
  Description of Artificial Sequence: Synthetic oligonucleotide
  Sense strand starting at position 2881 of SEQ ID NO: 1243143
gcuagaacuuacuuaauga

SEQ ID NO: 1397935 - RNA, 19 nt, Artificial Sequence
  Description of Artificial Sequence: Synthetic oligonucleotide
  Antisense strand to SEQ ID NO: 1397934
ucauuaaguaaguucuagc

SEQ ID NO: 1397936 - RNA, 19 nt, Artificial Sequence
  Description of Artificial Sequence: Synthetic oligonucleotide
  Sense strand starting at position 2888 of SEQ ID NO: 1243143
cuuacuuaaugagucuuga

SEQ ID NO: 1397937 - RNA, 19 nt, Artificial Sequence
  Description of Artificial Sequence: Synthetic oligonucleotide
  Antisense strand to SEQ ID NO: 1397936
ucaagacucauuaaguaag

SEQ ID NO: 1397938 - RNA, 19 nt, Artificial Sequence
  Description of Artificial Sequence: Synthetic oligonucleotide
  Sense strand starting at position 2956 of SEQ ID NO: 1243143
ugaauuguccauugcaagu

SEQ ID NO: 1397939 - RNA, 19 nt, Artificial Sequence
  Description of Artificial Sequence: Synthetic oligonucleotide
  Antisense strand to SEQ ID NO: 1397938
acuugcaauggacaauuca

SEQ ID NO: 1397940 - RNA, 19 nt, Artificial Sequence
  Description of Artificial Sequence: Synthetic oligonucleotide
  Sense strand starting at position 2966 of SEQ ID NO: 1243143
auugcaaguguauaacaga

SEQ ID NO: 1397941 - RNA, 19 nt, Artificial Sequence
  Description of Artificial Sequence: Synthetic oligonucleotide
  Antisense strand to SEQ ID NO: 1397940
ucuguuauacacuugcaau

SEQ ID NO: 1397942 - RNA, 19 nt, Artificial Sequence
  Description of Artificial Sequence: Synthetic oligonucleotide
  Sense strand starting at position 2969 of SEQ ID NO: 1243143
gcaaguguauaacagacaa

SEQ ID NO: 1397943 - RNA, 19 nt, Artificial Sequence
  Description of Artificial Sequence: Synthetic oligonucleotide
  Antisense strand to SEQ ID NO: 1397942
uugucuguuauacacuugc

SEQ ID NO: 1397944 - RNA, 19 nt, Artificial Sequence
  Description of Artificial Sequence: Synthetic oligonucleotide
  Sense strand starting at position 2986 of SEQ ID NO: 1243143
aauugagguuuguuuguuu

SEQ ID NO: 1397945 - RNA, 19 nt, Artificial Sequence
  Description of Artificial Sequence: Synthetic oligonucleotide
  Antisense strand to SEQ ID NO: 1397944
aaacaaacaaaccucaauu

SEQ ID NO: 1397946 - RNA, 19 nt, Artificial Sequence
  Description of Artificial Sequence: Synthetic oligonucleotide
  Sense strand starting at position 3040 of SEQ ID NO: 1243143
gugcaauaauggcauaucu

SEQ ID NO: 1397947 - RNA, 19 nt, Artificial Sequence
  Description of Artificial Sequence: Synthetic oligonucleotide
  Antisense strand to SEQ ID NO: 1397946
agauaugccauuauugcac

SEQ ID NO: 1397948 - RNA, 19 nt, Artificial Sequence
  Description of Artificial Sequence: Synthetic oligonucleotide
  Sense strand starting at position 3042 of SEQ ID NO: 1243143
gcaauaauggcauaucucu

SEQ ID NO: 1397949 - RNA, 19 nt, Artificial Sequence
  Description of Artificial Sequence: Synthetic oligonucleotide
  Antisense strand to SEQ ID NO: 1397948
agagauaugccauuauugc

SEQ ID NO: 1397950 - RNA, 19 nt, Artificial Sequence
  Description of Artificial Sequence: Synthetic oligonucleotide
  Sense strand starting at position 3049 of SEQ ID NO: 1243143
uggcauaucucugcucacu

SEQ ID NO: 1397951 - RNA, 19 nt, Artificial Sequence
  Description of Artificial Sequence: Synthetic oligonucleotide
  Antisense strand to SEQ ID NO: 1397950
agugagcagagauaugcca

SEQ ID NO: 1397952 - RNA, 19 nt, Artificial Sequence
  Description of Artificial Sequence: Synthetic oligonucleotide
  Sense strand starting at position 3296 of SEQ ID NO: 1243143
acaauugagcuuuguguau

SEQ ID NO: 1397953 - RNA, 19 nt, Artificial Sequence
  Description of Artificial Sequence: Synthetic oligonucleotide
  Antisense strand to SEQ ID NO: 1397952
auacacaaagcucaauugu

SEQ ID NO: 1397954 - RNA, 19 nt, Artificial Sequence
  Description of Artificial Sequence: Synthetic oligonucleotide
  Sense strand starting at position 3298 of SEQ ID NO: 1243143
aauugagcuuuguguauug

SEQ ID NO: 1397955 - RNA, 19 nt, Artificial Sequence
  Description of Artificial Sequence: Synthetic oligonucleotide
  Antisense strand to SEQ ID NO: 1397954
caauacacaaagcucaauu

SEQ ID NO: 1397956 - RNA, 19 nt, Artificial Sequence
  Description of Artificial Sequence: Synthetic oligonucleotide
  Sense strand starting at position 3300 of SEQ ID NO: 1243143
uugagcuuuguguauugau

SEQ ID NO: 1397957 - RNA, 19 nt, Artificial Sequence
  Description of Artificial Sequence: Synthetic oligonucleotide
  Antisense strand to SEQ ID NO: 1397956
aucaauacacaaagcucaa

SEQ ID NO: 1397958 - RNA, 19 nt, Artificial Sequence
  Description of Artificial Sequence: Synthetic oligonucleotide
  Sense strand starting at position 3303 of SEQ ID NO: 1243143
agcuuuguguauugaucuu

SEQ ID NO: 1397959 - RNA, 19 nt, Artificial Sequence
  Description of Artificial Sequence: Synthetic oligonucleotide
  Antisense strand to SEQ ID NO: 1397958
aagaucaauacacaaagcu

SEQ ID NO: 1397960 - RNA, 19 nt, Artificial Sequence
  Description of Artificial Sequence: Synthetic oligonucleotide
  Sense strand starting at position 3382 of SEQ ID NO: 1243143
ggaauuucuuuguauaaga

SEQ ID NO: 1397961 - RNA, 19 nt, Artificial Sequence
  Description of Artificial Sequence: Synthetic oligonucleotide
  Antisense strand to SEQ ID NO: 1397960
ucuuauacaaagaaauucc

SEQ ID NO: 1397962 - RNA, 19 nt, Artificial Sequence
  Description of Artificial Sequence: Synthetic oligonucleotide
  Sense strand starting at position 3390 of SEQ ID NO: 1243143
uuuguauaagauuguguca

SEQ ID NO: 1397963 - RNA, 19 nt, Artificial Sequence
  Description of Artificial Sequence: Synthetic oligonucleotide
  Antisense strand to SEQ ID NO: 1397962
ugacacaaucuuauacaaa

SEQ ID NO: 1397964 - RNA, 19 nt, Artificial Sequence
  Description of Artificial Sequence: Synthetic oligonucleotide
  Sense strand starting at position 3392 of SEQ ID NO: 1243143
uguauaagauugugucaua

SEQ ID NO: 1397965 - RNA, 19 nt, Artificial Sequence
  Description of Artificial Sequence: Synthetic oligonucleotide
  Antisense strand to SEQ ID NO: 1397964
uaugacacaaucuuauaca

SEQ ID NO: 1397966 - RNA, 19 nt, Artificial Sequence
  Description of Artificial Sequence: Synthetic oligonucleotide
  Sense strand starting at position 3395 of SEQ ID NO: 1243143
auaagauugugucauaugg

SEQ ID NO: 1397967 - RNA, 19 nt, Artificial Sequence
  Description of Artificial Sequence: Synthetic oligonucleotide
  Antisense strand to SEQ ID NO: 1397966
ccauaugacacaaucuuau

SEQ ID NO: 1397968 - RNA, 19 nt, Artificial Sequence
  Description of Artificial Sequence: Synthetic oligonucleotide
  Sense strand starting at position 3397 of SEQ ID NO: 1243143
aagauugugucauauggag

SEQ ID NO: 1397969 - RNA, 19 nt, Artificial Sequence
  Description of Artificial Sequence: Synthetic oligonucleotide
  Antisense strand to SEQ ID NO: 1397968
cuccauaugacacaaucuu

SEQ ID NO: 1397970 - RNA, 19 nt, Artificial Sequence
  Description of Artificial Sequence: Synthetic oligonucleotide
  Sense strand starting at position 3721 of SEQ ID NO: 1243143
aacaucaugucauauggga

SEQ ID NO: 1397971 - RNA, 19 nt, Artificial Sequence
  Description of Artificial Sequence: Synthetic oligonucleotide
  Antisense strand to SEQ ID NO: 1397970
ucccauaugacaugauguu

SEQ ID NO: 1397972 - RNA, 19 nt, Artificial Sequence
  Description of Artificial Sequence: Synthetic oligonucleotide
  Sense strand starting at position 3725 of SEQ ID NO: 1243143
ucaugucauaugggaauag

SEQ ID NO: 1397973 - RNA, 19 nt, Artificial Sequence
  Description of Artificial Sequence: Synthetic oligonucleotide
  Antisense strand to SEQ ID NO: 1397972
cuauucccauaugacauga

SEQ ID NO: 1397974 - RNA, 19 nt, Artificial Sequence
  Description of Artificial Sequence: Synthetic oligonucleotide
  Sense strand starting at position 3726 of SEQ ID NO: 1243143
caugucauaugggaauaga

SEQ ID NO: 1397975 - RNA, 19 nt, Artificial Sequence
  Description of Artificial Sequence: Synthetic oligonucleotide
  Antisense strand to SEQ ID NO: 1397974
ucuauucccauaugacaug

SEQ ID NO: 1397976 - RNA, 19 nt, Artificial Sequence
  Description of Artificial Sequence: Synthetic oligonucleotide
  Sense strand starting at position 3736 of SEQ ID NO: 1243143
gggaauagagacgguuuca

SEQ ID NO: 1397977 - RNA, 19 nt, Artificial Sequence
  Description of Artificial Sequence: Synthetic oligonucleotide
  Antisense strand to SEQ ID NO: 1397976
ugaaaccgucucuauuccc

SEQ ID NO: 1397978 - RNA, 19 nt, Artificial Sequence
  Description of Artificial Sequence: Synthetic oligonucleotide
  Sense strand starting at position 3801 of SEQ ID NO: 1243143
aguugcucugacuagaauu

SEQ ID NO: 1397979 - RNA, 19 nt, Artificial Sequence
  Description of Artificial Sequence: Synthetic oligonucleotide
  Antisense strand to SEQ ID NO: 1397978
aauucuagucagagcaacu

SEQ ID NO: 1397980 - RNA, 19 nt, Artificial Sequence
  Description of Artificial Sequence: Synthetic oligonucleotide
  Sense strand starting at position 3818 of SEQ ID NO: 1243143
uuugcaguacuaugguaua

SEQ ID NO: 1397981 - RNA, 19 nt, Artificial Sequence
  Description of Artificial Sequence: Synthetic oligonucleotide
  Antisense strand to SEQ ID NO: 1397980
uauaccauaguacugcaaa

SEQ ID NO: 1397982 - RNA, 19 nt, Artificial Sequence
  Description of Artificial Sequence: Synthetic oligonucleotide
  Sense strand starting at position 3821 of SEQ ID NO: 1243143
gcaguacuaugguauaaag

SEQ ID NO: 1397983 - RNA, 19 nt, Artificial Sequence
  Description of Artificial Sequence: Synthetic oligonucleotide
  Antisense strand to SEQ ID NO: 1397982
cuuuauaccauaguacugc

SEQ ID NO: 1397984 - RNA, 19 nt, Artificial Sequence
  Description of Artificial Sequence: Synthetic oligonucleotide
  Sense strand starting at position 3831 of SEQ ID NO: 1243143
gguauaaagaagugacuuu

SEQ ID NO: 1397985 - RNA, 19 nt, Artificial Sequence
  Description of Artificial Sequence: Synthetic oligonucleotide
  Antisense strand to SEQ ID NO: 1397984
aaagucacuucuuuauacc

SEQ ID NO: 1397986 - RNA, 19 nt, Artificial Sequence
  Description of Artificial Sequence: Synthetic oligonucleotide
  Sense strand starting at position 281 of SEQ ID NO: 1243144
cgacuuuccacaugaggaa

SEQ ID NO: 1397987 - RNA, 19 nt, Artificial Sequence
  Description of Artificial Sequence: Synthetic oligonucleotide
  Antisense strand to SEQ ID NO: 1397986
uuccucauguggaaagucg

SEQ ID NO: 1397988 - RNA, 19 nt, Artificial Sequence
  Description of Artificial Sequence: Synthetic oligonucleotide
  Sense strand starting at position 1993 of SEQ ID NO: 1243144
gugaaauucccacgugagc

SEQ ID NO: 1397989 - RNA, 19 nt, Artificial Sequence
  Description of Artificial Sequence: Synthetic oligonucleotide
  Antisense strand to SEQ ID NO: 1397988
gcucacgugggaauuucac

SEQ ID NO: 1397990 - RNA, 19 nt, Artificial Sequence
  Description of Artificial Sequence: Synthetic oligonucleotide
  Sense strand starting at position 2217 of SEQ ID NO: 1243144
augugagccuggucuguga

SEQ ID NO: 1397991 - RNA, 19 nt, Artificial Sequence
  Description of Artificial Sequence: Synthetic oligonucleotide
  Antisense strand to SEQ ID NO: 1397990
ucacagaccaggcucacau

SEQ ID NO: 1397992 - RNA, 19 nt, Artificial Sequence
  Description of Artificial Sequence: Synthetic oligonucleotide
  Sense strand starting at position 2219 of SEQ ID NO: 1243144
gugagccuggucugugaau

SEQ ID NO: 1397993 - RNA, 19 nt, Artificial Sequence
  Description of Artificial Sequence: Synthetic oligonucleotide
  Antisense strand to SEQ ID NO: 1397992
auucacagaccaggcucac

SEQ ID NO: 1397994 - RNA, 19 nt, Artificial Sequence
  Description of Artificial Sequence: Synthetic oligonucleotide
  Sense strand starting at position 2220 of SEQ ID NO: 1243144
ugagccuggucugugaauu

SEQ ID NO: 1397995 - RNA, 19 nt, Artificial Sequence
  Description of Artificial Sequence: Synthetic oligonucleotide
  Antisense strand to SEQ ID NO: 1397994
aauucacagaccaggcuca

SEQ ID NO: 1397996 - RNA, 19 nt, Artificial Sequence
  Description of Artificial Sequence: Synthetic oligonucleotide
  Sense strand starting at position 2221 of SEQ ID NO: 1243144
gagccuggucugugaauuu

SEQ ID NO: 1397997 - RNA, 19 nt, Artificial Sequence
  Description of Artificial Sequence: Synthetic oligonucleotide
  Antisense strand to SEQ ID NO: 1397996
aaauucacagaccaggcuc

SEQ ID NO: 1397998 - RNA, 19 nt, Artificial Sequence
  Description of Artificial Sequence: Synthetic oligonucleotide
  Sense strand starting at position 2255 of SEQ ID NO: 1243144
cgaccuuuauucucaaaug

SEQ ID NO: 1397999 - RNA, 19 nt, Artificial Sequence
  Description of Artificial Sequence: Synthetic oligonucleotide
  Antisense strand to SEQ ID NO: 1397998
cauuugagaauaaaggucg

SEQ ID NO: 1398000 - RNA, 19 nt, Artificial Sequence
  Description of Artificial Sequence: Synthetic oligonucleotide
  Sense strand starting at position 2283 of SEQ ID NO: 1243144
gugacugcauuccucuaau

SEQ ID NO: 1398001 - RNA, 19 nt, Artificial Sequence
  Description of Artificial Sequence: Synthetic oligonucleotide
  Antisense strand to SEQ ID NO: 1398000
auuagaggaaugcagucac

SEQ ID NO: 1398002 - RNA, 19 nt, Artificial Sequence
  Description of Artificial Sequence: Synthetic oligonucleotide
  Sense strand starting at position 2383 of SEQ ID NO: 1243144
acgguaauauuuggguaga

SEQ ID NO: 1398003 - RNA, 19 nt, Artificial Sequence
  Description of Artificial Sequence: Synthetic oligonucleotide
  Antisense strand to SEQ ID NO: 1398002
ucuacccaaauauuaccgu

SEQ ID NO: 1398004 - RNA, 19 nt, Artificial Sequence
  Description of Artificial Sequence: Synthetic oligonucleotide
  Sense strand starting at position 2384 of SEQ ID NO: 1243144
cgguaauauuuggguagau

SEQ ID NO: 1398005 - RNA, 19 nt, Artificial Sequence
  Description of Artificial Sequence: Synthetic oligonucleotide
  Antisense strand to SEQ ID NO: 1398004
aucuacccaaauauuaccg

SEQ ID NO: 1398006 - RNA, 19 nt, Artificial Sequence
  Description of Artificial Sequence: Synthetic oligonucleotide
  Sense strand starting at position 2406 of SEQ ID NO: 1243144
acagcaugcuacuauuuga

SEQ ID NO: 1398007 - RNA, 19 nt, Artificial Sequence
  Description of Artificial Sequence: Synthetic oligonucleotide
  Antisense strand to SEQ ID NO: 1398006
ucaaauaguagcaugcugu

SEQ ID NO: 1398008 - RNA, 19 nt, Artificial Sequence
  Description of Artificial Sequence: Synthetic oligonucleotide
  Sense strand starting at position 2444 of SEQ ID NO: 1243144
gcuagaacuuacuuaauga

SEQ ID NO: 1398009 - RNA, 19 nt, Artificial Sequence
  Description of Artificial Sequence: Synthetic oligonucleotide
  Antisense strand to SEQ ID NO: 1398008
ucauuaaguaaguucuagc

SEQ ID NO: 1398010 - RNA, 19 nt, Artificial Sequence
  Description of Artificial Sequence: Synthetic oligonucleotide
  Sense strand starting at position 2451 of SEQ ID NO: 1243144
cuuacuuaaugagucuuga

SEQ ID NO: 1398011 - RNA, 19 nt, Artificial Sequence
  Description of Artificial Sequence: Synthetic oligonucleotide
  Antisense strand to SEQ ID NO: 1398010
ucaagacucauuaaguaag

SEQ ID NO: 1398012 - RNA, 19 nt, Artificial Sequence
  Description of Artificial Sequence: Synthetic oligonucleotide
  Sense strand starting at position 2519 of SEQ ID NO: 1243144
ugaauuguccauugcaagu

SEQ ID NO: 1398013 - RNA, 19 nt, Artificial Sequence
  Description of Artificial Sequence: Synthetic oligonucleotide
  Antisense strand to SEQ ID NO: 1398012
acuugcaauggacaauuca

SEQ ID NO: 1398014 - RNA, 19 nt, Artificial Sequence
  Description of Artificial Sequence: Synthetic oligonucleotide
  Sense strand starting at position 2529 of SEQ ID NO: 1243144
auugcaaguguauaacaga

SEQ ID NO: 1398015 - RNA, 19 nt, Artificial Sequence
  Description of Artificial Sequence: Synthetic oligonucleotide
  Antisense strand to SEQ ID NO: 1398014
ucuguuauacacuugcaau

SEQ ID NO: 1398016 - RNA, 19 nt, Artificial Sequence
  Description of Artificial Sequence: Synthetic oligonucleotide
  Sense strand starting at position 2532 of SEQ ID NO: 1243144
gcaaguguauaacagacaa

SEQ ID NO: 1398017 - RNA, 19 nt, Artificial Sequence
  Description of Artificial Sequence: Synthetic oligonucleotide
  Antisense strand to SEQ ID NO: 1398016
uugucuguuauacacuugc

SEQ ID NO: 1398018 - RNA, 19 nt, Artificial Sequence
  Description of Artificial Sequence: Synthetic oligonucleotide
  Sense strand starting at position 2549 of SEQ ID NO: 1243144
aauugagguuuguuuguuu

SEQ ID NO: 1398019 - RNA, 19 nt, Artificial Sequence
  Description of Artificial Sequence: Synthetic oligonucleotide
  Antisense strand to SEQ ID NO: 1398018
aaacaaacaaaccucaauu

SEQ ID NO: 1398020 - RNA, 19 nt, Artificial Sequence
  Description of Artificial Sequence: Synthetic oligonucleotide
  Sense strand starting at position 2605 of SEQ ID NO: 1243144
gcaauaauggcauaucucu

SEQ ID NO: 1398021 - RNA, 19 nt, Artificial Sequence
  Description of Artificial Sequence: Synthetic oligonucleotide
  Antisense strand to SEQ ID NO: 1398020
agagauaugccauuauugc

SEQ ID NO: 1398022 - RNA, 19 nt, Artificial Sequence
  Description of Artificial Sequence: Synthetic oligonucleotide
  Sense strand starting at position 2612 of SEQ ID NO: 1243144
uggcauaucucugcucacu

SEQ ID NO: 1398023 - RNA, 19 nt, Artificial Sequence
  Description of Artificial Sequence: Synthetic oligonucleotide
  Antisense strand to SEQ ID NO: 1398022
agugagcagagauaugcca

SEQ ID NO: 1398024 - RNA, 19 nt, Artificial Sequence
  Description of Artificial Sequence: Synthetic oligonucleotide
  Sense strand starting at position 2859 of SEQ ID NO: 1243144
acaauugagcuuuguguau

SEQ ID NO: 1398025 - RNA, 19 nt, Artificial Sequence
  Description of Artificial Sequence: Synthetic oligonucleotide
  Antisense strand to SEQ ID NO: 1398024
auacacaaagcucaauugu

SEQ ID NO: 1398026 - RNA, 19 nt, Artificial Sequence
  Description of Artificial Sequence: Synthetic oligonucleotide
  Sense strand starting at position 2863 of SEQ ID NO: 1243144
uugagcuuuguguauugau

SEQ ID NO: 1398027 - RNA, 19 nt, Artificial Sequence
  Description of Artificial Sequence: Synthetic oligonucleotide
  Antisense strand to SEQ ID NO: 1398026
aucaauacacaaagcucaa

SEQ ID NO: 1398028 - RNA, 19 nt, Artificial Sequence
  Description of Artificial Sequence: Synthetic oligonucleotide
  Sense strand starting at position 2945 of SEQ ID NO: 1243144
ggaauuucuuuguauaaga

SEQ ID NO: 1398029 - RNA, 19 nt, Artificial Sequence
  Description of Artificial Sequence: Synthetic oligonucleotide
  Antisense strand to SEQ ID NO: 1398028
ucuuauacaaagaaauucc

SEQ ID NO: 1398030 - RNA, 19 nt, Artificial Sequence
  Description of Artificial Sequence: Synthetic oligonucleotide
  Sense strand starting at position 2953 of SEQ ID NO: 1243144
uuuguauaagauuguguca

SEQ ID NO: 1398031 - RNA, 19 nt, Artificial Sequence
  Description of Artificial Sequence: Synthetic oligonucleotide
  Antisense strand to SEQ ID NO: 1398030
ugacacaaucuuauacaaa

SEQ ID NO: 1398032 - RNA, 19 nt, Artificial Sequence
  Description of Artificial Sequence: Synthetic oligonucleotide
  Sense strand starting at position 2958 of SEQ ID NO: 1243144
auaagauugugucauaugg

SEQ ID NO: 1398033 - RNA, 19 nt, Artificial Sequence
  Description of Artificial Sequence: Synthetic oligonucleotide
  Antisense strand to SEQ ID NO: 1398032
ccauaugacacaaucuuau

SEQ ID NO: 1398034 - RNA, 19 nt, Artificial Sequence
  Description of Artificial Sequence: Synthetic oligonucleotide
  Sense strand starting at position 2960 of SEQ ID NO: 1243144
aagauugugucauauggag

SEQ ID NO: 1398035 - RNA, 19 nt, Artificial Sequence
  Description of Artificial Sequence: Synthetic oligonucleotide
  Antisense strand to SEQ ID NO: 1398034
cuccauaugacacaaucuu

SEQ ID NO: 1398036 - RNA, 19 nt, Artificial Sequence
  Description of Artificial Sequence: Synthetic oligonucleotide
  Sense strand starting at position 3284 of SEQ ID NO: 1243144
aacaucaugucauauggga

SEQ ID NO: 1398037 - RNA, 19 nt, Artificial Sequence
  Description of Artificial Sequence: Synthetic oligonucleotide
  Antisense strand to SEQ ID NO: 1398036
ucccauaugacaugauguu

SEQ ID NO: 1398038 - RNA, 19 nt, Artificial Sequence
  Description of Artificial Sequence: Synthetic oligonucleotide
  Sense strand starting at position 3288 of SEQ ID NO: 1243144
ucaugucauaugggaauag

SEQ ID NO: 1398039 - RNA, 19 nt, Artificial Sequence
  Description of Artificial Sequence: Synthetic oligonucleotide
  Antisense strand to SEQ ID NO: 1398038
cuauucccauaugacauga

SEQ ID NO: 1398040 - RNA, 19 nt, Artificial Sequence
  Description of Artificial Sequence: Synthetic oligonucleotide
  Sense strand starting at position 3289 of SEQ ID NO: 1243144
caugucauaugggaauaga

SEQ ID NO: 1398041 - RNA, 19 nt, Artificial Sequence
  Description of Artificial Sequence: Synthetic oligonucleotide
  Antisense strand to SEQ ID NO: 1398040
ucuauucccauaugacaug

SEQ ID NO: 1398042 - RNA, 19 nt, Artificial Sequence
  Description of Artificial Sequence: Synthetic oligonucleotide
  Sense strand starting at position 3299 of SEQ ID NO: 1243144
gggaauagagacgguuuca

SEQ ID NO: 1398043 - RNA, 19 nt, Artificial Sequence
  Description of Artificial Sequence: Synthetic oligonucleotide
  Antisense strand to SEQ ID NO: 1398042
ugaaaccgucucuauuccc

SEQ ID NO: 1398044 - RNA, 19 nt, Artificial Sequence
  Description of Artificial Sequence: Synthetic oligonucleotide
  Sense strand starting at position 3364 of SEQ ID NO: 1243144
aguugcucugacuagaauu

SEQ ID NO: 1398045 - RNA, 19 nt, Artificial Sequence
  Description of Artificial Sequence: Synthetic oligonucleotide
  Antisense strand to SEQ ID NO: 1398044
aauucuagucagagcaacu

SEQ ID NO: 1398046 - RNA, 19 nt, Artificial Sequence
  Description of Artificial Sequence: Synthetic oligonucleotide
  Sense strand starting at position 3381 of SEQ ID NO: 1243144
uuugcaguacuaugguaua

SEQ ID NO: 1398047 - RNA, 19 nt, Artificial Sequence
  Description of Artificial Sequence: Synthetic oligonucleotide
  Antisense strand to SEQ ID NO: 1398046
uauaccauaguacugcaaa

SEQ ID NO: 1398048 - RNA, 19 nt, Artificial Sequence
  Description of Artificial Sequence: Synthetic oligonucleotide
  Sense strand starting at position 3384 of SEQ ID NO: 1243144
gcaguacuaugguauaaag

SEQ ID NO: 1398049 - RNA, 19 nt, Artificial Sequence
  Description of Artificial Sequence: Synthetic oligonucleotide
  Antisense strand to SEQ ID NO: 1398048
cuuuauaccauaguacugc

SEQ ID NO: 1398050 - RNA, 19 nt, Artificial Sequence
  Description of Artificial Sequence: Synthetic oligonucleotide
  Sense strand starting at position 3394 of SEQ ID NO: 1243144
gguauaaagaagugacuuu

SEQ ID NO: 1398051 - RNA, 19 nt, Artificial Sequence
  Description of Artificial Sequence: Synthetic oligonucleotide
  Antisense strand to SEQ ID NO: 1398050
aaagucacuucuuuauacc

SEQ ID NO: 1398052 - RNA, 19 nt, Artificial Sequence
  Description of Artificial Sequence: Synthetic oligonucleotide
  Sense strand starting at position 3572 of SEQ ID NO: 1243144
augagugaaguguauagua

SEQ ID NO: 1398053 - RNA, 19 nt, Artificial Sequence
  Description of Artificial Sequence: Synthetic oligonucleotide
  Antisense strand to SEQ ID NO: 1398052
uacuauacacuucacucau

SEQ ID NO: 1398054 - RNA, 19 nt, Artificial Sequence
  Description of Artificial Sequence: Synthetic oligonucleotide
  Sense strand starting at position 3574 of SEQ ID NO: 1243144
gagugaaguguauaguaug

SEQ ID NO: 1398055 - RNA, 19 nt, Artificial Sequence
  Description of Artificial Sequence: Synthetic oligonucleotide
  Antisense strand to SEQ ID NO: 1398054
cauacuauacacuucacuc

SEQ ID NO: 1398056 - RNA, 19 nt, Artificial Sequence
  Description of Artificial Sequence: Synthetic oligonucleotide
  Sense strand starting at position 3579 of SEQ ID NO: 1243144
aaguguauaguaugucaau

SEQ ID NO: 1398057 - RNA, 19 nt, Artificial Sequence
  Description of Artificial Sequence: Synthetic oligonucleotide
  Antisense strand to SEQ ID NO: 1398056
auugacauacuauacacuu

SEQ ID NO: 1398058 - RNA, 19 nt, Artificial Sequence
  Description of Artificial Sequence: Synthetic oligonucleotide
  Sense strand starting at position 3580 of SEQ ID NO: 1243144
aguguauaguaugucaauu

SEQ ID NO: 1398059 - RNA, 19 nt, Artificial Sequence
  Description of Artificial Sequence: Synthetic oligonucleotide
  Antisense strand to SEQ ID NO: 1398058
aauugacauacuauacacu

SEQ ID NO: 1398060 - RNA, 19 nt, Artificial Sequence
  Description of Artificial Sequence: Synthetic oligonucleotide
  Sense strand starting at position 3591 of SEQ ID NO: 1243144
ugucaauuguaucccaaua

SEQ ID NO: 1398061 - RNA, 19 nt, Artificial Sequence
  Description of Artificial Sequence: Synthetic oligonucleotide
  Antisense strand to SEQ ID NO: 1398060
uauugggauacaauugaca

SEQ ID NO: 1398062 - RNA, 19 nt, Artificial Sequence
  Description of Artificial Sequence: Synthetic oligonucleotide
  Sense strand starting at position 3633 of SEQ ID NO: 1243144
cagauauuacuauagcgua

SEQ ID NO: 1398063 - RNA, 19 nt, Artificial Sequence
  Description of Artificial Sequence: Synthetic oligonucleotide
  Antisense strand to SEQ ID NO: 1398062
uacgcuauaguaauaucug

SEQ ID NO: 1398064 - RNA, 19 nt, Artificial Sequence
  Description of Artificial Sequence: Synthetic oligonucleotide
  Sense strand starting at position 3949 of SEQ ID NO: 1243144
gccacuauaucguacauuu

SEQ ID NO: 1398065 - RNA, 19 nt, Artificial Sequence
  Description of Artificial Sequence: Synthetic oligonucleotide
  Antisense strand to SEQ ID NO: 1398064
aaauguacgauauaguggc

SEQ ID NO: 1398066 - RNA, 19 nt, Artificial Sequence
  Description of Artificial Sequence: Synthetic oligonucleotide
  Sense strand starting at position 425 of SEQ ID NO: 1243145
cugugaugcccugaccuca

SEQ ID NO: 1398067 - RNA, 19 nt, Artificial Sequence
  Description of Artificial Sequence: Synthetic oligonucleotide
  Antisense strand to SEQ ID NO: 1398066
ugaggucagggcaucacag

SEQ ID NO: 1398068 - RNA, 19 nt, Artificial Sequence
  Description of Artificial Sequence: Synthetic oligonucleotide
  Sense strand starting at position 1268 of SEQ ID NO: 1243145
cgacuuuccacaugaggaa

SEQ ID NO: 1398069 - RNA, 19 nt, Artificial Sequence
  Description of Artificial Sequence: Synthetic oligonucleotide
  Antisense strand to SEQ ID NO: 1398068
uuccucauguggaaagucg

SEQ ID NO: 1398070 - RNA, 19 nt, Artificial Sequence
  Description of Artificial Sequence: Synthetic oligonucleotide
  Sense strand starting at position 1301 of SEQ ID NO: 1243145
cccugugucugaggugaau

SEQ ID NO: 1398071 - RNA, 19 nt, Artificial Sequence
  Description of Artificial Sequence: Synthetic oligonucleotide
  Antisense strand to SEQ ID NO: 1398070
auucaccucagacacaggg

SEQ ID NO: 1398072 - RNA, 19 nt, Artificial Sequence
  Description of Artificial Sequence: Synthetic oligonucleotide
  Sense strand starting at position 2978 of SEQ ID NO: 1243145
gggugaaauucccacguga

SEQ ID NO: 1398073 - RNA, 19 nt, Artificial Sequence
  Description of Artificial Sequence: Synthetic oligonucleotide
  Antisense strand to SEQ ID NO: 1398072
ucacgugggaauuucaccc

SEQ ID NO: 1398074 - RNA, 19 nt, Artificial Sequence
  Description of Artificial Sequence: Synthetic oligonucleotide
  Sense strand starting at position 2980 of SEQ ID NO: 1243145
gugaaauucccacgugagc

SEQ ID NO: 1398075 - RNA, 19 nt, Artificial Sequence
  Description of Artificial Sequence: Synthetic oligonucleotide
  Antisense strand to SEQ ID NO: 1398074
gcucacgugggaauuucac

SEQ ID NO: 1398076 - RNA, 19 nt, Artificial Sequence
  Description of Artificial Sequence: Synthetic oligonucleotide
  Sense strand starting at position 3204 of SEQ ID NO: 1243145
augugagccuggucuguga

SEQ ID NO: 1398077 - RNA, 19 nt, Artificial Sequence
  Description of Artificial Sequence: Synthetic oligonucleotide
  Antisense strand to SEQ ID NO: 1398076
ucacagaccaggcucacau

SEQ ID NO: 1398078 - RNA, 19 nt, Artificial Sequence
  Description of Artificial Sequence: Synthetic oligonucleotide
  Sense strand starting at position 3206 of SEQ ID NO: 1243145
gugagccuggucugugaau

SEQ ID NO: 1398079 - RNA, 19 nt, Artificial Sequence
  Description of Artificial Sequence: Synthetic oligonucleotide
  Antisense strand to SEQ ID NO: 1398078
auucacagaccaggcucac

SEQ ID NO: 1398080 - RNA, 19 nt, Artificial Sequence
  Description of Artificial Sequence: Synthetic oligonucleotide
  Sense strand starting at position 3207 of SEQ ID NO: 1243145
ugagccuggucugugaauu

SEQ ID NO: 1398081 - RNA, 19 nt, Artificial Sequence
  Description of Artificial Sequence: Synthetic oligonucleotide
  Antisense strand to SEQ ID NO: 1398080
aauucacagaccaggcuca

SEQ ID NO: 1398082 - RNA, 19 nt, Artificial Sequence
  Description of Artificial Sequence: Synthetic oligonucleotide
  Sense strand starting at position 3208 of SEQ ID NO: 1243145
gagccuggucugugaauuu

SEQ ID NO: 1398083 - RNA, 19 nt, Artificial Sequence
  Description of Artificial Sequence: Synthetic oligonucleotide
  Antisense strand to SEQ ID NO: 1398082
aaauucacagaccaggcuc

SEQ ID NO: 1398084 - RNA, 19 nt, Artificial Sequence
  Description of Artificial Sequence: Synthetic oligonucleotide
  Sense strand starting at position 3242 of SEQ ID NO: 1243145
cgaccuuuauucucaaaug

SEQ ID NO: 1398085 - RNA, 19 nt, Artificial Sequence
  Description of Artificial Sequence: Synthetic oligonucleotide
  Antisense strand to SEQ ID NO: 1398084
cauuugagaauaaaggucg

SEQ ID NO: 1398086 - RNA, 19 nt, Artificial Sequence
  Description of Artificial Sequence: Synthetic oligonucleotide
  Sense strand starting at position 3270 of SEQ ID NO: 1243145
gugacugcauuccucuaau

SEQ ID NO: 1398087 - RNA, 19 nt, Artificial Sequence
  Description of Artificial Sequence: Synthetic oligonucleotide
  Antisense strand to SEQ ID NO: 1398086
auuagaggaaugcagucac

SEQ ID NO: 1398088 - RNA, 19 nt, Artificial Sequence
  Description of Artificial Sequence: Synthetic oligonucleotide
  Sense strand starting at position 3370 of SEQ ID NO: 1243145
acgguaauauuuggguaga

SEQ ID NO: 1398089 - RNA, 19 nt, Artificial Sequence
  Description of Artificial Sequence: Synthetic oligonucleotide
  Antisense strand to SEQ ID NO: 1398088
ucuacccaaauauuaccgu

SEQ ID NO: 1398090 - RNA, 19 nt, Artificial Sequence
  Description of Artificial Sequence: Synthetic oligonucleotide
  Sense strand starting at position 3371 of SEQ ID NO: 1243145
cgguaauauuuggguagau

SEQ ID NO: 1398091 - RNA, 19 nt, Artificial Sequence
  Description of Artificial Sequence: Synthetic oligonucleotide
  Antisense strand to SEQ ID NO: 1398090
aucuacccaaauauuaccg

SEQ ID NO: 1398092 - RNA, 19 nt, Artificial Sequence
  Description of Artificial Sequence: Synthetic oligonucleotide
  Sense strand starting at position 3393 of SEQ ID NO: 1243145
acagcaugcuacuauuuga

SEQ ID NO: 1398093 - RNA, 19 nt, Artificial Sequence
  Description of Artificial Sequence: Synthetic oligonucleotide
  Antisense strand to SEQ ID NO: 1398092
ucaaauaguagcaugcugu

SEQ ID NO: 1398094 - RNA, 19 nt, Artificial Sequence
  Description of Artificial Sequence: Synthetic oligonucleotide
  Sense strand starting at position 3431 of SEQ ID NO: 1243145
gcuagaacuuacuuaauga

SEQ ID NO: 1398095 - RNA, 19 nt, Artificial Sequence
  Description of Artificial Sequence: Synthetic oligonucleotide
  Antisense strand to SEQ ID NO: 1398094
ucauuaaguaaguucuagc

SEQ ID NO: 1398096 - RNA, 19 nt, Artificial Sequence
  Description of Artificial Sequence: Synthetic oligonucleotide
  Sense strand starting at position 3438 of SEQ ID NO: 1243145
cuuacuuaaugagucuuga

SEQ ID NO: 1398097 - RNA, 19 nt, Artificial Sequence
  Description of Artificial Sequence: Synthetic oligonucleotide
  Antisense strand to SEQ ID NO: 1398096
ucaagacucauuaaguaag

SEQ ID NO: 1398098 - RNA, 19 nt, Artificial Sequence
  Description of Artificial Sequence: Synthetic oligonucleotide
  Sense strand starting at position 3506 of SEQ ID NO: 1243145
ugaauuguccauugcaagu

SEQ ID NO: 1398099 - RNA, 19 nt, Artificial Sequence
  Description of Artificial Sequence: Synthetic oligonucleotide
  Antisense strand to SEQ ID NO: 1398098
acuugcaauggacaauuca

SEQ ID NO: 1398100 - RNA, 19 nt, Artificial Sequence
  Description of Artificial Sequence: Synthetic oligonucleotide
  Sense strand starting at position 3516 of SEQ ID NO: 1243145
auugcaaguguauaacaga

SEQ ID NO: 1398101 - RNA, 19 nt, Artificial Sequence
  Description of Artificial Sequence: Synthetic oligonucleotide
  Antisense strand to SEQ ID NO: 1398100
ucuguuauacacuugcaau

SEQ ID NO: 1398102 - RNA, 19 nt, Artificial Sequence
  Description of Artificial Sequence: Synthetic oligonucleotide
  Sense strand starting at position 3519 of SEQ ID NO: 1243145
gcaaguguauaacagacaa

SEQ ID NO: 1398103 - RNA, 19 nt, Artificial Sequence
  Description of Artificial Sequence: Synthetic oligonucleotide
  Antisense strand to SEQ ID NO: 1398102
uugucuguuauacacuugc

SEQ ID NO: 1398104 - RNA, 19 nt, Artificial Sequence
  Description of Artificial Sequence: Synthetic oligonucleotide
  Sense strand starting at position 3536 of SEQ ID NO: 1243145
aauugagguuuguuuguuu

SEQ ID NO: 1398105 - RNA, 19 nt, Artificial Sequence
  Description of Artificial Sequence: Synthetic oligonucleotide
  Antisense strand to SEQ ID NO: 1398104
aaacaaacaaaccucaauu

SEQ ID NO: 1398106 - RNA, 19 nt, Artificial Sequence
  Description of Artificial Sequence: Synthetic oligonucleotide
  Sense strand starting at position 3590 of SEQ ID NO: 1243145
gugcaauaauggcauaucu

SEQ ID NO: 1398107 - RNA, 19 nt, Artificial Sequence
  Description of Artificial Sequence: Synthetic oligonucleotide
  Antisense strand to SEQ ID NO: 1398106
agauaugccauuauugcac

SEQ ID NO: 1398108 - RNA, 19 nt, Artificial Sequence
  Description of Artificial Sequence: Synthetic oligonucleotide
  Sense strand starting at position 3592 of SEQ ID NO: 1243145
gcaauaauggcauaucucu

SEQ ID NO: 1398109 - RNA, 19 nt, Artificial Sequence
  Description of Artificial Sequence: Synthetic oligonucleotide
  Antisense strand to SEQ ID NO: 1398108
agagauaugccauuauugc

SEQ ID NO: 1398110 - RNA, 19 nt, Artificial Sequence
  Description of Artificial Sequence: Synthetic oligonucleotide
  Sense strand starting at position 3599 of SEQ ID NO: 1243145
uggcauaucucugcucacu

SEQ ID NO: 1398111 - RNA, 19 nt, Artificial Sequence
  Description of Artificial Sequence: Synthetic oligonucleotide
  Antisense strand to SEQ ID NO: 1398110
agugagcagagauaugcca

SEQ ID NO: 1398112 - RNA, 19 nt, Artificial Sequence
  Description of Artificial Sequence: Synthetic oligonucleotide
  Sense strand starting at position 3846 of SEQ ID NO: 1243145
acaauugagcuuuguguau

SEQ ID NO: 1398113 - RNA, 19 nt, Artificial Sequence
  Description of Artificial Sequence: Synthetic oligonucleotide
  Antisense strand to SEQ ID NO: 1398112
auacacaaagcucaauugu

SEQ ID NO: 1398114 - RNA, 19 nt, Artificial Sequence
  Description of Artificial Sequence: Synthetic oligonucleotide
  Sense strand starting at position 3848 of SEQ ID NO: 1243145
aauugagcuuuguguauug

SEQ ID NO: 1398115 - RNA, 19 nt, Artificial Sequence
  Description of Artificial Sequence: Synthetic oligonucleotide
  Antisense strand to SEQ ID NO: 1398114
caauacacaaagcucaauu

SEQ ID NO: 1398116 - RNA, 19 nt, Artificial Sequence
  Description of Artificial Sequence: Synthetic oligonucleotide
  Sense strand starting at position 3850 of SEQ ID NO: 1243145
uugagcuuuguguauugau

SEQ ID NO: 1398117 - RNA, 19 nt, Artificial Sequence
  Description of Artificial Sequence: Synthetic oligonucleotide
  Antisense strand to SEQ ID NO: 1398116
aucaauacacaaagcucaa

SEQ ID NO: 1398118 - RNA, 19 nt, Artificial Sequence
  Description of Artificial Sequence: Synthetic oligonucleotide
  Sense strand starting at position 3853 of SEQ ID NO: 1243145
agcuuuguguauugaucuu

SEQ ID NO: 1398119 - RNA, 19 nt, Artificial Sequence
  Description of Artificial Sequence: Synthetic oligonucleotide
  Antisense strand to SEQ ID NO: 1398118
aagaucaauacacaaagcu

SEQ ID NO: 1398120 - RNA, 19 nt, Artificial Sequence
  Description of Artificial Sequence: Synthetic oligonucleotide
  Sense strand starting at position 3932 of SEQ ID NO: 1243145
ggaauuucuuuguauaaga

SEQ ID NO: 1398121 - RNA, 19 nt, Artificial Sequence
  Description of Artificial Sequence: Synthetic oligonucleotide
  Antisense strand to SEQ ID NO: 1398120
ucuuauacaaagaaauucc

SEQ ID NO: 1398122 - RNA, 19 nt, Artificial Sequence
  Description of Artificial Sequence: Synthetic oligonucleotide
  Sense strand starting at position 3940 of SEQ ID NO: 1243145
uuuguauaagauuguguca

SEQ ID NO: 1398123 - RNA, 19 nt, Artificial Sequence
  Description of Artificial Sequence: Synthetic oligonucleotide
  Antisense strand to SEQ ID NO: 1398122
ugacacaaucuuauacaaa

SEQ ID NO: 1398124 - RNA, 19 nt, Artificial Sequence
  Description of Artificial Sequence: Synthetic oligonucleotide
  Sense strand starting at position 3942 of SEQ ID NO: 1243145
uguauaagauugugucaua

SEQ ID NO: 1398125 - RNA, 19 nt, Artificial Sequence
  Description of Artificial Sequence: Synthetic oligonucleotide
  Antisense strand to SEQ ID NO: 1398124
uaugacacaaucuuauaca

SEQ ID NO: 1398126 - RNA, 19 nt, Artificial Sequence
  Description of Artificial Sequence: Synthetic oligonucleotide
  Sense strand starting at position 3945 of SEQ ID NO: 1243145
auaagauugugucauaugg

SEQ ID NO: 1398127 - RNA, 19 nt, Artificial Sequence
  Description of Artificial Sequence: Synthetic oligonucleotide
  Antisense strand to SEQ ID NO: 1398126
ccauaugacacaaucuuau

SEQ ID NO: 1398128 - RNA, 19 nt, Artificial Sequence
  Description of Artificial Sequence: Synthetic oligonucleotide
  Sense strand starting at position 3947 of SEQ ID NO: 1243145
aagauugugucauauggag

SEQ ID NO: 1398129 - RNA, 19 nt, Artificial Sequence
  Description of Artificial Sequence: Synthetic oligonucleotide
  Antisense strand to SEQ ID NO: 1398128
cuccauaugacacaaucuu

SEQ ID NO: 1398130 - RNA, 19 nt, Artificial Sequence
  Description of Artificial Sequence: Synthetic oligonucleotide
  Sense strand starting at position 49 of SEQ ID NO: 1243146
ggaguaacuguucacgggu

SEQ ID NO: 1398131 - RNA, 19 nt, Artificial Sequence
  Description of Artificial Sequence: Synthetic oligonucleotide
  Antisense strand to SEQ ID NO: 1398130
acccgugaacaguuacucc

SEQ ID NO: 1398132 - RNA, 19 nt, Artificial Sequence
  Description of Artificial Sequence: Synthetic oligonucleotide
  Sense strand starting at position 207 of SEQ ID NO: 1243146
uagcuauaggugcaugaca

SEQ ID NO: 1398133 - RNA, 19 nt, Artificial Sequence
  Description of Artificial Sequence: Synthetic oligonucleotide
  Antisense strand to SEQ ID NO: 1398132
ugucaugcaccuauagcua

SEQ ID NO: 1398134 - RNA, 19 nt, Artificial Sequence
  Description of Artificial Sequence: Synthetic oligonucleotide
  Sense strand starting at position 447 of SEQ ID NO: 1243146
acuagaaaccagugaguug

SEQ ID NO: 1398135 - RNA, 19 nt, Artificial Sequence
  Description of Artificial Sequence: Synthetic oligonucleotide
  Antisense strand to SEQ ID NO: 1398134
caacucacugguuucuagu

SEQ ID NO: 1398136 - RNA, 19 nt, Artificial Sequence
  Description of Artificial Sequence: Synthetic oligonucleotide
  Sense strand starting at position 456 of SEQ ID NO: 1243146
cagugaguugcacacuuua

SEQ ID NO: 1398137 - RNA, 19 nt, Artificial Sequence
  Description of Artificial Sequence: Synthetic oligonucleotide
  Antisense strand to SEQ ID NO: 1398136
uaaagugugcaacucacug

SEQ ID NO: 1398138 - RNA, 19 nt, Artificial Sequence
  Description of Artificial Sequence: Synthetic oligonucleotide
  Sense strand starting at position 479 of SEQ ID NO: 1243146
gguagauuguauaguacgu

SEQ ID NO: 1398139 - RNA, 19 nt, Artificial Sequence
  Description of Artificial Sequence: Synthetic oligonucleotide
  Antisense strand to SEQ ID NO: 1398138
acguacuauacaaucuacc

SEQ ID NO: 1398140 - RNA, 19 nt, Artificial Sequence
  Description of Artificial Sequence: Synthetic oligonucleotide
  Sense strand starting at position 483 of SEQ ID NO: 1243146
gauuguauaguacgugaau

SEQ ID NO: 1398141 - RNA, 19 nt, Artificial Sequence
  Description of Artificial Sequence: Synthetic oligonucleotide
  Antisense strand to SEQ ID NO: 1398140
auucacguacuauacaauc

SEQ ID NO: 1398142 - RNA, 19 nt, Artificial Sequence
  Description of Artificial Sequence: Synthetic oligonucleotide
  Sense strand starting at position 484 of SEQ ID NO: 1243146
auuguauaguacgugaauu

SEQ ID NO: 1398143 - RNA, 19 nt, Artificial Sequence
  Description of Artificial Sequence: Synthetic oligonucleotide
  Antisense strand to SEQ ID NO: 1398142
aauucacguacuauacaau

SEQ ID NO: 1398144 - RNA, 19 nt, Artificial Sequence
  Description of Artificial Sequence: Synthetic oligonucleotide
  Sense strand starting at position 485 of SEQ ID NO: 1243146
uuguauaguacgugaauua

SEQ ID NO: 1398145 - RNA, 19 nt, Artificial Sequence
  Description of Artificial Sequence: Synthetic oligonucleotide
  Antisense strand to SEQ ID NO: 1398144
uaauucacguacuauacaa

SEQ ID NO: 1398146 - RNA, 19 nt, Artificial Sequence
  Description of Artificial Sequence: Synthetic oligonucleotide
  Sense strand starting at position 509 of SEQ ID NO: 1243146
caauaaagcuguuagagau

SEQ ID NO: 1398147 - RNA, 19 nt, Artificial Sequence
  Description of Artificial Sequence: Synthetic oligonucleotide
  Antisense strand to SEQ ID NO: 1398146
aucucuaacagcuuuauug

SEQ ID NO: 1398148 - RNA, 19 nt, Artificial Sequence
  Description of Artificial Sequence: Synthetic oligonucleotide
  Sense strand starting at position 599 of SEQ ID NO: 1243146
uaucuacucuggcaggaua

SEQ ID NO: 1398149 - RNA, 19 nt, Artificial Sequence
  Description of Artificial Sequence: Synthetic oligonucleotide
  Antisense strand to SEQ ID NO: 1398148
uauccugccagaguagaua

SEQ ID NO: 1398150 - RNA, 19 nt, Artificial Sequence
  Description of Artificial Sequence: Synthetic oligonucleotide
  Sense strand starting at position 601 of SEQ ID NO: 1243146
ucuacucuggcaggauauu

SEQ ID NO: 1398151 - RNA, 19 nt, Artificial Sequence
  Description of Artificial Sequence: Synthetic oligonucleotide
  Antisense strand to SEQ ID NO: 1398150
aauauccugccagaguaga

SEQ ID NO: 1398152 - RNA, 19 nt, Artificial Sequence
  Description of Artificial Sequence: Synthetic oligonucleotide
  Sense strand starting at position 1240 of SEQ ID NO: 1243146
ggacgagaaugggacgaau

SEQ ID NO: 1398153 - RNA, 19 nt, Artificial Sequence
  Description of Artificial Sequence: Synthetic oligonucleotide
  Antisense strand to SEQ ID NO: 1398152
auucgucccauucucgucc

SEQ ID NO: 1398154 - RNA, 19 nt, Artificial Sequence
  Description of Artificial Sequence: Synthetic oligonucleotide
  Sense strand starting at position 1345 of SEQ ID NO: 1243146
uugucuaugcaucgaguau

SEQ ID NO: 1398155 - RNA, 19 nt, Artificial Sequence
  Description of Artificial Sequence: Synthetic oligonucleotide
  Antisense strand to SEQ ID NO: 1398154
auacucgaugcauagacaa

SEQ ID NO: 1398156 - RNA, 19 nt, Artificial Sequence
  Description of Artificial Sequence: Synthetic oligonucleotide
  Sense strand starting at position 1346 of SEQ ID NO: 1243146
ugucuaugcaucgaguaug

SEQ ID NO: 1398157 - RNA, 19 nt, Artificial Sequence
  Description of Artificial Sequence: Synthetic oligonucleotide
  Antisense strand to SEQ ID NO: 1398156
cauacucgaugcauagaca

SEQ ID NO: 1398158 - RNA, 19 nt, Artificial Sequence
  Description of Artificial Sequence: Synthetic oligonucleotide
  Sense strand starting at position 1349 of SEQ ID NO: 1243146
cuaugcaucgaguaugugu

SEQ ID NO: 1398159 - RNA, 19 nt, Artificial Sequence
  Description of Artificial Sequence: Synthetic oligonucleotide
  Antisense strand to SEQ ID NO: 1398158
acacauacucgaugcauag

SEQ ID NO: 1398160 - RNA, 19 nt, Artificial Sequence
  Description of Artificial Sequence: Synthetic oligonucleotide
  Sense strand starting at position 1398 of SEQ ID NO: 1243146
gacgccugucccgagauau

SEQ ID NO: 1398161 - RNA, 19 nt, Artificial Sequence
  Description of Artificial Sequence: Synthetic oligonucleotide
  Antisense strand to SEQ ID NO: 1398160
auaucucgggacaggcguc

SEQ ID NO: 1398162 - RNA, 19 nt, Artificial Sequence
  Description of Artificial Sequence: Synthetic oligonucleotide
  Sense strand starting at position 1960 of SEQ ID NO: 1243146
gcgucaggcaaagauaauu

SEQ ID NO: 1398163 - RNA, 19 nt, Artificial Sequence
  Description of Artificial Sequence: Synthetic oligonucleotide
  Antisense strand to SEQ ID NO: 1398162
aauuaucuuugccugacgc

SEQ ID NO: 1398164 - RNA, 19 nt, Artificial Sequence
  Description of Artificial Sequence: Synthetic oligonucleotide
  Sense strand starting at position 1978 of SEQ ID NO: 1243146
uaaagcuauguccaugagu

SEQ ID NO: 1398165 - RNA, 19 nt, Artificial Sequence
  Description of Artificial Sequence: Synthetic oligonucleotide
  Antisense strand to SEQ ID NO: 1398164
acucauggacauagcuuua

SEQ ID NO: 1398166 - RNA, 19 nt, Artificial Sequence
  Description of Artificial Sequence: Synthetic oligonucleotide
  Sense strand starting at position 1980 of SEQ ID NO: 1243146
aagcuauguccaugagucu

SEQ ID NO: 1398167 - RNA, 19 nt, Artificial Sequence
  Description of Artificial Sequence: Synthetic oligonucleotide
  Antisense strand to SEQ ID NO: 1398166
agacucauggacauagcuu

SEQ ID NO: 1398168 - RNA, 19 nt, Artificial Sequence
  Description of Artificial Sequence: Synthetic oligonucleotide
  Sense strand starting at position 1981 of SEQ ID NO: 1243146
agcuauguccaugagucuu

SEQ ID NO: 1398169 - RNA, 19 nt, Artificial Sequence
  Description of Artificial Sequence: Synthetic oligonucleotide
  Antisense strand to SEQ ID NO: 1398168
aagacucauggacauagcu

SEQ ID NO: 1398170 - RNA, 19 nt, Artificial Sequence
  Description of Artificial Sequence: Synthetic oligonucleotide
  Sense strand starting at position 1983 of SEQ ID NO: 1243146
cuauguccaugagucuuau

SEQ ID NO: 1398171 - RNA, 19 nt, Artificial Sequence
  Description of Artificial Sequence: Synthetic oligonucleotide
  Antisense strand to SEQ ID NO: 1398170
auaagacucauggacauag

SEQ ID NO: 1398172 - RNA, 19 nt, Artificial Sequence
  Description of Artificial Sequence: Synthetic oligonucleotide
  Sense strand starting at position 1989 of SEQ ID NO: 1243146
ccaugagucuuaucccuug

SEQ ID NO: 1398173 - RNA, 19 nt, Artificial Sequence
  Description of Artificial Sequence: Synthetic oligonucleotide
  Antisense strand to SEQ ID NO: 1398172
caagggauaagacucaugg

SEQ ID NO: 1398174 - RNA, 19 nt, Artificial Sequence
  Description of Artificial Sequence: Synthetic oligonucleotide
  Sense strand starting at position 2007 of SEQ ID NO: 1243146
gaggccuuguccgcuugau

SEQ ID NO: 1398175 - RNA, 19 nt, Artificial Sequence
  Description of Artificial Sequence: Synthetic oligonucleotide
  Antisense strand to SEQ ID NO: 1398174
aucaagcggacaaggccuc

SEQ ID NO: 1398176 - RNA, 19 nt, Artificial Sequence
  Description of Artificial Sequence: Synthetic oligonucleotide
  Sense strand starting at position 2009 of SEQ ID NO: 1243146
ggccuuguccgcuugauau

SEQ ID NO: 1398177 - RNA, 19 nt, Artificial Sequence
  Description of Artificial Sequence: Synthetic oligonucleotide
  Antisense strand to SEQ ID NO: 1398176
auaucaagcggacaaggcc

SEQ ID NO: 1398178 - RNA, 19 nt, Artificial Sequence
  Description of Artificial Sequence: Synthetic oligonucleotide
  Sense strand starting at position 2011 of SEQ ID NO: 1243146
ccuuguccgcuugauauuu

SEQ ID NO: 1398179 - RNA, 19 nt, Artificial Sequence
  Description of Artificial Sequence: Synthetic oligonucleotide
  Antisense strand to SEQ ID NO: 1398178
aaauaucaagcggacaagg

SEQ ID NO: 1398180 - RNA, 19 nt, Artificial Sequence
  Description of Artificial Sequence: Synthetic oligonucleotide
  Sense strand starting at position 2783 of SEQ ID NO: 1243146
cuguaauugcagugauuug

SEQ ID NO: 1398181 - RNA, 19 nt, Artificial Sequence
  Description of Artificial Sequence: Synthetic oligonucleotide
  Antisense strand to SEQ ID NO: 1398180
caaaucacugcaauuacag

SEQ ID NO: 1398182 - RNA, 19 nt, Artificial Sequence
  Description of Artificial Sequence: Synthetic oligonucleotide
  Sense strand starting at position 3076 of SEQ ID NO: 1243146
cuguuugaagaaugcgaau

SEQ ID NO: 1398183 - RNA, 19 nt, Artificial Sequence
  Description of Artificial Sequence: Synthetic oligonucleotide
  Antisense strand to SEQ ID NO: 1398182
auucgcauucuucaaacag

SEQ ID NO: 1398184 - RNA, 19 nt, Artificial Sequence
  Description of Artificial Sequence: Synthetic oligonucleotide
  Sense strand starting at position 3078 of SEQ ID NO: 1243146
guuugaagaaugcgaauaa

SEQ ID NO: 1398185 - RNA, 19 nt, Artificial Sequence
  Description of Artificial Sequence: Synthetic oligonucleotide
  Antisense strand to SEQ ID NO: 1398184
uuauucgcauucuucaaac

SEQ ID NO: 1398186 - RNA, 19 nt, Artificial Sequence
  Description of Artificial Sequence: Synthetic oligonucleotide
  Sense strand starting at position 3079 of SEQ ID NO: 1243146
uuugaagaaugcgaauaau

SEQ ID NO: 1398187 - RNA, 19 nt, Artificial Sequence
  Description of Artificial Sequence: Synthetic oligonucleotide
  Antisense strand to SEQ ID NO: 1398186
auuauucgcauucuucaaa

SEQ ID NO: 1398188 - RNA, 19 nt, Artificial Sequence
  Description of Artificial Sequence: Synthetic oligonucleotide
  Sense strand starting at position 3082 of SEQ ID NO: 1243146
gaagaaugcgaauaaugca

SEQ ID NO: 1398189 - RNA, 19 nt, Artificial Sequence
  Description of Artificial Sequence: Synthetic oligonucleotide
  Antisense strand to SEQ ID NO: 1398188
ugcauuauucgcauucuuc

SEQ ID NO: 1398190 - RNA, 19 nt, Artificial Sequence
  Description of Artificial Sequence: Synthetic oligonucleotide
  Sense strand starting at position 3121 of SEQ ID NO: 1243146
acugguaaccgagguguca

SEQ ID NO: 1398191 - RNA, 19 nt, Artificial Sequence
  Description of Artificial Sequence: Synthetic oligonucleotide
  Antisense strand to SEQ ID NO: 1398190
ugacaccucgguuaccagu

SEQ ID NO: 1398192 - RNA, 19 nt, Artificial Sequence
  Description of Artificial Sequence: Synthetic oligonucleotide
  Sense strand starting at position 3123 of SEQ ID NO: 1243146
ugguaaccgaggugucaga

SEQ ID NO: 1398193 - RNA, 19 nt, Artificial Sequence
  Description of Artificial Sequence: Synthetic oligonucleotide
  Antisense strand to SEQ ID NO: 1398192
ucugacaccucgguuacca

SEQ ID NO: 1398194 - RNA, 19 nt, Artificial Sequence
  Description of Artificial Sequence: Synthetic oligonucleotide
  Sense strand starting at position 3132 of SEQ ID NO: 1243146
aggugucagaguugagacu

SEQ ID NO: 1398195 - RNA, 19 nt, Artificial Sequence
  Description of Artificial Sequence: Synthetic oligonucleotide
  Antisense strand to SEQ ID NO: 1398194
agucucaacucugacaccu

SEQ ID NO: 1398196 - RNA, 19 nt, Artificial Sequence
  Description of Artificial Sequence: Synthetic oligonucleotide
  Sense strand starting at position 3146 of SEQ ID NO: 1243146
agacucaguuucgcagauu

SEQ ID NO: 1398197 - RNA, 19 nt, Artificial Sequence
  Description of Artificial Sequence: Synthetic oligonucleotide
  Antisense strand to SEQ ID NO: 1398196
aaucugcgaaacugagucu

SEQ ID NO: 1398198 - RNA, 19 nt, Artificial Sequence
  Description of Artificial Sequence: Synthetic oligonucleotide
  Sense strand starting at position 3149 of SEQ ID NO: 1243146
cucaguuucgcagauugca

SEQ ID NO: 1398199 - RNA, 19 nt, Artificial Sequence
  Description of Artificial Sequence: Synthetic oligonucleotide
  Antisense strand to SEQ ID NO: 1398198
ugcaaucugcgaaacugag

SEQ ID NO: 1398200 - RNA, 19 nt, Artificial Sequence
  Description of Artificial Sequence: Synthetic oligonucleotide
  Sense strand starting at position 3157 of SEQ ID NO: 1243146
cgcagauugcauuggcaag

SEQ ID NO: 1398201 - RNA, 19 nt, Artificial Sequence
  Description of Artificial Sequence: Synthetic oligonucleotide
  Antisense strand to SEQ ID NO: 1398200
cuugccaaugcaaucugcg

SEQ ID NO: 1398202 - RNA, 19 nt, Artificial Sequence
  Description of Artificial Sequence: Synthetic oligonucleotide
  Sense strand starting at position 3158 of SEQ ID NO: 1243146
gcagauugcauuggcaagu

SEQ ID NO: 1398203 - RNA, 19 nt, Artificial Sequence
  Description of Artificial Sequence: Synthetic oligonucleotide
  Antisense strand to SEQ ID NO: 1398202
acuugccaaugcaaucugc

SEQ ID NO: 1398204 - RNA, 19 nt, Artificial Sequence
  Description of Artificial Sequence: Synthetic oligonucleotide
  Sense strand starting at position 3227 of SEQ ID NO: 1243146
guggauguacaaggauuaa

SEQ ID NO: 1398205 - RNA, 19 nt, Artificial Sequence
  Description of Artificial Sequence: Synthetic oligonucleotide
  Antisense strand to SEQ ID NO: 1398204
uuaauccuuguacauccac

SEQ ID NO: 1398206 - RNA, 19 nt, Artificial Sequence
  Description of Artificial Sequence: Synthetic oligonucleotide
  Sense strand starting at position 3297 of SEQ ID NO: 1243146
ggcucuugugaacacuagu

SEQ ID NO: 1398207 - RNA, 19 nt, Artificial Sequence
  Description of Artificial Sequence: Synthetic oligonucleotide
  Antisense strand to SEQ ID NO: 1398206
acuaguguucacaagagcc

SEQ ID NO: 1398208 - RNA, 19 nt, Artificial Sequence
  Description of Artificial Sequence: Synthetic oligonucleotide
  Sense strand starting at position 3300 of SEQ ID NO: 1243146
ucuugugaacacuaguguu

SEQ ID NO: 1398209 - RNA, 19 nt, Artificial Sequence
  Description of Artificial Sequence: Synthetic oligonucleotide
  Antisense strand to SEQ ID NO: 1398208
aacacuaguguucacaaga

SEQ ID NO: 1398210 - RNA, 19 nt, Artificial Sequence
  Description of Artificial Sequence: Synthetic oligonucleotide
  Sense strand starting at position 320 of SEQ ID NO: 1243147
uguaguagucuaugaggaa

SEQ ID NO: 1398211 - RNA, 19 nt, Artificial Sequence
  Description of Artificial Sequence: Synthetic oligonucleotide
  Antisense strand to SEQ ID NO: 1398210
uuccucauagacuacuaca

SEQ ID NO: 1398212 - RNA, 19 nt, Artificial Sequence
  Description of Artificial Sequence: Synthetic oligonucleotide
  Sense strand starting at position 350 of SEQ ID NO: 1243147
gugcuuaaugcauaauaca

SEQ ID NO: 1398213 - RNA, 19 nt, Artificial Sequence
  Description of Artificial Sequence: Synthetic oligonucleotide
  Antisense strand to SEQ ID NO: 1398212
uguauuaugcauuaagcac

SEQ ID NO: 1398214 - RNA, 19 nt, Artificial Sequence
  Description of Artificial Sequence: Synthetic oligonucleotide
  Sense strand starting at position 378 of SEQ ID NO: 1243147
gcuguuauucuccagaguc

SEQ ID NO: 1398215 - RNA, 19 nt, Artificial Sequence
  Description of Artificial Sequence: Synthetic oligonucleotide
  Antisense strand to SEQ ID NO: 1398214
gacucuggagaauaacagc

SEQ ID NO: 1398216 - RNA, 19 nt, Artificial Sequence
  Description of Artificial Sequence: Synthetic oligonucleotide
  Sense strand starting at position 380 of SEQ ID NO: 1243147
uguuauucuccagagucau

SEQ ID NO: 1398217 - RNA, 19 nt, Artificial Sequence
  Description of Artificial Sequence: Synthetic oligonucleotide
  Antisense strand to SEQ ID NO: 1398216
augacucuggagaauaaca

SEQ ID NO: 1398218 - RNA, 19 nt, Artificial Sequence
  Description of Artificial Sequence: Synthetic oligonucleotide
  Sense strand starting at position 469 of SEQ ID NO: 1243147
cuagguauauugcucuuau

SEQ ID NO: 1398219 - RNA, 19 nt, Artificial Sequence
  Description of Artificial Sequence: Synthetic oligonucleotide
  Antisense strand to SEQ ID NO: 1398218
auaagagcaauauaccuag

SEQ ID NO: 1398220 - RNA, 19 nt, Artificial Sequence
  Description of Artificial Sequence: Synthetic oligonucleotide
  Sense strand starting at position 558 of SEQ ID NO: 1243147
aaagcuuuauguguuaaug

SEQ ID NO: 1398221 - RNA, 19 nt, Artificial Sequence
  Description of Artificial Sequence: Synthetic oligonucleotide
  Antisense strand to SEQ ID NO: 1398220
cauuaacacauaaagcuuu

SEQ ID NO: 1398222 - RNA, 19 nt, Artificial Sequence
  Description of Artificial Sequence: Synthetic oligonucleotide
  Sense strand starting at position 612 of SEQ ID NO: 1243147
aguauuuccucggaaagau

SEQ ID NO: 1398223 - RNA, 19 nt, Artificial Sequence
  Description of Artificial Sequence: Synthetic oligonucleotide
  Antisense strand to SEQ ID NO: 1398222
aucuuuccgaggaaauacu

SEQ ID NO: 1398224 - RNA, 19 nt, Artificial Sequence
  Description of Artificial Sequence: Synthetic oligonucleotide
  Sense strand starting at position 630 of SEQ ID NO: 1243147
uuuaguaaguuggcaaaga

SEQ ID NO: 1398225 - RNA, 19 nt, Artificial Sequence
  Description of Artificial Sequence: Synthetic oligonucleotide
  Antisense strand to SEQ ID NO: 1398224
ucuuugccaacuuacuaaa

SEQ ID NO: 1398226 - RNA, 19 nt, Artificial Sequence
  Description of Artificial Sequence: Synthetic oligonucleotide
  Sense strand starting at position 658 of SEQ ID NO: 1243147
uacuaaguugguggagaaa

SEQ ID NO: 1398227 - RNA, 19 nt, Artificial Sequence
  Description of Artificial Sequence: Synthetic oligonucleotide
  Antisense strand to SEQ ID NO: 1398226
uuucuccaccaacuuagua

SEQ ID NO: 1398228 - RNA, 19 nt, Artificial Sequence
  Description of Artificial Sequence: Synthetic oligonucleotide
  Sense strand starting at position 757 of SEQ ID NO: 1243147
gggccuuuccuggguauca

SEQ ID NO: 1398229 - RNA, 19 nt, Artificial Sequence
  Description of Artificial Sequence: Synthetic oligonucleotide
  Antisense strand to SEQ ID NO: 1398228
ugauacccaggaaaggccc

SEQ ID NO: 1398230 - RNA, 19 nt, Artificial Sequence
  Description of Artificial Sequence: Synthetic oligonucleotide
  Sense strand starting at position 1197 of SEQ ID NO: 1243147
agaucuuuguauccaguca

SEQ ID NO: 1398231 - RNA, 19 nt, Artificial Sequence
  Description of Artificial Sequence: Synthetic oligonucleotide
  Antisense strand to SEQ ID NO: 1398230
ugacuggauacaaagaucu

SEQ ID NO: 1398232 - RNA, 19 nt, Artificial Sequence
  Description of Artificial Sequence: Synthetic oligonucleotide
  Sense strand starting at position 1420 of SEQ ID NO: 1243147
auuugaaugcuaugcccga

SEQ ID NO: 1398233 - RNA, 19 nt, Artificial Sequence
  Description of Artificial Sequence: Synthetic oligonucleotide
  Antisense strand to SEQ ID NO: 1398232
ucgggcauagcauucaaau

SEQ ID NO: 1398234 - RNA, 19 nt, Artificial Sequence
  Description of Artificial Sequence: Synthetic oligonucleotide
  Sense strand starting at position 1425 of SEQ ID NO: 1243147
aaugcuaugcccgagagca

SEQ ID NO: 1398235 - RNA, 19 nt, Artificial Sequence
  Description of Artificial Sequence: Synthetic oligonucleotide
  Antisense strand to SEQ ID NO: 1398234
ugcucucgggcauagcauu

SEQ ID NO: 1398236 - RNA, 19 nt, Artificial Sequence
  Description of Artificial Sequence: Synthetic oligonucleotide
  Sense strand starting at position 1427 of SEQ ID NO: 1243147
ugcuaugcccgagagcaua

SEQ ID NO: 1398237 - RNA, 19 nt, Artificial Sequence
  Description of Artificial Sequence: Synthetic oligonucleotide
  Antisense strand to SEQ ID NO: 1398236
uaugcucucgggcauagca

SEQ ID NO: 1398238 - RNA, 19 nt, Artificial Sequence
  Description of Artificial Sequence: Synthetic oligonucleotide
  Sense strand starting at position 1501 of SEQ ID NO: 1243147
cuagaaagugcuggcucua

SEQ ID NO: 1398239 - RNA, 19 nt, Artificial Sequence
  Description of Artificial Sequence: Synthetic oligonucleotide
  Antisense strand to SEQ ID NO: 1398238
uagagccagcacuuucuag

SEQ ID NO: 1398240 - RNA, 19 nt, Artificial Sequence
  Description of Artificial Sequence: Synthetic oligonucleotide
  Sense strand starting at position 1506 of SEQ ID NO: 1243147
aagugcuggcucuaaaucu

SEQ ID NO: 1398241 - RNA, 19 nt, Artificial Sequence
  Description of Artificial Sequence: Synthetic oligonucleotide
  Antisense strand to SEQ ID NO: 1398240
agauuuagagccagcacuu

SEQ ID NO: 1398242 - RNA, 19 nt, Artificial Sequence
  Description of Artificial Sequence: Synthetic oligonucleotide
  Sense strand starting at position 1737 of SEQ ID NO: 1243147
uguaaauguucuucccgau

SEQ ID NO: 1398243 - RNA, 19 nt, Artificial Sequence
  Description of Artificial Sequence: Synthetic oligonucleotide
  Antisense strand to SEQ ID NO: 1398242
aucgggaagaacauuuaca

SEQ ID NO: 1398244 - RNA, 19 nt, Artificial Sequence
  Description of Artificial Sequence: Synthetic oligonucleotide
  Sense strand starting at position 1752 of SEQ ID NO: 1243147
cgauguccugcggacagaa

SEQ ID NO: 1398245 - RNA, 19 nt, Artificial Sequence
  Description of Artificial Sequence: Synthetic oligonucleotide
  Antisense strand to SEQ ID NO: 1398244
uucuguccgcaggacaucg

SEQ ID NO: 1398246 - RNA, 19 nt, Artificial Sequence
  Description of Artificial Sequence: Synthetic oligonucleotide
  Sense strand starting at position 2110 of SEQ ID NO: 1243147
cccgcauagccagagaagu

SEQ ID NO: 1398247 - RNA, 19 nt, Artificial Sequence
  Description of Artificial Sequence: Synthetic oligonucleotide
  Antisense strand to SEQ ID NO: 1398246
acuucucuggcuaugcggg

SEQ ID NO: 1398248 - RNA, 19 nt, Artificial Sequence
  Description of Artificial Sequence: Synthetic oligonucleotide
  Sense strand starting at position 2359 of SEQ ID NO: 1243147
cuguauauauucuuauggu

SEQ ID NO: 1398249 - RNA, 19 nt, Artificial Sequence
  Description of Artificial Sequence: Synthetic oligonucleotide
  Antisense strand to SEQ ID NO: 1398248
accauaagaauauauacag

SEQ ID NO: 1398250 - RNA, 19 nt, Artificial Sequence
  Description of Artificial Sequence: Synthetic oligonucleotide
  Sense strand starting at position 2482 of SEQ ID NO: 1243147
gcugcauuacugcuccagu

SEQ ID NO: 1398251 - RNA, 19 nt, Artificial Sequence
  Description of Artificial Sequence: Synthetic oligonucleotide
  Antisense strand to SEQ ID NO: 1398250
acuggagcaguaaugcagc

SEQ ID NO: 1398252 - RNA, 19 nt, Artificial Sequence
  Description of Artificial Sequence: Synthetic oligonucleotide
  Sense strand starting at position 2491 of SEQ ID NO: 1243147
cugcuccaguucucagaaa

SEQ ID NO: 1398253 - RNA, 19 nt, Artificial Sequence
  Description of Artificial Sequence: Synthetic oligonucleotide
  Antisense strand to SEQ ID NO: 1398252
uuucugagaacuggagcag

SEQ ID NO: 1398254 - RNA, 19 nt, Artificial Sequence
  Description of Artificial Sequence: Synthetic oligonucleotide
  Sense strand starting at position 2629 of SEQ ID NO: 1243147
cccuguucccaagauugua

SEQ ID NO: 1398255 - RNA, 19 nt, Artificial Sequence
  Description of Artificial Sequence: Synthetic oligonucleotide
  Antisense strand to SEQ ID NO: 1398254
uacaaucuugggaacaggg

SEQ ID NO: 1398256 - RNA, 19 nt, Artificial Sequence
  Description of Artificial Sequence: Synthetic oligonucleotide
  Sense strand starting at position 2818 of SEQ ID NO: 1243147
gguaauauaugggauauaa

SEQ ID NO: 1398257 - RNA, 19 nt, Artificial Sequence
  Description of Artificial Sequence: Synthetic oligonucleotide
  Antisense strand to SEQ ID NO: 1398256
uuauaucccauauauuacc

SEQ ID NO: 1398258 - RNA, 19 nt, Artificial Sequence
  Description of Artificial Sequence: Synthetic oligonucleotide
  Sense strand starting at position 2833 of SEQ ID NO: 1243147
auaauagaaccguauguac

SEQ ID NO: 1398259 - RNA, 19 nt, Artificial Sequence
  Description of Artificial Sequence: Synthetic oligonucleotide
  Antisense strand to SEQ ID NO: 1398258
guacauacgguucuauuau

SEQ ID NO: 1398260 - RNA, 19 nt, Artificial Sequence
  Description of Artificial Sequence: Synthetic oligonucleotide
  Sense strand starting at position 2867 of SEQ ID NO: 1243147
uguggacguuuaccugaau

SEQ ID NO: 1398261 - RNA, 19 nt, Artificial Sequence
  Description of Artificial Sequence: Synthetic oligonucleotide
  Antisense strand to SEQ ID NO: 1398260
auucagguaaacguccaca

SEQ ID NO: 1398262 - RNA, 19 nt, Artificial Sequence
  Description of Artificial Sequence: Synthetic oligonucleotide
  Sense strand starting at position 2868 of SEQ ID NO: 1243147
guggacguuuaccugaauu

SEQ ID NO: 1398263 - RNA, 19 nt, Artificial Sequence
  Description of Artificial Sequence: Synthetic oligonucleotide
  Antisense strand to SEQ ID NO: 1398262
aauucagguaaacguccac

SEQ ID NO: 1398264 - RNA, 19 nt, Artificial Sequence
  Description of Artificial Sequence: Synthetic oligonucleotide
  Sense strand starting at position 2870 of SEQ ID NO: 1243147
ggacguuuaccugaauucu

SEQ ID NO: 1398265 - RNA, 19 nt, Artificial Sequence
  Description of Artificial Sequence: Synthetic oligonucleotide
  Antisense strand to SEQ ID NO: 1398264
agaauucagguaaacgucc

SEQ ID NO: 1398266 - RNA, 19 nt, Artificial Sequence
  Description of Artificial Sequence: Synthetic oligonucleotide
  Sense strand starting at position 3425 of SEQ ID NO: 1243147
ccagcauacucccuagagu

SEQ ID NO: 1398267 - RNA, 19 nt, Artificial Sequence
  Description of Artificial Sequence: Synthetic oligonucleotide
  Antisense strand to SEQ ID NO: 1398266
acucuagggaguaugcugg

SEQ ID NO: 1398268 - RNA, 19 nt, Artificial Sequence
  Description of Artificial Sequence: Synthetic oligonucleotide
  Sense strand starting at position 3428 of SEQ ID NO: 1243147
gcauacucccuagaguagu

SEQ ID NO: 1398269 - RNA, 19 nt, Artificial Sequence
  Description of Artificial Sequence: Synthetic oligonucleotide
  Antisense strand to SEQ ID NO: 1398268
acuacucuagggaguaugc

SEQ ID NO: 1398270 - RNA, 19 nt, Artificial Sequence
  Description of Artificial Sequence: Synthetic oligonucleotide
  Sense strand starting at position 3460 of SEQ ID NO: 1243147
aucuaacuauuggaaggaa

SEQ ID NO: 1398271 - RNA, 19 nt, Artificial Sequence
  Description of Artificial Sequence: Synthetic oligonucleotide
  Antisense strand to SEQ ID NO: 1398270
uuccuuccaauaguuagau

SEQ ID NO: 1398272 - RNA, 19 nt, Artificial Sequence
  Description of Artificial Sequence: Synthetic oligonucleotide
  Sense strand starting at position 3499 of SEQ ID NO: 1243147
uagaauucuggcuggucca

SEQ ID NO: 1398273 - RNA, 19 nt, Artificial Sequence
  Description of Artificial Sequence: Synthetic oligonucleotide
  Antisense strand to SEQ ID NO: 1398272
uggaccagccagaauucua

SEQ ID NO: 1398274 - RNA, 19 nt, Artificial Sequence
  Description of Artificial Sequence: Synthetic oligonucleotide
  Sense strand starting at position 3500 of SEQ ID NO: 1243147
agaauucuggcugguccaa

SEQ ID NO: 1398275 - RNA, 19 nt, Artificial Sequence
  Description of Artificial Sequence: Synthetic oligonucleotide
  Antisense strand to SEQ ID NO: 1398274
uuggaccagccagaauucu

SEQ ID NO: 1398276 - RNA, 19 nt, Artificial Sequence
  Description of Artificial Sequence: Synthetic oligonucleotide
  Sense strand starting at position 3581 of SEQ ID NO: 1243147
guuuguuuggagcaaauuc

SEQ ID NO: 1398277 - RNA, 19 nt, Artificial Sequence
  Description of Artificial Sequence: Synthetic oligonucleotide
  Antisense strand to SEQ ID NO: 1398276
gaauuugcuccaaacaaac

SEQ ID NO: 1398278 - RNA, 19 nt, Artificial Sequence
  Description of Artificial Sequence: Synthetic oligonucleotide
  Sense strand starting at position 3617 of SEQ ID NO: 1243147
gguugaaugcaggaggagu

SEQ ID NO: 1398279 - RNA, 19 nt, Artificial Sequence
  Description of Artificial Sequence: Synthetic oligonucleotide
  Antisense strand to SEQ ID NO: 1398278
acuccuccugcauucaacc

SEQ ID NO: 1398280 - RNA, 19 nt, Artificial Sequence
  Description of Artificial Sequence: Synthetic oligonucleotide
  Sense strand starting at position 3628 of SEQ ID NO: 1243147
ggaggaguuucaccaauug

SEQ ID NO: 1398281 - RNA, 19 nt, Artificial Sequence
  Description of Artificial Sequence: Synthetic oligonucleotide
  Antisense strand to SEQ ID NO: 1398280
caauuggugaaacuccucc

SEQ ID NO: 1398282 - RNA, 19 nt, Artificial Sequence
  Description of Artificial Sequence: Synthetic oligonucleotide
  Sense strand starting at position 3711 of SEQ ID NO: 1243147
aguuccauccggcaucaua

SEQ ID NO: 1398283 - RNA, 19 nt, Artificial Sequence
  Description of Artificial Sequence: Synthetic oligonucleotide
  Antisense strand to SEQ ID NO: 1398282
uaugaugccggauggaacu

SEQ ID NO: 1398284 - RNA, 19 nt, Artificial Sequence
  Description of Artificial Sequence: Synthetic oligonucleotide
  Sense strand starting at position 3857 of SEQ ID NO: 1243147
cagggaagguucccuugaa

SEQ ID NO: 1398285 - RNA, 19 nt, Artificial Sequence
  Description of Artificial Sequence: Synthetic oligonucleotide
  Antisense strand to SEQ ID NO: 1398284
uucaagggaaccuucccug

SEQ ID NO: 1398286 - RNA, 19 nt, Artificial Sequence
  Description of Artificial Sequence: Synthetic oligonucleotide
  Sense strand starting at position 3858 of SEQ ID NO: 1243147
agggaagguucccuugaau

SEQ ID NO: 1398287 - RNA, 19 nt, Artificial Sequence
  Description of Artificial Sequence: Synthetic oligonucleotide
  Antisense strand to SEQ ID NO: 1398286
auucaagggaaccuucccu

SEQ ID NO: 1398288 - RNA, 19 nt, Artificial Sequence
  Description of Artificial Sequence: Synthetic oligonucleotide
  Sense strand starting at position 3861 of SEQ ID NO: 1243147
gaagguucccuugaauccu

SEQ ID NO: 1398289 - RNA, 19 nt, Artificial Sequence
  Description of Artificial Sequence: Synthetic oligonucleotide
  Antisense strand to SEQ ID NO: 1398288
aggauucaagggaaccuuc

SEQ ID NO: 1398290 - RNA, 19 nt, Artificial Sequence
  Description of Artificial Sequence: Synthetic oligonucleotide
  Sense strand starting at position 31 of SEQ ID NO: 1243148
acugcagugucauucuaau

SEQ ID NO: 1398291 - RNA, 19 nt, Artificial Sequence
  Description of Artificial Sequence: Synthetic oligonucleotide
  Antisense strand to SEQ ID NO: 1398290
auuagaaugacacugcagu

SEQ ID NO: 1398292 - RNA, 19 nt, Artificial Sequence
  Description of Artificial Sequence: Synthetic oligonucleotide
  Sense strand starting at position 165 of SEQ ID NO: 1243148
auagauucuggcugaauaa

SEQ ID NO: 1398293 - RNA, 19 nt, Artificial Sequence
  Description of Artificial Sequence: Synthetic oligonucleotide
  Antisense strand to SEQ ID NO: 1398292
uuauucagccagaaucuau

SEQ ID NO: 1398294 - RNA, 19 nt, Artificial Sequence
  Description of Artificial Sequence: Synthetic oligonucleotide
  Sense strand starting at position 219 of SEQ ID NO: 1243148
ggccaauugguccagcacu

SEQ ID NO: 1398295 - RNA, 19 nt, Artificial Sequence
  Description of Artificial Sequence: Synthetic oligonucleotide
  Antisense strand to SEQ ID NO: 1398294
agugcuggaccaauuggcc

SEQ ID NO: 1398296 - RNA, 19 nt, Artificial Sequence
  Description of Artificial Sequence: Synthetic oligonucleotide
  Sense strand starting at position 283 of SEQ ID NO: 1243148
ggucucaacuucccgauuu

SEQ ID NO: 1398297 - RNA, 19 nt, Artificial Sequence
  Description of Artificial Sequence: Synthetic oligonucleotide
  Antisense strand to SEQ ID NO: 1398296
aaaucgggaaguugagacc

SEQ ID NO: 1398298 - RNA, 19 nt, Artificial Sequence
  Description of Artificial Sequence: Synthetic oligonucleotide
  Sense strand starting at position 308 of SEQ ID NO: 1243148
uggaauguuaaugauuguu

SEQ ID NO: 1398299 - RNA, 19 nt, Artificial Sequence
  Description of Artificial Sequence: Synthetic oligonucleotide
  Antisense strand to SEQ ID NO: 1398298
aacaaucauuaacauucca

SEQ ID NO: 1398300 - RNA, 19 nt, Artificial Sequence
  Description of Artificial Sequence: Synthetic oligonucleotide
  Sense strand starting at position 313 of SEQ ID NO: 1243148
uguuaaugauuguuccauc

SEQ ID NO: 1398301 - RNA, 19 nt, Artificial Sequence
  Description of Artificial Sequence: Synthetic oligonucleotide
  Antisense strand to SEQ ID NO: 1398300
gauggaacaaucauuaaca

SEQ ID NO: 1398302 - RNA, 19 nt, Artificial Sequence
  Description of Artificial Sequence: Synthetic oligonucleotide
  Sense strand starting at position 314 of SEQ ID NO: 1243148
guuaaugauuguuccaucu

SEQ ID NO: 1398303 - RNA, 19 nt, Artificial Sequence
  Description of Artificial Sequence: Synthetic oligonucleotide
  Antisense strand to SEQ ID NO: 1398302
agauggaacaaucauuaac

SEQ ID NO: 1398304 - RNA, 19 nt, Artificial Sequence
  Description of Artificial Sequence: Synthetic oligonucleotide
  Sense strand starting at position 565 of SEQ ID NO: 1243148
aauauacugcaguguuaug

SEQ ID NO: 1398305 - RNA, 19 nt, Artificial Sequence
  Description of Artificial Sequence: Synthetic oligonucleotide
  Antisense strand to SEQ ID NO: 1398304
cauaacacugcaguauauu

SEQ ID NO: 1398306 - RNA, 19 nt, Artificial Sequence
  Description of Artificial Sequence: Synthetic oligonucleotide
  Sense strand starting at position 574 of SEQ ID NO: 1243148
caguguuauggucuguugu

SEQ ID NO: 1398307 - RNA, 19 nt, Artificial Sequence
  Description of Artificial Sequence: Synthetic oligonucleotide
  Antisense strand to SEQ ID NO: 1398306
acaacagaccauaacacug

SEQ ID NO: 1398308 - RNA, 19 nt, Artificial Sequence
  Description of Artificial Sequence: Synthetic oligonucleotide
  Sense strand starting at position 582 of SEQ ID NO: 1243148
uggucuguugugcuguuaa

SEQ ID NO: 1398309 - RNA, 19 nt, Artificial Sequence
  Description of Artificial Sequence: Synthetic oligonucleotide
  Antisense strand to SEQ ID NO: 1398308
uuaacagcacaacagacca

SEQ ID NO: 1398310 - RNA, 19 nt, Artificial Sequence
  Description of Artificial Sequence: Synthetic oligonucleotide
  Sense strand starting at position 584 of SEQ ID NO: 1243148
gucuguugugcuguuaauu

SEQ ID NO: 1398311 - RNA, 19 nt, Artificial Sequence
  Description of Artificial Sequence: Synthetic oligonucleotide
  Antisense strand to SEQ ID NO: 1398310
aauuaacagcacaacagac

SEQ ID NO: 1398312 - RNA, 19 nt, Artificial Sequence
  Description of Artificial Sequence: Synthetic oligonucleotide
  Sense strand starting at position 662 of SEQ ID NO: 1243148
aauagcagccagugguaau

SEQ ID NO: 1398313 - RNA, 19 nt, Artificial Sequence
  Description of Artificial Sequence: Synthetic oligonucleotide
  Antisense strand to SEQ ID NO: 1398312
auuaccacuggcugcuauu

SEQ ID NO: 1398314 - RNA, 19 nt, Artificial Sequence
  Description of Artificial Sequence: Synthetic oligonucleotide
  Sense strand starting at position 663 of SEQ ID NO: 1243148
auagcagccagugguaaua

SEQ ID NO: 1398315 - RNA, 19 nt, Artificial Sequence
  Description of Artificial Sequence: Synthetic oligonucleotide
  Antisense strand to SEQ ID NO: 1398314
uauuaccacuggcugcuau

SEQ ID NO: 1398316 - RNA, 19 nt, Artificial Sequence
  Description of Artificial Sequence: Synthetic oligonucleotide
  Sense strand starting at position 859 of SEQ ID NO: 1243148
gcaccauucuggcuccaga

SEQ ID NO: 1398317 - RNA, 19 nt, Artificial Sequence
  Description of Artificial Sequence: Synthetic oligonucleotide
  Antisense strand to SEQ ID NO: 1398316
ucuggagccagaauggugc

SEQ ID NO: 1398318 - RNA, 19 nt, Artificial Sequence
  Description of Artificial Sequence: Synthetic oligonucleotide
  Sense strand starting at position 899 of SEQ ID NO: 1243148
acacuuccucucggcagaa

SEQ ID NO: 1398319 - RNA, 19 nt, Artificial Sequence
  Description of Artificial Sequence: Synthetic oligonucleotide
  Antisense strand to SEQ ID NO: 1398318
uucugccgagaggaagugu

SEQ ID NO: 1398320 - RNA, 19 nt, Artificial Sequence
  Description of Artificial Sequence: Synthetic oligonucleotide
  Sense strand starting at position 1166 of SEQ ID NO: 1243148
cugcauucuagccagggua

SEQ ID NO: 1398321 - RNA, 19 nt, Artificial Sequence
  Description of Artificial Sequence: Synthetic oligonucleotide
  Antisense strand to SEQ ID NO: 1398320
uacccuggcuagaaugcag

SEQ ID NO: 1398322 - RNA, 19 nt, Artificial Sequence
  Description of Artificial Sequence: Synthetic oligonucleotide
  Sense strand starting at position 1169 of SEQ ID NO: 1243148
cauucuagccaggguaaca

SEQ ID NO: 1398323 - RNA, 19 nt, Artificial Sequence
  Description of Artificial Sequence: Synthetic oligonucleotide
  Antisense strand to SEQ ID NO: 1398322
uguuacccuggcuagaaug

SEQ ID NO: 1398324 - RNA, 19 nt, Artificial Sequence
  Description of Artificial Sequence: Synthetic oligonucleotide
  Sense strand starting at position 1230 of SEQ ID NO: 1243148
guuuccugccaagagucaa

SEQ ID NO: 1398325 - RNA, 19 nt, Artificial Sequence
  Description of Artificial Sequence: Synthetic oligonucleotide
  Antisense strand to SEQ ID NO: 1398324
uugacucuuggcaggaaac

SEQ ID NO: 1398326 - RNA, 19 nt, Artificial Sequence
  Description of Artificial Sequence: Synthetic oligonucleotide
  Sense strand starting at position 1334 of SEQ ID NO: 1243148
cagucuuggugacuaagca

SEQ ID NO: 1398327 - RNA, 19 nt, Artificial Sequence
  Description of Artificial Sequence: Synthetic oligonucleotide
  Antisense strand to SEQ ID NO: 1398326
ugcuuagucaccaagacug

SEQ ID NO: 1398328 - RNA, 19 nt, Artificial Sequence
  Description of Artificial Sequence: Synthetic oligonucleotide
  Sense strand starting at position 1359 of SEQ ID NO: 1243148
uccugagaacucugugaug

SEQ ID NO: 1398329 - RNA, 19 nt, Artificial Sequence
  Description of Artificial Sequence: Synthetic oligonucleotide
  Antisense strand to SEQ ID NO: 1398328
caucacagaguucucagga

SEQ ID NO: 1398330 - RNA, 19 nt, Artificial Sequence
  Description of Artificial Sequence: Synthetic oligonucleotide
  Sense strand starting at position 1361 of SEQ ID NO: 1243148
cugagaacucugugaugca

SEQ ID NO: 1398331 - RNA, 19 nt, Artificial Sequence
  Description of Artificial Sequence: Synthetic oligonucleotide
  Antisense strand to SEQ ID NO: 1398330
ugcaucacagaguucucag

SEQ ID NO: 1398332 - RNA, 19 nt, Artificial Sequence
  Description of Artificial Sequence: Synthetic oligonucleotide
  Sense strand starting at position 2170 of SEQ ID NO: 1243148
gagaucucccaaggucacu

SEQ ID NO: 1398333 - RNA, 19 nt, Artificial Sequence
  Description of Artificial Sequence: Synthetic oligonucleotide
  Antisense strand to SEQ ID NO: 1398332
agugaccuugggagaucuc

SEQ ID NO: 1398334 - RNA, 19 nt, Artificial Sequence
  Description of Artificial Sequence: Synthetic oligonucleotide
  Sense strand starting at position 2536 of SEQ ID NO: 1243148
ggcuaauauuaauuaagca

SEQ ID NO: 1398335 - RNA, 19 nt, Artificial Sequence
  Description of Artificial Sequence: Synthetic oligonucleotide
  Antisense strand to SEQ ID NO: 1398334
ugcuuaauuaauauuagcc

SEQ ID NO: 1398336 - RNA, 19 nt, Artificial Sequence
  Description of Artificial Sequence: Synthetic oligonucleotide
  Sense strand starting at position 2581 of SEQ ID NO: 1243148
agugcucuccugcaggaau

SEQ ID NO: 1398337 - RNA, 19 nt, Artificial Sequence
  Description of Artificial Sequence: Synthetic oligonucleotide
  Antisense strand to SEQ ID NO: 1398336
auuccugcaggagagcacu

SEQ ID NO: 1398338 - RNA, 19 nt, Artificial Sequence
  Description of Artificial Sequence: Synthetic oligonucleotide
  Sense strand starting at position 2623 of SEQ ID NO: 1243148
ugaaguagugccuaugauc

SEQ ID NO: 1398339 - RNA, 19 nt, Artificial Sequence
  Description of Artificial Sequence: Synthetic oligonucleotide
  Antisense strand to SEQ ID NO: 1398338
gaucauaggcacuacuuca

SEQ ID NO: 1398340 - RNA, 19 nt, Artificial Sequence
  Description of Artificial Sequence: Synthetic oligonucleotide
  Sense strand starting at position 2679 of SEQ ID NO: 1243148
agcuaagugauuuguacga

SEQ ID NO: 1398341 - RNA, 19 nt, Artificial Sequence
  Description of Artificial Sequence: Synthetic oligonucleotide
  Antisense strand to SEQ ID NO: 1398340
ucguacaaaucacuuagcu

SEQ ID NO: 1398342 - RNA, 19 nt, Artificial Sequence
  Description of Artificial Sequence: Synthetic oligonucleotide
  Sense strand starting at position 2683 of SEQ ID NO: 1243148
aagugauuuguacgaugug

SEQ ID NO: 1398343 - RNA, 19 nt, Artificial Sequence
  Description of Artificial Sequence: Synthetic oligonucleotide
  Antisense strand to SEQ ID NO: 1398342
cacaucguacaaaucacuu

SEQ ID NO: 1398344 - RNA, 19 nt, Artificial Sequence
  Description of Artificial Sequence: Synthetic oligonucleotide
  Sense strand starting at position 2686 of SEQ ID NO: 1243148
ugauuuguacgauguguca

SEQ ID NO: 1398345 - RNA, 19 nt, Artificial Sequence
  Description of Artificial Sequence: Synthetic oligonucleotide
  Antisense strand to SEQ ID NO: 1398344
ugacacaucguacaaauca

SEQ ID NO: 1398346 - RNA, 19 nt, Artificial Sequence
  Description of Artificial Sequence: Synthetic oligonucleotide
  Sense strand starting at position 2688 of SEQ ID NO: 1243148
auuuguacgaugugucaca

SEQ ID NO: 1398347 - RNA, 19 nt, Artificial Sequence
  Description of Artificial Sequence: Synthetic oligonucleotide
  Antisense strand to SEQ ID NO: 1398346
ugugacacaucguacaaau

SEQ ID NO: 1398348 - RNA, 19 nt, Artificial Sequence
  Description of Artificial Sequence: Synthetic oligonucleotide
  Sense strand starting at position 2731 of SEQ ID NO: 1243148
caacacgagccauguauga

SEQ ID NO: 1398349 - RNA, 19 nt, Artificial Sequence
  Description of Artificial Sequence: Synthetic oligonucleotide
  Antisense strand to SEQ ID NO: 1398348
ucauacauggcucguguug

SEQ ID NO: 1398350 - RNA, 19 nt, Artificial Sequence
  Description of Artificial Sequence: Synthetic oligonucleotide
  Sense strand starting at position 2733 of SEQ ID NO: 1243148
acacgagccauguaugacu

SEQ ID NO: 1398351 - RNA, 19 nt, Artificial Sequence
  Description of Artificial Sequence: Synthetic oligonucleotide
  Antisense strand to SEQ ID NO: 1398350
agucauacauggcucgugu

SEQ ID NO: 1398352 - RNA, 19 nt, Artificial Sequence
  Description of Artificial Sequence: Synthetic oligonucleotide
  Sense strand starting at position 2741 of SEQ ID NO: 1243148
cauguaugacuccggaaug

SEQ ID NO: 1398353 - RNA, 19 nt, Artificial Sequence
  Description of Artificial Sequence: Synthetic oligonucleotide
  Antisense strand to SEQ ID NO: 1398352
cauuccggagucauacaug

SEQ ID NO: 1398354 - RNA, 19 nt, Artificial Sequence
  Description of Artificial Sequence: Synthetic oligonucleotide
  Sense strand starting at position 2848 of SEQ ID NO: 1243148
ucagaauauugcucuaaag

SEQ ID NO: 1398355 - RNA, 19 nt, Artificial Sequence
  Description of Artificial Sequence: Synthetic oligonucleotide
  Antisense strand to SEQ ID NO: 1398354
cuuuagagcaauauucuga

SEQ ID NO: 1398356 - RNA, 19 nt, Artificial Sequence
  Description of Artificial Sequence: Synthetic oligonucleotide
  Sense strand starting at position 2850 of SEQ ID NO: 1243148
agaauauugcucuaaaggu

SEQ ID NO: 1398357 - RNA, 19 nt, Artificial Sequence
  Description of Artificial Sequence: Synthetic oligonucleotide
  Antisense strand to SEQ ID NO: 1398356
accuuuagagcaauauucu

SEQ ID NO: 1398358 - RNA, 19 nt, Artificial Sequence
  Description of Artificial Sequence: Synthetic oligonucleotide
  Sense strand starting at position 2907 of SEQ ID NO: 1243148
aguuguuuccgagcguucu

SEQ ID NO: 1398359 - RNA, 19 nt, Artificial Sequence
  Description of Artificial Sequence: Synthetic oligonucleotide
  Antisense strand to SEQ ID NO: 1398358
agaacgcucggaaacaacu

SEQ ID NO: 1398360 - RNA, 19 nt, Artificial Sequence
  Description of Artificial Sequence: Synthetic oligonucleotide
  Sense strand starting at position 3044 of SEQ ID NO: 1243148
cugugcguucugggaauuu

SEQ ID NO: 1398361 - RNA, 19 nt, Artificial Sequence
  Description of Artificial Sequence: Synthetic oligonucleotide
  Antisense strand to SEQ ID NO: 1398360
aaauucccagaacgcacag

SEQ ID NO: 1398362 - RNA, 19 nt, Artificial Sequence
  Description of Artificial Sequence: Synthetic oligonucleotide
  Sense strand starting at position 3315 of SEQ ID NO: 1243148
uuuccugaugguuguuuau

SEQ ID NO: 1398363 - RNA, 19 nt, Artificial Sequence
  Description of Artificial Sequence: Synthetic oligonucleotide
  Antisense strand to SEQ ID NO: 1398362
auaaacaaccaucaggaaa

SEQ ID NO: 1398364 - RNA, 19 nt, Artificial Sequence
  Description of Artificial Sequence: Synthetic oligonucleotide
  Sense strand starting at position 3371 of SEQ ID NO: 1243148
gucuuacucguccuggcau

SEQ ID NO: 1398365 - RNA, 19 nt, Artificial Sequence
  Description of Artificial Sequence: Synthetic oligonucleotide
  Antisense strand to SEQ ID NO: 1398364
augccaggacgaguaagac

SEQ ID NO: 1398366 - RNA, 19 nt, Artificial Sequence
  Description of Artificial Sequence: Synthetic oligonucleotide
  Sense strand starting at position 3780 of SEQ ID NO: 1243148
uagaauaagcucugggcuu

SEQ ID NO: 1398367 - RNA, 19 nt, Artificial Sequence
  Description of Artificial Sequence: Synthetic oligonucleotide
  Antisense strand to SEQ ID NO: 1398366
aagcccagagcuuauucua

SEQ ID NO: 1398368 - RNA, 19 nt, Artificial Sequence
  Description of Artificial Sequence: Synthetic oligonucleotide
  Sense strand starting at position 3810 of SEQ ID NO: 1243148
gguucucagcuguggaaac

SEQ ID NO: 1398369 - RNA, 19 nt, Artificial Sequence
  Description of Artificial Sequence: Synthetic oligonucleotide
  Antisense strand to SEQ ID NO: 1398368
guuuccacagcugagaacc

SEQ ID NO: 1398370 - RNA, 19 nt, Artificial Sequence
  Description of Artificial Sequence: Synthetic oligonucleotide
  Sense strand starting at position 325 of SEQ ID NO: 1243149
ggcuaauauuaauuaagca

SEQ ID NO: 1398371 - RNA, 19 nt, Artificial Sequence
  Description of Artificial Sequence: Synthetic oligonucleotide
  Antisense strand to SEQ ID NO: 1398370
ugcuuaauuaauauuagcc

SEQ ID NO: 1398372 - RNA, 19 nt, Artificial Sequence
  Description of Artificial Sequence: Synthetic oligonucleotide
  Sense strand starting at position 370 of SEQ ID NO: 1243149
agugcucuccugcaggaau

SEQ ID NO: 1398373 - RNA, 19 nt, Artificial Sequence
  Description of Artificial Sequence: Synthetic oligonucleotide
  Antisense strand to SEQ ID NO: 1398372
auuccugcaggagagcacu

SEQ ID NO: 1398374 - RNA, 19 nt, Artificial Sequence
  Description of Artificial Sequence: Synthetic oligonucleotide
  Sense strand starting at position 412 of SEQ ID NO: 1243149
ugaaguagugccuaugauc

SEQ ID NO: 1398375 - RNA, 19 nt, Artificial Sequence
  Description of Artificial Sequence: Synthetic oligonucleotide
  Antisense strand to SEQ ID NO: 1398374
gaucauaggcacuacuuca

SEQ ID NO: 1398376 - RNA, 19 nt, Artificial Sequence
  Description of Artificial Sequence: Synthetic oligonucleotide
  Sense strand starting at position 468 of SEQ ID NO: 1243149
agcuaagugauuuguacga

SEQ ID NO: 1398377 - RNA, 19 nt, Artificial Sequence
  Description of Artificial Sequence: Synthetic oligonucleotide
  Antisense strand to SEQ ID NO: 1398376
ucguacaaaucacuuagcu

SEQ ID NO: 1398378 - RNA, 19 nt, Artificial Sequence
  Description of Artificial Sequence: Synthetic oligonucleotide
  Sense strand starting at position 472 of SEQ ID NO: 1243149
aagugauuuguacgaugug

SEQ ID NO: 1398379 - RNA, 19 nt, Artificial Sequence
  Description of Artificial Sequence: Synthetic oligonucleotide
  Antisense strand to SEQ ID NO: 1398378
cacaucguacaaaucacuu

SEQ ID NO: 1398380 - RNA, 19 nt, Artificial Sequence
  Description of Artificial Sequence: Synthetic oligonucleotide
  Sense strand starting at position 475 of SEQ ID NO: 1243149
ugauuuguacgauguguca

SEQ ID NO: 1398381 - RNA, 19 nt, Artificial Sequence
  Description of Artificial Sequence: Synthetic oligonucleotide
  Antisense strand to SEQ ID NO: 1398380
ugacacaucguacaaauca

SEQ ID NO: 1398382 - RNA, 19 nt, Artificial Sequence
  Description of Artificial Sequence: Synthetic oligonucleotide
  Sense strand starting at position 477 of SEQ ID NO: 1243149
auuuguacgaugugucaca

SEQ ID NO: 1398383 - RNA, 19 nt, Artificial Sequence
  Description of Artificial Sequence: Synthetic oligonucleotide
  Antisense strand to SEQ ID NO: 1398382
ugugacacaucguacaaau

SEQ ID NO: 1398384 - RNA, 19 nt, Artificial Sequence
  Description of Artificial Sequence: Synthetic oligonucleotide
  Sense strand starting at position 520 of SEQ ID NO: 1243149
caacacgagccauguauga

SEQ ID NO: 1398385 - RNA, 19 nt, Artificial Sequence
  Description of Artificial Sequence: Synthetic oligonucleotide
  Antisense strand to SEQ ID NO: 1398384
ucauacauggcucguguug

SEQ ID NO: 1398386 - RNA, 19 nt, Artificial Sequence
  Description of Artificial Sequence: Synthetic oligonucleotide
  Sense strand starting at position 522 of SEQ ID NO: 1243149
acacgagccauguaugacu

SEQ ID NO: 1398387 - RNA, 19 nt, Artificial Sequence
  Description of Artificial Sequence: Synthetic oligonucleotide
  Antisense strand to SEQ ID NO: 1398386
agucauacauggcucgugu

SEQ ID NO: 1398388 - RNA, 19 nt, Artificial Sequence
  Description of Artificial Sequence: Synthetic oligonucleotide
  Sense strand starting at position 530 of SEQ ID NO: 1243149
cauguaugacuccggaaug

SEQ ID NO: 1398389 - RNA, 19 nt, Artificial Sequence
  Description of Artificial Sequence: Synthetic oligonucleotide
  Antisense strand to SEQ ID NO: 1398388
cauuccggagucauacaug

SEQ ID NO: 1398390 - RNA, 19 nt, Artificial Sequence
  Description of Artificial Sequence: Synthetic oligonucleotide
  Sense strand starting at position 637 of SEQ ID NO: 1243149
ucagaauauugcucuaaag

SEQ ID NO: 1398391 - RNA, 19 nt, Artificial Sequence
  Description of Artificial Sequence: Synthetic oligonucleotide
  Antisense strand to SEQ ID NO: 1398390
cuuuagagcaauauucuga

SEQ ID NO: 1398392 - RNA, 19 nt, Artificial Sequence
  Description of Artificial Sequence: Synthetic oligonucleotide
  Sense strand starting at position 639 of SEQ ID NO: 1243149
agaauauugcucuaaaggu

SEQ ID NO: 1398393 - RNA, 19 nt, Artificial Sequence
  Description of Artificial Sequence: Synthetic oligonucleotide
  Antisense strand to SEQ ID NO: 1398392
accuuuagagcaauauucu

SEQ ID NO: 1398394 - RNA, 19 nt, Artificial Sequence
  Description of Artificial Sequence: Synthetic oligonucleotide
  Sense strand starting at position 696 of SEQ ID NO: 1243149
aguuguuuccgagcguucu

SEQ ID NO: 1398395 - RNA, 19 nt, Artificial Sequence
  Description of Artificial Sequence: Synthetic oligonucleotide
  Antisense strand to SEQ ID NO: 1398394
agaacgcucggaaacaacu

SEQ ID NO: 1398396 - RNA, 19 nt, Artificial Sequence
  Description of Artificial Sequence: Synthetic oligonucleotide
  Sense strand starting at position 833 of SEQ ID NO: 1243149
cugugcguucugggaauuu

SEQ ID NO: 1398397 - RNA, 19 nt, Artificial Sequence
  Description of Artificial Sequence: Synthetic oligonucleotide
  Antisense strand to SEQ ID NO: 1398396
aaauucccagaacgcacag

SEQ ID NO: 1398398 - RNA, 19 nt, Artificial Sequence
  Description of Artificial Sequence: Synthetic oligonucleotide
  Sense strand starting at position 1160 of SEQ ID NO: 1243149
gucuuacucguccuggcau

SEQ ID NO: 1398399 - RNA, 19 nt, Artificial Sequence
  Description of Artificial Sequence: Synthetic oligonucleotide
  Antisense strand to SEQ ID NO: 1398398
augccaggacgaguaagac

SEQ ID NO: 1398400 - RNA, 19 nt, Artificial Sequence
  Description of Artificial Sequence: Synthetic oligonucleotide
  Sense strand starting at position 1569 of SEQ ID NO: 1243149
uagaauaagcucugggcuu

SEQ ID NO: 1398401 - RNA, 19 nt, Artificial Sequence
  Description of Artificial Sequence: Synthetic oligonucleotide
  Antisense strand to SEQ ID NO: 1398400
aagcccagagcuuauucua

SEQ ID NO: 1398402 - RNA, 19 nt, Artificial Sequence
  Description of Artificial Sequence: Synthetic oligonucleotide
  Sense strand starting at position 1813 of SEQ ID NO: 1243149
gcuccucuuacccggagaa

SEQ ID NO: 1398403 - RNA, 19 nt, Artificial Sequence
  Description of Artificial Sequence: Synthetic oligonucleotide
  Antisense strand to SEQ ID NO: 1398402
uucuccggguaagaggagc

SEQ ID NO: 1398404 - RNA, 19 nt, Artificial Sequence
  Description of Artificial Sequence: Synthetic oligonucleotide
  Sense strand starting at position 1814 of SEQ ID NO: 1243149
cuccucuuacccggagaau

SEQ ID NO: 1398405 - RNA, 19 nt, Artificial Sequence
  Description of Artificial Sequence: Synthetic oligonucleotide
  Antisense strand to SEQ ID NO: 1398404
auucuccggguaagaggag

SEQ ID NO: 1398406 - RNA, 19 nt, Artificial Sequence
  Description of Artificial Sequence: Synthetic oligonucleotide
  Sense strand starting at position 1815 of SEQ ID NO: 1243149
uccucuuacccggagaaug

SEQ ID NO: 1398407 - RNA, 19 nt, Artificial Sequence
  Description of Artificial Sequence: Synthetic oligonucleotide
  Antisense strand to SEQ ID NO: 1398406
cauucuccggguaagagga

SEQ ID NO: 1398408 - RNA, 19 nt, Artificial Sequence
  Description of Artificial Sequence: Synthetic oligonucleotide
  Sense strand starting at position 1987 of SEQ ID NO: 1243149
ccuggaucugucuaccaac

SEQ ID NO: 1398409 - RNA, 19 nt, Artificial Sequence
  Description of Artificial Sequence: Synthetic oligonucleotide
  Antisense strand to SEQ ID NO: 1398408
guugguagacagauccagg

SEQ ID NO: 1398410 - RNA, 19 nt, Artificial Sequence
  Description of Artificial Sequence: Synthetic oligonucleotide
  Sense strand starting at position 2015 of SEQ ID NO: 1243149
aagggaaauucccaaagga

SEQ ID NO: 1398411 - RNA, 19 nt, Artificial Sequence
  Description of Artificial Sequence: Synthetic oligonucleotide
  Antisense strand to SEQ ID NO: 1398410
uccuuugggaauuucccuu

SEQ ID NO: 1398412 - RNA, 19 nt, Artificial Sequence
  Description of Artificial Sequence: Synthetic oligonucleotide
  Sense strand starting at position 2365 of SEQ ID NO: 1243149
ggccuucuuccagaaaccu

SEQ ID NO: 1398413 - RNA, 19 nt, Artificial Sequence
  Description of Artificial Sequence: Synthetic oligonucleotide
  Antisense strand to SEQ ID NO: 1398412
agguuucuggaagaaggcc

SEQ ID NO: 1398414 - RNA, 19 nt, Artificial Sequence
  Description of Artificial Sequence: Synthetic oligonucleotide
  Sense strand starting at position 2393 of SEQ ID NO: 1243149
gagaauccugagggccaau

SEQ ID NO: 1398415 - RNA, 19 nt, Artificial Sequence
  Description of Artificial Sequence: Synthetic oligonucleotide
  Antisense strand to SEQ ID NO: 1398414
auuggcccucaggauucuc

SEQ ID NO: 1398416 - RNA, 19 nt, Artificial Sequence
  Description of Artificial Sequence: Synthetic oligonucleotide
  Sense strand starting at position 2441 of SEQ ID NO: 1243149
uguccugucucaucuuaaa

SEQ ID NO: 1398417 - RNA, 19 nt, Artificial Sequence
  Description of Artificial Sequence: Synthetic oligonucleotide
  Antisense strand to SEQ ID NO: 1398416
uuuaagaugagacaggaca

SEQ ID NO: 1398418 - RNA, 19 nt, Artificial Sequence
  Description of Artificial Sequence: Synthetic oligonucleotide
  Sense strand starting at position 2469 of SEQ ID NO: 1243149
aggagaaccuggccuuagu

SEQ ID NO: 1398419 - RNA, 19 nt, Artificial Sequence
  Description of Artificial Sequence: Synthetic oligonucleotide
  Antisense strand to SEQ ID NO: 1398418
acuaaggccagguucuccu

SEQ ID NO: 1398420 - RNA, 19 nt, Artificial Sequence
  Description of Artificial Sequence: Synthetic oligonucleotide
  Sense strand starting at position 2479 of SEQ ID NO: 1243149
ggccuuagugcuguucuca

SEQ ID NO: 1398421 - RNA, 19 nt, Artificial Sequence
  Description of Artificial Sequence: Synthetic oligonucleotide
  Antisense strand to SEQ ID NO: 1398420
ugagaacagcacuaaggcc

SEQ ID NO: 1398422 - RNA, 19 nt, Artificial Sequence
  Description of Artificial Sequence: Synthetic oligonucleotide
  Sense strand starting at position 2524 of SEQ ID NO: 1243149
uugggaaguuaaucauuau

SEQ ID NO: 1398423 - RNA, 19 nt, Artificial Sequence
  Description of Artificial Sequence: Synthetic oligonucleotide
  Antisense strand to SEQ ID NO: 1398422
auaaugauuaacuucccaa

SEQ ID NO: 1398424 - RNA, 19 nt, Artificial Sequence
  Description of Artificial Sequence: Synthetic oligonucleotide
  Sense strand starting at position 2527 of SEQ ID NO: 1243149
ggaaguuaaucauuauguc

SEQ ID NO: 1398425 - RNA, 19 nt, Artificial Sequence
  Description of Artificial Sequence: Synthetic oligonucleotide
  Antisense strand to SEQ ID NO: 1398424
gacauaaugauuaacuucc

SEQ ID NO: 1398426 - RNA, 19 nt, Artificial Sequence
  Description of Artificial Sequence: Synthetic oligonucleotide
  Sense strand starting at position 2787 of SEQ ID NO: 1243149
ggaucacuuccuugcugaa

SEQ ID NO: 1398427 - RNA, 19 nt, Artificial Sequence
  Description of Artificial Sequence: Synthetic oligonucleotide
  Antisense strand to SEQ ID NO: 1398426
uucagcaaggaagugaucc

SEQ ID NO: 1398428 - RNA, 19 nt, Artificial Sequence
  Description of Artificial Sequence: Synthetic oligonucleotide
  Sense strand starting at position 2933 of SEQ ID NO: 1243149
ugcuuaagugcugaaaucu

SEQ ID NO: 1398429 - RNA, 19 nt, Artificial Sequence
  Description of Artificial Sequence: Synthetic oligonucleotide
  Antisense strand to SEQ ID NO: 1398428
agauuucagcacuuaagca

SEQ ID NO: 1398430 - RNA, 19 nt, Artificial Sequence
  Description of Artificial Sequence: Synthetic oligonucleotide
  Sense strand starting at position 2942 of SEQ ID NO: 1243149
gcugaaaucucagcccacu

SEQ ID NO: 1398431 - RNA, 19 nt, Artificial Sequence
  Description of Artificial Sequence: Synthetic oligonucleotide
  Antisense strand to SEQ ID NO: 1398430
agugggcugagauuucagc

SEQ ID NO: 1398432 - RNA, 19 nt, Artificial Sequence
  Description of Artificial Sequence: Synthetic oligonucleotide
  Sense strand starting at position 3084 of SEQ ID NO: 1243149
acuguucucucccuaagag

SEQ ID NO: 1398433 - RNA, 19 nt, Artificial Sequence
  Description of Artificial Sequence: Synthetic oligonucleotide
  Antisense strand to SEQ ID NO: 1398432
cucuuagggagagaacagu

SEQ ID NO: 1398434 - RNA, 19 nt, Artificial Sequence
  Description of Artificial Sequence: Synthetic oligonucleotide
  Sense strand starting at position 3085 of SEQ ID NO: 1243149
cuguucucucccuaagaga

SEQ ID NO: 1398435 - RNA, 19 nt, Artificial Sequence
  Description of Artificial Sequence: Synthetic oligonucleotide
  Antisense strand to SEQ ID NO: 1398434
ucucuuagggagagaacag

SEQ ID NO: 1398436 - RNA, 19 nt, Artificial Sequence
  Description of Artificial Sequence: Synthetic oligonucleotide
  Sense strand starting at position 3305 of SEQ ID NO: 1243149
gugaaacugucaccaguga

SEQ ID NO: 1398437 - RNA, 19 nt, Artificial Sequence
  Description of Artificial Sequence: Synthetic oligonucleotide
  Antisense strand to SEQ ID NO: 1398436
ucacuggugacaguuucac

SEQ ID NO: 1398438 - RNA, 19 nt, Artificial Sequence
  Description of Artificial Sequence: Synthetic oligonucleotide
  Sense strand starting at position 3578 of SEQ ID NO: 1243149
caguuauauggugaugaug

SEQ ID NO: 1398439 - RNA, 19 nt, Artificial Sequence
  Description of Artificial Sequence: Synthetic oligonucleotide
  Antisense strand to SEQ ID NO: 1398438
caucaucaccauauaacug

SEQ ID NO: 1398440 - RNA, 19 nt, Artificial Sequence
  Description of Artificial Sequence: Synthetic oligonucleotide
  Sense strand starting at position 3587 of SEQ ID NO: 1243149
ggugaugaugcccaaaguu

SEQ ID NO: 1398441 - RNA, 19 nt, Artificial Sequence
  Description of Artificial Sequence: Synthetic oligonucleotide
  Antisense strand to SEQ ID NO: 1398440
aacuuugggcaucaucacc

SEQ ID NO: 1398442 - RNA, 19 nt, Artificial Sequence
  Description of Artificial Sequence: Synthetic oligonucleotide
  Sense strand starting at position 3708 of SEQ ID NO: 1243149
ugaucucuccgcuaagcaa

SEQ ID NO: 1398443 - RNA, 19 nt, Artificial Sequence
  Description of Artificial Sequence: Synthetic oligonucleotide
  Antisense strand to SEQ ID NO: 1398442
uugcuuagcggagagauca

SEQ ID NO: 1398444 - RNA, 19 nt, Artificial Sequence
  Description of Artificial Sequence: Synthetic oligonucleotide
  Sense strand starting at position 3827 of SEQ ID NO: 1243149
cgacacggccuuugaaaua

SEQ ID NO: 1398445 - RNA, 19 nt, Artificial Sequence
  Description of Artificial Sequence: Synthetic oligonucleotide
  Antisense strand to SEQ ID NO: 1398444
uauuucaaaggccgugucg

SEQ ID NO: 1398446 - RNA, 19 nt, Artificial Sequence
  Description of Artificial Sequence: Synthetic oligonucleotide
  Sense strand starting at position 3910 of SEQ ID NO: 1243149
auggucucucccgagaaug

SEQ ID NO: 1398447 - RNA, 19 nt, Artificial Sequence
  Description of Artificial Sequence: Synthetic oligonucleotide
  Antisense strand to SEQ ID NO: 1398446
cauucucgggagagaccau

SEQ ID NO: 1398448 - RNA, 19 nt, Artificial Sequence
  Description of Artificial Sequence: Synthetic oligonucleotide
  Sense strand starting at position 3912 of SEQ ID NO: 1243149
ggucucucccgagaaugac

SEQ ID NO: 1398449 - RNA, 19 nt, Artificial Sequence
  Description of Artificial Sequence: Synthetic oligonucleotide
  Antisense strand to SEQ ID NO: 1398448
gucauucucgggagagacc

SEQ ID NO: 1398450 - RNA, 19 nt, Artificial Sequence
  Description of Artificial Sequence: Synthetic oligonucleotide
  Sense strand starting at position 44 of SEQ ID NO: 1243150
cagacuuagcugugugaac

SEQ ID NO: 1398451 - RNA, 19 nt, Artificial Sequence
  Description of Artificial Sequence: Synthetic oligonucleotide
  Antisense strand to SEQ ID NO: 1398450
guucacacagcuaagucug

SEQ ID NO: 1398452 - RNA, 19 nt, Artificial Sequence
  Description of Artificial Sequence: Synthetic oligonucleotide
  Sense strand starting at position 818 of SEQ ID NO: 1243150
cgggaacaguggucaaaga

SEQ ID NO: 1398453 - RNA, 19 nt, Artificial Sequence
  Description of Artificial Sequence: Synthetic oligonucleotide
  Antisense strand to SEQ ID NO: 1398452
ucuuugaccacuguucccg

SEQ ID NO: 1398454 - RNA, 19 nt, Artificial Sequence
  Description of Artificial Sequence: Synthetic oligonucleotide
  Sense strand starting at position 2124 of SEQ ID NO: 1243150
uaggauugaugcugauacu

SEQ ID NO: 1398455 - RNA, 19 nt, Artificial Sequence
  Description of Artificial Sequence: Synthetic oligonucleotide
  Antisense strand to SEQ ID NO: 1398454
aguaucagcaucaauccua

SEQ ID NO: 1398456 - RNA, 19 nt, Artificial Sequence
  Description of Artificial Sequence: Synthetic oligonucleotide
  Sense strand starting at position 2127 of SEQ ID NO: 1243150
gauugaugcugauacucca

SEQ ID NO: 1398457 - RNA, 19 nt, Artificial Sequence
  Description of Artificial Sequence: Synthetic oligonucleotide
  Antisense strand to SEQ ID NO: 1398456
uggaguaucagcaucaauc

SEQ ID NO: 1398458 - RNA, 19 nt, Artificial Sequence
  Description of Artificial Sequence: Synthetic oligonucleotide
  Sense strand starting at position 2172 of SEQ ID NO: 1243150
cagucugacugcugaauau

SEQ ID NO: 1398459 - RNA, 19 nt, Artificial Sequence
  Description of Artificial Sequence: Synthetic oligonucleotide
  Antisense strand to SEQ ID NO: 1398458
auauucagcagucagacug

SEQ ID NO: 1398460 - RNA, 19 nt, Artificial Sequence
  Description of Artificial Sequence: Synthetic oligonucleotide
  Sense strand starting at position 2236 of SEQ ID NO: 1243150
cugcuuuggcccugcagaa

SEQ ID NO: 1398461 - RNA, 19 nt, Artificial Sequence
  Description of Artificial Sequence: Synthetic oligonucleotide
  Antisense strand to SEQ ID NO: 1398460
uucugcagggccaaagcag

SEQ ID NO: 1398462 - RNA, 19 nt, Artificial Sequence
  Description of Artificial Sequence: Synthetic oligonucleotide
  Sense strand starting at position 2264 of SEQ ID NO: 1243150
agagcucccugcuuccaua

SEQ ID NO: 1398463 - RNA, 19 nt, Artificial Sequence
  Description of Artificial Sequence: Synthetic oligonucleotide
  Antisense strand to SEQ ID NO: 1398462
uauggaagcagggagcucu

SEQ ID NO: 1398464 - RNA, 19 nt, Artificial Sequence
  Description of Artificial Sequence: Synthetic oligonucleotide
  Sense strand starting at position 2461 of SEQ ID NO: 1243150
ccugauuccugagcagaga

SEQ ID NO: 1398465 - RNA, 19 nt, Artificial Sequence
  Description of Artificial Sequence: Synthetic oligonucleotide
  Antisense strand to SEQ ID NO: 1398464
ucucugcucaggaaucagg

SEQ ID NO: 1398466 - RNA, 19 nt, Artificial Sequence
  Description of Artificial Sequence: Synthetic oligonucleotide
  Sense strand starting at position 2603 of SEQ ID NO: 1243150
ccugcugaccugggaauua

SEQ ID NO: 1398467 - RNA, 19 nt, Artificial Sequence
  Description of Artificial Sequence: Synthetic oligonucleotide
  Antisense strand to SEQ ID NO: 1398466
uaauucccaggucagcagg

SEQ ID NO: 1398468 - RNA, 19 nt, Artificial Sequence
  Description of Artificial Sequence: Synthetic oligonucleotide
  Sense strand starting at position 2625 of SEQ ID NO: 1243150
acagacauuuguuguuuga

SEQ ID NO: 1398469 - RNA, 19 nt, Artificial Sequence
  Description of Artificial Sequence: Synthetic oligonucleotide
  Antisense strand to SEQ ID NO: 1398468
ucaaacaacaaaugucugu

SEQ ID NO: 1398470 - RNA, 19 nt, Artificial Sequence
  Description of Artificial Sequence: Synthetic oligonucleotide
  Sense strand starting at position 2629 of SEQ ID NO: 1243150
acauuuguuguuugaucuu

SEQ ID NO: 1398471 - RNA, 19 nt, Artificial Sequence
  Description of Artificial Sequence: Synthetic oligonucleotide
  Antisense strand to SEQ ID NO: 1398470
aagaucaaacaacaaaugu

SEQ ID NO: 1398472 - RNA, 19 nt, Artificial Sequence
  Description of Artificial Sequence: Synthetic oligonucleotide
  Sense strand starting at position 2632 of SEQ ID NO: 1243150
uuuguuguuugaucuugaa

SEQ ID NO: 1398473 - RNA, 19 nt, Artificial Sequence
  Description of Artificial Sequence: Synthetic oligonucleotide
  Antisense strand to SEQ ID NO: 1398472
uucaagaucaaacaacaaa

SEQ ID NO: 1398474 - RNA, 19 nt, Artificial Sequence
  Description of Artificial Sequence: Synthetic oligonucleotide
  Sense strand starting at position 2635 of SEQ ID NO: 1243150
guuguuugaucuugaagua

SEQ ID NO: 1398475 - RNA, 19 nt, Artificial Sequence
  Description of Artificial Sequence: Synthetic oligonucleotide
  Antisense strand to SEQ ID NO: 1398474
uacuucaagaucaaacaac

SEQ ID NO: 1398476 - RNA, 19 nt, Artificial Sequence
  Description of Artificial Sequence: Synthetic oligonucleotide
  Sense strand starting at position 2636 of SEQ ID NO: 1243150
uuguuugaucuugaaguac

SEQ ID NO: 1398477 - RNA, 19 nt, Artificial Sequence
  Description of Artificial Sequence: Synthetic oligonucleotide
  Antisense strand to SEQ ID NO: 1398476
guacuucaagaucaaacaa

SEQ ID NO: 1398478 - RNA, 19 nt, Artificial Sequence
  Description of Artificial Sequence: Synthetic oligonucleotide
  Sense strand starting at position 2682 of SEQ ID NO: 1243150
acaaauacuugccgaacuu

SEQ ID NO: 1398479 - RNA, 19 nt, Artificial Sequence
  Description of Artificial Sequence: Synthetic oligonucleotide
  Antisense strand to SEQ ID NO: 1398478
aaguucggcaaguauuugu

SEQ ID NO: 1398480 - RNA, 19 nt, Artificial Sequence
  Description of Artificial Sequence: Synthetic oligonucleotide
  Sense strand starting at position 2713 of SEQ ID NO: 1243150
cuccauggaucgcacuauu

SEQ ID NO: 1398481 - RNA, 19 nt, Artificial Sequence
  Description of Artificial Sequence: Synthetic oligonucleotide
  Antisense strand to SEQ ID NO: 1398480
aauagugcgauccauggag

SEQ ID NO: 1398482 - RNA, 19 nt, Artificial Sequence
  Description of Artificial Sequence: Synthetic oligonucleotide
  Sense strand starting at position 3037 of SEQ ID NO: 1243150
cuguccuggucuugcuaua

SEQ ID NO: 1398483 - RNA, 19 nt, Artificial Sequence
  Description of Artificial Sequence: Synthetic oligonucleotide
  Antisense strand to SEQ ID NO: 1398482
uauagcaagaccaggacag

SEQ ID NO: 1398484 - RNA, 19 nt, Artificial Sequence
  Description of Artificial Sequence: Synthetic oligonucleotide
  Sense strand starting at position 3042 of SEQ ID NO: 1243150
cuggucuugcuauauugau

SEQ ID NO: 1398485 - RNA, 19 nt, Artificial Sequence
  Description of Artificial Sequence: Synthetic oligonucleotide
  Antisense strand to SEQ ID NO: 1398484
aucaauauagcaagaccag

SEQ ID NO: 1398486 - RNA, 19 nt, Artificial Sequence
  Description of Artificial Sequence: Synthetic oligonucleotide
  Sense strand starting at position 3160 of SEQ ID NO: 1243150
augccuggcucuugagaga

SEQ ID NO: 1398487 - RNA, 19 nt, Artificial Sequence
  Description of Artificial Sequence: Synthetic oligonucleotide
  Antisense strand to SEQ ID NO: 1398486
ucucucaagagccaggcau

SEQ ID NO: 1398488 - RNA, 19 nt, Artificial Sequence
  Description of Artificial Sequence: Synthetic oligonucleotide
  Sense strand starting at position 3163 of SEQ ID NO: 1243150
ccuggcucuugagagacua

SEQ ID NO: 1398489 - RNA, 19 nt, Artificial Sequence
  Description of Artificial Sequence: Synthetic oligonucleotide
  Antisense strand to SEQ ID NO: 1398488
uagucucucaagagccagg

SEQ ID NO: 1398490 - RNA, 19 nt, Artificial Sequence
  Description of Artificial Sequence: Synthetic oligonucleotide
  Sense strand starting at position 3206 of SEQ ID NO: 1243150
gagagucaaucugcuuuau

SEQ ID NO: 1398491 - RNA, 19 nt, Artificial Sequence
  Description of Artificial Sequence: Synthetic oligonucleotide
  Antisense strand to SEQ ID NO: 1398490
auaaagcagauugacucuc

SEQ ID NO: 1398492 - RNA, 19 nt, Artificial Sequence
  Description of Artificial Sequence: Synthetic oligonucleotide
  Sense strand starting at position 3537 of SEQ ID NO: 1243150
auugucaaccaaggauuau

SEQ ID NO: 1398493 - RNA, 19 nt, Artificial Sequence
  Description of Artificial Sequence: Synthetic oligonucleotide
  Antisense strand to SEQ ID NO: 1398492
auaauccuugguugacaau

SEQ ID NO: 1398494 - RNA, 19 nt, Artificial Sequence
  Description of Artificial Sequence: Synthetic oligonucleotide
  Sense strand starting at position 3616 of SEQ ID NO: 1243150
acaucaggccuugaaccau

SEQ ID NO: 1398495 - RNA, 19 nt, Artificial Sequence
  Description of Artificial Sequence: Synthetic oligonucleotide
  Antisense strand to SEQ ID NO: 1398494
augguucaaggccugaugu

SEQ ID NO: 1398496 - RNA, 19 nt, Artificial Sequence
  Description of Artificial Sequence: Synthetic oligonucleotide
  Sense strand starting at position 3766 of SEQ ID NO: 1243150
cggccuucucugggagaga

SEQ ID NO: 1398497 - RNA, 19 nt, Artificial Sequence
  Description of Artificial Sequence: Synthetic oligonucleotide
  Antisense strand to SEQ ID NO: 1398496
ucucucccagagaaggccg

SEQ ID NO: 1398498 - RNA, 19 nt, Artificial Sequence
  Description of Artificial Sequence: Synthetic oligonucleotide
  Sense strand starting at position 3767 of SEQ ID NO: 1243150
ggccuucucugggagagag

SEQ ID NO: 1398499 - RNA, 19 nt, Artificial Sequence
  Description of Artificial Sequence: Synthetic oligonucleotide
  Antisense strand to SEQ ID NO: 1398498
cucucucccagagaaggcc

SEQ ID NO: 1398500 - RNA, 19 nt, Artificial Sequence
  Description of Artificial Sequence: Synthetic oligonucleotide
  Sense strand starting at position 3872 of SEQ ID NO: 1243150
cuggcuuccucccauugaa

SEQ ID NO: 1398501 - RNA, 19 nt, Artificial Sequence
  Description of Artificial Sequence: Synthetic oligonucleotide
  Antisense strand to SEQ ID NO: 1398500
uucaaugggaggaagccag

SEQ ID NO: 1398502 - RNA, 19 nt, Artificial Sequence
  Description of Artificial Sequence: Synthetic oligonucleotide
  Sense strand starting at position 3940 of SEQ ID NO: 1243150
cccuuuaugucccguaugu

SEQ ID NO: 1398503 - RNA, 19 nt, Artificial Sequence
  Description of Artificial Sequence: Synthetic oligonucleotide
  Antisense strand to SEQ ID NO: 1398502
acauacgggacauaaaggg

SEQ ID NO: 1398504 - RNA, 19 nt, Artificial Sequence
  Description of Artificial Sequence: Synthetic oligonucleotide
  Sense strand starting at position 3942 of SEQ ID NO: 1243150
cuuuaugucccguauguga

SEQ ID NO: 1398505 - RNA, 19 nt, Artificial Sequence
  Description of Artificial Sequence: Synthetic oligonucleotide
  Antisense strand to SEQ ID NO: 1398504
ucacauacgggacauaaag

SEQ ID NO: 1398506 - RNA, 19 nt, Artificial Sequence
  Description of Artificial Sequence: Synthetic oligonucleotide
  Sense strand starting at position 3944 of SEQ ID NO: 1243150
uuaugucccguaugugaug

SEQ ID NO: 1398507 - RNA, 19 nt, Artificial Sequence
  Description of Artificial Sequence: Synthetic oligonucleotide
  Antisense strand to SEQ ID NO: 1398506
caucacauacgggacauaa

SEQ ID NO: 1398508 - RNA, 19 nt, Artificial Sequence
  Description of Artificial Sequence: Synthetic oligonucleotide
  Sense strand starting at position 3947 of SEQ ID NO: 1243150
ugucccguaugugaugaau

SEQ ID NO: 1398509 - RNA, 19 nt, Artificial Sequence
  Description of Artificial Sequence: Synthetic oligonucleotide
  Antisense strand to SEQ ID NO: 1398508
auucaucacauacgggaca

SEQ ID NO: 1398510 - RNA, 19 nt, Artificial Sequence
  Description of Artificial Sequence: Synthetic oligonucleotide
  Sense strand starting at position 3949 of SEQ ID NO: 1243150
ucccguaugugaugaaucu

SEQ ID NO: 1398511 - RNA, 19 nt, Artificial Sequence
  Description of Artificial Sequence: Synthetic oligonucleotide
  Antisense strand to SEQ ID NO: 1398510
agauucaucacauacggga

SEQ ID NO: 1398512 - RNA, 19 nt, Artificial Sequence
  Description of Artificial Sequence: Synthetic oligonucleotide
  Sense strand starting at position 3950 of SEQ ID NO: 1243150
cccguaugugaugaaucuu

SEQ ID NO: 1398513 - RNA, 19 nt, Artificial Sequence
  Description of Artificial Sequence: Synthetic oligonucleotide
  Antisense strand to SEQ ID NO: 1398512
aagauucaucacauacggg

SEQ ID NO: 1398514 - RNA, 19 nt, Artificial Sequence
  Description of Artificial Sequence: Synthetic oligonucleotide
  Sense strand starting at position 3956 of SEQ ID NO: 1243150
ugugaugaaucuugcuucu

SEQ ID NO: 1398515 - RNA, 19 nt, Artificial Sequence
  Description of Artificial Sequence: Synthetic oligonucleotide
  Antisense strand to SEQ ID NO: 1398514
agaagcaagauucaucaca

SEQ ID NO: 1398516 - RNA, 19 nt, Artificial Sequence
  Description of Artificial Sequence: Synthetic oligonucleotide
  Sense strand starting at position 3974 of SEQ ID NO: 1243150
uccacuucucagugagucu

SEQ ID NO: 1398517 - RNA, 19 nt, Artificial Sequence
  Description of Artificial Sequence: Synthetic oligonucleotide
  Antisense strand to SEQ ID NO: 1398516
agacucacugagaagugga

SEQ ID NO: 1398518 - RNA, 19 nt, Artificial Sequence
  Description of Artificial Sequence: Synthetic oligonucleotide
  Sense strand starting at position 181 of SEQ ID NO: 1243151
auugucaaccaaggauuau

SEQ ID NO: 1398519 - RNA, 19 nt, Artificial Sequence
  Description of Artificial Sequence: Synthetic oligonucleotide
  Antisense strand to SEQ ID NO: 1398518
auaauccuugguugacaau

SEQ ID NO: 1398520 - RNA, 19 nt, Artificial Sequence
  Description of Artificial Sequence: Synthetic oligonucleotide
  Sense strand starting at position 260 of SEQ ID NO: 1243151
acaucaggccuugaaccau

SEQ ID NO: 1398521 - RNA, 19 nt, Artificial Sequence
  Description of Artificial Sequence: Synthetic oligonucleotide
  Antisense strand to SEQ ID NO: 1398520
augguucaaggccugaugu

SEQ ID NO: 1398522 - RNA, 19 nt, Artificial Sequence
  Description of Artificial Sequence: Synthetic oligonucleotide
  Sense strand starting at position 410 of SEQ ID NO: 1243151
cggccuucucugggagaga

SEQ ID NO: 1398523 - RNA, 19 nt, Artificial Sequence
  Description of Artificial Sequence: Synthetic oligonucleotide
  Antisense strand to SEQ ID NO: 1398522
ucucucccagagaaggccg

SEQ ID NO: 1398524 - RNA, 19 nt, Artificial Sequence
  Description of Artificial Sequence: Synthetic oligonucleotide
  Sense strand starting at position 411 of SEQ ID NO: 1243151
ggccuucucugggagagag

SEQ ID NO: 1398525 - RNA, 19 nt, Artificial Sequence
  Description of Artificial Sequence: Synthetic oligonucleotide
  Antisense strand to SEQ ID NO: 1398524
cucucucccagagaaggcc

SEQ ID NO: 1398526 - RNA, 19 nt, Artificial Sequence
  Description of Artificial Sequence: Synthetic oligonucleotide
  Sense strand starting at position 516 of SEQ ID NO: 1243151
cuggcuuccucccauugaa

SEQ ID NO: 1398527 - RNA, 19 nt, Artificial Sequence
  Description of Artificial Sequence: Synthetic oligonucleotide
  Antisense strand to SEQ ID NO: 1398526
uucaaugggaggaagccag

SEQ ID NO: 1398528 - RNA, 19 nt, Artificial Sequence
  Description of Artificial Sequence: Synthetic oligonucleotide
  Sense strand starting at position 586 of SEQ ID NO: 1243151
cuuuaugucccguauguga

SEQ ID NO: 1398529 - RNA, 19 nt, Artificial Sequence
  Description of Artificial Sequence: Synthetic oligonucleotide
  Antisense strand to SEQ ID NO: 1398528
ucacauacgggacauaaag

SEQ ID NO: 1398530 - RNA, 19 nt, Artificial Sequence
  Description of Artificial Sequence: Synthetic oligonucleotide
  Sense strand starting at position 588 of SEQ ID NO: 1243151
uuaugucccguaugugaug

SEQ ID NO: 1398531 - RNA, 19 nt, Artificial Sequence
  Description of Artificial Sequence: Synthetic oligonucleotide
  Antisense strand to SEQ ID NO: 1398530
caucacauacgggacauaa

SEQ ID NO: 1398532 - RNA, 19 nt, Artificial Sequence
  Description of Artificial Sequence: Synthetic oligonucleotide
  Sense strand starting at position 594 of SEQ ID NO: 1243151
cccguaugugaugaaucuu

SEQ ID NO: 1398533 - RNA, 19 nt, Artificial Sequence
  Description of Artificial Sequence: Synthetic oligonucleotide
  Antisense strand to SEQ ID NO: 1398532
aagauucaucacauacggg

SEQ ID NO: 1398534 - RNA, 19 nt, Artificial Sequence
  Description of Artificial Sequence: Synthetic oligonucleotide
  Sense strand starting at position 618 of SEQ ID NO: 1243151
uccacuucucagugagucu

SEQ ID NO: 1398535 - RNA, 19 nt, Artificial Sequence
  Description of Artificial Sequence: Synthetic oligonucleotide
  Antisense strand to SEQ ID NO: 1398534
agacucacugagaagugga

SEQ ID NO: 1398536 - RNA, 19 nt, Artificial Sequence
  Description of Artificial Sequence: Synthetic oligonucleotide
  Sense strand starting at position 672 of SEQ ID NO: 1243151
ccucauguccuguaacagu

SEQ ID NO: 1398537 - RNA, 19 nt, Artificial Sequence
  Description of Artificial Sequence: Synthetic oligonucleotide
  Antisense strand to SEQ ID NO: 1398536
acuguuacaggacaugagg

SEQ ID NO: 1398538 - RNA, 19 nt, Artificial Sequence
  Description of Artificial Sequence: Synthetic oligonucleotide
  Sense strand starting at position 726 of SEQ ID NO: 1243151
ccgauagcacagugacuuu

SEQ ID NO: 1398539 - RNA, 19 nt, Artificial Sequence
  Description of Artificial Sequence: Synthetic oligonucleotide
  Antisense strand to SEQ ID NO: 1398538
aaagucacugugcuaucgg

SEQ ID NO: 1398540 - RNA, 19 nt, Artificial Sequence
  Description of Artificial Sequence: Synthetic oligonucleotide
  Sense strand starting at position 760 of SEQ ID NO: 1243151
uaggauugcuguucccauu

SEQ ID NO: 1398541 - RNA, 19 nt, Artificial Sequence
  Description of Artificial Sequence: Synthetic oligonucleotide
  Antisense strand to SEQ ID NO: 1398540
aaugggaacagcaauccua

SEQ ID NO: 1398542 - RNA, 19 nt, Artificial Sequence
  Description of Artificial Sequence: Synthetic oligonucleotide
  Sense strand starting at position 837 of SEQ ID NO: 1243151
cagccugaacuaugaggaa

SEQ ID NO: 1398543 - RNA, 19 nt, Artificial Sequence
  Description of Artificial Sequence: Synthetic oligonucleotide
  Antisense strand to SEQ ID NO: 1398542
uuccucauaguucaggcug

SEQ ID NO: 1398544 - RNA, 19 nt, Artificial Sequence
  Description of Artificial Sequence: Synthetic oligonucleotide
  Sense strand starting at position 1029 of SEQ ID NO: 1243151
cggagaacucacuaugccu

SEQ ID NO: 1398545 - RNA, 19 nt, Artificial Sequence
  Description of Artificial Sequence: Synthetic oligonucleotide
  Antisense strand to SEQ ID NO: 1398544
aggcauagugaguucuccg

SEQ ID NO: 1398546 - RNA, 19 nt, Artificial Sequence
  Description of Artificial Sequence: Synthetic oligonucleotide
  Sense strand starting at position 1530 of SEQ ID NO: 1243151
aaguuauuuagcggccagu

SEQ ID NO: 1398547 - RNA, 19 nt, Artificial Sequence
  Description of Artificial Sequence: Synthetic oligonucleotide
  Antisense strand to SEQ ID NO: 1398546
acuggccgcuaaauaacuu

SEQ ID NO: 1398548 - RNA, 19 nt, Artificial Sequence
  Description of Artificial Sequence: Synthetic oligonucleotide
  Sense strand starting at position 1543 of SEQ ID NO: 1243151
gccaguccuucgaggguga

SEQ ID NO: 1398549 - RNA, 19 nt, Artificial Sequence
  Description of Artificial Sequence: Synthetic oligonucleotide
  Antisense strand to SEQ ID NO: 1398548
ucacccucgaaggacuggc

SEQ ID NO: 1398550 - RNA, 19 nt, Artificial Sequence
  Description of Artificial Sequence: Synthetic oligonucleotide
  Sense strand starting at position 1545 of SEQ ID NO: 1243151
caguccuucgagggugaca

SEQ ID NO: 1398551 - RNA, 19 nt, Artificial Sequence
  Description of Artificial Sequence: Synthetic oligonucleotide
  Antisense strand to SEQ ID NO: 1398550
ugucacccucgaaggacug

SEQ ID NO: 1398552 - RNA, 19 nt, Artificial Sequence
  Description of Artificial Sequence: Synthetic oligonucleotide
  Sense strand starting at position 1563 of SEQ ID NO: 1243151
agguccgauucuucccaga

SEQ ID NO: 1398553 - RNA, 19 nt, Artificial Sequence
  Description of Artificial Sequence: Synthetic oligonucleotide
  Antisense strand to SEQ ID NO: 1398552
ucugggaagaaucggaccu

SEQ ID NO: 1398554 - RNA, 19 nt, Artificial Sequence
  Description of Artificial Sequence: Synthetic oligonucleotide
  Sense strand starting at position 1565 of SEQ ID NO: 1243151
guccgauucuucccagaga

SEQ ID NO: 1398555 - RNA, 19 nt, Artificial Sequence
  Description of Artificial Sequence: Synthetic oligonucleotide
  Antisense strand to SEQ ID NO: 1398554
ucucugggaagaaucggac

SEQ ID NO: 1398556 - RNA, 19 nt, Artificial Sequence
  Description of Artificial Sequence: Synthetic oligonucleotide
  Sense strand starting at position 1566 of SEQ ID NO: 1243151
uccgauucuucccagagag

SEQ ID NO: 1398557 - RNA, 19 nt, Artificial Sequence
  Description of Artificial Sequence: Synthetic oligonucleotide
  Antisense strand to SEQ ID NO: 1398556
cucucugggaagaaucgga

SEQ ID NO: 1398558 - RNA, 19 nt, Artificial Sequence
  Description of Artificial Sequence: Synthetic oligonucleotide
  Sense strand starting at position 1833 of SEQ ID NO: 1243151
ggcgcugauucugcccaau

SEQ ID NO: 1398559 - RNA, 19 nt, Artificial Sequence
  Description of Artificial Sequence: Synthetic oligonucleotide
  Antisense strand to SEQ ID NO: 1398558
auugggcagaaucagcgcc

SEQ ID NO: 1398560 - RNA, 19 nt, Artificial Sequence
  Description of Artificial Sequence: Synthetic oligonucleotide
  Sense strand starting at position 1835 of SEQ ID NO: 1243151
cgcugauucugcccaaucu

SEQ ID NO: 1398561 - RNA, 19 nt, Artificial Sequence
  Description of Artificial Sequence: Synthetic oligonucleotide
  Antisense strand to SEQ ID NO: 1398560
agauugggcagaaucagcg

SEQ ID NO: 1398562 - RNA, 19 nt, Artificial Sequence
  Description of Artificial Sequence: Synthetic oligonucleotide
  Sense strand starting at position 2206 of SEQ ID NO: 1243151
ugccaauuuccaggugcuu

SEQ ID NO: 1398563 - RNA, 19 nt, Artificial Sequence
  Description of Artificial Sequence: Synthetic oligonucleotide
  Antisense strand to SEQ ID NO: 1398562
aagcaccuggaaauuggca

SEQ ID NO: 1398564 - RNA, 19 nt, Artificial Sequence
  Description of Artificial Sequence: Synthetic oligonucleotide
  Sense strand starting at position 2226 of SEQ ID NO: 1243151
ccaucuaucuugucaucga

SEQ ID NO: 1398565 - RNA, 19 nt, Artificial Sequence
  Description of Artificial Sequence: Synthetic oligonucleotide
  Antisense strand to SEQ ID NO: 1398564
ucgaugacaagauagaugg

SEQ ID NO: 1398566 - RNA, 19 nt, Artificial Sequence
  Description of Artificial Sequence: Synthetic oligonucleotide
  Sense strand starting at position 2257 of SEQ ID NO: 1243151
gccugucacagaggaaguu

SEQ ID NO: 1398567 - RNA, 19 nt, Artificial Sequence
  Description of Artificial Sequence: Synthetic oligonucleotide
  Antisense strand to SEQ ID NO: 1398566
aacuuccucugugacaggc

SEQ ID NO: 1398568 - RNA, 19 nt, Artificial Sequence
  Description of Artificial Sequence: Synthetic oligonucleotide
  Sense strand starting at position 2469 of SEQ ID NO: 1243151
ucuggacgcuucuacaaau

SEQ ID NO: 1398569 - RNA, 19 nt, Artificial Sequence
  Description of Artificial Sequence: Synthetic oligonucleotide
  Antisense strand to SEQ ID NO: 1398568
auuuguagaagcguccaga

SEQ ID NO: 1398570 - RNA, 19 nt, Artificial Sequence
  Description of Artificial Sequence: Synthetic oligonucleotide
  Sense strand starting at position 2519 of SEQ ID NO: 1243151
cucccuggucgauagagaa

SEQ ID NO: 1398571 - RNA, 19 nt, Artificial Sequence
  Description of Artificial Sequence: Synthetic oligonucleotide
  Antisense strand to SEQ ID NO: 1398570
uucucuaucgaccagggag

SEQ ID NO: 1398572 - RNA, 19 nt, Artificial Sequence
  Description of Artificial Sequence: Synthetic oligonucleotide
  Sense strand starting at position 2859 of SEQ ID NO: 1243151
gguccuucccuaggagaag

SEQ ID NO: 1398573 - RNA, 19 nt, Artificial Sequence
  Description of Artificial Sequence: Synthetic oligonucleotide
  Antisense strand to SEQ ID NO: 1398572
cuucuccuagggaaggacc

SEQ ID NO: 1398574 - RNA, 19 nt, Artificial Sequence
  Description of Artificial Sequence: Synthetic oligonucleotide
  Sense strand starting at position 2860 of SEQ ID NO: 1243151
guccuucccuaggagaagu

SEQ ID NO: 1398575 - RNA, 19 nt, Artificial Sequence
  Description of Artificial Sequence: Synthetic oligonucleotide
  Antisense strand to SEQ ID NO: 1398574
acuucuccuagggaaggac

SEQ ID NO: 1398576 - RNA, 19 nt, Artificial Sequence
  Description of Artificial Sequence: Synthetic oligonucleotide
  Sense strand starting at position 2945 of SEQ ID NO: 1243151
gccuucugcucaguuagga

SEQ ID NO: 1398577 - RNA, 19 nt, Artificial Sequence
  Description of Artificial Sequence: Synthetic oligonucleotide
  Antisense strand to SEQ ID NO: 1398576
uccuaacugagcagaaggc

SEQ ID NO: 1398578 - RNA, 19 nt, Artificial Sequence
  Description of Artificial Sequence: Synthetic oligonucleotide
  Sense strand starting at position 3039 of SEQ ID NO: 1243151
gcagccugaacucaggauu

SEQ ID NO: 1398579 - RNA, 19 nt, Artificial Sequence
  Description of Artificial Sequence: Synthetic oligonucleotide
  Antisense strand to SEQ ID NO: 1398578
aauccugaguucaggcugc

SEQ ID NO: 1398580 - RNA, 19 nt, Artificial Sequence
  Description of Artificial Sequence: Synthetic oligonucleotide
  Sense strand starting at position 3212 of SEQ ID NO: 1243151
ggcugcaucugcgugagaa

SEQ ID NO: 1398581 - RNA, 19 nt, Artificial Sequence
  Description of Artificial Sequence: Synthetic oligonucleotide
  Antisense strand to SEQ ID NO: 1398580
uucucacgcagaugcagcc

SEQ ID NO: 1398582 - RNA, 19 nt, Artificial Sequence
  Description of Artificial Sequence: Synthetic oligonucleotide
  Sense strand starting at position 3213 of SEQ ID NO: 1243151
gcugcaucugcgugagaac

SEQ ID NO: 1398583 - RNA, 19 nt, Artificial Sequence
  Description of Artificial Sequence: Synthetic oligonucleotide
  Antisense strand to SEQ ID NO: 1398582
guucucacgcagaugcagc

SEQ ID NO: 1398584 - RNA, 19 nt, Artificial Sequence
  Description of Artificial Sequence: Synthetic oligonucleotide
  Sense strand starting at position 3288 of SEQ ID NO: 1243151
cugugacaauucuucuaga

SEQ ID NO: 1398585 - RNA, 19 nt, Artificial Sequence
  Description of Artificial Sequence: Synthetic oligonucleotide
  Antisense strand to SEQ ID NO: 1398584
ucuagaagaauugucacag

SEQ ID NO: 1398586 - RNA, 19 nt, Artificial Sequence
  Description of Artificial Sequence: Synthetic oligonucleotide
  Sense strand starting at position 3289 of SEQ ID NO: 1243151
ugugacaauucuucuagag

SEQ ID NO: 1398587 - RNA, 19 nt, Artificial Sequence
  Description of Artificial Sequence: Synthetic oligonucleotide
  Antisense strand to SEQ ID NO: 1398586
cucuagaagaauugucaca

SEQ ID NO: 1398588 - RNA, 19 nt, Artificial Sequence
  Description of Artificial Sequence: Synthetic oligonucleotide
  Sense strand starting at position 3291 of SEQ ID NO: 1243151
ugacaauucuucuagagac

SEQ ID NO: 1398589 - RNA, 19 nt, Artificial Sequence
  Description of Artificial Sequence: Synthetic oligonucleotide
  Antisense strand to SEQ ID NO: 1398588
gucucuagaagaauuguca

SEQ ID NO: 1398590 - RNA, 19 nt, Artificial Sequence
  Description of Artificial Sequence: Synthetic oligonucleotide
  Sense strand starting at position 3312 of SEQ ID NO: 1243151
ggcuuuggcucacagagaa

SEQ ID NO: 1398591 - RNA, 19 nt, Artificial Sequence
  Description of Artificial Sequence: Synthetic oligonucleotide
  Antisense strand to SEQ ID NO: 1398590
uucucugugagccaaagcc

SEQ ID NO: 1398592 - RNA, 19 nt, Artificial Sequence
  Description of Artificial Sequence: Synthetic oligonucleotide
  Sense strand starting at position 3466 of SEQ ID NO: 1243151
aggagagcucugggucagu

SEQ ID NO: 1398593 - RNA, 19 nt, Artificial Sequence
  Description of Artificial Sequence: Synthetic oligonucleotide
  Antisense strand to SEQ ID NO: 1398592
acugacccagagcucuccu

SEQ ID NO: 1398594 - RNA, 19 nt, Artificial Sequence
  Description of Artificial Sequence: Synthetic oligonucleotide
  Sense strand starting at position 3708 of SEQ ID NO: 1243151
cgcauuaaguucccaagga

SEQ ID NO: 1398595 - RNA, 19 nt, Artificial Sequence
  Description of Artificial Sequence: Synthetic oligonucleotide
  Antisense strand to SEQ ID NO: 1398594
uccuugggaacuuaaugcg

SEQ ID NO: 1398596 - RNA, 19 nt, Artificial Sequence
  Description of Artificial Sequence: Synthetic oligonucleotide
  Sense strand starting at position 3709 of SEQ ID NO: 1243151
gcauuaaguucccaaggaa

SEQ ID NO: 1398597 - RNA, 19 nt, Artificial Sequence
  Description of Artificial Sequence: Synthetic oligonucleotide
  Antisense strand to SEQ ID NO: 1398596
uuccuugggaacuuaaugc

SEQ ID NO: 1398598 - RNA, 19 nt, Artificial Sequence
  Description of Artificial Sequence: Synthetic oligonucleotide
  Sense strand starting at position 21 of SEQ ID NO: 1243152
cgugaaauaucaugauuau

SEQ ID NO: 1398599 - RNA, 19 nt, Artificial Sequence
  Description of Artificial Sequence: Synthetic oligonucleotide
  Antisense strand to SEQ ID NO: 1398598
auaaucaugauauuucacg

SEQ ID NO: 1398600 - RNA, 19 nt, Artificial Sequence
  Description of Artificial Sequence: Synthetic oligonucleotide
  Sense strand starting at position 1236 of SEQ ID NO: 1243152
acugaucuacuaggucaga

SEQ ID NO: 1398601 - RNA, 19 nt, Artificial Sequence
  Description of Artificial Sequence: Synthetic oligonucleotide
  Antisense strand to SEQ ID NO: 1398600
ucugaccuaguagaucagu

SEQ ID NO: 1398602 - RNA, 19 nt, Artificial Sequence
  Description of Artificial Sequence: Synthetic oligonucleotide
  Sense strand starting at position 1237 of SEQ ID NO: 1243152
cugaucuacuaggucagaa

SEQ ID NO: 1398603 - RNA, 19 nt, Artificial Sequence
  Description of Artificial Sequence: Synthetic oligonucleotide
  Antisense strand to SEQ ID NO: 1398602
uucugaccuaguagaucag

SEQ ID NO: 1398604 - RNA, 19 nt, Artificial Sequence
  Description of Artificial Sequence: Synthetic oligonucleotide
  Sense strand starting at position 1241 of SEQ ID NO: 1243152
ucuacuaggucagaaucua

SEQ ID NO: 1398605 - RNA, 19 nt, Artificial Sequence
  Description of Artificial Sequence: Synthetic oligonucleotide
  Antisense strand to SEQ ID NO: 1398604
uagauucugaccuaguaga

SEQ ID NO: 1398606 - RNA, 19 nt, Artificial Sequence
  Description of Artificial Sequence: Synthetic oligonucleotide
  Sense strand starting at position 3390 of SEQ ID NO: 1243152
accauacaguagucaaacu

SEQ ID NO: 1398607 - RNA, 19 nt, Artificial Sequence
  Description of Artificial Sequence: Synthetic oligonucleotide
  Antisense strand to SEQ ID NO: 1398606
aguuugacuacuguauggu

SEQ ID NO: 1398608 - RNA, 19 nt, Artificial Sequence
  Description of Artificial Sequence: Synthetic oligonucleotide
  Sense strand starting at position 3456 of SEQ ID NO: 1243152
ggucauaaucaugagugca

SEQ ID NO: 1398609 - RNA, 19 nt, Artificial Sequence
  Description of Artificial Sequence: Synthetic oligonucleotide
  Antisense strand to SEQ ID NO: 1398608
ugcacucaugauuaugacc

SEQ ID NO: 1398610 - RNA, 19 nt, Artificial Sequence
  Description of Artificial Sequence: Synthetic oligonucleotide
  Sense strand starting at position 3458 of SEQ ID NO: 1243152
ucauaaucaugagugcauc

SEQ ID NO: 1398611 - RNA, 19 nt, Artificial Sequence
  Description of Artificial Sequence: Synthetic oligonucleotide
  Antisense strand to SEQ ID NO: 1398610
gaugcacucaugauuauga

SEQ ID NO: 1398612 - RNA, 19 nt, Artificial Sequence
  Description of Artificial Sequence: Synthetic oligonucleotide
  Sense strand starting at position 54 of SEQ ID NO: 1243153
acaggauggcaauguaauc

SEQ ID NO: 1398613 - RNA, 19 nt, Artificial Sequence
  Description of Artificial Sequence: Synthetic oligonucleotide
  Antisense strand to SEQ ID NO: 1398612
gauuacauugccauccugu

SEQ ID NO: 1398614 - RNA, 19 nt, Artificial Sequence
  Description of Artificial Sequence: Synthetic oligonucleotide
  Sense strand starting at position 59 of SEQ ID NO: 1243153
auggcaauguaaucuacau

SEQ ID NO: 1398615 - RNA, 19 nt, Artificial Sequence
  Description of Artificial Sequence: Synthetic oligonucleotide
  Antisense strand to SEQ ID NO: 1398614
auguagauuacauugccau

SEQ ID NO: 1398616 - RNA, 19 nt, Artificial Sequence
  Description of Artificial Sequence: Synthetic oligonucleotide
  Sense strand starting at position 85 of SEQ ID NO: 1243153
gccaguaugaaaugucuga

SEQ ID NO: 1398617 - RNA, 19 nt, Artificial Sequence
  Description of Artificial Sequence: Synthetic oligonucleotide
  Antisense strand to SEQ ID NO: 1398616
ucagacauuucauacuggc

SEQ ID NO: 1398618 - RNA, 19 nt, Artificial Sequence
  Description of Artificial Sequence: Synthetic oligonucleotide
  Sense strand starting at position 215 of SEQ ID NO: 1243153
ucucaaggucacuauuagu

SEQ ID NO: 1398619 - RNA, 19 nt, Artificial Sequence
  Description of Artificial Sequence: Synthetic oligonucleotide
  Antisense strand to SEQ ID NO: 1398618
acuaauagugaccuugaga

SEQ ID NO: 1398620 - RNA, 19 nt, Artificial Sequence
  Description of Artificial Sequence: Synthetic oligonucleotide
  Sense strand starting at position 223 of SEQ ID NO: 1243153
ucacuauuaguaugagggu

SEQ ID NO: 1398621 - RNA, 19 nt, Artificial Sequence
  Description of Artificial Sequence: Synthetic oligonucleotide
  Antisense strand to SEQ ID NO: 1398620
acccucauacuaauaguga

SEQ ID NO: 1398622 - RNA, 19 nt, Artificial Sequence
  Description of Artificial Sequence: Synthetic oligonucleotide
  Sense strand starting at position 549 of SEQ ID NO: 1243153
ccgcuuguuaaagaaaugu

SEQ ID NO: 1398623 - RNA, 19 nt, Artificial Sequence
  Description of Artificial Sequence: Synthetic oligonucleotide
  Antisense strand to SEQ ID NO: 1398622
acauuucuuuaacaagcgg

SEQ ID NO: 1398624 - RNA, 19 nt, Artificial Sequence
  Description of Artificial Sequence: Synthetic oligonucleotide
  Sense strand starting at position 836 of SEQ ID NO: 1243153
cuaaauuaccuccgaggca

SEQ ID NO: 1398625 - RNA, 19 nt, Artificial Sequence
  Description of Artificial Sequence: Synthetic oligonucleotide
  Antisense strand to SEQ ID NO: 1398624
ugccucggagguaauuuag

SEQ ID NO: 1398626 - RNA, 19 nt, Artificial Sequence
  Description of Artificial Sequence: Synthetic oligonucleotide
  Sense strand starting at position 935 of SEQ ID NO: 1243153
ucccaucuaccgggacaaa

SEQ ID NO: 1398627 - RNA, 19 nt, Artificial Sequence
  Description of Artificial Sequence: Synthetic oligonucleotide
  Antisense strand to SEQ ID NO: 1398626
uuugucccgguagauggga

SEQ ID NO: 1398628 - RNA, 19 nt, Artificial Sequence
  Description of Artificial Sequence: Synthetic oligonucleotide
  Sense strand starting at position 997 of SEQ ID NO: 1243153
ggaaccuuucugggucaua

SEQ ID NO: 1398629 - RNA, 19 nt, Artificial Sequence
  Description of Artificial Sequence: Synthetic oligonucleotide
  Antisense strand to SEQ ID NO: 1398628
uaugacccagaaagguucc

SEQ ID NO: 1398630 - RNA, 19 nt, Artificial Sequence
  Description of Artificial Sequence: Synthetic oligonucleotide
  Sense strand starting at position 998 of SEQ ID NO: 1243153
gaaccuuucugggucauaa

SEQ ID NO: 1398631 - RNA, 19 nt, Artificial Sequence
  Description of Artificial Sequence: Synthetic oligonucleotide
  Antisense strand to SEQ ID NO: 1398630
uuaugacccagaaagguuc

SEQ ID NO: 1398632 - RNA, 19 nt, Artificial Sequence
  Description of Artificial Sequence: Synthetic oligonucleotide
  Sense strand starting at position 1000 of SEQ ID NO: 1243153
accuuucugggucauaauc

SEQ ID NO: 1398633 - RNA, 19 nt, Artificial Sequence
  Description of Artificial Sequence: Synthetic oligonucleotide
  Antisense strand to SEQ ID NO: 1398632
gauuaugacccagaaaggu

SEQ ID NO: 1398634 - RNA, 19 nt, Artificial Sequence
  Description of Artificial Sequence: Synthetic oligonucleotide
  Sense strand starting at position 1216 of SEQ ID NO: 1243153
uaggguugccaauacugau

SEQ ID NO: 1398635 - RNA, 19 nt, Artificial Sequence
  Description of Artificial Sequence: Synthetic oligonucleotide
  Antisense strand to SEQ ID NO: 1398634
aucaguauuggcaacccua

SEQ ID NO: 1398636 - RNA, 19 nt, Artificial Sequence
  Description of Artificial Sequence: Synthetic oligonucleotide
  Sense strand starting at position 1229 of SEQ ID NO: 1243153
acugaucuacuaggucaga

SEQ ID NO: 1398637 - RNA, 19 nt, Artificial Sequence
  Description of Artificial Sequence: Synthetic oligonucleotide
  Antisense strand to SEQ ID NO: 1398636
ucugaccuaguagaucagu

SEQ ID NO: 1398638 - RNA, 19 nt, Artificial Sequence
  Description of Artificial Sequence: Synthetic oligonucleotide
  Sense strand starting at position 1230 of SEQ ID NO: 1243153
cugaucuacuaggucagaa

SEQ ID NO: 1398639 - RNA, 19 nt, Artificial Sequence
  Description of Artificial Sequence: Synthetic oligonucleotide
  Antisense strand to SEQ ID NO: 1398638
uucugaccuaguagaucag

SEQ ID NO: 1398640 - RNA, 19 nt, Artificial Sequence
  Description of Artificial Sequence: Synthetic oligonucleotide
  Sense strand starting at position 1259 of SEQ ID NO: 1243153
gggaauugaugcucuuuaa

SEQ ID NO: 1398641 - RNA, 19 nt, Artificial Sequence
  Description of Artificial Sequence: Synthetic oligonucleotide
  Antisense strand to SEQ ID NO: 1398640
uuaaagagcaucaauuccc

SEQ ID NO: 1398642 - RNA, 19 nt, Artificial Sequence
  Description of Artificial Sequence: Synthetic oligonucleotide
  Sense strand starting at position 1347 of SEQ ID NO: 1243153
ggauaagacauguggucuc

SEQ ID NO: 1398643 - RNA, 19 nt, Artificial Sequence
  Description of Artificial Sequence: Synthetic oligonucleotide
  Antisense strand to SEQ ID NO: 1398642
gagaccacaugucuuaucc

SEQ ID NO: 1398644 - RNA, 19 nt, Artificial Sequence
  Description of Artificial Sequence: Synthetic oligonucleotide
  Sense strand starting at position 1407 of SEQ ID NO: 1243153
gggucugauucgaggagau

SEQ ID NO: 1398645 - RNA, 19 nt, Artificial Sequence
  Description of Artificial Sequence: Synthetic oligonucleotide
  Antisense strand to SEQ ID NO: 1398644
aucuccucgaaucagaccc

SEQ ID NO: 1398646 - RNA, 19 nt, Artificial Sequence
  Description of Artificial Sequence: Synthetic oligonucleotide
  Sense strand starting at position 1409 of SEQ ID NO: 1243153
gucugauucgaggagaucu

SEQ ID NO: 1398647 - RNA, 19 nt, Artificial Sequence
  Description of Artificial Sequence: Synthetic oligonucleotide
  Antisense strand to SEQ ID NO: 1398646
agaucuccucgaaucagac

SEQ ID NO: 1398648 - RNA, 19 nt, Artificial Sequence
  Description of Artificial Sequence: Synthetic oligonucleotide
  Sense strand starting at position 1422 of SEQ ID NO: 1243153
agaucucaggucuaaguuu

SEQ ID NO: 1398649 - RNA, 19 nt, Artificial Sequence
  Description of Artificial Sequence: Synthetic oligonucleotide
  Antisense strand to SEQ ID NO: 1398648
aaacuuagaccugagaucu

SEQ ID NO: 1398650 - RNA, 19 nt, Artificial Sequence
  Description of Artificial Sequence: Synthetic oligonucleotide
  Sense strand starting at position 1629 of SEQ ID NO: 1243153
acagcauagccucggaaga

SEQ ID NO: 1398651 - RNA, 19 nt, Artificial Sequence
  Description of Artificial Sequence: Synthetic oligonucleotide
  Antisense strand to SEQ ID NO: 1398650
ucuuccgaggcuaugcugu

SEQ ID NO: 1398652 - RNA, 19 nt, Artificial Sequence
  Description of Artificial Sequence: Synthetic oligonucleotide
  Sense strand starting at position 1763 of SEQ ID NO: 1243153
ccucgaugagcgaguaguu

SEQ ID NO: 1398653 - RNA, 19 nt, Artificial Sequence
  Description of Artificial Sequence: Synthetic oligonucleotide
  Antisense strand to SEQ ID NO: 1398652
aacuacucgcucaucgagg

SEQ ID NO: 1398654 - RNA, 19 nt, Artificial Sequence
  Description of Artificial Sequence: Synthetic oligonucleotide
  Sense strand starting at position 1765 of SEQ ID NO: 1243153
ucgaugagcgaguaguuga

SEQ ID NO: 1398655 - RNA, 19 nt, Artificial Sequence
  Description of Artificial Sequence: Synthetic oligonucleotide
  Antisense strand to SEQ ID NO: 1398654
ucaacuacucgcucaucga

SEQ ID NO: 1398656 - RNA, 19 nt, Artificial Sequence
  Description of Artificial Sequence: Synthetic oligonucleotide
  Sense strand starting at position 2321 of SEQ ID NO: 1243153
cccauauauuucgcaggua

SEQ ID NO: 1398657 - RNA, 19 nt, Artificial Sequence
  Description of Artificial Sequence: Synthetic oligonucleotide
  Antisense strand to SEQ ID NO: 1398656
uaccugcgaaauauauggg

SEQ ID NO: 1398658 - RNA, 19 nt, Artificial Sequence
  Description of Artificial Sequence: Synthetic oligonucleotide
  Sense strand starting at position 2550 of SEQ ID NO: 1243153
auuuguguaagcuggugua

SEQ ID NO: 1398659 - RNA, 19 nt, Artificial Sequence
  Description of Artificial Sequence: Synthetic oligonucleotide
  Antisense strand to SEQ ID NO: 1398658
uacaccagcuuacacaaau

SEQ ID NO: 1398660 - RNA, 19 nt, Artificial Sequence
  Description of Artificial Sequence: Synthetic oligonucleotide
  Sense strand starting at position 2718 of SEQ ID NO: 1243153
agugcaugcagucaguaua

SEQ ID NO: 1398661 - RNA, 19 nt, Artificial Sequence
  Description of Artificial Sequence: Synthetic oligonucleotide
  Antisense strand to SEQ ID NO: 1398660
uauacugacugcaugcacu

SEQ ID NO: 1398662 - RNA, 19 nt, Artificial Sequence
  Description of Artificial Sequence: Synthetic oligonucleotide
  Sense strand starting at position 2721 of SEQ ID NO: 1243153
gcaugcagucaguauacuu

SEQ ID NO: 1398663 - RNA, 19 nt, Artificial Sequence
  Description of Artificial Sequence: Synthetic oligonucleotide
  Antisense strand to SEQ ID NO: 1398662
aaguauacugacugcaugc

SEQ ID NO: 1398664 - RNA, 19 nt, Artificial Sequence
  Description of Artificial Sequence: Synthetic oligonucleotide
  Sense strand starting at position 2728 of SEQ ID NO: 1243153
gucaguauacuuugaauua

SEQ ID NO: 1398665 - RNA, 19 nt, Artificial Sequence
  Description of Artificial Sequence: Synthetic oligonucleotide
  Antisense strand to SEQ ID NO: 1398664
uaauucaaaguauacugac

SEQ ID NO: 1398666 - RNA, 19 nt, Artificial Sequence
  Description of Artificial Sequence: Synthetic oligonucleotide
  Sense strand starting at position 2739 of SEQ ID NO: 1243153
uugaauuagcucugcaaga

SEQ ID NO: 1398667 - RNA, 19 nt, Artificial Sequence
  Description of Artificial Sequence: Synthetic oligonucleotide
  Antisense strand to SEQ ID NO: 1398666
ucuugcagagcuaauucaa

SEQ ID NO: 1398668 - RNA, 19 nt, Artificial Sequence
  Description of Artificial Sequence: Synthetic oligonucleotide
  Sense strand starting at position 2740 of SEQ ID NO: 1243153
ugaauuagcucugcaagau

SEQ ID NO: 1398669 - RNA, 19 nt, Artificial Sequence
  Description of Artificial Sequence: Synthetic oligonucleotide
  Antisense strand to SEQ ID NO: 1398668
aucuugcagagcuaauuca

SEQ ID NO: 1398670 - RNA, 19 nt, Artificial Sequence
  Description of Artificial Sequence: Synthetic oligonucleotide
  Sense strand starting at position 2741 of SEQ ID NO: 1243153
gaauuagcucugcaagaug

SEQ ID NO: 1398671 - RNA, 19 nt, Artificial Sequence
  Description of Artificial Sequence: Synthetic oligonucleotide
  Antisense strand to SEQ ID NO: 1398670
caucuugcagagcuaauuc

SEQ ID NO: 1398672 - RNA, 19 nt, Artificial Sequence
  Description of Artificial Sequence: Synthetic oligonucleotide
  Sense strand starting at position 2744 of SEQ ID NO: 1243153
uuagcucugcaagaugaaa

SEQ ID NO: 1398673 - RNA, 19 nt, Artificial Sequence
  Description of Artificial Sequence: Synthetic oligonucleotide
  Antisense strand to SEQ ID NO: 1398672
uuucaucuugcagagcuaa

SEQ ID NO: 1398674 - RNA, 19 nt, Artificial Sequence
  Description of Artificial Sequence: Synthetic oligonucleotide
  Sense strand starting at position 3304 of SEQ ID NO: 1243153
ugaauuucccgcugcaauu

SEQ ID NO: 1398675 - RNA, 19 nt, Artificial Sequence
  Description of Artificial Sequence: Synthetic oligonucleotide
  Antisense strand to SEQ ID NO: 1398674
aauugcagcgggaaauuca

SEQ ID NO: 1398676 - RNA, 19 nt, Artificial Sequence
  Description of Artificial Sequence: Synthetic oligonucleotide
  Sense strand starting at position 3429 of SEQ ID NO: 1243153
cauugaccucagggucaua

SEQ ID NO: 1398677 - RNA, 19 nt, Artificial Sequence
  Description of Artificial Sequence: Synthetic oligonucleotide
  Antisense strand to SEQ ID NO: 1398676
uaugacccugaggucaaug

SEQ ID NO: 1398678 - RNA, 19 nt, Artificial Sequence
  Description of Artificial Sequence: Synthetic oligonucleotide
  Sense strand starting at position 3441 of SEQ ID NO: 1243153
ggucauaaucaugagugca

SEQ ID NO: 1398679 - RNA, 19 nt, Artificial Sequence
  Description of Artificial Sequence: Synthetic oligonucleotide
  Antisense strand to SEQ ID NO: 1398678
ugcacucaugauuaugacc

SEQ ID NO: 1398680 - RNA, 19 nt, Artificial Sequence
  Description of Artificial Sequence: Synthetic oligonucleotide
  Sense strand starting at position 3443 of SEQ ID NO: 1243153
ucauaaucaugagugcauc

SEQ ID NO: 1398681 - RNA, 19 nt, Artificial Sequence
  Description of Artificial Sequence: Synthetic oligonucleotide
  Antisense strand to SEQ ID NO: 1398680
gaugcacucaugauuauga

SEQ ID NO: 1398682 - RNA, 19 nt, Artificial Sequence
  Description of Artificial Sequence: Synthetic oligonucleotide
  Sense strand starting at position 3446 of SEQ ID NO: 1243153
uaaucaugagugcaucuga

SEQ ID NO: 1398683 - RNA, 19 nt, Artificial Sequence
  Description of Artificial Sequence: Synthetic oligonucleotide
  Antisense strand to SEQ ID NO: 1398682
ucagaugcacucaugauua

SEQ ID NO: 1398684 - RNA, 19 nt, Artificial Sequence
  Description of Artificial Sequence: Synthetic oligonucleotide
  Sense strand starting at position 3640 of SEQ ID NO: 1243153
aguguaggccuauggaaac

SEQ ID NO: 1398685 - RNA, 19 nt, Artificial Sequence
  Description of Artificial Sequence: Synthetic oligonucleotide
  Antisense strand to SEQ ID NO: 1398684
guuuccauaggccuacacu

SEQ ID NO: 1398686 - RNA, 19 nt, Artificial Sequence
  Description of Artificial Sequence: Synthetic oligonucleotide
  Sense strand starting at position 3699 of SEQ ID NO: 1243153
aaaggaaguugucuaagac

SEQ ID NO: 1398687 - RNA, 19 nt, Artificial Sequence
  Description of Artificial Sequence: Synthetic oligonucleotide
  Antisense strand to SEQ ID NO: 1398686
gucuuagacaacuuccuuu

SEQ ID NO: 1398688 - RNA, 19 nt, Artificial Sequence
  Description of Artificial Sequence: Synthetic oligonucleotide
  Sense strand starting at position 3709 of SEQ ID NO: 1243153
gucuaagacucugcaugca

SEQ ID NO: 1398689 - RNA, 19 nt, Artificial Sequence
  Description of Artificial Sequence: Synthetic oligonucleotide
  Antisense strand to SEQ ID NO: 1398688
ugcaugcagagucuuagac

SEQ ID NO: 1398690 - RNA, 19 nt, Artificial Sequence
  Description of Artificial Sequence: Synthetic oligonucleotide
  Sense strand starting at position 3778 of SEQ ID NO: 1243153
ggcuuacuacuguaauaug

SEQ ID NO: 1398691 - RNA, 19 nt, Artificial Sequence
  Description of Artificial Sequence: Synthetic oligonucleotide
  Antisense strand to SEQ ID NO: 1398690
cauauuacaguaguaagcc

SEQ ID NO: 1398692 - RNA, 19 nt, Artificial Sequence
  Description of Artificial Sequence: Synthetic oligonucleotide
  Sense strand starting at position 14 of SEQ ID NO: 1243154
cgugaaauaucaugauugu

SEQ ID NO: 1398693 - RNA, 19 nt, Artificial Sequence
  Description of Artificial Sequence: Synthetic oligonucleotide
  Antisense strand to SEQ ID NO: 1398692
acaaucaugauauuucacg

SEQ ID NO: 1398694 - RNA, 19 nt, Artificial Sequence
  Description of Artificial Sequence: Synthetic oligonucleotide
  Sense strand starting at position 15 of SEQ ID NO: 1243154
gugaaauaucaugauuguu

SEQ ID NO: 1398695 - RNA, 19 nt, Artificial Sequence
  Description of Artificial Sequence: Synthetic oligonucleotide
  Antisense strand to SEQ ID NO: 1398694
aacaaucaugauauuucac

SEQ ID NO: 1398696 - RNA, 19 nt, Artificial Sequence
  Description of Artificial Sequence: Synthetic oligonucleotide
  Sense strand starting at position 23 of SEQ ID NO: 1243154
ucaugauuguuucuacauc

SEQ ID NO: 1398697 - RNA, 19 nt, Artificial Sequence
  Description of Artificial Sequence: Synthetic oligonucleotide
  Antisense strand to SEQ ID NO: 1398696
gauguagaaacaaucauga

SEQ ID NO: 1398698 - RNA, 19 nt, Artificial Sequence
  Description of Artificial Sequence: Synthetic oligonucleotide
  Sense strand starting at position 1231 of SEQ ID NO: 1243154
cugaucuacuaggucagua

SEQ ID NO: 1398699 - RNA, 19 nt, Artificial Sequence
  Description of Artificial Sequence: Synthetic oligonucleotide
  Antisense strand to SEQ ID NO: 1398698
uacugaccuaguagaucag

SEQ ID NO: 1398700 - RNA, 19 nt, Artificial Sequence
  Description of Artificial Sequence: Synthetic oligonucleotide
  Sense strand starting at position 1235 of SEQ ID NO: 1243154
ucuacuaggucaguaucua

SEQ ID NO: 1398701 - RNA, 19 nt, Artificial Sequence
  Description of Artificial Sequence: Synthetic oligonucleotide
  Antisense strand to SEQ ID NO: 1398700
uagauacugaccuaguaga

SEQ ID NO: 1398702 - RNA, 19 nt, Artificial Sequence
  Description of Artificial Sequence: Synthetic oligonucleotide
  Sense strand starting at position 1236 of SEQ ID NO: 1243154
cuacuaggucaguaucuau

SEQ ID NO: 1398703 - RNA, 19 nt, Artificial Sequence
  Description of Artificial Sequence: Synthetic oligonucleotide
  Antisense strand to SEQ ID NO: 1398702
auagauacugaccuaguag

SEQ ID NO: 1398704 - RNA, 19 nt, Artificial Sequence
  Description of Artificial Sequence: Synthetic oligonucleotide
  Sense strand starting at position 1247 of SEQ ID NO: 1243154
guaucuaugggaugggaau

SEQ ID NO: 1398705 - RNA, 19 nt, Artificial Sequence
  Description of Artificial Sequence: Synthetic oligonucleotide
  Antisense strand to SEQ ID NO: 1398704
auucccaucccauagauac

SEQ ID NO: 1398706 - RNA, 19 nt, Artificial Sequence
  Description of Artificial Sequence: Synthetic oligonucleotide
  Sense strand starting at position 2276 of SEQ ID NO: 1243154
agauuucguugguggaauu

SEQ ID NO: 1398707 - RNA, 19 nt, Artificial Sequence
  Description of Artificial Sequence: Synthetic oligonucleotide
  Antisense strand to SEQ ID NO: 1398706
aauuccaccaacgaaaucu

SEQ ID NO: 1398708 - RNA, 19 nt, Artificial Sequence
  Description of Artificial Sequence: Synthetic oligonucleotide
  Sense strand starting at position 2588 of SEQ ID NO: 1243154
uuaagcgaaacguguuaau

SEQ ID NO: 1398709 - RNA, 19 nt, Artificial Sequence
  Description of Artificial Sequence: Synthetic oligonucleotide
  Antisense strand to SEQ ID NO: 1398708
auuaacacguuucgcuuaa

SEQ ID NO: 1398710 - RNA, 19 nt, Artificial Sequence
  Description of Artificial Sequence: Synthetic oligonucleotide
  Sense strand starting at position 2591 of SEQ ID NO: 1243154
agcgaaacguguuaauguu

SEQ ID NO: 1398711 - RNA, 19 nt, Artificial Sequence
  Description of Artificial Sequence: Synthetic oligonucleotide
  Antisense strand to SEQ ID NO: 1398710
aacauuaacacguuucgcu

SEQ ID NO: 1398712 - RNA, 19 nt, Artificial Sequence
  Description of Artificial Sequence: Synthetic oligonucleotide
  Sense strand starting at position 3431 of SEQ ID NO: 1243154
ggucauaaucaugagcgca

SEQ ID NO: 1398713 - RNA, 19 nt, Artificial Sequence
  Description of Artificial Sequence: Synthetic oligonucleotide
  Antisense strand to SEQ ID NO: 1398712
ugcgcucaugauuaugacc

SEQ ID NO: 1398714 - RNA, 19 nt, Artificial Sequence
  Description of Artificial Sequence: Synthetic oligonucleotide
  Sense strand starting at position 3436 of SEQ ID NO: 1243154
uaaucaugagcgcaucuga

SEQ ID NO: 1398715 - RNA, 19 nt, Artificial Sequence
  Description of Artificial Sequence: Synthetic oligonucleotide
  Antisense strand to SEQ ID NO: 1398714
ucagaugcgcucaugauua

SEQ ID NO: 1398716 - RNA, 19 nt, Artificial Sequence
  Description of Artificial Sequence: Synthetic oligonucleotide
  Sense strand starting at position 1168 of SEQ ID NO: 1243155
cugaucuacuaggucagua

SEQ ID NO: 1398717 - RNA, 19 nt, Artificial Sequence
  Description of Artificial Sequence: Synthetic oligonucleotide
  Antisense strand to SEQ ID NO: 1398716
uacugaccuaguagaucag

SEQ ID NO: 1398718 - RNA, 19 nt, Artificial Sequence
  Description of Artificial Sequence: Synthetic oligonucleotide
  Sense strand starting at position 1172 of SEQ ID NO: 1243155
ucuacuaggucaguaucua

SEQ ID NO: 1398719 - RNA, 19 nt, Artificial Sequence
  Description of Artificial Sequence: Synthetic oligonucleotide
  Antisense strand to SEQ ID NO: 1398718
uagauacugaccuaguaga

SEQ ID NO: 1398720 - RNA, 19 nt, Artificial Sequence
  Description of Artificial Sequence: Synthetic oligonucleotide
  Sense strand starting at position 1173 of SEQ ID NO: 1243155
cuacuaggucaguaucuau

SEQ ID NO: 1398721 - RNA, 19 nt, Artificial Sequence
  Description of Artificial Sequence: Synthetic oligonucleotide
  Antisense strand to SEQ ID NO: 1398720
auagauacugaccuaguag

SEQ ID NO: 1398722 - RNA, 19 nt, Artificial Sequence
  Description of Artificial Sequence: Synthetic oligonucleotide
  Sense strand starting at position 1184 of SEQ ID NO: 1243155
guaucuaugggaugggaau

SEQ ID NO: 1398723 - RNA, 19 nt, Artificial Sequence
  Description of Artificial Sequence: Synthetic oligonucleotide
  Antisense strand to SEQ ID NO: 1398722
auucccaucccauagauac

SEQ ID NO: 1398724 - RNA, 19 nt, Artificial Sequence
  Description of Artificial Sequence: Synthetic oligonucleotide
  Sense strand starting at position 2213 of SEQ ID NO: 1243155
agauuucguugguggaauu

SEQ ID NO: 1398725 - RNA, 19 nt, Artificial Sequence
  Description of Artificial Sequence: Synthetic oligonucleotide
  Antisense strand to SEQ ID NO: 1398724
aauuccaccaacgaaaucu

SEQ ID NO: 1398726 - RNA, 19 nt, Artificial Sequence
  Description of Artificial Sequence: Synthetic oligonucleotide
  Sense strand starting at position 2525 of SEQ ID NO: 1243155
uuaagcgaaacguguuaau

SEQ ID NO: 1398727 - RNA, 19 nt, Artificial Sequence
  Description of Artificial Sequence: Synthetic oligonucleotide
  Antisense strand to SEQ ID NO: 1398726
auuaacacguuucgcuuaa

SEQ ID NO: 1398728 - RNA, 19 nt, Artificial Sequence
  Description of Artificial Sequence: Synthetic oligonucleotide
  Sense strand starting at position 2528 of SEQ ID NO: 1243155
agcgaaacguguuaauguu

SEQ ID NO: 1398729 - RNA, 19 nt, Artificial Sequence
  Description of Artificial Sequence: Synthetic oligonucleotide
  Antisense strand to SEQ ID NO: 1398728
aacauuaacacguuucgcu

SEQ ID NO: 1398730 - RNA, 19 nt, Artificial Sequence
  Description of Artificial Sequence: Synthetic oligonucleotide
  Sense strand starting at position 3368 of SEQ ID NO: 1243155
ggucauaaucaugagcgca

SEQ ID NO: 1398731 - RNA, 19 nt, Artificial Sequence
  Description of Artificial Sequence: Synthetic oligonucleotide
  Antisense strand to SEQ ID NO: 1398730
ugcgcucaugauuaugacc

SEQ ID NO: 1398732 - RNA, 19 nt, Artificial Sequence
  Description of Artificial Sequence: Synthetic oligonucleotide
  Sense strand starting at position 3373 of SEQ ID NO: 1243155
uaaucaugagcgcaucuga

SEQ ID NO: 1398733 - RNA, 19 nt, Artificial Sequence
  Description of Artificial Sequence: Synthetic oligonucleotide
  Antisense strand to SEQ ID NO: 1398732
ucagaugcgcucaugauua

SEQ ID NO: 1398734 - RNA, 19 nt, Artificial Sequence
  Description of Artificial Sequence: Synthetic oligonucleotide
  Sense strand starting at position 62 of SEQ ID NO: 1243156
acauucuccuugcuugagu

SEQ ID NO: 1398735 - RNA, 19 nt, Artificial Sequence
  Description of Artificial Sequence: Synthetic oligonucleotide
  Antisense strand to SEQ ID NO: 1398734
acucaagcaaggagaaugu

SEQ ID NO: 1398736 - RNA, 19 nt, Artificial Sequence
  Description of Artificial Sequence: Synthetic oligonucleotide
  Sense strand starting at position 416 of SEQ ID NO: 1243156
gagcaaaucccuggguucu

SEQ ID NO: 1398737 - RNA, 19 nt, Artificial Sequence
  Description of Artificial Sequence: Synthetic oligonucleotide
  Antisense strand to SEQ ID NO: 1398736
agaacccagggauuugcuc

SEQ ID NO: 1398738 - RNA, 19 nt, Artificial Sequence
  Description of Artificial Sequence: Synthetic oligonucleotide
  Sense strand starting at position 417 of SEQ ID NO: 1243156
agcaaaucccuggguucuu

SEQ ID NO: 1398739 - RNA, 19 nt, Artificial Sequence
  Description of Artificial Sequence: Synthetic oligonucleotide
  Antisense strand to SEQ ID NO: 1398738
aagaacccagggauuugcu

SEQ ID NO: 1398740 - RNA, 19 nt, Artificial Sequence
  Description of Artificial Sequence: Synthetic oligonucleotide
  Sense strand starting at position 510 of SEQ ID NO: 1243156
cgcguguccuggguacaga

SEQ ID NO: 1398741 - RNA, 19 nt, Artificial Sequence
  Description of Artificial Sequence: Synthetic oligonucleotide
  Antisense strand to SEQ ID NO: 1398740
ucuguacccaggacacgcg

SEQ ID NO: 1398742 - RNA, 19 nt, Artificial Sequence
  Description of Artificial Sequence: Synthetic oligonucleotide
  Sense strand starting at position 511 of SEQ ID NO: 1243156
gcguguccuggguacagaa

SEQ ID NO: 1398743 - RNA, 19 nt, Artificial Sequence
  Description of Artificial Sequence: Synthetic oligonucleotide
  Antisense strand to SEQ ID NO: 1398742
uucuguacccaggacacgc

SEQ ID NO: 1398744 - RNA, 19 nt, Artificial Sequence
  Description of Artificial Sequence: Synthetic oligonucleotide
  Sense strand starting at position 861 of SEQ ID NO: 1243156
cgaagaagccagugaucgu

SEQ ID NO: 1398745 - RNA, 19 nt, Artificial Sequence
  Description of Artificial Sequence: Synthetic oligonucleotide
  Antisense strand to SEQ ID NO: 1398744
acgaucacuggcuucuucg

SEQ ID NO: 1398746 - RNA, 19 nt, Artificial Sequence
  Description of Artificial Sequence: Synthetic oligonucleotide
  Sense strand starting at position 908 of SEQ ID NO: 1243156
gccagcagccuccgagaau

SEQ ID NO: 1398747 - RNA, 19 nt, Artificial Sequence
  Description of Artificial Sequence: Synthetic oligonucleotide
  Antisense strand to SEQ ID NO: 1398746
auucucggaggcugcuggc

SEQ ID NO: 1398748 - RNA, 19 nt, Artificial Sequence
  Description of Artificial Sequence: Synthetic oligonucleotide
  Sense strand starting at position 909 of SEQ ID NO: 1243156
ccagcagccuccgagaaua

SEQ ID NO: 1398749 - RNA, 19 nt, Artificial Sequence
  Description of Artificial Sequence: Synthetic oligonucleotide
  Antisense strand to SEQ ID NO: 1398748
uauucucggaggcugcugg

SEQ ID NO: 1398750 - RNA, 19 nt, Artificial Sequence
  Description of Artificial Sequence: Synthetic oligonucleotide
  Sense strand starting at position 1106 of SEQ ID NO: 1243156
ccgagaagcuuugggagaa

SEQ ID NO: 1398751 - RNA, 19 nt, Artificial Sequence
  Description of Artificial Sequence: Synthetic oligonucleotide
  Antisense strand to SEQ ID NO: 1398750
uucucccaaagcuucucgg

SEQ ID NO: 1398752 - RNA, 19 nt, Artificial Sequence
  Description of Artificial Sequence: Synthetic oligonucleotide
  Sense strand starting at position 1199 of SEQ ID NO: 1243156
gggcauuggucuuccagag

SEQ ID NO: 1398753 - RNA, 19 nt, Artificial Sequence
  Description of Artificial Sequence: Synthetic oligonucleotide
  Antisense strand to SEQ ID NO: 1398752
cucuggaagaccaaugccc

SEQ ID NO: 1398754 - RNA, 19 nt, Artificial Sequence
  Description of Artificial Sequence: Synthetic oligonucleotide
  Sense strand starting at position 1389 of SEQ ID NO: 1243156
ccuugagcugccugaauuc

SEQ ID NO: 1398755 - RNA, 19 nt, Artificial Sequence
  Description of Artificial Sequence: Synthetic oligonucleotide
  Antisense strand to SEQ ID NO: 1398754
gaauucaggcagcucaagg

SEQ ID NO: 1398756 - RNA, 19 nt, Artificial Sequence
  Description of Artificial Sequence: Synthetic oligonucleotide
  Sense strand starting at position 1726 of SEQ ID NO: 1243156
gggauagaauccuggcaac

SEQ ID NO: 1398757 - RNA, 19 nt, Artificial Sequence
  Description of Artificial Sequence: Synthetic oligonucleotide
  Antisense strand to SEQ ID NO: 1398756
guugccaggauucuauccc

SEQ ID NO: 1398758 - RNA, 19 nt, Artificial Sequence
  Description of Artificial Sequence: Synthetic oligonucleotide
  Sense strand starting at position 1780 of SEQ ID NO: 1243156
agcugaguccuuugcagcu

SEQ ID NO: 1398759 - RNA, 19 nt, Artificial Sequence
  Description of Artificial Sequence: Synthetic oligonucleotide
  Antisense strand to SEQ ID NO: 1398758
agcugcaaaggacucagcu

SEQ ID NO: 1398760 - RNA, 19 nt, Artificial Sequence
  Description of Artificial Sequence: Synthetic oligonucleotide
  Sense strand starting at position 2145 of SEQ ID NO: 1243156
cuuuaagugcuuugucuga

SEQ ID NO: 1398761 - RNA, 19 nt, Artificial Sequence
  Description of Artificial Sequence: Synthetic oligonucleotide
  Antisense strand to SEQ ID NO: 1398760
ucagacaaagcacuuaaag

SEQ ID NO: 1398762 - RNA, 19 nt, Artificial Sequence
  Description of Artificial Sequence: Synthetic oligonucleotide
  Sense strand starting at position 2147 of SEQ ID NO: 1243156
uuaagugcuuugucugacu

SEQ ID NO: 1398763 - RNA, 19 nt, Artificial Sequence
  Description of Artificial Sequence: Synthetic oligonucleotide
  Antisense strand to SEQ ID NO: 1398762
agucagacaaagcacuuaa

SEQ ID NO: 1398764 - RNA, 19 nt, Artificial Sequence
  Description of Artificial Sequence: Synthetic oligonucleotide
  Sense strand starting at position 2149 of SEQ ID NO: 1243156
aagugcuuugucugacuua

SEQ ID NO: 1398765 - RNA, 19 nt, Artificial Sequence
  Description of Artificial Sequence: Synthetic oligonucleotide
  Antisense strand to SEQ ID NO: 1398764
uaagucagacaaagcacuu

SEQ ID NO: 1398766 - RNA, 19 nt, Artificial Sequence
  Description of Artificial Sequence: Synthetic oligonucleotide
  Sense strand starting at position 2152 of SEQ ID NO: 1243156
ugcuuugucugacuuaauc

SEQ ID NO: 1398767 - RNA, 19 nt, Artificial Sequence
  Description of Artificial Sequence: Synthetic oligonucleotide
  Antisense strand to SEQ ID NO: 1398766
gauuaagucagacaaagca

SEQ ID NO: 1398768 - RNA, 19 nt, Artificial Sequence
  Description of Artificial Sequence: Synthetic oligonucleotide
  Sense strand starting at position 2167 of SEQ ID NO: 1243156
aauccuaaugcuggaggaa

SEQ ID NO: 1398769 - RNA, 19 nt, Artificial Sequence
  Description of Artificial Sequence: Synthetic oligonucleotide
  Antisense strand to SEQ ID NO: 1398768
uuccuccagcauuaggauu

SEQ ID NO: 1398770 - RNA, 19 nt, Artificial Sequence
  Description of Artificial Sequence: Synthetic oligonucleotide
  Sense strand starting at position 2214 of SEQ ID NO: 1243156
ggaggaaauguguguuaaa

SEQ ID NO: 1398771 - RNA, 19 nt, Artificial Sequence
  Description of Artificial Sequence: Synthetic oligonucleotide
  Antisense strand to SEQ ID NO: 1398770
uuuaacacacauuuccucc

SEQ ID NO: 1398772 - RNA, 19 nt, Artificial Sequence
  Description of Artificial Sequence: Synthetic oligonucleotide
  Sense strand starting at position 2215 of SEQ ID NO: 1243156
gaggaaauguguguuaaau

SEQ ID NO: 1398773 - RNA, 19 nt, Artificial Sequence
  Description of Artificial Sequence: Synthetic oligonucleotide
  Antisense strand to SEQ ID NO: 1398772
auuuaacacacauuuccuc

SEQ ID NO: 1398774 - RNA, 19 nt, Artificial Sequence
  Description of Artificial Sequence: Synthetic oligonucleotide
  Sense strand starting at position 2217 of SEQ ID NO: 1243156
ggaaauguguguuaaaugc

SEQ ID NO: 1398775 - RNA, 19 nt, Artificial Sequence
  Description of Artificial Sequence: Synthetic oligonucleotide
  Antisense strand to SEQ ID NO: 1398774
gcauuuaacacacauuucc

SEQ ID NO: 1398776 - RNA, 19 nt, Artificial Sequence
  Description of Artificial Sequence: Synthetic oligonucleotide
  Sense strand starting at position 2221 of SEQ ID NO: 1243156
auguguguuaaaugcguaa

SEQ ID NO: 1398777 - RNA, 19 nt, Artificial Sequence
  Description of Artificial Sequence: Synthetic oligonucleotide
  Antisense strand to SEQ ID NO: 1398776
uuacgcauuuaacacacau

SEQ ID NO: 1398778 - RNA, 19 nt, Artificial Sequence
  Description of Artificial Sequence: Synthetic oligonucleotide
  Sense strand starting at position 2223 of SEQ ID NO: 1243156
guguguuaaaugcguaauu

SEQ ID NO: 1398779 - RNA, 19 nt, Artificial Sequence
  Description of Artificial Sequence: Synthetic oligonucleotide
  Antisense strand to SEQ ID NO: 1398778
aauuacgcauuuaacacac

SEQ ID NO: 1398780 - RNA, 19 nt, Artificial Sequence
  Description of Artificial Sequence: Synthetic oligonucleotide
  Sense strand starting at position 2224 of SEQ ID NO: 1243156
uguguuaaaugcguaauua

SEQ ID NO: 1398781 - RNA, 19 nt, Artificial Sequence
  Description of Artificial Sequence: Synthetic oligonucleotide
  Antisense strand to SEQ ID NO: 1398780
uaauuacgcauuuaacaca

SEQ ID NO: 1398782 - RNA, 19 nt, Artificial Sequence
  Description of Artificial Sequence: Synthetic oligonucleotide
  Sense strand starting at position 2225 of SEQ ID NO: 1243156
guguuaaaugcguaauuau

SEQ ID NO: 1398783 - RNA, 19 nt, Artificial Sequence
  Description of Artificial Sequence: Synthetic oligonucleotide
  Antisense strand to SEQ ID NO: 1398782
auaauuacgcauuuaacac

SEQ ID NO: 1398784 - RNA, 19 nt, Artificial Sequence
  Description of Artificial Sequence: Synthetic oligonucleotide
  Sense strand starting at position 2233 of SEQ ID NO: 1243156
ugcguaauuauugugagcu

SEQ ID NO: 1398785 - RNA, 19 nt, Artificial Sequence
  Description of Artificial Sequence: Synthetic oligonucleotide
  Antisense strand to SEQ ID NO: 1398784
agcucacaauaauuacgca

SEQ ID NO: 1398786 - RNA, 19 nt, Artificial Sequence
  Description of Artificial Sequence: Synthetic oligonucleotide
  Sense strand starting at position 2237 of SEQ ID NO: 1243156
uaauuauugugagcuguuc

SEQ ID NO: 1398787 - RNA, 19 nt, Artificial Sequence
  Description of Artificial Sequence: Synthetic oligonucleotide
  Antisense strand to SEQ ID NO: 1398786
gaacagcucacaauaauua

SEQ ID NO: 1398788 - RNA, 19 nt, Artificial Sequence
  Description of Artificial Sequence: Synthetic oligonucleotide
  Sense strand starting at position 2348 of SEQ ID NO: 1243156
ugugcagucacuggcauuu

SEQ ID NO: 1398789 - RNA, 19 nt, Artificial Sequence
  Description of Artificial Sequence: Synthetic oligonucleotide
  Antisense strand to SEQ ID NO: 1398788
aaaugccagugacugcaca

SEQ ID NO: 1398790 - RNA, 19 nt, Artificial Sequence
  Description of Artificial Sequence: Synthetic oligonucleotide
  Sense strand starting at position 2438 of SEQ ID NO: 1243156
ugccaugacuuacugcaaa

SEQ ID NO: 1398791 - RNA, 19 nt, Artificial Sequence
  Description of Artificial Sequence: Synthetic oligonucleotide
  Antisense strand to SEQ ID NO: 1398790
uuugcaguaagucauggca

SEQ ID NO: 1398792 - RNA, 19 nt, Artificial Sequence
  Description of Artificial Sequence: Synthetic oligonucleotide
  Sense strand starting at position 2496 of SEQ ID NO: 1243156
cuggcugcuuccuuauagu

SEQ ID NO: 1398793 - RNA, 19 nt, Artificial Sequence
  Description of Artificial Sequence: Synthetic oligonucleotide
  Antisense strand to SEQ ID NO: 1398792
acuauaaggaagcagccag

SEQ ID NO: 1398794 - RNA, 19 nt, Artificial Sequence
  Description of Artificial Sequence: Synthetic oligonucleotide
  Sense strand starting at position 3102 of SEQ ID NO: 1243156
gugccucaccuguaaucca

SEQ ID NO: 1398795 - RNA, 19 nt, Artificial Sequence
  Description of Artificial Sequence: Synthetic oligonucleotide
  Antisense strand to SEQ ID NO: 1398794
uggauuacaggugaggcac

SEQ ID NO: 1398796 - RNA, 19 nt, Artificial Sequence
  Description of Artificial Sequence: Synthetic oligonucleotide
  Sense strand starting at position 3188 of SEQ ID NO: 1243156
uguugagaccuccaucugu

SEQ ID NO: 1398797 - RNA, 19 nt, Artificial Sequence
  Description of Artificial Sequence: Synthetic oligonucleotide
  Antisense strand to SEQ ID NO: 1398796
acagauggaggucucaaca

SEQ ID NO: 1398798 - RNA, 19 nt, Artificial Sequence
  Description of Artificial Sequence: Synthetic oligonucleotide
  Sense strand starting at position 3734 of SEQ ID NO: 1243156
accaguuuguacgugaaca

SEQ ID NO: 1398799 - RNA, 19 nt, Artificial Sequence
  Description of Artificial Sequence: Synthetic oligonucleotide
  Antisense strand to SEQ ID NO: 1398798
uguucacguacaaacuggu

SEQ ID NO: 1398800 - RNA, 19 nt, Artificial Sequence
  Description of Artificial Sequence: Synthetic oligonucleotide
  Sense strand starting at position 3735 of SEQ ID NO: 1243156
ccaguuuguacgugaacau

SEQ ID NO: 1398801 - RNA, 19 nt, Artificial Sequence
  Description of Artificial Sequence: Synthetic oligonucleotide
  Antisense strand to SEQ ID NO: 1398800
auguucacguacaaacugg

SEQ ID NO: 1398802 - RNA, 19 nt, Artificial Sequence
  Description of Artificial Sequence: Synthetic oligonucleotide
  Sense strand starting at position 3736 of SEQ ID NO: 1243156
caguuuguacgugaacauu

SEQ ID NO: 1398803 - RNA, 19 nt, Artificial Sequence
  Description of Artificial Sequence: Synthetic oligonucleotide
  Antisense strand to SEQ ID NO: 1398802
aauguucacguacaaacug

SEQ ID NO: 1398804 - RNA, 19 nt, Artificial Sequence
  Description of Artificial Sequence: Synthetic oligonucleotide
  Sense strand starting at position 3745 of SEQ ID NO: 1243156
cgugaacauuuaugagugu

SEQ ID NO: 1398805 - RNA, 19 nt, Artificial Sequence
  Description of Artificial Sequence: Synthetic oligonucleotide
  Antisense strand to SEQ ID NO: 1398804
acacucauaaauguucacg

SEQ ID NO: 1398806 - RNA, 19 nt, Artificial Sequence
  Description of Artificial Sequence: Synthetic oligonucleotide
  Sense strand starting at position 3784 of SEQ ID NO: 1243156
ugucuugaccacuggauua

SEQ ID NO: 1398807 - RNA, 19 nt, Artificial Sequence
  Description of Artificial Sequence: Synthetic oligonucleotide
  Antisense strand to SEQ ID NO: 1398806
uaauccaguggucaagaca

SEQ ID NO: 1398808 - RNA, 19 nt, Artificial Sequence
  Description of Artificial Sequence: Synthetic oligonucleotide
  Sense strand starting at position 3875 of SEQ ID NO: 1243156
agcggucacugcgcaaaua

SEQ ID NO: 1398809 - RNA, 19 nt, Artificial Sequence
  Description of Artificial Sequence: Synthetic oligonucleotide
  Antisense strand to SEQ ID NO: 1398808
uauuugcgcagugaccgcu

SEQ ID NO: 1398810 - RNA, 19 nt, Artificial Sequence
  Description of Artificial Sequence: Synthetic oligonucleotide
  Sense strand starting at position 3876 of SEQ ID NO: 1243156
gcggucacugcgcaaauaa

SEQ ID NO: 1398811 - RNA, 19 nt, Artificial Sequence
  Description of Artificial Sequence: Synthetic oligonucleotide
  Antisense strand to SEQ ID NO: 1398810
uuauuugcgcagugaccgc

SEQ ID NO: 1398812 - RNA, 19 nt, Artificial Sequence
  Description of Artificial Sequence: Synthetic oligonucleotide
  Sense strand starting at position 3891 of SEQ ID NO: 1243156
auaauagcggaauggauaa

SEQ ID NO: 1398813 - RNA, 19 nt, Artificial Sequence
  Description of Artificial Sequence: Synthetic oligonucleotide
  Antisense strand to SEQ ID NO: 1398812
uuauccauuccgcuauuau

SEQ ID NO: 1398814 - RNA, 19 nt, Artificial Sequence
  Description of Artificial Sequence: Synthetic oligonucleotide
  Sense strand starting at position 2404 of SEQ ID NO: 1243157
aagguugcgugaucucaaa

SEQ ID NO: 1398815 - RNA, 19 nt, Artificial Sequence
  Description of Artificial Sequence: Synthetic oligonucleotide
  Antisense strand to SEQ ID NO: 1398814
uuugagaucacgcaaccuu

SEQ ID NO: 1398816 - RNA, 19 nt, Artificial Sequence
  Description of Artificial Sequence: Synthetic oligonucleotide
  Sense strand starting at position 2468 of SEQ ID NO: 1243157
ugauguccuuaucuauauu

SEQ ID NO: 1398817 - RNA, 19 nt, Artificial Sequence
  Description of Artificial Sequence: Synthetic oligonucleotide
  Antisense strand to SEQ ID NO: 1398816
aauauagauaaggacauca

SEQ ID NO: 1398818 - RNA, 19 nt, Artificial Sequence
  Description of Artificial Sequence: Synthetic oligonucleotide
  Sense strand starting at position 2565 of SEQ ID NO: 1243157
gccucucagggauguccaa

SEQ ID NO: 1398819 - RNA, 19 nt, Artificial Sequence
  Description of Artificial Sequence: Synthetic oligonucleotide
  Antisense strand to SEQ ID NO: 1398818
uuggacaucccugagaggc

SEQ ID NO: 1398820 - RNA, 19 nt, Artificial Sequence
  Description of Artificial Sequence: Synthetic oligonucleotide
  Sense strand starting at position 551 of SEQ ID NO: 1243163
ggcauuguaaucugagcua

SEQ ID NO: 1398821 - RNA, 19 nt, Artificial Sequence
  Description of Artificial Sequence: Synthetic oligonucleotide
  Antisense strand to SEQ ID NO: 1398820
uagcucagauuacaaugcc

SEQ ID NO: 1398822 - RNA, 19 nt, Artificial Sequence
  Description of Artificial Sequence: Synthetic oligonucleotide
  Sense strand starting at position 554 of SEQ ID NO: 1243163
auuguaaucugagcuacuc

SEQ ID NO: 1398823 - RNA, 19 nt, Artificial Sequence
  Description of Artificial Sequence: Synthetic oligonucleotide
  Antisense strand to SEQ ID NO: 1398822
gaguagcucagauuacaau

SEQ ID NO: 1398824 - RNA, 19 nt, Artificial Sequence
  Description of Artificial Sequence: Synthetic oligonucleotide
  Sense strand starting at position 757 of SEQ ID NO: 1243163
guuuguuggagacaagagu

SEQ ID NO: 1398825 - RNA, 19 nt, Artificial Sequence
  Description of Artificial Sequence: Synthetic oligonucleotide
  Antisense strand to SEQ ID NO: 1398824
acucuugucuccaacaaac

SEQ ID NO: 1398826 - RNA, 19 nt, Artificial Sequence
  Description of Artificial Sequence: Synthetic oligonucleotide
  Sense strand starting at position 1699 of SEQ ID NO: 1243163
ccaaguagugcccgcauca

SEQ ID NO: 1398827 - RNA, 19 nt, Artificial Sequence
  Description of Artificial Sequence: Synthetic oligonucleotide
  Antisense strand to SEQ ID NO: 1398826
ugaugcgggcacuacuugg

SEQ ID NO: 1398828 - RNA, 19 nt, Artificial Sequence
  Description of Artificial Sequence: Synthetic oligonucleotide
  Sense strand starting at position 1700 of SEQ ID NO: 1243163
caaguagugcccgcaucau

SEQ ID NO: 1398829 - RNA, 19 nt, Artificial Sequence
  Description of Artificial Sequence: Synthetic oligonucleotide
  Antisense strand to SEQ ID NO: 1398828
augaugcgggcacuacuug

SEQ ID NO: 1398830 - RNA, 19 nt, Artificial Sequence
  Description of Artificial Sequence: Synthetic oligonucleotide
  Sense strand starting at position 2403 of SEQ ID NO: 1243163
aagguugcgugaucucaaa

SEQ ID NO: 1398831 - RNA, 19 nt, Artificial Sequence
  Description of Artificial Sequence: Synthetic oligonucleotide
  Antisense strand to SEQ ID NO: 1398830
uuugagaucacgcaaccuu

SEQ ID NO: 1398832 - RNA, 19 nt, Artificial Sequence
  Description of Artificial Sequence: Synthetic oligonucleotide
  Sense strand starting at position 2467 of SEQ ID NO: 1243163
ugauguccuuaucuauauu

SEQ ID NO: 1398833 - RNA, 19 nt, Artificial Sequence
  Description of Artificial Sequence: Synthetic oligonucleotide
  Antisense strand to SEQ ID NO: 1398832
aauauagauaaggacauca

SEQ ID NO: 1398834 - RNA, 19 nt, Artificial Sequence
  Description of Artificial Sequence: Synthetic oligonucleotide
  Sense strand starting at position 2564 of SEQ ID NO: 1243163
gccucucagggauguccaa

SEQ ID NO: 1398835 - RNA, 19 nt, Artificial Sequence
  Description of Artificial Sequence: Synthetic oligonucleotide
  Antisense strand to SEQ ID NO: 1398834
uuggacaucccugagaggc

SEQ ID NO: 1398836 - RNA, 19 nt, Artificial Sequence
  Description of Artificial Sequence: Synthetic oligonucleotide
  Sense strand starting at position 3714 of SEQ ID NO: 1243163
uguguaucucuauaaaucu

SEQ ID NO: 1398837 - RNA, 19 nt, Artificial Sequence
  Description of Artificial Sequence: Synthetic oligonucleotide
  Antisense strand to SEQ ID NO: 1398836
agauuuauagagauacaca

SEQ ID NO: 1398838 - RNA, 19 nt, Artificial Sequence
  Description of Artificial Sequence: Synthetic oligonucleotide
  Sense strand starting at position 3938 of SEQ ID NO: 1243163
auauguacuguagaaugua

SEQ ID NO: 1398839 - RNA, 19 nt, Artificial Sequence
  Description of Artificial Sequence: Synthetic oligonucleotide
  Antisense strand to SEQ ID NO: 1398838
uacauucuacaguacauau

SEQ ID NO: 1398840 - RNA, 19 nt, Artificial Sequence
  Description of Artificial Sequence: Synthetic oligonucleotide
  Sense strand starting at position 554 of SEQ ID NO: 1243165
gugguaaucugagcuacuc

SEQ ID NO: 1398841 - RNA, 19 nt, Artificial Sequence
  Description of Artificial Sequence: Synthetic oligonucleotide
  Antisense strand to SEQ ID NO: 1398840
gaguagcucagauuaccac

SEQ ID NO: 1398842 - RNA, 19 nt, Artificial Sequence
  Description of Artificial Sequence: Synthetic oligonucleotide
  Sense strand starting at position 2452 of SEQ ID NO: 1243165
auccgaaacugagugauga

SEQ ID NO: 1398843 - RNA, 19 nt, Artificial Sequence
  Description of Artificial Sequence: Synthetic oligonucleotide
  Antisense strand to SEQ ID NO: 1398842
ucaucacucaguuucggau

SEQ ID NO: 1398844 - RNA, 19 nt, Artificial Sequence
  Description of Artificial Sequence: Synthetic oligonucleotide
  Sense strand starting at position 2453 of SEQ ID NO: 1243165
uccgaaacugagugaugau

SEQ ID NO: 1398845 - RNA, 19 nt, Artificial Sequence
  Description of Artificial Sequence: Synthetic oligonucleotide
  Antisense strand to SEQ ID NO: 1398844
aucaucacucaguuucgga

SEQ ID NO: 1398846 - RNA, 19 nt, Artificial Sequence
  Description of Artificial Sequence: Synthetic oligonucleotide
  Sense strand starting at position 2472 of SEQ ID NO: 1243165
guccuuaucuaugucaucu

SEQ ID NO: 1398847 - RNA, 19 nt, Artificial Sequence
  Description of Artificial Sequence: Synthetic oligonucleotide
  Antisense strand to SEQ ID NO: 1398846
agaugacauagauaaggac

SEQ ID NO: 1398848 - RNA, 19 nt, Artificial Sequence
  Description of Artificial Sequence: Synthetic oligonucleotide
  Sense strand starting at position 553 of SEQ ID NO: 1243166
gugguaaucugagcuacuc

SEQ ID NO: 1398849 - RNA, 19 nt, Artificial Sequence
  Description of Artificial Sequence: Synthetic oligonucleotide
  Antisense strand to SEQ ID NO: 1398848
gaguagcucagauuaccac

SEQ ID NO: 1398850 - RNA, 19 nt, Artificial Sequence
  Description of Artificial Sequence: Synthetic oligonucleotide
  Sense strand starting at position 756 of SEQ ID NO: 1243166
uugucuguuggagacaaga

SEQ ID NO: 1398851 - RNA, 19 nt, Artificial Sequence
  Description of Artificial Sequence: Synthetic oligonucleotide
  Antisense strand to SEQ ID NO: 1398850
ucuugucuccaacagacaa

SEQ ID NO: 1398852 - RNA, 19 nt, Artificial Sequence
  Description of Artificial Sequence: Synthetic oligonucleotide
  Sense strand starting at position 758 of SEQ ID NO: 1243166
gucuguuggagacaagagu

SEQ ID NO: 1398853 - RNA, 19 nt, Artificial Sequence
  Description of Artificial Sequence: Synthetic oligonucleotide
  Antisense strand to SEQ ID NO: 1398852
acucuugucuccaacagac

SEQ ID NO: 1398854 - RNA, 19 nt, Artificial Sequence
  Description of Artificial Sequence: Synthetic oligonucleotide
  Sense strand starting at position 1941 of SEQ ID NO: 1243166
agcagagugccagguugua

SEQ ID NO: 1398855 - RNA, 19 nt, Artificial Sequence
  Description of Artificial Sequence: Synthetic oligonucleotide
  Antisense strand to SEQ ID NO: 1398854
uacaaccuggcacucugcu

SEQ ID NO: 1398856 - RNA, 19 nt, Artificial Sequence
  Description of Artificial Sequence: Synthetic oligonucleotide
  Sense strand starting at position 2451 of SEQ ID NO: 1243166
auccgaaacugagugauga

SEQ ID NO: 1398857 - RNA, 19 nt, Artificial Sequence
  Description of Artificial Sequence: Synthetic oligonucleotide
  Antisense strand to SEQ ID NO: 1398856
ucaucacucaguuucggau

SEQ ID NO: 1398858 - RNA, 19 nt, Artificial Sequence
  Description of Artificial Sequence: Synthetic oligonucleotide
  Sense strand starting at position 2452 of SEQ ID NO: 1243166
uccgaaacugagugaugau

SEQ ID NO: 1398859 - RNA, 19 nt, Artificial Sequence
  Description of Artificial Sequence: Synthetic oligonucleotide
  Antisense strand to SEQ ID NO: 1398858
aucaucacucaguuucgga

SEQ ID NO: 1398860 - RNA, 19 nt, Artificial Sequence
  Description of Artificial Sequence: Synthetic oligonucleotide
  Sense strand starting at position 2470 of SEQ ID NO: 1243166
uguccuuaucuaugucauc

SEQ ID NO: 1398861 - RNA, 19 nt, Artificial Sequence
  Description of Artificial Sequence: Synthetic oligonucleotide
  Antisense strand to SEQ ID NO: 1398860
gaugacauagauaaggaca

SEQ ID NO: 1398862 - RNA, 19 nt, Artificial Sequence
  Description of Artificial Sequence: Synthetic oligonucleotide
  Sense strand starting at position 2471 of SEQ ID NO: 1243166
guccuuaucuaugucaucu

SEQ ID NO: 1398863 - RNA, 19 nt, Artificial Sequence
  Description of Artificial Sequence: Synthetic oligonucleotide
  Antisense strand to SEQ ID NO: 1398862
agaugacauagauaaggac

SEQ ID NO: 1398864 - RNA, 19 nt, Artificial Sequence
  Description of Artificial Sequence: Synthetic oligonucleotide
  Sense strand starting at position 554 of SEQ ID NO: 1243168
gugguaaucugagcuacuc

SEQ ID NO: 1398865 - RNA, 19 nt, Artificial Sequence
  Description of Artificial Sequence: Synthetic oligonucleotide
  Antisense strand to SEQ ID NO: 1398864
gaguagcucagauuaccac

SEQ ID NO: 1398866 - RNA, 19 nt, Artificial Sequence
  Description of Artificial Sequence: Synthetic oligonucleotide
  Sense strand starting at position 2452 of SEQ ID NO: 1243168
auccgaaacugagugauga

SEQ ID NO: 1398867 - RNA, 19 nt, Artificial Sequence
  Description of Artificial Sequence: Synthetic oligonucleotide
  Antisense strand to SEQ ID NO: 1398866
ucaucacucaguuucggau

SEQ ID NO: 1398868 - RNA, 19 nt, Artificial Sequence
  Description of Artificial Sequence: Synthetic oligonucleotide
  Sense strand starting at position 2453 of SEQ ID NO: 1243168
uccgaaacugagugaugau

SEQ ID NO: 1398869 - RNA, 19 nt, Artificial Sequence
  Description of Artificial Sequence: Synthetic oligonucleotide
  Antisense strand to SEQ ID NO: 1398868
aucaucacucaguuucgga

SEQ ID NO: 1398870 - RNA, 19 nt, Artificial Sequence
  Description of Artificial Sequence: Synthetic oligonucleotide
  Sense strand starting at position 2472 of SEQ ID NO: 1243168
guccuuaucuaugucaucu

SEQ ID NO: 1398871 - RNA, 19 nt, Artificial Sequence
  Description of Artificial Sequence: Synthetic oligonucleotide
  Antisense strand to SEQ ID NO: 1398870
agaugacauagauaaggac

SEQ ID NO: 1398872 - RNA, 19 nt, Artificial Sequence
  Description of Artificial Sequence: Synthetic oligonucleotide
  Sense strand starting at position 553 of SEQ ID NO: 1243169
gugguaaucugagcuacuc

SEQ ID NO: 1398873 - RNA, 19 nt, Artificial Sequence
  Description of Artificial Sequence: Synthetic oligonucleotide
  Antisense strand to SEQ ID NO: 1398872
gaguagcucagauuaccac

SEQ ID NO: 1398874 - RNA, 19 nt, Artificial Sequence
  Description of Artificial Sequence: Synthetic oligonucleotide
  Sense strand starting at position 756 of SEQ ID NO: 1243169
uugucuguuggagacaaga

SEQ ID NO: 1398875 - RNA, 19 nt, Artificial Sequence
  Description of Artificial Sequence: Synthetic oligonucleotide
  Antisense strand to SEQ ID NO: 1398874
ucuugucuccaacagacaa

SEQ ID NO: 1398876 - RNA, 19 nt, Artificial Sequence
  Description of Artificial Sequence: Synthetic oligonucleotide
  Sense strand starting at position 758 of SEQ ID NO: 1243169
gucuguuggagacaagagu

SEQ ID NO: 1398877 - RNA, 19 nt, Artificial Sequence
  Description of Artificial Sequence: Synthetic oligonucleotide
  Antisense strand to SEQ ID NO: 1398876
acucuugucuccaacagac

SEQ ID NO: 1398878 - RNA, 19 nt, Artificial Sequence
  Description of Artificial Sequence: Synthetic oligonucleotide
  Sense strand starting at position 1941 of SEQ ID NO: 1243169
agcagagugccagguugua

SEQ ID NO: 1398879 - RNA, 19 nt, Artificial Sequence
  Description of Artificial Sequence: Synthetic oligonucleotide
  Antisense strand to SEQ ID NO: 1398878
uacaaccuggcacucugcu

SEQ ID NO: 1398880 - RNA, 19 nt, Artificial Sequence
  Description of Artificial Sequence: Synthetic oligonucleotide
  Sense strand starting at position 2451 of SEQ ID NO: 1243169
auccgaaacugagugauga

SEQ ID NO: 1398881 - RNA, 19 nt, Artificial Sequence
  Description of Artificial Sequence: Synthetic oligonucleotide
  Antisense strand to SEQ ID NO: 1398880
ucaucacucaguuucggau

SEQ ID NO: 1398882 - RNA, 19 nt, Artificial Sequence
  Description of Artificial Sequence: Synthetic oligonucleotide
  Sense strand starting at position 2452 of SEQ ID NO: 1243169
uccgaaacugagugaugau

SEQ ID NO: 1398883 - RNA, 19 nt, Artificial Sequence
  Description of Artificial Sequence: Synthetic oligonucleotide
  Antisense strand to SEQ ID NO: 1398882
aucaucacucaguuucgga

SEQ ID NO: 1398884 - RNA, 19 nt, Artificial Sequence
  Description of Artificial Sequence: Synthetic oligonucleotide
  Sense strand starting at position 2470 of SEQ ID NO: 1243169
uguccuuaucuaugucauc

SEQ ID NO: 1398885 - RNA, 19 nt, Artificial Sequence
  Description of Artificial Sequence: Synthetic oligonucleotide
  Antisense strand to SEQ ID NO: 1398884
gaugacauagauaaggaca

SEQ ID NO: 1398886 - RNA, 19 nt, Artificial Sequence
  Description of Artificial Sequence: Synthetic oligonucleotide
  Sense strand starting at position 2471 of SEQ ID NO: 1243169
guccuuaucuaugucaucu

SEQ ID NO: 1398887 - RNA, 19 nt, Artificial Sequence
  Description of Artificial Sequence: Synthetic oligonucleotide
  Antisense strand to SEQ ID NO: 1398886
agaugacauagauaaggac

SEQ ID NO: 1398888 - RNA, 19 nt, Artificial Sequence
  Description of Artificial Sequence: Synthetic oligonucleotide
  Sense strand starting at position 1334 of SEQ ID NO: 1243170
gccuaaacuuggcaagcua

SEQ ID NO: 1398889 - RNA, 19 nt, Artificial Sequence
  Description of Artificial Sequence: Synthetic oligonucleotide
  Antisense strand to SEQ ID NO: 1398888
uagcuugccaaguuuaggc

SEQ ID NO: 1398890 - RNA, 19 nt, Artificial Sequence
  Description of Artificial Sequence: Synthetic oligonucleotide
  Sense strand starting at position 135 of SEQ ID NO: 1243171
acacaauguuagccaggua

SEQ ID NO: 1398891 - RNA, 19 nt, Artificial Sequence
  Description of Artificial Sequence: Synthetic oligonucleotide
  Antisense strand to SEQ ID NO: 1398890
uaccuggcuaacauugugu

SEQ ID NO: 1398892 - RNA, 19 nt, Artificial Sequence
  Description of Artificial Sequence: Synthetic oligonucleotide
  Sense strand starting at position 865 of SEQ ID NO: 1243171
augugaugugguuaacucu

SEQ ID NO: 1398893 - RNA, 19 nt, Artificial Sequence
  Description of Artificial Sequence: Synthetic oligonucleotide
  Antisense strand to SEQ ID NO: 1398892
agaguuaaccacaucacau

SEQ ID NO: 1398894 - RNA, 19 nt, Artificial Sequence
  Description of Artificial Sequence: Synthetic oligonucleotide
  Sense strand starting at position 924 of SEQ ID NO: 1243171
guauuauuaugagucaugu

SEQ ID NO: 1398895 - RNA, 19 nt, Artificial Sequence
  Description of Artificial Sequence: Synthetic oligonucleotide
  Antisense strand to SEQ ID NO: 1398894
acaugacucauaauaauac

SEQ ID NO: 1398896 - RNA, 19 nt, Artificial Sequence
  Description of Artificial Sequence: Synthetic oligonucleotide
  Sense strand starting at position 1518 of SEQ ID NO: 1243171
agcaucaccggcuaugaga

SEQ ID NO: 1398897 - RNA, 19 nt, Artificial Sequence
  Description of Artificial Sequence: Synthetic oligonucleotide
  Antisense strand to SEQ ID NO: 1398896
ucucauagccggugaugcu

SEQ ID NO: 1398898 - RNA, 19 nt, Artificial Sequence
  Description of Artificial Sequence: Synthetic oligonucleotide
  Sense strand starting at position 1527 of SEQ ID NO: 1243171
ggcuaugagauguguggca

SEQ ID NO: 1398899 - RNA, 19 nt, Artificial Sequence
  Description of Artificial Sequence: Synthetic oligonucleotide
  Antisense strand to SEQ ID NO: 1398898
ugccacacaucucauagcc

SEQ ID NO: 1398900 - RNA, 19 nt, Artificial Sequence
  Description of Artificial Sequence: Synthetic oligonucleotide
  Sense strand starting at position 2565 of SEQ ID NO: 1243171
guaguucuggccuggaggu

SEQ ID NO: 1398901 - RNA, 19 nt, Artificial Sequence
  Description of Artificial Sequence: Synthetic oligonucleotide
  Antisense strand to SEQ ID NO: 1398900
accuccaggccagaacuac

SEQ ID NO: 1398902 - RNA, 19 nt, Artificial Sequence
  Description of Artificial Sequence: Synthetic oligonucleotide
  Sense strand starting at position 3154 of SEQ ID NO: 1243171
aucgguauuguaggacaau

SEQ ID NO: 1398903 - RNA, 19 nt, Artificial Sequence
  Description of Artificial Sequence: Synthetic oligonucleotide
  Antisense strand to SEQ ID NO: 1398902
auuguccuacaauaccgau

SEQ ID NO: 1398904 - RNA, 19 nt, Artificial Sequence
  Description of Artificial Sequence: Synthetic oligonucleotide
  Sense strand starting at position 3155 of SEQ ID NO: 1243171
ucgguauuguaggacaaug

SEQ ID NO: 1398905 - RNA, 19 nt, Artificial Sequence
  Description of Artificial Sequence: Synthetic oligonucleotide
  Antisense strand to SEQ ID NO: 1398904
cauuguccuacaauaccga

SEQ ID NO: 1398906 - RNA, 19 nt, Artificial Sequence
  Description of Artificial Sequence: Synthetic oligonucleotide
  Sense strand starting at position 3327 of SEQ ID NO: 1243171
ggacuccucucuuauguaa

SEQ ID NO: 1398907 - RNA, 19 nt, Artificial Sequence
  Description of Artificial Sequence: Synthetic oligonucleotide
  Antisense strand to SEQ ID NO: 1398906
uuacauaagagaggagucc

SEQ ID NO: 1398908 - RNA, 19 nt, Artificial Sequence
  Description of Artificial Sequence: Synthetic oligonucleotide
  Sense strand starting at position 3398 of SEQ ID NO: 1243171
gcauguuagucacggugca

SEQ ID NO: 1398909 - RNA, 19 nt, Artificial Sequence
  Description of Artificial Sequence: Synthetic oligonucleotide
  Antisense strand to SEQ ID NO: 1398908
ugcaccgugacuaacaugc

SEQ ID NO: 1398910 - RNA, 19 nt, Artificial Sequence
  Description of Artificial Sequence: Synthetic oligonucleotide
  Sense strand starting at position 3489 of SEQ ID NO: 1243171
aacugagucucggaaugau

SEQ ID NO: 1398911 - RNA, 19 nt, Artificial Sequence
  Description of Artificial Sequence: Synthetic oligonucleotide
  Antisense strand to SEQ ID NO: 1398910
aucauuccgagacucaguu

SEQ ID NO: 1398912 - RNA, 19 nt, Artificial Sequence
  Description of Artificial Sequence: Synthetic oligonucleotide
  Sense strand starting at position 3492 of SEQ ID NO: 1243171
ugagucucggaaugaugaa

SEQ ID NO: 1398913 - RNA, 19 nt, Artificial Sequence
  Description of Artificial Sequence: Synthetic oligonucleotide
  Antisense strand to SEQ ID NO: 1398912
uucaucauuccgagacuca

SEQ ID NO: 1398914 - RNA, 19 nt, Artificial Sequence
  Description of Artificial Sequence: Synthetic oligonucleotide
  Sense strand starting at position 3505 of SEQ ID NO: 1243171
gaugaagcacucuguccaa

SEQ ID NO: 1398915 - RNA, 19 nt, Artificial Sequence
  Description of Artificial Sequence: Synthetic oligonucleotide
  Antisense strand to SEQ ID NO: 1398914
uuggacagagugcuucauc

SEQ ID NO: 1398916 - RNA, 19 nt, Artificial Sequence
  Description of Artificial Sequence: Synthetic oligonucleotide
  Sense strand starting at position 3909 of SEQ ID NO: 1243171
ggaagucucugguuaaauu

SEQ ID NO: 1398917 - RNA, 19 nt, Artificial Sequence
  Description of Artificial Sequence: Synthetic oligonucleotide
  Antisense strand to SEQ ID NO: 1398916
aauuuaaccagagacuucc

SEQ ID NO: 1398918 - RNA, 19 nt, Artificial Sequence
  Description of Artificial Sequence: Synthetic oligonucleotide
  Sense strand starting at position 3910 of SEQ ID NO: 1243171
gaagucucugguuaaauua

SEQ ID NO: 1398919 - RNA, 19 nt, Artificial Sequence
  Description of Artificial Sequence: Synthetic oligonucleotide
  Antisense strand to SEQ ID NO: 1398918
uaauuuaaccagagacuuc

SEQ ID NO: 1398920 - RNA, 19 nt, Artificial Sequence
  Description of Artificial Sequence: Synthetic oligonucleotide
  Sense strand starting at position 174 of SEQ ID NO: 1243172
aggaacugguggucagaca

SEQ ID NO: 1398921 - RNA, 19 nt, Artificial Sequence
  Description of Artificial Sequence: Synthetic oligonucleotide
  Antisense strand to SEQ ID NO: 1398920
ugucugaccaccaguuccu

SEQ ID NO: 1398922 - RNA, 19 nt, Artificial Sequence
  Description of Artificial Sequence: Synthetic oligonucleotide
  Sense strand starting at position 405 of SEQ ID NO: 1243172
gaugcauacugauugucaa

SEQ ID NO: 1398923 - RNA, 19 nt, Artificial Sequence
  Description of Artificial Sequence: Synthetic oligonucleotide
  Antisense strand to SEQ ID NO: 1398922
uugacaaucaguaugcauc

SEQ ID NO: 1398924 - RNA, 19 nt, Artificial Sequence
  Description of Artificial Sequence: Synthetic oligonucleotide
  Sense strand starting at position 1299 of SEQ ID NO: 1243172
augaucucggcccacuaaa

SEQ ID NO: 1398925 - RNA, 19 nt, Artificial Sequence
  Description of Artificial Sequence: Synthetic oligonucleotide
  Antisense strand to SEQ ID NO: 1398924
uuuagugggccgagaucau

SEQ ID NO: 1398926 - RNA, 19 nt, Artificial Sequence
  Description of Artificial Sequence: Synthetic oligonucleotide
  Sense strand starting at position 1907 of SEQ ID NO: 1243172
uggcucuggucaugcgaca

SEQ ID NO: 1398927 - RNA, 19 nt, Artificial Sequence
  Description of Artificial Sequence: Synthetic oligonucleotide
  Antisense strand to SEQ ID NO: 1398926
ugucgcaugaccagagcca

SEQ ID NO: 1398928 - RNA, 19 nt, Artificial Sequence
  Description of Artificial Sequence: Synthetic oligonucleotide
  Sense strand starting at position 2532 of SEQ ID NO: 1243172
gugugaucuggguaagaca

SEQ ID NO: 1398929 - RNA, 19 nt, Artificial Sequence
  Description of Artificial Sequence: Synthetic oligonucleotide
  Antisense strand to SEQ ID NO: 1398928
ugucuuacccagaucacac

SEQ ID NO: 1398930 - RNA, 19 nt, Artificial Sequence
  Description of Artificial Sequence: Synthetic oligonucleotide
  Sense strand starting at position 2535 of SEQ ID NO: 1243172
ugaucuggguaagacaauu

SEQ ID NO: 1398931 - RNA, 19 nt, Artificial Sequence
  Description of Artificial Sequence: Synthetic oligonucleotide
  Antisense strand to SEQ ID NO: 1398930
aauugucuuacccagauca

SEQ ID NO: 1398932 - RNA, 19 nt, Artificial Sequence
  Description of Artificial Sequence: Synthetic oligonucleotide
  Sense strand starting at position 2756 of SEQ ID NO: 1243172
cugagacugugucucagaa

SEQ ID NO: 1398933 - RNA, 19 nt, Artificial Sequence
  Description of Artificial Sequence: Synthetic oligonucleotide
  Antisense strand to SEQ ID NO: 1398932
uucugagacacagucucag

SEQ ID NO: 1398934 - RNA, 19 nt, Artificial Sequence
  Description of Artificial Sequence: Synthetic oligonucleotide
  Sense strand starting at position 2758 of SEQ ID NO: 1243172
gagacugugucucagaaau

SEQ ID NO: 1398935 - RNA, 19 nt, Artificial Sequence
  Description of Artificial Sequence: Synthetic oligonucleotide
  Antisense strand to SEQ ID NO: 1398934
auuucugagacacagucuc

SEQ ID NO: 1398936 - RNA, 19 nt, Artificial Sequence
  Description of Artificial Sequence: Synthetic oligonucleotide
  Sense strand starting at position 2822 of SEQ ID NO: 1243172
agugguuucuaauaaggaa

SEQ ID NO: 1398937 - RNA, 19 nt, Artificial Sequence
  Description of Artificial Sequence: Synthetic oligonucleotide
  Antisense strand to SEQ ID NO: 1398936
uuccuuauuagaaaccacu

SEQ ID NO: 1398938 - RNA, 19 nt, Artificial Sequence
  Description of Artificial Sequence: Synthetic oligonucleotide
  Sense strand starting at position 3254 of SEQ ID NO: 1243172
cucagaaguuaucuagaau

SEQ ID NO: 1398939 - RNA, 19 nt, Artificial Sequence
  Description of Artificial Sequence: Synthetic oligonucleotide
  Antisense strand to SEQ ID NO: 1398938
auucuagauaacuucugag

SEQ ID NO: 1398940 - RNA, 19 nt, Artificial Sequence
  Description of Artificial Sequence: Synthetic oligonucleotide
  Sense strand starting at position 3348 of SEQ ID NO: 1243172
cuucuaaaguuuggaaacu

SEQ ID NO: 1398941 - RNA, 19 nt, Artificial Sequence
  Description of Artificial Sequence: Synthetic oligonucleotide
  Antisense strand to SEQ ID NO: 1398940
aguuuccaaacuuuagaag

SEQ ID NO: 1398942 - RNA, 19 nt, Artificial Sequence
  Description of Artificial Sequence: Synthetic oligonucleotide
  Sense strand starting at position 3349 of SEQ ID NO: 1243172
uucuaaaguuuggaaacua

SEQ ID NO: 1398943 - RNA, 19 nt, Artificial Sequence
  Description of Artificial Sequence: Synthetic oligonucleotide
  Antisense strand to SEQ ID NO: 1398942
uaguuuccaaacuuuagaa

SEQ ID NO: 1398944 - RNA, 19 nt, Artificial Sequence
  Description of Artificial Sequence: Synthetic oligonucleotide
  Sense strand starting at position 3391 of SEQ ID NO: 1243172
guacauauguucucuuuau

SEQ ID NO: 1398945 - RNA, 19 nt, Artificial Sequence
  Description of Artificial Sequence: Synthetic oligonucleotide
  Antisense strand to SEQ ID NO: 1398944
auaaagagaacauauguac

SEQ ID NO: 1398946 - RNA, 19 nt, Artificial Sequence
  Description of Artificial Sequence: Synthetic oligonucleotide
  Sense strand starting at position 3423 of SEQ ID NO: 1243172
ucagaaagauugguuauau

SEQ ID NO: 1398947 - RNA, 19 nt, Artificial Sequence
  Description of Artificial Sequence: Synthetic oligonucleotide
  Antisense strand to SEQ ID NO: 1398946
auauaaccaaucuuucuga

SEQ ID NO: 1398948 - RNA, 19 nt, Artificial Sequence
  Description of Artificial Sequence: Synthetic oligonucleotide
  Sense strand starting at position 3424 of SEQ ID NO: 1243172
cagaaagauugguuauauu

SEQ ID NO: 1398949 - RNA, 19 nt, Artificial Sequence
  Description of Artificial Sequence: Synthetic oligonucleotide
  Antisense strand to SEQ ID NO: 1398948
aauauaaccaaucuuucug

SEQ ID NO: 1398950 - RNA, 19 nt, Artificial Sequence
  Description of Artificial Sequence: Synthetic oligonucleotide
  Sense strand starting at position 3486 of SEQ ID NO: 1243172
aauuccuggcuucgaguuu

SEQ ID NO: 1398951 - RNA, 19 nt, Artificial Sequence
  Description of Artificial Sequence: Synthetic oligonucleotide
  Antisense strand to SEQ ID NO: 1398950
aaacucgaagccaggaauu

SEQ ID NO: 1398952 - RNA, 19 nt, Artificial Sequence
  Description of Artificial Sequence: Synthetic oligonucleotide
  Sense strand starting at position 3549 of SEQ ID NO: 1243172
gccugagaaccuuagagcu

SEQ ID NO: 1398953 - RNA, 19 nt, Artificial Sequence
  Description of Artificial Sequence: Synthetic oligonucleotide
  Antisense strand to SEQ ID NO: 1398952
agcucuaagguucucaggc

SEQ ID NO: 1398954 - RNA, 19 nt, Artificial Sequence
  Description of Artificial Sequence: Synthetic oligonucleotide
  Sense strand starting at position 3551 of SEQ ID NO: 1243172
cugagaaccuuagagcuuu

SEQ ID NO: 1398955 - RNA, 19 nt, Artificial Sequence
  Description of Artificial Sequence: Synthetic oligonucleotide
  Antisense strand to SEQ ID NO: 1398954
aaagcucuaagguucucag

SEQ ID NO: 1398956 - RNA, 19 nt, Artificial Sequence
  Description of Artificial Sequence: Synthetic oligonucleotide
  Sense strand starting at position 50 of SEQ ID NO: 1243173
gguguacauuuccaucguu

SEQ ID NO: 1398957 - RNA, 19 nt, Artificial Sequence
  Description of Artificial Sequence: Synthetic oligonucleotide
  Antisense strand to SEQ ID NO: 1398956
aacgauggaaauguacacc

SEQ ID NO: 1398958 - RNA, 19 nt, Artificial Sequence
  Description of Artificial Sequence: Synthetic oligonucleotide
  Sense strand starting at position 167 of SEQ ID NO: 1243173
aggaacugguggucagaca

SEQ ID NO: 1398959 - RNA, 19 nt, Artificial Sequence
  Description of Artificial Sequence: Synthetic oligonucleotide
  Antisense strand to SEQ ID NO: 1398958
ugucugaccaccaguuccu

SEQ ID NO: 1398960 - RNA, 19 nt, Artificial Sequence
  Description of Artificial Sequence: Synthetic oligonucleotide
  Sense strand starting at position 178 of SEQ ID NO: 1243173
gucagacacacguagguuu

SEQ ID NO: 1398961 - RNA, 19 nt, Artificial Sequence
  Description of Artificial Sequence: Synthetic oligonucleotide
  Antisense strand to SEQ ID NO: 1398960
aaaccuacgugugucugac

SEQ ID NO: 1398962 - RNA, 19 nt, Artificial Sequence
  Description of Artificial Sequence: Synthetic oligonucleotide
  Sense strand starting at position 372 of SEQ ID NO: 1243173
acucaauguuagccaugua

SEQ ID NO: 1398963 - RNA, 19 nt, Artificial Sequence
  Description of Artificial Sequence: Synthetic oligonucleotide
  Antisense strand to SEQ ID NO: 1398962
uacauggcuaacauugagu

SEQ ID NO: 1398964 - RNA, 19 nt, Artificial Sequence
  Description of Artificial Sequence: Synthetic oligonucleotide
  Sense strand starting at position 429 of SEQ ID NO: 1243173
ccaguaaaguauuaccaaa

SEQ ID NO: 1398965 - RNA, 19 nt, Artificial Sequence
  Description of Artificial Sequence: Synthetic oligonucleotide
  Antisense strand to SEQ ID NO: 1398964
uuugguaauacuuuacugg

SEQ ID NO: 1398966 - RNA, 19 nt, Artificial Sequence
  Description of Artificial Sequence: Synthetic oligonucleotide
  Sense strand starting at position 2533 of SEQ ID NO: 1243173
gugugaucuggguaagaca

SEQ ID NO: 1398967 - RNA, 19 nt, Artificial Sequence
  Description of Artificial Sequence: Synthetic oligonucleotide
  Antisense strand to SEQ ID NO: 1398966
ugucuuacccagaucacac

SEQ ID NO: 1398968 - RNA, 19 nt, Artificial Sequence
  Description of Artificial Sequence: Synthetic oligonucleotide
  Sense strand starting at position 2536 of SEQ ID NO: 1243173
ugaucuggguaagacaauu

SEQ ID NO: 1398969 - RNA, 19 nt, Artificial Sequence
  Description of Artificial Sequence: Synthetic oligonucleotide
  Antisense strand to SEQ ID NO: 1398968
aauugucuuacccagauca

SEQ ID NO: 1398970 - RNA, 19 nt, Artificial Sequence
  Description of Artificial Sequence: Synthetic oligonucleotide
  Sense strand starting at position 2820 of SEQ ID NO: 1243173
ucuagugguuucuaauaag

SEQ ID NO: 1398971 - RNA, 19 nt, Artificial Sequence
  Description of Artificial Sequence: Synthetic oligonucleotide
  Antisense strand to SEQ ID NO: 1398970
cuuauuagaaaccacuaga

SEQ ID NO: 1398972 - RNA, 19 nt, Artificial Sequence
  Description of Artificial Sequence: Synthetic oligonucleotide
  Sense strand starting at position 2823 of SEQ ID NO: 1243173
agugguuucuaauaaggaa

SEQ ID NO: 1398973 - RNA, 19 nt, Artificial Sequence
  Description of Artificial Sequence: Synthetic oligonucleotide
  Antisense strand to SEQ ID NO: 1398972
uuccuuauuagaaaccacu

SEQ ID NO: 1398974 - RNA, 19 nt, Artificial Sequence
  Description of Artificial Sequence: Synthetic oligonucleotide
  Sense strand starting at position 3349 of SEQ ID NO: 1243173
cuucuaaaguuuggaaacu

SEQ ID NO: 1398975 - RNA, 19 nt, Artificial Sequence
  Description of Artificial Sequence: Synthetic oligonucleotide
  Antisense strand to SEQ ID NO: 1398974
aguuuccaaacuuuagaag

SEQ ID NO: 1398976 - RNA, 19 nt, Artificial Sequence
  Description of Artificial Sequence: Synthetic oligonucleotide
  Sense strand starting at position 3350 of SEQ ID NO: 1243173
uucuaaaguuuggaaacua

SEQ ID NO: 1398977 - RNA, 19 nt, Artificial Sequence
  Description of Artificial Sequence: Synthetic oligonucleotide
  Antisense strand to SEQ ID NO: 1398976
uaguuuccaaacuuuagaa

SEQ ID NO: 1398978 - RNA, 19 nt, Artificial Sequence
  Description of Artificial Sequence: Synthetic oligonucleotide
  Sense strand starting at position 3392 of SEQ ID NO: 1243173
guacauauguucucuuuau

SEQ ID NO: 1398979 - RNA, 19 nt, Artificial Sequence
  Description of Artificial Sequence: Synthetic oligonucleotide
  Antisense strand to SEQ ID NO: 1398978
auaaagagaacauauguac

SEQ ID NO: 1398980 - RNA, 19 nt, Artificial Sequence
  Description of Artificial Sequence: Synthetic oligonucleotide
  Sense strand starting at position 3415 of SEQ ID NO: 1243173
aggcuacaaucagaaagau

SEQ ID NO: 1398981 - RNA, 19 nt, Artificial Sequence
  Description of Artificial Sequence: Synthetic oligonucleotide
  Antisense strand to SEQ ID NO: 1398980
aucuuucugauuguagccu

SEQ ID NO: 1398982 - RNA, 19 nt, Artificial Sequence
  Description of Artificial Sequence: Synthetic oligonucleotide
  Sense strand starting at position 3424 of SEQ ID NO: 1243173
ucagaaagauugguuauau

SEQ ID NO: 1398983 - RNA, 19 nt, Artificial Sequence
  Description of Artificial Sequence: Synthetic oligonucleotide
  Antisense strand to SEQ ID NO: 1398982
auauaaccaaucuuucuga

SEQ ID NO: 1398984 - RNA, 19 nt, Artificial Sequence
  Description of Artificial Sequence: Synthetic oligonucleotide
  Sense strand starting at position 3425 of SEQ ID NO: 1243173
cagaaagauugguuauauu

SEQ ID NO: 1398985 - RNA, 19 nt, Artificial Sequence
  Description of Artificial Sequence: Synthetic oligonucleotide
  Antisense strand to SEQ ID NO: 1398984
aauauaaccaaucuuucug

SEQ ID NO: 1398986 - RNA, 19 nt, Artificial Sequence
  Description of Artificial Sequence: Synthetic oligonucleotide
  Sense strand starting at position 3487 of SEQ ID NO: 1243173
aauuccuggcuucgaguuu

SEQ ID NO: 1398987 - RNA, 19 nt, Artificial Sequence
  Description of Artificial Sequence: Synthetic oligonucleotide
  Antisense strand to SEQ ID NO: 1398986
aaacucgaagccaggaauu

SEQ ID NO: 1398988 - RNA, 19 nt, Artificial Sequence
  Description of Artificial Sequence: Synthetic oligonucleotide
  Sense strand starting at position 3550 of SEQ ID NO: 1243173
gccugagaaccuuagagcu

SEQ ID NO: 1398989 - RNA, 19 nt, Artificial Sequence
  Description of Artificial Sequence: Synthetic oligonucleotide
  Antisense strand to SEQ ID NO: 1398988
agcucuaagguucucaggc

SEQ ID NO: 1398990 - RNA, 19 nt, Artificial Sequence
  Description of Artificial Sequence: Synthetic oligonucleotide
  Sense strand starting at position 3552 of SEQ ID NO: 1243173
cugagaaccuuagagcuuu

SEQ ID NO: 1398991 - RNA, 19 nt, Artificial Sequence
  Description of Artificial Sequence: Synthetic oligonucleotide
  Antisense strand to SEQ ID NO: 1398990
aaagcucuaagguucucag

SEQ ID NO: 1398992 - RNA, 19 nt, Artificial Sequence
  Description of Artificial Sequence: Synthetic oligonucleotide
  Sense strand starting at position 106 of SEQ ID NO: 1243174
ggccaauaguaggaaagaa

SEQ ID NO: 1398993 - RNA, 19 nt, Artificial Sequence
  Description of Artificial Sequence: Synthetic oligonucleotide
  Antisense strand to SEQ ID NO: 1398992
uucuuuccuacuauuggcc

SEQ ID NO: 1398994 - RNA, 19 nt, Artificial Sequence
  Description of Artificial Sequence: Synthetic oligonucleotide
  Sense strand starting at position 632 of SEQ ID NO: 1243174
guugaucccugcuugcaaa

SEQ ID NO: 1398995 - RNA, 19 nt, Artificial Sequence
  Description of Artificial Sequence: Synthetic oligonucleotide
  Antisense strand to SEQ ID NO: 1398994
uuugcaagcagggaucaac

SEQ ID NO: 1398996 - RNA, 19 nt, Artificial Sequence
  Description of Artificial Sequence: Synthetic oligonucleotide
  Sense strand starting at position 695 of SEQ ID NO: 1243174
gaacaauucgugcgaugaa

SEQ ID NO: 1398997 - RNA, 19 nt, Artificial Sequence
  Description of Artificial Sequence: Synthetic oligonucleotide
  Antisense strand to SEQ ID NO: 1398996
uucaucgcacgaauuguuc

SEQ ID NO: 1398998 - RNA, 19 nt, Artificial Sequence
  Description of Artificial Sequence: Synthetic oligonucleotide
  Sense strand starting at position 696 of SEQ ID NO: 1243174
aacaauucgugcgaugaaa

SEQ ID NO: 1398999 - RNA, 19 nt, Artificial Sequence
  Description of Artificial Sequence: Synthetic oligonucleotide
  Antisense strand to SEQ ID NO: 1398998
uuucaucgcacgaauuguu

SEQ ID NO: 1399000 - RNA, 19 nt, Artificial Sequence
  Description of Artificial Sequence: Synthetic oligonucleotide
  Sense strand starting at position 740 of SEQ ID NO: 1243174
uguggauagaucugcaucu

SEQ ID NO: 1399001 - RNA, 19 nt, Artificial Sequence
  Description of Artificial Sequence: Synthetic oligonucleotide
  Antisense strand to SEQ ID NO: 1399000
agaugcagaucuauccaca

SEQ ID NO: 1399002 - RNA, 19 nt, Artificial Sequence
  Description of Artificial Sequence: Synthetic oligonucleotide
  Sense strand starting at position 741 of SEQ ID NO: 1243174
guggauagaucugcaucua

SEQ ID NO: 1399003 - RNA, 19 nt, Artificial Sequence
  Description of Artificial Sequence: Synthetic oligonucleotide
  Antisense strand to SEQ ID NO: 1399002
uagaugcagaucuauccac

SEQ ID NO: 1399004 - RNA, 19 nt, Artificial Sequence
  Description of Artificial Sequence: Synthetic oligonucleotide
  Sense strand starting at position 742 of SEQ ID NO: 1243174
uggauagaucugcaucuau

SEQ ID NO: 1399005 - RNA, 19 nt, Artificial Sequence
  Description of Artificial Sequence: Synthetic oligonucleotide
  Antisense strand to SEQ ID NO: 1399004
auagaugcagaucuaucca

SEQ ID NO: 1399006 - RNA, 19 nt, Artificial Sequence
  Description of Artificial Sequence: Synthetic oligonucleotide
  Sense strand starting at position 796 of SEQ ID NO: 1243174
gaucccugugcuugcuaga

SEQ ID NO: 1399007 - RNA, 19 nt, Artificial Sequence
  Description of Artificial Sequence: Synthetic oligonucleotide
  Antisense strand to SEQ ID NO: 1399006
ucuagcaagcacagggauc

SEQ ID NO: 1399008 - RNA, 19 nt, Artificial Sequence
  Description of Artificial Sequence: Synthetic oligonucleotide
  Sense strand starting at position 799 of SEQ ID NO: 1243174
cccugugcuugcuagaacu

SEQ ID NO: 1399009 - RNA, 19 nt, Artificial Sequence
  Description of Artificial Sequence: Synthetic oligonucleotide
  Antisense strand to SEQ ID NO: 1399008
aguucuagcaagcacaggg

SEQ ID NO: 1399010 - RNA, 19 nt, Artificial Sequence
  Description of Artificial Sequence: Synthetic oligonucleotide
  Sense strand starting at position 1148 of SEQ ID NO: 1243174
ccggccuuguucguguaau

SEQ ID NO: 1399011 - RNA, 19 nt, Artificial Sequence
  Description of Artificial Sequence: Synthetic oligonucleotide
  Antisense strand to SEQ ID NO: 1399010
auuacacgaacaaggccgg

SEQ ID NO: 1399012 - RNA, 19 nt, Artificial Sequence
  Description of Artificial Sequence: Synthetic oligonucleotide
  Sense strand starting at position 1149 of SEQ ID NO: 1243174
cggccuuguucguguaauu

SEQ ID NO: 1399013 - RNA, 19 nt, Artificial Sequence
  Description of Artificial Sequence: Synthetic oligonucleotide
  Antisense strand to SEQ ID NO: 1399012
aauuacacgaacaaggccg

SEQ ID NO: 1399014 - RNA, 19 nt, Artificial Sequence
  Description of Artificial Sequence: Synthetic oligonucleotide
  Sense strand starting at position 1233 of SEQ ID NO: 1243174
gcuggagacugaugaaaug

SEQ ID NO: 1399015 - RNA, 19 nt, Artificial Sequence
  Description of Artificial Sequence: Synthetic oligonucleotide
  Antisense strand to SEQ ID NO: 1399014
cauuucaucagucuccagc

SEQ ID NO: 1399016 - RNA, 19 nt, Artificial Sequence
  Description of Artificial Sequence: Synthetic oligonucleotide
  Sense strand starting at position 1243 of SEQ ID NO: 1243174
gaugaaaugucagcaguag

SEQ ID NO: 1399017 - RNA, 19 nt, Artificial Sequence
  Description of Artificial Sequence: Synthetic oligonucleotide
  Antisense strand to SEQ ID NO: 1399016
cuacugcugacauuucauc

SEQ ID NO: 1399018 - RNA, 19 nt, Artificial Sequence
  Description of Artificial Sequence: Synthetic oligonucleotide
  Sense strand starting at position 1244 of SEQ ID NO: 1243174
augaaaugucagcaguagu

SEQ ID NO: 1399019 - RNA, 19 nt, Artificial Sequence
  Description of Artificial Sequence: Synthetic oligonucleotide
  Antisense strand to SEQ ID NO: 1399018
acuacugcugacauuucau

SEQ ID NO: 1399020 - RNA, 19 nt, Artificial Sequence
  Description of Artificial Sequence: Synthetic oligonucleotide
  Sense strand starting at position 1261 of SEQ ID NO: 1243174
guugcuuugguguggugaa

SEQ ID NO: 1399021 - RNA, 19 nt, Artificial Sequence
  Description of Artificial Sequence: Synthetic oligonucleotide
  Antisense strand to SEQ ID NO: 1399020
uucaccacaccaaagcaac

SEQ ID NO: 1399022 - RNA, 19 nt, Artificial Sequence
  Description of Artificial Sequence: Synthetic oligonucleotide
  Sense strand starting at position 1273 of SEQ ID NO: 1243174
uggugaacaaugcaugauu

SEQ ID NO: 1399023 - RNA, 19 nt, Artificial Sequence
  Description of Artificial Sequence: Synthetic oligonucleotide
  Antisense strand to SEQ ID NO: 1399022
aaucaugcauuguucacca

SEQ ID NO: 1399024 - RNA, 19 nt, Artificial Sequence
  Description of Artificial Sequence: Synthetic oligonucleotide
  Sense strand starting at position 1443 of SEQ ID NO: 1243174
cucacuuacuugucuggga

SEQ ID NO: 1399025 - RNA, 19 nt, Artificial Sequence
  Description of Artificial Sequence: Synthetic oligonucleotide
  Antisense strand to SEQ ID NO: 1399024
ucccagacaaguaagugag

SEQ ID NO: 1399026 - RNA, 19 nt, Artificial Sequence
  Description of Artificial Sequence: Synthetic oligonucleotide
  Sense strand starting at position 2352 of SEQ ID NO: 1243174
gaagaaauuauccgggcgu

SEQ ID NO: 1399027 - RNA, 19 nt, Artificial Sequence
  Description of Artificial Sequence: Synthetic oligonucleotide
  Antisense strand to SEQ ID NO: 1399026
acgcccggauaauuucuuc

SEQ ID NO: 1399028 - RNA, 19 nt, Artificial Sequence
  Description of Artificial Sequence: Synthetic oligonucleotide
  Sense strand starting at position 2384 of SEQ ID NO: 1243174
cguaauccuagaggagaau

SEQ ID NO: 1399029 - RNA, 19 nt, Artificial Sequence
  Description of Artificial Sequence: Synthetic oligonucleotide
  Antisense strand to SEQ ID NO: 1399028
auucuccucuaggauuacg

SEQ ID NO: 1399030 - RNA, 19 nt, Artificial Sequence
  Description of Artificial Sequence: Synthetic oligonucleotide
  Sense strand starting at position 3248 of SEQ ID NO: 1243174
aaacuucggugcuuuaaag

SEQ ID NO: 1399031 - RNA, 19 nt, Artificial Sequence
  Description of Artificial Sequence: Synthetic oligonucleotide
  Antisense strand to SEQ ID NO: 1399030
cuuuaaagcaccgaaguuu

SEQ ID NO: 1399032 - RNA, 19 nt, Artificial Sequence
  Description of Artificial Sequence: Synthetic oligonucleotide
  Sense strand starting at position 3356 of SEQ ID NO: 1243174
ggaggaaacuuacaacuca

SEQ ID NO: 1399033 - RNA, 19 nt, Artificial Sequence
  Description of Artificial Sequence: Synthetic oligonucleotide
  Antisense strand to SEQ ID NO: 1399032
ugaguuguaaguuuccucc

SEQ ID NO: 1399034 - RNA, 19 nt, Artificial Sequence
  Description of Artificial Sequence: Synthetic oligonucleotide
  Sense strand starting at position 3419 of SEQ ID NO: 1243174
uuuccagugcauuaugcaa

SEQ ID NO: 1399035 - RNA, 19 nt, Artificial Sequence
  Description of Artificial Sequence: Synthetic oligonucleotide
  Antisense strand to SEQ ID NO: 1399034
uugcauaaugcacuggaaa

SEQ ID NO: 1399036 - RNA, 19 nt, Artificial Sequence
  Description of Artificial Sequence: Synthetic oligonucleotide
  Sense strand starting at position 3421 of SEQ ID NO: 1243174
uccagugcauuaugcaaau

SEQ ID NO: 1399037 - RNA, 19 nt, Artificial Sequence
  Description of Artificial Sequence: Synthetic oligonucleotide
  Antisense strand to SEQ ID NO: 1399036
auuugcauaaugcacugga

SEQ ID NO: 1399038 - RNA, 19 nt, Artificial Sequence
  Description of Artificial Sequence: Synthetic oligonucleotide
  Sense strand starting at position 3454 of SEQ ID NO: 1243174
agaagaugcucagcucaac

SEQ ID NO: 1399039 - RNA, 19 nt, Artificial Sequence
  Description of Artificial Sequence: Synthetic oligonucleotide
  Antisense strand to SEQ ID NO: 1399038
guugagcugagcaucuucu

SEQ ID NO: 1399040 - RNA, 19 nt, Artificial Sequence
  Description of Artificial Sequence: Synthetic oligonucleotide
  Sense strand starting at position 3620 of SEQ ID NO: 1243174
cuacgauggcuguaaucaa

SEQ ID NO: 1399041 - RNA, 19 nt, Artificial Sequence
  Description of Artificial Sequence: Synthetic oligonucleotide
  Antisense strand to SEQ ID NO: 1399040
uugauuacagccaucguag

SEQ ID NO: 1399042 - RNA, 19 nt, Artificial Sequence
  Description of Artificial Sequence: Synthetic oligonucleotide
  Sense strand starting at position 3704 of SEQ ID NO: 1243174
ggcuacacucgcuauggaa

SEQ ID NO: 1399043 - RNA, 19 nt, Artificial Sequence
  Description of Artificial Sequence: Synthetic oligonucleotide
  Antisense strand to SEQ ID NO: 1399042
uuccauagcgaguguagcc

SEQ ID NO: 1399044 - RNA, 19 nt, Artificial Sequence
  Description of Artificial Sequence: Synthetic oligonucleotide
  Sense strand starting at position 3738 of SEQ ID NO: 1243174
ccugaaagguuagaguuaa

SEQ ID NO: 1399045 - RNA, 19 nt, Artificial Sequence
  Description of Artificial Sequence: Synthetic oligonucleotide
  Antisense strand to SEQ ID NO: 1399044
uuaacucuaaccuuucagg

SEQ ID NO: 1399046 - RNA, 19 nt, Artificial Sequence
  Description of Artificial Sequence: Synthetic oligonucleotide
  Sense strand starting at position 3824 of SEQ ID NO: 1243174
aaacauguguguucuuagu

SEQ ID NO: 1399047 - RNA, 19 nt, Artificial Sequence
  Description of Artificial Sequence: Synthetic oligonucleotide
  Antisense strand to SEQ ID NO: 1399046
acuaagaacacacauguuu

SEQ ID NO: 1399048 - RNA, 19 nt, Artificial Sequence
  Description of Artificial Sequence: Synthetic oligonucleotide
  Sense strand starting at position 3826 of SEQ ID NO: 1243174
acauguguguucuuaguaa

SEQ ID NO: 1399049 - RNA, 19 nt, Artificial Sequence
  Description of Artificial Sequence: Synthetic oligonucleotide
  Antisense strand to SEQ ID NO: 1399048
uuacuaagaacacacaugu

SEQ ID NO: 1399050 - RNA, 19 nt, Artificial Sequence
  Description of Artificial Sequence: Synthetic oligonucleotide
  Sense strand starting at position 3830 of SEQ ID NO: 1243174
guguguucuuaguaauauu

SEQ ID NO: 1399051 - RNA, 19 nt, Artificial Sequence
  Description of Artificial Sequence: Synthetic oligonucleotide
  Antisense strand to SEQ ID NO: 1399050
aauauuacuaagaacacac

SEQ ID NO: 1399052 - RNA, 19 nt, Artificial Sequence
  Description of Artificial Sequence: Synthetic oligonucleotide
  Sense strand starting at position 3869 of SEQ ID NO: 1243174
gaagcaauccuaggguaua

SEQ ID NO: 1399053 - RNA, 19 nt, Artificial Sequence
  Description of Artificial Sequence: Synthetic oligonucleotide
  Antisense strand to SEQ ID NO: 1399052
uauacccuaggauugcuuc

SEQ ID NO: 1399054 - RNA, 19 nt, Artificial Sequence
  Description of Artificial Sequence: Synthetic oligonucleotide
  Sense strand starting at position 3870 of SEQ ID NO: 1243174
aagcaauccuaggguauau

SEQ ID NO: 1399055 - RNA, 19 nt, Artificial Sequence
  Description of Artificial Sequence: Synthetic oligonucleotide
  Antisense strand to SEQ ID NO: 1399054
auauacccuaggauugcuu

SEQ ID NO: 1399056 - RNA, 19 nt, Artificial Sequence
  Description of Artificial Sequence: Synthetic oligonucleotide
  Sense strand starting at position 3872 of SEQ ID NO: 1243174
gcaauccuaggguauauca

SEQ ID NO: 1399057 - RNA, 19 nt, Artificial Sequence
  Description of Artificial Sequence: Synthetic oligonucleotide
  Antisense strand to SEQ ID NO: 1399056
ugauauacccuaggauugc

SEQ ID NO: 1399058 - RNA, 19 nt, Artificial Sequence
  Description of Artificial Sequence: Synthetic oligonucleotide
  Sense strand starting at position 3901 of SEQ ID NO: 1243174
gggugaauaugguauaguu

SEQ ID NO: 1399059 - RNA, 19 nt, Artificial Sequence
  Description of Artificial Sequence: Synthetic oligonucleotide
  Antisense strand to SEQ ID NO: 1399058
aacuauaccauauucaccc

SEQ ID NO: 1399060 - RNA, 19 nt, Artificial Sequence
  Description of Artificial Sequence: Synthetic oligonucleotide
  Sense strand starting at position 3909 of SEQ ID NO: 1243174
augguauaguuuguuuaag

SEQ ID NO: 1399061 - RNA, 19 nt, Artificial Sequence
  Description of Artificial Sequence: Synthetic oligonucleotide
  Antisense strand to SEQ ID NO: 1399060
cuuaaacaaacuauaccau

SEQ ID NO: 1399062 - RNA, 19 nt, Artificial Sequence
  Description of Artificial Sequence: Synthetic oligonucleotide
  Sense strand starting at position 3915 of SEQ ID NO: 1243174
uaguuuguuuaagggaaua

SEQ ID NO: 1399063 - RNA, 19 nt, Artificial Sequence
  Description of Artificial Sequence: Synthetic oligonucleotide
  Antisense strand to SEQ ID NO: 1399062
uauucccuuaaacaaacua

SEQ ID NO: 1399064 - RNA, 19 nt, Artificial Sequence
  Description of Artificial Sequence: Synthetic oligonucleotide
  Sense strand starting at position 3917 of SEQ ID NO: 1243174
guuuguuuaagggaauacu

SEQ ID NO: 1399065 - RNA, 19 nt, Artificial Sequence
  Description of Artificial Sequence: Synthetic oligonucleotide
  Antisense strand to SEQ ID NO: 1399064
aguauucccuuaaacaaac

SEQ ID NO: 1399066 - RNA, 19 nt, Artificial Sequence
  Description of Artificial Sequence: Synthetic oligonucleotide
  Sense strand starting at position 3955 of SEQ ID NO: 1243174
ugaaguacggcacaugaau

SEQ ID NO: 1399067 - RNA, 19 nt, Artificial Sequence
  Description of Artificial Sequence: Synthetic oligonucleotide
  Antisense strand to SEQ ID NO: 1399066
auucaugugccguacuuca

SEQ ID NO: 1399068 - RNA, 19 nt, Artificial Sequence
  Description of Artificial Sequence: Synthetic oligonucleotide
  Sense strand starting at position 3968 of SEQ ID NO: 1243174
augaauccaucuugaagac

SEQ ID NO: 1399069 - RNA, 19 nt, Artificial Sequence
  Description of Artificial Sequence: Synthetic oligonucleotide
  Antisense strand to SEQ ID NO: 1399068
gucuucaagauggauucau

SEQ ID NO: 1399070 - RNA, 19 nt, Artificial Sequence
  Description of Artificial Sequence: Synthetic oligonucleotide
  Sense strand starting at position 587 of SEQ ID NO: 1243175
ugcggaagccuuuggcuaa

SEQ ID NO: 1399071 - RNA, 19 nt, Artificial Sequence
  Description of Artificial Sequence: Synthetic oligonucleotide
  Antisense strand to SEQ ID NO: 1399070
uuagccaaaggcuuccgca

SEQ ID NO: 1399072 - RNA, 19 nt, Artificial Sequence
  Description of Artificial Sequence: Synthetic oligonucleotide
  Sense strand starting at position 626 of SEQ ID NO: 1243175
agauccagguuugaaauga

SEQ ID NO: 1399073 - RNA, 19 nt, Artificial Sequence
  Description of Artificial Sequence: Synthetic oligonucleotide
  Antisense strand to SEQ ID NO: 1399072
ucauuucaaaccuggaucu

SEQ ID NO: 1399074 - RNA, 19 nt, Artificial Sequence
  Description of Artificial Sequence: Synthetic oligonucleotide
  Sense strand starting at position 981 of SEQ ID NO: 1243175
cgaagucucuaacgagaac

SEQ ID NO: 1399075 - RNA, 19 nt, Artificial Sequence
  Description of Artificial Sequence: Synthetic oligonucleotide
  Antisense strand to SEQ ID NO: 1399074
guucucguuagagacuucg

SEQ ID NO: 1399076 - RNA, 19 nt, Artificial Sequence
  Description of Artificial Sequence: Synthetic oligonucleotide
  Sense strand starting at position 2174 of SEQ ID NO: 1243175
agaguugucccuuguccuu

SEQ ID NO: 1399077 - RNA, 19 nt, Artificial Sequence
  Description of Artificial Sequence: Synthetic oligonucleotide
  Antisense strand to SEQ ID NO: 1399076
aaggacaagggacaacucu

SEQ ID NO: 1399078 - RNA, 19 nt, Artificial Sequence
  Description of Artificial Sequence: Synthetic oligonucleotide
  Sense strand starting at position 2184 of SEQ ID NO: 1243175
cuuguccuugccuagcaua

SEQ ID NO: 1399079 - RNA, 19 nt, Artificial Sequence
  Description of Artificial Sequence: Synthetic oligonucleotide
  Antisense strand to SEQ ID NO: 1399078
uaugcuaggcaaggacaag

SEQ ID NO: 1399080 - RNA, 19 nt, Artificial Sequence
  Description of Artificial Sequence: Synthetic oligonucleotide
  Sense strand starting at position 2325 of SEQ ID NO: 1243175
ucugcaguucugugaggcu

SEQ ID NO: 1399081 - RNA, 19 nt, Artificial Sequence
  Description of Artificial Sequence: Synthetic oligonucleotide
  Antisense strand to SEQ ID NO: 1399080
agccucacagaacugcaga

SEQ ID NO: 1399082 - RNA, 19 nt, Artificial Sequence
  Description of Artificial Sequence: Synthetic oligonucleotide
  Sense strand starting at position 2334 of SEQ ID NO: 1243175
cugugaggcuuccaggaga

SEQ ID NO: 1399083 - RNA, 19 nt, Artificial Sequence
  Description of Artificial Sequence: Synthetic oligonucleotide
  Antisense strand to SEQ ID NO: 1399082
ucuccuggaagccucacag

SEQ ID NO: 1399084 - RNA, 19 nt, Artificial Sequence
  Description of Artificial Sequence: Synthetic oligonucleotide
  Sense strand starting at position 3399 of SEQ ID NO: 1243175
uccagacaaugucaugagu

SEQ ID NO: 1399085 - RNA, 19 nt, Artificial Sequence
  Description of Artificial Sequence: Synthetic oligonucleotide
  Antisense strand to SEQ ID NO: 1399084
acucaugacauugucugga

SEQ ID NO: 1399086 - RNA, 19 nt, Artificial Sequence
  Description of Artificial Sequence: Synthetic oligonucleotide
  Sense strand starting at position 3405 of SEQ ID NO: 1243175
caaugucaugaguggaacu

SEQ ID NO: 1399087 - RNA, 19 nt, Artificial Sequence
  Description of Artificial Sequence: Synthetic oligonucleotide
  Antisense strand to SEQ ID NO: 1399086
aguuccacucaugacauug

SEQ ID NO: 1399088 - RNA, 19 nt, Artificial Sequence
  Description of Artificial Sequence: Synthetic oligonucleotide
  Sense strand starting at position 3479 of SEQ ID NO: 1243175
cccagaucauguuggguaa

SEQ ID NO: 1399089 - RNA, 19 nt, Artificial Sequence
  Description of Artificial Sequence: Synthetic oligonucleotide
  Antisense strand to SEQ ID NO: 1399088
uuacccaacaugaucuggg

SEQ ID NO: 1399090 - RNA, 19 nt, Artificial Sequence
  Description of Artificial Sequence: Synthetic oligonucleotide
  Sense strand starting at position 3480 of SEQ ID NO: 1243175
ccagaucauguuggguaaa

SEQ ID NO: 1399091 - RNA, 19 nt, Artificial Sequence
  Description of Artificial Sequence: Synthetic oligonucleotide
  Antisense strand to SEQ ID NO: 1399090
uuuacccaacaugaucugg

SEQ ID NO: 1399092 - RNA, 19 nt, Artificial Sequence
  Description of Artificial Sequence: Synthetic oligonucleotide
  Sense strand starting at position 3481 of SEQ ID NO: 1243175
cagaucauguuggguaaau

SEQ ID NO: 1399093 - RNA, 19 nt, Artificial Sequence
  Description of Artificial Sequence: Synthetic oligonucleotide
  Antisense strand to SEQ ID NO: 1399092
auuuacccaacaugaucug

SEQ ID NO: 1399094 - RNA, 19 nt, Artificial Sequence
  Description of Artificial Sequence: Synthetic oligonucleotide
  Sense strand starting at position 3482 of SEQ ID NO: 1243175
agaucauguuggguaaaug

SEQ ID NO: 1399095 - RNA, 19 nt, Artificial Sequence
  Description of Artificial Sequence: Synthetic oligonucleotide
  Antisense strand to SEQ ID NO: 1399094
cauuuacccaacaugaucu

SEQ ID NO: 1399096 - RNA, 19 nt, Artificial Sequence
  Description of Artificial Sequence: Synthetic oligonucleotide
  Sense strand starting at position 3557 of SEQ ID NO: 1243175
ggguacuccuguccagaag

SEQ ID NO: 1399097 - RNA, 19 nt, Artificial Sequence
  Description of Artificial Sequence: Synthetic oligonucleotide
  Antisense strand to SEQ ID NO: 1399096
cuucuggacaggaguaccc

SEQ ID NO: 1399098 - RNA, 19 nt, Artificial Sequence
  Description of Artificial Sequence: Synthetic oligonucleotide
  Sense strand starting at position 3788 of SEQ ID NO: 1243175
augucacgaggucaagaau

SEQ ID NO: 1399099 - RNA, 19 nt, Artificial Sequence
  Description of Artificial Sequence: Synthetic oligonucleotide
  Antisense strand to SEQ ID NO: 1399098
auucuugaccucgugacau

SEQ ID NO: 1399100 - RNA, 19 nt, Artificial Sequence
  Description of Artificial Sequence: Synthetic oligonucleotide
  Sense strand starting at position 3917 of SEQ ID NO: 1243175
gggagaauugcuugguccu

SEQ ID NO: 1399101 - RNA, 19 nt, Artificial Sequence
  Description of Artificial Sequence: Synthetic oligonucleotide
  Antisense strand to SEQ ID NO: 1399100
aggaccaagcaauucuccc

SEQ ID NO: 1399102 - RNA, 19 nt, Artificial Sequence
  Description of Artificial Sequence: Synthetic oligonucleotide
  Sense strand starting at position 3918 of SEQ ID NO: 1243175
ggagaauugcuugguccuc

SEQ ID NO: 1399103 - RNA, 19 nt, Artificial Sequence
  Description of Artificial Sequence: Synthetic oligonucleotide
  Antisense strand to SEQ ID NO: 1399102
gaggaccaagcaauucucc

SEQ ID NO: 1399104 - RNA, 19 nt, Artificial Sequence
  Description of Artificial Sequence: Synthetic oligonucleotide
  Sense strand starting at position 96 of SEQ ID NO: 1243176
agauaagccuuuguaucag

SEQ ID NO: 1399105 - RNA, 19 nt, Artificial Sequence
  Description of Artificial Sequence: Synthetic oligonucleotide
  Antisense strand to SEQ ID NO: 1399104
cugauacaaaggcuuaucu

SEQ ID NO: 1399106 - RNA, 19 nt, Artificial Sequence
  Description of Artificial Sequence: Synthetic oligonucleotide
  Sense strand starting at position 147 of SEQ ID NO: 1243176
acuugagugcuccagggaa

SEQ ID NO: 1399107 - RNA, 19 nt, Artificial Sequence
  Description of Artificial Sequence: Synthetic oligonucleotide
  Antisense strand to SEQ ID NO: 1399106
uucccuggagcacucaagu

SEQ ID NO: 1399108 - RNA, 19 nt, Artificial Sequence
  Description of Artificial Sequence: Synthetic oligonucleotide
  Sense strand starting at position 149 of SEQ ID NO: 1243176
uugagugcuccagggaaca

SEQ ID NO: 1399109 - RNA, 19 nt, Artificial Sequence
  Description of Artificial Sequence: Synthetic oligonucleotide
  Antisense strand to SEQ ID NO: 1399108
uguucccuggagcacucaa

SEQ ID NO: 1399110 - RNA, 19 nt, Artificial Sequence
  Description of Artificial Sequence: Synthetic oligonucleotide
  Sense strand starting at position 160 of SEQ ID NO: 1243176
agggaacaugagugcaaau

SEQ ID NO: 1399111 - RNA, 19 nt, Artificial Sequence
  Description of Artificial Sequence: Synthetic oligonucleotide
  Antisense strand to SEQ ID NO: 1399110
auuugcacucauguucccu

SEQ ID NO: 1399112 - RNA, 19 nt, Artificial Sequence
  Description of Artificial Sequence: Synthetic oligonucleotide
  Sense strand starting at position 183 of SEQ ID NO: 1243176
ugcaucuauuaguugcaaa

SEQ ID NO: 1399113 - RNA, 19 nt, Artificial Sequence
  Description of Artificial Sequence: Synthetic oligonucleotide
  Antisense strand to SEQ ID NO: 1399112
uuugcaacuaauagaugca

SEQ ID NO: 1399114 - RNA, 19 nt, Artificial Sequence
  Description of Artificial Sequence: Synthetic oligonucleotide
  Sense strand starting at position 316 of SEQ ID NO: 1243176
guguuuaagcuacacguaa

SEQ ID NO: 1399115 - RNA, 19 nt, Artificial Sequence
  Description of Artificial Sequence: Synthetic oligonucleotide
  Antisense strand to SEQ ID NO: 1399114
uuacguguagcuuaaacac

SEQ ID NO: 1399116 - RNA, 19 nt, Artificial Sequence
  Description of Artificial Sequence: Synthetic oligonucleotide
  Sense strand starting at position 407 of SEQ ID NO: 1243176
ugccucgacgcugaagaau

SEQ ID NO: 1399117 - RNA, 19 nt, Artificial Sequence
  Description of Artificial Sequence: Synthetic oligonucleotide
  Antisense strand to SEQ ID NO: 1399116
auucuucagcgucgaggca

SEQ ID NO: 1399118 - RNA, 19 nt, Artificial Sequence
  Description of Artificial Sequence: Synthetic oligonucleotide
  Sense strand starting at position 413 of SEQ ID NO: 1243176
gacgcugaagaaugaaaua

SEQ ID NO: 1399119 - RNA, 19 nt, Artificial Sequence
  Description of Artificial Sequence: Synthetic oligonucleotide
  Antisense strand to SEQ ID NO: 1399118
uauuucauucuucagcguc

SEQ ID NO: 1399120 - RNA, 19 nt, Artificial Sequence
  Description of Artificial Sequence: Synthetic oligonucleotide
  Sense strand starting at position 708 of SEQ ID NO: 1243176
ggcaacagcuuucuaaauc

SEQ ID NO: 1399121 - RNA, 19 nt, Artificial Sequence
  Description of Artificial Sequence: Synthetic oligonucleotide
  Antisense strand to SEQ ID NO: 1399120
gauuuagaaagcuguugcc

SEQ ID NO: 1399122 - RNA, 19 nt, Artificial Sequence
  Description of Artificial Sequence: Synthetic oligonucleotide
  Sense strand starting at position 718 of SEQ ID NO: 1243176
uucuaaaucuuaguacugu

SEQ ID NO: 1399123 - RNA, 19 nt, Artificial Sequence
  Description of Artificial Sequence: Synthetic oligonucleotide
  Antisense strand to SEQ ID NO: 1399122
acaguacuaagauuuagaa

SEQ ID NO: 1399124 - RNA, 19 nt, Artificial Sequence
  Description of Artificial Sequence: Synthetic oligonucleotide
  Sense strand starting at position 737 of SEQ ID NO: 1243176
ccaaucucagagugagauu

SEQ ID NO: 1399125 - RNA, 19 nt, Artificial Sequence
  Description of Artificial Sequence: Synthetic oligonucleotide
  Antisense strand to SEQ ID NO: 1399124
aaucucacucugagauugg

SEQ ID NO: 1399126 - RNA, 19 nt, Artificial Sequence
  Description of Artificial Sequence: Synthetic oligonucleotide
  Sense strand starting at position 748 of SEQ ID NO: 1243176
gugagauuauuugggaaac

SEQ ID NO: 1399127 - RNA, 19 nt, Artificial Sequence
  Description of Artificial Sequence: Synthetic oligonucleotide
  Antisense strand to SEQ ID NO: 1399126
guuucccaaauaaucucac

SEQ ID NO: 1399128 - RNA, 19 nt, Artificial Sequence
  Description of Artificial Sequence: Synthetic oligonucleotide
  Sense strand starting at position 749 of SEQ ID NO: 1243176
ugagauuauuugggaaaca

SEQ ID NO: 1399129 - RNA, 19 nt, Artificial Sequence
  Description of Artificial Sequence: Synthetic oligonucleotide
  Antisense strand to SEQ ID NO: 1399128
uguuucccaaauaaucuca

SEQ ID NO: 1399130 - RNA, 19 nt, Artificial Sequence
  Description of Artificial Sequence: Synthetic oligonucleotide
  Sense strand starting at position 786 of SEQ ID NO: 1243176
ugucucagcugguuauuua

SEQ ID NO: 1399131 - RNA, 19 nt, Artificial Sequence
  Description of Artificial Sequence: Synthetic oligonucleotide
  Antisense strand to SEQ ID NO: 1399130
uaaauaaccagcugagaca

SEQ ID NO: 1399132 - RNA, 19 nt, Artificial Sequence
  Description of Artificial Sequence: Synthetic oligonucleotide
  Sense strand starting at position 796 of SEQ ID NO: 1243176
gguuauuuaugccuugggu

SEQ ID NO: 1399133 - RNA, 19 nt, Artificial Sequence
  Description of Artificial Sequence: Synthetic oligonucleotide
  Antisense strand to SEQ ID NO: 1399132
acccaaggcauaaauaacc

SEQ ID NO: 1399134 - RNA, 19 nt, Artificial Sequence
  Description of Artificial Sequence: Synthetic oligonucleotide
  Sense strand starting at position 858 of SEQ ID NO: 1243176
gugggaaggcucuaucacu

SEQ ID NO: 1399135 - RNA, 19 nt, Artificial Sequence
  Description of Artificial Sequence: Synthetic oligonucleotide
  Antisense strand to SEQ ID NO: 1399134
agugauagagccuucccac

SEQ ID NO: 1399136 - RNA, 19 nt, Artificial Sequence
  Description of Artificial Sequence: Synthetic oligonucleotide
  Sense strand starting at position 907 of SEQ ID NO: 1243176
guacgaucugaucagguuu

SEQ ID NO: 1399137 - RNA, 19 nt, Artificial Sequence
  Description of Artificial Sequence: Synthetic oligonucleotide
  Antisense strand to SEQ ID NO: 1399136
aaaccugaucagaucguac

SEQ ID NO: 1399138 - RNA, 19 nt, Artificial Sequence
  Description of Artificial Sequence: Synthetic oligonucleotide
  Sense strand starting at position 913 of SEQ ID NO: 1243176
ucugaucagguuugccuaa

SEQ ID NO: 1399139 - RNA, 19 nt, Artificial Sequence
  Description of Artificial Sequence: Synthetic oligonucleotide
  Antisense strand to SEQ ID NO: 1399138
uuaggcaaaccugaucaga

SEQ ID NO: 1399140 - RNA, 19 nt, Artificial Sequence
  Description of Artificial Sequence: Synthetic oligonucleotide
  Sense strand starting at position 914 of SEQ ID NO: 1243176
cugaucagguuugccuaau

SEQ ID NO: 1399141 - RNA, 19 nt, Artificial Sequence
  Description of Artificial Sequence: Synthetic oligonucleotide
  Antisense strand to SEQ ID NO: 1399140
auuaggcaaaccugaucag

SEQ ID NO: 1399142 - RNA, 19 nt, Artificial Sequence
  Description of Artificial Sequence: Synthetic oligonucleotide
  Sense strand starting at position 984 of SEQ ID NO: 1243176
ucaguaaucucagcacuug

SEQ ID NO: 1399143 - RNA, 19 nt, Artificial Sequence
  Description of Artificial Sequence: Synthetic oligonucleotide
  Antisense strand to SEQ ID NO: 1399142
caagugcugagauuacuga

SEQ ID NO: 1399144 - RNA, 19 nt, Artificial Sequence
  Description of Artificial Sequence: Synthetic oligonucleotide
  Sense strand starting at position 1176 of SEQ ID NO: 1243176
ggaaguuucgcugagcuga

SEQ ID NO: 1399145 - RNA, 19 nt, Artificial Sequence
  Description of Artificial Sequence: Synthetic oligonucleotide
  Antisense strand to SEQ ID NO: 1399144
ucagcucagcgaaacuucc

SEQ ID NO: 1399146 - RNA, 19 nt, Artificial Sequence
  Description of Artificial Sequence: Synthetic oligonucleotide
  Sense strand starting at position 1347 of SEQ ID NO: 1243176
guccaccaaucgccagaua

SEQ ID NO: 1399147 - RNA, 19 nt, Artificial Sequence
  Description of Artificial Sequence: Synthetic oligonucleotide
  Antisense strand to SEQ ID NO: 1399146
uaucuggcgauugguggac

SEQ ID NO: 1399148 - RNA, 19 nt, Artificial Sequence
  Description of Artificial Sequence: Synthetic oligonucleotide
  Sense strand starting at position 1348 of SEQ ID NO: 1243176
uccaccaaucgccagauau

SEQ ID NO: 1399149 - RNA, 19 nt, Artificial Sequence
  Description of Artificial Sequence: Synthetic oligonucleotide
  Antisense strand to SEQ ID NO: 1399148
auaucuggcgauuggugga

SEQ ID NO: 1399150 - RNA, 19 nt, Artificial Sequence
  Description of Artificial Sequence: Synthetic oligonucleotide
  Sense strand starting at position 1355 of SEQ ID NO: 1243176
aucgccagauauucucauu

SEQ ID NO: 1399151 - RNA, 19 nt, Artificial Sequence
  Description of Artificial Sequence: Synthetic oligonucleotide
  Antisense strand to SEQ ID NO: 1399150
aaugagaauaucuggcgau

SEQ ID NO: 1399152 - RNA, 19 nt, Artificial Sequence
  Description of Artificial Sequence: Synthetic oligonucleotide
  Sense strand starting at position 1553 of SEQ ID NO: 1243176
aggucaaguuucuccuaaa

SEQ ID NO: 1399153 - RNA, 19 nt, Artificial Sequence
  Description of Artificial Sequence: Synthetic oligonucleotide
  Antisense strand to SEQ ID NO: 1399152
uuuaggagaaacuugaccu

SEQ ID NO: 1399154 - RNA, 19 nt, Artificial Sequence
  Description of Artificial Sequence: Synthetic oligonucleotide
  Sense strand starting at position 1554 of SEQ ID NO: 1243176
ggucaaguuucuccuaaau

SEQ ID NO: 1399155 - RNA, 19 nt, Artificial Sequence
  Description of Artificial Sequence: Synthetic oligonucleotide
  Antisense strand to SEQ ID NO: 1399154
auuuaggagaaacuugacc

SEQ ID NO: 1399156 - RNA, 19 nt, Artificial Sequence
  Description of Artificial Sequence: Synthetic oligonucleotide
  Sense strand starting at position 1567 of SEQ ID NO: 1243176
cuaaaugcccacuagaguu

SEQ ID NO: 1399157 - RNA, 19 nt, Artificial Sequence
  Description of Artificial Sequence: Synthetic oligonucleotide
  Antisense strand to SEQ ID NO: 1399156
aacucuagugggcauuuag

SEQ ID NO: 1399158 - RNA, 19 nt, Artificial Sequence
  Description of Artificial Sequence: Synthetic oligonucleotide
  Sense strand starting at position 2422 of SEQ ID NO: 1243176
gagacaugcuccguggaga

SEQ ID NO: 1399159 - RNA, 19 nt, Artificial Sequence
  Description of Artificial Sequence: Synthetic oligonucleotide
  Antisense strand to SEQ ID NO: 1399158
ucuccacggagcaugucuc

SEQ ID NO: 1399160 - RNA, 19 nt, Artificial Sequence
  Description of Artificial Sequence: Synthetic oligonucleotide
  Sense strand starting at position 2441 of SEQ ID NO: 1243176
cgaauuuguuucuuccuuu

SEQ ID NO: 1399161 - RNA, 19 nt, Artificial Sequence
  Description of Artificial Sequence: Synthetic oligonucleotide
  Antisense strand to SEQ ID NO: 1399160
aaaggaagaaacaaauucg

SEQ ID NO: 1399162 - RNA, 19 nt, Artificial Sequence
  Description of Artificial Sequence: Synthetic oligonucleotide
  Sense strand starting at position 2444 of SEQ ID NO: 1243176
auuuguuucuuccuuugca

SEQ ID NO: 1399163 - RNA, 19 nt, Artificial Sequence
  Description of Artificial Sequence: Synthetic oligonucleotide
  Antisense strand to SEQ ID NO: 1399162
ugcaaaggaagaaacaaau

SEQ ID NO: 1399164 - RNA, 19 nt, Artificial Sequence
  Description of Artificial Sequence: Synthetic oligonucleotide
  Sense strand starting at position 2567 of SEQ ID NO: 1243176
uuuguuucccaugagcuaa

SEQ ID NO: 1399165 - RNA, 19 nt, Artificial Sequence
  Description of Artificial Sequence: Synthetic oligonucleotide
  Antisense strand to SEQ ID NO: 1399164
uuagcucaugggaaacaaa

SEQ ID NO: 1399166 - RNA, 19 nt, Artificial Sequence
  Description of Artificial Sequence: Synthetic oligonucleotide
  Sense strand starting at position 2606 of SEQ ID NO: 1243176
agcaguuauagggaagcau

SEQ ID NO: 1399167 - RNA, 19 nt, Artificial Sequence
  Description of Artificial Sequence: Synthetic oligonucleotide
  Antisense strand to SEQ ID NO: 1399166
augcuucccuauaacugcu

SEQ ID NO: 1399168 - RNA, 19 nt, Artificial Sequence
  Description of Artificial Sequence: Synthetic oligonucleotide
  Sense strand starting at position 2615 of SEQ ID NO: 1243176
agggaagcauauuaaagaa

SEQ ID NO: 1399169 - RNA, 19 nt, Artificial Sequence
  Description of Artificial Sequence: Synthetic oligonucleotide
  Antisense strand to SEQ ID NO: 1399168
uucuuuaauaugcuucccu

SEQ ID NO: 1399170 - RNA, 19 nt, Artificial Sequence
  Description of Artificial Sequence: Synthetic oligonucleotide
  Sense strand starting at position 2962 of SEQ ID NO: 1243176
gauauacucucaguaggug

SEQ ID NO: 1399171 - RNA, 19 nt, Artificial Sequence
  Description of Artificial Sequence: Synthetic oligonucleotide
  Antisense strand to SEQ ID NO: 1399170
caccuacugagaguauauc

SEQ ID NO: 1399172 - RNA, 19 nt, Artificial Sequence
  Description of Artificial Sequence: Synthetic oligonucleotide
  Sense strand starting at position 2963 of SEQ ID NO: 1243176
auauacucucaguagguga

SEQ ID NO: 1399173 - RNA, 19 nt, Artificial Sequence
  Description of Artificial Sequence: Synthetic oligonucleotide
  Antisense strand to SEQ ID NO: 1399172
ucaccuacugagaguauau

SEQ ID NO: 1399174 - RNA, 19 nt, Artificial Sequence
  Description of Artificial Sequence: Synthetic oligonucleotide
  Sense strand starting at position 2995 of SEQ ID NO: 1243176
agagcuuuaaagugguaau

SEQ ID NO: 1399175 - RNA, 19 nt, Artificial Sequence
  Description of Artificial Sequence: Synthetic oligonucleotide
  Antisense strand to SEQ ID NO: 1399174
auuaccacuuuaaagcucu

SEQ ID NO: 1399176 - RNA, 19 nt, Artificial Sequence
  Description of Artificial Sequence: Synthetic oligonucleotide
  Sense strand starting at position 3418 of SEQ ID NO: 1243176
aucugugcugcccaaguaa

SEQ ID NO: 1399177 - RNA, 19 nt, Artificial Sequence
  Description of Artificial Sequence: Synthetic oligonucleotide
  Antisense strand to SEQ ID NO: 1399176
uuacuugggcagcacagau

SEQ ID NO: 1399178 - RNA, 19 nt, Artificial Sequence
  Description of Artificial Sequence: Synthetic oligonucleotide
  Sense strand starting at position 3842 of SEQ ID NO: 1243176
guauuauucguagagauga

SEQ ID NO: 1399179 - RNA, 19 nt, Artificial Sequence
  Description of Artificial Sequence: Synthetic oligonucleotide
  Antisense strand to SEQ ID NO: 1399178
ucaucucuacgaauaauac

SEQ ID NO: 1399180 - RNA, 19 nt, Artificial Sequence
  Description of Artificial Sequence: Synthetic oligonucleotide
  Sense strand starting at position 3844 of SEQ ID NO: 1243176
auuauucguagagaugagu

SEQ ID NO: 1399181 - RNA, 19 nt, Artificial Sequence
  Description of Artificial Sequence: Synthetic oligonucleotide
  Antisense strand to SEQ ID NO: 1399180
acucaucucuacgaauaau

SEQ ID NO: 1399182 - RNA, 19 nt, Artificial Sequence
  Description of Artificial Sequence: Synthetic oligonucleotide
  Sense strand starting at position 3978 of SEQ ID NO: 1243176
uuuagauagccacauguca

SEQ ID NO: 1399183 - RNA, 19 nt, Artificial Sequence
  Description of Artificial Sequence: Synthetic oligonucleotide
  Antisense strand to SEQ ID NO: 1399182
ugacauguggcuaucuaaa

SEQ ID NO: 1399184 - RNA, 19 nt, Artificial Sequence
  Description of Artificial Sequence: Synthetic oligonucleotide
  Sense strand starting at position 58 of SEQ ID NO: 1243177
agauaagccuuuguaucag

SEQ ID NO: 1399185 - RNA, 19 nt, Artificial Sequence
  Description of Artificial Sequence: Synthetic oligonucleotide
  Antisense strand to SEQ ID NO: 1399184
cugauacaaaggcuuaucu

SEQ ID NO: 1399186 - RNA, 19 nt, Artificial Sequence
  Description of Artificial Sequence: Synthetic oligonucleotide
  Sense strand starting at position 109 of SEQ ID NO: 1243177
acuugagugcuccagggaa

SEQ ID NO: 1399187 - RNA, 19 nt, Artificial Sequence
  Description of Artificial Sequence: Synthetic oligonucleotide
  Antisense strand to SEQ ID NO: 1399186
uucccuggagcacucaagu

SEQ ID NO: 1399188 - RNA, 19 nt, Artificial Sequence
  Description of Artificial Sequence: Synthetic oligonucleotide
  Sense strand starting at position 111 of SEQ ID NO: 1243177
uugagugcuccagggaaca

SEQ ID NO: 1399189 - RNA, 19 nt, Artificial Sequence
  Description of Artificial Sequence: Synthetic oligonucleotide
  Antisense strand to SEQ ID NO: 1399188
uguucccuggagcacucaa

SEQ ID NO: 1399190 - RNA, 19 nt, Artificial Sequence
  Description of Artificial Sequence: Synthetic oligonucleotide
  Sense strand starting at position 122 of SEQ ID NO: 1243177
agggaacaugagugcaaau

SEQ ID NO: 1399191 - RNA, 19 nt, Artificial Sequence
  Description of Artificial Sequence: Synthetic oligonucleotide
  Antisense strand to SEQ ID NO: 1399190
auuugcacucauguucccu

SEQ ID NO: 1399192 - RNA, 19 nt, Artificial Sequence
  Description of Artificial Sequence: Synthetic oligonucleotide
  Sense strand starting at position 369 of SEQ ID NO: 1243177
ugccucgacgcugaagaau

SEQ ID NO: 1399193 - RNA, 19 nt, Artificial Sequence
  Description of Artificial Sequence: Synthetic oligonucleotide
  Antisense strand to SEQ ID NO: 1399192
auucuucagcgucgaggca

SEQ ID NO: 1399194 - RNA, 19 nt, Artificial Sequence
  Description of Artificial Sequence: Synthetic oligonucleotide
  Sense strand starting at position 375 of SEQ ID NO: 1243177
gacgcugaagaaugaaaua

SEQ ID NO: 1399195 - RNA, 19 nt, Artificial Sequence
  Description of Artificial Sequence: Synthetic oligonucleotide
  Antisense strand to SEQ ID NO: 1399194
uauuucauucuucagcguc

SEQ ID NO: 1399196 - RNA, 19 nt, Artificial Sequence
  Description of Artificial Sequence: Synthetic oligonucleotide
  Sense strand starting at position 670 of SEQ ID NO: 1243177
ggcaacagcuuucuaaauc

SEQ ID NO: 1399197 - RNA, 19 nt, Artificial Sequence
  Description of Artificial Sequence: Synthetic oligonucleotide
  Antisense strand to SEQ ID NO: 1399196
gauuuagaaagcuguugcc

SEQ ID NO: 1399198 - RNA, 19 nt, Artificial Sequence
  Description of Artificial Sequence: Synthetic oligonucleotide
  Sense strand starting at position 680 of SEQ ID NO: 1243177
uucuaaaucuuaguacugu

SEQ ID NO: 1399199 - RNA, 19 nt, Artificial Sequence
  Description of Artificial Sequence: Synthetic oligonucleotide
  Antisense strand to SEQ ID NO: 1399198
acaguacuaagauuuagaa

SEQ ID NO: 1399200 - RNA, 19 nt, Artificial Sequence
  Description of Artificial Sequence: Synthetic oligonucleotide
  Sense strand starting at position 699 of SEQ ID NO: 1243177
ccaaucucagagugagauu

SEQ ID NO: 1399201 - RNA, 19 nt, Artificial Sequence
  Description of Artificial Sequence: Synthetic oligonucleotide
  Antisense strand to SEQ ID NO: 1399200
aaucucacucugagauugg

SEQ ID NO: 1399202 - RNA, 19 nt, Artificial Sequence
  Description of Artificial Sequence: Synthetic oligonucleotide
  Sense strand starting at position 710 of SEQ ID NO: 1243177
gugagauuauuugggaaac

SEQ ID NO: 1399203 - RNA, 19 nt, Artificial Sequence
  Description of Artificial Sequence: Synthetic oligonucleotide
  Antisense strand to SEQ ID NO: 1399202
guuucccaaauaaucucac

SEQ ID NO: 1399204 - RNA, 19 nt, Artificial Sequence
  Description of Artificial Sequence: Synthetic oligonucleotide
  Sense strand starting at position 711 of SEQ ID NO: 1243177
ugagauuauuugggaaaca

SEQ ID NO: 1399205 - RNA, 19 nt, Artificial Sequence
  Description of Artificial Sequence: Synthetic oligonucleotide
  Antisense strand to SEQ ID NO: 1399204
uguuucccaaauaaucuca

SEQ ID NO: 1399206 - RNA, 19 nt, Artificial Sequence
  Description of Artificial Sequence: Synthetic oligonucleotide
  Sense strand starting at position 748 of SEQ ID NO: 1243177
ugucucagcugguuauuua

SEQ ID NO: 1399207 - RNA, 19 nt, Artificial Sequence
  Description of Artificial Sequence: Synthetic oligonucleotide
  Antisense strand to SEQ ID NO: 1399206
uaaauaaccagcugagaca

SEQ ID NO: 1399208 - RNA, 19 nt, Artificial Sequence
  Description of Artificial Sequence: Synthetic oligonucleotide
  Sense strand starting at position 758 of SEQ ID NO: 1243177
gguuauuuaugccuugggu

SEQ ID NO: 1399209 - RNA, 19 nt, Artificial Sequence
  Description of Artificial Sequence: Synthetic oligonucleotide
  Antisense strand to SEQ ID NO: 1399208
acccaaggcauaaauaacc

SEQ ID NO: 1399210 - RNA, 19 nt, Artificial Sequence
  Description of Artificial Sequence: Synthetic oligonucleotide
  Sense strand starting at position 820 of SEQ ID NO: 1243177
gugggaaggcucuaucacu

SEQ ID NO: 1399211 - RNA, 19 nt, Artificial Sequence
  Description of Artificial Sequence: Synthetic oligonucleotide
  Antisense strand to SEQ ID NO: 1399210
agugauagagccuucccac

SEQ ID NO: 1399212 - RNA, 19 nt, Artificial Sequence
  Description of Artificial Sequence: Synthetic oligonucleotide
  Sense strand starting at position 869 of SEQ ID NO: 1243177
guacgaucugaucagguuu

SEQ ID NO: 1399213 - RNA, 19 nt, Artificial Sequence
  Description of Artificial Sequence: Synthetic oligonucleotide
  Antisense strand to SEQ ID NO: 1399212
aaaccugaucagaucguac

SEQ ID NO: 1399214 - RNA, 19 nt, Artificial Sequence
  Description of Artificial Sequence: Synthetic oligonucleotide
  Sense strand starting at position 875 of SEQ ID NO: 1243177
ucugaucagguuugccuaa

SEQ ID NO: 1399215 - RNA, 19 nt, Artificial Sequence
  Description of Artificial Sequence: Synthetic oligonucleotide
  Antisense strand to SEQ ID NO: 1399214
uuaggcaaaccugaucaga

SEQ ID NO: 1399216 - RNA, 19 nt, Artificial Sequence
  Description of Artificial Sequence: Synthetic oligonucleotide
  Sense strand starting at position 876 of SEQ ID NO: 1243177
cugaucagguuugccuaau

SEQ ID NO: 1399217 - RNA, 19 nt, Artificial Sequence
  Description of Artificial Sequence: Synthetic oligonucleotide
  Antisense strand to SEQ ID NO: 1399216
auuaggcaaaccugaucag

SEQ ID NO: 1399218 - RNA, 19 nt, Artificial Sequence
  Description of Artificial Sequence: Synthetic oligonucleotide
  Sense strand starting at position 946 of SEQ ID NO: 1243177
ucaguaaucucagcacuug

SEQ ID NO: 1399219 - RNA, 19 nt, Artificial Sequence
  Description of Artificial Sequence: Synthetic oligonucleotide
  Antisense strand to SEQ ID NO: 1399218
caagugcugagauuacuga

SEQ ID NO: 1399220 - RNA, 19 nt, Artificial Sequence
  Description of Artificial Sequence: Synthetic oligonucleotide
  Sense strand starting at position 1138 of SEQ ID NO: 1243177
ggaaguuucgcugagcuga

SEQ ID NO: 1399221 - RNA, 19 nt, Artificial Sequence
  Description of Artificial Sequence: Synthetic oligonucleotide
  Antisense strand to SEQ ID NO: 1399220
ucagcucagcgaaacuucc

SEQ ID NO: 1399222 - RNA, 19 nt, Artificial Sequence
  Description of Artificial Sequence: Synthetic oligonucleotide
  Sense strand starting at position 1309 of SEQ ID NO: 1243177
guccaccaaucgccagaua

SEQ ID NO: 1399223 - RNA, 19 nt, Artificial Sequence
  Description of Artificial Sequence: Synthetic oligonucleotide
  Antisense strand to SEQ ID NO: 1399222
uaucuggcgauugguggac

SEQ ID NO: 1399224 - RNA, 19 nt, Artificial Sequence
  Description of Artificial Sequence: Synthetic oligonucleotide
  Sense strand starting at position 1310 of SEQ ID NO: 1243177
uccaccaaucgccagauau

SEQ ID NO: 1399225 - RNA, 19 nt, Artificial Sequence
  Description of Artificial Sequence: Synthetic oligonucleotide
  Antisense strand to SEQ ID NO: 1399224
auaucuggcgauuggugga

SEQ ID NO: 1399226 - RNA, 19 nt, Artificial Sequence
  Description of Artificial Sequence: Synthetic oligonucleotide
  Sense strand starting at position 1317 of SEQ ID NO: 1243177
aucgccagauauucucauu

SEQ ID NO: 1399227 - RNA, 19 nt, Artificial Sequence
  Description of Artificial Sequence: Synthetic oligonucleotide
  Antisense strand to SEQ ID NO: 1399226
aaugagaauaucuggcgau

SEQ ID NO: 1399228 - RNA, 19 nt, Artificial Sequence
  Description of Artificial Sequence: Synthetic oligonucleotide
  Sense strand starting at position 1515 of SEQ ID NO: 1243177
aggucaaguuucuccuaaa

SEQ ID NO: 1399229 - RNA, 19 nt, Artificial Sequence
  Description of Artificial Sequence: Synthetic oligonucleotide
  Antisense strand to SEQ ID NO: 1399228
uuuaggagaaacuugaccu

SEQ ID NO: 1399230 - RNA, 19 nt, Artificial Sequence
  Description of Artificial Sequence: Synthetic oligonucleotide
  Sense strand starting at position 1516 of SEQ ID NO: 1243177
ggucaaguuucuccuaaau

SEQ ID NO: 1399231 - RNA, 19 nt, Artificial Sequence
  Description of Artificial Sequence: Synthetic oligonucleotide
  Antisense strand to SEQ ID NO: 1399230
auuuaggagaaacuugacc

SEQ ID NO: 1399232 - RNA, 19 nt, Artificial Sequence
  Description of Artificial Sequence: Synthetic oligonucleotide
  Sense strand starting at position 1529 of SEQ ID NO: 1243177
cuaaaugcccacuagaguu

SEQ ID NO: 1399233 - RNA, 19 nt, Artificial Sequence
  Description of Artificial Sequence: Synthetic oligonucleotide
  Antisense strand to SEQ ID NO: 1399232
aacucuagugggcauuuag

SEQ ID NO: 1399234 - RNA, 19 nt, Artificial Sequence
  Description of Artificial Sequence: Synthetic oligonucleotide
  Sense strand starting at position 2384 of SEQ ID NO: 1243177
gagacaugcuccguggaga

SEQ ID NO: 1399235 - RNA, 19 nt, Artificial Sequence
  Description of Artificial Sequence: Synthetic oligonucleotide
  Antisense strand to SEQ ID NO: 1399234
ucuccacggagcaugucuc

SEQ ID NO: 1399236 - RNA, 19 nt, Artificial Sequence
  Description of Artificial Sequence: Synthetic oligonucleotide
  Sense strand starting at position 2403 of SEQ ID NO: 1243177
cgaauuuguuucuuccuuu

SEQ ID NO: 1399237 - RNA, 19 nt, Artificial Sequence
  Description of Artificial Sequence: Synthetic oligonucleotide
  Antisense strand to SEQ ID NO: 1399236
aaaggaagaaacaaauucg

SEQ ID NO: 1399238 - RNA, 19 nt, Artificial Sequence
  Description of Artificial Sequence: Synthetic oligonucleotide
  Sense strand starting at position 2406 of SEQ ID NO: 1243177
auuuguuucuuccuuugca

SEQ ID NO: 1399239 - RNA, 19 nt, Artificial Sequence
  Description of Artificial Sequence: Synthetic oligonucleotide
  Antisense strand to SEQ ID NO: 1399238
ugcaaaggaagaaacaaau

SEQ ID NO: 1399240 - RNA, 19 nt, Artificial Sequence
  Description of Artificial Sequence: Synthetic oligonucleotide
  Sense strand starting at position 2529 of SEQ ID NO: 1243177
uuuguuucccaugagcuaa

SEQ ID NO: 1399241 - RNA, 19 nt, Artificial Sequence
  Description of Artificial Sequence: Synthetic oligonucleotide
  Antisense strand to SEQ ID NO: 1399240
uuagcucaugggaaacaaa

SEQ ID NO: 1399242 - RNA, 19 nt, Artificial Sequence
  Description of Artificial Sequence: Synthetic oligonucleotide
  Sense strand starting at position 2568 of SEQ ID NO: 1243177
agcaguuauagggaagcau

SEQ ID NO: 1399243 - RNA, 19 nt, Artificial Sequence
  Description of Artificial Sequence: Synthetic oligonucleotide
  Antisense strand to SEQ ID NO: 1399242
augcuucccuauaacugcu

SEQ ID NO: 1399244 - RNA, 19 nt, Artificial Sequence
  Description of Artificial Sequence: Synthetic oligonucleotide
  Sense strand starting at position 2577 of SEQ ID NO: 1243177
agggaagcauauuaaagaa

SEQ ID NO: 1399245 - RNA, 19 nt, Artificial Sequence
  Description of Artificial Sequence: Synthetic oligonucleotide
  Antisense strand to SEQ ID NO: 1399244
uucuuuaauaugcuucccu

SEQ ID NO: 1399246 - RNA, 19 nt, Artificial Sequence
  Description of Artificial Sequence: Synthetic oligonucleotide
  Sense strand starting at position 2924 of SEQ ID NO: 1243177
gauauacucucaguaggug

SEQ ID NO: 1399247 - RNA, 19 nt, Artificial Sequence
  Description of Artificial Sequence: Synthetic oligonucleotide
  Antisense strand to SEQ ID NO: 1399246
caccuacugagaguauauc

SEQ ID NO: 1399248 - RNA, 19 nt, Artificial Sequence
  Description of Artificial Sequence: Synthetic oligonucleotide
  Sense strand starting at position 2925 of SEQ ID NO: 1243177
auauacucucaguagguga

SEQ ID NO: 1399249 - RNA, 19 nt, Artificial Sequence
  Description of Artificial Sequence: Synthetic oligonucleotide
  Antisense strand to SEQ ID NO: 1399248
ucaccuacugagaguauau

SEQ ID NO: 1399250 - RNA, 19 nt, Artificial Sequence
  Description of Artificial Sequence: Synthetic oligonucleotide
  Sense strand starting at position 2957 of SEQ ID NO: 1243177
agagcuuuaaagugguaau

SEQ ID NO: 1399251 - RNA, 19 nt, Artificial Sequence
  Description of Artificial Sequence: Synthetic oligonucleotide
  Antisense strand to SEQ ID NO: 1399250
auuaccacuuuaaagcucu

SEQ ID NO: 1399252 - RNA, 19 nt, Artificial Sequence
  Description of Artificial Sequence: Synthetic oligonucleotide
  Sense strand starting at position 3380 of SEQ ID NO: 1243177
aucugugcugcccaaguaa

SEQ ID NO: 1399253 - RNA, 19 nt, Artificial Sequence
  Description of Artificial Sequence: Synthetic oligonucleotide
  Antisense strand to SEQ ID NO: 1399252
uuacuugggcagcacagau

SEQ ID NO: 1399254 - RNA, 19 nt, Artificial Sequence
  Description of Artificial Sequence: Synthetic oligonucleotide
  Sense strand starting at position 3804 of SEQ ID NO: 1243177
guauuauucguagagauga

SEQ ID NO: 1399255 - RNA, 19 nt, Artificial Sequence
  Description of Artificial Sequence: Synthetic oligonucleotide
  Antisense strand to SEQ ID NO: 1399254
ucaucucuacgaauaauac

SEQ ID NO: 1399256 - RNA, 19 nt, Artificial Sequence
  Description of Artificial Sequence: Synthetic oligonucleotide
  Sense strand starting at position 3806 of SEQ ID NO: 1243177
auuauucguagagaugagu

SEQ ID NO: 1399257 - RNA, 19 nt, Artificial Sequence
  Description of Artificial Sequence: Synthetic oligonucleotide
  Antisense strand to SEQ ID NO: 1399256
acucaucucuacgaauaau

SEQ ID NO: 1399258 - RNA, 19 nt, Artificial Sequence
  Description of Artificial Sequence: Synthetic oligonucleotide
  Sense strand starting at position 3940 of SEQ ID NO: 1243177
uuuagauagccacauguca

SEQ ID NO: 1399259 - RNA, 19 nt, Artificial Sequence
  Description of Artificial Sequence: Synthetic oligonucleotide
  Antisense strand to SEQ ID NO: 1399258
ugacauguggcuaucuaaa

SEQ ID NO: 1399260 - RNA, 19 nt, Artificial Sequence
  Description of Artificial Sequence: Synthetic oligonucleotide
  Sense strand starting at position 3954 of SEQ ID NO: 1243177
ugucacuaguguuuggaaa

SEQ ID NO: 1399261 - RNA, 19 nt, Artificial Sequence
  Description of Artificial Sequence: Synthetic oligonucleotide
  Antisense strand to SEQ ID NO: 1399260
uuuccaaacacuagugaca

SEQ ID NO: 1399262 - RNA, 19 nt, Artificial Sequence
  Description of Artificial Sequence: Synthetic oligonucleotide
  Sense strand starting at position 3955 of SEQ ID NO: 1243177
gucacuaguguuuggaaag

SEQ ID NO: 1399263 - RNA, 19 nt, Artificial Sequence
  Description of Artificial Sequence: Synthetic oligonucleotide
  Antisense strand to SEQ ID NO: 1399262
cuuuccaaacacuagugac

SEQ ID NO: 1399264 - RNA, 19 nt, Artificial Sequence
  Description of Artificial Sequence: Synthetic oligonucleotide
  Sense strand starting at position 51 of SEQ ID NO: 1243178
gagcacauagucugugcua

SEQ ID NO: 1399265 - RNA, 19 nt, Artificial Sequence
  Description of Artificial Sequence: Synthetic oligonucleotide
  Antisense strand to SEQ ID NO: 1399264
uagcacagacuaugugcuc

SEQ ID NO: 1399266 - RNA, 19 nt, Artificial Sequence
  Description of Artificial Sequence: Synthetic oligonucleotide
  Sense strand starting at position 52 of SEQ ID NO: 1243178
agcacauagucugugcuau

SEQ ID NO: 1399267 - RNA, 19 nt, Artificial Sequence
  Description of Artificial Sequence: Synthetic oligonucleotide
  Antisense strand to SEQ ID NO: 1399266
auagcacagacuaugugcu

SEQ ID NO: 1399268 - RNA, 19 nt, Artificial Sequence
  Description of Artificial Sequence: Synthetic oligonucleotide
  Sense strand starting at position 53 of SEQ ID NO: 1243178
gcacauagucugugcuaug

SEQ ID NO: 1399269 - RNA, 19 nt, Artificial Sequence
  Description of Artificial Sequence: Synthetic oligonucleotide
  Antisense strand to SEQ ID NO: 1399268
cauagcacagacuaugugc

SEQ ID NO: 1399270 - RNA, 19 nt, Artificial Sequence
  Description of Artificial Sequence: Synthetic oligonucleotide
  Sense strand starting at position 64 of SEQ ID NO: 1243178
gugcuaugccuugaaggcu

SEQ ID NO: 1399271 - RNA, 19 nt, Artificial Sequence
  Description of Artificial Sequence: Synthetic oligonucleotide
  Antisense strand to SEQ ID NO: 1399270
agccuucaaggcauagcac

SEQ ID NO: 1399272 - RNA, 19 nt, Artificial Sequence
  Description of Artificial Sequence: Synthetic oligonucleotide
  Sense strand starting at position 282 of SEQ ID NO: 1243178
ugugcauucuggcagaucu

SEQ ID NO: 1399273 - RNA, 19 nt, Artificial Sequence
  Description of Artificial Sequence: Synthetic oligonucleotide
  Antisense strand to SEQ ID NO: 1399272
agaucugccagaaugcaca

SEQ ID NO: 1399274 - RNA, 19 nt, Artificial Sequence
  Description of Artificial Sequence: Synthetic oligonucleotide
  Sense strand starting at position 350 of SEQ ID NO: 1243178
ugcgcugccacugggaaau

SEQ ID NO: 1399275 - RNA, 19 nt, Artificial Sequence
  Description of Artificial Sequence: Synthetic oligonucleotide
  Antisense strand to SEQ ID NO: 1399274
auuucccaguggcagcgca

SEQ ID NO: 1399276 - RNA, 19 nt, Artificial Sequence
  Description of Artificial Sequence: Synthetic oligonucleotide
  Sense strand starting at position 360 of SEQ ID NO: 1243178
cugggaaaugaguguuugu

SEQ ID NO: 1399277 - RNA, 19 nt, Artificial Sequence
  Description of Artificial Sequence: Synthetic oligonucleotide
  Antisense strand to SEQ ID NO: 1399276
acaaacacucauuucccag

SEQ ID NO: 1399278 - RNA, 19 nt, Artificial Sequence
  Description of Artificial Sequence: Synthetic oligonucleotide
  Sense strand starting at position 363 of SEQ ID NO: 1243178
ggaaaugaguguuuguaag

SEQ ID NO: 1399279 - RNA, 19 nt, Artificial Sequence
  Description of Artificial Sequence: Synthetic oligonucleotide
  Antisense strand to SEQ ID NO: 1399278
cuuacaaacacucauuucc

SEQ ID NO: 1399280 - RNA, 19 nt, Artificial Sequence
  Description of Artificial Sequence: Synthetic oligonucleotide
  Sense strand starting at position 365 of SEQ ID NO: 1243178
aaaugaguguuuguaagga

SEQ ID NO: 1399281 - RNA, 19 nt, Artificial Sequence
  Description of Artificial Sequence: Synthetic oligonucleotide
  Antisense strand to SEQ ID NO: 1399280
uccuuacaaacacucauuu

SEQ ID NO: 1399282 - RNA, 19 nt, Artificial Sequence
  Description of Artificial Sequence: Synthetic oligonucleotide
  Sense strand starting at position 369 of SEQ ID NO: 1243178
gaguguuuguaaggaggaa

SEQ ID NO: 1399283 - RNA, 19 nt, Artificial Sequence
  Description of Artificial Sequence: Synthetic oligonucleotide
  Antisense strand to SEQ ID NO: 1399282
uuccuccuuacaaacacuc

SEQ ID NO: 1399284 - RNA, 19 nt, Artificial Sequence
  Description of Artificial Sequence: Synthetic oligonucleotide
  Sense strand starting at position 434 of SEQ ID NO: 1243178
agcaaaggaucaguuucua

SEQ ID NO: 1399285 - RNA, 19 nt, Artificial Sequence
  Description of Artificial Sequence: Synthetic oligonucleotide
  Antisense strand to SEQ ID NO: 1399284
uagaaacugauccuuugcu

SEQ ID NO: 1399286 - RNA, 19 nt, Artificial Sequence
  Description of Artificial Sequence: Synthetic oligonucleotide
  Sense strand starting at position 439 of SEQ ID NO: 1243178
aggaucaguuucuaggagu

SEQ ID NO: 1399287 - RNA, 19 nt, Artificial Sequence
  Description of Artificial Sequence: Synthetic oligonucleotide
  Antisense strand to SEQ ID NO: 1399286
acuccuagaaacugauccu

SEQ ID NO: 1399288 - RNA, 19 nt, Artificial Sequence
  Description of Artificial Sequence: Synthetic oligonucleotide
  Sense strand starting at position 906 of SEQ ID NO: 1243178
cuguuaagggagugggauu

SEQ ID NO: 1399289 - RNA, 19 nt, Artificial Sequence
  Description of Artificial Sequence: Synthetic oligonucleotide
  Antisense strand to SEQ ID NO: 1399288
aaucccacucccuuaacag

SEQ ID NO: 1399290 - RNA, 19 nt, Artificial Sequence
  Description of Artificial Sequence: Synthetic oligonucleotide
  Sense strand starting at position 946 of SEQ ID NO: 1243178
gagacuuuagcuugggaaa

SEQ ID NO: 1399291 - RNA, 19 nt, Artificial Sequence
  Description of Artificial Sequence: Synthetic oligonucleotide
  Antisense strand to SEQ ID NO: 1399290
uuucccaagcuaaagucuc

SEQ ID NO: 1399292 - RNA, 19 nt, Artificial Sequence
  Description of Artificial Sequence: Synthetic oligonucleotide
  Sense strand starting at position 947 of SEQ ID NO: 1243178
agacuuuagcuugggaaau

SEQ ID NO: 1399293 - RNA, 19 nt, Artificial Sequence
  Description of Artificial Sequence: Synthetic oligonucleotide
  Antisense strand to SEQ ID NO: 1399292
auuucccaagcuaaagucu

SEQ ID NO: 1399294 - RNA, 19 nt, Artificial Sequence
  Description of Artificial Sequence: Synthetic oligonucleotide
  Sense strand starting at position 948 of SEQ ID NO: 1243178
gacuuuagcuugggaaaua

SEQ ID NO: 1399295 - RNA, 19 nt, Artificial Sequence
  Description of Artificial Sequence: Synthetic oligonucleotide
  Antisense strand to SEQ ID NO: 1399294
uauuucccaagcuaaaguc

SEQ ID NO: 1399296 - RNA, 19 nt, Artificial Sequence
  Description of Artificial Sequence: Synthetic oligonucleotide
  Sense strand starting at position 949 of SEQ ID NO: 1243178
acuuuagcuugggaaauaa

SEQ ID NO: 1399297 - RNA, 19 nt, Artificial Sequence
  Description of Artificial Sequence: Synthetic oligonucleotide
  Antisense strand to SEQ ID NO: 1399296
uuauuucccaagcuaaagu

SEQ ID NO: 1399298 - RNA, 19 nt, Artificial Sequence
  Description of Artificial Sequence: Synthetic oligonucleotide
  Sense strand starting at position 1234 of SEQ ID NO: 1243178
gcuuguuuaccugggagca

SEQ ID NO: 1399299 - RNA, 19 nt, Artificial Sequence
  Description of Artificial Sequence: Synthetic oligonucleotide
  Antisense strand to SEQ ID NO: 1399298
ugcucccagguaaacaagc

SEQ ID NO: 1399300 - RNA, 19 nt, Artificial Sequence
  Description of Artificial Sequence: Synthetic oligonucleotide
  Sense strand starting at position 1259 of SEQ ID NO: 1243178
ggaugugacucagcggaaa

SEQ ID NO: 1399301 - RNA, 19 nt, Artificial Sequence
  Description of Artificial Sequence: Synthetic oligonucleotide
  Antisense strand to SEQ ID NO: 1399300
uuuccgcugagucacaucc

SEQ ID NO: 1399302 - RNA, 19 nt, Artificial Sequence
  Description of Artificial Sequence: Synthetic oligonucleotide
  Sense strand starting at position 1429 of SEQ ID NO: 1243178
gugacaaggguccauguaa

SEQ ID NO: 1399303 - RNA, 19 nt, Artificial Sequence
  Description of Artificial Sequence: Synthetic oligonucleotide
  Antisense strand to SEQ ID NO: 1399302
uuacauggacccuugucac

SEQ ID NO: 1399304 - RNA, 19 nt, Artificial Sequence
  Description of Artificial Sequence: Synthetic oligonucleotide
  Sense strand starting at position 1635 of SEQ ID NO: 1243178
ggauccuacgacuggucua

SEQ ID NO: 1399305 - RNA, 19 nt, Artificial Sequence
  Description of Artificial Sequence: Synthetic oligonucleotide
  Antisense strand to SEQ ID NO: 1399304
uagaccagucguaggaucc

SEQ ID NO: 1399306 - RNA, 19 nt, Artificial Sequence
  Description of Artificial Sequence: Synthetic oligonucleotide
  Sense strand starting at position 1638 of SEQ ID NO: 1243178
uccuacgacuggucuauaa

SEQ ID NO: 1399307 - RNA, 19 nt, Artificial Sequence
  Description of Artificial Sequence: Synthetic oligonucleotide
  Antisense strand to SEQ ID NO: 1399306
uuauagaccagucguagga

SEQ ID NO: 1399308 - RNA, 19 nt, Artificial Sequence
  Description of Artificial Sequence: Synthetic oligonucleotide
  Sense strand starting at position 1640 of SEQ ID NO: 1243178
cuacgacuggucuauaagu

SEQ ID NO: 1399309 - RNA, 19 nt, Artificial Sequence
  Description of Artificial Sequence: Synthetic oligonucleotide
  Antisense strand to SEQ ID NO: 1399308
acuuauagaccagucguag

SEQ ID NO: 1399310 - RNA, 19 nt, Artificial Sequence
  Description of Artificial Sequence: Synthetic oligonucleotide
  Sense strand starting at position 1667 of SEQ ID NO: 1243178
uggcaugucucccuuuauc

SEQ ID NO: 1399311 - RNA, 19 nt, Artificial Sequence
  Description of Artificial Sequence: Synthetic oligonucleotide
  Antisense strand to SEQ ID NO: 1399310
gauaaagggagacaugcca

SEQ ID NO: 1399312 - RNA, 19 nt, Artificial Sequence
  Description of Artificial Sequence: Synthetic oligonucleotide
  Sense strand starting at position 1706 of SEQ ID NO: 1243178
uggaguccuucucccauaa

SEQ ID NO: 1399313 - RNA, 19 nt, Artificial Sequence
  Description of Artificial Sequence: Synthetic oligonucleotide
  Antisense strand to SEQ ID NO: 1399312
uuaugggagaaggacucca

SEQ ID NO: 1399314 - RNA, 19 nt, Artificial Sequence
  Description of Artificial Sequence: Synthetic oligonucleotide
  Sense strand starting at position 1730 of SEQ ID NO: 1243178
gcuguuugugccucucacu

SEQ ID NO: 1399315 - RNA, 19 nt, Artificial Sequence
  Description of Artificial Sequence: Synthetic oligonucleotide
  Antisense strand to SEQ ID NO: 1399314
agugagaggcacaaacagc

SEQ ID NO: 1399316 - RNA, 19 nt, Artificial Sequence
  Description of Artificial Sequence: Synthetic oligonucleotide
  Sense strand starting at position 1746 of SEQ ID NO: 1243178
acuuucuguccugaaguca

SEQ ID NO: 1399317 - RNA, 19 nt, Artificial Sequence
  Description of Artificial Sequence: Synthetic oligonucleotide
  Antisense strand to SEQ ID NO: 1399316
ugacuucaggacagaaagu

SEQ ID NO: 1399318 - RNA, 19 nt, Artificial Sequence
  Description of Artificial Sequence: Synthetic oligonucleotide
  Sense strand starting at position 2149 of SEQ ID NO: 1243178
agaaauucgcaggagcaca

SEQ ID NO: 1399319 - RNA, 19 nt, Artificial Sequence
  Description of Artificial Sequence: Synthetic oligonucleotide
  Antisense strand to SEQ ID NO: 1399318
ugugcuccugcgaauuucu

SEQ ID NO: 1399320 - RNA, 19 nt, Artificial Sequence
  Description of Artificial Sequence: Synthetic oligonucleotide
  Sense strand starting at position 2272 of SEQ ID NO: 1243178
cuggguuggccucgacaga

SEQ ID NO: 1399321 - RNA, 19 nt, Artificial Sequence
  Description of Artificial Sequence: Synthetic oligonucleotide
  Antisense strand to SEQ ID NO: 1399320
ucugucgaggccaacccag

SEQ ID NO: 1399322 - RNA, 19 nt, Artificial Sequence
  Description of Artificial Sequence: Synthetic oligonucleotide
  Sense strand starting at position 2333 of SEQ ID NO: 1243178
uuaugagagucacaccaaa

SEQ ID NO: 1399323 - RNA, 19 nt, Artificial Sequence
  Description of Artificial Sequence: Synthetic oligonucleotide
  Antisense strand to SEQ ID NO: 1399322
uuuggugugacucucauaa

SEQ ID NO: 1399324 - RNA, 19 nt, Artificial Sequence
  Description of Artificial Sequence: Synthetic oligonucleotide
  Sense strand starting at position 3001 of SEQ ID NO: 1243178
gagggaacccucuggguga

SEQ ID NO: 1399325 - RNA, 19 nt, Artificial Sequence
  Description of Artificial Sequence: Synthetic oligonucleotide
  Antisense strand to SEQ ID NO: 1399324
ucacccagaggguucccuc

SEQ ID NO: 1399326 - RNA, 19 nt, Artificial Sequence
  Description of Artificial Sequence: Synthetic oligonucleotide
  Sense strand starting at position 3340 of SEQ ID NO: 1243178
uagcaaauaucaggaugga

SEQ ID NO: 1399327 - RNA, 19 nt, Artificial Sequence
  Description of Artificial Sequence: Synthetic oligonucleotide
  Antisense strand to SEQ ID NO: 1399326
uccauccugauauuugcua

SEQ ID NO: 1399328 - RNA, 19 nt, Artificial Sequence
  Description of Artificial Sequence: Synthetic oligonucleotide
  Sense strand starting at position 3443 of SEQ ID NO: 1243178
ccuguagggcuguguaguu

SEQ ID NO: 1399329 - RNA, 19 nt, Artificial Sequence
  Description of Artificial Sequence: Synthetic oligonucleotide
  Antisense strand to SEQ ID NO: 1399328
aacuacacagcccuacagg

SEQ ID NO: 1399330 - RNA, 19 nt, Artificial Sequence
  Description of Artificial Sequence: Synthetic oligonucleotide
  Sense strand starting at position 3480 of SEQ ID NO: 1243178
auggguuccugagaagggu

SEQ ID NO: 1399331 - RNA, 19 nt, Artificial Sequence
  Description of Artificial Sequence: Synthetic oligonucleotide
  Antisense strand to SEQ ID NO: 1399330
acccuucucaggaacccau

SEQ ID NO: 1399332 - RNA, 19 nt, Artificial Sequence
  Description of Artificial Sequence: Synthetic oligonucleotide
  Sense strand starting at position 3484 of SEQ ID NO: 1243178
guuccugagaaggguaguu

SEQ ID NO: 1399333 - RNA, 19 nt, Artificial Sequence
  Description of Artificial Sequence: Synthetic oligonucleotide
  Antisense strand to SEQ ID NO: 1399332
aacuacccuucucaggaac

SEQ ID NO: 1399334 - RNA, 19 nt, Artificial Sequence
  Description of Artificial Sequence: Synthetic oligonucleotide
  Sense strand starting at position 3489 of SEQ ID NO: 1243178
ugagaaggguaguuguaaa

SEQ ID NO: 1399335 - RNA, 19 nt, Artificial Sequence
  Description of Artificial Sequence: Synthetic oligonucleotide
  Antisense strand to SEQ ID NO: 1399334
uuuacaacuacccuucuca

SEQ ID NO: 1399336 - RNA, 19 nt, Artificial Sequence
  Description of Artificial Sequence: Synthetic oligonucleotide
  Sense strand starting at position 3628 of SEQ ID NO: 1243178
uggaguagaauguauggua

SEQ ID NO: 1399337 - RNA, 19 nt, Artificial Sequence
  Description of Artificial Sequence: Synthetic oligonucleotide
  Antisense strand to SEQ ID NO: 1399336
uaccauacauucuacucca

SEQ ID NO: 1399338 - RNA, 19 nt, Artificial Sequence
  Description of Artificial Sequence: Synthetic oligonucleotide
  Sense strand starting at position 3631 of SEQ ID NO: 1243178
aguagaauguaugguaugu

SEQ ID NO: 1399339 - RNA, 19 nt, Artificial Sequence
  Description of Artificial Sequence: Synthetic oligonucleotide
  Antisense strand to SEQ ID NO: 1399338
acauaccauacauucuacu

SEQ ID NO: 1399340 - RNA, 19 nt, Artificial Sequence
  Description of Artificial Sequence: Synthetic oligonucleotide
  Sense strand starting at position 3644 of SEQ ID NO: 1243178
guaugugggccuugucaag

SEQ ID NO: 1399341 - RNA, 19 nt, Artificial Sequence
  Description of Artificial Sequence: Synthetic oligonucleotide
  Antisense strand to SEQ ID NO: 1399340
cuugacaaggcccacauac

SEQ ID NO: 1399342 - RNA, 19 nt, Artificial Sequence
  Description of Artificial Sequence: Synthetic oligonucleotide
  Sense strand starting at position 3682 of SEQ ID NO: 1243178
gggccuaaugccuaucgua

SEQ ID NO: 1399343 - RNA, 19 nt, Artificial Sequence
  Description of Artificial Sequence: Synthetic oligonucleotide
  Antisense strand to SEQ ID NO: 1399342
uacgauaggcauuaggccc

SEQ ID NO: 1399344 - RNA, 19 nt, Artificial Sequence
  Description of Artificial Sequence: Synthetic oligonucleotide
  Sense strand starting at position 117 of SEQ ID NO: 1243179
gcauaaugugggcagcaaa

SEQ ID NO: 1399345 - RNA, 19 nt, Artificial Sequence
  Description of Artificial Sequence: Synthetic oligonucleotide
  Antisense strand to SEQ ID NO: 1399344
uuugcugcccacauuaugc

SEQ ID NO: 1399346 - RNA, 19 nt, Artificial Sequence
  Description of Artificial Sequence: Synthetic oligonucleotide
  Sense strand starting at position 245 of SEQ ID NO: 1243179
ugcaaccuugcagauaaau

SEQ ID NO: 1399347 - RNA, 19 nt, Artificial Sequence
  Description of Artificial Sequence: Synthetic oligonucleotide
  Antisense strand to SEQ ID NO: 1399346
auuuaucugcaagguugca

SEQ ID NO: 1399348 - RNA, 19 nt, Artificial Sequence
  Description of Artificial Sequence: Synthetic oligonucleotide
  Sense strand starting at position 860 of SEQ ID NO: 1243179
aaacuuguuuaaguuggaa

SEQ ID NO: 1399349 - RNA, 19 nt, Artificial Sequence
  Description of Artificial Sequence: Synthetic oligonucleotide
  Antisense strand to SEQ ID NO: 1399348
uuccaacuuaaacaaguuu

SEQ ID NO: 1399350 - RNA, 19 nt, Artificial Sequence
  Description of Artificial Sequence: Synthetic oligonucleotide
  Sense strand starting at position 917 of SEQ ID NO: 1243179
uuaucccaacaguguaaau

SEQ ID NO: 1399351 - RNA, 19 nt, Artificial Sequence
  Description of Artificial Sequence: Synthetic oligonucleotide
  Antisense strand to SEQ ID NO: 1399350
auuuacacuguugggauaa

SEQ ID NO: 1399352 - RNA, 19 nt, Artificial Sequence
  Description of Artificial Sequence: Synthetic oligonucleotide
  Sense strand starting at position 1242 of SEQ ID NO: 1243179
cgaccaggucaauguaaua

SEQ ID NO: 1399353 - RNA, 19 nt, Artificial Sequence
  Description of Artificial Sequence: Synthetic oligonucleotide
  Antisense strand to SEQ ID NO: 1399352
uauuacauugaccuggucg

SEQ ID NO: 1399354 - RNA, 19 nt, Artificial Sequence
  Description of Artificial Sequence: Synthetic oligonucleotide
  Sense strand starting at position 1275 of SEQ ID NO: 1243179
uaacuuuagcuguggaaag

SEQ ID NO: 1399355 - RNA, 19 nt, Artificial Sequence
  Description of Artificial Sequence: Synthetic oligonucleotide
  Antisense strand to SEQ ID NO: 1399354
cuuuccacagcuaaaguua

SEQ ID NO: 1399356 - RNA, 19 nt, Artificial Sequence
  Description of Artificial Sequence: Synthetic oligonucleotide
  Sense strand starting at position 1292 of SEQ ID NO: 1243179
agggucguguauuugauua

SEQ ID NO: 1399357 - RNA, 19 nt, Artificial Sequence
  Description of Artificial Sequence: Synthetic oligonucleotide
  Antisense strand to SEQ ID NO: 1399356
uaaucaaauacacgacccu

SEQ ID NO: 1399358 - RNA, 19 nt, Artificial Sequence
  Description of Artificial Sequence: Synthetic oligonucleotide
  Sense strand starting at position 1453 of SEQ ID NO: 1243179
guaagaaacuccguacaca

SEQ ID NO: 1399359 - RNA, 19 nt, Artificial Sequence
  Description of Artificial Sequence: Synthetic oligonucleotide
  Antisense strand to SEQ ID NO: 1399358
uguguacggaguuucuuac

SEQ ID NO: 1399360 - RNA, 19 nt, Artificial Sequence
  Description of Artificial Sequence: Synthetic oligonucleotide
  Sense strand starting at position 1674 of SEQ ID NO: 1243179
guguguugcgggaggacau

SEQ ID NO: 1399361 - RNA, 19 nt, Artificial Sequence
  Description of Artificial Sequence: Synthetic oligonucleotide
  Antisense strand to SEQ ID NO: 1399360
auguccucccgcaacacac

SEQ ID NO: 1399362 - RNA, 19 nt, Artificial Sequence
  Description of Artificial Sequence: Synthetic oligonucleotide
  Sense strand starting at position 2120 of SEQ ID NO: 1243179
gcccgcucucgauccuuaa

SEQ ID NO: 1399363 - RNA, 19 nt, Artificial Sequence
  Description of Artificial Sequence: Synthetic oligonucleotide
  Antisense strand to SEQ ID NO: 1399362
uuaaggaucgagagcgggc

SEQ ID NO: 1399364 - RNA, 19 nt, Artificial Sequence
  Description of Artificial Sequence: Synthetic oligonucleotide
  Sense strand starting at position 2124 of SEQ ID NO: 1243179
gcucucgauccuuaauaau

SEQ ID NO: 1399365 - RNA, 19 nt, Artificial Sequence
  Description of Artificial Sequence: Synthetic oligonucleotide
  Antisense strand to SEQ ID NO: 1399364
auuauuaaggaucgagagc

SEQ ID NO: 1399366 - RNA, 19 nt, Artificial Sequence
  Description of Artificial Sequence: Synthetic oligonucleotide
  Sense strand starting at position 2638 of SEQ ID NO: 1243179
uggacucuguggucauaga

SEQ ID NO: 1399367 - RNA, 19 nt, Artificial Sequence
  Description of Artificial Sequence: Synthetic oligonucleotide
  Antisense strand to SEQ ID NO: 1399366
ucuaugaccacagagucca

SEQ ID NO: 1399368 - RNA, 19 nt, Artificial Sequence
  Description of Artificial Sequence: Synthetic oligonucleotide
  Sense strand starting at position 2648 of SEQ ID NO: 1243179
ggucauagagccugaucua

SEQ ID NO: 1399369 - RNA, 19 nt, Artificial Sequence
  Description of Artificial Sequence: Synthetic oligonucleotide
  Antisense strand to SEQ ID NO: 1399368
uagaucaggcucuaugacc

SEQ ID NO: 1399370 - RNA, 19 nt, Artificial Sequence
  Description of Artificial Sequence: Synthetic oligonucleotide
  Sense strand starting at position 2649 of SEQ ID NO: 1243179
gucauagagccugaucuag

SEQ ID NO: 1399371 - RNA, 19 nt, Artificial Sequence
  Description of Artificial Sequence: Synthetic oligonucleotide
  Antisense strand to SEQ ID NO: 1399370
cuagaucaggcucuaugac

SEQ ID NO: 1399372 - RNA, 19 nt, Artificial Sequence
  Description of Artificial Sequence: Synthetic oligonucleotide
  Sense strand starting at position 2746 of SEQ ID NO: 1243179
ggauauuaguucuugcaaa

SEQ ID NO: 1399373 - RNA, 19 nt, Artificial Sequence
  Description of Artificial Sequence: Synthetic oligonucleotide
  Antisense strand to SEQ ID NO: 1399372
uuugcaagaacuaauaucc

SEQ ID NO: 1399374 - RNA, 19 nt, Artificial Sequence
  Description of Artificial Sequence: Synthetic oligonucleotide
  Sense strand starting at position 2841 of SEQ ID NO: 1243179
gggagugcugauuauaugu

SEQ ID NO: 1399375 - RNA, 19 nt, Artificial Sequence
  Description of Artificial Sequence: Synthetic oligonucleotide
  Antisense strand to SEQ ID NO: 1399374
acauauaaucagcacuccc

SEQ ID NO: 1399376 - RNA, 19 nt, Artificial Sequence
  Description of Artificial Sequence: Synthetic oligonucleotide
  Sense strand starting at position 2871 of SEQ ID NO: 1243179
uuaccuagggauugugaga

SEQ ID NO: 1399377 - RNA, 19 nt, Artificial Sequence
  Description of Artificial Sequence: Synthetic oligonucleotide
  Antisense strand to SEQ ID NO: 1399376
ucucacaaucccuagguaa

SEQ ID NO: 1399378 - RNA, 19 nt, Artificial Sequence
  Description of Artificial Sequence: Synthetic oligonucleotide
  Sense strand starting at position 2885 of SEQ ID NO: 1243179
ugagaaagcaagugaaauu

SEQ ID NO: 1399379 - RNA, 19 nt, Artificial Sequence
  Description of Artificial Sequence: Synthetic oligonucleotide
  Antisense strand to SEQ ID NO: 1399378
aauuucacuugcuuucuca

SEQ ID NO: 1399380 - RNA, 19 nt, Artificial Sequence
  Description of Artificial Sequence: Synthetic oligonucleotide
  Sense strand starting at position 2894 of SEQ ID NO: 1243179
aagugaaauuacucgugga

SEQ ID NO: 1399381 - RNA, 19 nt, Artificial Sequence
  Description of Artificial Sequence: Synthetic oligonucleotide
  Antisense strand to SEQ ID NO: 1399380
uccacgaguaauuucacuu

SEQ ID NO: 1399382 - RNA, 19 nt, Artificial Sequence
  Description of Artificial Sequence: Synthetic oligonucleotide
  Sense strand starting at position 2895 of SEQ ID NO: 1243179
agugaaauuacucguggaa

SEQ ID NO: 1399383 - RNA, 19 nt, Artificial Sequence
  Description of Artificial Sequence: Synthetic oligonucleotide
  Antisense strand to SEQ ID NO: 1399382
uuccacgaguaauuucacu

SEQ ID NO: 1399384 - RNA, 19 nt, Artificial Sequence
  Description of Artificial Sequence: Synthetic oligonucleotide
  Sense strand starting at position 2898 of SEQ ID NO: 1243179
gaaauuacucguggaagug

SEQ ID NO: 1399385 - RNA, 19 nt, Artificial Sequence
  Description of Artificial Sequence: Synthetic oligonucleotide
  Antisense strand to SEQ ID NO: 1399384
cacuuccacgaguaauuuc

SEQ ID NO: 1399386 - RNA, 19 nt, Artificial Sequence
  Description of Artificial Sequence: Synthetic oligonucleotide
  Sense strand starting at position 2899 of SEQ ID NO: 1243179
aaauuacucguggaaguga

SEQ ID NO: 1399387 - RNA, 19 nt, Artificial Sequence
  Description of Artificial Sequence: Synthetic oligonucleotide
  Antisense strand to SEQ ID NO: 1399386
ucacuuccacgaguaauuu

SEQ ID NO: 1399388 - RNA, 19 nt, Artificial Sequence
  Description of Artificial Sequence: Synthetic oligonucleotide
  Sense strand starting at position 2965 of SEQ ID NO: 1243179
uucuaucccuggucugaga

SEQ ID NO: 1399389 - RNA, 19 nt, Artificial Sequence
  Description of Artificial Sequence: Synthetic oligonucleotide
  Antisense strand to SEQ ID NO: 1399388
ucucagaccagggauagaa

SEQ ID NO: 1399390 - RNA, 19 nt, Artificial Sequence
  Description of Artificial Sequence: Synthetic oligonucleotide
  Sense strand starting at position 2974 of SEQ ID NO: 1243179
uggucugagagcuagggau

SEQ ID NO: 1399391 - RNA, 19 nt, Artificial Sequence
  Description of Artificial Sequence: Synthetic oligonucleotide
  Antisense strand to SEQ ID NO: 1399390
aucccuagcucucagacca

SEQ ID NO: 1399392 - RNA, 19 nt, Artificial Sequence
  Description of Artificial Sequence: Synthetic oligonucleotide
  Sense strand starting at position 3044 of SEQ ID NO: 1243179
auaucugucucugugagga

SEQ ID NO: 1399393 - RNA, 19 nt, Artificial Sequence
  Description of Artificial Sequence: Synthetic oligonucleotide
  Antisense strand to SEQ ID NO: 1399392
uccucacagagacagauau

SEQ ID NO: 1399394 - RNA, 19 nt, Artificial Sequence
  Description of Artificial Sequence: Synthetic oligonucleotide
  Sense strand starting at position 3049 of SEQ ID NO: 1243179
ugucucugugaggauagau

SEQ ID NO: 1399395 - RNA, 19 nt, Artificial Sequence
  Description of Artificial Sequence: Synthetic oligonucleotide
  Antisense strand to SEQ ID NO: 1399394
aucuauccucacagagaca

SEQ ID NO: 1399396 - RNA, 19 nt, Artificial Sequence
  Description of Artificial Sequence: Synthetic oligonucleotide
  Sense strand starting at position 3094 of SEQ ID NO: 1243179
cccugugaucuuggacaac

SEQ ID NO: 1399397 - RNA, 19 nt, Artificial Sequence
  Description of Artificial Sequence: Synthetic oligonucleotide
  Antisense strand to SEQ ID NO: 1399396
guuguccaagaucacaggg

SEQ ID NO: 1399398 - RNA, 19 nt, Artificial Sequence
  Description of Artificial Sequence: Synthetic oligonucleotide
  Sense strand starting at position 3138 of SEQ ID NO: 1243179
ucaucugcuaagugggaaa

SEQ ID NO: 1399399 - RNA, 19 nt, Artificial Sequence
  Description of Artificial Sequence: Synthetic oligonucleotide
  Antisense strand to SEQ ID NO: 1399398
uuucccacuuagcagauga

SEQ ID NO: 1399400 - RNA, 19 nt, Artificial Sequence
  Description of Artificial Sequence: Synthetic oligonucleotide
  Sense strand starting at position 3191 of SEQ ID NO: 1243179
ggagcuggauggucaacau

SEQ ID NO: 1399401 - RNA, 19 nt, Artificial Sequence
  Description of Artificial Sequence: Synthetic oligonucleotide
  Antisense strand to SEQ ID NO: 1399400
auguugaccauccagcucc

SEQ ID NO: 1399402 - RNA, 19 nt, Artificial Sequence
  Description of Artificial Sequence: Synthetic oligonucleotide
  Sense strand starting at position 3207 of SEQ ID NO: 1243179
cauggaauccugggccuua

SEQ ID NO: 1399403 - RNA, 19 nt, Artificial Sequence
  Description of Artificial Sequence: Synthetic oligonucleotide
  Antisense strand to SEQ ID NO: 1399402
uaaggcccaggauuccaug

SEQ ID NO: 1399404 - RNA, 19 nt, Artificial Sequence
  Description of Artificial Sequence: Synthetic oligonucleotide
  Sense strand starting at position 3208 of SEQ ID NO: 1243179
auggaauccugggccuuaa

SEQ ID NO: 1399405 - RNA, 19 nt, Artificial Sequence
  Description of Artificial Sequence: Synthetic oligonucleotide
  Antisense strand to SEQ ID NO: 1399404
uuaaggcccaggauuccau

SEQ ID NO: 1399406 - RNA, 19 nt, Artificial Sequence
  Description of Artificial Sequence: Synthetic oligonucleotide
  Sense strand starting at position 3232 of SEQ ID NO: 1243179
gugucucugagacauagga

SEQ ID NO: 1399407 - RNA, 19 nt, Artificial Sequence
  Description of Artificial Sequence: Synthetic oligonucleotide
  Antisense strand to SEQ ID NO: 1399406
uccuaugucucagagacac

SEQ ID NO: 1399408 - RNA, 19 nt, Artificial Sequence
  Description of Artificial Sequence: Synthetic oligonucleotide
  Sense strand starting at position 3530 of SEQ ID NO: 1243179
gccugcuuccuagacagaa

SEQ ID NO: 1399409 - RNA, 19 nt, Artificial Sequence
  Description of Artificial Sequence: Synthetic oligonucleotide
  Antisense strand to SEQ ID NO: 1399408
uucugucuaggaagcaggc

SEQ ID NO: 1399410 - RNA, 19 nt, Artificial Sequence
  Description of Artificial Sequence: Synthetic oligonucleotide
  Sense strand starting at position 3697 of SEQ ID NO: 1243179
gggauuagagaguguugau

SEQ ID NO: 1399411 - RNA, 19 nt, Artificial Sequence
  Description of Artificial Sequence: Synthetic oligonucleotide
  Antisense strand to SEQ ID NO: 1399410
aucaacacucucuaauccc

SEQ ID NO: 1399412 - RNA, 19 nt, Artificial Sequence
  Description of Artificial Sequence: Synthetic oligonucleotide
  Sense strand starting at position 3706 of SEQ ID NO: 1243179
gaguguugauagguuggau

SEQ ID NO: 1399413 - RNA, 19 nt, Artificial Sequence
  Description of Artificial Sequence: Synthetic oligonucleotide
  Antisense strand to SEQ ID NO: 1399412
auccaaccuaucaacacuc

SEQ ID NO: 1399414 - RNA, 19 nt, Artificial Sequence
  Description of Artificial Sequence: Synthetic oligonucleotide
  Sense strand starting at position 3761 of SEQ ID NO: 1243179
gagucagauccuggguuag

SEQ ID NO: 1399415 - RNA, 19 nt, Artificial Sequence
  Description of Artificial Sequence: Synthetic oligonucleotide
  Antisense strand to SEQ ID NO: 1399414
cuaacccaggaucugacuc

SEQ ID NO: 1399416 - RNA, 19 nt, Artificial Sequence
  Description of Artificial Sequence: Synthetic oligonucleotide
  Sense strand starting at position 3763 of SEQ ID NO: 1243179
gucagauccuggguuagga

SEQ ID NO: 1399417 - RNA, 19 nt, Artificial Sequence
  Description of Artificial Sequence: Synthetic oligonucleotide
  Antisense strand to SEQ ID NO: 1399416
uccuaacccaggaucugac

SEQ ID NO: 1399418 - RNA, 19 nt, Artificial Sequence
  Description of Artificial Sequence: Synthetic oligonucleotide
  Sense strand starting at position 3787 of SEQ ID NO: 1243179
ggaccagauuagccagauu

SEQ ID NO: 1399419 - RNA, 19 nt, Artificial Sequence
  Description of Artificial Sequence: Synthetic oligonucleotide
  Antisense strand to SEQ ID NO: 1399418
aaucuggcuaaucuggucc

SEQ ID NO: 1399420 - RNA, 19 nt, Artificial Sequence
  Description of Artificial Sequence: Synthetic oligonucleotide
  Sense strand starting at position 3891 of SEQ ID NO: 1243179
auguuacucccggaagcaa

SEQ ID NO: 1399421 - RNA, 19 nt, Artificial Sequence
  Description of Artificial Sequence: Synthetic oligonucleotide
  Antisense strand to SEQ ID NO: 1399420
uugcuuccgggaguaacau

SEQ ID NO: 1399422 - RNA, 19 nt, Artificial Sequence
  Description of Artificial Sequence: Synthetic oligonucleotide
  Sense strand starting at position 3980 of SEQ ID NO: 1243179
gcuaauuuguuagucuaca

SEQ ID NO: 1399423 - RNA, 19 nt, Artificial Sequence
  Description of Artificial Sequence: Synthetic oligonucleotide
  Antisense strand to SEQ ID NO: 1399422
uguagacuaacaaauuagc

SEQ ID NO: 1399424 - RNA, 19 nt, Artificial Sequence
  Description of Artificial Sequence: Synthetic oligonucleotide
  Sense strand starting at position 267 of SEQ ID NO: 1243180
cccgguaugucaccaaauc

SEQ ID NO: 1399425 - RNA, 19 nt, Artificial Sequence
  Description of Artificial Sequence: Synthetic oligonucleotide
  Antisense strand to SEQ ID NO: 1399424
gauuuggugacauaccggg

SEQ ID NO: 1399426 - RNA, 19 nt, Artificial Sequence
  Description of Artificial Sequence: Synthetic oligonucleotide
  Sense strand starting at position 268 of SEQ ID NO: 1243180
ccgguaugucaccaaaucu

SEQ ID NO: 1399427 - RNA, 19 nt, Artificial Sequence
  Description of Artificial Sequence: Synthetic oligonucleotide
  Antisense strand to SEQ ID NO: 1399426
agauuuggugacauaccgg

SEQ ID NO: 1399428 - RNA, 19 nt, Artificial Sequence
  Description of Artificial Sequence: Synthetic oligonucleotide
  Sense strand starting at position 326 of SEQ ID NO: 1243180
acuuucuaucacggacauu

SEQ ID NO: 1399429 - RNA, 19 nt, Artificial Sequence
  Description of Artificial Sequence: Synthetic oligonucleotide
  Antisense strand to SEQ ID NO: 1399428
aauguccgugauagaaagu

SEQ ID NO: 1399430 - RNA, 19 nt, Artificial Sequence
  Description of Artificial Sequence: Synthetic oligonucleotide
  Sense strand starting at position 421 of SEQ ID NO: 1243180
ucuugacuucgcuagcuaa

SEQ ID NO: 1399431 - RNA, 19 nt, Artificial Sequence
  Description of Artificial Sequence: Synthetic oligonucleotide
  Antisense strand to SEQ ID NO: 1399430
uuagcuagcgaagucaaga

SEQ ID NO: 1399432 - RNA, 19 nt, Artificial Sequence
  Description of Artificial Sequence: Synthetic oligonucleotide
  Sense strand starting at position 493 of SEQ ID NO: 1243180
gugcauguuggcuaacaga

SEQ ID NO: 1399433 - RNA, 19 nt, Artificial Sequence
  Description of Artificial Sequence: Synthetic oligonucleotide
  Antisense strand to SEQ ID NO: 1399432
ucuguuagccaacaugcac

SEQ ID NO: 1399434 - RNA, 19 nt, Artificial Sequence
  Description of Artificial Sequence: Synthetic oligonucleotide
  Sense strand starting at position 570 of SEQ ID NO: 1243180
gucaguaaguccuugucac

SEQ ID NO: 1399435 - RNA, 19 nt, Artificial Sequence
  Description of Artificial Sequence: Synthetic oligonucleotide
  Antisense strand to SEQ ID NO: 1399434
gugacaaggacuuacugac

SEQ ID NO: 1399436 - RNA, 19 nt, Artificial Sequence
  Description of Artificial Sequence: Synthetic oligonucleotide
  Sense strand starting at position 630 of SEQ ID NO: 1243180
ugcagcaaaucuuuacuga

SEQ ID NO: 1399437 - RNA, 19 nt, Artificial Sequence
  Description of Artificial Sequence: Synthetic oligonucleotide
  Antisense strand to SEQ ID NO: 1399436
ucaguaaagauuugcugca

SEQ ID NO: 1399438 - RNA, 19 nt, Artificial Sequence
  Description of Artificial Sequence: Synthetic oligonucleotide
  Sense strand starting at position 671 of SEQ ID NO: 1243180
cguccuacacucugaggau

SEQ ID NO: 1399439 - RNA, 19 nt, Artificial Sequence
  Description of Artificial Sequence: Synthetic oligonucleotide
  Antisense strand to SEQ ID NO: 1399438
auccucagaguguaggacg

SEQ ID NO: 1399440 - RNA, 19 nt, Artificial Sequence
  Description of Artificial Sequence: Synthetic oligonucleotide
  Sense strand starting at position 785 of SEQ ID NO: 1243180
acuguacagcugugacaga

SEQ ID NO: 1399441 - RNA, 19 nt, Artificial Sequence
  Description of Artificial Sequence: Synthetic oligonucleotide
  Antisense strand to SEQ ID NO: 1399440
ucugucacagcuguacagu

SEQ ID NO: 1399442 - RNA, 19 nt, Artificial Sequence
  Description of Artificial Sequence: Synthetic oligonucleotide
  Sense strand starting at position 977 of SEQ ID NO: 1243180
gacagugaucaguacguug

SEQ ID NO: 1399443 - RNA, 19 nt, Artificial Sequence
  Description of Artificial Sequence: Synthetic oligonucleotide
  Antisense strand to SEQ ID NO: 1399442
caacguacugaucacuguc

SEQ ID NO: 1399444 - RNA, 19 nt, Artificial Sequence
  Description of Artificial Sequence: Synthetic oligonucleotide
  Sense strand starting at position 989 of SEQ ID NO: 1243180
uacguugcccaacagauau

SEQ ID NO: 1399445 - RNA, 19 nt, Artificial Sequence
  Description of Artificial Sequence: Synthetic oligonucleotide
  Antisense strand to SEQ ID NO: 1399444
auaucuguugggcaacgua

SEQ ID NO: 1399446 - RNA, 19 nt, Artificial Sequence
  Description of Artificial Sequence: Synthetic oligonucleotide
  Sense strand starting at position 1134 of SEQ ID NO: 1243180
gccaacagucccugcauaa

SEQ ID NO: 1399447 - RNA, 19 nt, Artificial Sequence
  Description of Artificial Sequence: Synthetic oligonucleotide
  Antisense strand to SEQ ID NO: 1399446
uuaugcagggacuguuggc

SEQ ID NO: 1399448 - RNA, 19 nt, Artificial Sequence
  Description of Artificial Sequence: Synthetic oligonucleotide
  Sense strand starting at position 1144 of SEQ ID NO: 1243180
ccugcauaagcguggacaa

SEQ ID NO: 1399449 - RNA, 19 nt, Artificial Sequence
  Description of Artificial Sequence: Synthetic oligonucleotide
  Antisense strand to SEQ ID NO: 1399448
uuguccacgcuuaugcagg

SEQ ID NO: 1399450 - RNA, 19 nt, Artificial Sequence
  Description of Artificial Sequence: Synthetic oligonucleotide
  Sense strand starting at position 1169 of SEQ ID NO: 1243180
agagaucuauuugagcaca

SEQ ID NO: 1399451 - RNA, 19 nt, Artificial Sequence
  Description of Artificial Sequence: Synthetic oligonucleotide
  Antisense strand to SEQ ID NO: 1399450
ugugcucaaauagaucucu

SEQ ID NO: 1399452 - RNA, 19 nt, Artificial Sequence
  Description of Artificial Sequence: Synthetic oligonucleotide
  Sense strand starting at position 1626 of SEQ ID NO: 1243180
cccgcugaagucuaaagaa

SEQ ID NO: 1399453 - RNA, 19 nt, Artificial Sequence
  Description of Artificial Sequence: Synthetic oligonucleotide
  Antisense strand to SEQ ID NO: 1399452
uucuuuagacuucagcggg

SEQ ID NO: 1399454 - RNA, 19 nt, Artificial Sequence
  Description of Artificial Sequence: Synthetic oligonucleotide
  Sense strand starting at position 2173 of SEQ ID NO: 1243180
ugggaaguguagucccaaa

SEQ ID NO: 1399455 - RNA, 19 nt, Artificial Sequence
  Description of Artificial Sequence: Synthetic oligonucleotide
  Antisense strand to SEQ ID NO: 1399454
uuugggacuacacuuccca

SEQ ID NO: 1399456 - RNA, 19 nt, Artificial Sequence
  Description of Artificial Sequence: Synthetic oligonucleotide
  Sense strand starting at position 2338 of SEQ ID NO: 1243180
cuuccacaagcuugaguuu

SEQ ID NO: 1399457 - RNA, 19 nt, Artificial Sequence
  Description of Artificial Sequence: Synthetic oligonucleotide
  Antisense strand to SEQ ID NO: 1399456
aaacucaagcuuguggaag

SEQ ID NO: 1399458 - RNA, 19 nt, Artificial Sequence
  Description of Artificial Sequence: Synthetic oligonucleotide
  Sense strand starting at position 2681 of SEQ ID NO: 1243180
gggacacucuguuucugaa

SEQ ID NO: 1399459 - RNA, 19 nt, Artificial Sequence
  Description of Artificial Sequence: Synthetic oligonucleotide
  Antisense strand to SEQ ID NO: 1399458
uucagaaacagaguguccc

SEQ ID NO: 1399460 - RNA, 19 nt, Artificial Sequence
  Description of Artificial Sequence: Synthetic oligonucleotide
  Sense strand starting at position 2720 of SEQ ID NO: 1243180
acggucuuaaacugagaaa

SEQ ID NO: 1399461 - RNA, 19 nt, Artificial Sequence
  Description of Artificial Sequence: Synthetic oligonucleotide
  Antisense strand to SEQ ID NO: 1399460
uuucucaguuuaagaccgu

SEQ ID NO: 1399462 - RNA, 19 nt, Artificial Sequence
  Description of Artificial Sequence: Synthetic oligonucleotide
  Sense strand starting at position 2793 of SEQ ID NO: 1243180
ucgugauuggaaugcaaua

SEQ ID NO: 1399463 - RNA, 19 nt, Artificial Sequence
  Description of Artificial Sequence: Synthetic oligonucleotide
  Antisense strand to SEQ ID NO: 1399462
uauugcauuccaaucacga

SEQ ID NO: 1399464 - RNA, 19 nt, Artificial Sequence
  Description of Artificial Sequence: Synthetic oligonucleotide
  Sense strand starting at position 2936 of SEQ ID NO: 1243180
uuggaaauauugcucaaau

SEQ ID NO: 1399465 - RNA, 19 nt, Artificial Sequence
  Description of Artificial Sequence: Synthetic oligonucleotide
  Antisense strand to SEQ ID NO: 1399464
auuugagcaauauuuccaa

SEQ ID NO: 1399466 - RNA, 19 nt, Artificial Sequence
  Description of Artificial Sequence: Synthetic oligonucleotide
  Sense strand starting at position 2937 of SEQ ID NO: 1243180
uggaaauauugcucaaauu

SEQ ID NO: 1399467 - RNA, 19 nt, Artificial Sequence
  Description of Artificial Sequence: Synthetic oligonucleotide
  Antisense strand to SEQ ID NO: 1399466
aauuugagcaauauuucca

SEQ ID NO: 1399468 - RNA, 19 nt, Artificial Sequence
  Description of Artificial Sequence: Synthetic oligonucleotide
  Sense strand starting at position 3023 of SEQ ID NO: 1243180
gcagaaacuuuauuagaau

SEQ ID NO: 1399469 - RNA, 19 nt, Artificial Sequence
  Description of Artificial Sequence: Synthetic oligonucleotide
  Antisense strand to SEQ ID NO: 1399468
auucuaauaaaguuucugc

SEQ ID NO: 1399470 - RNA, 19 nt, Artificial Sequence
  Description of Artificial Sequence: Synthetic oligonucleotide
  Sense strand starting at position 3142 of SEQ ID NO: 1243180
agaagaugguguucccauc

SEQ ID NO: 1399471 - RNA, 19 nt, Artificial Sequence
  Description of Artificial Sequence: Synthetic oligonucleotide
  Antisense strand to SEQ ID NO: 1399470
gaugggaacaccaucuucu

SEQ ID NO: 1399472 - RNA, 19 nt, Artificial Sequence
  Description of Artificial Sequence: Synthetic oligonucleotide
  Sense strand starting at position 3196 of SEQ ID NO: 1243180
auuucuagcuaccaggaaa

SEQ ID NO: 1399473 - RNA, 19 nt, Artificial Sequence
  Description of Artificial Sequence: Synthetic oligonucleotide
  Antisense strand to SEQ ID NO: 1399472
uuuccugguagcuagaaau

SEQ ID NO: 1399474 - RNA, 19 nt, Artificial Sequence
  Description of Artificial Sequence: Synthetic oligonucleotide
  Sense strand starting at position 3288 of SEQ ID NO: 1243180
uuugucauuuguccucaca

SEQ ID NO: 1399475 - RNA, 19 nt, Artificial Sequence
  Description of Artificial Sequence: Synthetic oligonucleotide
  Antisense strand to SEQ ID NO: 1399474
ugugaggacaaaugacaaa

SEQ ID NO: 1399476 - RNA, 19 nt, Artificial Sequence
  Description of Artificial Sequence: Synthetic oligonucleotide
  Sense strand starting at position 3346 of SEQ ID NO: 1243180
acaguaacuugcucaaagu

SEQ ID NO: 1399477 - RNA, 19 nt, Artificial Sequence
  Description of Artificial Sequence: Synthetic oligonucleotide
  Antisense strand to SEQ ID NO: 1399476
acuuugagcaaguuacugu

SEQ ID NO: 1399478 - RNA, 19 nt, Artificial Sequence
  Description of Artificial Sequence: Synthetic oligonucleotide
  Sense strand starting at position 3353 of SEQ ID NO: 1243180
cuugcucaaagugguagaa

SEQ ID NO: 1399479 - RNA, 19 nt, Artificial Sequence
  Description of Artificial Sequence: Synthetic oligonucleotide
  Antisense strand to SEQ ID NO: 1399478
uucuaccacuuugagcaag

SEQ ID NO: 1399480 - RNA, 19 nt, Artificial Sequence
  Description of Artificial Sequence: Synthetic oligonucleotide
  Sense strand starting at position 3397 of SEQ ID NO: 1243180
cuagcuuugcaugauucca

SEQ ID NO: 1399481 - RNA, 19 nt, Artificial Sequence
  Description of Artificial Sequence: Synthetic oligonucleotide
  Antisense strand to SEQ ID NO: 1399480
uggaaucaugcaaagcuag

SEQ ID NO: 1399482 - RNA, 19 nt, Artificial Sequence
  Description of Artificial Sequence: Synthetic oligonucleotide
  Sense strand starting at position 3399 of SEQ ID NO: 1243180
agcuuugcaugauuccaaa

SEQ ID NO: 1399483 - RNA, 19 nt, Artificial Sequence
  Description of Artificial Sequence: Synthetic oligonucleotide
  Antisense strand to SEQ ID NO: 1399482
uuuggaaucaugcaaagcu

SEQ ID NO: 1399484 - RNA, 19 nt, Artificial Sequence
  Description of Artificial Sequence: Synthetic oligonucleotide
  Sense strand starting at position 3418 of SEQ ID NO: 1243180
ggcagugcucuccaucacu

SEQ ID NO: 1399485 - RNA, 19 nt, Artificial Sequence
  Description of Artificial Sequence: Synthetic oligonucleotide
  Antisense strand to SEQ ID NO: 1399484
agugauggagagcacugcc

SEQ ID NO: 1399486 - RNA, 19 nt, Artificial Sequence
  Description of Artificial Sequence: Synthetic oligonucleotide
  Sense strand starting at position 3421 of SEQ ID NO: 1243180
agugcucuccaucacuaua

SEQ ID NO: 1399487 - RNA, 19 nt, Artificial Sequence
  Description of Artificial Sequence: Synthetic oligonucleotide
  Antisense strand to SEQ ID NO: 1399486
uauagugauggagagcacu

SEQ ID NO: 1399488 - RNA, 19 nt, Artificial Sequence
  Description of Artificial Sequence: Synthetic oligonucleotide
  Sense strand starting at position 3434 of SEQ ID NO: 1243180
acuauaagaugcuccuaga

SEQ ID NO: 1399489 - RNA, 19 nt, Artificial Sequence
  Description of Artificial Sequence: Synthetic oligonucleotide
  Antisense strand to SEQ ID NO: 1399488
ucuaggagcaucuuauagu

SEQ ID NO: 1399490 - RNA, 19 nt, Artificial Sequence
  Description of Artificial Sequence: Synthetic oligonucleotide
  Sense strand starting at position 3470 of SEQ ID NO: 1243180
cauucuaaugcaggugaca

SEQ ID NO: 1399491 - RNA, 19 nt, Artificial Sequence
  Description of Artificial Sequence: Synthetic oligonucleotide
  Antisense strand to SEQ ID NO: 1399490
ugucaccugcauuagaaug

SEQ ID NO: 1399492 - RNA, 19 nt, Artificial Sequence
  Description of Artificial Sequence: Synthetic oligonucleotide
  Sense strand starting at position 3530 of SEQ ID NO: 1243180
guuugaaaccagggugauc

SEQ ID NO: 1399493 - RNA, 19 nt, Artificial Sequence
  Description of Artificial Sequence: Synthetic oligonucleotide
  Antisense strand to SEQ ID NO: 1399492
gaucacccugguuucaaac

SEQ ID NO: 1399494 - RNA, 19 nt, Artificial Sequence
  Description of Artificial Sequence: Synthetic oligonucleotide
  Sense strand starting at position 3602 of SEQ ID NO: 1243180
uguagaauagcauguuugu

SEQ ID NO: 1399495 - RNA, 19 nt, Artificial Sequence
  Description of Artificial Sequence: Synthetic oligonucleotide
  Antisense strand to SEQ ID NO: 1399494
acaaacaugcuauucuaca

SEQ ID NO: 1399496 - RNA, 19 nt, Artificial Sequence
  Description of Artificial Sequence: Synthetic oligonucleotide
  Sense strand starting at position 3671 of SEQ ID NO: 1243180
agcaaagaguagucaauca

SEQ ID NO: 1399497 - RNA, 19 nt, Artificial Sequence
  Description of Artificial Sequence: Synthetic oligonucleotide
  Antisense strand to SEQ ID NO: 1399496
ugauugacuacucuuugcu

SEQ ID NO: 1399498 - RNA, 19 nt, Artificial Sequence
  Description of Artificial Sequence: Synthetic oligonucleotide
  Sense strand starting at position 3720 of SEQ ID NO: 1243180
gaacaagguucuguggguu

SEQ ID NO: 1399499 - RNA, 19 nt, Artificial Sequence
  Description of Artificial Sequence: Synthetic oligonucleotide
  Antisense strand to SEQ ID NO: 1399498
aacccacagaaccuuguuc

SEQ ID NO: 1399500 - RNA, 19 nt, Artificial Sequence
  Description of Artificial Sequence: Synthetic oligonucleotide
  Sense strand starting at position 3800 of SEQ ID NO: 1243180
guaaucucagguuaucaau

SEQ ID NO: 1399501 - RNA, 19 nt, Artificial Sequence
  Description of Artificial Sequence: Synthetic oligonucleotide
  Antisense strand to SEQ ID NO: 1399500
auugauaaccugagauuac

SEQ ID NO: 1399502 - RNA, 19 nt, Artificial Sequence
  Description of Artificial Sequence: Synthetic oligonucleotide
  Sense strand starting at position 3825 of SEQ ID NO: 1243180
ggcugaguacuguguuaaa

SEQ ID NO: 1399503 - RNA, 19 nt, Artificial Sequence
  Description of Artificial Sequence: Synthetic oligonucleotide
  Antisense strand to SEQ ID NO: 1399502
uuuaacacaguacucagcc

SEQ ID NO: 1399504 - RNA, 19 nt, Artificial Sequence
  Description of Artificial Sequence: Synthetic oligonucleotide
  Sense strand starting at position 51 of SEQ ID NO: 1243181
ggcagaaguucgagcacga

SEQ ID NO: 1399505 - RNA, 19 nt, Artificial Sequence
  Description of Artificial Sequence: Synthetic oligonucleotide
  Antisense strand to SEQ ID NO: 1399504
ucgugcucgaacuucugcc

SEQ ID NO: 1399506 - RNA, 19 nt, Artificial Sequence
  Description of Artificial Sequence: Synthetic oligonucleotide
  Sense strand starting at position 681 of SEQ ID NO: 1243181
ccugacaagguccauguua

SEQ ID NO: 1399507 - RNA, 19 nt, Artificial Sequence
  Description of Artificial Sequence: Synthetic oligonucleotide
  Antisense strand to SEQ ID NO: 1399506
uaacauggaccuugucagg

SEQ ID NO: 1399508 - RNA, 19 nt, Artificial Sequence
  Description of Artificial Sequence: Synthetic oligonucleotide
  Sense strand starting at position 689 of SEQ ID NO: 1243181
gguccauguuagcucauga

SEQ ID NO: 1399509 - RNA, 19 nt, Artificial Sequence
  Description of Artificial Sequence: Synthetic oligonucleotide
  Antisense strand to SEQ ID NO: 1399508
ucaugagcuaacauggacc

SEQ ID NO: 1399510 - RNA, 19 nt, Artificial Sequence
  Description of Artificial Sequence: Synthetic oligonucleotide
  Sense strand starting at position 694 of SEQ ID NO: 1243181
auguuagcucaugaggacu

SEQ ID NO: 1399511 - RNA, 19 nt, Artificial Sequence
  Description of Artificial Sequence: Synthetic oligonucleotide
  Antisense strand to SEQ ID NO: 1399510
aguccucaugagcuaacau

SEQ ID NO: 1399512 - RNA, 19 nt, Artificial Sequence
  Description of Artificial Sequence: Synthetic oligonucleotide
  Sense strand starting at position 763 of SEQ ID NO: 1243181
cagagacagucugcuaaca

SEQ ID NO: 1399513 - RNA, 19 nt, Artificial Sequence
  Description of Artificial Sequence: Synthetic oligonucleotide
  Antisense strand to SEQ ID NO: 1399512
uguuagcagacugucucug

SEQ ID NO: 1399514 - RNA, 19 nt, Artificial Sequence
  Description of Artificial Sequence: Synthetic oligonucleotide
  Sense strand starting at position 1239 of SEQ ID NO: 1243181
ccugacauagucuggacua

SEQ ID NO: 1399515 - RNA, 19 nt, Artificial Sequence
  Description of Artificial Sequence: Synthetic oligonucleotide
  Antisense strand to SEQ ID NO: 1399514
uaguccagacuaugucagg

SEQ ID NO: 1399516 - RNA, 19 nt, Artificial Sequence
  Description of Artificial Sequence: Synthetic oligonucleotide
  Sense strand starting at position 1295 of SEQ ID NO: 1243181
uggccaauucugcagaagu

SEQ ID NO: 1399517 - RNA, 19 nt, Artificial Sequence
  Description of Artificial Sequence: Synthetic oligonucleotide
  Antisense strand to SEQ ID NO: 1399516
acuucugcagaauuggcca

SEQ ID NO: 1399518 - RNA, 19 nt, Artificial Sequence
  Description of Artificial Sequence: Synthetic oligonucleotide
  Sense strand starting at position 1661 of SEQ ID NO: 1243181
gaccgcaaucuuugggaaa

SEQ ID NO: 1399519 - RNA, 19 nt, Artificial Sequence
  Description of Artificial Sequence: Synthetic oligonucleotide
  Antisense strand to SEQ ID NO: 1399518
uuucccaaagauugcgguc

SEQ ID NO: 1399520 - RNA, 19 nt, Artificial Sequence
  Description of Artificial Sequence: Synthetic oligonucleotide
  Sense strand starting at position 2492 of SEQ ID NO: 1243181
ggcagcgucugaguagaga

SEQ ID NO: 1399521 - RNA, 19 nt, Artificial Sequence
  Description of Artificial Sequence: Synthetic oligonucleotide
  Antisense strand to SEQ ID NO: 1399520
ucucuacucagacgcugcc

SEQ ID NO: 1399522 - RNA, 19 nt, Artificial Sequence
  Description of Artificial Sequence: Synthetic oligonucleotide
  Sense strand starting at position 2586 of SEQ ID NO: 1243181
ugaguucucccagggagug

SEQ ID NO: 1399523 - RNA, 19 nt, Artificial Sequence
  Description of Artificial Sequence: Synthetic oligonucleotide
  Antisense strand to SEQ ID NO: 1399522
cacucccugggagaacuca

SEQ ID NO: 1399524 - RNA, 19 nt, Artificial Sequence
  Description of Artificial Sequence: Synthetic oligonucleotide
  Sense strand starting at position 2587 of SEQ ID NO: 1243181
gaguucucccagggagugu

SEQ ID NO: 1399525 - RNA, 19 nt, Artificial Sequence
  Description of Artificial Sequence: Synthetic oligonucleotide
  Antisense strand to SEQ ID NO: 1399524
acacucccugggagaacuc

SEQ ID NO: 1399526 - RNA, 19 nt, Artificial Sequence
  Description of Artificial Sequence: Synthetic oligonucleotide
  Sense strand starting at position 2612 of SEQ ID NO: 1243181
aaagguuaugcccaccaga

SEQ ID NO: 1399527 - RNA, 19 nt, Artificial Sequence
  Description of Artificial Sequence: Synthetic oligonucleotide
  Antisense strand to SEQ ID NO: 1399526
ucuggugggcauaaccuuu

SEQ ID NO: 1399528 - RNA, 19 nt, Artificial Sequence
  Description of Artificial Sequence: Synthetic oligonucleotide
  Sense strand starting at position 2677 of SEQ ID NO: 1243181
agagguguugcucagaugu

SEQ ID NO: 1399529 - RNA, 19 nt, Artificial Sequence
  Description of Artificial Sequence: Synthetic oligonucleotide
  Antisense strand to SEQ ID NO: 1399528
acaucugagcaacaccucu

SEQ ID NO: 1399530 - RNA, 19 nt, Artificial Sequence
  Description of Artificial Sequence: Synthetic oligonucleotide
  Sense strand starting at position 2703 of SEQ ID NO: 1243181
ccuguuucguuugcacaga

SEQ ID NO: 1399531 - RNA, 19 nt, Artificial Sequence
  Description of Artificial Sequence: Synthetic oligonucleotide
  Antisense strand to SEQ ID NO: 1399530
ucugugcaaacgaaacagg

SEQ ID NO: 1399532 - RNA, 19 nt, Artificial Sequence
  Description of Artificial Sequence: Synthetic oligonucleotide
  Sense strand starting at position 2890 of SEQ ID NO: 1243181
gagugagcuaccugugucu

SEQ ID NO: 1399533 - RNA, 19 nt, Artificial Sequence
  Description of Artificial Sequence: Synthetic oligonucleotide
  Antisense strand to SEQ ID NO: 1399532
agacacagguagcucacuc

SEQ ID NO: 1399534 - RNA, 19 nt, Artificial Sequence
  Description of Artificial Sequence: Synthetic oligonucleotide
  Sense strand starting at position 2892 of SEQ ID NO: 1243181
gugagcuaccugugucuuu

SEQ ID NO: 1399535 - RNA, 19 nt, Artificial Sequence
  Description of Artificial Sequence: Synthetic oligonucleotide
  Antisense strand to SEQ ID NO: 1399534
aaagacacagguagcucac

SEQ ID NO: 1399536 - RNA, 19 nt, Artificial Sequence
  Description of Artificial Sequence: Synthetic oligonucleotide
  Sense strand starting at position 2896 of SEQ ID NO: 1243181
gcuaccugugucuuugcua

SEQ ID NO: 1399537 - RNA, 19 nt, Artificial Sequence
  Description of Artificial Sequence: Synthetic oligonucleotide
  Antisense strand to SEQ ID NO: 1399536
uagcaaagacacagguagc

SEQ ID NO: 1399538 - RNA, 19 nt, Artificial Sequence
  Description of Artificial Sequence: Synthetic oligonucleotide
  Sense strand starting at position 2903 of SEQ ID NO: 1243181
gugucuuugcuaggcuaga

SEQ ID NO: 1399539 - RNA, 19 nt, Artificial Sequence
  Description of Artificial Sequence: Synthetic oligonucleotide
  Antisense strand to SEQ ID NO: 1399538
ucuagccuagcaaagacac

SEQ ID NO: 1399540 - RNA, 19 nt, Artificial Sequence
  Description of Artificial Sequence: Synthetic oligonucleotide
  Sense strand starting at position 2996 of SEQ ID NO: 1243181
caggaaugcugucuccagu

SEQ ID NO: 1399541 - RNA, 19 nt, Artificial Sequence
  Description of Artificial Sequence: Synthetic oligonucleotide
  Antisense strand to SEQ ID NO: 1399540
acuggagacagcauuccug

SEQ ID NO: 1399542 - RNA, 19 nt, Artificial Sequence
  Description of Artificial Sequence: Synthetic oligonucleotide
  Sense strand starting at position 2999 of SEQ ID NO: 1243181
gaaugcugucuccaguacu

SEQ ID NO: 1399543 - RNA, 19 nt, Artificial Sequence
  Description of Artificial Sequence: Synthetic oligonucleotide
  Antisense strand to SEQ ID NO: 1399542
aguacuggagacagcauuc

SEQ ID NO: 1399544 - RNA, 19 nt, Artificial Sequence
  Description of Artificial Sequence: Synthetic oligonucleotide
  Sense strand starting at position 3023 of SEQ ID NO: 1243181
gccgacauguccuuccuca

SEQ ID NO: 1399545 - RNA, 19 nt, Artificial Sequence
  Description of Artificial Sequence: Synthetic oligonucleotide
  Antisense strand to SEQ ID NO: 1399544
ugaggaaggacaugucggc

SEQ ID NO: 1399546 - RNA, 19 nt, Artificial Sequence
  Description of Artificial Sequence: Synthetic oligonucleotide
  Sense strand starting at position 3031 of SEQ ID NO: 1243181
guccuuccucaggagacuu

SEQ ID NO: 1399547 - RNA, 19 nt, Artificial Sequence
  Description of Artificial Sequence: Synthetic oligonucleotide
  Antisense strand to SEQ ID NO: 1399546
aagucuccugaggaaggac

SEQ ID NO: 1399548 - RNA, 19 nt, Artificial Sequence
  Description of Artificial Sequence: Synthetic oligonucleotide
  Sense strand starting at position 3039 of SEQ ID NO: 1243181
ucaggagacuucgaaaguc

SEQ ID NO: 1399549 - RNA, 19 nt, Artificial Sequence
  Description of Artificial Sequence: Synthetic oligonucleotide
  Antisense strand to SEQ ID NO: 1399548
gacuuucgaagucuccuga

SEQ ID NO: 1399550 - RNA, 19 nt, Artificial Sequence
  Description of Artificial Sequence: Synthetic oligonucleotide
  Sense strand starting at position 3079 of SEQ ID NO: 1243181
aggcacacuugaguuacua

SEQ ID NO: 1399551 - RNA, 19 nt, Artificial Sequence
  Description of Artificial Sequence: Synthetic oligonucleotide
  Antisense strand to SEQ ID NO: 1399550
uaguaacucaagugugccu

SEQ ID NO: 1399552 - RNA, 19 nt, Artificial Sequence
  Description of Artificial Sequence: Synthetic oligonucleotide
  Sense strand starting at position 3128 of SEQ ID NO: 1243181
auagaugaggccugaguau

SEQ ID NO: 1399553 - RNA, 19 nt, Artificial Sequence
  Description of Artificial Sequence: Synthetic oligonucleotide
  Antisense strand to SEQ ID NO: 1399552
auacucaggccucaucuau

SEQ ID NO: 1399554 - RNA, 19 nt, Artificial Sequence
  Description of Artificial Sequence: Synthetic oligonucleotide
  Sense strand starting at position 3137 of SEQ ID NO: 1243181
gccugaguaucaucaucuu

SEQ ID NO: 1399555 - RNA, 19 nt, Artificial Sequence
  Description of Artificial Sequence: Synthetic oligonucleotide
  Antisense strand to SEQ ID NO: 1399554
aagaugaugauacucaggc

SEQ ID NO: 1399556 - RNA, 19 nt, Artificial Sequence
  Description of Artificial Sequence: Synthetic oligonucleotide
  Sense strand starting at position 3162 of SEQ ID NO: 1243181
uaaggauauguccaggugu

SEQ ID NO: 1399557 - RNA, 19 nt, Artificial Sequence
  Description of Artificial Sequence: Synthetic oligonucleotide
  Antisense strand to SEQ ID NO: 1399556
acaccuggacauauccuua

SEQ ID NO: 1399558 - RNA, 19 nt, Artificial Sequence
  Description of Artificial Sequence: Synthetic oligonucleotide
  Sense strand starting at position 3164 of SEQ ID NO: 1243181
aggauauguccagguguua

SEQ ID NO: 1399559 - RNA, 19 nt, Artificial Sequence
  Description of Artificial Sequence: Synthetic oligonucleotide
  Antisense strand to SEQ ID NO: 1399558
uaacaccuggacauauccu

SEQ ID NO: 1399560 - RNA, 19 nt, Artificial Sequence
  Description of Artificial Sequence: Synthetic oligonucleotide
  Sense strand starting at position 3173 of SEQ ID NO: 1243181
ccagguguuacaugauaag

SEQ ID NO: 1399561 - RNA, 19 nt, Artificial Sequence
  Description of Artificial Sequence: Synthetic oligonucleotide
  Antisense strand to SEQ ID NO: 1399560
cuuaucauguaacaccugg

SEQ ID NO: 1399562 - RNA, 19 nt, Artificial Sequence
  Description of Artificial Sequence: Synthetic oligonucleotide
  Sense strand starting at position 3176 of SEQ ID NO: 1243181
gguguuacaugauaagaug

SEQ ID NO: 1399563 - RNA, 19 nt, Artificial Sequence
  Description of Artificial Sequence: Synthetic oligonucleotide
  Antisense strand to SEQ ID NO: 1399562
caucuuaucauguaacacc

SEQ ID NO: 1399564 - RNA, 19 nt, Artificial Sequence
  Description of Artificial Sequence: Synthetic oligonucleotide
  Sense strand starting at position 3179 of SEQ ID NO: 1243181
guuacaugauaagauguga

SEQ ID NO: 1399565 - RNA, 19 nt, Artificial Sequence
  Description of Artificial Sequence: Synthetic oligonucleotide
  Antisense strand to SEQ ID NO: 1399564
ucacaucuuaucauguaac

SEQ ID NO: 1399566 - RNA, 19 nt, Artificial Sequence
  Description of Artificial Sequence: Synthetic oligonucleotide
  Sense strand starting at position 3192 of SEQ ID NO: 1243181
augugaguuccugggagaa

SEQ ID NO: 1399567 - RNA, 19 nt, Artificial Sequence
  Description of Artificial Sequence: Synthetic oligonucleotide
  Antisense strand to SEQ ID NO: 1399566
uucucccaggaacucacau

SEQ ID NO: 1399568 - RNA, 19 nt, Artificial Sequence
  Description of Artificial Sequence: Synthetic oligonucleotide
  Sense strand starting at position 3194 of SEQ ID NO: 1243181
gugaguuccugggagaagu

SEQ ID NO: 1399569 - RNA, 19 nt, Artificial Sequence
  Description of Artificial Sequence: Synthetic oligonucleotide
  Antisense strand to SEQ ID NO: 1399568
acuucucccaggaacucac

SEQ ID NO: 1399570 - RNA, 19 nt, Artificial Sequence
  Description of Artificial Sequence: Synthetic oligonucleotide
  Sense strand starting at position 3515 of SEQ ID NO: 1243181
ugggcuaggucguuaucuu

SEQ ID NO: 1399571 - RNA, 19 nt, Artificial Sequence
  Description of Artificial Sequence: Synthetic oligonucleotide
  Antisense strand to SEQ ID NO: 1399570
aagauaacgaccuagccca

SEQ ID NO: 1399572 - RNA, 19 nt, Artificial Sequence
  Description of Artificial Sequence: Synthetic oligonucleotide
  Sense strand starting at position 3516 of SEQ ID NO: 1243181
gggcuaggucguuaucuuu

SEQ ID NO: 1399573 - RNA, 19 nt, Artificial Sequence
  Description of Artificial Sequence: Synthetic oligonucleotide
  Antisense strand to SEQ ID NO: 1399572
aaagauaacgaccuagccc

SEQ ID NO: 1399574 - RNA, 19 nt, Artificial Sequence
  Description of Artificial Sequence: Synthetic oligonucleotide
  Sense strand starting at position 3539 of SEQ ID NO: 1243181
uguguuugugucuuuguca

SEQ ID NO: 1399575 - RNA, 19 nt, Artificial Sequence
  Description of Artificial Sequence: Synthetic oligonucleotide
  Antisense strand to SEQ ID NO: 1399574
ugacaaagacacaaacaca

SEQ ID NO: 1399576 - RNA, 19 nt, Artificial Sequence
  Description of Artificial Sequence: Synthetic oligonucleotide
  Sense strand starting at position 3540 of SEQ ID NO: 1243181
guguuugugucuuugucac

SEQ ID NO: 1399577 - RNA, 19 nt, Artificial Sequence
  Description of Artificial Sequence: Synthetic oligonucleotide
  Antisense strand to SEQ ID NO: 1399576
gugacaaagacacaaacac

SEQ ID NO: 1399578 - RNA, 19 nt, Artificial Sequence
  Description of Artificial Sequence: Synthetic oligonucleotide
  Sense strand starting at position 3554 of SEQ ID NO: 1243181
gucacacaugccuggcauu

SEQ ID NO: 1399579 - RNA, 19 nt, Artificial Sequence
  Description of Artificial Sequence: Synthetic oligonucleotide
  Antisense strand to SEQ ID NO: 1399578
aaugccaggcaugugugac

SEQ ID NO: 1399580 - RNA, 19 nt, Artificial Sequence
  Description of Artificial Sequence: Synthetic oligonucleotide
  Sense strand starting at position 3584 of SEQ ID NO: 1243181
augaguaaaugcugaauuu

SEQ ID NO: 1399581 - RNA, 19 nt, Artificial Sequence
  Description of Artificial Sequence: Synthetic oligonucleotide
  Antisense strand to SEQ ID NO: 1399580
aaauucagcauuuacucau

SEQ ID NO: 1399582 - RNA, 19 nt, Artificial Sequence
  Description of Artificial Sequence: Synthetic oligonucleotide
  Sense strand starting at position 3965 of SEQ ID NO: 1243181
aauugugcaguuugaaauu

SEQ ID NO: 1399583 - RNA, 19 nt, Artificial Sequence
  Description of Artificial Sequence: Synthetic oligonucleotide
  Antisense strand to SEQ ID NO: 1399582
aauuucaaacugcacaauu

SEQ ID NO: 1399584 - RNA, 19 nt, Artificial Sequence
  Description of Artificial Sequence: Synthetic oligonucleotide
  Sense strand starting at position 63 of SEQ ID NO: 1243182
agucacagucuggguagaa

SEQ ID NO: 1399585 - RNA, 19 nt, Artificial Sequence
  Description of Artificial Sequence: Synthetic oligonucleotide
  Antisense strand to SEQ ID NO: 1399584
uucuacccagacugugacu

SEQ ID NO: 1399586 - RNA, 19 nt, Artificial Sequence
  Description of Artificial Sequence: Synthetic oligonucleotide
  Sense strand starting at position 246 of SEQ ID NO: 1243182
gggagaauggccugcgaug

SEQ ID NO: 1399587 - RNA, 19 nt, Artificial Sequence
  Description of Artificial Sequence: Synthetic oligonucleotide
  Antisense strand to SEQ ID NO: 1399586
caucgcaggccauucuccc

SEQ ID NO: 1399588 - RNA, 19 nt, Artificial Sequence
  Description of Artificial Sequence: Synthetic oligonucleotide
  Sense strand starting at position 2656 of SEQ ID NO: 1243182
agcagcaucuacucgagua

SEQ ID NO: 1399589 - RNA, 19 nt, Artificial Sequence
  Description of Artificial Sequence: Synthetic oligonucleotide
  Antisense strand to SEQ ID NO: 1399588
uacucgaguagaugcugcu

SEQ ID NO: 1399590 - RNA, 19 nt, Artificial Sequence
  Description of Artificial Sequence: Synthetic oligonucleotide
  Sense strand starting at position 2658 of SEQ ID NO: 1243182
cagcaucuacucgaguaga

SEQ ID NO: 1399591 - RNA, 19 nt, Artificial Sequence
  Description of Artificial Sequence: Synthetic oligonucleotide
  Antisense strand to SEQ ID NO: 1399590
ucuacucgaguagaugcug

SEQ ID NO: 1399592 - RNA, 19 nt, Artificial Sequence
  Description of Artificial Sequence: Synthetic oligonucleotide
  Sense strand starting at position 2683 of SEQ ID NO: 1243182
ccaggauucggucaggucu

SEQ ID NO: 1399593 - RNA, 19 nt, Artificial Sequence
  Description of Artificial Sequence: Synthetic oligonucleotide
  Antisense strand to SEQ ID NO: 1399592
agaccugaccgaauccugg

SEQ ID NO: 1399594 - RNA, 19 nt, Artificial Sequence
  Description of Artificial Sequence: Synthetic oligonucleotide
  Sense strand starting at position 2685 of SEQ ID NO: 1243182
aggauucggucaggucuaa

SEQ ID NO: 1399595 - RNA, 19 nt, Artificial Sequence
  Description of Artificial Sequence: Synthetic oligonucleotide
  Antisense strand to SEQ ID NO: 1399594
uuagaccugaccgaauccu

SEQ ID NO: 1399596 - RNA, 19 nt, Artificial Sequence
  Description of Artificial Sequence: Synthetic oligonucleotide
  Sense strand starting at position 2760 of SEQ ID NO: 1243182
cugccagaugccuguuacu

SEQ ID NO: 1399597 - RNA, 19 nt, Artificial Sequence
  Description of Artificial Sequence: Synthetic oligonucleotide
  Antisense strand to SEQ ID NO: 1399596
aguaacaggcaucuggcag

SEQ ID NO: 1399598 - RNA, 19 nt, Artificial Sequence
  Description of Artificial Sequence: Synthetic oligonucleotide
  Sense strand starting at position 2788 of SEQ ID NO: 1243182
cucugaagcuguuggauuu

SEQ ID NO: 1399599 - RNA, 19 nt, Artificial Sequence
  Description of Artificial Sequence: Synthetic oligonucleotide
  Antisense strand to SEQ ID NO: 1399598
aaauccaacagcuucagag

SEQ ID NO: 1399600 - RNA, 19 nt, Artificial Sequence
  Description of Artificial Sequence: Synthetic oligonucleotide
  Sense strand starting at position 2834 of SEQ ID NO: 1243182
agucgagagcugcacaaau

SEQ ID NO: 1399601 - RNA, 19 nt, Artificial Sequence
  Description of Artificial Sequence: Synthetic oligonucleotide
  Antisense strand to SEQ ID NO: 1399600
auuugugcagcucucgacu

SEQ ID NO: 1399602 - RNA, 19 nt, Artificial Sequence
  Description of Artificial Sequence: Synthetic oligonucleotide
  Sense strand starting at position 2853 of SEQ ID NO: 1243182
uggagugucuccugcccau

SEQ ID NO: 1399603 - RNA, 19 nt, Artificial Sequence
  Description of Artificial Sequence: Synthetic oligonucleotide
  Antisense strand to SEQ ID NO: 1399602
augggcaggagacacucca

SEQ ID NO: 1399604 - RNA, 19 nt, Artificial Sequence
  Description of Artificial Sequence: Synthetic oligonucleotide
  Sense strand starting at position 2942 of SEQ ID NO: 1243182
gccagauucugaucccaaa

SEQ ID NO: 1399605 - RNA, 19 nt, Artificial Sequence
  Description of Artificial Sequence: Synthetic oligonucleotide
  Antisense strand to SEQ ID NO: 1399604
uuugggaucagaaucuggc

SEQ ID NO: 1399606 - RNA, 19 nt, Artificial Sequence
  Description of Artificial Sequence: Synthetic oligonucleotide
  Sense strand starting at position 2945 of SEQ ID NO: 1243182
agauucugaucccaaagcu

SEQ ID NO: 1399607 - RNA, 19 nt, Artificial Sequence
  Description of Artificial Sequence: Synthetic oligonucleotide
  Antisense strand to SEQ ID NO: 1399606
agcuuugggaucagaaucu

SEQ ID NO: 1399608 - RNA, 19 nt, Artificial Sequence
  Description of Artificial Sequence: Synthetic oligonucleotide
  Sense strand starting at position 3110 of SEQ ID NO: 1243182
aggguuuaaucaugggaag

SEQ ID NO: 1399609 - RNA, 19 nt, Artificial Sequence
  Description of Artificial Sequence: Synthetic oligonucleotide
  Antisense strand to SEQ ID NO: 1399608
cuucccaugauuaaacccu

SEQ ID NO: 1399610 - RNA, 19 nt, Artificial Sequence
  Description of Artificial Sequence: Synthetic oligonucleotide
  Sense strand starting at position 3273 of SEQ ID NO: 1243182
aggaacagcucuggucaga

SEQ ID NO: 1399611 - RNA, 19 nt, Artificial Sequence
  Description of Artificial Sequence: Synthetic oligonucleotide
  Antisense strand to SEQ ID NO: 1399610
ucugaccagagcuguuccu

SEQ ID NO: 1399612 - RNA, 19 nt, Artificial Sequence
  Description of Artificial Sequence: Synthetic oligonucleotide
  Sense strand starting at position 3278 of SEQ ID NO: 1243182
cagcucuggucagagaaac

SEQ ID NO: 1399613 - RNA, 19 nt, Artificial Sequence
  Description of Artificial Sequence: Synthetic oligonucleotide
  Antisense strand to SEQ ID NO: 1399612
guuucucugaccagagcug

SEQ ID NO: 1399614 - RNA, 19 nt, Artificial Sequence
  Description of Artificial Sequence: Synthetic oligonucleotide
  Sense strand starting at position 3706 of SEQ ID NO: 1243182
gcaugugacagccacagau

SEQ ID NO: 1399615 - RNA, 19 nt, Artificial Sequence
  Description of Artificial Sequence: Synthetic oligonucleotide
  Antisense strand to SEQ ID NO: 1399614
aucuguggcugucacaugc

SEQ ID NO: 1399616 - RNA, 19 nt, Artificial Sequence
  Description of Artificial Sequence: Synthetic oligonucleotide
  Sense strand starting at position 3801 of SEQ ID NO: 1243182
ucagcuuccugauaaagag

SEQ ID NO: 1399617 - RNA, 19 nt, Artificial Sequence
  Description of Artificial Sequence: Synthetic oligonucleotide
  Antisense strand to SEQ ID NO: 1399616
cucuuuaucaggaagcuga

SEQ ID NO: 1399618 - RNA, 19 nt, Artificial Sequence
  Description of Artificial Sequence: Synthetic oligonucleotide
  Sense strand starting at position 3822 of SEQ ID NO: 1243182
ugggaauuguguccuuuac

SEQ ID NO: 1399619 - RNA, 19 nt, Artificial Sequence
  Description of Artificial Sequence: Synthetic oligonucleotide
  Antisense strand to SEQ ID NO: 1399618
guaaaggacacaauuccca

SEQ ID NO: 1399620 - RNA, 19 nt, Artificial Sequence
  Description of Artificial Sequence: Synthetic oligonucleotide
  Sense strand starting at position 3824 of SEQ ID NO: 1243182
ggaauuguguccuuuacaa

SEQ ID NO: 1399621 - RNA, 19 nt, Artificial Sequence
  Description of Artificial Sequence: Synthetic oligonucleotide
  Antisense strand to SEQ ID NO: 1399620
uuguaaaggacacaauucc

SEQ ID NO: 1399622 - RNA, 19 nt, Artificial Sequence
  Description of Artificial Sequence: Synthetic oligonucleotide
  Sense strand starting at position 39 of SEQ ID NO: 1243183
uucugaauaguguagauau

SEQ ID NO: 1399623 - RNA, 19 nt, Artificial Sequence
  Description of Artificial Sequence: Synthetic oligonucleotide
  Antisense strand to SEQ ID NO: 1399622
auaucuacacuauucagaa

SEQ ID NO: 1399624 - RNA, 19 nt, Artificial Sequence
  Description of Artificial Sequence: Synthetic oligonucleotide
  Sense strand starting at position 51 of SEQ ID NO: 1243183
uagauauacugggcacgaa

SEQ ID NO: 1399625 - RNA, 19 nt, Artificial Sequence
  Description of Artificial Sequence: Synthetic oligonucleotide
  Antisense strand to SEQ ID NO: 1399624
uucgugcccaguauaucua

SEQ ID NO: 1399626 - RNA, 19 nt, Artificial Sequence
  Description of Artificial Sequence: Synthetic oligonucleotide
  Sense strand starting at position 54 of SEQ ID NO: 1243183
auauacugggcacgaauua

SEQ ID NO: 1399627 - RNA, 19 nt, Artificial Sequence
  Description of Artificial Sequence: Synthetic oligonucleotide
  Antisense strand to SEQ ID NO: 1399626
uaauucgugcccaguauau

SEQ ID NO: 1399628 - RNA, 19 nt, Artificial Sequence
  Description of Artificial Sequence: Synthetic oligonucleotide
  Sense strand starting at position 55 of SEQ ID NO: 1243183
uauacugggcacgaauuaa

SEQ ID NO: 1399629 - RNA, 19 nt, Artificial Sequence
  Description of Artificial Sequence: Synthetic oligonucleotide
  Antisense strand to SEQ ID NO: 1399628
uuaauucgugcccaguaua

SEQ ID NO: 1399630 - RNA, 19 nt, Artificial Sequence
  Description of Artificial Sequence: Synthetic oligonucleotide
  Sense strand starting at position 196 of SEQ ID NO: 1243183
acagauguuucugucacuu

SEQ ID NO: 1399631 - RNA, 19 nt, Artificial Sequence
  Description of Artificial Sequence: Synthetic oligonucleotide
  Antisense strand to SEQ ID NO: 1399630
aagugacagaaacaucugu

SEQ ID NO: 1399632 - RNA, 19 nt, Artificial Sequence
  Description of Artificial Sequence: Synthetic oligonucleotide
  Sense strand starting at position 279 of SEQ ID NO: 1243183
ucuccauugcauugacaga

SEQ ID NO: 1399633 - RNA, 19 nt, Artificial Sequence
  Description of Artificial Sequence: Synthetic oligonucleotide
  Antisense strand to SEQ ID NO: 1399632
ucugucaaugcaauggaga

SEQ ID NO: 1399634 - RNA, 19 nt, Artificial Sequence
  Description of Artificial Sequence: Synthetic oligonucleotide
  Sense strand starting at position 931 of SEQ ID NO: 1243183
gaaccugagaggugaaagu

SEQ ID NO: 1399635 - RNA, 19 nt, Artificial Sequence
  Description of Artificial Sequence: Synthetic oligonucleotide
  Antisense strand to SEQ ID NO: 1399634
acuuucaccucucagguuc

SEQ ID NO: 1399636 - RNA, 19 nt, Artificial Sequence
  Description of Artificial Sequence: Synthetic oligonucleotide
  Sense strand starting at position 1395 of SEQ ID NO: 1243183
cuguuauugucacucaaac

SEQ ID NO: 1399637 - RNA, 19 nt, Artificial Sequence
  Description of Artificial Sequence: Synthetic oligonucleotide
  Antisense strand to SEQ ID NO: 1399636
guuugagugacaauaacag

SEQ ID NO: 1399638 - RNA, 19 nt, Artificial Sequence
  Description of Artificial Sequence: Synthetic oligonucleotide
  Sense strand starting at position 1625 of SEQ ID NO: 1243183
gucagucauucugcagauc

SEQ ID NO: 1399639 - RNA, 19 nt, Artificial Sequence
  Description of Artificial Sequence: Synthetic oligonucleotide
  Antisense strand to SEQ ID NO: 1399638
gaucugcagaaugacugac

SEQ ID NO: 1399640 - RNA, 19 nt, Artificial Sequence
  Description of Artificial Sequence: Synthetic oligonucleotide
  Sense strand starting at position 2116 of SEQ ID NO: 1243183
ugcagugcaucuccuaaga

SEQ ID NO: 1399641 - RNA, 19 nt, Artificial Sequence
  Description of Artificial Sequence: Synthetic oligonucleotide
  Antisense strand to SEQ ID NO: 1399640
ucuuaggagaugcacugca

SEQ ID NO: 1399642 - RNA, 19 nt, Artificial Sequence
  Description of Artificial Sequence: Synthetic oligonucleotide
  Sense strand starting at position 2148 of SEQ ID NO: 1243183
ucaugacaucagugccauu

SEQ ID NO: 1399643 - RNA, 19 nt, Artificial Sequence
  Description of Artificial Sequence: Synthetic oligonucleotide
  Antisense strand to SEQ ID NO: 1399642
aauggcacugaugucauga

SEQ ID NO: 1399644 - RNA, 19 nt, Artificial Sequence
  Description of Artificial Sequence: Synthetic oligonucleotide
  Sense strand starting at position 2196 of SEQ ID NO: 1243183
aguacuagccaaugcagua

SEQ ID NO: 1399645 - RNA, 19 nt, Artificial Sequence
  Description of Artificial Sequence: Synthetic oligonucleotide
  Antisense strand to SEQ ID NO: 1399644
uacugcauuggcuaguacu

SEQ ID NO: 1399646 - RNA, 19 nt, Artificial Sequence
  Description of Artificial Sequence: Synthetic oligonucleotide
  Sense strand starting at position 2275 of SEQ ID NO: 1243183
cacucacugccuggaguua

SEQ ID NO: 1399647 - RNA, 19 nt, Artificial Sequence
  Description of Artificial Sequence: Synthetic oligonucleotide
  Antisense strand to SEQ ID NO: 1399646
uaacuccaggcagugagug

SEQ ID NO: 1399648 - RNA, 19 nt, Artificial Sequence
  Description of Artificial Sequence: Synthetic oligonucleotide
  Sense strand starting at position 2276 of SEQ ID NO: 1243183
acucacugccuggaguuau

SEQ ID NO: 1399649 - RNA, 19 nt, Artificial Sequence
  Description of Artificial Sequence: Synthetic oligonucleotide
  Antisense strand to SEQ ID NO: 1399648
auaacuccaggcagugagu

SEQ ID NO: 1399650 - RNA, 19 nt, Artificial Sequence
  Description of Artificial Sequence: Synthetic oligonucleotide
  Sense strand starting at position 2287 of SEQ ID NO: 1243183
ggaguuauuucucuucggu

SEQ ID NO: 1399651 - RNA, 19 nt, Artificial Sequence
  Description of Artificial Sequence: Synthetic oligonucleotide
  Antisense strand to SEQ ID NO: 1399650
accgaagagaaauaacucc

SEQ ID NO: 1399652 - RNA, 19 nt, Artificial Sequence
  Description of Artificial Sequence: Synthetic oligonucleotide
  Sense strand starting at position 2289 of SEQ ID NO: 1243183
aguuauuucucuucggucu

SEQ ID NO: 1399653 - RNA, 19 nt, Artificial Sequence
  Description of Artificial Sequence: Synthetic oligonucleotide
  Antisense strand to SEQ ID NO: 1399652
agaccgaagagaaauaacu

SEQ ID NO: 1399654 - RNA, 19 nt, Artificial Sequence
  Description of Artificial Sequence: Synthetic oligonucleotide
  Sense strand starting at position 2376 of SEQ ID NO: 1243183
agaccaguuguguaauaga

SEQ ID NO: 1399655 - RNA, 19 nt, Artificial Sequence
  Description of Artificial Sequence: Synthetic oligonucleotide
  Antisense strand to SEQ ID NO: 1399654
ucuauuacacaacuggucu

SEQ ID NO: 1399656 - RNA, 19 nt, Artificial Sequence
  Description of Artificial Sequence: Synthetic oligonucleotide
  Sense strand starting at position 2434 of SEQ ID NO: 1243183
cuugccuuguaauuagaua

SEQ ID NO: 1399657 - RNA, 19 nt, Artificial Sequence
  Description of Artificial Sequence: Synthetic oligonucleotide
  Antisense strand to SEQ ID NO: 1399656
uaucuaauuacaaggcaag

SEQ ID NO: 1399658 - RNA, 19 nt, Artificial Sequence
  Description of Artificial Sequence: Synthetic oligonucleotide
  Sense strand starting at position 2488 of SEQ ID NO: 1243183
uggauaaugucaguuuguc

SEQ ID NO: 1399659 - RNA, 19 nt, Artificial Sequence
  Description of Artificial Sequence: Synthetic oligonucleotide
  Antisense strand to SEQ ID NO: 1399658
gacaaacugacauuaucca

SEQ ID NO: 1399660 - RNA, 19 nt, Artificial Sequence
  Description of Artificial Sequence: Synthetic oligonucleotide
  Sense strand starting at position 2611 of SEQ ID NO: 1243183
gggaccaucuucuucucua

SEQ ID NO: 1399661 - RNA, 19 nt, Artificial Sequence
  Description of Artificial Sequence: Synthetic oligonucleotide
  Antisense strand to SEQ ID NO: 1399660
uagagaagaagaugguccc

SEQ ID NO: 1399662 - RNA, 19 nt, Artificial Sequence
  Description of Artificial Sequence: Synthetic oligonucleotide
  Sense strand starting at position 2752 of SEQ ID NO: 1243183
cacuauggauuccuggauu

SEQ ID NO: 1399663 - RNA, 19 nt, Artificial Sequence
  Description of Artificial Sequence: Synthetic oligonucleotide
  Antisense strand to SEQ ID NO: 1399662
aauccaggaauccauagug

SEQ ID NO: 1399664 - RNA, 19 nt, Artificial Sequence
  Description of Artificial Sequence: Synthetic oligonucleotide
  Sense strand starting at position 2800 of SEQ ID NO: 1243183
uauucuuucuggucgauuu

SEQ ID NO: 1399665 - RNA, 19 nt, Artificial Sequence
  Description of Artificial Sequence: Synthetic oligonucleotide
  Antisense strand to SEQ ID NO: 1399664
aaaucgaccagaaagaaua

SEQ ID NO: 1399666 - RNA, 19 nt, Artificial Sequence
  Description of Artificial Sequence: Synthetic oligonucleotide
  Sense strand starting at position 2826 of SEQ ID NO: 1243183
cccagauguggccagugaa

SEQ ID NO: 1399667 - RNA, 19 nt, Artificial Sequence
  Description of Artificial Sequence: Synthetic oligonucleotide
  Antisense strand to SEQ ID NO: 1399666
uucacuggccacaucuggg

SEQ ID NO: 1399668 - RNA, 19 nt, Artificial Sequence
  Description of Artificial Sequence: Synthetic oligonucleotide
  Sense strand starting at position 2851 of SEQ ID NO: 1243183
ucaagacaguucuuauguu

SEQ ID NO: 1399669 - RNA, 19 nt, Artificial Sequence
  Description of Artificial Sequence: Synthetic oligonucleotide
  Antisense strand to SEQ ID NO: 1399668
aacauaagaacugucuuga

SEQ ID NO: 1399670 - RNA, 19 nt, Artificial Sequence
  Description of Artificial Sequence: Synthetic oligonucleotide
  Sense strand starting at position 2860 of SEQ ID NO: 1243183
uucuuauguucuuugggca

SEQ ID NO: 1399671 - RNA, 19 nt, Artificial Sequence
  Description of Artificial Sequence: Synthetic oligonucleotide
  Antisense strand to SEQ ID NO: 1399670
ugcccaaagaacauaagaa

SEQ ID NO: 1399672 - RNA, 19 nt, Artificial Sequence
  Description of Artificial Sequence: Synthetic oligonucleotide
  Sense strand starting at position 2864 of SEQ ID NO: 1243183
uauguucuuugggcacuaa

SEQ ID NO: 1399673 - RNA, 19 nt, Artificial Sequence
  Description of Artificial Sequence: Synthetic oligonucleotide
  Antisense strand to SEQ ID NO: 1399672
uuagugcccaaagaacaua

SEQ ID NO: 1399674 - RNA, 19 nt, Artificial Sequence
  Description of Artificial Sequence: Synthetic oligonucleotide
  Sense strand starting at position 2865 of SEQ ID NO: 1243183
auguucuuugggcacuaau

SEQ ID NO: 1399675 - RNA, 19 nt, Artificial Sequence
  Description of Artificial Sequence: Synthetic oligonucleotide
  Antisense strand to SEQ ID NO: 1399674
auuagugcccaaagaacau

SEQ ID NO: 1399676 - RNA, 19 nt, Artificial Sequence
  Description of Artificial Sequence: Synthetic oligonucleotide
  Sense strand starting at position 2962 of SEQ ID NO: 1243183
cagggagccuugguuacuu

SEQ ID NO: 1399677 - RNA, 19 nt, Artificial Sequence
  Description of Artificial Sequence: Synthetic oligonucleotide
  Antisense strand to SEQ ID NO: 1399676
aaguaaccaaggcucccug

SEQ ID NO: 1399678 - RNA, 19 nt, Artificial Sequence
  Description of Artificial Sequence: Synthetic oligonucleotide
  Sense strand starting at position 3004 of SEQ ID NO: 1243183
ccaagauguggaugccaca

SEQ ID NO: 1399679 - RNA, 19 nt, Artificial Sequence
  Description of Artificial Sequence: Synthetic oligonucleotide
  Antisense strand to SEQ ID NO: 1399678
uguggcauccacaucuugg

SEQ ID NO: 1399680 - RNA, 19 nt, Artificial Sequence
  Description of Artificial Sequence: Synthetic oligonucleotide
  Sense strand starting at position 3036 of SEQ ID NO: 1243183
acuggagugucauugcuca

SEQ ID NO: 1399681 - RNA, 19 nt, Artificial Sequence
  Description of Artificial Sequence: Synthetic oligonucleotide
  Antisense strand to SEQ ID NO: 1399680
ugagcaaugacacuccagu

SEQ ID NO: 1399682 - RNA, 19 nt, Artificial Sequence
  Description of Artificial Sequence: Synthetic oligonucleotide
  Sense strand starting at position 3056 of SEQ ID NO: 1243183
agguuuggcaccuggaaua

SEQ ID NO: 1399683 - RNA, 19 nt, Artificial Sequence
  Description of Artificial Sequence: Synthetic oligonucleotide
  Antisense strand to SEQ ID NO: 1399682
uauuccaggugccaaaccu

SEQ ID NO: 1399684 - RNA, 19 nt, Artificial Sequence
  Description of Artificial Sequence: Synthetic oligonucleotide
  Sense strand starting at position 3113 of SEQ ID NO: 1243183
agaauauggaaacguuuau

SEQ ID NO: 1399685 - RNA, 19 nt, Artificial Sequence
  Description of Artificial Sequence: Synthetic oligonucleotide
  Antisense strand to SEQ ID NO: 1399684
auaaacguuuccauauucu

SEQ ID NO: 1399686 - RNA, 19 nt, Artificial Sequence
  Description of Artificial Sequence: Synthetic oligonucleotide
  Sense strand starting at position 3491 of SEQ ID NO: 1243183
guagaauacuuaccguuug

SEQ ID NO: 1399687 - RNA, 19 nt, Artificial Sequence
  Description of Artificial Sequence: Synthetic oligonucleotide
  Antisense strand to SEQ ID NO: 1399686
caaacgguaaguauucuac

SEQ ID NO: 1399688 - RNA, 19 nt, Artificial Sequence
  Description of Artificial Sequence: Synthetic oligonucleotide
  Sense strand starting at position 3652 of SEQ ID NO: 1243183
gggugauaaacuuggucug

SEQ ID NO: 1399689 - RNA, 19 nt, Artificial Sequence
  Description of Artificial Sequence: Synthetic oligonucleotide
  Antisense strand to SEQ ID NO: 1399688
cagaccaaguuuaucaccc

SEQ ID NO: 1399690 - RNA, 19 nt, Artificial Sequence
  Description of Artificial Sequence: Synthetic oligonucleotide
  Sense strand starting at position 3653 of SEQ ID NO: 1243183
ggugauaaacuuggucugu

SEQ ID NO: 1399691 - RNA, 19 nt, Artificial Sequence
  Description of Artificial Sequence: Synthetic oligonucleotide
  Antisense strand to SEQ ID NO: 1399690
acagaccaaguuuaucacc

SEQ ID NO: 1399692 - RNA, 19 nt, Artificial Sequence
  Description of Artificial Sequence: Synthetic oligonucleotide
  Sense strand starting at position 3655 of SEQ ID NO: 1243183
ugauaaacuuggucugucu

SEQ ID NO: 1399693 - RNA, 19 nt, Artificial Sequence
  Description of Artificial Sequence: Synthetic oligonucleotide
  Antisense strand to SEQ ID NO: 1399692
agacagaccaaguuuauca

SEQ ID NO: 1399694 - RNA, 19 nt, Artificial Sequence
  Description of Artificial Sequence: Synthetic oligonucleotide
  Sense strand starting at position 3768 of SEQ ID NO: 1243183
cacagucuggucgggagaa

SEQ ID NO: 1399695 - RNA, 19 nt, Artificial Sequence
  Description of Artificial Sequence: Synthetic oligonucleotide
  Antisense strand to SEQ ID NO: 1399694
uucucccgaccagacugug

SEQ ID NO: 1399696 - RNA, 19 nt, Artificial Sequence
  Description of Artificial Sequence: Synthetic oligonucleotide
  Sense strand starting at position 3770 of SEQ ID NO: 1243183
cagucuggucgggagaaga

SEQ ID NO: 1399697 - RNA, 19 nt, Artificial Sequence
  Description of Artificial Sequence: Synthetic oligonucleotide
  Antisense strand to SEQ ID NO: 1399696
ucuucucccgaccagacug

SEQ ID NO: 1399698 - RNA, 19 nt, Artificial Sequence
  Description of Artificial Sequence: Synthetic oligonucleotide
  Sense strand starting at position 3879 of SEQ ID NO: 1243183
gugauaagauggcugcaaa

SEQ ID NO: 1399699 - RNA, 19 nt, Artificial Sequence
  Description of Artificial Sequence: Synthetic oligonucleotide
  Antisense strand to SEQ ID NO: 1399698
uuugcagccaucuuaucac

SEQ ID NO: 1399700 - RNA, 19 nt, Artificial Sequence
  Description of Artificial Sequence: Synthetic oligonucleotide
  Sense strand starting at position 3880 of SEQ ID NO: 1243183
ugauaagauggcugcaaag

SEQ ID NO: 1399701 - RNA, 19 nt, Artificial Sequence
  Description of Artificial Sequence: Synthetic oligonucleotide
  Antisense strand to SEQ ID NO: 1399700
cuuugcagccaucuuauca

SEQ ID NO: 1399702 - RNA, 19 nt, Artificial Sequence
  Description of Artificial Sequence: Synthetic oligonucleotide
  Sense strand starting at position 51 of SEQ ID NO: 1243184
cguagagacuguuucucua

SEQ ID NO: 1399703 - RNA, 19 nt, Artificial Sequence
  Description of Artificial Sequence: Synthetic oligonucleotide
  Antisense strand to SEQ ID NO: 1399702
uagagaaacagucucuacg

SEQ ID NO: 1399704 - RNA, 19 nt, Artificial Sequence
  Description of Artificial Sequence: Synthetic oligonucleotide
  Sense strand starting at position 53 of SEQ ID NO: 1243184
uagagacuguuucucuaug

SEQ ID NO: 1399705 - RNA, 19 nt, Artificial Sequence
  Description of Artificial Sequence: Synthetic oligonucleotide
  Antisense strand to SEQ ID NO: 1399704
cauagagaaacagucucua

SEQ ID NO: 1399706 - RNA, 19 nt, Artificial Sequence
  Description of Artificial Sequence: Synthetic oligonucleotide
  Sense strand starting at position 54 of SEQ ID NO: 1243184
agagacuguuucucuaugu

SEQ ID NO: 1399707 - RNA, 19 nt, Artificial Sequence
  Description of Artificial Sequence: Synthetic oligonucleotide
  Antisense strand to SEQ ID NO: 1399706
acauagagaaacagucucu

SEQ ID NO: 1399708 - RNA, 19 nt, Artificial Sequence
  Description of Artificial Sequence: Synthetic oligonucleotide
  Sense strand starting at position 55 of SEQ ID NO: 1243184
gagacuguuucucuauguu

SEQ ID NO: 1399709 - RNA, 19 nt, Artificial Sequence
  Description of Artificial Sequence: Synthetic oligonucleotide
  Antisense strand to SEQ ID NO: 1399708
aacauagagaaacagucuc

SEQ ID NO: 1399710 - RNA, 19 nt, Artificial Sequence
  Description of Artificial Sequence: Synthetic oligonucleotide
  Sense strand starting at position 442 of SEQ ID NO: 1243184
ugcagugagccgucaucga

SEQ ID NO: 1399711 - RNA, 19 nt, Artificial Sequence
  Description of Artificial Sequence: Synthetic oligonucleotide
  Antisense strand to SEQ ID NO: 1399710
ucgaugacggcucacugca

SEQ ID NO: 1399712 - RNA, 19 nt, Artificial Sequence
  Description of Artificial Sequence: Synthetic oligonucleotide
  Sense strand starting at position 446 of SEQ ID NO: 1243184
gugagccgucaucgagauu

SEQ ID NO: 1399713 - RNA, 19 nt, Artificial Sequence
  Description of Artificial Sequence: Synthetic oligonucleotide
  Antisense strand to SEQ ID NO: 1399712
aaucucgaugacggcucac

SEQ ID NO: 1399714 - RNA, 19 nt, Artificial Sequence
  Description of Artificial Sequence: Synthetic oligonucleotide
  Sense strand starting at position 589 of SEQ ID NO: 1243184
gaaggaucauuucggucca

SEQ ID NO: 1399715 - RNA, 19 nt, Artificial Sequence
  Description of Artificial Sequence: Synthetic oligonucleotide
  Antisense strand to SEQ ID NO: 1399714
uggaccgaaaugauccuuc

SEQ ID NO: 1399716 - RNA, 19 nt, Artificial Sequence
  Description of Artificial Sequence: Synthetic oligonucleotide
  Sense strand starting at position 608 of SEQ ID NO: 1243184
ggaggaguuccgcaccacu

SEQ ID NO: 1399717 - RNA, 19 nt, Artificial Sequence
  Description of Artificial Sequence: Synthetic oligonucleotide
  Antisense strand to SEQ ID NO: 1399716
aguggugcggaacuccucc

SEQ ID NO: 1399718 - RNA, 19 nt, Artificial Sequence
  Description of Artificial Sequence: Synthetic oligonucleotide
  Sense strand starting at position 785 of SEQ ID NO: 1243184
cagccuuggcgacaguuaa

SEQ ID NO: 1399719 - RNA, 19 nt, Artificial Sequence
  Description of Artificial Sequence: Synthetic oligonucleotide
  Antisense strand to SEQ ID NO: 1399718
uuaacugucgccaaggcug

SEQ ID NO: 1399720 - RNA, 19 nt, Artificial Sequence
  Description of Artificial Sequence: Synthetic oligonucleotide
  Sense strand starting at position 845 of SEQ ID NO: 1243184
guaauauccuuacuuugua

SEQ ID NO: 1399721 - RNA, 19 nt, Artificial Sequence
  Description of Artificial Sequence: Synthetic oligonucleotide
  Antisense strand to SEQ ID NO: 1399720
uacaaaguaaggauauuac

SEQ ID NO: 1399722 - RNA, 19 nt, Artificial Sequence
  Description of Artificial Sequence: Synthetic oligonucleotide
  Sense strand starting at position 848 of SEQ ID NO: 1243184
auauccuuacuuuguagua

SEQ ID NO: 1399723 - RNA, 19 nt, Artificial Sequence
  Description of Artificial Sequence: Synthetic oligonucleotide
  Antisense strand to SEQ ID NO: 1399722
uacuacaaaguaaggauau

SEQ ID NO: 1399724 - RNA, 19 nt, Artificial Sequence
  Description of Artificial Sequence: Synthetic oligonucleotide
  Sense strand starting at position 850 of SEQ ID NO: 1243184
auccuuacuuuguaguaaa

SEQ ID NO: 1399725 - RNA, 19 nt, Artificial Sequence
  Description of Artificial Sequence: Synthetic oligonucleotide
  Antisense strand to SEQ ID NO: 1399724
uuuacuacaaaguaaggau

SEQ ID NO: 1399726 - RNA, 19 nt, Artificial Sequence
  Description of Artificial Sequence: Synthetic oligonucleotide
  Sense strand starting at position 1233 of SEQ ID NO: 1243184
cucgguuucuaaucuguca

SEQ ID NO: 1399727 - RNA, 19 nt, Artificial Sequence
  Description of Artificial Sequence: Synthetic oligonucleotide
  Antisense strand to SEQ ID NO: 1399726
ugacagauuagaaaccgag

SEQ ID NO: 1399728 - RNA, 19 nt, Artificial Sequence
  Description of Artificial Sequence: Synthetic oligonucleotide
  Sense strand starting at position 1235 of SEQ ID NO: 1243184
cgguuucuaaucugucaga

SEQ ID NO: 1399729 - RNA, 19 nt, Artificial Sequence
  Description of Artificial Sequence: Synthetic oligonucleotide
  Antisense strand to SEQ ID NO: 1399728
ucugacagauuagaaaccg

SEQ ID NO: 1399730 - RNA, 19 nt, Artificial Sequence
  Description of Artificial Sequence: Synthetic oligonucleotide
  Sense strand starting at position 1236 of SEQ ID NO: 1243184
gguuucuaaucugucagag

SEQ ID NO: 1399731 - RNA, 19 nt, Artificial Sequence
  Description of Artificial Sequence: Synthetic oligonucleotide
  Antisense strand to SEQ ID NO: 1399730
cucugacagauuagaaacc

SEQ ID NO: 1399732 - RNA, 19 nt, Artificial Sequence
  Description of Artificial Sequence: Synthetic oligonucleotide
  Sense strand starting at position 1266 of SEQ ID NO: 1243184
gaccuugcuguccgaggaa

SEQ ID NO: 1399733 - RNA, 19 nt, Artificial Sequence
  Description of Artificial Sequence: Synthetic oligonucleotide
  Antisense strand to SEQ ID NO: 1399732
uuccucggacagcaagguc

SEQ ID NO: 1399734 - RNA, 19 nt, Artificial Sequence
  Description of Artificial Sequence: Synthetic oligonucleotide
  Sense strand starting at position 1269 of SEQ ID NO: 1243184
cuugcuguccgaggaaugu

SEQ ID NO: 1399735 - RNA, 19 nt, Artificial Sequence
  Description of Artificial Sequence: Synthetic oligonucleotide
  Antisense strand to SEQ ID NO: 1399734
acauuccucggacagcaag

SEQ ID NO: 1399736 - RNA, 19 nt, Artificial Sequence
  Description of Artificial Sequence: Synthetic oligonucleotide
  Sense strand starting at position 1308 of SEQ ID NO: 1243184
cgaggucucuuagaagaua

SEQ ID NO: 1399737 - RNA, 19 nt, Artificial Sequence
  Description of Artificial Sequence: Synthetic oligonucleotide
  Antisense strand to SEQ ID NO: 1399736
uaucuucuaagagaccucg

SEQ ID NO: 1399738 - RNA, 19 nt, Artificial Sequence
  Description of Artificial Sequence: Synthetic oligonucleotide
  Sense strand starting at position 1393 of SEQ ID NO: 1243184
gugaauucugucccgcgca

SEQ ID NO: 1399739 - RNA, 19 nt, Artificial Sequence
  Description of Artificial Sequence: Synthetic oligonucleotide
  Antisense strand to SEQ ID NO: 1399738
ugcgcgggacagaauucac

SEQ ID NO: 1399740 - RNA, 19 nt, Artificial Sequence
  Description of Artificial Sequence: Synthetic oligonucleotide
  Sense strand starting at position 1437 of SEQ ID NO: 1243184
gcgccacuuccacaaagaa

SEQ ID NO: 1399741 - RNA, 19 nt, Artificial Sequence
  Description of Artificial Sequence: Synthetic oligonucleotide
  Antisense strand to SEQ ID NO: 1399740
uucuuuguggaaguggcgc

SEQ ID NO: 1399742 - RNA, 19 nt, Artificial Sequence
  Description of Artificial Sequence: Synthetic oligonucleotide
  Sense strand starting at position 1501 of SEQ ID NO: 1243184
gcgcgcgugugauuuauuu

SEQ ID NO: 1399743 - RNA, 19 nt, Artificial Sequence
  Description of Artificial Sequence: Synthetic oligonucleotide
  Antisense strand to SEQ ID NO: 1399742
aaauaaaucacacgcgcgc

SEQ ID NO: 1399744 - RNA, 19 nt, Artificial Sequence
  Description of Artificial Sequence: Synthetic oligonucleotide
  Sense strand starting at position 1616 of SEQ ID NO: 1243184
cgcggugcucaacaaaguu

SEQ ID NO: 1399745 - RNA, 19 nt, Artificial Sequence
  Description of Artificial Sequence: Synthetic oligonucleotide
  Antisense strand to SEQ ID NO: 1399744
aacuuuguugagcaccgcg

SEQ ID NO: 1399746 - RNA, 19 nt, Artificial Sequence
  Description of Artificial Sequence: Synthetic oligonucleotide
  Sense strand starting at position 1715 of SEQ ID NO: 1243184
aaacgacccuguuuagaaa

SEQ ID NO: 1399747 - RNA, 19 nt, Artificial Sequence
  Description of Artificial Sequence: Synthetic oligonucleotide
  Antisense strand to SEQ ID NO: 1399746
uuucuaaacagggucguuu

SEQ ID NO: 1399748 - RNA, 19 nt, Artificial Sequence
  Description of Artificial Sequence: Synthetic oligonucleotide
  Sense strand starting at position 2217 of SEQ ID NO: 1243184
uuggauuaggacugacagu

SEQ ID NO: 1399749 - RNA, 19 nt, Artificial Sequence
  Description of Artificial Sequence: Synthetic oligonucleotide
  Antisense strand to SEQ ID NO: 1399748
acugucaguccuaauccaa

SEQ ID NO: 1399750 - RNA, 19 nt, Artificial Sequence
  Description of Artificial Sequence: Synthetic oligonucleotide
  Sense strand starting at position 2226 of SEQ ID NO: 1243184
gacugacaguuccugaaac

SEQ ID NO: 1399751 - RNA, 19 nt, Artificial Sequence
  Description of Artificial Sequence: Synthetic oligonucleotide
  Antisense strand to SEQ ID NO: 1399750
guuucaggaacugucaguc

SEQ ID NO: 1399752 - RNA, 19 nt, Artificial Sequence
  Description of Artificial Sequence: Synthetic oligonucleotide
  Sense strand starting at position 2228 of SEQ ID NO: 1243184
cugacaguuccugaaaccu

SEQ ID NO: 1399753 - RNA, 19 nt, Artificial Sequence
  Description of Artificial Sequence: Synthetic oligonucleotide
  Antisense strand to SEQ ID NO: 1399752
agguuucaggaacugucag

SEQ ID NO: 1399754 - RNA, 19 nt, Artificial Sequence
  Description of Artificial Sequence: Synthetic oligonucleotide
  Sense strand starting at position 2238 of SEQ ID NO: 1243184
cugaaaccucucggcaaua

SEQ ID NO: 1399755 - RNA, 19 nt, Artificial Sequence
  Description of Artificial Sequence: Synthetic oligonucleotide
  Antisense strand to SEQ ID NO: 1399754
uauugccgagagguuucag

SEQ ID NO: 1399756 - RNA, 19 nt, Artificial Sequence
  Description of Artificial Sequence: Synthetic oligonucleotide
  Sense strand starting at position 2254 of SEQ ID NO: 1243184
auagcuuugucacccgacu

SEQ ID NO: 1399757 - RNA, 19 nt, Artificial Sequence
  Description of Artificial Sequence: Synthetic oligonucleotide
  Antisense strand to SEQ ID NO: 1399756
agucgggugacaaagcuau

SEQ ID NO: 1399758 - RNA, 19 nt, Artificial Sequence
  Description of Artificial Sequence: Synthetic oligonucleotide
  Sense strand starting at position 2900 of SEQ ID NO: 1243184
auuuguguuucacgaggag

SEQ ID NO: 1399759 - RNA, 19 nt, Artificial Sequence
  Description of Artificial Sequence: Synthetic oligonucleotide
  Antisense strand to SEQ ID NO: 1399758
cuccucgugaaacacaaau

SEQ ID NO: 1399760 - RNA, 19 nt, Artificial Sequence
  Description of Artificial Sequence: Synthetic oligonucleotide
  Sense strand starting at position 3044 of SEQ ID NO: 1243184
gugcuucuggcaugaggaa

SEQ ID NO: 1399761 - RNA, 19 nt, Artificial Sequence
  Description of Artificial Sequence: Synthetic oligonucleotide
  Antisense strand to SEQ ID NO: 1399760
uuccucaugccagaagcac

SEQ ID NO: 1399762 - RNA, 19 nt, Artificial Sequence
  Description of Artificial Sequence: Synthetic oligonucleotide
  Sense strand starting at position 3122 of SEQ ID NO: 1243184
uuuagaugccugcgggaca

SEQ ID NO: 1399763 - RNA, 19 nt, Artificial Sequence
  Description of Artificial Sequence: Synthetic oligonucleotide
  Antisense strand to SEQ ID NO: 1399762
ugucccgcaggcaucuaaa

SEQ ID NO: 1399764 - RNA, 19 nt, Artificial Sequence
  Description of Artificial Sequence: Synthetic oligonucleotide
  Sense strand starting at position 3192 of SEQ ID NO: 1243184
auucgcauuccggagucau

SEQ ID NO: 1399765 - RNA, 19 nt, Artificial Sequence
  Description of Artificial Sequence: Synthetic oligonucleotide
  Antisense strand to SEQ ID NO: 1399764
augacuccggaaugcgaau

SEQ ID NO: 1399766 - RNA, 19 nt, Artificial Sequence
  Description of Artificial Sequence: Synthetic oligonucleotide
  Sense strand starting at position 3258 of SEQ ID NO: 1243184
ugcucagauccuggaguga

SEQ ID NO: 1399767 - RNA, 19 nt, Artificial Sequence
  Description of Artificial Sequence: Synthetic oligonucleotide
  Antisense strand to SEQ ID NO: 1399766
ucacuccaggaucugagca

SEQ ID NO: 1399768 - RNA, 19 nt, Artificial Sequence
  Description of Artificial Sequence: Synthetic oligonucleotide
  Sense strand starting at position 3392 of SEQ ID NO: 1243184
gagucuuccuuugcccaga

SEQ ID NO: 1399769 - RNA, 19 nt, Artificial Sequence
  Description of Artificial Sequence: Synthetic oligonucleotide
  Antisense strand to SEQ ID NO: 1399768
ucugggcaaaggaagacuc

SEQ ID NO: 1399770 - RNA, 19 nt, Artificial Sequence
  Description of Artificial Sequence: Synthetic oligonucleotide
  Sense strand starting at position 3630 of SEQ ID NO: 1243184
ggcagacauuaccugaaca

SEQ ID NO: 1399771 - RNA, 19 nt, Artificial Sequence
  Description of Artificial Sequence: Synthetic oligonucleotide
  Antisense strand to SEQ ID NO: 1399770
uguucagguaaugucugcc

SEQ ID NO: 1399772 - RNA, 19 nt, Artificial Sequence
  Description of Artificial Sequence: Synthetic oligonucleotide
  Sense strand starting at position 3647 of SEQ ID NO: 1243184
cacggaaucagucggagaa

SEQ ID NO: 1399773 - RNA, 19 nt, Artificial Sequence
  Description of Artificial Sequence: Synthetic oligonucleotide
  Antisense strand to SEQ ID NO: 1399772
uucuccgacugauuccgug

SEQ ID NO: 1399774 - RNA, 19 nt, Artificial Sequence
  Description of Artificial Sequence: Synthetic oligonucleotide
  Sense strand starting at position 3648 of SEQ ID NO: 1243184
acggaaucagucggagaaa

SEQ ID NO: 1399775 - RNA, 19 nt, Artificial Sequence
  Description of Artificial Sequence: Synthetic oligonucleotide
  Antisense strand to SEQ ID NO: 1399774
uuucuccgacugauuccgu

SEQ ID NO: 1399776 - RNA, 19 nt, Artificial Sequence
  Description of Artificial Sequence: Synthetic oligonucleotide
  Sense strand starting at position 3666 of SEQ ID NO: 1243184
aaagaugcuucugaggcua

SEQ ID NO: 1399777 - RNA, 19 nt, Artificial Sequence
  Description of Artificial Sequence: Synthetic oligonucleotide
  Antisense strand to SEQ ID NO: 1399776
uagccucagaagcaucuuu

SEQ ID NO: 1399778 - RNA, 19 nt, Artificial Sequence
  Description of Artificial Sequence: Synthetic oligonucleotide
  Sense strand starting at position 3739 of SEQ ID NO: 1243184
ucuuuaauuuggcaaagga

SEQ ID NO: 1399779 - RNA, 19 nt, Artificial Sequence
  Description of Artificial Sequence: Synthetic oligonucleotide
  Antisense strand to SEQ ID NO: 1399778
uccuuugccaaauuaaaga

SEQ ID NO: 1399780 - RNA, 19 nt, Artificial Sequence
  Description of Artificial Sequence: Synthetic oligonucleotide
  Sense strand starting at position 3809 of SEQ ID NO: 1243184
ugugcuuucuccucugaaa

SEQ ID NO: 1399781 - RNA, 19 nt, Artificial Sequence
  Description of Artificial Sequence: Synthetic oligonucleotide
  Antisense strand to SEQ ID NO: 1399780
uuucagaggagaaagcaca

SEQ ID NO: 1399782 - RNA, 19 nt, Artificial Sequence
  Description of Artificial Sequence: Synthetic oligonucleotide
  Sense strand starting at position 1090 of SEQ ID NO: 1243185
acaugagguucccaaguuu

SEQ ID NO: 1399783 - RNA, 19 nt, Artificial Sequence
  Description of Artificial Sequence: Synthetic oligonucleotide
  Antisense strand to SEQ ID NO: 1399782
aaacuugggaaccucaugu

SEQ ID NO: 1399784 - RNA, 19 nt, Artificial Sequence
  Description of Artificial Sequence: Synthetic oligonucleotide
  Sense strand starting at position 2268 of SEQ ID NO: 1243185
ugacauugugggcgacgaa

SEQ ID NO: 1399785 - RNA, 19 nt, Artificial Sequence
  Description of Artificial Sequence: Synthetic oligonucleotide
  Antisense strand to SEQ ID NO: 1399784
uucgucgcccacaauguca

SEQ ID NO: 1399786 - RNA, 19 nt, Artificial Sequence
  Description of Artificial Sequence: Synthetic oligonucleotide
  Sense strand starting at position 2315 of SEQ ID NO: 1243185
gccgaaauucccugcgguu

SEQ ID NO: 1399787 - RNA, 19 nt, Artificial Sequence
  Description of Artificial Sequence: Synthetic oligonucleotide
  Antisense strand to SEQ ID NO: 1399786
aaccgcagggaauuucggc

SEQ ID NO: 1399788 - RNA, 19 nt, Artificial Sequence
  Description of Artificial Sequence: Synthetic oligonucleotide
  Sense strand starting at position 2674 of SEQ ID NO: 1243185
ccagcuugcugggcagaaa

SEQ ID NO: 1399789 - RNA, 19 nt, Artificial Sequence
  Description of Artificial Sequence: Synthetic oligonucleotide
  Antisense strand to SEQ ID NO: 1399788
uuucugcccagcaagcugg

SEQ ID NO: 1399790 - RNA, 19 nt, Artificial Sequence
  Description of Artificial Sequence: Synthetic oligonucleotide
  Sense strand starting at position 2685 of SEQ ID NO: 1243185
ggcagaaagugacuuaaau

SEQ ID NO: 1399791 - RNA, 19 nt, Artificial Sequence
  Description of Artificial Sequence: Synthetic oligonucleotide
  Antisense strand to SEQ ID NO: 1399790
auuuaagucacuuucugcc

SEQ ID NO: 1399792 - RNA, 19 nt, Artificial Sequence
  Description of Artificial Sequence: Synthetic oligonucleotide
  Sense strand starting at position 2814 of SEQ ID NO: 1243185
ggacauaacuugccuaagu

SEQ ID NO: 1399793 - RNA, 19 nt, Artificial Sequence
  Description of Artificial Sequence: Synthetic oligonucleotide
  Antisense strand to SEQ ID NO: 1399792
acuuaggcaaguuaugucc

SEQ ID NO: 1399794 - RNA, 19 nt, Artificial Sequence
  Description of Artificial Sequence: Synthetic oligonucleotide
  Sense strand starting at position 2892 of SEQ ID NO: 1243185
ccacuuaccuuguguuugu

SEQ ID NO: 1399795 - RNA, 19 nt, Artificial Sequence
  Description of Artificial Sequence: Synthetic oligonucleotide
  Antisense strand to SEQ ID NO: 1399794
acaaacacaagguaagugg

SEQ ID NO: 1399796 - RNA, 19 nt, Artificial Sequence
  Description of Artificial Sequence: Synthetic oligonucleotide
  Sense strand starting at position 2893 of SEQ ID NO: 1243185
cacuuaccuuguguuugua

SEQ ID NO: 1399797 - RNA, 19 nt, Artificial Sequence
  Description of Artificial Sequence: Synthetic oligonucleotide
  Antisense strand to SEQ ID NO: 1399796
uacaaacacaagguaagug

SEQ ID NO: 1399798 - RNA, 19 nt, Artificial Sequence
  Description of Artificial Sequence: Synthetic oligonucleotide
  Sense strand starting at position 2901 of SEQ ID NO: 1243185
uuguguuuguacuggagau

SEQ ID NO: 1399799 - RNA, 19 nt, Artificial Sequence
  Description of Artificial Sequence: Synthetic oligonucleotide
  Antisense strand to SEQ ID NO: 1399798
aucuccaguacaaacacaa

SEQ ID NO: 1399800 - RNA, 19 nt, Artificial Sequence
  Description of Artificial Sequence: Synthetic oligonucleotide
  Sense strand starting at position 2905 of SEQ ID NO: 1243185
guuuguacuggagaugucu

SEQ ID NO: 1399801 - RNA, 19 nt, Artificial Sequence
  Description of Artificial Sequence: Synthetic oligonucleotide
  Antisense strand to SEQ ID NO: 1399800
agacaucuccaguacaaac

SEQ ID NO: 1399802 - RNA, 19 nt, Artificial Sequence
  Description of Artificial Sequence: Synthetic oligonucleotide
  Sense strand starting at position 3152 of SEQ ID NO: 1243185
agagaaggcugccuucagu

SEQ ID NO: 1399803 - RNA, 19 nt, Artificial Sequence
  Description of Artificial Sequence: Synthetic oligonucleotide
  Antisense strand to SEQ ID NO: 1399802
acugaaggcagccuucucu

SEQ ID NO: 1399804 - RNA, 19 nt, Artificial Sequence
  Description of Artificial Sequence: Synthetic oligonucleotide
  Sense strand starting at position 3208 of SEQ ID NO: 1243185
auuggaaacucaccuguua

SEQ ID NO: 1399805 - RNA, 19 nt, Artificial Sequence
  Description of Artificial Sequence: Synthetic oligonucleotide
  Antisense strand to SEQ ID NO: 1399804
uaacaggugaguuuccaau

SEQ ID NO: 1399806 - RNA, 19 nt, Artificial Sequence
  Description of Artificial Sequence: Synthetic oligonucleotide
  Sense strand starting at position 3237 of SEQ ID NO: 1243185
ggccucagauguggagaau

SEQ ID NO: 1399807 - RNA, 19 nt, Artificial Sequence
  Description of Artificial Sequence: Synthetic oligonucleotide
  Antisense strand to SEQ ID NO: 1399806
auucuccacaucugaggcc

SEQ ID NO: 1399808 - RNA, 19 nt, Artificial Sequence
  Description of Artificial Sequence: Synthetic oligonucleotide
  Sense strand starting at position 3536 of SEQ ID NO: 1243185
cuggcucuucugggaggua

SEQ ID NO: 1399809 - RNA, 19 nt, Artificial Sequence
  Description of Artificial Sequence: Synthetic oligonucleotide
  Antisense strand to SEQ ID NO: 1399808
uaccucccagaagagccag

SEQ ID NO: 1399810 - RNA, 19 nt, Artificial Sequence
  Description of Artificial Sequence: Synthetic oligonucleotide
  Sense strand starting at position 17 of SEQ ID NO: 1243186
cuguauauccaguauugug

SEQ ID NO: 1399811 - RNA, 19 nt, Artificial Sequence
  Description of Artificial Sequence: Synthetic oligonucleotide
  Antisense strand to SEQ ID NO: 1399810
cacaauacuggauauacag

SEQ ID NO: 1399812 - RNA, 19 nt, Artificial Sequence
  Description of Artificial Sequence: Synthetic oligonucleotide
  Sense strand starting at position 123 of SEQ ID NO: 1243186
guuaacucaggugaacuua

SEQ ID NO: 1399813 - RNA, 19 nt, Artificial Sequence
  Description of Artificial Sequence: Synthetic oligonucleotide
  Antisense strand to SEQ ID NO: 1399812
uaaguucaccugaguuaac

SEQ ID NO: 1399814 - RNA, 19 nt, Artificial Sequence
  Description of Artificial Sequence: Synthetic oligonucleotide
  Sense strand starting at position 342 of SEQ ID NO: 1243186
ucuaauaaccaccgaaagu

SEQ ID NO: 1399815 - RNA, 19 nt, Artificial Sequence
  Description of Artificial Sequence: Synthetic oligonucleotide
  Antisense strand to SEQ ID NO: 1399814
acuuucggugguuauuaga

SEQ ID NO: 1399816 - RNA, 19 nt, Artificial Sequence
  Description of Artificial Sequence: Synthetic oligonucleotide
  Sense strand starting at position 406 of SEQ ID NO: 1243186
ccuuuaccauuugauggau

SEQ ID NO: 1399817 - RNA, 19 nt, Artificial Sequence
  Description of Artificial Sequence: Synthetic oligonucleotide
  Antisense strand to SEQ ID NO: 1399816
auccaucaaaugguaaagg

SEQ ID NO: 1399818 - RNA, 19 nt, Artificial Sequence
  Description of Artificial Sequence: Synthetic oligonucleotide
  Sense strand starting at position 408 of SEQ ID NO: 1243186
uuuaccauuugauggauuu

SEQ ID NO: 1399819 - RNA, 19 nt, Artificial Sequence
  Description of Artificial Sequence: Synthetic oligonucleotide
  Antisense strand to SEQ ID NO: 1399818
aaauccaucaaaugguaaa

SEQ ID NO: 1399820 - RNA, 19 nt, Artificial Sequence
  Description of Artificial Sequence: Synthetic oligonucleotide
  Sense strand starting at position 709 of SEQ ID NO: 1243186
gggagacaauguccguuua

SEQ ID NO: 1399821 - RNA, 19 nt, Artificial Sequence
  Description of Artificial Sequence: Synthetic oligonucleotide
  Antisense strand to SEQ ID NO: 1399820
uaaacggacauugucuccc

SEQ ID NO: 1399822 - RNA, 19 nt, Artificial Sequence
  Description of Artificial Sequence: Synthetic oligonucleotide
  Sense strand starting at position 710 of SEQ ID NO: 1243186
ggagacaauguccguuuau

SEQ ID NO: 1399823 - RNA, 19 nt, Artificial Sequence
  Description of Artificial Sequence: Synthetic oligonucleotide
  Antisense strand to SEQ ID NO: 1399822
auaaacggacauugucucc

SEQ ID NO: 1399824 - RNA, 19 nt, Artificial Sequence
  Description of Artificial Sequence: Synthetic oligonucleotide
  Sense strand starting at position 751 of SEQ ID NO: 1243186
ccuaaacugccuuacgaaa

SEQ ID NO: 1399825 - RNA, 19 nt, Artificial Sequence
  Description of Artificial Sequence: Synthetic oligonucleotide
  Antisense strand to SEQ ID NO: 1399824
uuucguaaggcaguuuagg

SEQ ID NO: 1399826 - RNA, 19 nt, Artificial Sequence
  Description of Artificial Sequence: Synthetic oligonucleotide
  Sense strand starting at position 976 of SEQ ID NO: 1243186
uugaaaugcaaugguuuga

SEQ ID NO: 1399827 - RNA, 19 nt, Artificial Sequence
  Description of Artificial Sequence: Synthetic oligonucleotide
  Antisense strand to SEQ ID NO: 1399826
ucaaaccauugcauuucaa

SEQ ID NO: 1399828 - RNA, 19 nt, Artificial Sequence
  Description of Artificial Sequence: Synthetic oligonucleotide
  Sense strand starting at position 985 of SEQ ID NO: 1243186
aaugguuugaaguguugaa

SEQ ID NO: 1399829 - RNA, 19 nt, Artificial Sequence
  Description of Artificial Sequence: Synthetic oligonucleotide
  Antisense strand to SEQ ID NO: 1399828
uucaacacuucaaaccauu

SEQ ID NO: 1399830 - RNA, 19 nt, Artificial Sequence
  Description of Artificial Sequence: Synthetic oligonucleotide
  Sense strand starting at position 989 of SEQ ID NO: 1243186
guuugaaguguugaaacag

SEQ ID NO: 1399831 - RNA, 19 nt, Artificial Sequence
  Description of Artificial Sequence: Synthetic oligonucleotide
  Antisense strand to SEQ ID NO: 1399830
cuguuucaacacuucaaac

SEQ ID NO: 1399832 - RNA, 19 nt, Artificial Sequence
  Description of Artificial Sequence: Synthetic oligonucleotide
  Sense strand starting at position 1141 of SEQ ID NO: 1243186
ccggcauugagacaucaga

SEQ ID NO: 1399833 - RNA, 19 nt, Artificial Sequence
  Description of Artificial Sequence: Synthetic oligonucleotide
  Antisense strand to SEQ ID NO: 1399832
ucugaugucucaaugccgg

SEQ ID NO: 1399834 - RNA, 19 nt, Artificial Sequence
  Description of Artificial Sequence: Synthetic oligonucleotide
  Sense strand starting at position 1382 of SEQ ID NO: 1243186
guacgugaugcgaaagcau

SEQ ID NO: 1399835 - RNA, 19 nt, Artificial Sequence
  Description of Artificial Sequence: Synthetic oligonucleotide
  Antisense strand to SEQ ID NO: 1399834
augcuuucgcaucacguac

SEQ ID NO: 1399836 - RNA, 19 nt, Artificial Sequence
  Description of Artificial Sequence: Synthetic oligonucleotide
  Sense strand starting at position 1673 of SEQ ID NO: 1243186
gcgcgucggagagucuaua

SEQ ID NO: 1399837 - RNA, 19 nt, Artificial Sequence
  Description of Artificial Sequence: Synthetic oligonucleotide
  Antisense strand to SEQ ID NO: 1399836
uauagacucuccgacgcgc

SEQ ID NO: 1399838 - RNA, 19 nt, Artificial Sequence
  Description of Artificial Sequence: Synthetic oligonucleotide
  Sense strand starting at position 2097 of SEQ ID NO: 1243186
uggagcucccauugguaaa

SEQ ID NO: 1399839 - RNA, 19 nt, Artificial Sequence
  Description of Artificial Sequence: Synthetic oligonucleotide
  Antisense strand to SEQ ID NO: 1399838
uuuaccaaugggagcucca

SEQ ID NO: 1399840 - RNA, 19 nt, Artificial Sequence
  Description of Artificial Sequence: Synthetic oligonucleotide
  Sense strand starting at position 2098 of SEQ ID NO: 1243186
ggagcucccauugguaaac

SEQ ID NO: 1399841 - RNA, 19 nt, Artificial Sequence
  Description of Artificial Sequence: Synthetic oligonucleotide
  Antisense strand to SEQ ID NO: 1399840
guuuaccaaugggagcucc

SEQ ID NO: 1399842 - RNA, 19 nt, Artificial Sequence
  Description of Artificial Sequence: Synthetic oligonucleotide
  Sense strand starting at position 2109 of SEQ ID NO: 1243186
ugguaaaccggguauaggu

SEQ ID NO: 1399843 - RNA, 19 nt, Artificial Sequence
  Description of Artificial Sequence: Synthetic oligonucleotide
  Antisense strand to SEQ ID NO: 1399842
accuauacccgguuuacca

SEQ ID NO: 1399844 - RNA, 19 nt, Artificial Sequence
  Description of Artificial Sequence: Synthetic oligonucleotide
  Sense strand starting at position 2655 of SEQ ID NO: 1243186
ggguaugcaagagauaguu

SEQ ID NO: 1399845 - RNA, 19 nt, Artificial Sequence
  Description of Artificial Sequence: Synthetic oligonucleotide
  Antisense strand to SEQ ID NO: 1399844
aacuaucucuugcauaccc

SEQ ID NO: 1399846 - RNA, 19 nt, Artificial Sequence
  Description of Artificial Sequence: Synthetic oligonucleotide
  Sense strand starting at position 2670 of SEQ ID NO: 1243186
aguugcauucuggagucaa

SEQ ID NO: 1399847 - RNA, 19 nt, Artificial Sequence
  Description of Artificial Sequence: Synthetic oligonucleotide
  Antisense strand to SEQ ID NO: 1399846
uugacuccagaaugcaacu

SEQ ID NO: 1399848 - RNA, 19 nt, Artificial Sequence
  Description of Artificial Sequence: Synthetic oligonucleotide
  Sense strand starting at position 2674 of SEQ ID NO: 1243186
gcauucuggagucaaagau

SEQ ID NO: 1399849 - RNA, 19 nt, Artificial Sequence
  Description of Artificial Sequence: Synthetic oligonucleotide
  Antisense strand to SEQ ID NO: 1399848
aucuuugacuccagaaugc

SEQ ID NO: 1399850 - RNA, 19 nt, Artificial Sequence
  Description of Artificial Sequence: Synthetic oligonucleotide
  Sense strand starting at position 2683 of SEQ ID NO: 1243186
agucaaagauuacugaguu

SEQ ID NO: 1399851 - RNA, 19 nt, Artificial Sequence
  Description of Artificial Sequence: Synthetic oligonucleotide
  Antisense strand to SEQ ID NO: 1399850
aacucaguaaucuuugacu

SEQ ID NO: 1399852 - RNA, 19 nt, Artificial Sequence
  Description of Artificial Sequence: Synthetic oligonucleotide
  Sense strand starting at position 2852 of SEQ ID NO: 1243186
aaauguuucccugaguaag

SEQ ID NO: 1399853 - RNA, 19 nt, Artificial Sequence
  Description of Artificial Sequence: Synthetic oligonucleotide
  Antisense strand to SEQ ID NO: 1399852
cuuacucagggaaacauuu

SEQ ID NO: 1399854 - RNA, 19 nt, Artificial Sequence
  Description of Artificial Sequence: Synthetic oligonucleotide
  Sense strand starting at position 2862 of SEQ ID NO: 1243186
cugaguaaggcccaauaca

SEQ ID NO: 1399855 - RNA, 19 nt, Artificial Sequence
  Description of Artificial Sequence: Synthetic oligonucleotide
  Antisense strand to SEQ ID NO: 1399854
uguauugggccuuacucag

SEQ ID NO: 1399856 - RNA, 19 nt, Artificial Sequence
  Description of Artificial Sequence: Synthetic oligonucleotide
  Sense strand starting at position 2905 of SEQ ID NO: 1243186
ugaugucauuucuccugca

SEQ ID NO: 1399857 - RNA, 19 nt, Artificial Sequence
  Description of Artificial Sequence: Synthetic oligonucleotide
  Antisense strand to SEQ ID NO: 1399856
ugcaggagaaaugacauca

SEQ ID NO: 1399858 - RNA, 19 nt, Artificial Sequence
  Description of Artificial Sequence: Synthetic oligonucleotide
  Sense strand starting at position 3017 of SEQ ID NO: 1243186
guaguuugacuccaugaug

SEQ ID NO: 1399859 - RNA, 19 nt, Artificial Sequence
  Description of Artificial Sequence: Synthetic oligonucleotide
  Antisense strand to SEQ ID NO: 1399858
caucauggagucaaacuac

SEQ ID NO: 1399860 - RNA, 19 nt, Artificial Sequence
  Description of Artificial Sequence: Synthetic oligonucleotide
  Sense strand starting at position 3020 of SEQ ID NO: 1243186
guuugacuccaugauguau

SEQ ID NO: 1399861 - RNA, 19 nt, Artificial Sequence
  Description of Artificial Sequence: Synthetic oligonucleotide
  Antisense strand to SEQ ID NO: 1399860
auacaucauggagucaaac

SEQ ID NO: 1399862 - RNA, 19 nt, Artificial Sequence
  Description of Artificial Sequence: Synthetic oligonucleotide
  Sense strand starting at position 3171 of SEQ ID NO: 1243186
uuucuuuccguugucaagu

SEQ ID NO: 1399863 - RNA, 19 nt, Artificial Sequence
  Description of Artificial Sequence: Synthetic oligonucleotide
  Antisense strand to SEQ ID NO: 1399862
acuugacaacggaaagaaa

SEQ ID NO: 1399864 - RNA, 19 nt, Artificial Sequence
  Description of Artificial Sequence: Synthetic oligonucleotide
  Sense strand starting at position 3182 of SEQ ID NO: 1243186
ugucaagugcuuugaagag

SEQ ID NO: 1399865 - RNA, 19 nt, Artificial Sequence
  Description of Artificial Sequence: Synthetic oligonucleotide
  Antisense strand to SEQ ID NO: 1399864
cucuucaaagcacuugaca

SEQ ID NO: 1399866 - RNA, 19 nt, Artificial Sequence
  Description of Artificial Sequence: Synthetic oligonucleotide
  Sense strand starting at position 3299 of SEQ ID NO: 1243186
gugauaaugucucccucag

SEQ ID NO: 1399867 - RNA, 19 nt, Artificial Sequence
  Description of Artificial Sequence: Synthetic oligonucleotide
  Antisense strand to SEQ ID NO: 1399866
cugagggagacauuaucac

SEQ ID NO: 1399868 - RNA, 19 nt, Artificial Sequence
  Description of Artificial Sequence: Synthetic oligonucleotide
  Sense strand starting at position 3301 of SEQ ID NO: 1243186
gauaaugucucccucagag

SEQ ID NO: 1399869 - RNA, 19 nt, Artificial Sequence
  Description of Artificial Sequence: Synthetic oligonucleotide
  Antisense strand to SEQ ID NO: 1399868
cucugagggagacauuauc

SEQ ID NO: 1399870 - RNA, 19 nt, Artificial Sequence
  Description of Artificial Sequence: Synthetic oligonucleotide
  Sense strand starting at position 3360 of SEQ ID NO: 1243186
guagguggugcugaugauu

SEQ ID NO: 1399871 - RNA, 19 nt, Artificial Sequence
  Description of Artificial Sequence: Synthetic oligonucleotide
  Antisense strand to SEQ ID NO: 1399870
aaucaucagcaccaccuac

SEQ ID NO: 1399872 - RNA, 19 nt, Artificial Sequence
  Description of Artificial Sequence: Synthetic oligonucleotide
  Sense strand starting at position 3363 of SEQ ID NO: 1243186
gguggugcugaugauuaca

SEQ ID NO: 1399873 - RNA, 19 nt, Artificial Sequence
  Description of Artificial Sequence: Synthetic oligonucleotide
  Antisense strand to SEQ ID NO: 1399872
uguaaucaucagcaccacc

SEQ ID NO: 1399874 - RNA, 19 nt, Artificial Sequence
  Description of Artificial Sequence: Synthetic oligonucleotide
  Sense strand starting at position 3433 of SEQ ID NO: 1243186
caaggaauuagaggugguu

SEQ ID NO: 1399875 - RNA, 19 nt, Artificial Sequence
  Description of Artificial Sequence: Synthetic oligonucleotide
  Antisense strand to SEQ ID NO: 1399874
aaccaccucuaauuccuug

SEQ ID NO: 1399876 - RNA, 19 nt, Artificial Sequence
  Description of Artificial Sequence: Synthetic oligonucleotide
  Sense strand starting at position 3435 of SEQ ID NO: 1243186
aggaauuagaggugguuau

SEQ ID NO: 1399877 - RNA, 19 nt, Artificial Sequence
  Description of Artificial Sequence: Synthetic oligonucleotide
  Antisense strand to SEQ ID NO: 1399876
auaaccaccucuaauuccu

SEQ ID NO: 1399878 - RNA, 19 nt, Artificial Sequence
  Description of Artificial Sequence: Synthetic oligonucleotide
  Sense strand starting at position 3436 of SEQ ID NO: 1243186
ggaauuagaggugguuaug

SEQ ID NO: 1399879 - RNA, 19 nt, Artificial Sequence
  Description of Artificial Sequence: Synthetic oligonucleotide
  Antisense strand to SEQ ID NO: 1399878
cauaaccaccucuaauucc

SEQ ID NO: 1399880 - RNA, 19 nt, Artificial Sequence
  Description of Artificial Sequence: Synthetic oligonucleotide
  Sense strand starting at position 3535 of SEQ ID NO: 1243186
gaaacugccgaccaguauu

SEQ ID NO: 1399881 - RNA, 19 nt, Artificial Sequence
  Description of Artificial Sequence: Synthetic oligonucleotide
  Antisense strand to SEQ ID NO: 1399880
aauacuggucggcaguuuc

SEQ ID NO: 1399882 - RNA, 19 nt, Artificial Sequence
  Description of Artificial Sequence: Synthetic oligonucleotide
  Sense strand starting at position 3704 of SEQ ID NO: 1243186
uggaguuguaagcauggua

SEQ ID NO: 1399883 - RNA, 19 nt, Artificial Sequence
  Description of Artificial Sequence: Synthetic oligonucleotide
  Antisense strand to SEQ ID NO: 1399882
uaccaugcuuacaacucca

SEQ ID NO: 1399884 - RNA, 19 nt, Artificial Sequence
  Description of Artificial Sequence: Synthetic oligonucleotide
  Sense strand starting at position 3756 of SEQ ID NO: 1243186
aaggucagagcuuaucauu

SEQ ID NO: 1399885 - RNA, 19 nt, Artificial Sequence
  Description of Artificial Sequence: Synthetic oligonucleotide
  Antisense strand to SEQ ID NO: 1399884
aaugauaagcucugaccuu

SEQ ID NO: 1399886 - RNA, 19 nt, Artificial Sequence
  Description of Artificial Sequence: Synthetic oligonucleotide
  Sense strand starting at position 3850 of SEQ ID NO: 1243186
auguuacuuggaugucaaa

SEQ ID NO: 1399887 - RNA, 19 nt, Artificial Sequence
  Description of Artificial Sequence: Synthetic oligonucleotide
  Antisense strand to SEQ ID NO: 1399886
uuugacauccaaguaacau

SEQ ID NO: 1399888 - RNA, 19 nt, Artificial Sequence
  Description of Artificial Sequence: Synthetic oligonucleotide
  Sense strand starting at position 3909 of SEQ ID NO: 1243186
aacagaagucauugucaug

SEQ ID NO: 1399889 - RNA, 19 nt, Artificial Sequence
  Description of Artificial Sequence: Synthetic oligonucleotide
  Antisense strand to SEQ ID NO: 1399888
caugacaaugacuucuguu

SEQ ID NO: 1399890 - RNA, 19 nt, Artificial Sequence
  Description of Artificial Sequence: Synthetic oligonucleotide
  Sense strand starting at position 371 of SEQ ID NO: 1243187
gagccuucuaagggaguga

SEQ ID NO: 1399891 - RNA, 19 nt, Artificial Sequence
  Description of Artificial Sequence: Synthetic oligonucleotide
  Antisense strand to SEQ ID NO: 1399890
ucacucccuuagaaggcuc

SEQ ID NO: 1399892 - RNA, 19 nt, Artificial Sequence
  Description of Artificial Sequence: Synthetic oligonucleotide
  Sense strand starting at position 437 of SEQ ID NO: 1243187
agagaccauuucuauuguu

SEQ ID NO: 1399893 - RNA, 19 nt, Artificial Sequence
  Description of Artificial Sequence: Synthetic oligonucleotide
  Antisense strand to SEQ ID NO: 1399892
aacaauagaaauggucucu

SEQ ID NO: 1399894 - RNA, 19 nt, Artificial Sequence
  Description of Artificial Sequence: Synthetic oligonucleotide
  Sense strand starting at position 468 of SEQ ID NO: 1243187
gugugugguacucuguuau

SEQ ID NO: 1399895 - RNA, 19 nt, Artificial Sequence
  Description of Artificial Sequence: Synthetic oligonucleotide
  Antisense strand to SEQ ID NO: 1399894
auaacagaguaccacacac

SEQ ID NO: 1399896 - RNA, 19 nt, Artificial Sequence
  Description of Artificial Sequence: Synthetic oligonucleotide
  Sense strand starting at position 539 of SEQ ID NO: 1243187
uuugcauagugggcagaau

SEQ ID NO: 1399897 - RNA, 19 nt, Artificial Sequence
  Description of Artificial Sequence: Synthetic oligonucleotide
  Antisense strand to SEQ ID NO: 1399896
auucugcccacuaugcaaa

SEQ ID NO: 1399898 - RNA, 19 nt, Artificial Sequence
  Description of Artificial Sequence: Synthetic oligonucleotide
  Sense strand starting at position 933 of SEQ ID NO: 1243187
ucauuugugucaggcuuga

SEQ ID NO: 1399899 - RNA, 19 nt, Artificial Sequence
  Description of Artificial Sequence: Synthetic oligonucleotide
  Antisense strand to SEQ ID NO: 1399898
ucaagccugacacaaauga

SEQ ID NO: 1399900 - RNA, 19 nt, Artificial Sequence
  Description of Artificial Sequence: Synthetic oligonucleotide
  Sense strand starting at position 937 of SEQ ID NO: 1243187
uugugucaggcuugaggau

SEQ ID NO: 1399901 - RNA, 19 nt, Artificial Sequence
  Description of Artificial Sequence: Synthetic oligonucleotide
  Antisense strand to SEQ ID NO: 1399900
auccucaagccugacacaa

SEQ ID NO: 1399902 - RNA, 19 nt, Artificial Sequence
  Description of Artificial Sequence: Synthetic oligonucleotide
  Sense strand starting at position 938 of SEQ ID NO: 1243187
ugugucaggcuugaggaua

SEQ ID NO: 1399903 - RNA, 19 nt, Artificial Sequence
  Description of Artificial Sequence: Synthetic oligonucleotide
  Antisense strand to SEQ ID NO: 1399902
uauccucaagccugacaca

SEQ ID NO: 1399904 - RNA, 19 nt, Artificial Sequence
  Description of Artificial Sequence: Synthetic oligonucleotide
  Sense strand starting at position 963 of SEQ ID NO: 1243187
aagauuaaaugaugcaguu

SEQ ID NO: 1399905 - RNA, 19 nt, Artificial Sequence
  Description of Artificial Sequence: Synthetic oligonucleotide
  Antisense strand to SEQ ID NO: 1399904
aacugcaucauuuaaucuu

SEQ ID NO: 1399906 - RNA, 19 nt, Artificial Sequence
  Description of Artificial Sequence: Synthetic oligonucleotide
  Sense strand starting at position 1021 of SEQ ID NO: 1243187
gguaaccacugucauaaau

SEQ ID NO: 1399907 - RNA, 19 nt, Artificial Sequence
  Description of Artificial Sequence: Synthetic oligonucleotide
  Antisense strand to SEQ ID NO: 1399906
auuuaugacagugguuacc

SEQ ID NO: 1399908 - RNA, 19 nt, Artificial Sequence
  Description of Artificial Sequence: Synthetic oligonucleotide
  Sense strand starting at position 1058 of SEQ ID NO: 1243187
gcaguuguuugcaggaggu

SEQ ID NO: 1399909 - RNA, 19 nt, Artificial Sequence
  Description of Artificial Sequence: Synthetic oligonucleotide
  Antisense strand to SEQ ID NO: 1399908
accuccugcaaacaacugc

SEQ ID NO: 1399910 - RNA, 19 nt, Artificial Sequence
  Description of Artificial Sequence: Synthetic oligonucleotide
  Sense strand starting at position 1060 of SEQ ID NO: 1243187
aguuguuugcaggagguau

SEQ ID NO: 1399911 - RNA, 19 nt, Artificial Sequence
  Description of Artificial Sequence: Synthetic oligonucleotide
  Antisense strand to SEQ ID NO: 1399910
auaccuccugcaaacaacu

SEQ ID NO: 1399912 - RNA, 19 nt, Artificial Sequence
  Description of Artificial Sequence: Synthetic oligonucleotide
  Sense strand starting at position 1068 of SEQ ID NO: 1243187
gcaggagguauuugcuauu

SEQ ID NO: 1399913 - RNA, 19 nt, Artificial Sequence
  Description of Artificial Sequence: Synthetic oligonucleotide
  Antisense strand to SEQ ID NO: 1399912
aauagcaaauaccuccugc

SEQ ID NO: 1399914 - RNA, 19 nt, Artificial Sequence
  Description of Artificial Sequence: Synthetic oligonucleotide
  Sense strand starting at position 1117 of SEQ ID NO: 1243187
accagaugugguuggguaa

SEQ ID NO: 1399915 - RNA, 19 nt, Artificial Sequence
  Description of Artificial Sequence: Synthetic oligonucleotide
  Antisense strand to SEQ ID NO: 1399914
uuacccaaccacaucuggu

SEQ ID NO: 1399916 - RNA, 19 nt, Artificial Sequence
  Description of Artificial Sequence: Synthetic oligonucleotide
  Sense strand starting at position 1130 of SEQ ID NO: 1243187
ggguaacggcaguguauuu

SEQ ID NO: 1399917 - RNA, 19 nt, Artificial Sequence
  Description of Artificial Sequence: Synthetic oligonucleotide
  Antisense strand to SEQ ID NO: 1399916
aaauacacugccguuaccc

SEQ ID NO: 1399918 - RNA, 19 nt, Artificial Sequence
  Description of Artificial Sequence: Synthetic oligonucleotide
  Sense strand starting at position 1322 of SEQ ID NO: 1243187
acguuaucuguccacuuua

SEQ ID NO: 1399919 - RNA, 19 nt, Artificial Sequence
  Description of Artificial Sequence: Synthetic oligonucleotide
  Antisense strand to SEQ ID NO: 1399918
uaaaguggacagauaacgu

SEQ ID NO: 1399920 - RNA, 19 nt, Artificial Sequence
  Description of Artificial Sequence: Synthetic oligonucleotide
  Sense strand starting at position 1352 of SEQ ID NO: 1243187
cuggaauaaucaccaaggu

SEQ ID NO: 1399921 - RNA, 19 nt, Artificial Sequence
  Description of Artificial Sequence: Synthetic oligonucleotide
  Antisense strand to SEQ ID NO: 1399920
accuuggugauuauuccag

SEQ ID NO: 1399922 - RNA, 19 nt, Artificial Sequence
  Description of Artificial Sequence: Synthetic oligonucleotide
  Sense strand starting at position 1396 of SEQ ID NO: 1243187
uucugagcauggucucaau

SEQ ID NO: 1399923 - RNA, 19 nt, Artificial Sequence
  Description of Artificial Sequence: Synthetic oligonucleotide
  Antisense strand to SEQ ID NO: 1399922
auugagaccaugcucagaa

SEQ ID NO: 1399924 - RNA, 19 nt, Artificial Sequence
  Description of Artificial Sequence: Synthetic oligonucleotide
  Sense strand starting at position 1479 of SEQ ID NO: 1243187
cagagaguuuacgaaacug

SEQ ID NO: 1399925 - RNA, 19 nt, Artificial Sequence
  Description of Artificial Sequence: Synthetic oligonucleotide
  Antisense strand to SEQ ID NO: 1399924
caguuucguaaacucucug

SEQ ID NO: 1399926 - RNA, 19 nt, Artificial Sequence
  Description of Artificial Sequence: Synthetic oligonucleotide
  Sense strand starting at position 1639 of SEQ ID NO: 1243187
gggagcagcguguauguaa

SEQ ID NO: 1399927 - RNA, 19 nt, Artificial Sequence
  Description of Artificial Sequence: Synthetic oligonucleotide
  Antisense strand to SEQ ID NO: 1399926
uuacauacacgcugcuccc

SEQ ID NO: 1399928 - RNA, 19 nt, Artificial Sequence
  Description of Artificial Sequence: Synthetic oligonucleotide
  Sense strand starting at position 1640 of SEQ ID NO: 1243187
ggagcagcguguauguaaa

SEQ ID NO: 1399929 - RNA, 19 nt, Artificial Sequence
  Description of Artificial Sequence: Synthetic oligonucleotide
  Antisense strand to SEQ ID NO: 1399928
uuuacauacacgcugcucc

SEQ ID NO: 1399930 - RNA, 19 nt, Artificial Sequence
  Description of Artificial Sequence: Synthetic oligonucleotide
  Sense strand starting at position 1676 of SEQ ID NO: 1243187
ggcucuguuccuggccaga

SEQ ID NO: 1399931 - RNA, 19 nt, Artificial Sequence
  Description of Artificial Sequence: Synthetic oligonucleotide
  Antisense strand to SEQ ID NO: 1399930
ucuggccaggaacagagcc

SEQ ID NO: 1399932 - RNA, 19 nt, Artificial Sequence
  Description of Artificial Sequence: Synthetic oligonucleotide
  Sense strand starting at position 1861 of SEQ ID NO: 1243187
ccggaaagccuuuaccuga

SEQ ID NO: 1399933 - RNA, 19 nt, Artificial Sequence
  Description of Artificial Sequence: Synthetic oligonucleotide
  Antisense strand to SEQ ID NO: 1399932
ucagguaaaggcuuuccgg

SEQ ID NO: 1399934 - RNA, 19 nt, Artificial Sequence
  Description of Artificial Sequence: Synthetic oligonucleotide
  Sense strand starting at position 2331 of SEQ ID NO: 1243187
cgcuguugcuggaagguua

SEQ ID NO: 1399935 - RNA, 19 nt, Artificial Sequence
  Description of Artificial Sequence: Synthetic oligonucleotide
  Antisense strand to SEQ ID NO: 1399934
uaaccuuccagcaacagcg

SEQ ID NO: 1399936 - RNA, 19 nt, Artificial Sequence
  Description of Artificial Sequence: Synthetic oligonucleotide
  Sense strand starting at position 2338 of SEQ ID NO: 1243187
gcuggaagguuaaggugau

SEQ ID NO: 1399937 - RNA, 19 nt, Artificial Sequence
  Description of Artificial Sequence: Synthetic oligonucleotide
  Antisense strand to SEQ ID NO: 1399936
aucaccuuaaccuuccagc

SEQ ID NO: 1399938 - RNA, 19 nt, Artificial Sequence
  Description of Artificial Sequence: Synthetic oligonucleotide
  Sense strand starting at position 2339 of SEQ ID NO: 1243187
cuggaagguuaaggugauu

SEQ ID NO: 1399939 - RNA, 19 nt, Artificial Sequence
  Description of Artificial Sequence: Synthetic oligonucleotide
  Antisense strand to SEQ ID NO: 1399938
aaucaccuuaaccuuccag

SEQ ID NO: 1399940 - RNA, 19 nt, Artificial Sequence
  Description of Artificial Sequence: Synthetic oligonucleotide
  Sense strand starting at position 2845 of SEQ ID NO: 1243187
ggccuuugguccuucuaga

SEQ ID NO: 1399941 - RNA, 19 nt, Artificial Sequence
  Description of Artificial Sequence: Synthetic oligonucleotide
  Antisense strand to SEQ ID NO: 1399940
ucuagaaggaccaaaggcc

SEQ ID NO: 1399942 - RNA, 19 nt, Artificial Sequence
  Description of Artificial Sequence: Synthetic oligonucleotide
  Sense strand starting at position 2862 of SEQ ID NO: 1243187
gagcgugugaaggagaaau

SEQ ID NO: 1399943 - RNA, 19 nt, Artificial Sequence
  Description of Artificial Sequence: Synthetic oligonucleotide
  Antisense strand to SEQ ID NO: 1399942
auuucuccuucacacgcuc

SEQ ID NO: 1399944 - RNA, 19 nt, Artificial Sequence
  Description of Artificial Sequence: Synthetic oligonucleotide
  Sense strand starting at position 2904 of SEQ ID NO: 1243187
aggcuugguagaggaaaua

SEQ ID NO: 1399945 - RNA, 19 nt, Artificial Sequence
  Description of Artificial Sequence: Synthetic oligonucleotide
  Antisense strand to SEQ ID NO: 1399944
uauuuccucuaccaagccu

SEQ ID NO: 1399946 - RNA, 19 nt, Artificial Sequence
  Description of Artificial Sequence: Synthetic oligonucleotide
  Sense strand starting at position 2928 of SEQ ID NO: 1243187
gcagcucaucuugaaagca

SEQ ID NO: 1399947 - RNA, 19 nt, Artificial Sequence
  Description of Artificial Sequence: Synthetic oligonucleotide
  Antisense strand to SEQ ID NO: 1399946
ugcuuucaagaugagcugc

SEQ ID NO: 1399948 - RNA, 19 nt, Artificial Sequence
  Description of Artificial Sequence: Synthetic oligonucleotide
  Sense strand starting at position 2985 of SEQ ID NO: 1243187
ggaucacuuugguccuguu

SEQ ID NO: 1399949 - RNA, 19 nt, Artificial Sequence
  Description of Artificial Sequence: Synthetic oligonucleotide
  Antisense strand to SEQ ID NO: 1399948
aacaggaccaaagugaucc

SEQ ID NO: 1399950 - RNA, 19 nt, Artificial Sequence
  Description of Artificial Sequence: Synthetic oligonucleotide
  Sense strand starting at position 3466 of SEQ ID NO: 1243187
aggugucaggcccagugau

SEQ ID NO: 1399951 - RNA, 19 nt, Artificial Sequence
  Description of Artificial Sequence: Synthetic oligonucleotide
  Antisense strand to SEQ ID NO: 1399950
aucacugggccugacaccu

SEQ ID NO: 1399952 - RNA, 19 nt, Artificial Sequence
  Description of Artificial Sequence: Synthetic oligonucleotide
  Sense strand starting at position 3476 of SEQ ID NO: 1243187
cccagugaucugugcugua

SEQ ID NO: 1399953 - RNA, 19 nt, Artificial Sequence
  Description of Artificial Sequence: Synthetic oligonucleotide
  Antisense strand to SEQ ID NO: 1399952
uacagcacagaucacuggg

SEQ ID NO: 1399954 - RNA, 19 nt, Artificial Sequence
  Description of Artificial Sequence: Synthetic oligonucleotide
  Sense strand starting at position 3504 of SEQ ID NO: 1243187
ugaugcucugugcgggaua

SEQ ID NO: 1399955 - RNA, 19 nt, Artificial Sequence
  Description of Artificial Sequence: Synthetic oligonucleotide
  Antisense strand to SEQ ID NO: 1399954
uaucccgcacagagcauca

SEQ ID NO: 1399956 - RNA, 19 nt, Artificial Sequence
  Description of Artificial Sequence: Synthetic oligonucleotide
  Sense strand starting at position 3506 of SEQ ID NO: 1243187
augcucugugcgggauaga

SEQ ID NO: 1399957 - RNA, 19 nt, Artificial Sequence
  Description of Artificial Sequence: Synthetic oligonucleotide
  Antisense strand to SEQ ID NO: 1399956
ucuaucccgcacagagcau

SEQ ID NO: 1399958 - RNA, 19 nt, Artificial Sequence
  Description of Artificial Sequence: Synthetic oligonucleotide
  Sense strand starting at position 3568 of SEQ ID NO: 1243187
agggcaaaguuugugcaaa

SEQ ID NO: 1399959 - RNA, 19 nt, Artificial Sequence
  Description of Artificial Sequence: Synthetic oligonucleotide
  Antisense strand to SEQ ID NO: 1399958
uuugcacaaacuuugcccu

SEQ ID NO: 1399960 - RNA, 19 nt, Artificial Sequence
  Description of Artificial Sequence: Synthetic oligonucleotide
  Sense strand starting at position 3570 of SEQ ID NO: 1243187
ggcaaaguuugugcaaaga

SEQ ID NO: 1399961 - RNA, 19 nt, Artificial Sequence
  Description of Artificial Sequence: Synthetic oligonucleotide
  Antisense strand to SEQ ID NO: 1399960
ucuuugcacaaacuuugcc

SEQ ID NO: 1399962 - RNA, 19 nt, Artificial Sequence
  Description of Artificial Sequence: Synthetic oligonucleotide
  Sense strand starting at position 3627 of SEQ ID NO: 1243187
ccuggugcgagcugagaau

SEQ ID NO: 1399963 - RNA, 19 nt, Artificial Sequence
  Description of Artificial Sequence: Synthetic oligonucleotide
  Antisense strand to SEQ ID NO: 1399962
auucucagcucgcaccagg

SEQ ID NO: 1399964 - RNA, 19 nt, Artificial Sequence
  Description of Artificial Sequence: Synthetic oligonucleotide
  Sense strand starting at position 3790 of SEQ ID NO: 1243187
gaauccagcuuggaugaua

SEQ ID NO: 1399965 - RNA, 19 nt, Artificial Sequence
  Description of Artificial Sequence: Synthetic oligonucleotide
  Antisense strand to SEQ ID NO: 1399964
uaucauccaagcuggauuc

SEQ ID NO: 1399966 - RNA, 19 nt, Artificial Sequence
  Description of Artificial Sequence: Synthetic oligonucleotide
  Sense strand starting at position 3795 of SEQ ID NO: 1243187
cagcuuggaugauagucau

SEQ ID NO: 1399967 - RNA, 19 nt, Artificial Sequence
  Description of Artificial Sequence: Synthetic oligonucleotide
  Antisense strand to SEQ ID NO: 1399966
augacuaucauccaagcug

SEQ ID NO: 1399968 - RNA, 19 nt, Artificial Sequence
  Description of Artificial Sequence: Synthetic oligonucleotide
  Sense strand starting at position 3883 of SEQ ID NO: 1243187
guagcuagggcccaugaaa

SEQ ID NO: 1399969 - RNA, 19 nt, Artificial Sequence
  Description of Artificial Sequence: Synthetic oligonucleotide
  Antisense strand to SEQ ID NO: 1399968
uuucaugggcccuagcuac

SEQ ID NO: 1399970 - RNA, 19 nt, Artificial Sequence
  Description of Artificial Sequence: Synthetic oligonucleotide
  Sense strand starting at position 302 of SEQ ID NO: 1243188
cucauugucucaucucaga

SEQ ID NO: 1399971 - RNA, 19 nt, Artificial Sequence
  Description of Artificial Sequence: Synthetic oligonucleotide
  Antisense strand to SEQ ID NO: 1399970
ucugagaugagacaaugag

SEQ ID NO: 1399972 - RNA, 19 nt, Artificial Sequence
  Description of Artificial Sequence: Synthetic oligonucleotide
  Sense strand starting at position 318 of SEQ ID NO: 1243188
agaaaucgauucuuugcaa

SEQ ID NO: 1399973 - RNA, 19 nt, Artificial Sequence
  Description of Artificial Sequence: Synthetic oligonucleotide
  Antisense strand to SEQ ID NO: 1399972
uugcaaagaaucgauuucu

SEQ ID NO: 1399974 - RNA, 19 nt, Artificial Sequence
  Description of Artificial Sequence: Synthetic oligonucleotide
  Sense strand starting at position 361 of SEQ ID NO: 1243188
aggaaucuuagucaugggu

SEQ ID NO: 1399975 - RNA, 19 nt, Artificial Sequence
  Description of Artificial Sequence: Synthetic oligonucleotide
  Antisense strand to SEQ ID NO: 1399974
acccaugacuaagauuccu

SEQ ID NO: 1399976 - RNA, 19 nt, Artificial Sequence
  Description of Artificial Sequence: Synthetic oligonucleotide
  Sense strand starting at position 364 of SEQ ID NO: 1243188
aaucuuagucauggguaaa

SEQ ID NO: 1399977 - RNA, 19 nt, Artificial Sequence
  Description of Artificial Sequence: Synthetic oligonucleotide
  Antisense strand to SEQ ID NO: 1399976
uuuacccaugacuaagauu

SEQ ID NO: 1399978 - RNA, 19 nt, Artificial Sequence
  Description of Artificial Sequence: Synthetic oligonucleotide
  Sense strand starting at position 471 of SEQ ID NO: 1243188
ccucaagucuuccuauugu

SEQ ID NO: 1399979 - RNA, 19 nt, Artificial Sequence
  Description of Artificial Sequence: Synthetic oligonucleotide
  Antisense strand to SEQ ID NO: 1399978
acaauaggaagacuugagg

SEQ ID NO: 1399980 - RNA, 19 nt, Artificial Sequence
  Description of Artificial Sequence: Synthetic oligonucleotide
  Sense strand starting at position 715 of SEQ ID NO: 1243188
cuuugauauuaaucaaggu

SEQ ID NO: 1399981 - RNA, 19 nt, Artificial Sequence
  Description of Artificial Sequence: Synthetic oligonucleotide
  Antisense strand to SEQ ID NO: 1399980
accuugauuaauaucaaag

SEQ ID NO: 1399982 - RNA, 19 nt, Artificial Sequence
  Description of Artificial Sequence: Synthetic oligonucleotide
  Sense strand starting at position 748 of SEQ ID NO: 1243188
aggcaagauuuauaauucu

SEQ ID NO: 1399983 - RNA, 19 nt, Artificial Sequence
  Description of Artificial Sequence: Synthetic oligonucleotide
  Antisense strand to SEQ ID NO: 1399982
agaauuauaaaucuugccu

SEQ ID NO: 1399984 - RNA, 19 nt, Artificial Sequence
  Description of Artificial Sequence: Synthetic oligonucleotide
  Sense strand starting at position 774 of SEQ ID NO: 1243188
uccagauaaugcuuacaug

SEQ ID NO: 1399985 - RNA, 19 nt, Artificial Sequence
  Description of Artificial Sequence: Synthetic oligonucleotide
  Antisense strand to SEQ ID NO: 1399984
cauguaagcauuaucugga

SEQ ID NO: 1399986 - RNA, 19 nt, Artificial Sequence
  Description of Artificial Sequence: Synthetic oligonucleotide
  Sense strand starting at position 969 of SEQ ID NO: 1243188
acuguuuaguucuucucau

SEQ ID NO: 1399987 - RNA, 19 nt, Artificial Sequence
  Description of Artificial Sequence: Synthetic oligonucleotide
  Antisense strand to SEQ ID NO: 1399986
augagaagaacuaaacagu

SEQ ID NO: 1399988 - RNA, 19 nt, Artificial Sequence
  Description of Artificial Sequence: Synthetic oligonucleotide
  Sense strand starting at position 1005 of SEQ ID NO: 1243188
aacauuuccugugagauag

SEQ ID NO: 1399989 - RNA, 19 nt, Artificial Sequence
  Description of Artificial Sequence: Synthetic oligonucleotide
  Antisense strand to SEQ ID NO: 1399988
cuaucucacaggaaauguu

SEQ ID NO: 1399990 - RNA, 19 nt, Artificial Sequence
  Description of Artificial Sequence: Synthetic oligonucleotide
  Sense strand starting at position 1007 of SEQ ID NO: 1243188
cauuuccugugagauaguu

SEQ ID NO: 1399991 - RNA, 19 nt, Artificial Sequence
  Description of Artificial Sequence: Synthetic oligonucleotide
  Antisense strand to SEQ ID NO: 1399990
aacuaucucacaggaaaug

SEQ ID NO: 1399992 - RNA, 19 nt, Artificial Sequence
  Description of Artificial Sequence: Synthetic oligonucleotide
  Sense strand starting at position 1396 of SEQ ID NO: 1243188
cugaacaauucucagaaga

SEQ ID NO: 1399993 - RNA, 19 nt, Artificial Sequence
  Description of Artificial Sequence: Synthetic oligonucleotide
  Antisense strand to SEQ ID NO: 1399992
ucuucugagaauuguucag

SEQ ID NO: 1399994 - RNA, 19 nt, Artificial Sequence
  Description of Artificial Sequence: Synthetic oligonucleotide
  Sense strand starting at position 1437 of SEQ ID NO: 1243188
ugaguuaacugcuuccaaa

SEQ ID NO: 1399995 - RNA, 19 nt, Artificial Sequence
  Description of Artificial Sequence: Synthetic oligonucleotide
  Antisense strand to SEQ ID NO: 1399994
uuuggaagcaguuaacuca

SEQ ID NO: 1399996 - RNA, 19 nt, Artificial Sequence
  Description of Artificial Sequence: Synthetic oligonucleotide
  Sense strand starting at position 1532 of SEQ ID NO: 1243188
cagggugcauuugucuuaa

SEQ ID NO: 1399997 - RNA, 19 nt, Artificial Sequence
  Description of Artificial Sequence: Synthetic oligonucleotide
  Antisense strand to SEQ ID NO: 1399996
uuaagacaaaugcacccug

SEQ ID NO: 1399998 - RNA, 19 nt, Artificial Sequence
  Description of Artificial Sequence: Synthetic oligonucleotide
  Sense strand starting at position 1534 of SEQ ID NO: 1243188
gggugcauuugucuuaauu

SEQ ID NO: 1399999 - RNA, 19 nt, Artificial Sequence
  Description of Artificial Sequence: Synthetic oligonucleotide
  Antisense strand to SEQ ID NO: 1399998
aauuaagacaaaugcaccc

SEQ ID NO: 1400000 - RNA, 19 nt, Artificial Sequence
  Description of Artificial Sequence: Synthetic oligonucleotide
  Sense strand starting at position 1536 of SEQ ID NO: 1243188
gugcauuugucuuaauuuc

SEQ ID NO: 1400001 - RNA, 19 nt, Artificial Sequence
  Description of Artificial Sequence: Synthetic oligonucleotide
  Antisense strand to SEQ ID NO: 1400000
gaaauuaagacaaaugcac

SEQ ID NO: 1400002 - RNA, 19 nt, Artificial Sequence
  Description of Artificial Sequence: Synthetic oligonucleotide
  Sense strand starting at position 2006 of SEQ ID NO: 1243188
guaccaaguuaagauuuaa

SEQ ID NO: 1400003 - RNA, 19 nt, Artificial Sequence
  Description of Artificial Sequence: Synthetic oligonucleotide
  Antisense strand to SEQ ID NO: 1400002
uuaaaucuuaacuugguac

SEQ ID NO: 1400004 - RNA, 19 nt, Artificial Sequence
  Description of Artificial Sequence: Synthetic oligonucleotide
  Sense strand starting at position 2088 of SEQ ID NO: 1243188
cugcaauuacucugaugug

SEQ ID NO: 1400005 - RNA, 19 nt, Artificial Sequence
  Description of Artificial Sequence: Synthetic oligonucleotide
  Antisense strand to SEQ ID NO: 1400004
cacaucagaguaauugcag

SEQ ID NO: 1400006 - RNA, 19 nt, Artificial Sequence
  Description of Artificial Sequence: Synthetic oligonucleotide
  Sense strand starting at position 2100 of SEQ ID NO: 1243188
ugaugugaaucuuugauga

SEQ ID NO: 1400007 - RNA, 19 nt, Artificial Sequence
  Description of Artificial Sequence: Synthetic oligonucleotide
  Antisense strand to SEQ ID NO: 1400006
ucaucaaagauucacauca

SEQ ID NO: 1400008 - RNA, 19 nt, Artificial Sequence
  Description of Artificial Sequence: Synthetic oligonucleotide
  Sense strand starting at position 2123 of SEQ ID NO: 1243188
cgacaucuugcaugguuaa

SEQ ID NO: 1400009 - RNA, 19 nt, Artificial Sequence
  Description of Artificial Sequence: Synthetic oligonucleotide
  Antisense strand to SEQ ID NO: 1400008
uuaaccaugcaagaugucg

SEQ ID NO: 1400010 - RNA, 19 nt, Artificial Sequence
  Description of Artificial Sequence: Synthetic oligonucleotide
  Sense strand starting at position 2124 of SEQ ID NO: 1243188
gacaucuugcaugguuaau

SEQ ID NO: 1400011 - RNA, 19 nt, Artificial Sequence
  Description of Artificial Sequence: Synthetic oligonucleotide
  Antisense strand to SEQ ID NO: 1400010
auuaaccaugcaagauguc

SEQ ID NO: 1400012 - RNA, 19 nt, Artificial Sequence
  Description of Artificial Sequence: Synthetic oligonucleotide
  Sense strand starting at position 2154 of SEQ ID NO: 1243188
cugucauguuugguuaaug

SEQ ID NO: 1400013 - RNA, 19 nt, Artificial Sequence
  Description of Artificial Sequence: Synthetic oligonucleotide
  Antisense strand to SEQ ID NO: 1400012
cauuaaccaaacaugacag

SEQ ID NO: 1400014 - RNA, 19 nt, Artificial Sequence
  Description of Artificial Sequence: Synthetic oligonucleotide
  Sense strand starting at position 2341 of SEQ ID NO: 1243188
gucuacaguauguguagau

SEQ ID NO: 1400015 - RNA, 19 nt, Artificial Sequence
  Description of Artificial Sequence: Synthetic oligonucleotide
  Antisense strand to SEQ ID NO: 1400014
aucuacacauacuguagac

SEQ ID NO: 1400016 - RNA, 19 nt, Artificial Sequence
  Description of Artificial Sequence: Synthetic oligonucleotide
  Sense strand starting at position 2342 of SEQ ID NO: 1243188
ucuacaguauguguagaua

SEQ ID NO: 1400017 - RNA, 19 nt, Artificial Sequence
  Description of Artificial Sequence: Synthetic oligonucleotide
  Antisense strand to SEQ ID NO: 1400016
uaucuacacauacuguaga

SEQ ID NO: 1400018 - RNA, 19 nt, Artificial Sequence
  Description of Artificial Sequence: Synthetic oligonucleotide
  Sense strand starting at position 2345 of SEQ ID NO: 1243188
acaguauguguagauacaa

SEQ ID NO: 1400019 - RNA, 19 nt, Artificial Sequence
  Description of Artificial Sequence: Synthetic oligonucleotide
  Antisense strand to SEQ ID NO: 1400018
uuguaucuacacauacugu

SEQ ID NO: 1400020 - RNA, 19 nt, Artificial Sequence
  Description of Artificial Sequence: Synthetic oligonucleotide
  Sense strand starting at position 2422 of SEQ ID NO: 1243188
acaguaaauucgccaucuu

SEQ ID NO: 1400021 - RNA, 19 nt, Artificial Sequence
  Description of Artificial Sequence: Synthetic oligonucleotide
  Antisense strand to SEQ ID NO: 1400020
aagauggcgaauuuacugu

SEQ ID NO: 1400022 - RNA, 19 nt, Artificial Sequence
  Description of Artificial Sequence: Synthetic oligonucleotide
  Sense strand starting at position 2439 of SEQ ID NO: 1243188
uuaaauguuuggccucuua

SEQ ID NO: 1400023 - RNA, 19 nt, Artificial Sequence
  Description of Artificial Sequence: Synthetic oligonucleotide
  Antisense strand to SEQ ID NO: 1400022
uaagaggccaaacauuuaa

SEQ ID NO: 1400024 - RNA, 19 nt, Artificial Sequence
  Description of Artificial Sequence: Synthetic oligonucleotide
  Sense strand starting at position 2555 of SEQ ID NO: 1243188
ugaaacugucacugacaca

SEQ ID NO: 1400025 - RNA, 19 nt, Artificial Sequence
  Description of Artificial Sequence: Synthetic oligonucleotide
  Antisense strand to SEQ ID NO: 1400024
ugugucagugacaguuuca

SEQ ID NO: 1400026 - RNA, 19 nt, Artificial Sequence
  Description of Artificial Sequence: Synthetic oligonucleotide
  Sense strand starting at position 2648 of SEQ ID NO: 1243188
uaugauguguaaguaauga

SEQ ID NO: 1400027 - RNA, 19 nt, Artificial Sequence
  Description of Artificial Sequence: Synthetic oligonucleotide
  Antisense strand to SEQ ID NO: 1400026
ucauuacuuacacaucaua

SEQ ID NO: 1400028 - RNA, 19 nt, Artificial Sequence
  Description of Artificial Sequence: Synthetic oligonucleotide
  Sense strand starting at position 2799 of SEQ ID NO: 1243188
ggaaauucagugcggcaaa

SEQ ID NO: 1400029 - RNA, 19 nt, Artificial Sequence
  Description of Artificial Sequence: Synthetic oligonucleotide
  Antisense strand to SEQ ID NO: 1400028
uuugccgcacugaauuucc

SEQ ID NO: 1400030 - RNA, 19 nt, Artificial Sequence
  Description of Artificial Sequence: Synthetic oligonucleotide
  Sense strand starting at position 2812 of SEQ ID NO: 1243188
ggcaaacaacuguacaauu

SEQ ID NO: 1400031 - RNA, 19 nt, Artificial Sequence
  Description of Artificial Sequence: Synthetic oligonucleotide
  Antisense strand to SEQ ID NO: 1400030
aauuguacaguuguuugcc

SEQ ID NO: 1400032 - RNA, 19 nt, Artificial Sequence
  Description of Artificial Sequence: Synthetic oligonucleotide
  Sense strand starting at position 2820 of SEQ ID NO: 1243188
acuguacaauuauaggaaa

SEQ ID NO: 1400033 - RNA, 19 nt, Artificial Sequence
  Description of Artificial Sequence: Synthetic oligonucleotide
  Antisense strand to SEQ ID NO: 1400032
uuuccuauaauuguacagu

SEQ ID NO: 1400034 - RNA, 19 nt, Artificial Sequence
  Description of Artificial Sequence: Synthetic oligonucleotide
  Sense strand starting at position 2878 of SEQ ID NO: 1243188
ggcaccagaugauuaaagu

SEQ ID NO: 1400035 - RNA, 19 nt, Artificial Sequence
  Description of Artificial Sequence: Synthetic oligonucleotide
  Antisense strand to SEQ ID NO: 1400034
acuuuaaucaucuggugcc

SEQ ID NO: 1400036 - RNA, 19 nt, Artificial Sequence
  Description of Artificial Sequence: Synthetic oligonucleotide
  Sense strand starting at position 3126 of SEQ ID NO: 1243188
gguucuuacucagcuacca

SEQ ID NO: 1400037 - RNA, 19 nt, Artificial Sequence
  Description of Artificial Sequence: Synthetic oligonucleotide
  Antisense strand to SEQ ID NO: 1400036
ugguagcugaguaagaacc

SEQ ID NO: 1400038 - RNA, 19 nt, Artificial Sequence
  Description of Artificial Sequence: Synthetic oligonucleotide
  Sense strand starting at position 3461 of SEQ ID NO: 1243188
uguguuaacgagcacugua

SEQ ID NO: 1400039 - RNA, 19 nt, Artificial Sequence
  Description of Artificial Sequence: Synthetic oligonucleotide
  Antisense strand to SEQ ID NO: 1400038
uacagugcucguuaacaca

SEQ ID NO: 1400040 - RNA, 19 nt, Artificial Sequence
  Description of Artificial Sequence: Synthetic oligonucleotide
  Sense strand starting at position 3564 of SEQ ID NO: 1243188
aguaguuguagcuaacauu

SEQ ID NO: 1400041 - RNA, 19 nt, Artificial Sequence
  Description of Artificial Sequence: Synthetic oligonucleotide
  Antisense strand to SEQ ID NO: 1400040
aauguuagcuacaacuacu

SEQ ID NO: 1400042 - RNA, 19 nt, Artificial Sequence
  Description of Artificial Sequence: Synthetic oligonucleotide
  Sense strand starting at position 3672 of SEQ ID NO: 1243188
uguugaggguagcuuugaa

SEQ ID NO: 1400043 - RNA, 19 nt, Artificial Sequence
  Description of Artificial Sequence: Synthetic oligonucleotide
  Antisense strand to SEQ ID NO: 1400042
uucaaagcuacccucaaca

SEQ ID NO: 1400044 - RNA, 19 nt, Artificial Sequence
  Description of Artificial Sequence: Synthetic oligonucleotide
  Sense strand starting at position 3805 of SEQ ID NO: 1243188
uggagcaugguggauauau

SEQ ID NO: 1400045 - RNA, 19 nt, Artificial Sequence
  Description of Artificial Sequence: Synthetic oligonucleotide
  Antisense strand to SEQ ID NO: 1400044
auauauccaccaugcucca

SEQ ID NO: 1400046 - RNA, 19 nt, Artificial Sequence
  Description of Artificial Sequence: Synthetic oligonucleotide
  Sense strand starting at position 3865 of SEQ ID NO: 1243188
acccaagugugguuaaagu

SEQ ID NO: 1400047 - RNA, 19 nt, Artificial Sequence
  Description of Artificial Sequence: Synthetic oligonucleotide
  Antisense strand to SEQ ID NO: 1400046
acuuuaaccacacuugggu

SEQ ID NO: 1400048 - RNA, 19 nt, Artificial Sequence
  Description of Artificial Sequence: Synthetic oligonucleotide
  Sense strand starting at position 3981 of SEQ ID NO: 1243188
ucaccaagucacuguuaag

SEQ ID NO: 1400049 - RNA, 19 nt, Artificial Sequence
  Description of Artificial Sequence: Synthetic oligonucleotide
  Antisense strand to SEQ ID NO: 1400048
cuuaacagugacuugguga

SEQ ID NO: 1400050 - RNA, 19 nt, Artificial Sequence
  Description of Artificial Sequence: Synthetic oligonucleotide
  Sense strand starting at position 314 of SEQ ID NO: 1243189
gcaaacaaaucugcaguua

SEQ ID NO: 1400051 - RNA, 19 nt, Artificial Sequence
  Description of Artificial Sequence: Synthetic oligonucleotide
  Antisense strand to SEQ ID NO: 1400050
uaacugcagauuuguuugc

SEQ ID NO: 1400052 - RNA, 19 nt, Artificial Sequence
  Description of Artificial Sequence: Synthetic oligonucleotide
  Sense strand starting at position 471 of SEQ ID NO: 1243189
ugcugagaucuaggcucuu

SEQ ID NO: 1400053 - RNA, 19 nt, Artificial Sequence
  Description of Artificial Sequence: Synthetic oligonucleotide
  Antisense strand to SEQ ID NO: 1400052
aagagccuagaucucagca

SEQ ID NO: 1400054 - RNA, 19 nt, Artificial Sequence
  Description of Artificial Sequence: Synthetic oligonucleotide
  Sense strand starting at position 487 of SEQ ID NO: 1243189
cuuauuccguaaguuaaua

SEQ ID NO: 1400055 - RNA, 19 nt, Artificial Sequence
  Description of Artificial Sequence: Synthetic oligonucleotide
  Antisense strand to SEQ ID NO: 1400054
uauuaacuuacggaauaag

SEQ ID NO: 1400056 - RNA, 19 nt, Artificial Sequence
  Description of Artificial Sequence: Synthetic oligonucleotide
  Sense strand starting at position 518 of SEQ ID NO: 1243189
auuuauggaucuuguagga

SEQ ID NO: 1400057 - RNA, 19 nt, Artificial Sequence
  Description of Artificial Sequence: Synthetic oligonucleotide
  Antisense strand to SEQ ID NO: 1400056
uccuacaagauccauaaau

SEQ ID NO: 1400058 - RNA, 19 nt, Artificial Sequence
  Description of Artificial Sequence: Synthetic oligonucleotide
  Sense strand starting at position 534 of SEQ ID NO: 1243189
ggauucuaaccagggcuua

SEQ ID NO: 1400059 - RNA, 19 nt, Artificial Sequence
  Description of Artificial Sequence: Synthetic oligonucleotide
  Antisense strand to SEQ ID NO: 1400058
uaagcccugguuagaaucc

SEQ ID NO: 1400060 - RNA, 19 nt, Artificial Sequence
  Description of Artificial Sequence: Synthetic oligonucleotide
  Sense strand starting at position 560 of SEQ ID NO: 1243189
cgaaccuuccuaugucaau

SEQ ID NO: 1400061 - RNA, 19 nt, Artificial Sequence
  Description of Artificial Sequence: Synthetic oligonucleotide
  Antisense strand to SEQ ID NO: 1400060
auugacauaggaagguucg

SEQ ID NO: 1400062 - RNA, 19 nt, Artificial Sequence
  Description of Artificial Sequence: Synthetic oligonucleotide
  Sense strand starting at position 600 of SEQ ID NO: 1243189
aucauugucucccuaguuu

SEQ ID NO: 1400063 - RNA, 19 nt, Artificial Sequence
  Description of Artificial Sequence: Synthetic oligonucleotide
  Antisense strand to SEQ ID NO: 1400062
aaacuagggagacaaugau

SEQ ID NO: 1400064 - RNA, 19 nt, Artificial Sequence
  Description of Artificial Sequence: Synthetic oligonucleotide
  Sense strand starting at position 645 of SEQ ID NO: 1243189
gcacucagugaguaggaua

SEQ ID NO: 1400065 - RNA, 19 nt, Artificial Sequence
  Description of Artificial Sequence: Synthetic oligonucleotide
  Antisense strand to SEQ ID NO: 1400064
uauccuacucacugagugc

SEQ ID NO: 1400066 - RNA, 19 nt, Artificial Sequence
  Description of Artificial Sequence: Synthetic oligonucleotide
  Sense strand starting at position 781 of SEQ ID NO: 1243189
aaagcauguugagcaaauu

SEQ ID NO: 1400067 - RNA, 19 nt, Artificial Sequence
  Description of Artificial Sequence: Synthetic oligonucleotide
  Antisense strand to SEQ ID NO: 1400066
aauuugcucaacaugcuuu

SEQ ID NO: 1400068 - RNA, 19 nt, Artificial Sequence
  Description of Artificial Sequence: Synthetic oligonucleotide
  Sense strand starting at position 941 of SEQ ID NO: 1243189
aagaaauaagccgggucaa

SEQ ID NO: 1400069 - RNA, 19 nt, Artificial Sequence
  Description of Artificial Sequence: Synthetic oligonucleotide
  Antisense strand to SEQ ID NO: 1400068
uugacccggcuuauuucuu

SEQ ID NO: 1400070 - RNA, 19 nt, Artificial Sequence
  Description of Artificial Sequence: Synthetic oligonucleotide
  Sense strand starting at position 942 of SEQ ID NO: 1243189
agaaauaagccgggucaaa

SEQ ID NO: 1400071 - RNA, 19 nt, Artificial Sequence
  Description of Artificial Sequence: Synthetic oligonucleotide
  Antisense strand to SEQ ID NO: 1400070
uuugacccggcuuauuucu

SEQ ID NO: 1400072 - RNA, 19 nt, Artificial Sequence
  Description of Artificial Sequence: Synthetic oligonucleotide
  Sense strand starting at position 1085 of SEQ ID NO: 1243189
gagugaaagccucaaucua

SEQ ID NO: 1400073 - RNA, 19 nt, Artificial Sequence
  Description of Artificial Sequence: Synthetic oligonucleotide
  Antisense strand to SEQ ID NO: 1400072
uagauugaggcuuucacuc

SEQ ID NO: 1400074 - RNA, 19 nt, Artificial Sequence
  Description of Artificial Sequence: Synthetic oligonucleotide
  Sense strand starting at position 1166 of SEQ ID NO: 1243189
gcuauuauaggucauuaac

SEQ ID NO: 1400075 - RNA, 19 nt, Artificial Sequence
  Description of Artificial Sequence: Synthetic oligonucleotide
  Antisense strand to SEQ ID NO: 1400074
guuaaugaccuauaauagc

SEQ ID NO: 1400076 - RNA, 19 nt, Artificial Sequence
  Description of Artificial Sequence: Synthetic oligonucleotide
  Sense strand starting at position 1175 of SEQ ID NO: 1243189
ggucauuaacccggaagca

SEQ ID NO: 1400077 - RNA, 19 nt, Artificial Sequence
  Description of Artificial Sequence: Synthetic oligonucleotide
  Antisense strand to SEQ ID NO: 1400076
ugcuuccggguuaaugacc

SEQ ID NO: 1400078 - RNA, 19 nt, Artificial Sequence
  Description of Artificial Sequence: Synthetic oligonucleotide
  Sense strand starting at position 1176 of SEQ ID NO: 1243189
gucauuaacccggaagcau

SEQ ID NO: 1400079 - RNA, 19 nt, Artificial Sequence
  Description of Artificial Sequence: Synthetic oligonucleotide
  Antisense strand to SEQ ID NO: 1400078
augcuuccggguuaaugac

SEQ ID NO: 1400080 - RNA, 19 nt, Artificial Sequence
  Description of Artificial Sequence: Synthetic oligonucleotide
  Sense strand starting at position 1513 of SEQ ID NO: 1243189
gaaccucugcguuacacuu

SEQ ID NO: 1400081 - RNA, 19 nt, Artificial Sequence
  Description of Artificial Sequence: Synthetic oligonucleotide
  Antisense strand to SEQ ID NO: 1400080
aaguguaacgcagagguuc

SEQ ID NO: 1400082 - RNA, 19 nt, Artificial Sequence
  Description of Artificial Sequence: Synthetic oligonucleotide
  Sense strand starting at position 1602 of SEQ ID NO: 1243189
cugcuauaugaguacaaga

SEQ ID NO: 1400083 - RNA, 19 nt, Artificial Sequence
  Description of Artificial Sequence: Synthetic oligonucleotide
  Antisense strand to SEQ ID NO: 1400082
ucuuguacucauauagcag

SEQ ID NO: 1400084 - RNA, 19 nt, Artificial Sequence
  Description of Artificial Sequence: Synthetic oligonucleotide
  Sense strand starting at position 2011 of SEQ ID NO: 1243189
cucauugucucaucucaga

SEQ ID NO: 1400085 - RNA, 19 nt, Artificial Sequence
  Description of Artificial Sequence: Synthetic oligonucleotide
  Antisense strand to SEQ ID NO: 1400084
ucugagaugagacaaugag

SEQ ID NO: 1400086 - RNA, 19 nt, Artificial Sequence
  Description of Artificial Sequence: Synthetic oligonucleotide
  Sense strand starting at position 2027 of SEQ ID NO: 1243189
agaaaucgauucuuugcaa

SEQ ID NO: 1400087 - RNA, 19 nt, Artificial Sequence
  Description of Artificial Sequence: Synthetic oligonucleotide
  Antisense strand to SEQ ID NO: 1400086
uugcaaagaaucgauuucu

SEQ ID NO: 1400088 - RNA, 19 nt, Artificial Sequence
  Description of Artificial Sequence: Synthetic oligonucleotide
  Sense strand starting at position 2070 of SEQ ID NO: 1243189
aggaaucuuagucaugggu

SEQ ID NO: 1400089 - RNA, 19 nt, Artificial Sequence
  Description of Artificial Sequence: Synthetic oligonucleotide
  Antisense strand to SEQ ID NO: 1400088
acccaugacuaagauuccu

SEQ ID NO: 1400090 - RNA, 19 nt, Artificial Sequence
  Description of Artificial Sequence: Synthetic oligonucleotide
  Sense strand starting at position 2073 of SEQ ID NO: 1243189
aaucuuagucauggguaaa

SEQ ID NO: 1400091 - RNA, 19 nt, Artificial Sequence
  Description of Artificial Sequence: Synthetic oligonucleotide
  Antisense strand to SEQ ID NO: 1400090
uuuacccaugacuaagauu

SEQ ID NO: 1400092 - RNA, 19 nt, Artificial Sequence
  Description of Artificial Sequence: Synthetic oligonucleotide
  Sense strand starting at position 2180 of SEQ ID NO: 1243189
ccucaagucuuccuauugu

SEQ ID NO: 1400093 - RNA, 19 nt, Artificial Sequence
  Description of Artificial Sequence: Synthetic oligonucleotide
  Antisense strand to SEQ ID NO: 1400092
acaauaggaagacuugagg

SEQ ID NO: 1400094 - RNA, 19 nt, Artificial Sequence
  Description of Artificial Sequence: Synthetic oligonucleotide
  Sense strand starting at position 2424 of SEQ ID NO: 1243189
cuuugauauuaaucaaggu

SEQ ID NO: 1400095 - RNA, 19 nt, Artificial Sequence
  Description of Artificial Sequence: Synthetic oligonucleotide
  Antisense strand to SEQ ID NO: 1400094
accuugauuaauaucaaag

SEQ ID NO: 1400096 - RNA, 19 nt, Artificial Sequence
  Description of Artificial Sequence: Synthetic oligonucleotide
  Sense strand starting at position 2457 of SEQ ID NO: 1243189
aggcaagauuuauaauucu

SEQ ID NO: 1400097 - RNA, 19 nt, Artificial Sequence
  Description of Artificial Sequence: Synthetic oligonucleotide
  Antisense strand to SEQ ID NO: 1400096
agaauuauaaaucuugccu

SEQ ID NO: 1400098 - RNA, 19 nt, Artificial Sequence
  Description of Artificial Sequence: Synthetic oligonucleotide
  Sense strand starting at position 2483 of SEQ ID NO: 1243189
uccagauaaugcuuacaug

SEQ ID NO: 1400099 - RNA, 19 nt, Artificial Sequence
  Description of Artificial Sequence: Synthetic oligonucleotide
  Antisense strand to SEQ ID NO: 1400098
cauguaagcauuaucugga

SEQ ID NO: 1400100 - RNA, 19 nt, Artificial Sequence
  Description of Artificial Sequence: Synthetic oligonucleotide
  Sense strand starting at position 2672 of SEQ ID NO: 1243189
gguguuacuguuuaguucu

SEQ ID NO: 1400101 - RNA, 19 nt, Artificial Sequence
  Description of Artificial Sequence: Synthetic oligonucleotide
  Antisense strand to SEQ ID NO: 1400100
agaacuaaacaguaacacc

SEQ ID NO: 1400102 - RNA, 19 nt, Artificial Sequence
  Description of Artificial Sequence: Synthetic oligonucleotide
  Sense strand starting at position 2678 of SEQ ID NO: 1243189
acuguuuaguucuucucau

SEQ ID NO: 1400103 - RNA, 19 nt, Artificial Sequence
  Description of Artificial Sequence: Synthetic oligonucleotide
  Antisense strand to SEQ ID NO: 1400102
augagaagaacuaaacagu

SEQ ID NO: 1400104 - RNA, 19 nt, Artificial Sequence
  Description of Artificial Sequence: Synthetic oligonucleotide
  Sense strand starting at position 2714 of SEQ ID NO: 1243189
aacauuuccugugagauag

SEQ ID NO: 1400105 - RNA, 19 nt, Artificial Sequence
  Description of Artificial Sequence: Synthetic oligonucleotide
  Antisense strand to SEQ ID NO: 1400104
cuaucucacaggaaauguu

SEQ ID NO: 1400106 - RNA, 19 nt, Artificial Sequence
  Description of Artificial Sequence: Synthetic oligonucleotide
  Sense strand starting at position 2716 of SEQ ID NO: 1243189
cauuuccugugagauaguu

SEQ ID NO: 1400107 - RNA, 19 nt, Artificial Sequence
  Description of Artificial Sequence: Synthetic oligonucleotide
  Antisense strand to SEQ ID NO: 1400106
aacuaucucacaggaaaug

SEQ ID NO: 1400108 - RNA, 19 nt, Artificial Sequence
  Description of Artificial Sequence: Synthetic oligonucleotide
  Sense strand starting at position 3105 of SEQ ID NO: 1243189
cugaacaauucucagaaga

SEQ ID NO: 1400109 - RNA, 19 nt, Artificial Sequence
  Description of Artificial Sequence: Synthetic oligonucleotide
  Antisense strand to SEQ ID NO: 1400108
ucuucugagaauuguucag

SEQ ID NO: 1400110 - RNA, 19 nt, Artificial Sequence
  Description of Artificial Sequence: Synthetic oligonucleotide
  Sense strand starting at position 3146 of SEQ ID NO: 1243189
ugaguuaacugcuuccaaa

SEQ ID NO: 1400111 - RNA, 19 nt, Artificial Sequence
  Description of Artificial Sequence: Synthetic oligonucleotide
  Antisense strand to SEQ ID NO: 1400110
uuuggaagcaguuaacuca

SEQ ID NO: 1400112 - RNA, 19 nt, Artificial Sequence
  Description of Artificial Sequence: Synthetic oligonucleotide
  Sense strand starting at position 3241 of SEQ ID NO: 1243189
cagggugcauuugucuuaa

SEQ ID NO: 1400113 - RNA, 19 nt, Artificial Sequence
  Description of Artificial Sequence: Synthetic oligonucleotide
  Antisense strand to SEQ ID NO: 1400112
uuaagacaaaugcacccug

SEQ ID NO: 1400114 - RNA, 19 nt, Artificial Sequence
  Description of Artificial Sequence: Synthetic oligonucleotide
  Sense strand starting at position 3243 of SEQ ID NO: 1243189
gggugcauuugucuuaauu

SEQ ID NO: 1400115 - RNA, 19 nt, Artificial Sequence
  Description of Artificial Sequence: Synthetic oligonucleotide
  Antisense strand to SEQ ID NO: 1400114
aauuaagacaaaugcaccc

SEQ ID NO: 1400116 - RNA, 19 nt, Artificial Sequence
  Description of Artificial Sequence: Synthetic oligonucleotide
  Sense strand starting at position 3245 of SEQ ID NO: 1243189
gugcauuugucuuaauuuc

SEQ ID NO: 1400117 - RNA, 19 nt, Artificial Sequence
  Description of Artificial Sequence: Synthetic oligonucleotide
  Antisense strand to SEQ ID NO: 1400116
gaaauuaagacaaaugcac

SEQ ID NO: 1400118 - RNA, 19 nt, Artificial Sequence
  Description of Artificial Sequence: Synthetic oligonucleotide
  Sense strand starting at position 3715 of SEQ ID NO: 1243189
guaccaaguuaagauuuaa

SEQ ID NO: 1400119 - RNA, 19 nt, Artificial Sequence
  Description of Artificial Sequence: Synthetic oligonucleotide
  Antisense strand to SEQ ID NO: 1400118
uuaaaucuuaacuugguac

SEQ ID NO: 1400120 - RNA, 19 nt, Artificial Sequence
  Description of Artificial Sequence: Synthetic oligonucleotide
  Sense strand starting at position 3797 of SEQ ID NO: 1243189
cugcaauuacucugaugug

SEQ ID NO: 1400121 - RNA, 19 nt, Artificial Sequence
  Description of Artificial Sequence: Synthetic oligonucleotide
  Antisense strand to SEQ ID NO: 1400120
cacaucagaguaauugcag

SEQ ID NO: 1400122 - RNA, 19 nt, Artificial Sequence
  Description of Artificial Sequence: Synthetic oligonucleotide
  Sense strand starting at position 3809 of SEQ ID NO: 1243189
ugaugugaaucuuugauga

SEQ ID NO: 1400123 - RNA, 19 nt, Artificial Sequence
  Description of Artificial Sequence: Synthetic oligonucleotide
  Antisense strand to SEQ ID NO: 1400122
ucaucaaagauucacauca

SEQ ID NO: 1400124 - RNA, 19 nt, Artificial Sequence
  Description of Artificial Sequence: Synthetic oligonucleotide
  Sense strand starting at position 3832 of SEQ ID NO: 1243189
cgacaucuugcaugguuaa

SEQ ID NO: 1400125 - RNA, 19 nt, Artificial Sequence
  Description of Artificial Sequence: Synthetic oligonucleotide
  Antisense strand to SEQ ID NO: 1400124
uuaaccaugcaagaugucg

SEQ ID NO: 1400126 - RNA, 19 nt, Artificial Sequence
  Description of Artificial Sequence: Synthetic oligonucleotide
  Sense strand starting at position 3833 of SEQ ID NO: 1243189
gacaucuugcaugguuaau

SEQ ID NO: 1400127 - RNA, 19 nt, Artificial Sequence
  Description of Artificial Sequence: Synthetic oligonucleotide
  Antisense strand to SEQ ID NO: 1400126
auuaaccaugcaagauguc

SEQ ID NO: 1400128 - RNA, 19 nt, Artificial Sequence
  Description of Artificial Sequence: Synthetic oligonucleotide
  Sense strand starting at position 3863 of SEQ ID NO: 1243189
cugucauguuugguuaaug

SEQ ID NO: 1400129 - RNA, 19 nt, Artificial Sequence
  Description of Artificial Sequence: Synthetic oligonucleotide
  Antisense strand to SEQ ID NO: 1400128
cauuaaccaaacaugacag

SEQ ID NO: 1400130 - RNA, 19 nt, Artificial Sequence
  Description of Artificial Sequence: Synthetic oligonucleotide
  Sense strand starting at position 10 of SEQ ID NO: 1243190
ugcaaacuacauggauauu

SEQ ID NO: 1400131 - RNA, 19 nt, Artificial Sequence
  Description of Artificial Sequence: Synthetic oligonucleotide
  Antisense strand to SEQ ID NO: 1400130
aauauccauguaguuugca

SEQ ID NO: 1400132 - RNA, 19 nt, Artificial Sequence
  Description of Artificial Sequence: Synthetic oligonucleotide
  Sense strand starting at position 51 of SEQ ID NO: 1243190
gaggcuaaagcaugucuga

SEQ ID NO: 1400133 - RNA, 19 nt, Artificial Sequence
  Description of Artificial Sequence: Synthetic oligonucleotide
  Antisense strand to SEQ ID NO: 1400132
ucagacaugcuuuagccuc

SEQ ID NO: 1400134 - RNA, 19 nt, Artificial Sequence
  Description of Artificial Sequence: Synthetic oligonucleotide
  Sense strand starting at position 62 of SEQ ID NO: 1243190
augucugacguuuggaaag

SEQ ID NO: 1400135 - RNA, 19 nt, Artificial Sequence
  Description of Artificial Sequence: Synthetic oligonucleotide
  Antisense strand to SEQ ID NO: 1400134
cuuuccaaacgucagacau

SEQ ID NO: 1400136 - RNA, 19 nt, Artificial Sequence
  Description of Artificial Sequence: Synthetic oligonucleotide
  Sense strand starting at position 93 of SEQ ID NO: 1243190
aaaugagacugggaaagua

SEQ ID NO: 1400137 - RNA, 19 nt, Artificial Sequence
  Description of Artificial Sequence: Synthetic oligonucleotide
  Antisense strand to SEQ ID NO: 1400136
uacuuucccagucucauuu

SEQ ID NO: 1400138 - RNA, 19 nt, Artificial Sequence
  Description of Artificial Sequence: Synthetic oligonucleotide
  Sense strand starting at position 109 of SEQ ID NO: 1243190
guaacagugggucagauua

SEQ ID NO: 1400139 - RNA, 19 nt, Artificial Sequence
  Description of Artificial Sequence: Synthetic oligonucleotide
  Antisense strand to SEQ ID NO: 1400138
uaaucugacccacuguuac

SEQ ID NO: 1400140 - RNA, 19 nt, Artificial Sequence
  Description of Artificial Sequence: Synthetic oligonucleotide
  Sense strand starting at position 133 of SEQ ID NO: 1243190
agccuuauagcucacugua

SEQ ID NO: 1400141 - RNA, 19 nt, Artificial Sequence
  Description of Artificial Sequence: Synthetic oligonucleotide
  Antisense strand to SEQ ID NO: 1400140
uacagugagcuauaaggcu

SEQ ID NO: 1400142 - RNA, 19 nt, Artificial Sequence
  Description of Artificial Sequence: Synthetic oligonucleotide
  Sense strand starting at position 136 of SEQ ID NO: 1243190
cuuauagcucacuguaaag

SEQ ID NO: 1400143 - RNA, 19 nt, Artificial Sequence
  Description of Artificial Sequence: Synthetic oligonucleotide
  Antisense strand to SEQ ID NO: 1400142
cuuuacagugagcuauaag

SEQ ID NO: 1400144 - RNA, 19 nt, Artificial Sequence
  Description of Artificial Sequence: Synthetic oligonucleotide
  Sense strand starting at position 358 of SEQ ID NO: 1243190
caggguggcaaguauuauu

SEQ ID NO: 1400145 - RNA, 19 nt, Artificial Sequence
  Description of Artificial Sequence: Synthetic oligonucleotide
  Antisense strand to SEQ ID NO: 1400144
aauaauacuugccacccug

SEQ ID NO: 1400146 - RNA, 19 nt, Artificial Sequence
  Description of Artificial Sequence: Synthetic oligonucleotide
  Sense strand starting at position 848 of SEQ ID NO: 1243190
uggcauguuuaauuugagu

SEQ ID NO: 1400147 - RNA, 19 nt, Artificial Sequence
  Description of Artificial Sequence: Synthetic oligonucleotide
  Antisense strand to SEQ ID NO: 1400146
acucaaauuaaacaugcca

SEQ ID NO: 1400148 - RNA, 19 nt, Artificial Sequence
  Description of Artificial Sequence: Synthetic oligonucleotide
  Sense strand starting at position 850 of SEQ ID NO: 1243190
gcauguuuaauuugaguug

SEQ ID NO: 1400149 - RNA, 19 nt, Artificial Sequence
  Description of Artificial Sequence: Synthetic oligonucleotide
  Antisense strand to SEQ ID NO: 1400148
caacucaaauuaaacaugc

SEQ ID NO: 1400150 - RNA, 19 nt, Artificial Sequence
  Description of Artificial Sequence: Synthetic oligonucleotide
  Sense strand starting at position 853 of SEQ ID NO: 1243190
uguuuaauuugaguugccu

SEQ ID NO: 1400151 - RNA, 19 nt, Artificial Sequence
  Description of Artificial Sequence: Synthetic oligonucleotide
  Antisense strand to SEQ ID NO: 1400150
aggcaacucaaauuaaaca

SEQ ID NO: 1400152 - RNA, 19 nt, Artificial Sequence
  Description of Artificial Sequence: Synthetic oligonucleotide
  Sense strand starting at position 861 of SEQ ID NO: 1243190
uugaguugccuauaaccca

SEQ ID NO: 1400153 - RNA, 19 nt, Artificial Sequence
  Description of Artificial Sequence: Synthetic oligonucleotide
  Antisense strand to SEQ ID NO: 1400152
uggguuauaggcaacucaa

SEQ ID NO: 1400154 - RNA, 19 nt, Artificial Sequence
  Description of Artificial Sequence: Synthetic oligonucleotide
  Sense strand starting at position 925 of SEQ ID NO: 1243190
gagaccugcgauggagaua

SEQ ID NO: 1400155 - RNA, 19 nt, Artificial Sequence
  Description of Artificial Sequence: Synthetic oligonucleotide
  Antisense strand to SEQ ID NO: 1400154
uaucuccaucgcaggucuc

SEQ ID NO: 1400156 - RNA, 19 nt, Artificial Sequence
  Description of Artificial Sequence: Synthetic oligonucleotide
  Sense strand starting at position 951 of SEQ ID NO: 1243190
ggaaucuguuagccucuga

SEQ ID NO: 1400157 - RNA, 19 nt, Artificial Sequence
  Description of Artificial Sequence: Synthetic oligonucleotide
  Antisense strand to SEQ ID NO: 1400156
ucagaggcuaacagauucc

SEQ ID NO: 1400158 - RNA, 19 nt, Artificial Sequence
  Description of Artificial Sequence: Synthetic oligonucleotide
  Sense strand starting at position 955 of SEQ ID NO: 1243190
ucuguuagccucugauaug

SEQ ID NO: 1400159 - RNA, 19 nt, Artificial Sequence
  Description of Artificial Sequence: Synthetic oligonucleotide
  Antisense strand to SEQ ID NO: 1400158
cauaucagaggcuaacaga

SEQ ID NO: 1400160 - RNA, 19 nt, Artificial Sequence
  Description of Artificial Sequence: Synthetic oligonucleotide
  Sense strand starting at position 961 of SEQ ID NO: 1243190
agccucugauauguaugua

SEQ ID NO: 1400161 - RNA, 19 nt, Artificial Sequence
  Description of Artificial Sequence: Synthetic oligonucleotide
  Antisense strand to SEQ ID NO: 1400160
uacauacauaucagaggcu

SEQ ID NO: 1400162 - RNA, 19 nt, Artificial Sequence
  Description of Artificial Sequence: Synthetic oligonucleotide
  Sense strand starting at position 1144 of SEQ ID NO: 1243190
gaaagacaacucggucaaa

SEQ ID NO: 1400163 - RNA, 19 nt, Artificial Sequence
  Description of Artificial Sequence: Synthetic oligonucleotide
  Antisense strand to SEQ ID NO: 1400162
uuugaccgaguugucuuuc

SEQ ID NO: 1400164 - RNA, 19 nt, Artificial Sequence
  Description of Artificial Sequence: Synthetic oligonucleotide
  Sense strand starting at position 1382 of SEQ ID NO: 1243190
cagcauccuccuggaugua

SEQ ID NO: 1400165 - RNA, 19 nt, Artificial Sequence
  Description of Artificial Sequence: Synthetic oligonucleotide
  Antisense strand to SEQ ID NO: 1400164
uacauccaggaggaugcug

SEQ ID NO: 1400166 - RNA, 19 nt, Artificial Sequence
  Description of Artificial Sequence: Synthetic oligonucleotide
  Sense strand starting at position 2308 of SEQ ID NO: 1243190
cucauugaguucccagguu

SEQ ID NO: 1400167 - RNA, 19 nt, Artificial Sequence
  Description of Artificial Sequence: Synthetic oligonucleotide
  Antisense strand to SEQ ID NO: 1400166
aaccugggaacucaaugag

SEQ ID NO: 1400168 - RNA, 19 nt, Artificial Sequence
  Description of Artificial Sequence: Synthetic oligonucleotide
  Sense strand starting at position 2352 of SEQ ID NO: 1243190
auaacugcacuuugcaaga

SEQ ID NO: 1400169 - RNA, 19 nt, Artificial Sequence
  Description of Artificial Sequence: Synthetic oligonucleotide
  Antisense strand to SEQ ID NO: 1400168
ucuugcaaagugcaguuau

SEQ ID NO: 1400170 - RNA, 19 nt, Artificial Sequence
  Description of Artificial Sequence: Synthetic oligonucleotide
  Sense strand starting at position 2402 of SEQ ID NO: 1243190
gagagaaugcuuggauguu

SEQ ID NO: 1400171 - RNA, 19 nt, Artificial Sequence
  Description of Artificial Sequence: Synthetic oligonucleotide
  Antisense strand to SEQ ID NO: 1400170
aacauccaagcauucucuc

SEQ ID NO: 1400172 - RNA, 19 nt, Artificial Sequence
  Description of Artificial Sequence: Synthetic oligonucleotide
  Sense strand starting at position 2443 of SEQ ID NO: 1243190
gcgacaucuugagcugaau

SEQ ID NO: 1400173 - RNA, 19 nt, Artificial Sequence
  Description of Artificial Sequence: Synthetic oligonucleotide
  Antisense strand to SEQ ID NO: 1400172
auucagcucaagaugucgc

SEQ ID NO: 1400174 - RNA, 19 nt, Artificial Sequence
  Description of Artificial Sequence: Synthetic oligonucleotide
  Sense strand starting at position 2551 of SEQ ID NO: 1243190
ccagcuuaguguuuggaga

SEQ ID NO: 1400175 - RNA, 19 nt, Artificial Sequence
  Description of Artificial Sequence: Synthetic oligonucleotide
  Antisense strand to SEQ ID NO: 1400174
ucuccaaacacuaagcugg

SEQ ID NO: 1400176 - RNA, 19 nt, Artificial Sequence
  Description of Artificial Sequence: Synthetic oligonucleotide
  Sense strand starting at position 2618 of SEQ ID NO: 1243190
gggucagacucauccauag

SEQ ID NO: 1400177 - RNA, 19 nt, Artificial Sequence
  Description of Artificial Sequence: Synthetic oligonucleotide
  Antisense strand to SEQ ID NO: 1400176
cuauggaugagucugaccc

SEQ ID NO: 1400178 - RNA, 19 nt, Artificial Sequence
  Description of Artificial Sequence: Synthetic oligonucleotide
  Sense strand starting at position 3317 of SEQ ID NO: 1243190
uuaagaagucuauagcaac

SEQ ID NO: 1400179 - RNA, 19 nt, Artificial Sequence
  Description of Artificial Sequence: Synthetic oligonucleotide
  Antisense strand to SEQ ID NO: 1400178
guugcuauagacuucuuaa

SEQ ID NO: 1400180 - RNA, 19 nt, Artificial Sequence
  Description of Artificial Sequence: Synthetic oligonucleotide
  Sense strand starting at position 3379 of SEQ ID NO: 1243190
uugugaguucucuauaaau

SEQ ID NO: 1400181 - RNA, 19 nt, Artificial Sequence
  Description of Artificial Sequence: Synthetic oligonucleotide
  Antisense strand to SEQ ID NO: 1400180
auuuauagagaacucacaa

SEQ ID NO: 1400182 - RNA, 19 nt, Artificial Sequence
  Description of Artificial Sequence: Synthetic oligonucleotide
  Sense strand starting at position 3381 of SEQ ID NO: 1243190
gugaguucucuauaaauaa

SEQ ID NO: 1400183 - RNA, 19 nt, Artificial Sequence
  Description of Artificial Sequence: Synthetic oligonucleotide
  Antisense strand to SEQ ID NO: 1400182
uuauuuauagagaacucac

SEQ ID NO: 1400184 - RNA, 19 nt, Artificial Sequence
  Description of Artificial Sequence: Synthetic oligonucleotide
  Sense strand starting at position 3396 of SEQ ID NO: 1243190
auaauuggugcugauuaac

SEQ ID NO: 1400185 - RNA, 19 nt, Artificial Sequence
  Description of Artificial Sequence: Synthetic oligonucleotide
  Antisense strand to SEQ ID NO: 1400184
guuaaucagcaccaauuau

SEQ ID NO: 1400186 - RNA, 19 nt, Artificial Sequence
  Description of Artificial Sequence: Synthetic oligonucleotide
  Sense strand starting at position 3399 of SEQ ID NO: 1243190
auuggugcugauuaacaau

SEQ ID NO: 1400187 - RNA, 19 nt, Artificial Sequence
  Description of Artificial Sequence: Synthetic oligonucleotide
  Antisense strand to SEQ ID NO: 1400186
auuguuaaucagcaccaau

SEQ ID NO: 1400188 - RNA, 19 nt, Artificial Sequence
  Description of Artificial Sequence: Synthetic oligonucleotide
  Sense strand starting at position 3405 of SEQ ID NO: 1243190
gcugauuaacaauauguau

SEQ ID NO: 1400189 - RNA, 19 nt, Artificial Sequence
  Description of Artificial Sequence: Synthetic oligonucleotide
  Antisense strand to SEQ ID NO: 1400188
auacauauuguuaaucagc

SEQ ID NO: 1400190 - RNA, 19 nt, Artificial Sequence
  Description of Artificial Sequence: Synthetic oligonucleotide
  Sense strand starting at position 3430 of SEQ ID NO: 1243190
ggccuuugcccugaagcua

SEQ ID NO: 1400191 - RNA, 19 nt, Artificial Sequence
  Description of Artificial Sequence: Synthetic oligonucleotide
  Antisense strand to SEQ ID NO: 1400190
uagcuucagggcaaaggcc

SEQ ID NO: 1400192 - RNA, 19 nt, Artificial Sequence
  Description of Artificial Sequence: Synthetic oligonucleotide
  Sense strand starting at position 3494 of SEQ ID NO: 1243190
agauaauaguaucuugcau

SEQ ID NO: 1400193 - RNA, 19 nt, Artificial Sequence
  Description of Artificial Sequence: Synthetic oligonucleotide
  Antisense strand to SEQ ID NO: 1400192
augcaagauacuauuaucu

SEQ ID NO: 1400194 - RNA, 19 nt, Artificial Sequence
  Description of Artificial Sequence: Synthetic oligonucleotide
  Sense strand starting at position 3506 of SEQ ID NO: 1243190
cuugcaucugaauaauguu

SEQ ID NO: 1400195 - RNA, 19 nt, Artificial Sequence
  Description of Artificial Sequence: Synthetic oligonucleotide
  Antisense strand to SEQ ID NO: 1400194
aacauuauucagaugcaag

SEQ ID NO: 1400196 - RNA, 19 nt, Artificial Sequence
  Description of Artificial Sequence: Synthetic oligonucleotide
  Sense strand starting at position 3587 of SEQ ID NO: 1243190
uagacaaaugcuugugcaa

SEQ ID NO: 1400197 - RNA, 19 nt, Artificial Sequence
  Description of Artificial Sequence: Synthetic oligonucleotide
  Antisense strand to SEQ ID NO: 1400196
uugcacaagcauuugucua

SEQ ID NO: 1400198 - RNA, 19 nt, Artificial Sequence
  Description of Artificial Sequence: Synthetic oligonucleotide
  Sense strand starting at position 3590 of SEQ ID NO: 1243190
acaaaugcuugugcaauau

SEQ ID NO: 1400199 - RNA, 19 nt, Artificial Sequence
  Description of Artificial Sequence: Synthetic oligonucleotide
  Antisense strand to SEQ ID NO: 1400198
auauugcacaagcauuugu

SEQ ID NO: 1400200 - RNA, 19 nt, Artificial Sequence
  Description of Artificial Sequence: Synthetic oligonucleotide
  Sense strand starting at position 3599 of SEQ ID NO: 1243190
ugugcaauauugccaaaug

SEQ ID NO: 1400201 - RNA, 19 nt, Artificial Sequence
  Description of Artificial Sequence: Synthetic oligonucleotide
  Antisense strand to SEQ ID NO: 1400200
cauuuggcaauauugcaca

SEQ ID NO: 1400202 - RNA, 19 nt, Artificial Sequence
  Description of Artificial Sequence: Synthetic oligonucleotide
  Sense strand starting at position 3644 of SEQ ID NO: 1243190
gcugaauauuucuacauug

SEQ ID NO: 1400203 - RNA, 19 nt, Artificial Sequence
  Description of Artificial Sequence: Synthetic oligonucleotide
  Antisense strand to SEQ ID NO: 1400202
caauguagaaauauucagc

SEQ ID NO: 1400204 - RNA, 19 nt, Artificial Sequence
  Description of Artificial Sequence: Synthetic oligonucleotide
  Sense strand starting at position 3684 of SEQ ID NO: 1243190
cuagauauaugcccuagag

SEQ ID NO: 1400205 - RNA, 19 nt, Artificial Sequence
  Description of Artificial Sequence: Synthetic oligonucleotide
  Antisense strand to SEQ ID NO: 1400204
cucuagggcauauaucuag

SEQ ID NO: 1400206 - RNA, 19 nt, Artificial Sequence
  Description of Artificial Sequence: Synthetic oligonucleotide
  Sense strand starting at position 3713 of SEQ ID NO: 1243190
acauaugcaccaggaguua

SEQ ID NO: 1400207 - RNA, 19 nt, Artificial Sequence
  Description of Artificial Sequence: Synthetic oligonucleotide
  Antisense strand to SEQ ID NO: 1400206
uaacuccuggugcauaugu

SEQ ID NO: 1400208 - RNA, 19 nt, Artificial Sequence
  Description of Artificial Sequence: Synthetic oligonucleotide
  Sense strand starting at position 3836 of SEQ ID NO: 1243190
gauauuaugcaauggagca

SEQ ID NO: 1400209 - RNA, 19 nt, Artificial Sequence
  Description of Artificial Sequence: Synthetic oligonucleotide
  Antisense strand to SEQ ID NO: 1400208
ugcuccauugcauaauauc

SEQ ID NO: 1400210 - RNA, 19 nt, Artificial Sequence
  Description of Artificial Sequence: Synthetic oligonucleotide
  Sense strand starting at position 100 of SEQ ID NO: 1243191
cucucucaggcucaugaau

SEQ ID NO: 1400211 - RNA, 19 nt, Artificial Sequence
  Description of Artificial Sequence: Synthetic oligonucleotide
  Antisense strand to SEQ ID NO: 1400210
auucaugagccugagagag

SEQ ID NO: 1400212 - RNA, 19 nt, Artificial Sequence
  Description of Artificial Sequence: Synthetic oligonucleotide
  Sense strand starting at position 198 of SEQ ID NO: 1243191
ugccgugcgugucuauuua

SEQ ID NO: 1400213 - RNA, 19 nt, Artificial Sequence
  Description of Artificial Sequence: Synthetic oligonucleotide
  Antisense strand to SEQ ID NO: 1400212
uaaauagacacgcacggca

SEQ ID NO: 1400214 - RNA, 19 nt, Artificial Sequence
  Description of Artificial Sequence: Synthetic oligonucleotide
  Sense strand starting at position 202 of SEQ ID NO: 1243191
gugcgugucuauuuauugu

SEQ ID NO: 1400215 - RNA, 19 nt, Artificial Sequence
  Description of Artificial Sequence: Synthetic oligonucleotide
  Antisense strand to SEQ ID NO: 1400214
acaauaaauagacacgcac

SEQ ID NO: 1400216 - RNA, 19 nt, Artificial Sequence
  Description of Artificial Sequence: Synthetic oligonucleotide
  Sense strand starting at position 366 of SEQ ID NO: 1243191
agacucagucagcgggaau

SEQ ID NO: 1400217 - RNA, 19 nt, Artificial Sequence
  Description of Artificial Sequence: Synthetic oligonucleotide
  Antisense strand to SEQ ID NO: 1400216
auucccgcugacugagucu

SEQ ID NO: 1400218 - RNA, 19 nt, Artificial Sequence
  Description of Artificial Sequence: Synthetic oligonucleotide
  Sense strand starting at position 367 of SEQ ID NO: 1243191
gacucagucagcgggaaua

SEQ ID NO: 1400219 - RNA, 19 nt, Artificial Sequence
  Description of Artificial Sequence: Synthetic oligonucleotide
  Antisense strand to SEQ ID NO: 1400218
uauucccgcugacugaguc

SEQ ID NO: 1400220 - RNA, 19 nt, Artificial Sequence
  Description of Artificial Sequence: Synthetic oligonucleotide
  Sense strand starting at position 456 of SEQ ID NO: 1243191
gucucuauugcugggugua

SEQ ID NO: 1400221 - RNA, 19 nt, Artificial Sequence
  Description of Artificial Sequence: Synthetic oligonucleotide
  Antisense strand to SEQ ID NO: 1400220
uacacccagcaauagagac

SEQ ID NO: 1400222 - RNA, 19 nt, Artificial Sequence
  Description of Artificial Sequence: Synthetic oligonucleotide
  Sense strand starting at position 469 of SEQ ID NO: 1243191
gguguaguguccauggucu

SEQ ID NO: 1400223 - RNA, 19 nt, Artificial Sequence
  Description of Artificial Sequence: Synthetic oligonucleotide
  Antisense strand to SEQ ID NO: 1400222
agaccauggacacuacacc

SEQ ID NO: 1400224 - RNA, 19 nt, Artificial Sequence
  Description of Artificial Sequence: Synthetic oligonucleotide
  Sense strand starting at position 528 of SEQ ID NO: 1243191
gacagagaucuggguucua

SEQ ID NO: 1400225 - RNA, 19 nt, Artificial Sequence
  Description of Artificial Sequence: Synthetic oligonucleotide
  Antisense strand to SEQ ID NO: 1400224
uagaacccagaucucuguc

SEQ ID NO: 1400226 - RNA, 19 nt, Artificial Sequence
  Description of Artificial Sequence: Synthetic oligonucleotide
  Sense strand starting at position 614 of SEQ ID NO: 1243191
cugucucuguaagucaaau

SEQ ID NO: 1400227 - RNA, 19 nt, Artificial Sequence
  Description of Artificial Sequence: Synthetic oligonucleotide
  Antisense strand to SEQ ID NO: 1400226
auuugacuuacagagacag

SEQ ID NO: 1400228 - RNA, 19 nt, Artificial Sequence
  Description of Artificial Sequence: Synthetic oligonucleotide
  Sense strand starting at position 650 of SEQ ID NO: 1243191
gguucuguguucccacuuu

SEQ ID NO: 1400229 - RNA, 19 nt, Artificial Sequence
  Description of Artificial Sequence: Synthetic oligonucleotide
  Antisense strand to SEQ ID NO: 1400228
aaagugggaacacagaacc

SEQ ID NO: 1400230 - RNA, 19 nt, Artificial Sequence
  Description of Artificial Sequence: Synthetic oligonucleotide
  Sense strand starting at position 883 of SEQ ID NO: 1243191
gcagcuuggucaccaguuu

SEQ ID NO: 1400231 - RNA, 19 nt, Artificial Sequence
  Description of Artificial Sequence: Synthetic oligonucleotide
  Antisense strand to SEQ ID NO: 1400230
aaacuggugaccaagcugc

SEQ ID NO: 1400232 - RNA, 19 nt, Artificial Sequence
  Description of Artificial Sequence: Synthetic oligonucleotide
  Sense strand starting at position 1145 of SEQ ID NO: 1243191
ggcugaguaacauagcacu

SEQ ID NO: 1400233 - RNA, 19 nt, Artificial Sequence
  Description of Artificial Sequence: Synthetic oligonucleotide
  Antisense strand to SEQ ID NO: 1400232
agugcuauguuacucagcc

SEQ ID NO: 1400234 - RNA, 19 nt, Artificial Sequence
  Description of Artificial Sequence: Synthetic oligonucleotide
  Sense strand starting at position 1156 of SEQ ID NO: 1243191
auagcacuccugggauaag

SEQ ID NO: 1400235 - RNA, 19 nt, Artificial Sequence
  Description of Artificial Sequence: Synthetic oligonucleotide
  Antisense strand to SEQ ID NO: 1400234
cuuaucccaggagugcuau

SEQ ID NO: 1400236 - RNA, 19 nt, Artificial Sequence
  Description of Artificial Sequence: Synthetic oligonucleotide
  Sense strand starting at position 1205 of SEQ ID NO: 1243191
ggaacagguuggcuagaaa

SEQ ID NO: 1400237 - RNA, 19 nt, Artificial Sequence
  Description of Artificial Sequence: Synthetic oligonucleotide
  Antisense strand to SEQ ID NO: 1400236
uuucuagccaaccuguucc

SEQ ID NO: 1400238 - RNA, 19 nt, Artificial Sequence
  Description of Artificial Sequence: Synthetic oligonucleotide
  Sense strand starting at position 1312 of SEQ ID NO: 1243191
uugggaucagccugggaaa

SEQ ID NO: 1400239 - RNA, 19 nt, Artificial Sequence
  Description of Artificial Sequence: Synthetic oligonucleotide
  Antisense strand to SEQ ID NO: 1400238
uuucccaggcugaucccaa

SEQ ID NO: 1400240 - RNA, 19 nt, Artificial Sequence
  Description of Artificial Sequence: Synthetic oligonucleotide
  Sense strand starting at position 1434 of SEQ ID NO: 1243191
ugcggugaguuguuugagu

SEQ ID NO: 1400241 - RNA, 19 nt, Artificial Sequence
  Description of Artificial Sequence: Synthetic oligonucleotide
  Antisense strand to SEQ ID NO: 1400240
acucaaacaacucaccgca

SEQ ID NO: 1400242 - RNA, 19 nt, Artificial Sequence
  Description of Artificial Sequence: Synthetic oligonucleotide
  Sense strand starting at position 1436 of SEQ ID NO: 1243191
cggugaguuguuugaguug

SEQ ID NO: 1400243 - RNA, 19 nt, Artificial Sequence
  Description of Artificial Sequence: Synthetic oligonucleotide
  Antisense strand to SEQ ID NO: 1400242
caacucaaacaacucaccg

SEQ ID NO: 1400244 - RNA, 19 nt, Artificial Sequence
  Description of Artificial Sequence: Synthetic oligonucleotide
  Sense strand starting at position 1443 of SEQ ID NO: 1243191
uuguuugaguuguugugau

SEQ ID NO: 1400245 - RNA, 19 nt, Artificial Sequence
  Description of Artificial Sequence: Synthetic oligonucleotide
  Antisense strand to SEQ ID NO: 1400244
aucacaacaacucaaacaa

SEQ ID NO: 1400246 - RNA, 19 nt, Artificial Sequence
  Description of Artificial Sequence: Synthetic oligonucleotide
  Sense strand starting at position 1450 of SEQ ID NO: 1243191
aguuguugugaucacacua

SEQ ID NO: 1400247 - RNA, 19 nt, Artificial Sequence
  Description of Artificial Sequence: Synthetic oligonucleotide
  Antisense strand to SEQ ID NO: 1400246
uagugugaucacaacaacu

SEQ ID NO: 1400248 - RNA, 19 nt, Artificial Sequence
  Description of Artificial Sequence: Synthetic oligonucleotide
  Sense strand starting at position 1566 of SEQ ID NO: 1243191
ggguccugauuucgggaga

SEQ ID NO: 1400249 - RNA, 19 nt, Artificial Sequence
  Description of Artificial Sequence: Synthetic oligonucleotide
  Antisense strand to SEQ ID NO: 1400248
ucucccgaaaucaggaccc

SEQ ID NO: 1400250 - RNA, 19 nt, Artificial Sequence
  Description of Artificial Sequence: Synthetic oligonucleotide
  Sense strand starting at position 1615 of SEQ ID NO: 1243191
gccuuaccgagguaggaau

SEQ ID NO: 1400251 - RNA, 19 nt, Artificial Sequence
  Description of Artificial Sequence: Synthetic oligonucleotide
  Antisense strand to SEQ ID NO: 1400250
auuccuaccucgguaaggc

SEQ ID NO: 1400252 - RNA, 19 nt, Artificial Sequence
  Description of Artificial Sequence: Synthetic oligonucleotide
  Sense strand starting at position 1628 of SEQ ID NO: 1243191
aggaaugggccaggcuaua

SEQ ID NO: 1400253 - RNA, 19 nt, Artificial Sequence
  Description of Artificial Sequence: Synthetic oligonucleotide
  Antisense strand to SEQ ID NO: 1400252
uauagccuggcccauuccu

SEQ ID NO: 1400254 - RNA, 19 nt, Artificial Sequence
  Description of Artificial Sequence: Synthetic oligonucleotide
  Sense strand starting at position 1926 of SEQ ID NO: 1243191
cagucaugagacgggaaga

SEQ ID NO: 1400255 - RNA, 19 nt, Artificial Sequence
  Description of Artificial Sequence: Synthetic oligonucleotide
  Antisense strand to SEQ ID NO: 1400254
ucuucccgucucaugacug

SEQ ID NO: 1400256 - RNA, 19 nt, Artificial Sequence
  Description of Artificial Sequence: Synthetic oligonucleotide
  Sense strand starting at position 2020 of SEQ ID NO: 1243191
ucccgcuucucggcagaaa

SEQ ID NO: 1400257 - RNA, 19 nt, Artificial Sequence
  Description of Artificial Sequence: Synthetic oligonucleotide
  Antisense strand to SEQ ID NO: 1400256
uuucugccgagaagcggga

SEQ ID NO: 1400258 - RNA, 19 nt, Artificial Sequence
  Description of Artificial Sequence: Synthetic oligonucleotide
  Sense strand starting at position 2191 of SEQ ID NO: 1243191
gggauaucagcacacuugu

SEQ ID NO: 1400259 - RNA, 19 nt, Artificial Sequence
  Description of Artificial Sequence: Synthetic oligonucleotide
  Antisense strand to SEQ ID NO: 1400258
acaagugugcugauauccc

SEQ ID NO: 1400260 - RNA, 19 nt, Artificial Sequence
  Description of Artificial Sequence: Synthetic oligonucleotide
  Sense strand starting at position 2202 of SEQ ID NO: 1243191
acacuugugccagggacaa

SEQ ID NO: 1400261 - RNA, 19 nt, Artificial Sequence
  Description of Artificial Sequence: Synthetic oligonucleotide
  Antisense strand to SEQ ID NO: 1400260
uugucccuggcacaagugu

SEQ ID NO: 1400262 - RNA, 19 nt, Artificial Sequence
  Description of Artificial Sequence: Synthetic oligonucleotide
  Sense strand starting at position 2715 of SEQ ID NO: 1243191
ccacuuuccgugugaccuu

SEQ ID NO: 1400263 - RNA, 19 nt, Artificial Sequence
  Description of Artificial Sequence: Synthetic oligonucleotide
  Antisense strand to SEQ ID NO: 1400262
aaggucacacggaaagugg

SEQ ID NO: 1400264 - RNA, 19 nt, Artificial Sequence
  Description of Artificial Sequence: Synthetic oligonucleotide
  Sense strand starting at position 2785 of SEQ ID NO: 1243191
ggaugauaauaauuguauc

SEQ ID NO: 1400265 - RNA, 19 nt, Artificial Sequence
  Description of Artificial Sequence: Synthetic oligonucleotide
  Antisense strand to SEQ ID NO: 1400264
gauacaauuauuaucaucc

SEQ ID NO: 1400266 - RNA, 19 nt, Artificial Sequence
  Description of Artificial Sequence: Synthetic oligonucleotide
  Sense strand starting at position 2796 of SEQ ID NO: 1243191
auuguaucuucuuccuaga

SEQ ID NO: 1400267 - RNA, 19 nt, Artificial Sequence
  Description of Artificial Sequence: Synthetic oligonucleotide
  Antisense strand to SEQ ID NO: 1400266
ucuaggaagaagauacaau

SEQ ID NO: 1400268 - RNA, 19 nt, Artificial Sequence
  Description of Artificial Sequence: Synthetic oligonucleotide
  Sense strand starting at position 2834 of SEQ ID NO: 1243191
gagauaauguuugaaagac

SEQ ID NO: 1400269 - RNA, 19 nt, Artificial Sequence
  Description of Artificial Sequence: Synthetic oligonucleotide
  Antisense strand to SEQ ID NO: 1400268
gucuuucaaacauuaucuc

SEQ ID NO: 1400270 - RNA, 19 nt, Artificial Sequence
  Description of Artificial Sequence: Synthetic oligonucleotide
  Sense strand starting at position 3272 of SEQ ID NO: 1243191
ugaacuucugcuuguguuu

SEQ ID NO: 1400271 - RNA, 19 nt, Artificial Sequence
  Description of Artificial Sequence: Synthetic oligonucleotide
  Antisense strand to SEQ ID NO: 1400270
aaacacaagcagaaguuca

SEQ ID NO: 1400272 - RNA, 19 nt, Artificial Sequence
  Description of Artificial Sequence: Synthetic oligonucleotide
  Sense strand starting at position 3285 of SEQ ID NO: 1243191
guguuucucccuugccuga

SEQ ID NO: 1400273 - RNA, 19 nt, Artificial Sequence
  Description of Artificial Sequence: Synthetic oligonucleotide
  Antisense strand to SEQ ID NO: 1400272
ucaggcaagggagaaacac

SEQ ID NO: 1400274 - RNA, 19 nt, Artificial Sequence
  Description of Artificial Sequence: Synthetic oligonucleotide
  Sense strand starting at position 3334 of SEQ ID NO: 1243191
agauuuggaugauguauga

SEQ ID NO: 1400275 - RNA, 19 nt, Artificial Sequence
  Description of Artificial Sequence: Synthetic oligonucleotide
  Antisense strand to SEQ ID NO: 1400274
ucauacaucauccaaaucu

SEQ ID NO: 1400276 - RNA, 19 nt, Artificial Sequence
  Description of Artificial Sequence: Synthetic oligonucleotide
  Sense strand starting at position 3341 of SEQ ID NO: 1243191
gaugauguaugaguuccuu

SEQ ID NO: 1400277 - RNA, 19 nt, Artificial Sequence
  Description of Artificial Sequence: Synthetic oligonucleotide
  Antisense strand to SEQ ID NO: 1400276
aaggaacucauacaucauc

SEQ ID NO: 1400278 - RNA, 19 nt, Artificial Sequence
  Description of Artificial Sequence: Synthetic oligonucleotide
  Sense strand starting at position 3347 of SEQ ID NO: 1243191
guaugaguuccuuaacacc

SEQ ID NO: 1400279 - RNA, 19 nt, Artificial Sequence
  Description of Artificial Sequence: Synthetic oligonucleotide
  Antisense strand to SEQ ID NO: 1400278
gguguuaaggaacucauac

SEQ ID NO: 1400280 - RNA, 19 nt, Artificial Sequence
  Description of Artificial Sequence: Synthetic oligonucleotide
  Sense strand starting at position 3497 of SEQ ID NO: 1243191
ccuguaauuccagggcucu

SEQ ID NO: 1400281 - RNA, 19 nt, Artificial Sequence
  Description of Artificial Sequence: Synthetic oligonucleotide
  Antisense strand to SEQ ID NO: 1400280
agagcccuggaauuacagg

SEQ ID NO: 1400282 - RNA, 19 nt, Artificial Sequence
  Description of Artificial Sequence: Synthetic oligonucleotide
  Sense strand starting at position 3519 of SEQ ID NO: 1243191
aggguaagcugggaggauu

SEQ ID NO: 1400283 - RNA, 19 nt, Artificial Sequence
  Description of Artificial Sequence: Synthetic oligonucleotide
  Antisense strand to SEQ ID NO: 1400282
aauccucccagcuuacccu

SEQ ID NO: 1400284 - RNA, 19 nt, Artificial Sequence
  Description of Artificial Sequence: Synthetic oligonucleotide
  Sense strand starting at position 3942 of SEQ ID NO: 1243191
gcaugcaaccguugguuua

SEQ ID NO: 1400285 - RNA, 19 nt, Artificial Sequence
  Description of Artificial Sequence: Synthetic oligonucleotide
  Antisense strand to SEQ ID NO: 1400284
uaaaccaacgguugcaugc

SEQ ID NO: 1400286 - RNA, 19 nt, Artificial Sequence
  Description of Artificial Sequence: Synthetic oligonucleotide
  Sense strand starting at position 3952 of SEQ ID NO: 1243191
guugguuuaguuuaguuaa

SEQ ID NO: 1400287 - RNA, 19 nt, Artificial Sequence
  Description of Artificial Sequence: Synthetic oligonucleotide
  Antisense strand to SEQ ID NO: 1400286
uuaacuaaacuaaaccaac

SEQ ID NO: 1400288 - RNA, 19 nt, Artificial Sequence
  Description of Artificial Sequence: Synthetic oligonucleotide
  Sense strand starting at position 3978 of SEQ ID NO: 1243191
aggaguaggcucuggaaca

SEQ ID NO: 1400289 - RNA, 19 nt, Artificial Sequence
  Description of Artificial Sequence: Synthetic oligonucleotide
  Antisense strand to SEQ ID NO: 1400288
uguuccagagccuacuccu

SEQ ID NO: 1400290 - RNA, 19 nt, Artificial Sequence
  Description of Artificial Sequence: Synthetic oligonucleotide
  Sense strand starting at position 91 of SEQ ID NO: 1243192
accugauauucugcuugcu

SEQ ID NO: 1400291 - RNA, 19 nt, Artificial Sequence
  Description of Artificial Sequence: Synthetic oligonucleotide
  Antisense strand to SEQ ID NO: 1400290
agcaagcagaauaucaggu

SEQ ID NO: 1400292 - RNA, 19 nt, Artificial Sequence
  Description of Artificial Sequence: Synthetic oligonucleotide
  Sense strand starting at position 617 of SEQ ID NO: 1243192
ugagcuacuucuuuagucu

SEQ ID NO: 1400293 - RNA, 19 nt, Artificial Sequence
  Description of Artificial Sequence: Synthetic oligonucleotide
  Antisense strand to SEQ ID NO: 1400292
agacuaaagaaguagcuca

SEQ ID NO: 1400294 - RNA, 19 nt, Artificial Sequence
  Description of Artificial Sequence: Synthetic oligonucleotide
  Sense strand starting at position 624 of SEQ ID NO: 1243192
cuucuuuagucucuggaaa

SEQ ID NO: 1400295 - RNA, 19 nt, Artificial Sequence
  Description of Artificial Sequence: Synthetic oligonucleotide
  Antisense strand to SEQ ID NO: 1400294
uuuccagagacuaaagaag

SEQ ID NO: 1400296 - RNA, 19 nt, Artificial Sequence
  Description of Artificial Sequence: Synthetic oligonucleotide
  Sense strand starting at position 625 of SEQ ID NO: 1243192
uucuuuagucucuggaaag

SEQ ID NO: 1400297 - RNA, 19 nt, Artificial Sequence
  Description of Artificial Sequence: Synthetic oligonucleotide
  Antisense strand to SEQ ID NO: 1400296
cuuuccagagacuaaagaa

SEQ ID NO: 1400298 - RNA, 19 nt, Artificial Sequence
  Description of Artificial Sequence: Synthetic oligonucleotide
  Sense strand starting at position 705 of SEQ ID NO: 1243192
cuggacugguuccuuaauu

SEQ ID NO: 1400299 - RNA, 19 nt, Artificial Sequence
  Description of Artificial Sequence: Synthetic oligonucleotide
  Antisense strand to SEQ ID NO: 1400298
aauuaaggaaccaguccag

SEQ ID NO: 1400300 - RNA, 19 nt, Artificial Sequence
  Description of Artificial Sequence: Synthetic oligonucleotide
  Sense strand starting at position 815 of SEQ ID NO: 1243192
cucugauggcaucaguaag

SEQ ID NO: 1400301 - RNA, 19 nt, Artificial Sequence
  Description of Artificial Sequence: Synthetic oligonucleotide
  Antisense strand to SEQ ID NO: 1400300
cuuacugaugccaucagag

SEQ ID NO: 1400302 - RNA, 19 nt, Artificial Sequence
  Description of Artificial Sequence: Synthetic oligonucleotide
  Sense strand starting at position 877 of SEQ ID NO: 1243192
gcuccaguuguugggaagu

SEQ ID NO: 1400303 - RNA, 19 nt, Artificial Sequence
  Description of Artificial Sequence: Synthetic oligonucleotide
  Antisense strand to SEQ ID NO: 1400302
acuucccaacaacuggagc

SEQ ID NO: 1400304 - RNA, 19 nt, Artificial Sequence
  Description of Artificial Sequence: Synthetic oligonucleotide
  Sense strand starting at position 1152 of SEQ ID NO: 1243192
gggccuggucacugauaga

SEQ ID NO: 1400305 - RNA, 19 nt, Artificial Sequence
  Description of Artificial Sequence: Synthetic oligonucleotide
  Antisense strand to SEQ ID NO: 1400304
ucuaucagugaccaggccc

SEQ ID NO: 1400306 - RNA, 19 nt, Artificial Sequence
  Description of Artificial Sequence: Synthetic oligonucleotide
  Sense strand starting at position 1155 of SEQ ID NO: 1243192
ccuggucacugauagagaa

SEQ ID NO: 1400307 - RNA, 19 nt, Artificial Sequence
  Description of Artificial Sequence: Synthetic oligonucleotide
  Antisense strand to SEQ ID NO: 1400306
uucucuaucagugaccagg

SEQ ID NO: 1400308 - RNA, 19 nt, Artificial Sequence
  Description of Artificial Sequence: Synthetic oligonucleotide
  Sense strand starting at position 1218 of SEQ ID NO: 1243192
aggcccagauccucuaaga

SEQ ID NO: 1400309 - RNA, 19 nt, Artificial Sequence
  Description of Artificial Sequence: Synthetic oligonucleotide
  Antisense strand to SEQ ID NO: 1400308
ucuuagaggaucugggccu

SEQ ID NO: 1400310 - RNA, 19 nt, Artificial Sequence
  Description of Artificial Sequence: Synthetic oligonucleotide
  Sense strand starting at position 1248 of SEQ ID NO: 1243192
uaaagucucccguggaauc

SEQ ID NO: 1400311 - RNA, 19 nt, Artificial Sequence
  Description of Artificial Sequence: Synthetic oligonucleotide
  Antisense strand to SEQ ID NO: 1400310
gauuccacgggagacuuua

SEQ ID NO: 1400312 - RNA, 19 nt, Artificial Sequence
  Description of Artificial Sequence: Synthetic oligonucleotide
  Sense strand starting at position 1336 of SEQ ID NO: 1243192
cgguaagaaacguacacuu

SEQ ID NO: 1400313 - RNA, 19 nt, Artificial Sequence
  Description of Artificial Sequence: Synthetic oligonucleotide
  Antisense strand to SEQ ID NO: 1400312
aaguguacguuucuuaccg

SEQ ID NO: 1400314 - RNA, 19 nt, Artificial Sequence
  Description of Artificial Sequence: Synthetic oligonucleotide
  Sense strand starting at position 1397 of SEQ ID NO: 1243192
cgggcuauggucgggaaca

SEQ ID NO: 1400315 - RNA, 19 nt, Artificial Sequence
  Description of Artificial Sequence: Synthetic oligonucleotide
  Antisense strand to SEQ ID NO: 1400314
uguucccgaccauagcccg

SEQ ID NO: 1400316 - RNA, 19 nt, Artificial Sequence
  Description of Artificial Sequence: Synthetic oligonucleotide
  Sense strand starting at position 2189 of SEQ ID NO: 1243192
agaauuguggucuagcgga

SEQ ID NO: 1400317 - RNA, 19 nt, Artificial Sequence
  Description of Artificial Sequence: Synthetic oligonucleotide
  Antisense strand to SEQ ID NO: 1400316
uccgcuagaccacaauucu

SEQ ID NO: 1400318 - RNA, 19 nt, Artificial Sequence
  Description of Artificial Sequence: Synthetic oligonucleotide
  Sense strand starting at position 2380 of SEQ ID NO: 1243192
ggccguuuccgcucacgaa

SEQ ID NO: 1400319 - RNA, 19 nt, Artificial Sequence
  Description of Artificial Sequence: Synthetic oligonucleotide
  Antisense strand to SEQ ID NO: 1400318
uucgugagcggaaacggcc

SEQ ID NO: 1400320 - RNA, 19 nt, Artificial Sequence
  Description of Artificial Sequence: Synthetic oligonucleotide
  Sense strand starting at position 2570 of SEQ ID NO: 1243192
acucaaaugucccucaggu

SEQ ID NO: 1400321 - RNA, 19 nt, Artificial Sequence
  Description of Artificial Sequence: Synthetic oligonucleotide
  Antisense strand to SEQ ID NO: 1400320
accugagggacauuugagu

SEQ ID NO: 1400322 - RNA, 19 nt, Artificial Sequence
  Description of Artificial Sequence: Synthetic oligonucleotide
  Sense strand starting at position 2590 of SEQ ID NO: 1243192
gggcuugguuggagagguu

SEQ ID NO: 1400323 - RNA, 19 nt, Artificial Sequence
  Description of Artificial Sequence: Synthetic oligonucleotide
  Antisense strand to SEQ ID NO: 1400322
aaccucuccaaccaagccc

SEQ ID NO: 1400324 - RNA, 19 nt, Artificial Sequence
  Description of Artificial Sequence: Synthetic oligonucleotide
  Sense strand starting at position 2591 of SEQ ID NO: 1243192
ggcuugguuggagagguua

SEQ ID NO: 1400325 - RNA, 19 nt, Artificial Sequence
  Description of Artificial Sequence: Synthetic oligonucleotide
  Antisense strand to SEQ ID NO: 1400324
uaaccucuccaaccaagcc

SEQ ID NO: 1400326 - RNA, 19 nt, Artificial Sequence
  Description of Artificial Sequence: Synthetic oligonucleotide
  Sense strand starting at position 2599 of SEQ ID NO: 1243192
uggagagguuacccucaaa

SEQ ID NO: 1400327 - RNA, 19 nt, Artificial Sequence
  Description of Artificial Sequence: Synthetic oligonucleotide
  Antisense strand to SEQ ID NO: 1400326
uuugaggguaaccucucca

SEQ ID NO: 1400328 - RNA, 19 nt, Artificial Sequence
  Description of Artificial Sequence: Synthetic oligonucleotide
  Sense strand starting at position 2731 of SEQ ID NO: 1243192
aaauuucgcugugauuuaa

SEQ ID NO: 1400329 - RNA, 19 nt, Artificial Sequence
  Description of Artificial Sequence: Synthetic oligonucleotide
  Antisense strand to SEQ ID NO: 1400328
uuaaaucacagcgaaauuu

SEQ ID NO: 1400330 - RNA, 19 nt, Artificial Sequence
  Description of Artificial Sequence: Synthetic oligonucleotide
  Sense strand starting at position 2735 of SEQ ID NO: 1243192
uucgcugugauuuaaguga

SEQ ID NO: 1400331 - RNA, 19 nt, Artificial Sequence
  Description of Artificial Sequence: Synthetic oligonucleotide
  Antisense strand to SEQ ID NO: 1400330
ucacuuaaaucacagcgaa

SEQ ID NO: 1400332 - RNA, 19 nt, Artificial Sequence
  Description of Artificial Sequence: Synthetic oligonucleotide
  Sense strand starting at position 2748 of SEQ ID NO: 1243192
aagugaccagauuguaaau

SEQ ID NO: 1400333 - RNA, 19 nt, Artificial Sequence
  Description of Artificial Sequence: Synthetic oligonucleotide
  Antisense strand to SEQ ID NO: 1400332
auuuacaaucuggucacuu

SEQ ID NO: 1400334 - RNA, 19 nt, Artificial Sequence
  Description of Artificial Sequence: Synthetic oligonucleotide
  Sense strand starting at position 2760 of SEQ ID NO: 1243192
uguaaauaguucucuuccu

SEQ ID NO: 1400335 - RNA, 19 nt, Artificial Sequence
  Description of Artificial Sequence: Synthetic oligonucleotide
  Antisense strand to SEQ ID NO: 1400334
aggaagagaacuauuuaca

SEQ ID NO: 1400336 - RNA, 19 nt, Artificial Sequence
  Description of Artificial Sequence: Synthetic oligonucleotide
  Sense strand starting at position 2761 of SEQ ID NO: 1243192
guaaauaguucucuuccua

SEQ ID NO: 1400337 - RNA, 19 nt, Artificial Sequence
  Description of Artificial Sequence: Synthetic oligonucleotide
  Antisense strand to SEQ ID NO: 1400336
uaggaagagaacuauuuac

SEQ ID NO: 1400338 - RNA, 19 nt, Artificial Sequence
  Description of Artificial Sequence: Synthetic oligonucleotide
  Sense strand starting at position 2850 of SEQ ID NO: 1243192
cuaggucagaccugugcuu

SEQ ID NO: 1400339 - RNA, 19 nt, Artificial Sequence
  Description of Artificial Sequence: Synthetic oligonucleotide
  Antisense strand to SEQ ID NO: 1400338
aagcacaggucugaccuag

SEQ ID NO: 1400340 - RNA, 19 nt, Artificial Sequence
  Description of Artificial Sequence: Synthetic oligonucleotide
  Sense strand starting at position 2856 of SEQ ID NO: 1243192
cagaccugugcuuggcaaa

SEQ ID NO: 1400341 - RNA, 19 nt, Artificial Sequence
  Description of Artificial Sequence: Synthetic oligonucleotide
  Antisense strand to SEQ ID NO: 1400340
uuugccaagcacaggucug

SEQ ID NO: 1400342 - RNA, 19 nt, Artificial Sequence
  Description of Artificial Sequence: Synthetic oligonucleotide
  Sense strand starting at position 2978 of SEQ ID NO: 1243192
ccuguucuuccacaagagu

SEQ ID NO: 1400343 - RNA, 19 nt, Artificial Sequence
  Description of Artificial Sequence: Synthetic oligonucleotide
  Antisense strand to SEQ ID NO: 1400342
acucuuguggaagaacagg

SEQ ID NO: 1400344 - RNA, 19 nt, Artificial Sequence
  Description of Artificial Sequence: Synthetic oligonucleotide
  Sense strand starting at position 3029 of SEQ ID NO: 1243192
ccaagagauggcugguaag

SEQ ID NO: 1400345 - RNA, 19 nt, Artificial Sequence
  Description of Artificial Sequence: Synthetic oligonucleotide
  Antisense strand to SEQ ID NO: 1400344
cuuaccagccaucucuugg

SEQ ID NO: 1400346 - RNA, 19 nt, Artificial Sequence
  Description of Artificial Sequence: Synthetic oligonucleotide
  Sense strand starting at position 3103 of SEQ ID NO: 1243192
ugacuagaugcuuauuacu

SEQ ID NO: 1400347 - RNA, 19 nt, Artificial Sequence
  Description of Artificial Sequence: Synthetic oligonucleotide
  Antisense strand to SEQ ID NO: 1400346
aguaauaagcaucuaguca

SEQ ID NO: 1400348 - RNA, 19 nt, Artificial Sequence
  Description of Artificial Sequence: Synthetic oligonucleotide
  Sense strand starting at position 3112 of SEQ ID NO: 1243192
gcuuauuacucagcuagug

SEQ ID NO: 1400349 - RNA, 19 nt, Artificial Sequence
  Description of Artificial Sequence: Synthetic oligonucleotide
  Antisense strand to SEQ ID NO: 1400348
cacuagcugaguaauaagc

SEQ ID NO: 1400350 - RNA, 19 nt, Artificial Sequence
  Description of Artificial Sequence: Synthetic oligonucleotide
  Sense strand starting at position 3126 of SEQ ID NO: 1243192
uagugagaacucugcauug

SEQ ID NO: 1400351 - RNA, 19 nt, Artificial Sequence
  Description of Artificial Sequence: Synthetic oligonucleotide
  Antisense strand to SEQ ID NO: 1400350
caaugcagaguucucacua

SEQ ID NO: 1400352 - RNA, 19 nt, Artificial Sequence
  Description of Artificial Sequence: Synthetic oligonucleotide
  Sense strand starting at position 3382 of SEQ ID NO: 1243192
augugagacuggcccaaua

SEQ ID NO: 1400353 - RNA, 19 nt, Artificial Sequence
  Description of Artificial Sequence: Synthetic oligonucleotide
  Antisense strand to SEQ ID NO: 1400352
uauugggccagucucacau

SEQ ID NO: 1400354 - RNA, 19 nt, Artificial Sequence
  Description of Artificial Sequence: Synthetic oligonucleotide
  Sense strand starting at position 3620 of SEQ ID NO: 1243192
ggcagauggcuuuguccau

SEQ ID NO: 1400355 - RNA, 19 nt, Artificial Sequence
  Description of Artificial Sequence: Synthetic oligonucleotide
  Antisense strand to SEQ ID NO: 1400354
auggacaaagccaucugcc

SEQ ID NO: 1400356 - RNA, 19 nt, Artificial Sequence
  Description of Artificial Sequence: Synthetic oligonucleotide
  Sense strand starting at position 3621 of SEQ ID NO: 1243192
gcagauggcuuuguccaua

SEQ ID NO: 1400357 - RNA, 19 nt, Artificial Sequence
  Description of Artificial Sequence: Synthetic oligonucleotide
  Antisense strand to SEQ ID NO: 1400356
uauggacaaagccaucugc

SEQ ID NO: 1400358 - RNA, 19 nt, Artificial Sequence
  Description of Artificial Sequence: Synthetic oligonucleotide
  Sense strand starting at position 3624 of SEQ ID NO: 1243192
gauggcuuuguccauaagu

SEQ ID NO: 1400359 - RNA, 19 nt, Artificial Sequence
  Description of Artificial Sequence: Synthetic oligonucleotide
  Antisense strand to SEQ ID NO: 1400358
acuuauggacaaagccauc

SEQ ID NO: 1400360 - RNA, 19 nt, Artificial Sequence
  Description of Artificial Sequence: Synthetic oligonucleotide
  Sense strand starting at position 3626 of SEQ ID NO: 1243192
uggcuuuguccauaaguaa

SEQ ID NO: 1400361 - RNA, 19 nt, Artificial Sequence
  Description of Artificial Sequence: Synthetic oligonucleotide
  Antisense strand to SEQ ID NO: 1400360
uuacuuauggacaaagcca

SEQ ID NO: 1400362 - RNA, 19 nt, Artificial Sequence
  Description of Artificial Sequence: Synthetic oligonucleotide
  Sense strand starting at position 3629 of SEQ ID NO: 1243192
cuuuguccauaaguaagaa

SEQ ID NO: 1400363 - RNA, 19 nt, Artificial Sequence
  Description of Artificial Sequence: Synthetic oligonucleotide
  Antisense strand to SEQ ID NO: 1400362
uucuuacuuauggacaaag

SEQ ID NO: 1400364 - RNA, 19 nt, Artificial Sequence
  Description of Artificial Sequence: Synthetic oligonucleotide
  Sense strand starting at position 3705 of SEQ ID NO: 1243192
acaguaaacccagagcuuu

SEQ ID NO: 1400365 - RNA, 19 nt, Artificial Sequence
  Description of Artificial Sequence: Synthetic oligonucleotide
  Antisense strand to SEQ ID NO: 1400364
aaagcucuggguuuacugu

SEQ ID NO: 1400366 - RNA, 19 nt, Artificial Sequence
  Description of Artificial Sequence: Synthetic oligonucleotide
  Sense strand starting at position 3740 of SEQ ID NO: 1243192
agacauuggcuuugagcua

SEQ ID NO: 1400367 - RNA, 19 nt, Artificial Sequence
  Description of Artificial Sequence: Synthetic oligonucleotide
  Antisense strand to SEQ ID NO: 1400366
uagcucaaagccaaugucu

SEQ ID NO: 1400368 - RNA, 19 nt, Artificial Sequence
  Description of Artificial Sequence: Synthetic oligonucleotide
  Sense strand starting at position 3755 of SEQ ID NO: 1243192
gcuaaauuacuuggagcua

SEQ ID NO: 1400369 - RNA, 19 nt, Artificial Sequence
  Description of Artificial Sequence: Synthetic oligonucleotide
  Antisense strand to SEQ ID NO: 1400368
uagcuccaaguaauuuagc

SEQ ID NO: 1400370 - RNA, 19 nt, Artificial Sequence
  Description of Artificial Sequence: Synthetic oligonucleotide
  Sense strand starting at position 244 of SEQ ID NO: 1243193
augacuucuguuggaagaa

SEQ ID NO: 1400371 - RNA, 19 nt, Artificial Sequence
  Description of Artificial Sequence: Synthetic oligonucleotide
  Antisense strand to SEQ ID NO: 1400370
uucuuccaacagaagucau

SEQ ID NO: 1400372 - RNA, 19 nt, Artificial Sequence
  Description of Artificial Sequence: Synthetic oligonucleotide
  Sense strand starting at position 454 of SEQ ID NO: 1243193
aacuccaguccuugagaug

SEQ ID NO: 1400373 - RNA, 19 nt, Artificial Sequence
  Description of Artificial Sequence: Synthetic oligonucleotide
  Antisense strand to SEQ ID NO: 1400372
caucucaaggacuggaguu

SEQ ID NO: 1400374 - RNA, 19 nt, Artificial Sequence
  Description of Artificial Sequence: Synthetic oligonucleotide
  Sense strand starting at position 459 of SEQ ID NO: 1243193
caguccuugagaugaguga

SEQ ID NO: 1400375 - RNA, 19 nt, Artificial Sequence
  Description of Artificial Sequence: Synthetic oligonucleotide
  Antisense strand to SEQ ID NO: 1400374
ucacucaucucaaggacug

SEQ ID NO: 1400376 - RNA, 19 nt, Artificial Sequence
  Description of Artificial Sequence: Synthetic oligonucleotide
  Sense strand starting at position 460 of SEQ ID NO: 1243193
aguccuugagaugagugau

SEQ ID NO: 1400377 - RNA, 19 nt, Artificial Sequence
  Description of Artificial Sequence: Synthetic oligonucleotide
  Antisense strand to SEQ ID NO: 1400376
aucacucaucucaaggacu

SEQ ID NO: 1400378 - RNA, 19 nt, Artificial Sequence
  Description of Artificial Sequence: Synthetic oligonucleotide
  Sense strand starting at position 468 of SEQ ID NO: 1243193
agaugagugaugggugaug

SEQ ID NO: 1400379 - RNA, 19 nt, Artificial Sequence
  Description of Artificial Sequence: Synthetic oligonucleotide
  Antisense strand to SEQ ID NO: 1400378
caucacccaucacucaucu

SEQ ID NO: 1400380 - RNA, 19 nt, Artificial Sequence
  Description of Artificial Sequence: Synthetic oligonucleotide
  Sense strand starting at position 973 of SEQ ID NO: 1243193
gcacuugacaacggaaaga

SEQ ID NO: 1400381 - RNA, 19 nt, Artificial Sequence
  Description of Artificial Sequence: Synthetic oligonucleotide
  Antisense strand to SEQ ID NO: 1400380
ucuuuccguugucaagugc

SEQ ID NO: 1400382 - RNA, 19 nt, Artificial Sequence
  Description of Artificial Sequence: Synthetic oligonucleotide
  Sense strand starting at position 1104 of SEQ ID NO: 1243193
uggucaaagcgcguuuauu

SEQ ID NO: 1400383 - RNA, 19 nt, Artificial Sequence
  Description of Artificial Sequence: Synthetic oligonucleotide
  Antisense strand to SEQ ID NO: 1400382
aauaaacgcgcuuugacca

SEQ ID NO: 1400384 - RNA, 19 nt, Artificial Sequence
  Description of Artificial Sequence: Synthetic oligonucleotide
  Sense strand starting at position 1182 of SEQ ID NO: 1243193
cuggcagcucacgacaaau

SEQ ID NO: 1400385 - RNA, 19 nt, Artificial Sequence
  Description of Artificial Sequence: Synthetic oligonucleotide
  Antisense strand to SEQ ID NO: 1400384
auuugucgugagcugccag

SEQ ID NO: 1400386 - RNA, 19 nt, Artificial Sequence
  Description of Artificial Sequence: Synthetic oligonucleotide
  Sense strand starting at position 1194 of SEQ ID NO: 1243193
gacaaaugcccuggcuaga

SEQ ID NO: 1400387 - RNA, 19 nt, Artificial Sequence
  Description of Artificial Sequence: Synthetic oligonucleotide
  Antisense strand to SEQ ID NO: 1400386
ucuagccagggcauuuguc

SEQ ID NO: 1400388 - RNA, 19 nt, Artificial Sequence
  Description of Artificial Sequence: Synthetic oligonucleotide
  Sense strand starting at position 1234 of SEQ ID NO: 1243193
augcccuugcaggagaaau

SEQ ID NO: 1400389 - RNA, 19 nt, Artificial Sequence
  Description of Artificial Sequence: Synthetic oligonucleotide
  Antisense strand to SEQ ID NO: 1400388
auuucuccugcaagggcau

SEQ ID NO: 1400390 - RNA, 19 nt, Artificial Sequence
  Description of Artificial Sequence: Synthetic oligonucleotide
  Sense strand starting at position 1265 of SEQ ID NO: 1243193
uccuguauuuguccacaug

SEQ ID NO: 1400391 - RNA, 19 nt, Artificial Sequence
  Description of Artificial Sequence: Synthetic oligonucleotide
  Antisense strand to SEQ ID NO: 1400390
cauguggacaaauacagga

SEQ ID NO: 1400392 - RNA, 19 nt, Artificial Sequence
  Description of Artificial Sequence: Synthetic oligonucleotide
  Sense strand starting at position 1268 of SEQ ID NO: 1243193
uguauuuguccacaugugu

SEQ ID NO: 1400393 - RNA, 19 nt, Artificial Sequence
  Description of Artificial Sequence: Synthetic oligonucleotide
  Antisense strand to SEQ ID NO: 1400392
acacauguggacaaauaca

SEQ ID NO: 1400394 - RNA, 19 nt, Artificial Sequence
  Description of Artificial Sequence: Synthetic oligonucleotide
  Sense strand starting at position 1291 of SEQ ID NO: 1243193
ggccuuacucagggaaaca

SEQ ID NO: 1400395 - RNA, 19 nt, Artificial Sequence
  Description of Artificial Sequence: Synthetic oligonucleotide
  Antisense strand to SEQ ID NO: 1400394
uguuucccugaguaaggcc

SEQ ID NO: 1400396 - RNA, 19 nt, Artificial Sequence
  Description of Artificial Sequence: Synthetic oligonucleotide
  Sense strand starting at position 1453 of SEQ ID NO: 1243193
agaggauucuaacucagua

SEQ ID NO: 1400397 - RNA, 19 nt, Artificial Sequence
  Description of Artificial Sequence: Synthetic oligonucleotide
  Antisense strand to SEQ ID NO: 1400396
uacugaguuagaauccucu

SEQ ID NO: 1400398 - RNA, 19 nt, Artificial Sequence
  Description of Artificial Sequence: Synthetic oligonucleotide
  Sense strand starting at position 1468 of SEQ ID NO: 1243193
aguaaucuuugacuccaga

SEQ ID NO: 1400399 - RNA, 19 nt, Artificial Sequence
  Description of Artificial Sequence: Synthetic oligonucleotide
  Antisense strand to SEQ ID NO: 1400398
ucuggagucaaagauuacu

SEQ ID NO: 1400400 - RNA, 19 nt, Artificial Sequence
  Description of Artificial Sequence: Synthetic oligonucleotide
  Sense strand starting at position 1619 of SEQ ID NO: 1243193
uggccaaaguccucuaaga

SEQ ID NO: 1400401 - RNA, 19 nt, Artificial Sequence
  Description of Artificial Sequence: Synthetic oligonucleotide
  Antisense strand to SEQ ID NO: 1400400
ucuuagaggacuuuggcca

SEQ ID NO: 1400402 - RNA, 19 nt, Artificial Sequence
  Description of Artificial Sequence: Synthetic oligonucleotide
  Sense strand starting at position 1621 of SEQ ID NO: 1243193
gccaaaguccucuaagagc

SEQ ID NO: 1400403 - RNA, 19 nt, Artificial Sequence
  Description of Artificial Sequence: Synthetic oligonucleotide
  Antisense strand to SEQ ID NO: 1400402
gcucuuagaggacuuuggc

SEQ ID NO: 1400404 - RNA, 19 nt, Artificial Sequence
  Description of Artificial Sequence: Synthetic oligonucleotide
  Sense strand starting at position 1738 of SEQ ID NO: 1243193
cccgguuaccgugacugaa

SEQ ID NO: 1400405 - RNA, 19 nt, Artificial Sequence
  Description of Artificial Sequence: Synthetic oligonucleotide
  Antisense strand to SEQ ID NO: 1400404
uucagucacgguaaccggg

SEQ ID NO: 1400406 - RNA, 19 nt, Artificial Sequence
  Description of Artificial Sequence: Synthetic oligonucleotide
  Sense strand starting at position 2034 of SEQ ID NO: 1243193
ggaaccuauacccgguuua

SEQ ID NO: 1400407 - RNA, 19 nt, Artificial Sequence
  Description of Artificial Sequence: Synthetic oligonucleotide
  Antisense strand to SEQ ID NO: 1400406
uaaaccggguauagguucc

SEQ ID NO: 1400408 - RNA, 19 nt, Artificial Sequence
  Description of Artificial Sequence: Synthetic oligonucleotide
  Sense strand starting at position 2058 of SEQ ID NO: 1243193
gggagcuccagcuauugca

SEQ ID NO: 1400409 - RNA, 19 nt, Artificial Sequence
  Description of Artificial Sequence: Synthetic oligonucleotide
  Antisense strand to SEQ ID NO: 1400408
ugcaauagcuggagcuccc

SEQ ID NO: 1400410 - RNA, 19 nt, Artificial Sequence
  Description of Artificial Sequence: Synthetic oligonucleotide
  Sense strand starting at position 2645 of SEQ ID NO: 1243193
uauguauucggucauaaug

SEQ ID NO: 1400411 - RNA, 19 nt, Artificial Sequence
  Description of Artificial Sequence: Synthetic oligonucleotide
  Antisense strand to SEQ ID NO: 1400410
cauuaugaccgaauacaua

SEQ ID NO: 1400412 - RNA, 19 nt, Artificial Sequence
  Description of Artificial Sequence: Synthetic oligonucleotide
  Sense strand starting at position 2699 of SEQ ID NO: 1243193
cccaccucuccagagguaa

SEQ ID NO: 1400413 - RNA, 19 nt, Artificial Sequence
  Description of Artificial Sequence: Synthetic oligonucleotide
  Antisense strand to SEQ ID NO: 1400412
uuaccucuggagagguggg

SEQ ID NO: 1400414 - RNA, 19 nt, Artificial Sequence
  Description of Artificial Sequence: Synthetic oligonucleotide
  Sense strand starting at position 2751 of SEQ ID NO: 1243193
cagugaauuguuuaugcuu

SEQ ID NO: 1400415 - RNA, 19 nt, Artificial Sequence
  Description of Artificial Sequence: Synthetic oligonucleotide
  Antisense strand to SEQ ID NO: 1400414
aagcauaaacaauucacug

SEQ ID NO: 1400416 - RNA, 19 nt, Artificial Sequence
  Description of Artificial Sequence: Synthetic oligonucleotide
  Sense strand starting at position 2757 of SEQ ID NO: 1243193
auuguuuaugcuuucgcau

SEQ ID NO: 1400417 - RNA, 19 nt, Artificial Sequence
  Description of Artificial Sequence: Synthetic oligonucleotide
  Antisense strand to SEQ ID NO: 1400416
augcgaaagcauaaacaau

SEQ ID NO: 1400418 - RNA, 19 nt, Artificial Sequence
  Description of Artificial Sequence: Synthetic oligonucleotide
  Sense strand starting at position 2763 of SEQ ID NO: 1243193
uaugcuuucgcaucacgua

SEQ ID NO: 1400419 - RNA, 19 nt, Artificial Sequence
  Description of Artificial Sequence: Synthetic oligonucleotide
  Antisense strand to SEQ ID NO: 1400418
uacgugaugcgaaagcaua

SEQ ID NO: 1400420 - RNA, 19 nt, Artificial Sequence
  Description of Artificial Sequence: Synthetic oligonucleotide
  Sense strand starting at position 2806 of SEQ ID NO: 1243193
augugauacgaaugguaua

SEQ ID NO: 1400421 - RNA, 19 nt, Artificial Sequence
  Description of Artificial Sequence: Synthetic oligonucleotide
  Antisense strand to SEQ ID NO: 1400420
uauaccauucguaucacau

SEQ ID NO: 1400422 - RNA, 19 nt, Artificial Sequence
  Description of Artificial Sequence: Synthetic oligonucleotide
  Sense strand starting at position 2807 of SEQ ID NO: 1243193
ugugauacgaaugguauaa

SEQ ID NO: 1400423 - RNA, 19 nt, Artificial Sequence
  Description of Artificial Sequence: Synthetic oligonucleotide
  Antisense strand to SEQ ID NO: 1400422
uuauaccauucguaucaca

SEQ ID NO: 1400424 - RNA, 19 nt, Artificial Sequence
  Description of Artificial Sequence: Synthetic oligonucleotide
  Sense strand starting at position 2848 of SEQ ID NO: 1243193
ucacucugacaguaagguu

SEQ ID NO: 1400425 - RNA, 19 nt, Artificial Sequence
  Description of Artificial Sequence: Synthetic oligonucleotide
  Antisense strand to SEQ ID NO: 1400424
aaccuuacugucagaguga

SEQ ID NO: 1400426 - RNA, 19 nt, Artificial Sequence
  Description of Artificial Sequence: Synthetic oligonucleotide
  Sense strand starting at position 3000 of SEQ ID NO: 1243193
cgucgucugaugucucaau

SEQ ID NO: 1400427 - RNA, 19 nt, Artificial Sequence
  Description of Artificial Sequence: Synthetic oligonucleotide
  Antisense strand to SEQ ID NO: 1400426
auugagacaucagacgacg

SEQ ID NO: 1400428 - RNA, 19 nt, Artificial Sequence
  Description of Artificial Sequence: Synthetic oligonucleotide
  Sense strand starting at position 3248 of SEQ ID NO: 1243193
aagaaauugucaguaaugc

SEQ ID NO: 1400429 - RNA, 19 nt, Artificial Sequence
  Description of Artificial Sequence: Synthetic oligonucleotide
  Antisense strand to SEQ ID NO: 1400428
gcauuacugacaauuucuu

SEQ ID NO: 1400430 - RNA, 19 nt, Artificial Sequence
  Description of Artificial Sequence: Synthetic oligonucleotide
  Sense strand starting at position 3249 of SEQ ID NO: 1243193
agaaauugucaguaaugcu

SEQ ID NO: 1400431 - RNA, 19 nt, Artificial Sequence
  Description of Artificial Sequence: Synthetic oligonucleotide
  Antisense strand to SEQ ID NO: 1400430
agcauuacugacaauuucu

SEQ ID NO: 1400432 - RNA, 19 nt, Artificial Sequence
  Description of Artificial Sequence: Synthetic oligonucleotide
  Sense strand starting at position 3333 of SEQ ID NO: 1243193
gaggaaaguggccaguuua

SEQ ID NO: 1400433 - RNA, 19 nt, Artificial Sequence
  Description of Artificial Sequence: Synthetic oligonucleotide
  Antisense strand to SEQ ID NO: 1400432
uaaacuggccacuuuccuc

SEQ ID NO: 1400434 - RNA, 19 nt, Artificial Sequence
  Description of Artificial Sequence: Synthetic oligonucleotide
  Sense strand starting at position 3527 of SEQ ID NO: 1243193
cuuggaaauuuagauaaug

SEQ ID NO: 1400435 - RNA, 19 nt, Artificial Sequence
  Description of Artificial Sequence: Synthetic oligonucleotide
  Antisense strand to SEQ ID NO: 1400434
cauuaucuaaauuuccaag

SEQ ID NO: 1400436 - RNA, 19 nt, Artificial Sequence
  Description of Artificial Sequence: Synthetic oligonucleotide
  Sense strand starting at position 3542 of SEQ ID NO: 1243193
aauggaaaugcuggguuua

SEQ ID NO: 1400437 - RNA, 19 nt, Artificial Sequence
  Description of Artificial Sequence: Synthetic oligonucleotide
  Antisense strand to SEQ ID NO: 1400436
uaaacccagcauuuccauu

SEQ ID NO: 1400438 - RNA, 19 nt, Artificial Sequence
  Description of Artificial Sequence: Synthetic oligonucleotide
  Sense strand starting at position 3543 of SEQ ID NO: 1243193
auggaaaugcuggguuuau

SEQ ID NO: 1400439 - RNA, 19 nt, Artificial Sequence
  Description of Artificial Sequence: Synthetic oligonucleotide
  Antisense strand to SEQ ID NO: 1400438
auaaacccagcauuuccau

SEQ ID NO: 1400440 - RNA, 19 nt, Artificial Sequence
  Description of Artificial Sequence: Synthetic oligonucleotide
  Sense strand starting at position 3544 of SEQ ID NO: 1243193
uggaaaugcuggguuuaua

SEQ ID NO: 1400441 - RNA, 19 nt, Artificial Sequence
  Description of Artificial Sequence: Synthetic oligonucleotide
  Antisense strand to SEQ ID NO: 1400440
uauaaacccagcauuucca

SEQ ID NO: 1400442 - RNA, 19 nt, Artificial Sequence
  Description of Artificial Sequence: Synthetic oligonucleotide
  Sense strand starting at position 3566 of SEQ ID NO: 1243193
ucuggaauuaguugauagu

SEQ ID NO: 1400443 - RNA, 19 nt, Artificial Sequence
  Description of Artificial Sequence: Synthetic oligonucleotide
  Antisense strand to SEQ ID NO: 1400442
acuaucaacuaauuccaga

SEQ ID NO: 1400444 - RNA, 19 nt, Artificial Sequence
  Description of Artificial Sequence: Synthetic oligonucleotide
  Sense strand starting at position 3567 of SEQ ID NO: 1243193
cuggaauuaguugauaguu

SEQ ID NO: 1400445 - RNA, 19 nt, Artificial Sequence
  Description of Artificial Sequence: Synthetic oligonucleotide
  Antisense strand to SEQ ID NO: 1400444
aacuaucaacuaauuccag

SEQ ID NO: 1400446 - RNA, 19 nt, Artificial Sequence
  Description of Artificial Sequence: Synthetic oligonucleotide
  Sense strand starting at position 3751 of SEQ ID NO: 1243193
gguaaaggcaaauguuauc

SEQ ID NO: 1400447 - RNA, 19 nt, Artificial Sequence
  Description of Artificial Sequence: Synthetic oligonucleotide
  Antisense strand to SEQ ID NO: 1400446
gauaacauuugccuuuacc

SEQ ID NO: 1400448 - RNA, 19 nt, Artificial Sequence
  Description of Artificial Sequence: Synthetic oligonucleotide
  Sense strand starting at position 3804 of SEQ ID NO: 1243193
acuuucggugguuauuaga

SEQ ID NO: 1400449 - RNA, 19 nt, Artificial Sequence
  Description of Artificial Sequence: Synthetic oligonucleotide
  Antisense strand to SEQ ID NO: 1400448
ucuaauaaccaccgaaagu

SEQ ID NO: 1400450 - RNA, 19 nt, Artificial Sequence
  Description of Artificial Sequence: Synthetic oligonucleotide
  Sense strand starting at position 297 of SEQ ID NO: 1243194
augauuaucuucccuuguu

SEQ ID NO: 1400451 - RNA, 19 nt, Artificial Sequence
  Description of Artificial Sequence: Synthetic oligonucleotide
  Antisense strand to SEQ ID NO: 1400450
aacaagggaagauaaucau

SEQ ID NO: 1400452 - RNA, 19 nt, Artificial Sequence
  Description of Artificial Sequence: Synthetic oligonucleotide
  Sense strand starting at position 396 of SEQ ID NO: 1243194
uuguauaguuagguagaau

SEQ ID NO: 1400453 - RNA, 19 nt, Artificial Sequence
  Description of Artificial Sequence: Synthetic oligonucleotide
  Antisense strand to SEQ ID NO: 1400452
auucuaccuaacuauacaa

SEQ ID NO: 1400454 - RNA, 19 nt, Artificial Sequence
  Description of Artificial Sequence: Synthetic oligonucleotide
  Sense strand starting at position 397 of SEQ ID NO: 1243194
uguauaguuagguagaauu

SEQ ID NO: 1400455 - RNA, 19 nt, Artificial Sequence
  Description of Artificial Sequence: Synthetic oligonucleotide
  Antisense strand to SEQ ID NO: 1400454
aauucuaccuaacuauaca

SEQ ID NO: 1400456 - RNA, 19 nt, Artificial Sequence
  Description of Artificial Sequence: Synthetic oligonucleotide
  Sense strand starting at position 405 of SEQ ID NO: 1243194
uagguagaauuaucacagu

SEQ ID NO: 1400457 - RNA, 19 nt, Artificial Sequence
  Description of Artificial Sequence: Synthetic oligonucleotide
  Antisense strand to SEQ ID NO: 1400456
acugugauaauucuaccua

SEQ ID NO: 1400458 - RNA, 19 nt, Artificial Sequence
  Description of Artificial Sequence: Synthetic oligonucleotide
  Sense strand starting at position 613 of SEQ ID NO: 1243194
accgauacauguccauauu

SEQ ID NO: 1400459 - RNA, 19 nt, Artificial Sequence
  Description of Artificial Sequence: Synthetic oligonucleotide
  Antisense strand to SEQ ID NO: 1400458
aauauggacauguaucggu

SEQ ID NO: 1400460 - RNA, 19 nt, Artificial Sequence
  Description of Artificial Sequence: Synthetic oligonucleotide
  Sense strand starting at position 614 of SEQ ID NO: 1243194
ccgauacauguccauauua

SEQ ID NO: 1400461 - RNA, 19 nt, Artificial Sequence
  Description of Artificial Sequence: Synthetic oligonucleotide
  Antisense strand to SEQ ID NO: 1400460
uaauauggacauguaucgg

SEQ ID NO: 1400462 - RNA, 19 nt, Artificial Sequence
  Description of Artificial Sequence: Synthetic oligonucleotide
  Sense strand starting at position 950 of SEQ ID NO: 1243194
auuacuaagugugucacua

SEQ ID NO: 1400463 - RNA, 19 nt, Artificial Sequence
  Description of Artificial Sequence: Synthetic oligonucleotide
  Antisense strand to SEQ ID NO: 1400462
uagugacacacuuaguaau

SEQ ID NO: 1400464 - RNA, 19 nt, Artificial Sequence
  Description of Artificial Sequence: Synthetic oligonucleotide
  Sense strand starting at position 1027 of SEQ ID NO: 1243194
uuuccuugggaaugagauu

SEQ ID NO: 1400465 - RNA, 19 nt, Artificial Sequence
  Description of Artificial Sequence: Synthetic oligonucleotide
  Antisense strand to SEQ ID NO: 1400464
aaucucauucccaaggaaa

SEQ ID NO: 1400466 - RNA, 19 nt, Artificial Sequence
  Description of Artificial Sequence: Synthetic oligonucleotide
  Sense strand starting at position 2102 of SEQ ID NO: 1243194
gcuugcaggauguaaauga

SEQ ID NO: 1400467 - RNA, 19 nt, Artificial Sequence
  Description of Artificial Sequence: Synthetic oligonucleotide
  Antisense strand to SEQ ID NO: 1400466
ucauuuacauccugcaagc

SEQ ID NO: 1400468 - RNA, 19 nt, Artificial Sequence
  Description of Artificial Sequence: Synthetic oligonucleotide
  Sense strand starting at position 2106 of SEQ ID NO: 1243194
gcaggauguaaaugauaau

SEQ ID NO: 1400469 - RNA, 19 nt, Artificial Sequence
  Description of Artificial Sequence: Synthetic oligonucleotide
  Antisense strand to SEQ ID NO: 1400468
auuaucauuuacauccugc

SEQ ID NO: 1400470 - RNA, 19 nt, Artificial Sequence
  Description of Artificial Sequence: Synthetic oligonucleotide
  Sense strand starting at position 2252 of SEQ ID NO: 1243194
cccagaggucugggcagaa

SEQ ID NO: 1400471 - RNA, 19 nt, Artificial Sequence
  Description of Artificial Sequence: Synthetic oligonucleotide
  Antisense strand to SEQ ID NO: 1400470
uucugcccagaccucuggg

SEQ ID NO: 1400472 - RNA, 19 nt, Artificial Sequence
  Description of Artificial Sequence: Synthetic oligonucleotide
  Sense strand starting at position 2264 of SEQ ID NO: 1243194
ggcagaaacucagucaguu

SEQ ID NO: 1400473 - RNA, 19 nt, Artificial Sequence
  Description of Artificial Sequence: Synthetic oligonucleotide
  Antisense strand to SEQ ID NO: 1400472
aacugacugaguuucugcc

SEQ ID NO: 1400474 - RNA, 19 nt, Artificial Sequence
  Description of Artificial Sequence: Synthetic oligonucleotide
  Sense strand starting at position 2420 of SEQ ID NO: 1243194
gcuuuaaguccugacaagc

SEQ ID NO: 1400475 - RNA, 19 nt, Artificial Sequence
  Description of Artificial Sequence: Synthetic oligonucleotide
  Antisense strand to SEQ ID NO: 1400474
gcuugucaggacuuaaagc

SEQ ID NO: 1400476 - RNA, 19 nt, Artificial Sequence
  Description of Artificial Sequence: Synthetic oligonucleotide
  Sense strand starting at position 2437 of SEQ ID NO: 1243194
gcaguuaucagugaagucc

SEQ ID NO: 1400477 - RNA, 19 nt, Artificial Sequence
  Description of Artificial Sequence: Synthetic oligonucleotide
  Antisense strand to SEQ ID NO: 1400476
ggacuucacugauaacugc

SEQ ID NO: 1400478 - RNA, 19 nt, Artificial Sequence
  Description of Artificial Sequence: Synthetic oligonucleotide
  Sense strand starting at position 2852 of SEQ ID NO: 1243194
agguuauuggucugaggga

SEQ ID NO: 1400479 - RNA, 19 nt, Artificial Sequence
  Description of Artificial Sequence: Synthetic oligonucleotide
  Antisense strand to SEQ ID NO: 1400478
ucccucagaccaauaaccu

SEQ ID NO: 1400480 - RNA, 19 nt, Artificial Sequence
  Description of Artificial Sequence: Synthetic oligonucleotide
  Sense strand starting at position 2887 of SEQ ID NO: 1243194
gagcuuugaggcugaguau

SEQ ID NO: 1400481 - RNA, 19 nt, Artificial Sequence
  Description of Artificial Sequence: Synthetic oligonucleotide
  Antisense strand to SEQ ID NO: 1400480
auacucagccucaaagcuc

SEQ ID NO: 1400482 - RNA, 19 nt, Artificial Sequence
  Description of Artificial Sequence: Synthetic oligonucleotide
  Sense strand starting at position 2932 of SEQ ID NO: 1243194
agacucagcccuugaugca

SEQ ID NO: 1400483 - RNA, 19 nt, Artificial Sequence
  Description of Artificial Sequence: Synthetic oligonucleotide
  Antisense strand to SEQ ID NO: 1400482
ugcaucaagggcugagucu

SEQ ID NO: 1400484 - RNA, 19 nt, Artificial Sequence
  Description of Artificial Sequence: Synthetic oligonucleotide
  Sense strand starting at position 2952 of SEQ ID NO: 1243194
gaaggauguuuggaagaau

SEQ ID NO: 1400485 - RNA, 19 nt, Artificial Sequence
  Description of Artificial Sequence: Synthetic oligonucleotide
  Antisense strand to SEQ ID NO: 1400484
auucuuccaaacauccuuc

SEQ ID NO: 1400486 - RNA, 19 nt, Artificial Sequence
  Description of Artificial Sequence: Synthetic oligonucleotide
  Sense strand starting at position 3009 of SEQ ID NO: 1243194
agggucauauucccugaga

SEQ ID NO: 1400487 - RNA, 19 nt, Artificial Sequence
  Description of Artificial Sequence: Synthetic oligonucleotide
  Antisense strand to SEQ ID NO: 1400486
ucucagggaauaugacccu

SEQ ID NO: 1400488 - RNA, 19 nt, Artificial Sequence
  Description of Artificial Sequence: Synthetic oligonucleotide
  Sense strand starting at position 3010 of SEQ ID NO: 1243194
gggucauauucccugagag

SEQ ID NO: 1400489 - RNA, 19 nt, Artificial Sequence
  Description of Artificial Sequence: Synthetic oligonucleotide
  Antisense strand to SEQ ID NO: 1400488
cucucagggaauaugaccc

SEQ ID NO: 1400490 - RNA, 19 nt, Artificial Sequence
  Description of Artificial Sequence: Synthetic oligonucleotide
  Sense strand starting at position 3011 of SEQ ID NO: 1243194
ggucauauucccugagagc

SEQ ID NO: 1400491 - RNA, 19 nt, Artificial Sequence
  Description of Artificial Sequence: Synthetic oligonucleotide
  Antisense strand to SEQ ID NO: 1400490
gcucucagggaauaugacc

SEQ ID NO: 1400492 - RNA, 19 nt, Artificial Sequence
  Description of Artificial Sequence: Synthetic oligonucleotide
  Sense strand starting at position 3022 of SEQ ID NO: 1243194
cugagagccucauugagaa

SEQ ID NO: 1400493 - RNA, 19 nt, Artificial Sequence
  Description of Artificial Sequence: Synthetic oligonucleotide
  Antisense strand to SEQ ID NO: 1400492
uucucaaugaggcucucag

SEQ ID NO: 1400494 - RNA, 19 nt, Artificial Sequence
  Description of Artificial Sequence: Synthetic oligonucleotide
  Sense strand starting at position 3094 of SEQ ID NO: 1243194
acgauaaagcuuugucaua

SEQ ID NO: 1400495 - RNA, 19 nt, Artificial Sequence
  Description of Artificial Sequence: Synthetic oligonucleotide
  Antisense strand to SEQ ID NO: 1400494
uaugacaaagcuuuaucgu

SEQ ID NO: 1400496 - RNA, 19 nt, Artificial Sequence
  Description of Artificial Sequence: Synthetic oligonucleotide
  Sense strand starting at position 3095 of SEQ ID NO: 1243194
cgauaaagcuuugucauac

SEQ ID NO: 1400497 - RNA, 19 nt, Artificial Sequence
  Description of Artificial Sequence: Synthetic oligonucleotide
  Antisense strand to SEQ ID NO: 1400496
guaugacaaagcuuuaucg

SEQ ID NO: 1400498 - RNA, 19 nt, Artificial Sequence
  Description of Artificial Sequence: Synthetic oligonucleotide
  Sense strand starting at position 3163 of SEQ ID NO: 1243194
ggguaaucauuggcaacaa

SEQ ID NO: 1400499 - RNA, 19 nt, Artificial Sequence
  Description of Artificial Sequence: Synthetic oligonucleotide
  Antisense strand to SEQ ID NO: 1400498
uuguugccaaugauuaccc

SEQ ID NO: 1400500 - RNA, 19 nt, Artificial Sequence
  Description of Artificial Sequence: Synthetic oligonucleotide
  Sense strand starting at position 3231 of SEQ ID NO: 1243194
cugggaugcugaucuuguu

SEQ ID NO: 1400501 - RNA, 19 nt, Artificial Sequence
  Description of Artificial Sequence: Synthetic oligonucleotide
  Antisense strand to SEQ ID NO: 1400500
aacaagaucagcaucccag

SEQ ID NO: 1400502 - RNA, 19 nt, Artificial Sequence
  Description of Artificial Sequence: Synthetic oligonucleotide
  Sense strand starting at position 3238 of SEQ ID NO: 1243194
gcugaucuuguugggagau

SEQ ID NO: 1400503 - RNA, 19 nt, Artificial Sequence
  Description of Artificial Sequence: Synthetic oligonucleotide
  Antisense strand to SEQ ID NO: 1400502
aucucccaacaagaucagc

SEQ ID NO: 1400504 - RNA, 19 nt, Artificial Sequence
  Description of Artificial Sequence: Synthetic oligonucleotide
  Sense strand starting at position 3248 of SEQ ID NO: 1243194
uugggagauaccugugaag

SEQ ID NO: 1400505 - RNA, 19 nt, Artificial Sequence
  Description of Artificial Sequence: Synthetic oligonucleotide
  Antisense strand to SEQ ID NO: 1400504
cuucacagguaucucccaa

SEQ ID NO: 1400506 - RNA, 19 nt, Artificial Sequence
  Description of Artificial Sequence: Synthetic oligonucleotide
  Sense strand starting at position 3250 of SEQ ID NO: 1243194
gggagauaccugugaagcu

SEQ ID NO: 1400507 - RNA, 19 nt, Artificial Sequence
  Description of Artificial Sequence: Synthetic oligonucleotide
  Antisense strand to SEQ ID NO: 1400506
agcuucacagguaucuccc

SEQ ID NO: 1400508 - RNA, 19 nt, Artificial Sequence
  Description of Artificial Sequence: Synthetic oligonucleotide
  Sense strand starting at position 3262 of SEQ ID NO: 1243194
ugaagcuguacugggauua

SEQ ID NO: 1400509 - RNA, 19 nt, Artificial Sequence
  Description of Artificial Sequence: Synthetic oligonucleotide
  Antisense strand to SEQ ID NO: 1400508
uaaucccaguacagcuuca

SEQ ID NO: 1400510 - RNA, 19 nt, Artificial Sequence
  Description of Artificial Sequence: Synthetic oligonucleotide
  Sense strand starting at position 3263 of SEQ ID NO: 1243194
gaagcuguacugggauuaa

SEQ ID NO: 1400511 - RNA, 19 nt, Artificial Sequence
  Description of Artificial Sequence: Synthetic oligonucleotide
  Antisense strand to SEQ ID NO: 1400510
uuaaucccaguacagcuuc

SEQ ID NO: 1400512 - RNA, 19 nt, Artificial Sequence
  Description of Artificial Sequence: Synthetic oligonucleotide
  Sense strand starting at position 3337 of SEQ ID NO: 1243194
ccaguuguauagccuuaga

SEQ ID NO: 1400513 - RNA, 19 nt, Artificial Sequence
  Description of Artificial Sequence: Synthetic oligonucleotide
  Antisense strand to SEQ ID NO: 1400512
ucuaaggcuauacaacugg

SEQ ID NO: 1400514 - RNA, 19 nt, Artificial Sequence
  Description of Artificial Sequence: Synthetic oligonucleotide
  Sense strand starting at position 3359 of SEQ ID NO: 1243194
gcuaguaaccuccacugaa

SEQ ID NO: 1400515 - RNA, 19 nt, Artificial Sequence
  Description of Artificial Sequence: Synthetic oligonucleotide
  Antisense strand to SEQ ID NO: 1400514
uucaguggagguuacuagc

SEQ ID NO: 1400516 - RNA, 19 nt, Artificial Sequence
  Description of Artificial Sequence: Synthetic oligonucleotide
  Sense strand starting at position 3454 of SEQ ID NO: 1243194
uauguuaaauaucucguga

SEQ ID NO: 1400517 - RNA, 19 nt, Artificial Sequence
  Description of Artificial Sequence: Synthetic oligonucleotide
  Antisense strand to SEQ ID NO: 1400516
ucacgagauauuuaacaua

SEQ ID NO: 1400518 - RNA, 19 nt, Artificial Sequence
  Description of Artificial Sequence: Synthetic oligonucleotide
  Sense strand starting at position 3513 of SEQ ID NO: 1243194
cuaggugaaggcugaagau

SEQ ID NO: 1400519 - RNA, 19 nt, Artificial Sequence
  Description of Artificial Sequence: Synthetic oligonucleotide
  Antisense strand to SEQ ID NO: 1400518
aucuucagccuucaccuag

SEQ ID NO: 1400520 - RNA, 19 nt, Artificial Sequence
  Description of Artificial Sequence: Synthetic oligonucleotide
  Sense strand starting at position 3603 of SEQ ID NO: 1243194
auucuuguugcccaggcaa

SEQ ID NO: 1400521 - RNA, 19 nt, Artificial Sequence
  Description of Artificial Sequence: Synthetic oligonucleotide
  Antisense strand to SEQ ID NO: 1400520
uugccugggcaacaagaau

SEQ ID NO: 1400522 - RNA, 19 nt, Artificial Sequence
  Description of Artificial Sequence: Synthetic oligonucleotide
  Sense strand starting at position 3716 of SEQ ID NO: 1243194
ccauaaagcuaauuacgaa

SEQ ID NO: 1400523 - RNA, 19 nt, Artificial Sequence
  Description of Artificial Sequence: Synthetic oligonucleotide
  Antisense strand to SEQ ID NO: 1400522
uucguaauuagcuuuaugg

SEQ ID NO: 1400524 - RNA, 19 nt, Artificial Sequence
  Description of Artificial Sequence: Synthetic oligonucleotide
  Sense strand starting at position 3832 of SEQ ID NO: 1243194
agguuaaugucauuacaaa

SEQ ID NO: 1400525 - RNA, 19 nt, Artificial Sequence
  Description of Artificial Sequence: Synthetic oligonucleotide
  Antisense strand to SEQ ID NO: 1400524
uuuguaaugacauuaaccu

SEQ ID NO: 1400526 - RNA, 19 nt, Artificial Sequence
  Description of Artificial Sequence: Synthetic oligonucleotide
  Sense strand starting at position 3854 of SEQ ID NO: 1243194
caaggugucuucuugcaaa

SEQ ID NO: 1400527 - RNA, 19 nt, Artificial Sequence
  Description of Artificial Sequence: Synthetic oligonucleotide
  Antisense strand to SEQ ID NO: 1400526
uuugcaagaagacaccuug

SEQ ID NO: 1400528 - RNA, 19 nt, Artificial Sequence
  Description of Artificial Sequence: Synthetic oligonucleotide
  Sense strand starting at position 3865 of SEQ ID NO: 1243194
cuugcaaagccuuuguguu

SEQ ID NO: 1400529 - RNA, 19 nt, Artificial Sequence
  Description of Artificial Sequence: Synthetic oligonucleotide
  Antisense strand to SEQ ID NO: 1400528
aacacaaaggcuuugcaag

SEQ ID NO: 1400530 - RNA, 19 nt, Artificial Sequence
  Description of Artificial Sequence: Synthetic oligonucleotide
  Sense strand starting at position 177 of SEQ ID NO: 1243195
cacugcacccagugguaua

SEQ ID NO: 1400531 - RNA, 19 nt, Artificial Sequence
  Description of Artificial Sequence: Synthetic oligonucleotide
  Antisense strand to SEQ ID NO: 1400530
uauaccacugggugcagug

SEQ ID NO: 1400532 - RNA, 19 nt, Artificial Sequence
  Description of Artificial Sequence: Synthetic oligonucleotide
  Sense strand starting at position 187 of SEQ ID NO: 1243195
agugguauacugcauuauu

SEQ ID NO: 1400533 - RNA, 19 nt, Artificial Sequence
  Description of Artificial Sequence: Synthetic oligonucleotide
  Antisense strand to SEQ ID NO: 1400532
aauaaugcaguauaccacu

SEQ ID NO: 1400534 - RNA, 19 nt, Artificial Sequence
  Description of Artificial Sequence: Synthetic oligonucleotide
  Sense strand starting at position 190 of SEQ ID NO: 1243195
gguauacugcauuauuaag

SEQ ID NO: 1400535 - RNA, 19 nt, Artificial Sequence
  Description of Artificial Sequence: Synthetic oligonucleotide
  Antisense strand to SEQ ID NO: 1400534
cuuaauaaugcaguauacc

SEQ ID NO: 1400536 - RNA, 19 nt, Artificial Sequence
  Description of Artificial Sequence: Synthetic oligonucleotide
  Sense strand starting at position 196 of SEQ ID NO: 1243195
cugcauuauuaagaagaga

SEQ ID NO: 1400537 - RNA, 19 nt, Artificial Sequence
  Description of Artificial Sequence: Synthetic oligonucleotide
  Antisense strand to SEQ ID NO: 1400536
ucucuucuuaauaaugcag

SEQ ID NO: 1400538 - RNA, 19 nt, Artificial Sequence
  Description of Artificial Sequence: Synthetic oligonucleotide
  Sense strand starting at position 285 of SEQ ID NO: 1243195
ggccaagaauucuagacca

SEQ ID NO: 1400539 - RNA, 19 nt, Artificial Sequence
  Description of Artificial Sequence: Synthetic oligonucleotide
  Antisense strand to SEQ ID NO: 1400538
uggucuagaauucuuggcc

SEQ ID NO: 1400540 - RNA, 19 nt, Artificial Sequence
  Description of Artificial Sequence: Synthetic oligonucleotide
  Sense strand starting at position 531 of SEQ ID NO: 1243195
aggcaaagauaaugacaga

SEQ ID NO: 1400541 - RNA, 19 nt, Artificial Sequence
  Description of Artificial Sequence: Synthetic oligonucleotide
  Antisense strand to SEQ ID NO: 1400540
ucugucauuaucuuugccu

SEQ ID NO: 1400542 - RNA, 19 nt, Artificial Sequence
  Description of Artificial Sequence: Synthetic oligonucleotide
  Sense strand starting at position 560 of SEQ ID NO: 1243195
acaugaauuguuugggucu

SEQ ID NO: 1400543 - RNA, 19 nt, Artificial Sequence
  Description of Artificial Sequence: Synthetic oligonucleotide
  Antisense strand to SEQ ID NO: 1400542
agacccaaacaauucaugu

SEQ ID NO: 1400544 - RNA, 19 nt, Artificial Sequence
  Description of Artificial Sequence: Synthetic oligonucleotide
  Sense strand starting at position 589 of SEQ ID NO: 1243195
uuaauaauacauggcuuga

SEQ ID NO: 1400545 - RNA, 19 nt, Artificial Sequence
  Description of Artificial Sequence: Synthetic oligonucleotide
  Antisense strand to SEQ ID NO: 1400544
ucaagccauguauuauuaa

SEQ ID NO: 1400546 - RNA, 19 nt, Artificial Sequence
  Description of Artificial Sequence: Synthetic oligonucleotide
  Sense strand starting at position 649 of SEQ ID NO: 1243195
ggaggugcuuugcuuagaa

SEQ ID NO: 1400547 - RNA, 19 nt, Artificial Sequence
  Description of Artificial Sequence: Synthetic oligonucleotide
  Antisense strand to SEQ ID NO: 1400546
uucuaagcaaagcaccucc

SEQ ID NO: 1400548 - RNA, 19 nt, Artificial Sequence
  Description of Artificial Sequence: Synthetic oligonucleotide
  Sense strand starting at position 733 of SEQ ID NO: 1243195
gugagacaggucugucaca

SEQ ID NO: 1400549 - RNA, 19 nt, Artificial Sequence
  Description of Artificial Sequence: Synthetic oligonucleotide
  Antisense strand to SEQ ID NO: 1400548
ugugacagaccugucucac

SEQ ID NO: 1400550 - RNA, 19 nt, Artificial Sequence
  Description of Artificial Sequence: Synthetic oligonucleotide
  Sense strand starting at position 740 of SEQ ID NO: 1243195
aggucugucacaggucaau

SEQ ID NO: 1400551 - RNA, 19 nt, Artificial Sequence
  Description of Artificial Sequence: Synthetic oligonucleotide
  Antisense strand to SEQ ID NO: 1400550
auugaccugugacagaccu

SEQ ID NO: 1400552 - RNA, 19 nt, Artificial Sequence
  Description of Artificial Sequence: Synthetic oligonucleotide
  Sense strand starting at position 797 of SEQ ID NO: 1243195
gguaguccacaguaggauu

SEQ ID NO: 1400553 - RNA, 19 nt, Artificial Sequence
  Description of Artificial Sequence: Synthetic oligonucleotide
  Antisense strand to SEQ ID NO: 1400552
aauccuacuguggacuacc

SEQ ID NO: 1400554 - RNA, 19 nt, Artificial Sequence
  Description of Artificial Sequence: Synthetic oligonucleotide
  Sense strand starting at position 816 of SEQ ID NO: 1243195
uuugguaaauaaguguaga

SEQ ID NO: 1400555 - RNA, 19 nt, Artificial Sequence
  Description of Artificial Sequence: Synthetic oligonucleotide
  Antisense strand to SEQ ID NO: 1400554
ucuacacuuauuuaccaaa

SEQ ID NO: 1400556 - RNA, 19 nt, Artificial Sequence
  Description of Artificial Sequence: Synthetic oligonucleotide
  Sense strand starting at position 817 of SEQ ID NO: 1243195
uugguaaauaaguguagaa

SEQ ID NO: 1400557 - RNA, 19 nt, Artificial Sequence
  Description of Artificial Sequence: Synthetic oligonucleotide
  Antisense strand to SEQ ID NO: 1400556
uucuacacuuauuuaccaa

SEQ ID NO: 1400558 - RNA, 19 nt, Artificial Sequence
  Description of Artificial Sequence: Synthetic oligonucleotide
  Sense strand starting at position 827 of SEQ ID NO: 1243195
aguguagaacauuacgaau

SEQ ID NO: 1400559 - RNA, 19 nt, Artificial Sequence
  Description of Artificial Sequence: Synthetic oligonucleotide
  Antisense strand to SEQ ID NO: 1400558
auucguaauguucuacacu

SEQ ID NO: 1400560 - RNA, 19 nt, Artificial Sequence
  Description of Artificial Sequence: Synthetic oligonucleotide
  Sense strand starting at position 830 of SEQ ID NO: 1243195
guagaacauuacgaauaac

SEQ ID NO: 1400561 - RNA, 19 nt, Artificial Sequence
  Description of Artificial Sequence: Synthetic oligonucleotide
  Antisense strand to SEQ ID NO: 1400560
guuauucguaauguucuac

SEQ ID NO: 1400562 - RNA, 19 nt, Artificial Sequence
  Description of Artificial Sequence: Synthetic oligonucleotide
  Sense strand starting at position 916 of SEQ ID NO: 1243195
cggaauuaguauuccucau

SEQ ID NO: 1400563 - RNA, 19 nt, Artificial Sequence
  Description of Artificial Sequence: Synthetic oligonucleotide
  Antisense strand to SEQ ID NO: 1400562
augaggaauacuaauuccg

SEQ ID NO: 1400564 - RNA, 19 nt, Artificial Sequence
  Description of Artificial Sequence: Synthetic oligonucleotide
  Sense strand starting at position 920 of SEQ ID NO: 1243195
auuaguauuccucauguuc

SEQ ID NO: 1400565 - RNA, 19 nt, Artificial Sequence
  Description of Artificial Sequence: Synthetic oligonucleotide
  Antisense strand to SEQ ID NO: 1400564
gaacaugaggaauacuaau

SEQ ID NO: 1400566 - RNA, 19 nt, Artificial Sequence
  Description of Artificial Sequence: Synthetic oligonucleotide
  Sense strand starting at position 2042 of SEQ ID NO: 1243195
ucaggaacggucuaauagu

SEQ ID NO: 1400567 - RNA, 19 nt, Artificial Sequence
  Description of Artificial Sequence: Synthetic oligonucleotide
  Antisense strand to SEQ ID NO: 1400566
acuauuagaccguuccuga

SEQ ID NO: 1400568 - RNA, 19 nt, Artificial Sequence
  Description of Artificial Sequence: Synthetic oligonucleotide
  Sense strand starting at position 2051 of SEQ ID NO: 1243195
gucuaauaguucucuggga

SEQ ID NO: 1400569 - RNA, 19 nt, Artificial Sequence
  Description of Artificial Sequence: Synthetic oligonucleotide
  Antisense strand to SEQ ID NO: 1400568
ucccagagaacuauuagac

SEQ ID NO: 1400570 - RNA, 19 nt, Artificial Sequence
  Description of Artificial Sequence: Synthetic oligonucleotide
  Sense strand starting at position 2052 of SEQ ID NO: 1243195
ucuaauaguucucugggau

SEQ ID NO: 1400571 - RNA, 19 nt, Artificial Sequence
  Description of Artificial Sequence: Synthetic oligonucleotide
  Antisense strand to SEQ ID NO: 1400570
aucccagagaacuauuaga

SEQ ID NO: 1400572 - RNA, 19 nt, Artificial Sequence
  Description of Artificial Sequence: Synthetic oligonucleotide
  Sense strand starting at position 2053 of SEQ ID NO: 1243195
cuaauaguucucugggauc

SEQ ID NO: 1400573 - RNA, 19 nt, Artificial Sequence
  Description of Artificial Sequence: Synthetic oligonucleotide
  Antisense strand to SEQ ID NO: 1400572
gaucccagagaacuauuag

SEQ ID NO: 1400574 - RNA, 19 nt, Artificial Sequence
  Description of Artificial Sequence: Synthetic oligonucleotide
  Sense strand starting at position 2055 of SEQ ID NO: 1243195
aauaguucucugggaucca

SEQ ID NO: 1400575 - RNA, 19 nt, Artificial Sequence
  Description of Artificial Sequence: Synthetic oligonucleotide
  Antisense strand to SEQ ID NO: 1400574
uggaucccagagaacuauu

SEQ ID NO: 1400576 - RNA, 19 nt, Artificial Sequence
  Description of Artificial Sequence: Synthetic oligonucleotide
  Sense strand starting at position 2065 of SEQ ID NO: 1243195
ugggauccauaguuaagua

SEQ ID NO: 1400577 - RNA, 19 nt, Artificial Sequence
  Description of Artificial Sequence: Synthetic oligonucleotide
  Antisense strand to SEQ ID NO: 1400576
uacuuaacuauggauccca

SEQ ID NO: 1400578 - RNA, 19 nt, Artificial Sequence
  Description of Artificial Sequence: Synthetic oligonucleotide
  Sense strand starting at position 2698 of SEQ ID NO: 1243195
ccgugcguggccuagauuu

SEQ ID NO: 1400579 - RNA, 19 nt, Artificial Sequence
  Description of Artificial Sequence: Synthetic oligonucleotide
  Antisense strand to SEQ ID NO: 1400578
aaaucuaggccacgcacgg

SEQ ID NO: 1400580 - RNA, 19 nt, Artificial Sequence
  Description of Artificial Sequence: Synthetic oligonucleotide
  Sense strand starting at position 2700 of SEQ ID NO: 1243195
gugcguggccuagauuuca

SEQ ID NO: 1400581 - RNA, 19 nt, Artificial Sequence
  Description of Artificial Sequence: Synthetic oligonucleotide
  Antisense strand to SEQ ID NO: 1400580
ugaaaucuaggccacgcac

SEQ ID NO: 1400582 - RNA, 19 nt, Artificial Sequence
  Description of Artificial Sequence: Synthetic oligonucleotide
  Sense strand starting at position 2736 of SEQ ID NO: 1243195
ccaucuacuguugguuaca

SEQ ID NO: 1400583 - RNA, 19 nt, Artificial Sequence
  Description of Artificial Sequence: Synthetic oligonucleotide
  Antisense strand to SEQ ID NO: 1400582
uguaaccaacaguagaugg

SEQ ID NO: 1400584 - RNA, 19 nt, Artificial Sequence
  Description of Artificial Sequence: Synthetic oligonucleotide
  Sense strand starting at position 2776 of SEQ ID NO: 1243195
ccaucagaaugucagguau

SEQ ID NO: 1400585 - RNA, 19 nt, Artificial Sequence
  Description of Artificial Sequence: Synthetic oligonucleotide
  Antisense strand to SEQ ID NO: 1400584
auaccugacauucugaugg

SEQ ID NO: 1400586 - RNA, 19 nt, Artificial Sequence
  Description of Artificial Sequence: Synthetic oligonucleotide
  Sense strand starting at position 2782 of SEQ ID NO: 1243195
gaaugucagguaugagcua

SEQ ID NO: 1400587 - RNA, 19 nt, Artificial Sequence
  Description of Artificial Sequence: Synthetic oligonucleotide
  Antisense strand to SEQ ID NO: 1400586
uagcucauaccugacauuc

SEQ ID NO: 1400588 - RNA, 19 nt, Artificial Sequence
  Description of Artificial Sequence: Synthetic oligonucleotide
  Sense strand starting at position 2879 of SEQ ID NO: 1243195
auggcuaugacgggauaga

SEQ ID NO: 1400589 - RNA, 19 nt, Artificial Sequence
  Description of Artificial Sequence: Synthetic oligonucleotide
  Antisense strand to SEQ ID NO: 1400588
ucuaucccgucauagccau

SEQ ID NO: 1400590 - RNA, 19 nt, Artificial Sequence
  Description of Artificial Sequence: Synthetic oligonucleotide
  Sense strand starting at position 2907 of SEQ ID NO: 1243195
ccauuagaauuagauguga

SEQ ID NO: 1400591 - RNA, 19 nt, Artificial Sequence
  Description of Artificial Sequence: Synthetic oligonucleotide
  Antisense strand to SEQ ID NO: 1400590
ucacaucuaauucuaaugg

SEQ ID NO: 1400592 - RNA, 19 nt, Artificial Sequence
  Description of Artificial Sequence: Synthetic oligonucleotide
  Sense strand starting at position 2912 of SEQ ID NO: 1243195
agaauuagaugugaaaguu

SEQ ID NO: 1400593 - RNA, 19 nt, Artificial Sequence
  Description of Artificial Sequence: Synthetic oligonucleotide
  Antisense strand to SEQ ID NO: 1400592
aacuuucacaucuaauucu

SEQ ID NO: 1400594 - RNA, 19 nt, Artificial Sequence
  Description of Artificial Sequence: Synthetic oligonucleotide
  Sense strand starting at position 3137 of SEQ ID NO: 1243195
uucugauacgcucagggaa

SEQ ID NO: 1400595 - RNA, 19 nt, Artificial Sequence
  Description of Artificial Sequence: Synthetic oligonucleotide
  Antisense strand to SEQ ID NO: 1400594
uucccugagcguaucagaa

SEQ ID NO: 1400596 - RNA, 19 nt, Artificial Sequence
  Description of Artificial Sequence: Synthetic oligonucleotide
  Sense strand starting at position 3249 of SEQ ID NO: 1243195
uaccucagugcuggaucua

SEQ ID NO: 1400597 - RNA, 19 nt, Artificial Sequence
  Description of Artificial Sequence: Synthetic oligonucleotide
  Antisense strand to SEQ ID NO: 1400596
uagauccagcacugaggua

SEQ ID NO: 1400598 - RNA, 19 nt, Artificial Sequence
  Description of Artificial Sequence: Synthetic oligonucleotide
  Sense strand starting at position 3265 of SEQ ID NO: 1243195
cuagaaagaugauguuuga

SEQ ID NO: 1400599 - RNA, 19 nt, Artificial Sequence
  Description of Artificial Sequence: Synthetic oligonucleotide
  Antisense strand to SEQ ID NO: 1400598
ucaaacaucaucuuucuag

SEQ ID NO: 1400600 - RNA, 19 nt, Artificial Sequence
  Description of Artificial Sequence: Synthetic oligonucleotide
  Sense strand starting at position 3272 of SEQ ID NO: 1243195
gaugauguuugaggaauaa

SEQ ID NO: 1400601 - RNA, 19 nt, Artificial Sequence
  Description of Artificial Sequence: Synthetic oligonucleotide
  Antisense strand to SEQ ID NO: 1400600
uuauuccucaaacaucauc

SEQ ID NO: 1400602 - RNA, 19 nt, Artificial Sequence
  Description of Artificial Sequence: Synthetic oligonucleotide
  Sense strand starting at position 3284 of SEQ ID NO: 1243195
ggaauaacaugaugaaucu

SEQ ID NO: 1400603 - RNA, 19 nt, Artificial Sequence
  Description of Artificial Sequence: Synthetic oligonucleotide
  Antisense strand to SEQ ID NO: 1400602
agauucaucauguuauucc

SEQ ID NO: 1400604 - RNA, 19 nt, Artificial Sequence
  Description of Artificial Sequence: Synthetic oligonucleotide
  Sense strand starting at position 3420 of SEQ ID NO: 1243195
uaaauaaguuuagguggaa

SEQ ID NO: 1400605 - RNA, 19 nt, Artificial Sequence
  Description of Artificial Sequence: Synthetic oligonucleotide
  Antisense strand to SEQ ID NO: 1400604
uuccaccuaaacuuauuua

SEQ ID NO: 1400606 - RNA, 19 nt, Artificial Sequence
  Description of Artificial Sequence: Synthetic oligonucleotide
  Sense strand starting at position 3562 of SEQ ID NO: 1243195
uguguccacgucuaaauca

SEQ ID NO: 1400607 - RNA, 19 nt, Artificial Sequence
  Description of Artificial Sequence: Synthetic oligonucleotide
  Antisense strand to SEQ ID NO: 1400606
ugauuuagacguggacaca

SEQ ID NO: 1400608 - RNA, 19 nt, Artificial Sequence
  Description of Artificial Sequence: Synthetic oligonucleotide
  Sense strand starting at position 3836 of SEQ ID NO: 1243195
uugagauugcacuacuaca

SEQ ID NO: 1400609 - RNA, 19 nt, Artificial Sequence
  Description of Artificial Sequence: Synthetic oligonucleotide
  Antisense strand to SEQ ID NO: 1400608
uguaguagugcaaucucaa

SEQ ID NO: 1400610 - RNA, 19 nt, Artificial Sequence
  Description of Artificial Sequence: Synthetic oligonucleotide
  Sense strand starting at position 216 of SEQ ID NO: 1243196
gggauugucuccuugggaa

SEQ ID NO: 1400611 - RNA, 19 nt, Artificial Sequence
  Description of Artificial Sequence: Synthetic oligonucleotide
  Antisense strand to SEQ ID NO: 1400610
uucccaaggagacaauccc

SEQ ID NO: 1400612 - RNA, 19 nt, Artificial Sequence
  Description of Artificial Sequence: Synthetic oligonucleotide
  Sense strand starting at position 354 of SEQ ID NO: 1243196
guaagcuggucuguggauu

SEQ ID NO: 1400613 - RNA, 19 nt, Artificial Sequence
  Description of Artificial Sequence: Synthetic oligonucleotide
  Antisense strand to SEQ ID NO: 1400612
aauccacagaccagcuuac

SEQ ID NO: 1400614 - RNA, 19 nt, Artificial Sequence
  Description of Artificial Sequence: Synthetic oligonucleotide
  Sense strand starting at position 410 of SEQ ID NO: 1243196
cccuuaggguuagagaguu

SEQ ID NO: 1400615 - RNA, 19 nt, Artificial Sequence
  Description of Artificial Sequence: Synthetic oligonucleotide
  Antisense strand to SEQ ID NO: 1400614
aacucucuaacccuaaggg

SEQ ID NO: 1400616 - RNA, 19 nt, Artificial Sequence
  Description of Artificial Sequence: Synthetic oligonucleotide
  Sense strand starting at position 420 of SEQ ID NO: 1243196
uagagaguuucccugucau

SEQ ID NO: 1400617 - RNA, 19 nt, Artificial Sequence
  Description of Artificial Sequence: Synthetic oligonucleotide
  Antisense strand to SEQ ID NO: 1400616
augacagggaaacucucua

SEQ ID NO: 1400618 - RNA, 19 nt, Artificial Sequence
  Description of Artificial Sequence: Synthetic oligonucleotide
  Sense strand starting at position 424 of SEQ ID NO: 1243196
gaguuucccugucauuguu

SEQ ID NO: 1400619 - RNA, 19 nt, Artificial Sequence
  Description of Artificial Sequence: Synthetic oligonucleotide
  Antisense strand to SEQ ID NO: 1400618
aacaaugacagggaaacuc

SEQ ID NO: 1400620 - RNA, 19 nt, Artificial Sequence
  Description of Artificial Sequence: Synthetic oligonucleotide
  Sense strand starting at position 982 of SEQ ID NO: 1243196
gguuuaucagcuugagacu

SEQ ID NO: 1400621 - RNA, 19 nt, Artificial Sequence
  Description of Artificial Sequence: Synthetic oligonucleotide
  Antisense strand to SEQ ID NO: 1400620
agucucaagcugauaaacc

SEQ ID NO: 1400622 - RNA, 19 nt, Artificial Sequence
  Description of Artificial Sequence: Synthetic oligonucleotide
  Sense strand starting at position 991 of SEQ ID NO: 1243196
gcuugagacucgcuuauca

SEQ ID NO: 1400623 - RNA, 19 nt, Artificial Sequence
  Description of Artificial Sequence: Synthetic oligonucleotide
  Antisense strand to SEQ ID NO: 1400622
ugauaagcgagucucaagc

SEQ ID NO: 1400624 - RNA, 19 nt, Artificial Sequence
  Description of Artificial Sequence: Synthetic oligonucleotide
  Sense strand starting at position 993 of SEQ ID NO: 1243196
uugagacucgcuuaucagu

SEQ ID NO: 1400625 - RNA, 19 nt, Artificial Sequence
  Description of Artificial Sequence: Synthetic oligonucleotide
  Antisense strand to SEQ ID NO: 1400624
acugauaagcgagucucaa

SEQ ID NO: 1400626 - RNA, 19 nt, Artificial Sequence
  Description of Artificial Sequence: Synthetic oligonucleotide
  Sense strand starting at position 995 of SEQ ID NO: 1243196
gagacucgcuuaucaguuu

SEQ ID NO: 1400627 - RNA, 19 nt, Artificial Sequence
  Description of Artificial Sequence: Synthetic oligonucleotide
  Antisense strand to SEQ ID NO: 1400626
aaacugauaagcgagucuc

SEQ ID NO: 1400628 - RNA, 19 nt, Artificial Sequence
  Description of Artificial Sequence: Synthetic oligonucleotide
  Sense strand starting at position 1047 of SEQ ID NO: 1243196
cgggcaugaucucuuguca

SEQ ID NO: 1400629 - RNA, 19 nt, Artificial Sequence
  Description of Artificial Sequence: Synthetic oligonucleotide
  Antisense strand to SEQ ID NO: 1400628
ugacaagagaucaugcccg

SEQ ID NO: 1400630 - RNA, 19 nt, Artificial Sequence
  Description of Artificial Sequence: Synthetic oligonucleotide
  Sense strand starting at position 1284 of SEQ ID NO: 1243196
gccucacuguugcagucaa

SEQ ID NO: 1400631 - RNA, 19 nt, Artificial Sequence
  Description of Artificial Sequence: Synthetic oligonucleotide
  Antisense strand to SEQ ID NO: 1400630
uugacugcaacagugaggc

SEQ ID NO: 1400632 - RNA, 19 nt, Artificial Sequence
  Description of Artificial Sequence: Synthetic oligonucleotide
  Sense strand starting at position 2249 of SEQ ID NO: 1243196
gcccacucaucuguaggua

SEQ ID NO: 1400633 - RNA, 19 nt, Artificial Sequence
  Description of Artificial Sequence: Synthetic oligonucleotide
  Antisense strand to SEQ ID NO: 1400632
uaccuacagaugagugggc

SEQ ID NO: 1400634 - RNA, 19 nt, Artificial Sequence
  Description of Artificial Sequence: Synthetic oligonucleotide
  Sense strand starting at position 76 of SEQ ID NO: 1243197
auaauaauccagcgaaauu

SEQ ID NO: 1400635 - RNA, 19 nt, Artificial Sequence
  Description of Artificial Sequence: Synthetic oligonucleotide
  Antisense strand to SEQ ID NO: 1400634
aauuucgcuggauuauuau

SEQ ID NO: 1400636 - RNA, 19 nt, Artificial Sequence
  Description of Artificial Sequence: Synthetic oligonucleotide
  Sense strand starting at position 244 of SEQ ID NO: 1243197
uuuggaaauacgugcuuua

SEQ ID NO: 1400637 - RNA, 19 nt, Artificial Sequence
  Description of Artificial Sequence: Synthetic oligonucleotide
  Antisense strand to SEQ ID NO: 1400636
uaaagcacguauuuccaaa

SEQ ID NO: 1400638 - RNA, 19 nt, Artificial Sequence
  Description of Artificial Sequence: Synthetic oligonucleotide
  Sense strand starting at position 295 of SEQ ID NO: 1243197
auggccucuagccgagaaa

SEQ ID NO: 1400639 - RNA, 19 nt, Artificial Sequence
  Description of Artificial Sequence: Synthetic oligonucleotide
  Antisense strand to SEQ ID NO: 1400638
uuucucggcuagaggccau

SEQ ID NO: 1400640 - RNA, 19 nt, Artificial Sequence
  Description of Artificial Sequence: Synthetic oligonucleotide
  Sense strand starting at position 483 of SEQ ID NO: 1243197
aauguugcacuggauuauu

SEQ ID NO: 1400641 - RNA, 19 nt, Artificial Sequence
  Description of Artificial Sequence: Synthetic oligonucleotide
  Antisense strand to SEQ ID NO: 1400640
aauaauccagugcaacauu

SEQ ID NO: 1400642 - RNA, 19 nt, Artificial Sequence
  Description of Artificial Sequence: Synthetic oligonucleotide
  Sense strand starting at position 503 of SEQ ID NO: 1243197
agacauucggugggaccua

SEQ ID NO: 1400643 - RNA, 19 nt, Artificial Sequence
  Description of Artificial Sequence: Synthetic oligonucleotide
  Antisense strand to SEQ ID NO: 1400642
uaggucccaccgaaugucu

SEQ ID NO: 1400644 - RNA, 19 nt, Artificial Sequence
  Description of Artificial Sequence: Synthetic oligonucleotide
  Sense strand starting at position 692 of SEQ ID NO: 1243197
ucagaaguuugcucaacac

SEQ ID NO: 1400645 - RNA, 19 nt, Artificial Sequence
  Description of Artificial Sequence: Synthetic oligonucleotide
  Antisense strand to SEQ ID NO: 1400644
guguugagcaaacuucuga

SEQ ID NO: 1400646 - RNA, 19 nt, Artificial Sequence
  Description of Artificial Sequence: Synthetic oligonucleotide
  Sense strand starting at position 711 of SEQ ID NO: 1243197
guugguaaacaaugaauac

SEQ ID NO: 1400647 - RNA, 19 nt, Artificial Sequence
  Description of Artificial Sequence: Synthetic oligonucleotide
  Antisense strand to SEQ ID NO: 1400646
guauucauuguuuaccaac

SEQ ID NO: 1400648 - RNA, 19 nt, Artificial Sequence
  Description of Artificial Sequence: Synthetic oligonucleotide
  Sense strand starting at position 793 of SEQ ID NO: 1243197
ggucauauccucuggugag

SEQ ID NO: 1400649 - RNA, 19 nt, Artificial Sequence
  Description of Artificial Sequence: Synthetic oligonucleotide
  Antisense strand to SEQ ID NO: 1400648
cucaccagaggauaugacc

SEQ ID NO: 1400650 - RNA, 19 nt, Artificial Sequence
  Description of Artificial Sequence: Synthetic oligonucleotide
  Sense strand starting at position 840 of SEQ ID NO: 1243197
acaucacugugcucaaaug

SEQ ID NO: 1400651 - RNA, 19 nt, Artificial Sequence
  Description of Artificial Sequence: Synthetic oligonucleotide
  Antisense strand to SEQ ID NO: 1400650
cauuugagcacagugaugu

SEQ ID NO: 1400652 - RNA, 19 nt, Artificial Sequence
  Description of Artificial Sequence: Synthetic oligonucleotide
  Sense strand starting at position 986 of SEQ ID NO: 1243197
ccuuuaaaucaguaguucu

SEQ ID NO: 1400653 - RNA, 19 nt, Artificial Sequence
  Description of Artificial Sequence: Synthetic oligonucleotide
  Antisense strand to SEQ ID NO: 1400652
agaacuacugauuuaaagg

SEQ ID NO: 1400654 - RNA, 19 nt, Artificial Sequence
  Description of Artificial Sequence: Synthetic oligonucleotide
  Sense strand starting at position 1000 of SEQ ID NO: 1243197
guucuuaaacuugauggua

SEQ ID NO: 1400655 - RNA, 19 nt, Artificial Sequence
  Description of Artificial Sequence: Synthetic oligonucleotide
  Antisense strand to SEQ ID NO: 1400654
uaccaucaaguuuaagaac

SEQ ID NO: 1400656 - RNA, 19 nt, Artificial Sequence
  Description of Artificial Sequence: Synthetic oligonucleotide
  Sense strand starting at position 1062 of SEQ ID NO: 1243197
ccgaguuacugaucagcag

SEQ ID NO: 1400657 - RNA, 19 nt, Artificial Sequence
  Description of Artificial Sequence: Synthetic oligonucleotide
  Antisense strand to SEQ ID NO: 1400656
cugcugaucaguaacucgg

SEQ ID NO: 1400658 - RNA, 19 nt, Artificial Sequence
  Description of Artificial Sequence: Synthetic oligonucleotide
  Sense strand starting at position 1103 of SEQ ID NO: 1243197
uuguauuucuaacaaguga

SEQ ID NO: 1400659 - RNA, 19 nt, Artificial Sequence
  Description of Artificial Sequence: Synthetic oligonucleotide
  Antisense strand to SEQ ID NO: 1400658
ucacuuguuagaaauacaa

SEQ ID NO: 1400660 - RNA, 19 nt, Artificial Sequence
  Description of Artificial Sequence: Synthetic oligonucleotide
  Sense strand starting at position 1594 of SEQ ID NO: 1243197
gcggaaugaacggaaaguu

SEQ ID NO: 1400661 - RNA, 19 nt, Artificial Sequence
  Description of Artificial Sequence: Synthetic oligonucleotide
  Antisense strand to SEQ ID NO: 1400660
aacuuuccguucauuccgc

SEQ ID NO: 1400662 - RNA, 19 nt, Artificial Sequence
  Description of Artificial Sequence: Synthetic oligonucleotide
  Sense strand starting at position 1606 of SEQ ID NO: 1243197
gaaaguucucccuggcuca

SEQ ID NO: 1400663 - RNA, 19 nt, Artificial Sequence
  Description of Artificial Sequence: Synthetic oligonucleotide
  Antisense strand to SEQ ID NO: 1400662
ugagccagggagaacuuuc

SEQ ID NO: 1400664 - RNA, 19 nt, Artificial Sequence
  Description of Artificial Sequence: Synthetic oligonucleotide
  Sense strand starting at position 1666 of SEQ ID NO: 1243197
gugccaucgccguuugcua

SEQ ID NO: 1400665 - RNA, 19 nt, Artificial Sequence
  Description of Artificial Sequence: Synthetic oligonucleotide
  Antisense strand to SEQ ID NO: 1400664
uagcaaacggcgauggcac

SEQ ID NO: 1400666 - RNA, 19 nt, Artificial Sequence
  Description of Artificial Sequence: Synthetic oligonucleotide
  Sense strand starting at position 1709 of SEQ ID NO: 1243197
agcucacggccgagaaguu

SEQ ID NO: 1400667 - RNA, 19 nt, Artificial Sequence
  Description of Artificial Sequence: Synthetic oligonucleotide
  Antisense strand to SEQ ID NO: 1400666
aacuucucggccgugagcu

SEQ ID NO: 1400668 - RNA, 19 nt, Artificial Sequence
  Description of Artificial Sequence: Synthetic oligonucleotide
  Sense strand starting at position 2316 of SEQ ID NO: 1243197
cguccaucuagcguuaagu

SEQ ID NO: 1400669 - RNA, 19 nt, Artificial Sequence
  Description of Artificial Sequence: Synthetic oligonucleotide
  Antisense strand to SEQ ID NO: 1400668
acuuaacgcuagauggacg

SEQ ID NO: 1400670 - RNA, 19 nt, Artificial Sequence
  Description of Artificial Sequence: Synthetic oligonucleotide
  Sense strand starting at position 2318 of SEQ ID NO: 1243197
uccaucuagcguuaaguga

SEQ ID NO: 1400671 - RNA, 19 nt, Artificial Sequence
  Description of Artificial Sequence: Synthetic oligonucleotide
  Antisense strand to SEQ ID NO: 1400670
ucacuuaacgcuagaugga

SEQ ID NO: 1400672 - RNA, 19 nt, Artificial Sequence
  Description of Artificial Sequence: Synthetic oligonucleotide
  Sense strand starting at position 2641 of SEQ ID NO: 1243197
cgauuuggccugcgggaua

SEQ ID NO: 1400673 - RNA, 19 nt, Artificial Sequence
  Description of Artificial Sequence: Synthetic oligonucleotide
  Antisense strand to SEQ ID NO: 1400672
uaucccgcaggccaaaucg

SEQ ID NO: 1400674 - RNA, 19 nt, Artificial Sequence
  Description of Artificial Sequence: Synthetic oligonucleotide
  Sense strand starting at position 3073 of SEQ ID NO: 1243197
acaugaauuuccuggaagg

SEQ ID NO: 1400675 - RNA, 19 nt, Artificial Sequence
  Description of Artificial Sequence: Synthetic oligonucleotide
  Antisense strand to SEQ ID NO: 1400674
ccuuccaggaaauucaugu

SEQ ID NO: 1400676 - RNA, 19 nt, Artificial Sequence
  Description of Artificial Sequence: Synthetic oligonucleotide
  Sense strand starting at position 3091 of SEQ ID NO: 1243197
gacucaggcugucuucuaa

SEQ ID NO: 1400677 - RNA, 19 nt, Artificial Sequence
  Description of Artificial Sequence: Synthetic oligonucleotide
  Antisense strand to SEQ ID NO: 1400676
uuagaagacagccugaguc

SEQ ID NO: 1400678 - RNA, 19 nt, Artificial Sequence
  Description of Artificial Sequence: Synthetic oligonucleotide
  Sense strand starting at position 3126 of SEQ ID NO: 1243197
ggagacugauuguuuacuu

SEQ ID NO: 1400679 - RNA, 19 nt, Artificial Sequence
  Description of Artificial Sequence: Synthetic oligonucleotide
  Antisense strand to SEQ ID NO: 1400678
aaguaaacaaucagucucc

SEQ ID NO: 1400680 - RNA, 19 nt, Artificial Sequence
  Description of Artificial Sequence: Synthetic oligonucleotide
  Sense strand starting at position 3127 of SEQ ID NO: 1243197
gagacugauuguuuacuuu

SEQ ID NO: 1400681 - RNA, 19 nt, Artificial Sequence
  Description of Artificial Sequence: Synthetic oligonucleotide
  Antisense strand to SEQ ID NO: 1400680
aaaguaaacaaucagucuc

SEQ ID NO: 1400682 - RNA, 19 nt, Artificial Sequence
  Description of Artificial Sequence: Synthetic oligonucleotide
  Sense strand starting at position 3131 of SEQ ID NO: 1243197
cugauuguuuacuuuagca

SEQ ID NO: 1400683 - RNA, 19 nt, Artificial Sequence
  Description of Artificial Sequence: Synthetic oligonucleotide
  Antisense strand to SEQ ID NO: 1400682
ugcuaaaguaaacaaucag

SEQ ID NO: 1400684 - RNA, 19 nt, Artificial Sequence
  Description of Artificial Sequence: Synthetic oligonucleotide
  Sense strand starting at position 3314 of SEQ ID NO: 1243197
ugugucugguucccacaaa

SEQ ID NO: 1400685 - RNA, 19 nt, Artificial Sequence
  Description of Artificial Sequence: Synthetic oligonucleotide
  Antisense strand to SEQ ID NO: 1400684
uuugugggaaccagacaca

SEQ ID NO: 1400686 - RNA, 19 nt, Artificial Sequence
  Description of Artificial Sequence: Synthetic oligonucleotide
  Sense strand starting at position 3371 of SEQ ID NO: 1243197
gccugcacuguguaaauaa

SEQ ID NO: 1400687 - RNA, 19 nt, Artificial Sequence
  Description of Artificial Sequence: Synthetic oligonucleotide
  Antisense strand to SEQ ID NO: 1400686
uuauuuacacagugcaggc

SEQ ID NO: 1400688 - RNA, 19 nt, Artificial Sequence
  Description of Artificial Sequence: Synthetic oligonucleotide
  Sense strand starting at position 3428 of SEQ ID NO: 1243197
uuacucacucuguguagau

SEQ ID NO: 1400689 - RNA, 19 nt, Artificial Sequence
  Description of Artificial Sequence: Synthetic oligonucleotide
  Antisense strand to SEQ ID NO: 1400688
aucuacacagagugaguaa

SEQ ID NO: 1400690 - RNA, 19 nt, Artificial Sequence
  Description of Artificial Sequence: Synthetic oligonucleotide
  Sense strand starting at position 3452 of SEQ ID NO: 1243197
ucuguaaaucuguaagccu

SEQ ID NO: 1400691 - RNA, 19 nt, Artificial Sequence
  Description of Artificial Sequence: Synthetic oligonucleotide
  Antisense strand to SEQ ID NO: 1400690
aggcuuacagauuuacaga

SEQ ID NO: 1400692 - RNA, 19 nt, Artificial Sequence
  Description of Artificial Sequence: Synthetic oligonucleotide
  Sense strand starting at position 3459 of SEQ ID NO: 1243197
aucuguaagccuggaaaca

SEQ ID NO: 1400693 - RNA, 19 nt, Artificial Sequence
  Description of Artificial Sequence: Synthetic oligonucleotide
  Antisense strand to SEQ ID NO: 1400692
uguuuccaggcuuacagau

SEQ ID NO: 1400694 - RNA, 19 nt, Artificial Sequence
  Description of Artificial Sequence: Synthetic oligonucleotide
  Sense strand starting at position 3501 of SEQ ID NO: 1243197
gccagaaaggauuaagugu

SEQ ID NO: 1400695 - RNA, 19 nt, Artificial Sequence
  Description of Artificial Sequence: Synthetic oligonucleotide
  Antisense strand to SEQ ID NO: 1400694
acacuuaauccuuucuggc

SEQ ID NO: 1400696 - RNA, 19 nt, Artificial Sequence
  Description of Artificial Sequence: Synthetic oligonucleotide
  Sense strand starting at position 3629 of SEQ ID NO: 1243197
uaggauuuguguguuucca

SEQ ID NO: 1400697 - RNA, 19 nt, Artificial Sequence
  Description of Artificial Sequence: Synthetic oligonucleotide
  Antisense strand to SEQ ID NO: 1400696
uggaaacacacaaauccua

SEQ ID NO: 1400698 - RNA, 19 nt, Artificial Sequence
  Description of Artificial Sequence: Synthetic oligonucleotide
  Sense strand starting at position 3638 of SEQ ID NO: 1243197
uguguuuccagcguuuaug

SEQ ID NO: 1400699 - RNA, 19 nt, Artificial Sequence
  Description of Artificial Sequence: Synthetic oligonucleotide
  Antisense strand to SEQ ID NO: 1400698
cauaaacgcuggaaacaca

SEQ ID NO: 1400700 - RNA, 19 nt, Artificial Sequence
  Description of Artificial Sequence: Synthetic oligonucleotide
  Sense strand starting at position 3691 of SEQ ID NO: 1243197
cuuaauugaggauguauua

SEQ ID NO: 1400701 - RNA, 19 nt, Artificial Sequence
  Description of Artificial Sequence: Synthetic oligonucleotide
  Antisense strand to SEQ ID NO: 1400700
uaauacauccucaauuaag

SEQ ID NO: 1400702 - RNA, 19 nt, Artificial Sequence
  Description of Artificial Sequence: Synthetic oligonucleotide
  Sense strand starting at position 3717 of SEQ ID NO: 1243197
cgauucuuuguugggugaa

SEQ ID NO: 1400703 - RNA, 19 nt, Artificial Sequence
  Description of Artificial Sequence: Synthetic oligonucleotide
  Antisense strand to SEQ ID NO: 1400702
uucacccaacaaagaaucg

SEQ ID NO: 1400704 - RNA, 19 nt, Artificial Sequence
  Description of Artificial Sequence: Synthetic oligonucleotide
  Sense strand starting at position 3720 of SEQ ID NO: 1243197
uucuuuguugggugaacca

SEQ ID NO: 1400705 - RNA, 19 nt, Artificial Sequence
  Description of Artificial Sequence: Synthetic oligonucleotide
  Antisense strand to SEQ ID NO: 1400704
ugguucacccaacaaagaa

SEQ ID NO: 1400706 - RNA, 19 nt, Artificial Sequence
  Description of Artificial Sequence: Synthetic oligonucleotide
  Sense strand starting at position 3762 of SEQ ID NO: 1243197
acagucuuguccucaugaa

SEQ ID NO: 1400707 - RNA, 19 nt, Artificial Sequence
  Description of Artificial Sequence: Synthetic oligonucleotide
  Antisense strand to SEQ ID NO: 1400706
uucaugaggacaagacugu

SEQ ID NO: 1400708 - RNA, 19 nt, Artificial Sequence
  Description of Artificial Sequence: Synthetic oligonucleotide
  Sense strand starting at position 3793 of SEQ ID NO: 1243197
aggaaacuugaguauucgu

SEQ ID NO: 1400709 - RNA, 19 nt, Artificial Sequence
  Description of Artificial Sequence: Synthetic oligonucleotide
  Antisense strand to SEQ ID NO: 1400708
acgaauacucaaguuuccu

SEQ ID NO: 1400710 - RNA, 19 nt, Artificial Sequence
  Description of Artificial Sequence: Synthetic oligonucleotide
  Sense strand starting at position 3818 of SEQ ID NO: 1243197
acagucacugucuauaauu

SEQ ID NO: 1400711 - RNA, 19 nt, Artificial Sequence
  Description of Artificial Sequence: Synthetic oligonucleotide
  Antisense strand to SEQ ID NO: 1400710
aauuauagacagugacugu

SEQ ID NO: 1400712 - RNA, 19 nt, Artificial Sequence
  Description of Artificial Sequence: Synthetic oligonucleotide
  Sense strand starting at position 3954 of SEQ ID NO: 1243197
ucuugugugccuucagugu

SEQ ID NO: 1400713 - RNA, 19 nt, Artificial Sequence
  Description of Artificial Sequence: Synthetic oligonucleotide
  Antisense strand to SEQ ID NO: 1400712
acacugaaggcacacaaga

SEQ ID NO: 1400714 - RNA, 19 nt, Artificial Sequence
  Description of Artificial Sequence: Synthetic oligonucleotide
  Sense strand starting at position 212 of SEQ ID NO: 1243198
gggcgauggaacugauauu

SEQ ID NO: 1400715 - RNA, 19 nt, Artificial Sequence
  Description of Artificial Sequence: Synthetic oligonucleotide
  Antisense strand to SEQ ID NO: 1400714
aauaucaguuccaucgccc

SEQ ID NO: 1400716 - RNA, 19 nt, Artificial Sequence
  Description of Artificial Sequence: Synthetic oligonucleotide
  Sense strand starting at position 531 of SEQ ID NO: 1243198
gaagcuucuggaugccaca

SEQ ID NO: 1400717 - RNA, 19 nt, Artificial Sequence
  Description of Artificial Sequence: Synthetic oligonucleotide
  Antisense strand to SEQ ID NO: 1400716
uguggcauccagaagcuuc

SEQ ID NO: 1400718 - RNA, 19 nt, Artificial Sequence
  Description of Artificial Sequence: Synthetic oligonucleotide
  Sense strand starting at position 646 of SEQ ID NO: 1243198
acucauaaccucggacaaa

SEQ ID NO: 1400719 - RNA, 19 nt, Artificial Sequence
  Description of Artificial Sequence: Synthetic oligonucleotide
  Antisense strand to SEQ ID NO: 1400718
uuuguccgagguuaugagu

SEQ ID NO: 1400720 - RNA, 19 nt, Artificial Sequence
  Description of Artificial Sequence: Synthetic oligonucleotide
  Sense strand starting at position 647 of SEQ ID NO: 1243198
cucauaaccucggacaaau

SEQ ID NO: 1400721 - RNA, 19 nt, Artificial Sequence
  Description of Artificial Sequence: Synthetic oligonucleotide
  Antisense strand to SEQ ID NO: 1400720
auuuguccgagguuaugag

SEQ ID NO: 1400722 - RNA, 19 nt, Artificial Sequence
  Description of Artificial Sequence: Synthetic oligonucleotide
  Sense strand starting at position 658 of SEQ ID NO: 1243198
ggacaaauaugcugccaac

SEQ ID NO: 1400723 - RNA, 19 nt, Artificial Sequence
  Description of Artificial Sequence: Synthetic oligonucleotide
  Antisense strand to SEQ ID NO: 1400722
guuggcagcauauuugucc

SEQ ID NO: 1400724 - RNA, 19 nt, Artificial Sequence
  Description of Artificial Sequence: Synthetic oligonucleotide
  Sense strand starting at position 784 of SEQ ID NO: 1243198
gaagauggcagauguugau

SEQ ID NO: 1400725 - RNA, 19 nt, Artificial Sequence
  Description of Artificial Sequence: Synthetic oligonucleotide
  Antisense strand to SEQ ID NO: 1400724
aucaacaucugccaucuuc

SEQ ID NO: 1400726 - RNA, 19 nt, Artificial Sequence
  Description of Artificial Sequence: Synthetic oligonucleotide
  Sense strand starting at position 790 of SEQ ID NO: 1243198
ggcagauguugauggaaag

SEQ ID NO: 1400727 - RNA, 19 nt, Artificial Sequence
  Description of Artificial Sequence: Synthetic oligonucleotide
  Antisense strand to SEQ ID NO: 1400726
cuuuccaucaacaucugcc

SEQ ID NO: 1400728 - RNA, 19 nt, Artificial Sequence
  Description of Artificial Sequence: Synthetic oligonucleotide
  Sense strand starting at position 791 of SEQ ID NO: 1243198
gcagauguugauggaaaga

SEQ ID NO: 1400729 - RNA, 19 nt, Artificial Sequence
  Description of Artificial Sequence: Synthetic oligonucleotide
  Antisense strand to SEQ ID NO: 1400728
ucuuuccaucaacaucugc

SEQ ID NO: 1400730 - RNA, 19 nt, Artificial Sequence
  Description of Artificial Sequence: Synthetic oligonucleotide
  Sense strand starting at position 915 of SEQ ID NO: 1243198
uuguacuucugagguuguu

SEQ ID NO: 1400731 - RNA, 19 nt, Artificial Sequence
  Description of Artificial Sequence: Synthetic oligonucleotide
  Antisense strand to SEQ ID NO: 1400730
aacaaccucagaaguacaa

SEQ ID NO: 1400732 - RNA, 19 nt, Artificial Sequence
  Description of Artificial Sequence: Synthetic oligonucleotide
  Sense strand starting at position 918 of SEQ ID NO: 1243198
uacuucugagguuguuaaa

SEQ ID NO: 1400733 - RNA, 19 nt, Artificial Sequence
  Description of Artificial Sequence: Synthetic oligonucleotide
  Antisense strand to SEQ ID NO: 1400732
uuuaacaaccucagaagua

SEQ ID NO: 1400734 - RNA, 19 nt, Artificial Sequence
  Description of Artificial Sequence: Synthetic oligonucleotide
  Sense strand starting at position 921 of SEQ ID NO: 1243198
uucugagguuguuaaagcu

SEQ ID NO: 1400735 - RNA, 19 nt, Artificial Sequence
  Description of Artificial Sequence: Synthetic oligonucleotide
  Antisense strand to SEQ ID NO: 1400734
agcuuuaacaaccucagaa

SEQ ID NO: 1400736 - RNA, 19 nt, Artificial Sequence
  Description of Artificial Sequence: Synthetic oligonucleotide
  Sense strand starting at position 927 of SEQ ID NO: 1243198
gguuguuaaagcugcaaac

SEQ ID NO: 1400737 - RNA, 19 nt, Artificial Sequence
  Description of Artificial Sequence: Synthetic oligonucleotide
  Antisense strand to SEQ ID NO: 1400736
guuugcagcuuuaacaacc

SEQ ID NO: 1400738 - RNA, 19 nt, Artificial Sequence
  Description of Artificial Sequence: Synthetic oligonucleotide
  Sense strand starting at position 939 of SEQ ID NO: 1243198
ugcaaacugcucugagacu

SEQ ID NO: 1400739 - RNA, 19 nt, Artificial Sequence
  Description of Artificial Sequence: Synthetic oligonucleotide
  Antisense strand to SEQ ID NO: 1400738
agucucagagcaguuugca

SEQ ID NO: 1400740 - RNA, 19 nt, Artificial Sequence
  Description of Artificial Sequence: Synthetic oligonucleotide
  Sense strand starting at position 1008 of SEQ ID NO: 1243198
cuccuuugccuuugaagac

SEQ ID NO: 1400741 - RNA, 19 nt, Artificial Sequence
  Description of Artificial Sequence: Synthetic oligonucleotide
  Antisense strand to SEQ ID NO: 1400740
gucuucaaaggcaaaggag

SEQ ID NO: 1400742 - RNA, 19 nt, Artificial Sequence
  Description of Artificial Sequence: Synthetic oligonucleotide
  Sense strand starting at position 1033 of SEQ ID NO: 1243198
ggagguggguguucuuauc

SEQ ID NO: 1400743 - RNA, 19 nt, Artificial Sequence
  Description of Artificial Sequence: Synthetic oligonucleotide
  Antisense strand to SEQ ID NO: 1400742
gauaagaacacccaccucc

SEQ ID NO: 1400744 - RNA, 19 nt, Artificial Sequence
  Description of Artificial Sequence: Synthetic oligonucleotide
  Sense strand starting at position 1136 of SEQ ID NO: 1243198
ugugacaaaucuuaguucu

SEQ ID NO: 1400745 - RNA, 19 nt, Artificial Sequence
  Description of Artificial Sequence: Synthetic oligonucleotide
  Antisense strand to SEQ ID NO: 1400744
agaacuaagauuugucaca

SEQ ID NO: 1400746 - RNA, 19 nt, Artificial Sequence
  Description of Artificial Sequence: Synthetic oligonucleotide
  Sense strand starting at position 1264 of SEQ ID NO: 1243198
ugccauuuaucacagacga

SEQ ID NO: 1400747 - RNA, 19 nt, Artificial Sequence
  Description of Artificial Sequence: Synthetic oligonucleotide
  Antisense strand to SEQ ID NO: 1400746
ucgucugugauaaauggca

SEQ ID NO: 1400748 - RNA, 19 nt, Artificial Sequence
  Description of Artificial Sequence: Synthetic oligonucleotide
  Sense strand starting at position 1370 of SEQ ID NO: 1243198
ucuugagccuccugagaga

SEQ ID NO: 1400749 - RNA, 19 nt, Artificial Sequence
  Description of Artificial Sequence: Synthetic oligonucleotide
  Antisense strand to SEQ ID NO: 1400748
ucucucaggaggcucaaga

SEQ ID NO: 1400750 - RNA, 19 nt, Artificial Sequence
  Description of Artificial Sequence: Synthetic oligonucleotide
  Sense strand starting at position 2087 of SEQ ID NO: 1243198
gcccgugaugaaugaacuu

SEQ ID NO: 1400751 - RNA, 19 nt, Artificial Sequence
  Description of Artificial Sequence: Synthetic oligonucleotide
  Antisense strand to SEQ ID NO: 1400750
aaguucauucaucacgggc

SEQ ID NO: 1400752 - RNA, 19 nt, Artificial Sequence
  Description of Artificial Sequence: Synthetic oligonucleotide
  Sense strand starting at position 2258 of SEQ ID NO: 1243198
accagugaccucugaauga

SEQ ID NO: 1400753 - RNA, 19 nt, Artificial Sequence
  Description of Artificial Sequence: Synthetic oligonucleotide
  Antisense strand to SEQ ID NO: 1400752
ucauucagaggucacuggu

SEQ ID NO: 1400754 - RNA, 19 nt, Artificial Sequence
  Description of Artificial Sequence: Synthetic oligonucleotide
  Sense strand starting at position 2284 of SEQ ID NO: 1243198
uggccuuugccauaagcga

SEQ ID NO: 1400755 - RNA, 19 nt, Artificial Sequence
  Description of Artificial Sequence: Synthetic oligonucleotide
  Antisense strand to SEQ ID NO: 1400754
ucgcuuauggcaaaggcca

SEQ ID NO: 1400756 - RNA, 19 nt, Artificial Sequence
  Description of Artificial Sequence: Synthetic oligonucleotide
  Sense strand starting at position 2311 of SEQ ID NO: 1243198
uggcuuugucccgcacaca

SEQ ID NO: 1400757 - RNA, 19 nt, Artificial Sequence
  Description of Artificial Sequence: Synthetic oligonucleotide
  Antisense strand to SEQ ID NO: 1400756
ugugugcgggacaaagcca

SEQ ID NO: 1400758 - RNA, 19 nt, Artificial Sequence
  Description of Artificial Sequence: Synthetic oligonucleotide
  Sense strand starting at position 2342 of SEQ ID NO: 1243198
guaccuuuaaguggcgaaa

SEQ ID NO: 1400759 - RNA, 19 nt, Artificial Sequence
  Description of Artificial Sequence: Synthetic oligonucleotide
  Antisense strand to SEQ ID NO: 1400758
uuucgccacuuaaagguac

SEQ ID NO: 1400760 - RNA, 19 nt, Artificial Sequence
  Description of Artificial Sequence: Synthetic oligonucleotide
  Sense strand starting at position 2569 of SEQ ID NO: 1243198
ggguuuacaugacauccuu

SEQ ID NO: 1400761 - RNA, 19 nt, Artificial Sequence
  Description of Artificial Sequence: Synthetic oligonucleotide
  Antisense strand to SEQ ID NO: 1400760
aaggaugucauguaaaccc

SEQ ID NO: 1400762 - RNA, 19 nt, Artificial Sequence
  Description of Artificial Sequence: Synthetic oligonucleotide
  Sense strand starting at position 2976 of SEQ ID NO: 1243198
uggccuauuucugaauuau

SEQ ID NO: 1400763 - RNA, 19 nt, Artificial Sequence
  Description of Artificial Sequence: Synthetic oligonucleotide
  Antisense strand to SEQ ID NO: 1400762
auaauucagaaauaggcca

SEQ ID NO: 1400764 - RNA, 19 nt, Artificial Sequence
  Description of Artificial Sequence: Synthetic oligonucleotide
  Sense strand starting at position 3042 of SEQ ID NO: 1243198
ggaaguauauucgugacug

SEQ ID NO: 1400765 - RNA, 19 nt, Artificial Sequence
  Description of Artificial Sequence: Synthetic oligonucleotide
  Antisense strand to SEQ ID NO: 1400764
cagucacgaauauacuucc

SEQ ID NO: 1400766 - RNA, 19 nt, Artificial Sequence
  Description of Artificial Sequence: Synthetic oligonucleotide
  Sense strand starting at position 3043 of SEQ ID NO: 1243198
gaaguauauucgugacugc

SEQ ID NO: 1400767 - RNA, 19 nt, Artificial Sequence
  Description of Artificial Sequence: Synthetic oligonucleotide
  Antisense strand to SEQ ID NO: 1400766
gcagucacgaauauacuuc

SEQ ID NO: 1400768 - RNA, 19 nt, Artificial Sequence
  Description of Artificial Sequence: Synthetic oligonucleotide
  Sense strand starting at position 3044 of SEQ ID NO: 1243198
aaguauauucgugacugcu

SEQ ID NO: 1400769 - RNA, 19 nt, Artificial Sequence
  Description of Artificial Sequence: Synthetic oligonucleotide
  Antisense strand to SEQ ID NO: 1400768
agcagucacgaauauacuu

SEQ ID NO: 1400770 - RNA, 19 nt, Artificial Sequence
  Description of Artificial Sequence: Synthetic oligonucleotide
  Sense strand starting at position 3046 of SEQ ID NO: 1243198
guauauucgugacugcucu

SEQ ID NO: 1400771 - RNA, 19 nt, Artificial Sequence
  Description of Artificial Sequence: Synthetic oligonucleotide
  Antisense strand to SEQ ID NO: 1400770
agagcagucacgaauauac

SEQ ID NO: 1400772 - RNA, 19 nt, Artificial Sequence
  Description of Artificial Sequence: Synthetic oligonucleotide
  Sense strand starting at position 3047 of SEQ ID NO: 1243198
uauauucgugacugcucua

SEQ ID NO: 1400773 - RNA, 19 nt, Artificial Sequence
  Description of Artificial Sequence: Synthetic oligonucleotide
  Antisense strand to SEQ ID NO: 1400772
uagagcagucacgaauaua

SEQ ID NO: 1400774 - RNA, 19 nt, Artificial Sequence
  Description of Artificial Sequence: Synthetic oligonucleotide
  Sense strand starting at position 3098 of SEQ ID NO: 1243198
ggcacucaacaucgguuaa

SEQ ID NO: 1400775 - RNA, 19 nt, Artificial Sequence
  Description of Artificial Sequence: Synthetic oligonucleotide
  Antisense strand to SEQ ID NO: 1400774
uuaaccgauguugagugcc

SEQ ID NO: 1400776 - RNA, 19 nt, Artificial Sequence
  Description of Artificial Sequence: Synthetic oligonucleotide
  Sense strand starting at position 3600 of SEQ ID NO: 1243198
gugcaccuuugagugcaaa

SEQ ID NO: 1400777 - RNA, 19 nt, Artificial Sequence
  Description of Artificial Sequence: Synthetic oligonucleotide
  Antisense strand to SEQ ID NO: 1400776
uuugcacucaaaggugcac

SEQ ID NO: 1400778 - RNA, 19 nt, Artificial Sequence
  Description of Artificial Sequence: Synthetic oligonucleotide
  Sense strand starting at position 3766 of SEQ ID NO: 1243198
cgaugccgucuguguuuau

SEQ ID NO: 1400779 - RNA, 19 nt, Artificial Sequence
  Description of Artificial Sequence: Synthetic oligonucleotide
  Antisense strand to SEQ ID NO: 1400778
auaaacacagacggcaucg

SEQ ID NO: 1400780 - RNA, 19 nt, Artificial Sequence
  Description of Artificial Sequence: Synthetic oligonucleotide
  Sense strand starting at position 3767 of SEQ ID NO: 1243198
gaugccgucuguguuuaua

SEQ ID NO: 1400781 - RNA, 19 nt, Artificial Sequence
  Description of Artificial Sequence: Synthetic oligonucleotide
  Antisense strand to SEQ ID NO: 1400780
uauaaacacagacggcauc

SEQ ID NO: 1400782 - RNA, 19 nt, Artificial Sequence
  Description of Artificial Sequence: Synthetic oligonucleotide
  Sense strand starting at position 3769 of SEQ ID NO: 1243198
ugccgucuguguuuauaau

SEQ ID NO: 1400783 - RNA, 19 nt, Artificial Sequence
  Description of Artificial Sequence: Synthetic oligonucleotide
  Antisense strand to SEQ ID NO: 1400782
auuauaaacacagacggca

SEQ ID NO: 1400784 - RNA, 19 nt, Artificial Sequence
  Description of Artificial Sequence: Synthetic oligonucleotide
  Sense strand starting at position 3770 of SEQ ID NO: 1243198
gccgucuguguuuauaaua

SEQ ID NO: 1400785 - RNA, 19 nt, Artificial Sequence
  Description of Artificial Sequence: Synthetic oligonucleotide
  Antisense strand to SEQ ID NO: 1400784
uauuauaaacacagacggc

SEQ ID NO: 1400786 - RNA, 19 nt, Artificial Sequence
  Description of Artificial Sequence: Synthetic oligonucleotide
  Sense strand starting at position 3831 of SEQ ID NO: 1243198
uuugauguguaagaacacu

SEQ ID NO: 1400787 - RNA, 19 nt, Artificial Sequence
  Description of Artificial Sequence: Synthetic oligonucleotide
  Antisense strand to SEQ ID NO: 1400786
aguguucuuacacaucaaa

SEQ ID NO: 1400788 - RNA, 19 nt, Artificial Sequence
  Description of Artificial Sequence: Synthetic oligonucleotide
  Sense strand starting at position 3859 of SEQ ID NO: 1243198
caguauguauucuggugau

SEQ ID NO: 1400789 - RNA, 19 nt, Artificial Sequence
  Description of Artificial Sequence: Synthetic oligonucleotide
  Antisense strand to SEQ ID NO: 1400788
aucaccagaauacauacug

SEQ ID NO: 1400790 - RNA, 19 nt, Artificial Sequence
  Description of Artificial Sequence: Synthetic oligonucleotide
  Sense strand starting at position 3863 of SEQ ID NO: 1243198
auguauucuggugauggga

SEQ ID NO: 1400791 - RNA, 19 nt, Artificial Sequence
  Description of Artificial Sequence: Synthetic oligonucleotide
  Antisense strand to SEQ ID NO: 1400790
ucccaucaccagaauacau

SEQ ID NO: 1400792 - RNA, 19 nt, Artificial Sequence
  Description of Artificial Sequence: Synthetic oligonucleotide
  Sense strand starting at position 3865 of SEQ ID NO: 1243198
guauucuggugaugggagu

SEQ ID NO: 1400793 - RNA, 19 nt, Artificial Sequence
  Description of Artificial Sequence: Synthetic oligonucleotide
  Antisense strand to SEQ ID NO: 1400792
acucccaucaccagaauac

SEQ ID NO: 1400794 - RNA, 19 nt, Artificial Sequence
  Description of Artificial Sequence: Synthetic oligonucleotide
  Sense strand starting at position 183 of SEQ ID NO: 1243199
gagcaaacgcaucaucuga

SEQ ID NO: 1400795 - RNA, 19 nt, Artificial Sequence
  Description of Artificial Sequence: Synthetic oligonucleotide
  Antisense strand to SEQ ID NO: 1400794
ucagaugaugcguuugcuc

SEQ ID NO: 1400796 - RNA, 19 nt, Artificial Sequence
  Description of Artificial Sequence: Synthetic oligonucleotide
  Sense strand starting at position 190 of SEQ ID NO: 1243199
cgcaucaucugauuaauuc

SEQ ID NO: 1400797 - RNA, 19 nt, Artificial Sequence
  Description of Artificial Sequence: Synthetic oligonucleotide
  Antisense strand to SEQ ID NO: 1400796
gaauuaaucagaugaugcg

SEQ ID NO: 1400798 - RNA, 19 nt, Artificial Sequence
  Description of Artificial Sequence: Synthetic oligonucleotide
  Sense strand starting at position 290 of SEQ ID NO: 1243199
guguguccugagcaaauga

SEQ ID NO: 1400799 - RNA, 19 nt, Artificial Sequence
  Description of Artificial Sequence: Synthetic oligonucleotide
  Antisense strand to SEQ ID NO: 1400798
ucauuugcucaggacacac

SEQ ID NO: 1400800 - RNA, 19 nt, Artificial Sequence
  Description of Artificial Sequence: Synthetic oligonucleotide
  Sense strand starting at position 356 of SEQ ID NO: 1243199
ugugauauucuuggaucac

SEQ ID NO: 1400801 - RNA, 19 nt, Artificial Sequence
  Description of Artificial Sequence: Synthetic oligonucleotide
  Antisense strand to SEQ ID NO: 1400800
gugauccaagaauaucaca

SEQ ID NO: 1400802 - RNA, 19 nt, Artificial Sequence
  Description of Artificial Sequence: Synthetic oligonucleotide
  Sense strand starting at position 447 of SEQ ID NO: 1243199
ggaggaucucuguguccac

SEQ ID NO: 1400803 - RNA, 19 nt, Artificial Sequence
  Description of Artificial Sequence: Synthetic oligonucleotide
  Antisense strand to SEQ ID NO: 1400802
guggacacagagauccucc

SEQ ID NO: 1400804 - RNA, 19 nt, Artificial Sequence
  Description of Artificial Sequence: Synthetic oligonucleotide
  Sense strand starting at position 461 of SEQ ID NO: 1243199
uccacuggugcauaguaau

SEQ ID NO: 1400805 - RNA, 19 nt, Artificial Sequence
  Description of Artificial Sequence: Synthetic oligonucleotide
  Antisense strand to SEQ ID NO: 1400804
auuacuaugcaccagugga

SEQ ID NO: 1400806 - RNA, 19 nt, Artificial Sequence
  Description of Artificial Sequence: Synthetic oligonucleotide
  Sense strand starting at position 481 of SEQ ID NO: 1243199
uuuacuaguggauguuuau

SEQ ID NO: 1400807 - RNA, 19 nt, Artificial Sequence
  Description of Artificial Sequence: Synthetic oligonucleotide
  Antisense strand to SEQ ID NO: 1400806
auaaacauccacuaguaaa

SEQ ID NO: 1400808 - RNA, 19 nt, Artificial Sequence
  Description of Artificial Sequence: Synthetic oligonucleotide
  Sense strand starting at position 543 of SEQ ID NO: 1243199
cgucauuucuuaguacuga

SEQ ID NO: 1400809 - RNA, 19 nt, Artificial Sequence
  Description of Artificial Sequence: Synthetic oligonucleotide
  Antisense strand to SEQ ID NO: 1400808
ucaguacuaagaaaugacg

SEQ ID NO: 1400810 - RNA, 19 nt, Artificial Sequence
  Description of Artificial Sequence: Synthetic oligonucleotide
  Sense strand starting at position 1351 of SEQ ID NO: 1243199
cucauuagccgccaacauu

SEQ ID NO: 1400811 - RNA, 19 nt, Artificial Sequence
  Description of Artificial Sequence: Synthetic oligonucleotide
  Antisense strand to SEQ ID NO: 1400810
aauguuggcggcuaaugag

SEQ ID NO: 1400812 - RNA, 19 nt, Artificial Sequence
  Description of Artificial Sequence: Synthetic oligonucleotide
  Sense strand starting at position 2064 of SEQ ID NO: 1243199
agagauuuccucugcuguc

SEQ ID NO: 1400813 - RNA, 19 nt, Artificial Sequence
  Description of Artificial Sequence: Synthetic oligonucleotide
  Antisense strand to SEQ ID NO: 1400812
gacagcagaggaaaucucu

SEQ ID NO: 1400814 - RNA, 19 nt, Artificial Sequence
  Description of Artificial Sequence: Synthetic oligonucleotide
  Sense strand starting at position 2065 of SEQ ID NO: 1243199
gagauuuccucugcugucu

SEQ ID NO: 1400815 - RNA, 19 nt, Artificial Sequence
  Description of Artificial Sequence: Synthetic oligonucleotide
  Antisense strand to SEQ ID NO: 1400814
agacagcagaggaaaucuc

SEQ ID NO: 1400816 - RNA, 19 nt, Artificial Sequence
  Description of Artificial Sequence: Synthetic oligonucleotide
  Sense strand starting at position 2085 of SEQ ID NO: 1243199
gggaauuguucucuaaauc

SEQ ID NO: 1400817 - RNA, 19 nt, Artificial Sequence
  Description of Artificial Sequence: Synthetic oligonucleotide
  Antisense strand to SEQ ID NO: 1400816
gauuuagagaacaauuccc

SEQ ID NO: 1400818 - RNA, 19 nt, Artificial Sequence
  Description of Artificial Sequence: Synthetic oligonucleotide
  Sense strand starting at position 2086 of SEQ ID NO: 1243199
ggaauuguucucuaaaucu

SEQ ID NO: 1400819 - RNA, 19 nt, Artificial Sequence
  Description of Artificial Sequence: Synthetic oligonucleotide
  Antisense strand to SEQ ID NO: 1400818
agauuuagagaacaauucc

SEQ ID NO: 1400820 - RNA, 19 nt, Artificial Sequence
  Description of Artificial Sequence: Synthetic oligonucleotide
  Sense strand starting at position 2097 of SEQ ID NO: 1243199
cuaaaucuccguuaaacag

SEQ ID NO: 1400821 - RNA, 19 nt, Artificial Sequence
  Description of Artificial Sequence: Synthetic oligonucleotide
  Antisense strand to SEQ ID NO: 1400820
cuguuuaacggagauuuag

SEQ ID NO: 1400822 - RNA, 19 nt, Artificial Sequence
  Description of Artificial Sequence: Synthetic oligonucleotide
  Sense strand starting at position 2114 of SEQ ID NO: 1243199
agacaugcccagugugaug

SEQ ID NO: 1400823 - RNA, 19 nt, Artificial Sequence
  Description of Artificial Sequence: Synthetic oligonucleotide
  Antisense strand to SEQ ID NO: 1400822
caucacacugggcaugucu

SEQ ID NO: 1400824 - RNA, 19 nt, Artificial Sequence
  Description of Artificial Sequence: Synthetic oligonucleotide
  Sense strand starting at position 2317 of SEQ ID NO: 1243199
ucaaauguugcauaggaca

SEQ ID NO: 1400825 - RNA, 19 nt, Artificial Sequence
  Description of Artificial Sequence: Synthetic oligonucleotide
  Antisense strand to SEQ ID NO: 1400824
uguccuaugcaacauuuga

SEQ ID NO: 1400826 - RNA, 19 nt, Artificial Sequence
  Description of Artificial Sequence: Synthetic oligonucleotide
  Sense strand starting at position 3125 of SEQ ID NO: 1243199
gaggauucaguguguaaag

SEQ ID NO: 1400827 - RNA, 19 nt, Artificial Sequence
  Description of Artificial Sequence: Synthetic oligonucleotide
  Antisense strand to SEQ ID NO: 1400826
cuuuacacacugaauccuc

SEQ ID NO: 1400828 - RNA, 19 nt, Artificial Sequence
  Description of Artificial Sequence: Synthetic oligonucleotide
  Sense strand starting at position 3126 of SEQ ID NO: 1243199
aggauucaguguguaaagu

SEQ ID NO: 1400829 - RNA, 19 nt, Artificial Sequence
  Description of Artificial Sequence: Synthetic oligonucleotide
  Antisense strand to SEQ ID NO: 1400828
acuuuacacacugaauccu

SEQ ID NO: 1400830 - RNA, 19 nt, Artificial Sequence
  Description of Artificial Sequence: Synthetic oligonucleotide
  Sense strand starting at position 3197 of SEQ ID NO: 1243199
ucucuaucuugaccaaggu

SEQ ID NO: 1400831 - RNA, 19 nt, Artificial Sequence
  Description of Artificial Sequence: Synthetic oligonucleotide
  Antisense strand to SEQ ID NO: 1400830
accuuggucaagauagaga

SEQ ID NO: 1400832 - RNA, 19 nt, Artificial Sequence
  Description of Artificial Sequence: Synthetic oligonucleotide
  Sense strand starting at position 3201 of SEQ ID NO: 1243199
uaucuugaccaaggugaau

SEQ ID NO: 1400833 - RNA, 19 nt, Artificial Sequence
  Description of Artificial Sequence: Synthetic oligonucleotide
  Antisense strand to SEQ ID NO: 1400832
auucaccuuggucaagaua

SEQ ID NO: 1400834 - RNA, 19 nt, Artificial Sequence
  Description of Artificial Sequence: Synthetic oligonucleotide
  Sense strand starting at position 3213 of SEQ ID NO: 1243199
ggugaauaauggcuuaauu

SEQ ID NO: 1400835 - RNA, 19 nt, Artificial Sequence
  Description of Artificial Sequence: Synthetic oligonucleotide
  Antisense strand to SEQ ID NO: 1400834
aauuaagccauuauucacc

SEQ ID NO: 1400836 - RNA, 19 nt, Artificial Sequence
  Description of Artificial Sequence: Synthetic oligonucleotide
  Sense strand starting at position 3249 of SEQ ID NO: 1243199
augaaagguccuugugggu

SEQ ID NO: 1400837 - RNA, 19 nt, Artificial Sequence
  Description of Artificial Sequence: Synthetic oligonucleotide
  Antisense strand to SEQ ID NO: 1400836
acccacaaggaccuuucau

SEQ ID NO: 1400838 - RNA, 19 nt, Artificial Sequence
  Description of Artificial Sequence: Synthetic oligonucleotide
  Sense strand starting at position 3310 of SEQ ID NO: 1243199
agagcuaugccuggcagaa

SEQ ID NO: 1400839 - RNA, 19 nt, Artificial Sequence
  Description of Artificial Sequence: Synthetic oligonucleotide
  Antisense strand to SEQ ID NO: 1400838
uucugccaggcauagcucu

SEQ ID NO: 1400840 - RNA, 19 nt, Artificial Sequence
  Description of Artificial Sequence: Synthetic oligonucleotide
  Sense strand starting at position 3323 of SEQ ID NO: 1243199
gcagaaagcagauguuaac

SEQ ID NO: 1400841 - RNA, 19 nt, Artificial Sequence
  Description of Artificial Sequence: Synthetic oligonucleotide
  Antisense strand to SEQ ID NO: 1400840
guuaacaucugcuuucugc

SEQ ID NO: 1400842 - RNA, 19 nt, Artificial Sequence
  Description of Artificial Sequence: Synthetic oligonucleotide
  Sense strand starting at position 3329 of SEQ ID NO: 1243199
agcagauguuaacucagua

SEQ ID NO: 1400843 - RNA, 19 nt, Artificial Sequence
  Description of Artificial Sequence: Synthetic oligonucleotide
  Antisense strand to SEQ ID NO: 1400842
uacugaguuaacaucugcu

SEQ ID NO: 1400844 - RNA, 19 nt, Artificial Sequence
  Description of Artificial Sequence: Synthetic oligonucleotide
  Sense strand starting at position 3334 of SEQ ID NO: 1243199
auguuaacucaguagauau

SEQ ID NO: 1400845 - RNA, 19 nt, Artificial Sequence
  Description of Artificial Sequence: Synthetic oligonucleotide
  Antisense strand to SEQ ID NO: 1400844
auaucuacugaguuaacau

SEQ ID NO: 1400846 - RNA, 19 nt, Artificial Sequence
  Description of Artificial Sequence: Synthetic oligonucleotide
  Sense strand starting at position 3336 of SEQ ID NO: 1243199
guuaacucaguagauauua

SEQ ID NO: 1400847 - RNA, 19 nt, Artificial Sequence
  Description of Artificial Sequence: Synthetic oligonucleotide
  Antisense strand to SEQ ID NO: 1400846
uaauaucuacugaguuaac

SEQ ID NO: 1400848 - RNA, 19 nt, Artificial Sequence
  Description of Artificial Sequence: Synthetic oligonucleotide
  Sense strand starting at position 3390 of SEQ ID NO: 1243199
aacguaucagauuaaagug

SEQ ID NO: 1400849 - RNA, 19 nt, Artificial Sequence
  Description of Artificial Sequence: Synthetic oligonucleotide
  Antisense strand to SEQ ID NO: 1400848
cacuuuaaucugauacguu

SEQ ID NO: 1400850 - RNA, 19 nt, Artificial Sequence
  Description of Artificial Sequence: Synthetic oligonucleotide
  Sense strand starting at position 3419 of SEQ ID NO: 1243199
augaguauccauuacugcu

SEQ ID NO: 1400851 - RNA, 19 nt, Artificial Sequence
  Description of Artificial Sequence: Synthetic oligonucleotide
  Antisense strand to SEQ ID NO: 1400850
agcaguaauggauacucau

SEQ ID NO: 1400852 - RNA, 19 nt, Artificial Sequence
  Description of Artificial Sequence: Synthetic oligonucleotide
  Sense strand starting at position 3470 of SEQ ID NO: 1243199
caguuucccugacugauga

SEQ ID NO: 1400853 - RNA, 19 nt, Artificial Sequence
  Description of Artificial Sequence: Synthetic oligonucleotide
  Antisense strand to SEQ ID NO: 1400852
ucaucagucagggaaacug

SEQ ID NO: 1400854 - RNA, 19 nt, Artificial Sequence
  Description of Artificial Sequence: Synthetic oligonucleotide
  Sense strand starting at position 3471 of SEQ ID NO: 1243199
aguuucccugacugaugaa

SEQ ID NO: 1400855 - RNA, 19 nt, Artificial Sequence
  Description of Artificial Sequence: Synthetic oligonucleotide
  Antisense strand to SEQ ID NO: 1400854
uucaucagucagggaaacu

SEQ ID NO: 1400856 - RNA, 19 nt, Artificial Sequence
  Description of Artificial Sequence: Synthetic oligonucleotide
  Sense strand starting at position 3563 of SEQ ID NO: 1243199
acaacaagcucucugagua

SEQ ID NO: 1400857 - RNA, 19 nt, Artificial Sequence
  Description of Artificial Sequence: Synthetic oligonucleotide
  Antisense strand to SEQ ID NO: 1400856
uacucagagagcuuguugu

SEQ ID NO: 1400858 - RNA, 19 nt, Artificial Sequence
  Description of Artificial Sequence: Synthetic oligonucleotide
  Sense strand starting at position 3577 of SEQ ID NO: 1243199
gaguauauuugugauauca

SEQ ID NO: 1400859 - RNA, 19 nt, Artificial Sequence
  Description of Artificial Sequence: Synthetic oligonucleotide
  Antisense strand to SEQ ID NO: 1400858
ugauaucacaaauauacuc

SEQ ID NO: 1400860 - RNA, 19 nt, Artificial Sequence
  Description of Artificial Sequence: Synthetic oligonucleotide
  Sense strand starting at position 3585 of SEQ ID NO: 1243199
uugugauaucaauguuggu

SEQ ID NO: 1400861 - RNA, 19 nt, Artificial Sequence
  Description of Artificial Sequence: Synthetic oligonucleotide
  Antisense strand to SEQ ID NO: 1400860
accaacauugauaucacaa

SEQ ID NO: 1400862 - RNA, 19 nt, Artificial Sequence
  Description of Artificial Sequence: Synthetic oligonucleotide
  Sense strand starting at position 3589 of SEQ ID NO: 1243199
gauaucaauguugguugau

SEQ ID NO: 1400863 - RNA, 19 nt, Artificial Sequence
  Description of Artificial Sequence: Synthetic oligonucleotide
  Antisense strand to SEQ ID NO: 1400862
aucaaccaacauugauauc

SEQ ID NO: 1400864 - RNA, 19 nt, Artificial Sequence
  Description of Artificial Sequence: Synthetic oligonucleotide
  Sense strand starting at position 3591 of SEQ ID NO: 1243199
uaucaauguugguugaugu

SEQ ID NO: 1400865 - RNA, 19 nt, Artificial Sequence
  Description of Artificial Sequence: Synthetic oligonucleotide
  Antisense strand to SEQ ID NO: 1400864
acaucaaccaacauugaua

SEQ ID NO: 1400866 - RNA, 19 nt, Artificial Sequence
  Description of Artificial Sequence: Synthetic oligonucleotide
  Sense strand starting at position 3592 of SEQ ID NO: 1243199
aucaauguugguugauguu

SEQ ID NO: 1400867 - RNA, 19 nt, Artificial Sequence
  Description of Artificial Sequence: Synthetic oligonucleotide
  Antisense strand to SEQ ID NO: 1400866
aacaucaaccaacauugau

SEQ ID NO: 1400868 - RNA, 19 nt, Artificial Sequence
  Description of Artificial Sequence: Synthetic oligonucleotide
  Sense strand starting at position 3755 of SEQ ID NO: 1243199
uuauccacagugugaugau

SEQ ID NO: 1400869 - RNA, 19 nt, Artificial Sequence
  Description of Artificial Sequence: Synthetic oligonucleotide
  Antisense strand to SEQ ID NO: 1400868
aucaucacacuguggauaa

SEQ ID NO: 1400870 - RNA, 19 nt, Artificial Sequence
  Description of Artificial Sequence: Synthetic oligonucleotide
  Sense strand starting at position 3868 of SEQ ID NO: 1243199
aggcaaauauccuuugcca

SEQ ID NO: 1400871 - RNA, 19 nt, Artificial Sequence
  Description of Artificial Sequence: Synthetic oligonucleotide
  Antisense strand to SEQ ID NO: 1400870
uggcaaaggauauuugccu

SEQ ID NO: 1400872 - RNA, 19 nt, Artificial Sequence
  Description of Artificial Sequence: Synthetic oligonucleotide
  Sense strand starting at position 3925 of SEQ ID NO: 1243199
guacauuucuuggacccau

SEQ ID NO: 1400873 - RNA, 19 nt, Artificial Sequence
  Description of Artificial Sequence: Synthetic oligonucleotide
  Antisense strand to SEQ ID NO: 1400872
auggguccaagaaauguac

SEQ ID NO: 1400874 - RNA, 19 nt, Artificial Sequence
  Description of Artificial Sequence: Synthetic oligonucleotide
  Sense strand starting at position 398 of SEQ ID NO: 1243200
uagggaaaggagugguuau

SEQ ID NO: 1400875 - RNA, 19 nt, Artificial Sequence
  Description of Artificial Sequence: Synthetic oligonucleotide
  Antisense strand to SEQ ID NO: 1400874
auaaccacuccuuucccua

SEQ ID NO: 1400876 - RNA, 19 nt, Artificial Sequence
  Description of Artificial Sequence: Synthetic oligonucleotide
  Sense strand starting at position 475 of SEQ ID NO: 1243200
uuucuuaucgaucauagua

SEQ ID NO: 1400877 - RNA, 19 nt, Artificial Sequence
  Description of Artificial Sequence: Synthetic oligonucleotide
  Antisense strand to SEQ ID NO: 1400876
uacuaugaucgauaagaaa

SEQ ID NO: 1400878 - RNA, 19 nt, Artificial Sequence
  Description of Artificial Sequence: Synthetic oligonucleotide
  Sense strand starting at position 483 of SEQ ID NO: 1243200
cgaucauaguacucaucau

SEQ ID NO: 1400879 - RNA, 19 nt, Artificial Sequence
  Description of Artificial Sequence: Synthetic oligonucleotide
  Antisense strand to SEQ ID NO: 1400878
augaugaguacuaugaucg

SEQ ID NO: 1400880 - RNA, 19 nt, Artificial Sequence
  Description of Artificial Sequence: Synthetic oligonucleotide
  Sense strand starting at position 640 of SEQ ID NO: 1243200
aguuguguguccuugauuu

SEQ ID NO: 1400881 - RNA, 19 nt, Artificial Sequence
  Description of Artificial Sequence: Synthetic oligonucleotide
  Antisense strand to SEQ ID NO: 1400880
aaaucaaggacacacaacu

SEQ ID NO: 1400882 - RNA, 19 nt, Artificial Sequence
  Description of Artificial Sequence: Synthetic oligonucleotide
  Sense strand starting at position 642 of SEQ ID NO: 1243200
uuguguguccuugauuuac

SEQ ID NO: 1400883 - RNA, 19 nt, Artificial Sequence
  Description of Artificial Sequence: Synthetic oligonucleotide
  Antisense strand to SEQ ID NO: 1400882
guaaaucaaggacacacaa

SEQ ID NO: 1400884 - RNA, 19 nt, Artificial Sequence
  Description of Artificial Sequence: Synthetic oligonucleotide
  Sense strand starting at position 723 of SEQ ID NO: 1243200
ggcacuugugaggauuaga

SEQ ID NO: 1400885 - RNA, 19 nt, Artificial Sequence
  Description of Artificial Sequence: Synthetic oligonucleotide
  Antisense strand to SEQ ID NO: 1400884
ucuaauccucacaagugcc

SEQ ID NO: 1400886 - RNA, 19 nt, Artificial Sequence
  Description of Artificial Sequence: Synthetic oligonucleotide
  Sense strand starting at position 731 of SEQ ID NO: 1243200
ugaggauuagauuguuucu

SEQ ID NO: 1400887 - RNA, 19 nt, Artificial Sequence
  Description of Artificial Sequence: Synthetic oligonucleotide
  Antisense strand to SEQ ID NO: 1400886
agaaacaaucuaauccuca

SEQ ID NO: 1400888 - RNA, 19 nt, Artificial Sequence
  Description of Artificial Sequence: Synthetic oligonucleotide
  Sense strand starting at position 733 of SEQ ID NO: 1243200
aggauuagauuguuucuau

SEQ ID NO: 1400889 - RNA, 19 nt, Artificial Sequence
  Description of Artificial Sequence: Synthetic oligonucleotide
  Antisense strand to SEQ ID NO: 1400888
auagaaacaaucuaauccu

SEQ ID NO: 1400890 - RNA, 19 nt, Artificial Sequence
  Description of Artificial Sequence: Synthetic oligonucleotide
  Sense strand starting at position 734 of SEQ ID NO: 1243200
ggauuagauuguuucuaua

SEQ ID NO: 1400891 - RNA, 19 nt, Artificial Sequence
  Description of Artificial Sequence: Synthetic oligonucleotide
  Antisense strand to SEQ ID NO: 1400890
uauagaaacaaucuaaucc

SEQ ID NO: 1400892 - RNA, 19 nt, Artificial Sequence
  Description of Artificial Sequence: Synthetic oligonucleotide
  Sense strand starting at position 750 of SEQ ID NO: 1243200
auaccaagcgcuuaguaga

SEQ ID NO: 1400893 - RNA, 19 nt, Artificial Sequence
  Description of Artificial Sequence: Synthetic oligonucleotide
  Antisense strand to SEQ ID NO: 1400892
ucuacuaagcgcuugguau

SEQ ID NO: 1400894 - RNA, 19 nt, Artificial Sequence
  Description of Artificial Sequence: Synthetic oligonucleotide
  Sense strand starting at position 1032 of SEQ ID NO: 1243200
gcaguagugagccaagaua

SEQ ID NO: 1400895 - RNA, 19 nt, Artificial Sequence
  Description of Artificial Sequence: Synthetic oligonucleotide
  Antisense strand to SEQ ID NO: 1400894
uaucuuggcucacuacugc

SEQ ID NO: 1400896 - RNA, 19 nt, Artificial Sequence
  Description of Artificial Sequence: Synthetic oligonucleotide
  Sense strand starting at position 1177 of SEQ ID NO: 1243200
cacauugugcauugauuga

SEQ ID NO: 1400897 - RNA, 19 nt, Artificial Sequence
  Description of Artificial Sequence: Synthetic oligonucleotide
  Antisense strand to SEQ ID NO: 1400896
ucaaucaaugcacaaugug

SEQ ID NO: 1400898 - RNA, 19 nt, Artificial Sequence
  Description of Artificial Sequence: Synthetic oligonucleotide
  Sense strand starting at position 1391 of SEQ ID NO: 1243200
gcuacauucuguuugaaau

SEQ ID NO: 1400899 - RNA, 19 nt, Artificial Sequence
  Description of Artificial Sequence: Synthetic oligonucleotide
  Antisense strand to SEQ ID NO: 1400898
auuucaaacagaauguagc

SEQ ID NO: 1400900 - RNA, 19 nt, Artificial Sequence
  Description of Artificial Sequence: Synthetic oligonucleotide
  Sense strand starting at position 1559 of SEQ ID NO: 1243200
auagaauacucaccgccau

SEQ ID NO: 1400901 - RNA, 19 nt, Artificial Sequence
  Description of Artificial Sequence: Synthetic oligonucleotide
  Antisense strand to SEQ ID NO: 1400900
auggcggugaguauucuau

SEQ ID NO: 1400902 - RNA, 19 nt, Artificial Sequence
  Description of Artificial Sequence: Synthetic oligonucleotide
  Sense strand starting at position 1591 of SEQ ID NO: 1243200
ggaugcaaaucuguaagaa

SEQ ID NO: 1400903 - RNA, 19 nt, Artificial Sequence
  Description of Artificial Sequence: Synthetic oligonucleotide
  Antisense strand to SEQ ID NO: 1400902
uucuuacagauuugcaucc

SEQ ID NO: 1400904 - RNA, 19 nt, Artificial Sequence
  Description of Artificial Sequence: Synthetic oligonucleotide
  Sense strand starting at position 1627 of SEQ ID NO: 1243200
cuagaauugaauuguguga

SEQ ID NO: 1400905 - RNA, 19 nt, Artificial Sequence
  Description of Artificial Sequence: Synthetic oligonucleotide
  Antisense strand to SEQ ID NO: 1400904
ucacacaauucaauucuag

SEQ ID NO: 1400906 - RNA, 19 nt, Artificial Sequence
  Description of Artificial Sequence: Synthetic oligonucleotide
  Sense strand starting at position 1631 of SEQ ID NO: 1243200
aauugaauugugugaccuu

SEQ ID NO: 1400907 - RNA, 19 nt, Artificial Sequence
  Description of Artificial Sequence: Synthetic oligonucleotide
  Antisense strand to SEQ ID NO: 1400906
aaggucacacaauucaauu

SEQ ID NO: 1400908 - RNA, 19 nt, Artificial Sequence
  Description of Artificial Sequence: Synthetic oligonucleotide
  Sense strand starting at position 1689 of SEQ ID NO: 1243200
gccacucaugaaggaaauu

SEQ ID NO: 1400909 - RNA, 19 nt, Artificial Sequence
  Description of Artificial Sequence: Synthetic oligonucleotide
  Antisense strand to SEQ ID NO: 1400908
aauuuccuucaugaguggc

SEQ ID NO: 1400910 - RNA, 19 nt, Artificial Sequence
  Description of Artificial Sequence: Synthetic oligonucleotide
  Sense strand starting at position 1858 of SEQ ID NO: 1243200
uucccuaaacuguguggaa

SEQ ID NO: 1400911 - RNA, 19 nt, Artificial Sequence
  Description of Artificial Sequence: Synthetic oligonucleotide
  Antisense strand to SEQ ID NO: 1400910
uuccacacaguuuagggaa

SEQ ID NO: 1400912 - RNA, 19 nt, Artificial Sequence
  Description of Artificial Sequence: Synthetic oligonucleotide
  Sense strand starting at position 1859 of SEQ ID NO: 1243200
ucccuaaacuguguggaaa

SEQ ID NO: 1400913 - RNA, 19 nt, Artificial Sequence
  Description of Artificial Sequence: Synthetic oligonucleotide
  Antisense strand to SEQ ID NO: 1400912
uuuccacacaguuuaggga

SEQ ID NO: 1400914 - RNA, 19 nt, Artificial Sequence
  Description of Artificial Sequence: Synthetic oligonucleotide
  Sense strand starting at position 1883 of SEQ ID NO: 1243200
aagggugauucuucccuca

SEQ ID NO: 1400915 - RNA, 19 nt, Artificial Sequence
  Description of Artificial Sequence: Synthetic oligonucleotide
  Antisense strand to SEQ ID NO: 1400914
ugagggaagaaucacccuu

SEQ ID NO: 1400916 - RNA, 19 nt, Artificial Sequence
  Description of Artificial Sequence: Synthetic oligonucleotide
  Sense strand starting at position 1885 of SEQ ID NO: 1243200
gggugauucuucccucagg

SEQ ID NO: 1400917 - RNA, 19 nt, Artificial Sequence
  Description of Artificial Sequence: Synthetic oligonucleotide
  Antisense strand to SEQ ID NO: 1400916
ccugagggaagaaucaccc

SEQ ID NO: 1400918 - RNA, 19 nt, Artificial Sequence
  Description of Artificial Sequence: Synthetic oligonucleotide
  Sense strand starting at position 1886 of SEQ ID NO: 1243200
ggugauucuucccucagga

SEQ ID NO: 1400919 - RNA, 19 nt, Artificial Sequence
  Description of Artificial Sequence: Synthetic oligonucleotide
  Antisense strand to SEQ ID NO: 1400918
uccugagggaagaaucacc

SEQ ID NO: 1400920 - RNA, 19 nt, Artificial Sequence
  Description of Artificial Sequence: Synthetic oligonucleotide
  Sense strand starting at position 1992 of SEQ ID NO: 1243200
cugagacauucuccuguag

SEQ ID NO: 1400921 - RNA, 19 nt, Artificial Sequence
  Description of Artificial Sequence: Synthetic oligonucleotide
  Antisense strand to SEQ ID NO: 1400920
cuacaggagaaugucucag

SEQ ID NO: 1400922 - RNA, 19 nt, Artificial Sequence
  Description of Artificial Sequence: Synthetic oligonucleotide
  Sense strand starting at position 2143 of SEQ ID NO: 1243200
cccagaaucccuugaaguc

SEQ ID NO: 1400923 - RNA, 19 nt, Artificial Sequence
  Description of Artificial Sequence: Synthetic oligonucleotide
  Antisense strand to SEQ ID NO: 1400922
gacuucaagggauucuggg

SEQ ID NO: 1400924 - RNA, 19 nt, Artificial Sequence
  Description of Artificial Sequence: Synthetic oligonucleotide
  Sense strand starting at position 2144 of SEQ ID NO: 1243200
ccagaaucccuugaagucu

SEQ ID NO: 1400925 - RNA, 19 nt, Artificial Sequence
  Description of Artificial Sequence: Synthetic oligonucleotide
  Antisense strand to SEQ ID NO: 1400924
agacuucaagggauucugg

SEQ ID NO: 1400926 - RNA, 19 nt, Artificial Sequence
  Description of Artificial Sequence: Synthetic oligonucleotide
  Sense strand starting at position 2239 of SEQ ID NO: 1243200
ucuccuuggugacuacaau

SEQ ID NO: 1400927 - RNA, 19 nt, Artificial Sequence
  Description of Artificial Sequence: Synthetic oligonucleotide
  Antisense strand to SEQ ID NO: 1400926
auuguagucaccaaggaga

SEQ ID NO: 1400928 - RNA, 19 nt, Artificial Sequence
  Description of Artificial Sequence: Synthetic oligonucleotide
  Sense strand starting at position 2638 of SEQ ID NO: 1243200
gcaagaaauuuauauccag

SEQ ID NO: 1400929 - RNA, 19 nt, Artificial Sequence
  Description of Artificial Sequence: Synthetic oligonucleotide
  Antisense strand to SEQ ID NO: 1400928
cuggauauaaauuucuugc

SEQ ID NO: 1400930 - RNA, 19 nt, Artificial Sequence
  Description of Artificial Sequence: Synthetic oligonucleotide
  Sense strand starting at position 3185 of SEQ ID NO: 1243200
cuaucaaauguuggugaug

SEQ ID NO: 1400931 - RNA, 19 nt, Artificial Sequence
  Description of Artificial Sequence: Synthetic oligonucleotide
  Antisense strand to SEQ ID NO: 1400930
caucaccaacauuugauag

SEQ ID NO: 1400932 - RNA, 19 nt, Artificial Sequence
  Description of Artificial Sequence: Synthetic oligonucleotide
  Sense strand starting at position 3485 of SEQ ID NO: 1243200
uuauucuagcuaugaugga

SEQ ID NO: 1400933 - RNA, 19 nt, Artificial Sequence
  Description of Artificial Sequence: Synthetic oligonucleotide
  Antisense strand to SEQ ID NO: 1400932
uccaucauagcuagaauaa

SEQ ID NO: 1400934 - RNA, 19 nt, Artificial Sequence
  Description of Artificial Sequence: Synthetic oligonucleotide
  Sense strand starting at position 3489 of SEQ ID NO: 1243200
ucuagcuaugauggaguaa

SEQ ID NO: 1400935 - RNA, 19 nt, Artificial Sequence
  Description of Artificial Sequence: Synthetic oligonucleotide
  Antisense strand to SEQ ID NO: 1400934
uuacuccaucauagcuaga

SEQ ID NO: 1400936 - RNA, 19 nt, Artificial Sequence
  Description of Artificial Sequence: Synthetic oligonucleotide
  Sense strand starting at position 3490 of SEQ ID NO: 1243200
cuagcuaugauggaguaau

SEQ ID NO: 1400937 - RNA, 19 nt, Artificial Sequence
  Description of Artificial Sequence: Synthetic oligonucleotide
  Antisense strand to SEQ ID NO: 1400936
auuacuccaucauagcuag

SEQ ID NO: 1400938 - RNA, 19 nt, Artificial Sequence
  Description of Artificial Sequence: Synthetic oligonucleotide
  Sense strand starting at position 3498 of SEQ ID NO: 1243200
gauggaguaauuggcaaug

SEQ ID NO: 1400939 - RNA, 19 nt, Artificial Sequence
  Description of Artificial Sequence: Synthetic oligonucleotide
  Antisense strand to SEQ ID NO: 1400938
cauugccaauuacuccauc

SEQ ID NO: 1400940 - RNA, 19 nt, Artificial Sequence
  Description of Artificial Sequence: Synthetic oligonucleotide
  Sense strand starting at position 3503 of SEQ ID NO: 1243200
aguaauuggcaauggauaa

SEQ ID NO: 1400941 - RNA, 19 nt, Artificial Sequence
  Description of Artificial Sequence: Synthetic oligonucleotide
  Antisense strand to SEQ ID NO: 1400940
uuauccauugccaauuacu

SEQ ID NO: 1400942 - RNA, 19 nt, Artificial Sequence
  Description of Artificial Sequence: Synthetic oligonucleotide
  Sense strand starting at position 3504 of SEQ ID NO: 1243200
guaauuggcaauggauaaa

SEQ ID NO: 1400943 - RNA, 19 nt, Artificial Sequence
  Description of Artificial Sequence: Synthetic oligonucleotide
  Antisense strand to SEQ ID NO: 1400942
uuuauccauugccaauuac

SEQ ID NO: 1400944 - RNA, 19 nt, Artificial Sequence
  Description of Artificial Sequence: Synthetic oligonucleotide
  Sense strand starting at position 3522 of SEQ ID NO: 1243200
accguccugccuuaaacaa

SEQ ID NO: 1400945 - RNA, 19 nt, Artificial Sequence
  Description of Artificial Sequence: Synthetic oligonucleotide
  Antisense strand to SEQ ID NO: 1400944
uuguuuaaggcaggacggu

SEQ ID NO: 1400946 - RNA, 19 nt, Artificial Sequence
  Description of Artificial Sequence: Synthetic oligonucleotide
  Sense strand starting at position 3606 of SEQ ID NO: 1243200
gacugagaucccugagcaa

SEQ ID NO: 1400947 - RNA, 19 nt, Artificial Sequence
  Description of Artificial Sequence: Synthetic oligonucleotide
  Antisense strand to SEQ ID NO: 1400946
uugcucagggaucucaguc

SEQ ID NO: 1400948 - RNA, 19 nt, Artificial Sequence
  Description of Artificial Sequence: Synthetic oligonucleotide
  Sense strand starting at position 3718 of SEQ ID NO: 1243200
acaggucucacugagcaga

SEQ ID NO: 1400949 - RNA, 19 nt, Artificial Sequence
  Description of Artificial Sequence: Synthetic oligonucleotide
  Antisense strand to SEQ ID NO: 1400948
ucugcucagugagaccugu

SEQ ID NO: 1400950 - RNA, 19 nt, Artificial Sequence
  Description of Artificial Sequence: Synthetic oligonucleotide
  Sense strand starting at position 3785 of SEQ ID NO: 1243200
gaagaauacuuggagagga

SEQ ID NO: 1400951 - RNA, 19 nt, Artificial Sequence
  Description of Artificial Sequence: Synthetic oligonucleotide
  Antisense strand to SEQ ID NO: 1400950
uccucuccaaguauucuuc

SEQ ID NO: 1400952 - RNA, 19 nt, Artificial Sequence
  Description of Artificial Sequence: Synthetic oligonucleotide
  Sense strand starting at position 3850 of SEQ ID NO: 1243200
uugagacuuuggcugaaua

SEQ ID NO: 1400953 - RNA, 19 nt, Artificial Sequence
  Description of Artificial Sequence: Synthetic oligonucleotide
  Antisense strand to SEQ ID NO: 1400952
uauucagccaaagucucaa

SEQ ID NO: 1400954 - RNA, 19 nt, Artificial Sequence
  Description of Artificial Sequence: Synthetic oligonucleotide
  Sense strand starting at position 193 of SEQ ID NO: 1243201
ggacuuuauggugaugugu

SEQ ID NO: 1400955 - RNA, 19 nt, Artificial Sequence
  Description of Artificial Sequence: Synthetic oligonucleotide
  Antisense strand to SEQ ID NO: 1400954
acacaucaccauaaagucc

SEQ ID NO: 1400956 - RNA, 19 nt, Artificial Sequence
  Description of Artificial Sequence: Synthetic oligonucleotide
  Sense strand starting at position 199 of SEQ ID NO: 1243201
uauggugaugugugggaaa

SEQ ID NO: 1400957 - RNA, 19 nt, Artificial Sequence
  Description of Artificial Sequence: Synthetic oligonucleotide
  Antisense strand to SEQ ID NO: 1400956
uuucccacacaucaccaua

SEQ ID NO: 1400958 - RNA, 19 nt, Artificial Sequence
  Description of Artificial Sequence: Synthetic oligonucleotide
  Sense strand starting at position 201 of SEQ ID NO: 1243201
uggugaugugugggaaacu

SEQ ID NO: 1400959 - RNA, 19 nt, Artificial Sequence
  Description of Artificial Sequence: Synthetic oligonucleotide
  Antisense strand to SEQ ID NO: 1400958
aguuucccacacaucacca

SEQ ID NO: 1400960 - RNA, 19 nt, Artificial Sequence
  Description of Artificial Sequence: Synthetic oligonucleotide
  Sense strand starting at position 212 of SEQ ID NO: 1243201
gggaaacugcugugaaauu

SEQ ID NO: 1400961 - RNA, 19 nt, Artificial Sequence
  Description of Artificial Sequence: Synthetic oligonucleotide
  Antisense strand to SEQ ID NO: 1400960
aauuucacagcaguuuccc

SEQ ID NO: 1400962 - RNA, 19 nt, Artificial Sequence
  Description of Artificial Sequence: Synthetic oligonucleotide
  Sense strand starting at position 222 of SEQ ID NO: 1243201
ugugaaauuauugauggcu

SEQ ID NO: 1400963 - RNA, 19 nt, Artificial Sequence
  Description of Artificial Sequence: Synthetic oligonucleotide
  Antisense strand to SEQ ID NO: 1400962
agccaucaauaauuucaca

SEQ ID NO: 1400964 - RNA, 19 nt, Artificial Sequence
  Description of Artificial Sequence: Synthetic oligonucleotide
  Sense strand starting at position 403 of SEQ ID NO: 1243201
ucaucuggucuugggaacu

SEQ ID NO: 1400965 - RNA, 19 nt, Artificial Sequence
  Description of Artificial Sequence: Synthetic oligonucleotide
  Antisense strand to SEQ ID NO: 1400964
aguucccaagaccagauga

SEQ ID NO: 1400966 - RNA, 19 nt, Artificial Sequence
  Description of Artificial Sequence: Synthetic oligonucleotide
  Sense strand starting at position 556 of SEQ ID NO: 1243201
ggauguuacuaaucuagag

SEQ ID NO: 1400967 - RNA, 19 nt, Artificial Sequence
  Description of Artificial Sequence: Synthetic oligonucleotide
  Antisense strand to SEQ ID NO: 1400966
cucuagauuaguaacaucc

SEQ ID NO: 1400968 - RNA, 19 nt, Artificial Sequence
  Description of Artificial Sequence: Synthetic oligonucleotide
  Sense strand starting at position 907 of SEQ ID NO: 1243201
agugcaaagucacuaucau

SEQ ID NO: 1400969 - RNA, 19 nt, Artificial Sequence
  Description of Artificial Sequence: Synthetic oligonucleotide
  Antisense strand to SEQ ID NO: 1400968
augauagugacuuugcacu

SEQ ID NO: 1400970 - RNA, 19 nt, Artificial Sequence
  Description of Artificial Sequence: Synthetic oligonucleotide
  Sense strand starting at position 908 of SEQ ID NO: 1243201
gugcaaagucacuaucaua

SEQ ID NO: 1400971 - RNA, 19 nt, Artificial Sequence
  Description of Artificial Sequence: Synthetic oligonucleotide
  Antisense strand to SEQ ID NO: 1400970
uaugauagugacuuugcac

SEQ ID NO: 1400972 - RNA, 19 nt, Artificial Sequence
  Description of Artificial Sequence: Synthetic oligonucleotide
  Sense strand starting at position 1436 of SEQ ID NO: 1243201
ugagacagcuuucugauua

SEQ ID NO: 1400973 - RNA, 19 nt, Artificial Sequence
  Description of Artificial Sequence: Synthetic oligonucleotide
  Antisense strand to SEQ ID NO: 1400972
uaaucagaaagcugucuca

SEQ ID NO: 1400974 - RNA, 19 nt, Artificial Sequence
  Description of Artificial Sequence: Synthetic oligonucleotide
  Sense strand starting at position 1473 of SEQ ID NO: 1243201
gucuguuccuuugcuauuu

SEQ ID NO: 1400975 - RNA, 19 nt, Artificial Sequence
  Description of Artificial Sequence: Synthetic oligonucleotide
  Antisense strand to SEQ ID NO: 1400974
aaauagcaaaggaacagac

SEQ ID NO: 1400976 - RNA, 19 nt, Artificial Sequence
  Description of Artificial Sequence: Synthetic oligonucleotide
  Sense strand starting at position 1520 of SEQ ID NO: 1243201
cucaguauuugagaugcca

SEQ ID NO: 1400977 - RNA, 19 nt, Artificial Sequence
  Description of Artificial Sequence: Synthetic oligonucleotide
  Antisense strand to SEQ ID NO: 1400976
uggcaucucaaauacugag

SEQ ID NO: 1400978 - RNA, 19 nt, Artificial Sequence
  Description of Artificial Sequence: Synthetic oligonucleotide
  Sense strand starting at position 1562 of SEQ ID NO: 1243201
ccgacuaaugcuguguguu

SEQ ID NO: 1400979 - RNA, 19 nt, Artificial Sequence
  Description of Artificial Sequence: Synthetic oligonucleotide
  Antisense strand to SEQ ID NO: 1400978
aacacacagcauuagucgg

SEQ ID NO: 1400980 - RNA, 19 nt, Artificial Sequence
  Description of Artificial Sequence: Synthetic oligonucleotide
  Sense strand starting at position 1612 of SEQ ID NO: 1243201
ccauuucucuggcuaguga

SEQ ID NO: 1400981 - RNA, 19 nt, Artificial Sequence
  Description of Artificial Sequence: Synthetic oligonucleotide
  Antisense strand to SEQ ID NO: 1400980
ucacuagccagagaaaugg

SEQ ID NO: 1400982 - RNA, 19 nt, Artificial Sequence
  Description of Artificial Sequence: Synthetic oligonucleotide
  Sense strand starting at position 2536 of SEQ ID NO: 1243201
cugggacuuaaauguagau

SEQ ID NO: 1400983 - RNA, 19 nt, Artificial Sequence
  Description of Artificial Sequence: Synthetic oligonucleotide
  Antisense strand to SEQ ID NO: 1400982
aucuacauuuaagucccag

SEQ ID NO: 1400984 - RNA, 19 nt, Artificial Sequence
  Description of Artificial Sequence: Synthetic oligonucleotide
  Sense strand starting at position 2670 of SEQ ID NO: 1243201
cugaucucacccugaggga

SEQ ID NO: 1400985 - RNA, 19 nt, Artificial Sequence
  Description of Artificial Sequence: Synthetic oligonucleotide
  Antisense strand to SEQ ID NO: 1400984
ucccucagggugagaucag

SEQ ID NO: 1400986 - RNA, 19 nt, Artificial Sequence
  Description of Artificial Sequence: Synthetic oligonucleotide
  Sense strand starting at position 2700 of SEQ ID NO: 1243201
agagaucuguuucuaggau

SEQ ID NO: 1400987 - RNA, 19 nt, Artificial Sequence
  Description of Artificial Sequence: Synthetic oligonucleotide
  Antisense strand to SEQ ID NO: 1400986
auccuagaaacagaucucu

SEQ ID NO: 1400988 - RNA, 19 nt, Artificial Sequence
  Description of Artificial Sequence: Synthetic oligonucleotide
  Sense strand starting at position 2814 of SEQ ID NO: 1243201
ccugguauaacugagagca

SEQ ID NO: 1400989 - RNA, 19 nt, Artificial Sequence
  Description of Artificial Sequence: Synthetic oligonucleotide
  Antisense strand to SEQ ID NO: 1400988
ugcucucaguuauaccagg

SEQ ID NO: 1400990 - RNA, 19 nt, Artificial Sequence
  Description of Artificial Sequence: Synthetic oligonucleotide
  Sense strand starting at position 2822 of SEQ ID NO: 1243201
aacugagagcaauguuucu

SEQ ID NO: 1400991 - RNA, 19 nt, Artificial Sequence
  Description of Artificial Sequence: Synthetic oligonucleotide
  Antisense strand to SEQ ID NO: 1400990
agaaacauugcucucaguu

SEQ ID NO: 1400992 - RNA, 19 nt, Artificial Sequence
  Description of Artificial Sequence: Synthetic oligonucleotide
  Sense strand starting at position 2827 of SEQ ID NO: 1243201
agagcaauguuucuaauca

SEQ ID NO: 1400993 - RNA, 19 nt, Artificial Sequence
  Description of Artificial Sequence: Synthetic oligonucleotide
  Antisense strand to SEQ ID NO: 1400992
ugauuagaaacauugcucu

SEQ ID NO: 1400994 - RNA, 19 nt, Artificial Sequence
  Description of Artificial Sequence: Synthetic oligonucleotide
  Sense strand starting at position 2834 of SEQ ID NO: 1243201
uguuucuaaucauuaagag

SEQ ID NO: 1400995 - RNA, 19 nt, Artificial Sequence
  Description of Artificial Sequence: Synthetic oligonucleotide
  Antisense strand to SEQ ID NO: 1400994
cucuuaaugauuagaaaca

SEQ ID NO: 1400996 - RNA, 19 nt, Artificial Sequence
  Description of Artificial Sequence: Synthetic oligonucleotide
  Sense strand starting at position 2835 of SEQ ID NO: 1243201
guuucuaaucauuaagagc

SEQ ID NO: 1400997 - RNA, 19 nt, Artificial Sequence
  Description of Artificial Sequence: Synthetic oligonucleotide
  Antisense strand to SEQ ID NO: 1400996
gcucuuaaugauuagaaac

SEQ ID NO: 1400998 - RNA, 19 nt, Artificial Sequence
  Description of Artificial Sequence: Synthetic oligonucleotide
  Sense strand starting at position 2892 of SEQ ID NO: 1243201
ugagauguuugcucuccac

SEQ ID NO: 1400999 - RNA, 19 nt, Artificial Sequence
  Description of Artificial Sequence: Synthetic oligonucleotide
  Antisense strand to SEQ ID NO: 1400998
guggagagcaaacaucuca

SEQ ID NO: 1401000 - RNA, 19 nt, Artificial Sequence
  Description of Artificial Sequence: Synthetic oligonucleotide
  Sense strand starting at position 2964 of SEQ ID NO: 1243201
ucuguacucccauacugua

SEQ ID NO: 1401001 - RNA, 19 nt, Artificial Sequence
  Description of Artificial Sequence: Synthetic oligonucleotide
  Antisense strand to SEQ ID NO: 1401000
uacaguaugggaguacaga

SEQ ID NO: 1401002 - RNA, 19 nt, Artificial Sequence
  Description of Artificial Sequence: Synthetic oligonucleotide
  Sense strand starting at position 3013 of SEQ ID NO: 1243201
cucuaauaaaugggagguu

SEQ ID NO: 1401003 - RNA, 19 nt, Artificial Sequence
  Description of Artificial Sequence: Synthetic oligonucleotide
  Antisense strand to SEQ ID NO: 1401002
aaccucccauuuauuagag

SEQ ID NO: 1401004 - RNA, 19 nt, Artificial Sequence
  Description of Artificial Sequence: Synthetic oligonucleotide
  Sense strand starting at position 3042 of SEQ ID NO: 1243201
aucguagcacaucauaaua

SEQ ID NO: 1401005 - RNA, 19 nt, Artificial Sequence
  Description of Artificial Sequence: Synthetic oligonucleotide
  Antisense strand to SEQ ID NO: 1401004
uauuaugaugugcuacgau

SEQ ID NO: 1401006 - RNA, 19 nt, Artificial Sequence
  Description of Artificial Sequence: Synthetic oligonucleotide
  Sense strand starting at position 3095 of SEQ ID NO: 1243201
uuaaaugagaagugguaua

SEQ ID NO: 1401007 - RNA, 19 nt, Artificial Sequence
  Description of Artificial Sequence: Synthetic oligonucleotide
  Antisense strand to SEQ ID NO: 1401006
uauaccacuucucauuuaa

SEQ ID NO: 1401008 - RNA, 19 nt, Artificial Sequence
  Description of Artificial Sequence: Synthetic oligonucleotide
  Sense strand starting at position 3124 of SEQ ID NO: 1243201
ugcauacauccugguggaa

SEQ ID NO: 1401009 - RNA, 19 nt, Artificial Sequence
  Description of Artificial Sequence: Synthetic oligonucleotide
  Antisense strand to SEQ ID NO: 1401008
uuccaccaggauguaugca

SEQ ID NO: 1401010 - RNA, 19 nt, Artificial Sequence
  Description of Artificial Sequence: Synthetic oligonucleotide
  Sense strand starting at position 3158 of SEQ ID NO: 1243201
auuaaugaaugcucuuaga

SEQ ID NO: 1401011 - RNA, 19 nt, Artificial Sequence
  Description of Artificial Sequence: Synthetic oligonucleotide
  Antisense strand to SEQ ID NO: 1401010
ucuaagagcauucauuaau

SEQ ID NO: 1401012 - RNA, 19 nt, Artificial Sequence
  Description of Artificial Sequence: Synthetic oligonucleotide
  Sense strand starting at position 3167 of SEQ ID NO: 1243201
ugcucuuagaguuagaaug

SEQ ID NO: 1401013 - RNA, 19 nt, Artificial Sequence
  Description of Artificial Sequence: Synthetic oligonucleotide
  Antisense strand to SEQ ID NO: 1401012
cauucuaacucuaagagca

SEQ ID NO: 1401014 - RNA, 19 nt, Artificial Sequence
  Description of Artificial Sequence: Synthetic oligonucleotide
  Sense strand starting at position 3221 of SEQ ID NO: 1243201
acccucucagagcgauauu

SEQ ID NO: 1401015 - RNA, 19 nt, Artificial Sequence
  Description of Artificial Sequence: Synthetic oligonucleotide
  Antisense strand to SEQ ID NO: 1401014
aauaucgcucugagagggu

SEQ ID NO: 1401016 - RNA, 19 nt, Artificial Sequence
  Description of Artificial Sequence: Synthetic oligonucleotide
  Sense strand starting at position 3224 of SEQ ID NO: 1243201
cucucagagcgauauugac

SEQ ID NO: 1401017 - RNA, 19 nt, Artificial Sequence
  Description of Artificial Sequence: Synthetic oligonucleotide
  Antisense strand to SEQ ID NO: 1401016
gucaauaucgcucugagag

SEQ ID NO: 1401018 - RNA, 19 nt, Artificial Sequence
  Description of Artificial Sequence: Synthetic oligonucleotide
  Sense strand starting at position 3290 of SEQ ID NO: 1243201
uugaaagugugucucauga

SEQ ID NO: 1401019 - RNA, 19 nt, Artificial Sequence
  Description of Artificial Sequence: Synthetic oligonucleotide
  Antisense strand to SEQ ID NO: 1401018
ucaugagacacacuuucaa

SEQ ID NO: 1401020 - RNA, 19 nt, Artificial Sequence
  Description of Artificial Sequence: Synthetic oligonucleotide
  Sense strand starting at position 3357 of SEQ ID NO: 1243201
agggcugaacguuaauaac

SEQ ID NO: 1401021 - RNA, 19 nt, Artificial Sequence
  Description of Artificial Sequence: Synthetic oligonucleotide
  Antisense strand to SEQ ID NO: 1401020
guuauuaacguucagcccu

SEQ ID NO: 1401022 - RNA, 19 nt, Artificial Sequence
  Description of Artificial Sequence: Synthetic oligonucleotide
  Sense strand starting at position 3375 of SEQ ID NO: 1243201
ccacguugagaauaacuau

SEQ ID NO: 1401023 - RNA, 19 nt, Artificial Sequence
  Description of Artificial Sequence: Synthetic oligonucleotide
  Antisense strand to SEQ ID NO: 1401022
auaguuauucucaacgugg

SEQ ID NO: 1401024 - RNA, 19 nt, Artificial Sequence
  Description of Artificial Sequence: Synthetic oligonucleotide
  Sense strand starting at position 3545 of SEQ ID NO: 1243201
ggaggaucuuaugcuaagu

SEQ ID NO: 1401025 - RNA, 19 nt, Artificial Sequence
  Description of Artificial Sequence: Synthetic oligonucleotide
  Antisense strand to SEQ ID NO: 1401024
acuuagcauaagauccucc

SEQ ID NO: 1401026 - RNA, 19 nt, Artificial Sequence
  Description of Artificial Sequence: Synthetic oligonucleotide
  Sense strand starting at position 3640 of SEQ ID NO: 1243201
cgucauacucauggaagca

SEQ ID NO: 1401027 - RNA, 19 nt, Artificial Sequence
  Description of Artificial Sequence: Synthetic oligonucleotide
  Antisense strand to SEQ ID NO: 1401026
ugcuuccaugaguaugacg

SEQ ID NO: 1401028 - RNA, 19 nt, Artificial Sequence
  Description of Artificial Sequence: Synthetic oligonucleotide
  Sense strand starting at position 3661 of SEQ ID NO: 1243201
gccuuagaaugguugguac

SEQ ID NO: 1401029 - RNA, 19 nt, Artificial Sequence
  Description of Artificial Sequence: Synthetic oligonucleotide
  Antisense strand to SEQ ID NO: 1401028
guaccaaccauucuaaggc

SEQ ID NO: 1401030 - RNA, 19 nt, Artificial Sequence
  Description of Artificial Sequence: Synthetic oligonucleotide
  Sense strand starting at position 3663 of SEQ ID NO: 1243201
cuuagaaugguugguacca

SEQ ID NO: 1401031 - RNA, 19 nt, Artificial Sequence
  Description of Artificial Sequence: Synthetic oligonucleotide
  Antisense strand to SEQ ID NO: 1401030
ugguaccaaccauucuaag

SEQ ID NO: 1401032 - RNA, 19 nt, Artificial Sequence
  Description of Artificial Sequence: Synthetic oligonucleotide
  Sense strand starting at position 3926 of SEQ ID NO: 1243201
uguugcacaccauagauau

SEQ ID NO: 1401033 - RNA, 19 nt, Artificial Sequence
  Description of Artificial Sequence: Synthetic oligonucleotide
  Antisense strand to SEQ ID NO: 1401032
auaucuauggugugcaaca

SEQ ID NO: 1401034 - RNA, 19 nt, Artificial Sequence
  Description of Artificial Sequence: Synthetic oligonucleotide
  Sense strand starting at position 375 of SEQ ID NO: 1243202
cagagaacuugucacacag

SEQ ID NO: 1401035 - RNA, 19 nt, Artificial Sequence
  Description of Artificial Sequence: Synthetic oligonucleotide
  Antisense strand to SEQ ID NO: 1401034
cugugugacaaguucucug

SEQ ID NO: 1401036 - RNA, 19 nt, Artificial Sequence
  Description of Artificial Sequence: Synthetic oligonucleotide
  Sense strand starting at position 377 of SEQ ID NO: 1243202
gagaacuugucacacagga

SEQ ID NO: 1401037 - RNA, 19 nt, Artificial Sequence
  Description of Artificial Sequence: Synthetic oligonucleotide
  Antisense strand to SEQ ID NO: 1401036
uccugugugacaaguucuc

SEQ ID NO: 1401038 - RNA, 19 nt, Artificial Sequence
  Description of Artificial Sequence: Synthetic oligonucleotide
  Sense strand starting at position 520 of SEQ ID NO: 1243202
gggccuucuuguuagaggu

SEQ ID NO: 1401039 - RNA, 19 nt, Artificial Sequence
  Description of Artificial Sequence: Synthetic oligonucleotide
  Antisense strand to SEQ ID NO: 1401038
accucuaacaagaaggccc

SEQ ID NO: 1401040 - RNA, 19 nt, Artificial Sequence
  Description of Artificial Sequence: Synthetic oligonucleotide
  Sense strand starting at position 522 of SEQ ID NO: 1243202
gccuucuuguuagagguga

SEQ ID NO: 1401041 - RNA, 19 nt, Artificial Sequence
  Description of Artificial Sequence: Synthetic oligonucleotide
  Antisense strand to SEQ ID NO: 1401040
ucaccucuaacaagaaggc

SEQ ID NO: 1401042 - RNA, 19 nt, Artificial Sequence
  Description of Artificial Sequence: Synthetic oligonucleotide
  Sense strand starting at position 526 of SEQ ID NO: 1243202
ucuuguuagaggugaggaa

SEQ ID NO: 1401043 - RNA, 19 nt, Artificial Sequence
  Description of Artificial Sequence: Synthetic oligonucleotide
  Antisense strand to SEQ ID NO: 1401042
uuccucaccucuaacaaga

SEQ ID NO: 1401044 - RNA, 19 nt, Artificial Sequence
  Description of Artificial Sequence: Synthetic oligonucleotide
  Sense strand starting at position 625 of SEQ ID NO: 1243202
aggaaaggauaucucguau

SEQ ID NO: 1401045 - RNA, 19 nt, Artificial Sequence
  Description of Artificial Sequence: Synthetic oligonucleotide
  Antisense strand to SEQ ID NO: 1401044
auacgagauauccuuuccu

SEQ ID NO: 1401046 - RNA, 19 nt, Artificial Sequence
  Description of Artificial Sequence: Synthetic oligonucleotide
  Sense strand starting at position 629 of SEQ ID NO: 1243202
aaggauaucucguauggag

SEQ ID NO: 1401047 - RNA, 19 nt, Artificial Sequence
  Description of Artificial Sequence: Synthetic oligonucleotide
  Antisense strand to SEQ ID NO: 1401046
cuccauacgagauauccuu

SEQ ID NO: 1401048 - RNA, 19 nt, Artificial Sequence
  Description of Artificial Sequence: Synthetic oligonucleotide
  Sense strand starting at position 741 of SEQ ID NO: 1243202
ggaauaugugcccaggcca

SEQ ID NO: 1401049 - RNA, 19 nt, Artificial Sequence
  Description of Artificial Sequence: Synthetic oligonucleotide
  Antisense strand to SEQ ID NO: 1401048
uggccugggcacauauucc

SEQ ID NO: 1401050 - RNA, 19 nt, Artificial Sequence
  Description of Artificial Sequence: Synthetic oligonucleotide
  Sense strand starting at position 756 of SEQ ID NO: 1243202
gccaguguuuccucaaggu

SEQ ID NO: 1401051 - RNA, 19 nt, Artificial Sequence
  Description of Artificial Sequence: Synthetic oligonucleotide
  Antisense strand to SEQ ID NO: 1401050
accuugaggaaacacuggc

SEQ ID NO: 1401052 - RNA, 19 nt, Artificial Sequence
  Description of Artificial Sequence: Synthetic oligonucleotide
  Sense strand starting at position 839 of SEQ ID NO: 1243202
cagacccucugguagagau

SEQ ID NO: 1401053 - RNA, 19 nt, Artificial Sequence
  Description of Artificial Sequence: Synthetic oligonucleotide
  Antisense strand to SEQ ID NO: 1401052
aucucuaccagagggucug

SEQ ID NO: 1401054 - RNA, 19 nt, Artificial Sequence
  Description of Artificial Sequence: Synthetic oligonucleotide
  Sense strand starting at position 1684 of SEQ ID NO: 1243202
gcuguuaccuggucaggca

SEQ ID NO: 1401055 - RNA, 19 nt, Artificial Sequence
  Description of Artificial Sequence: Synthetic oligonucleotide
  Antisense strand to SEQ ID NO: 1401054
ugccugaccagguaacagc

SEQ ID NO: 1401056 - RNA, 19 nt, Artificial Sequence
  Description of Artificial Sequence: Synthetic oligonucleotide
  Sense strand starting at position 1719 of SEQ ID NO: 1243202
guucucuugcuccagcaga

SEQ ID NO: 1401057 - RNA, 19 nt, Artificial Sequence
  Description of Artificial Sequence: Synthetic oligonucleotide
  Antisense strand to SEQ ID NO: 1401056
ucugcuggagcaagagaac

SEQ ID NO: 1401058 - RNA, 19 nt, Artificial Sequence
  Description of Artificial Sequence: Synthetic oligonucleotide
  Sense strand starting at position 1825 of SEQ ID NO: 1243202
cccagaaucuccuuggucu

SEQ ID NO: 1401059 - RNA, 19 nt, Artificial Sequence
  Description of Artificial Sequence: Synthetic oligonucleotide
  Antisense strand to SEQ ID NO: 1401058
agaccaaggagauucuggg

SEQ ID NO: 1401060 - RNA, 19 nt, Artificial Sequence
  Description of Artificial Sequence: Synthetic oligonucleotide
  Sense strand starting at position 2015 of SEQ ID NO: 1243202
ccaggcucuccuggaguuu

SEQ ID NO: 1401061 - RNA, 19 nt, Artificial Sequence
  Description of Artificial Sequence: Synthetic oligonucleotide
  Antisense strand to SEQ ID NO: 1401060
aaacuccaggagagccugg

SEQ ID NO: 1401062 - RNA, 19 nt, Artificial Sequence
  Description of Artificial Sequence: Synthetic oligonucleotide
  Sense strand starting at position 2304 of SEQ ID NO: 1243202
gcaugaacacucgaucuaa

SEQ ID NO: 1401063 - RNA, 19 nt, Artificial Sequence
  Description of Artificial Sequence: Synthetic oligonucleotide
  Antisense strand to SEQ ID NO: 1401062
uuagaucgaguguucaugc

SEQ ID NO: 1401064 - RNA, 19 nt, Artificial Sequence
  Description of Artificial Sequence: Synthetic oligonucleotide
  Sense strand starting at position 2333 of SEQ ID NO: 1243202
gggagugguuucuucuagu

SEQ ID NO: 1401065 - RNA, 19 nt, Artificial Sequence
  Description of Artificial Sequence: Synthetic oligonucleotide
  Antisense strand to SEQ ID NO: 1401064
acuagaagaaaccacuccc

SEQ ID NO: 1401066 - RNA, 19 nt, Artificial Sequence
  Description of Artificial Sequence: Synthetic oligonucleotide
  Sense strand starting at position 2588 of SEQ ID NO: 1243202
gcaggagucuugcuuuguu

SEQ ID NO: 1401067 - RNA, 19 nt, Artificial Sequence
  Description of Artificial Sequence: Synthetic oligonucleotide
  Antisense strand to SEQ ID NO: 1401066
aacaaagcaagacuccugc

SEQ ID NO: 1401068 - RNA, 19 nt, Artificial Sequence
  Description of Artificial Sequence: Synthetic oligonucleotide
  Sense strand starting at position 2895 of SEQ ID NO: 1243202
cuuccaugaggccagaauu

SEQ ID NO: 1401069 - RNA, 19 nt, Artificial Sequence
  Description of Artificial Sequence: Synthetic oligonucleotide
  Antisense strand to SEQ ID NO: 1401068
aauucuggccucauggaag

SEQ ID NO: 1401070 - RNA, 19 nt, Artificial Sequence
  Description of Artificial Sequence: Synthetic oligonucleotide
  Sense strand starting at position 2906 of SEQ ID NO: 1243202
ccagaauuauucugcugug

SEQ ID NO: 1401071 - RNA, 19 nt, Artificial Sequence
  Description of Artificial Sequence: Synthetic oligonucleotide
  Antisense strand to SEQ ID NO: 1401070
cacagcagaauaauucugg

SEQ ID NO: 1401072 - RNA, 19 nt, Artificial Sequence
  Description of Artificial Sequence: Synthetic oligonucleotide
  Sense strand starting at position 2942 of SEQ ID NO: 1243202
ggagugacggcgugaguua

SEQ ID NO: 1401073 - RNA, 19 nt, Artificial Sequence
  Description of Artificial Sequence: Synthetic oligonucleotide
  Antisense strand to SEQ ID NO: 1401072
uaacucacgccgucacucc

SEQ ID NO: 1401074 - RNA, 19 nt, Artificial Sequence
  Description of Artificial Sequence: Synthetic oligonucleotide
  Sense strand starting at position 2943 of SEQ ID NO: 1243202
gagugacggcgugaguuau

SEQ ID NO: 1401075 - RNA, 19 nt, Artificial Sequence
  Description of Artificial Sequence: Synthetic oligonucleotide
  Antisense strand to SEQ ID NO: 1401074
auaacucacgccgucacuc

SEQ ID NO: 1401076 - RNA, 19 nt, Artificial Sequence
  Description of Artificial Sequence: Synthetic oligonucleotide
  Sense strand starting at position 2944 of SEQ ID NO: 1243202
agugacggcgugaguuauu

SEQ ID NO: 1401077 - RNA, 19 nt, Artificial Sequence
  Description of Artificial Sequence: Synthetic oligonucleotide
  Antisense strand to SEQ ID NO: 1401076
aauaacucacgccgucacu

SEQ ID NO: 1401078 - RNA, 19 nt, Artificial Sequence
  Description of Artificial Sequence: Synthetic oligonucleotide
  Sense strand starting at position 2994 of SEQ ID NO: 1243202
gugaguuacuguggcggaa

SEQ ID NO: 1401079 - RNA, 19 nt, Artificial Sequence
  Description of Artificial Sequence: Synthetic oligonucleotide
  Antisense strand to SEQ ID NO: 1401078
uuccgccacaguaacucac

SEQ ID NO: 1401080 - RNA, 19 nt, Artificial Sequence
  Description of Artificial Sequence: Synthetic oligonucleotide
  Sense strand starting at position 2996 of SEQ ID NO: 1243202
gaguuacuguggcggaauu

SEQ ID NO: 1401081 - RNA, 19 nt, Artificial Sequence
  Description of Artificial Sequence: Synthetic oligonucleotide
  Antisense strand to SEQ ID NO: 1401080
aauuccgccacaguaacuc

SEQ ID NO: 1401082 - RNA, 19 nt, Artificial Sequence
  Description of Artificial Sequence: Synthetic oligonucleotide
  Sense strand starting at position 2998 of SEQ ID NO: 1243202
guuacuguggcggaauuca

SEQ ID NO: 1401083 - RNA, 19 nt, Artificial Sequence
  Description of Artificial Sequence: Synthetic oligonucleotide
  Antisense strand to SEQ ID NO: 1401082
ugaauuccgccacaguaac

SEQ ID NO: 1401084 - RNA, 19 nt, Artificial Sequence
  Description of Artificial Sequence: Synthetic oligonucleotide
  Sense strand starting at position 3006 of SEQ ID NO: 1243202
ggcggaauucagugggcau

SEQ ID NO: 1401085 - RNA, 19 nt, Artificial Sequence
  Description of Artificial Sequence: Synthetic oligonucleotide
  Antisense strand to SEQ ID NO: 1401084
augcccacugaauuccgcc

SEQ ID NO: 1401086 - RNA, 19 nt, Artificial Sequence
  Description of Artificial Sequence: Synthetic oligonucleotide
  Sense strand starting at position 3218 of SEQ ID NO: 1243202
ugccauugguggugggaga

SEQ ID NO: 1401087 - RNA, 19 nt, Artificial Sequence
  Description of Artificial Sequence: Synthetic oligonucleotide
  Antisense strand to SEQ ID NO: 1401086
ucucccaccaccaauggca

SEQ ID NO: 1401088 - RNA, 19 nt, Artificial Sequence
  Description of Artificial Sequence: Synthetic oligonucleotide
  Sense strand starting at position 3317 of SEQ ID NO: 1243202
ugggauuccugggaauuug

SEQ ID NO: 1401089 - RNA, 19 nt, Artificial Sequence
  Description of Artificial Sequence: Synthetic oligonucleotide
  Antisense strand to SEQ ID NO: 1401088
caaauucccaggaauccca

SEQ ID NO: 1401090 - RNA, 19 nt, Artificial Sequence
  Description of Artificial Sequence: Synthetic oligonucleotide
  Sense strand starting at position 3524 of SEQ ID NO: 1243202
gccagaaggugucugagau

SEQ ID NO: 1401091 - RNA, 19 nt, Artificial Sequence
  Description of Artificial Sequence: Synthetic oligonucleotide
  Antisense strand to SEQ ID NO: 1401090
aucucagacaccuucuggc

SEQ ID NO: 1401092 - RNA, 19 nt, Artificial Sequence
  Description of Artificial Sequence: Synthetic oligonucleotide
  Sense strand starting at position 3525 of SEQ ID NO: 1243202
ccagaaggugucugagaug

SEQ ID NO: 1401093 - RNA, 19 nt, Artificial Sequence
  Description of Artificial Sequence: Synthetic oligonucleotide
  Antisense strand to SEQ ID NO: 1401092
caucucagacaccuucugg

SEQ ID NO: 1401094 - RNA, 19 nt, Artificial Sequence
  Description of Artificial Sequence: Synthetic oligonucleotide
  Sense strand starting at position 3556 of SEQ ID NO: 1243202
ucaguuuagagguguaucu

SEQ ID NO: 1401095 - RNA, 19 nt, Artificial Sequence
  Description of Artificial Sequence: Synthetic oligonucleotide
  Antisense strand to SEQ ID NO: 1401094
agauacaccucuaaacuga

SEQ ID NO: 1401096 - RNA, 19 nt, Artificial Sequence
  Description of Artificial Sequence: Synthetic oligonucleotide
  Sense strand starting at position 3563 of SEQ ID NO: 1243202
agagguguaucuugccaag

SEQ ID NO: 1401097 - RNA, 19 nt, Artificial Sequence
  Description of Artificial Sequence: Synthetic oligonucleotide
  Antisense strand to SEQ ID NO: 1401096
cuuggcaagauacaccucu

SEQ ID NO: 1401098 - RNA, 19 nt, Artificial Sequence
  Description of Artificial Sequence: Synthetic oligonucleotide
  Sense strand starting at position 3565 of SEQ ID NO: 1243202
agguguaucuugccaaggu

SEQ ID NO: 1401099 - RNA, 19 nt, Artificial Sequence
  Description of Artificial Sequence: Synthetic oligonucleotide
  Antisense strand to SEQ ID NO: 1401098
accuuggcaagauacaccu

SEQ ID NO: 1401100 - RNA, 19 nt, Artificial Sequence
  Description of Artificial Sequence: Synthetic oligonucleotide
  Sense strand starting at position 3566 of SEQ ID NO: 1243202
gguguaucuugccaagguu

SEQ ID NO: 1401101 - RNA, 19 nt, Artificial Sequence
  Description of Artificial Sequence: Synthetic oligonucleotide
  Antisense strand to SEQ ID NO: 1401100
aaccuuggcaagauacacc

SEQ ID NO: 1401102 - RNA, 19 nt, Artificial Sequence
  Description of Artificial Sequence: Synthetic oligonucleotide
  Sense strand starting at position 3569 of SEQ ID NO: 1243202
guaucuugccaagguuaag

SEQ ID NO: 1401103 - RNA, 19 nt, Artificial Sequence
  Description of Artificial Sequence: Synthetic oligonucleotide
  Antisense strand to SEQ ID NO: 1401102
cuuaaccuuggcaagauac

SEQ ID NO: 1401104 - RNA, 19 nt, Artificial Sequence
  Description of Artificial Sequence: Synthetic oligonucleotide
  Sense strand starting at position 21 of SEQ ID NO: 1243203
aggcaugacucugagggua

SEQ ID NO: 1401105 - RNA, 19 nt, Artificial Sequence
  Description of Artificial Sequence: Synthetic oligonucleotide
  Antisense strand to SEQ ID NO: 1401104
uacccucagagucaugccu

SEQ ID NO: 1401106 - RNA, 19 nt, Artificial Sequence
  Description of Artificial Sequence: Synthetic oligonucleotide
  Sense strand starting at position 24 of SEQ ID NO: 1243203
caugacucugaggguaaau

SEQ ID NO: 1401107 - RNA, 19 nt, Artificial Sequence
  Description of Artificial Sequence: Synthetic oligonucleotide
  Antisense strand to SEQ ID NO: 1401106
auuuacccucagagucaug

SEQ ID NO: 1401108 - RNA, 19 nt, Artificial Sequence
  Description of Artificial Sequence: Synthetic oligonucleotide
  Sense strand starting at position 33 of SEQ ID NO: 1243203
gaggguaaauucuaggaag

SEQ ID NO: 1401109 - RNA, 19 nt, Artificial Sequence
  Description of Artificial Sequence: Synthetic oligonucleotide
  Antisense strand to SEQ ID NO: 1401108
cuuccuagaauuuacccuc

SEQ ID NO: 1401110 - RNA, 19 nt, Artificial Sequence
  Description of Artificial Sequence: Synthetic oligonucleotide
  Sense strand starting at position 36 of SEQ ID NO: 1243203
gguaaauucuaggaaggca

SEQ ID NO: 1401111 - RNA, 19 nt, Artificial Sequence
  Description of Artificial Sequence: Synthetic oligonucleotide
  Antisense strand to SEQ ID NO: 1401110
ugccuuccuagaauuuacc

SEQ ID NO: 1401112 - RNA, 19 nt, Artificial Sequence
  Description of Artificial Sequence: Synthetic oligonucleotide
  Sense strand starting at position 71 of SEQ ID NO: 1243203
gggccagcggugugauuaa

SEQ ID NO: 1401113 - RNA, 19 nt, Artificial Sequence
  Description of Artificial Sequence: Synthetic oligonucleotide
  Antisense strand to SEQ ID NO: 1401112
uuaaucacaccgcuggccc

SEQ ID NO: 1401114 - RNA, 19 nt, Artificial Sequence
  Description of Artificial Sequence: Synthetic oligonucleotide
  Sense strand starting at position 82 of SEQ ID NO: 1243203
gugauuaaagaauguacau

SEQ ID NO: 1401115 - RNA, 19 nt, Artificial Sequence
  Description of Artificial Sequence: Synthetic oligonucleotide
  Antisense strand to SEQ ID NO: 1401114
auguacauucuuuaaucac

SEQ ID NO: 1401116 - RNA, 19 nt, Artificial Sequence
  Description of Artificial Sequence: Synthetic oligonucleotide
  Sense strand starting at position 89 of SEQ ID NO: 1243203
aagaauguacaugguagua

SEQ ID NO: 1401117 - RNA, 19 nt, Artificial Sequence
  Description of Artificial Sequence: Synthetic oligonucleotide
  Antisense strand to SEQ ID NO: 1401116
uacuaccauguacauucuu

SEQ ID NO: 1401118 - RNA, 19 nt, Artificial Sequence
  Description of Artificial Sequence: Synthetic oligonucleotide
  Sense strand starting at position 91 of SEQ ID NO: 1243203
gaauguacaugguaguaga

SEQ ID NO: 1401119 - RNA, 19 nt, Artificial Sequence
  Description of Artificial Sequence: Synthetic oligonucleotide
  Antisense strand to SEQ ID NO: 1401118
ucuacuaccauguacauuc

SEQ ID NO: 1401120 - RNA, 19 nt, Artificial Sequence
  Description of Artificial Sequence: Synthetic oligonucleotide
  Sense strand starting at position 102 of SEQ ID NO: 1243203
guaguagagggaugcagau

SEQ ID NO: 1401121 - RNA, 19 nt, Artificial Sequence
  Description of Artificial Sequence: Synthetic oligonucleotide
  Antisense strand to SEQ ID NO: 1401120
aucugcaucccucuacuac

SEQ ID NO: 1401122 - RNA, 19 nt, Artificial Sequence
  Description of Artificial Sequence: Synthetic oligonucleotide
  Sense strand starting at position 161 of SEQ ID NO: 1243203
ugggaaacaugauagaauu

SEQ ID NO: 1401123 - RNA, 19 nt, Artificial Sequence
  Description of Artificial Sequence: Synthetic oligonucleotide
  Antisense strand to SEQ ID NO: 1401122
aauucuaucauguuuccca

SEQ ID NO: 1401124 - RNA, 19 nt, Artificial Sequence
  Description of Artificial Sequence: Synthetic oligonucleotide
  Sense strand starting at position 742 of SEQ ID NO: 1243203
aagacaagguaguaaucua

SEQ ID NO: 1401125 - RNA, 19 nt, Artificial Sequence
  Description of Artificial Sequence: Synthetic oligonucleotide
  Antisense strand to SEQ ID NO: 1401124
uagauuacuaccuugucuu

SEQ ID NO: 1401126 - RNA, 19 nt, Artificial Sequence
  Description of Artificial Sequence: Synthetic oligonucleotide
  Sense strand starting at position 750 of SEQ ID NO: 1243203
guaguaaucuaagucauaa

SEQ ID NO: 1401127 - RNA, 19 nt, Artificial Sequence
  Description of Artificial Sequence: Synthetic oligonucleotide
  Antisense strand to SEQ ID NO: 1401126
uuaugacuuagauuacuac

SEQ ID NO: 1401128 - RNA, 19 nt, Artificial Sequence
  Description of Artificial Sequence: Synthetic oligonucleotide
  Sense strand starting at position 761 of SEQ ID NO: 1243203
agucauaaagauggugcua

SEQ ID NO: 1401129 - RNA, 19 nt, Artificial Sequence
  Description of Artificial Sequence: Synthetic oligonucleotide
  Antisense strand to SEQ ID NO: 1401128
uagcaccaucuuuaugacu

SEQ ID NO: 1401130 - RNA, 19 nt, Artificial Sequence
  Description of Artificial Sequence: Synthetic oligonucleotide
  Sense strand starting at position 772 of SEQ ID NO: 1243203
uggugcuacugggugaaua

SEQ ID NO: 1401131 - RNA, 19 nt, Artificial Sequence
  Description of Artificial Sequence: Synthetic oligonucleotide
  Antisense strand to SEQ ID NO: 1401130
uauucacccaguagcacca

SEQ ID NO: 1401132 - RNA, 19 nt, Artificial Sequence
  Description of Artificial Sequence: Synthetic oligonucleotide
  Sense strand starting at position 774 of SEQ ID NO: 1243203
gugcuacugggugaauacu

SEQ ID NO: 1401133 - RNA, 19 nt, Artificial Sequence
  Description of Artificial Sequence: Synthetic oligonucleotide
  Antisense strand to SEQ ID NO: 1401132
aguauucacccaguagcac

SEQ ID NO: 1401134 - RNA, 19 nt, Artificial Sequence
  Description of Artificial Sequence: Synthetic oligonucleotide
  Sense strand starting at position 802 of SEQ ID NO: 1243203
agcuguaaguuguguggga

SEQ ID NO: 1401135 - RNA, 19 nt, Artificial Sequence
  Description of Artificial Sequence: Synthetic oligonucleotide
  Antisense strand to SEQ ID NO: 1401134
ucccacacaacuuacagcu

SEQ ID NO: 1401136 - RNA, 19 nt, Artificial Sequence
  Description of Artificial Sequence: Synthetic oligonucleotide
  Sense strand starting at position 852 of SEQ ID NO: 1243203
gccgaucuuggguaacuga

SEQ ID NO: 1401137 - RNA, 19 nt, Artificial Sequence
  Description of Artificial Sequence: Synthetic oligonucleotide
  Antisense strand to SEQ ID NO: 1401136
ucaguuacccaagaucggc

SEQ ID NO: 1401138 - RNA, 19 nt, Artificial Sequence
  Description of Artificial Sequence: Synthetic oligonucleotide
  Sense strand starting at position 986 of SEQ ID NO: 1243203
gggcauguguggucuggga

SEQ ID NO: 1401139 - RNA, 19 nt, Artificial Sequence
  Description of Artificial Sequence: Synthetic oligonucleotide
  Antisense strand to SEQ ID NO: 1401138
ucccagaccacacaugccc

SEQ ID NO: 1401140 - RNA, 19 nt, Artificial Sequence
  Description of Artificial Sequence: Synthetic oligonucleotide
  Sense strand starting at position 988 of SEQ ID NO: 1243203
gcauguguggucugggaca

SEQ ID NO: 1401141 - RNA, 19 nt, Artificial Sequence
  Description of Artificial Sequence: Synthetic oligonucleotide
  Antisense strand to SEQ ID NO: 1401140
ugucccagaccacacaugc

SEQ ID NO: 1401142 - RNA, 19 nt, Artificial Sequence
  Description of Artificial Sequence: Synthetic oligonucleotide
  Sense strand starting at position 1181 of SEQ ID NO: 1243203
guguaagggugugccuuua

SEQ ID NO: 1401143 - RNA, 19 nt, Artificial Sequence
  Description of Artificial Sequence: Synthetic oligonucleotide
  Antisense strand to SEQ ID NO: 1401142
uaaaggcacacccuuacac

SEQ ID NO: 1401144 - RNA, 19 nt, Artificial Sequence
  Description of Artificial Sequence: Synthetic oligonucleotide
  Sense strand starting at position 2031 of SEQ ID NO: 1243203
cgucaagucagaugccgua

SEQ ID NO: 1401145 - RNA, 19 nt, Artificial Sequence
  Description of Artificial Sequence: Synthetic oligonucleotide
  Antisense strand to SEQ ID NO: 1401144
uacggcaucugacuugacg

SEQ ID NO: 1401146 - RNA, 19 nt, Artificial Sequence
  Description of Artificial Sequence: Synthetic oligonucleotide
  Sense strand starting at position 2225 of SEQ ID NO: 1243203
cgggaagucgcaugcguau

SEQ ID NO: 1401147 - RNA, 19 nt, Artificial Sequence
  Description of Artificial Sequence: Synthetic oligonucleotide
  Antisense strand to SEQ ID NO: 1401146
auacgcaugcgacuucccg

SEQ ID NO: 1401148 - RNA, 19 nt, Artificial Sequence
  Description of Artificial Sequence: Synthetic oligonucleotide
  Sense strand starting at position 2249 of SEQ ID NO: 1243203
ccaguaagguucugccaga

SEQ ID NO: 1401149 - RNA, 19 nt, Artificial Sequence
  Description of Artificial Sequence: Synthetic oligonucleotide
  Antisense strand to SEQ ID NO: 1401148
ucuggcagaaccuuacugg

SEQ ID NO: 1401150 - RNA, 19 nt, Artificial Sequence
  Description of Artificial Sequence: Synthetic oligonucleotide
  Sense strand starting at position 2250 of SEQ ID NO: 1243203
caguaagguucugccagaa

SEQ ID NO: 1401151 - RNA, 19 nt, Artificial Sequence
  Description of Artificial Sequence: Synthetic oligonucleotide
  Antisense strand to SEQ ID NO: 1401150
uucuggcagaaccuuacug

SEQ ID NO: 1401152 - RNA, 19 nt, Artificial Sequence
  Description of Artificial Sequence: Synthetic oligonucleotide
  Sense strand starting at position 2299 of SEQ ID NO: 1243203
gcaggaaccaaccgagauu

SEQ ID NO: 1401153 - RNA, 19 nt, Artificial Sequence
  Description of Artificial Sequence: Synthetic oligonucleotide
  Antisense strand to SEQ ID NO: 1401152
aaucucgguugguuccugc

SEQ ID NO: 1401154 - RNA, 19 nt, Artificial Sequence
  Description of Artificial Sequence: Synthetic oligonucleotide
  Sense strand starting at position 144 of SEQ ID NO: 1243204
gagcgagacucugcuugaa

SEQ ID NO: 1401155 - RNA, 19 nt, Artificial Sequence
  Description of Artificial Sequence: Synthetic oligonucleotide
  Antisense strand to SEQ ID NO: 1401154
uucaagcagagucucgcuc

SEQ ID NO: 1401156 - RNA, 19 nt, Artificial Sequence
  Description of Artificial Sequence: Synthetic oligonucleotide
  Sense strand starting at position 447 of SEQ ID NO: 1243204
agcggagagucugucucaa

SEQ ID NO: 1401157 - RNA, 19 nt, Artificial Sequence
  Description of Artificial Sequence: Synthetic oligonucleotide
  Antisense strand to SEQ ID NO: 1401156
uugagacagacucuccgcu

SEQ ID NO: 1401158 - RNA, 19 nt, Artificial Sequence
  Description of Artificial Sequence: Synthetic oligonucleotide
  Sense strand starting at position 858 of SEQ ID NO: 1243204
gggauuaucuuguuuacuu

SEQ ID NO: 1401159 - RNA, 19 nt, Artificial Sequence
  Description of Artificial Sequence: Synthetic oligonucleotide
  Antisense strand to SEQ ID NO: 1401158
aaguaaacaagauaauccc

SEQ ID NO: 1401160 - RNA, 19 nt, Artificial Sequence
  Description of Artificial Sequence: Synthetic oligonucleotide
  Sense strand starting at position 859 of SEQ ID NO: 1243204
ggauuaucuuguuuacuua

SEQ ID NO: 1401161 - RNA, 19 nt, Artificial Sequence
  Description of Artificial Sequence: Synthetic oligonucleotide
  Antisense strand to SEQ ID NO: 1401160
uaaguaaacaagauaaucc

SEQ ID NO: 1401162 - RNA, 19 nt, Artificial Sequence
  Description of Artificial Sequence: Synthetic oligonucleotide
  Sense strand starting at position 1485 of SEQ ID NO: 1243204
gagcaagggugucgauaca

SEQ ID NO: 1401163 - RNA, 19 nt, Artificial Sequence
  Description of Artificial Sequence: Synthetic oligonucleotide
  Antisense strand to SEQ ID NO: 1401162
uguaucgacacccuugcuc

SEQ ID NO: 1401164 - RNA, 19 nt, Artificial Sequence
  Description of Artificial Sequence: Synthetic oligonucleotide
  Sense strand starting at position 1496 of SEQ ID NO: 1243204
ucgauacagcuuuaucuac

SEQ ID NO: 1401165 - RNA, 19 nt, Artificial Sequence
  Description of Artificial Sequence: Synthetic oligonucleotide
  Antisense strand to SEQ ID NO: 1401164
guagauaaagcuguaucga

SEQ ID NO: 1401166 - RNA, 19 nt, Artificial Sequence
  Description of Artificial Sequence: Synthetic oligonucleotide
  Sense strand starting at position 1517 of SEQ ID NO: 1243204
acuguuacacauuguauua

SEQ ID NO: 1401167 - RNA, 19 nt, Artificial Sequence
  Description of Artificial Sequence: Synthetic oligonucleotide
  Antisense strand to SEQ ID NO: 1401166
uaauacaauguguaacagu

SEQ ID NO: 1401168 - RNA, 19 nt, Artificial Sequence
  Description of Artificial Sequence: Synthetic oligonucleotide
  Sense strand starting at position 1528 of SEQ ID NO: 1243204
uuguauuaaugcgcugcua

SEQ ID NO: 1401169 - RNA, 19 nt, Artificial Sequence
  Description of Artificial Sequence: Synthetic oligonucleotide
  Antisense strand to SEQ ID NO: 1401168
uagcagcgcauuaauacaa

SEQ ID NO: 1401170 - RNA, 19 nt, Artificial Sequence
  Description of Artificial Sequence: Synthetic oligonucleotide
  Sense strand starting at position 1530 of SEQ ID NO: 1243204
guauuaaugcgcugcuacu

SEQ ID NO: 1401171 - RNA, 19 nt, Artificial Sequence
  Description of Artificial Sequence: Synthetic oligonucleotide
  Antisense strand to SEQ ID NO: 1401170
aguagcagcgcauuaauac

SEQ ID NO: 1401172 - RNA, 19 nt, Artificial Sequence
  Description of Artificial Sequence: Synthetic oligonucleotide
  Sense strand starting at position 1541 of SEQ ID NO: 1243204
cugcuacuguaaugaaauu

SEQ ID NO: 1401173 - RNA, 19 nt, Artificial Sequence
  Description of Artificial Sequence: Synthetic oligonucleotide
  Antisense strand to SEQ ID NO: 1401172
aauuucauuacaguagcag

SEQ ID NO: 1401174 - RNA, 19 nt, Artificial Sequence
  Description of Artificial Sequence: Synthetic oligonucleotide
  Sense strand starting at position 2246 of SEQ ID NO: 1243204
agauauguauccuccucuu

SEQ ID NO: 1401175 - RNA, 19 nt, Artificial Sequence
  Description of Artificial Sequence: Synthetic oligonucleotide
  Antisense strand to SEQ ID NO: 1401174
aagaggaggauacauaucu

SEQ ID NO: 1401176 - RNA, 19 nt, Artificial Sequence
  Description of Artificial Sequence: Synthetic oligonucleotide
  Sense strand starting at position 2338 of SEQ ID NO: 1243204
ggccauuagucccggauua

SEQ ID NO: 1401177 - RNA, 19 nt, Artificial Sequence
  Description of Artificial Sequence: Synthetic oligonucleotide
  Antisense strand to SEQ ID NO: 1401176
uaauccgggacuaauggcc

SEQ ID NO: 1401178 - RNA, 19 nt, Artificial Sequence
  Description of Artificial Sequence: Synthetic oligonucleotide
  Sense strand starting at position 2339 of SEQ ID NO: 1243204
gccauuagucccggauuau

SEQ ID NO: 1401179 - RNA, 19 nt, Artificial Sequence
  Description of Artificial Sequence: Synthetic oligonucleotide
  Antisense strand to SEQ ID NO: 1401178
auaauccgggacuaauggc

SEQ ID NO: 1401180 - RNA, 19 nt, Artificial Sequence
  Description of Artificial Sequence: Synthetic oligonucleotide
  Sense strand starting at position 2340 of SEQ ID NO: 1243204
ccauuagucccggauuauc

SEQ ID NO: 1401181 - RNA, 19 nt, Artificial Sequence
  Description of Artificial Sequence: Synthetic oligonucleotide
  Antisense strand to SEQ ID NO: 1401180
gauaauccgggacuaaugg

SEQ ID NO: 1401182 - RNA, 19 nt, Artificial Sequence
  Description of Artificial Sequence: Synthetic oligonucleotide
  Sense strand starting at position 2454 of SEQ ID NO: 1243204
aagugccuucgggaggaua

SEQ ID NO: 1401183 - RNA, 19 nt, Artificial Sequence
  Description of Artificial Sequence: Synthetic oligonucleotide
  Antisense strand to SEQ ID NO: 1401182
uauccucccgaaggcacuu

SEQ ID NO: 1401184 - RNA, 19 nt, Artificial Sequence
  Description of Artificial Sequence: Synthetic oligonucleotide
  Sense strand starting at position 2496 of SEQ ID NO: 1243204
cgaauuacagcucggacuu

SEQ ID NO: 1401185 - RNA, 19 nt, Artificial Sequence
  Description of Artificial Sequence: Synthetic oligonucleotide
  Antisense strand to SEQ ID NO: 1401184
aaguccgagcuguaauucg

SEQ ID NO: 1401186 - RNA, 19 nt, Artificial Sequence
  Description of Artificial Sequence: Synthetic oligonucleotide
  Sense strand starting at position 2879 of SEQ ID NO: 1243204
uugguucuuuaugaucagu

SEQ ID NO: 1401187 - RNA, 19 nt, Artificial Sequence
  Description of Artificial Sequence: Synthetic oligonucleotide
  Antisense strand to SEQ ID NO: 1401186
acugaucauaaagaaccaa

SEQ ID NO: 1401188 - RNA, 19 nt, Artificial Sequence
  Description of Artificial Sequence: Synthetic oligonucleotide
  Sense strand starting at position 2881 of SEQ ID NO: 1243204
gguucuuuaugaucaguac

SEQ ID NO: 1401189 - RNA, 19 nt, Artificial Sequence
  Description of Artificial Sequence: Synthetic oligonucleotide
  Antisense strand to SEQ ID NO: 1401188
guacugaucauaaagaacc

SEQ ID NO: 1401190 - RNA, 19 nt, Artificial Sequence
  Description of Artificial Sequence: Synthetic oligonucleotide
  Sense strand starting at position 2882 of SEQ ID NO: 1243204
guucuuuaugaucaguaca

SEQ ID NO: 1401191 - RNA, 19 nt, Artificial Sequence
  Description of Artificial Sequence: Synthetic oligonucleotide
  Antisense strand to SEQ ID NO: 1401190
uguacugaucauaaagaac

SEQ ID NO: 1401192 - RNA, 19 nt, Artificial Sequence
  Description of Artificial Sequence: Synthetic oligonucleotide
  Sense strand starting at position 2884 of SEQ ID NO: 1243204
ucuuuaugaucaguacaug

SEQ ID NO: 1401193 - RNA, 19 nt, Artificial Sequence
  Description of Artificial Sequence: Synthetic oligonucleotide
  Antisense strand to SEQ ID NO: 1401192
cauguacugaucauaaaga

SEQ ID NO: 1401194 - RNA, 19 nt, Artificial Sequence
  Description of Artificial Sequence: Synthetic oligonucleotide
  Sense strand starting at position 2890 of SEQ ID NO: 1243204
ugaucaguacaugauaugu

SEQ ID NO: 1401195 - RNA, 19 nt, Artificial Sequence
  Description of Artificial Sequence: Synthetic oligonucleotide
  Antisense strand to SEQ ID NO: 1401194
acauaucauguacugauca

SEQ ID NO: 1401196 - RNA, 19 nt, Artificial Sequence
  Description of Artificial Sequence: Synthetic oligonucleotide
  Sense strand starting at position 2895 of SEQ ID NO: 1243204
aguacaugauauguuugua

SEQ ID NO: 1401197 - RNA, 19 nt, Artificial Sequence
  Description of Artificial Sequence: Synthetic oligonucleotide
  Antisense strand to SEQ ID NO: 1401196
uacaaacauaucauguacu

SEQ ID NO: 1401198 - RNA, 19 nt, Artificial Sequence
  Description of Artificial Sequence: Synthetic oligonucleotide
  Sense strand starting at position 2926 of SEQ ID NO: 1243204
cagggcaaguggucaauua

SEQ ID NO: 1401199 - RNA, 19 nt, Artificial Sequence
  Description of Artificial Sequence: Synthetic oligonucleotide
  Antisense strand to SEQ ID NO: 1401198
uaauugaccacuugcccug

SEQ ID NO: 1401200 - RNA, 19 nt, Artificial Sequence
  Description of Artificial Sequence: Synthetic oligonucleotide
  Sense strand starting at position 2927 of SEQ ID NO: 1243204
agggcaaguggucaauuaa

SEQ ID NO: 1401201 - RNA, 19 nt, Artificial Sequence
  Description of Artificial Sequence: Synthetic oligonucleotide
  Antisense strand to SEQ ID NO: 1401200
uuaauugaccacuugcccu

SEQ ID NO: 1401202 - RNA, 19 nt, Artificial Sequence
  Description of Artificial Sequence: Synthetic oligonucleotide
  Sense strand starting at position 2937 of SEQ ID NO: 1243204
gucaauuaacguuacuauc

SEQ ID NO: 1401203 - RNA, 19 nt, Artificial Sequence
  Description of Artificial Sequence: Synthetic oligonucleotide
  Antisense strand to SEQ ID NO: 1401202
gauaguaacguuaauugac

SEQ ID NO: 1401204 - RNA, 19 nt, Artificial Sequence
  Description of Artificial Sequence: Synthetic oligonucleotide
  Sense strand starting at position 2986 of SEQ ID NO: 1243204
cucugauacucauagucau

SEQ ID NO: 1401205 - RNA, 19 nt, Artificial Sequence
  Description of Artificial Sequence: Synthetic oligonucleotide
  Antisense strand to SEQ ID NO: 1401204
augacuaugaguaucagag

SEQ ID NO: 1401206 - RNA, 19 nt, Artificial Sequence
  Description of Artificial Sequence: Synthetic oligonucleotide
  Sense strand starting at position 2989 of SEQ ID NO: 1243204
ugauacucauagucauuau

SEQ ID NO: 1401207 - RNA, 19 nt, Artificial Sequence
  Description of Artificial Sequence: Synthetic oligonucleotide
  Antisense strand to SEQ ID NO: 1401206
auaaugacuaugaguauca

SEQ ID NO: 1401208 - RNA, 19 nt, Artificial Sequence
  Description of Artificial Sequence: Synthetic oligonucleotide
  Sense strand starting at position 3063 of SEQ ID NO: 1243204
gucugaugccaccaagcua

SEQ ID NO: 1401209 - RNA, 19 nt, Artificial Sequence
  Description of Artificial Sequence: Synthetic oligonucleotide
  Antisense strand to SEQ ID NO: 1401208
uagcuugguggcaucagac

SEQ ID NO: 1401210 - RNA, 19 nt, Artificial Sequence
  Description of Artificial Sequence: Synthetic oligonucleotide
  Sense strand starting at position 3094 of SEQ ID NO: 1243204
uuaugaguuuauuccuuga

SEQ ID NO: 1401211 - RNA, 19 nt, Artificial Sequence
  Description of Artificial Sequence: Synthetic oligonucleotide
  Antisense strand to SEQ ID NO: 1401210
ucaaggaauaaacucauaa

SEQ ID NO: 1401212 - RNA, 19 nt, Artificial Sequence
  Description of Artificial Sequence: Synthetic oligonucleotide
  Sense strand starting at position 3096 of SEQ ID NO: 1243204
augaguuuauuccuugagu

SEQ ID NO: 1401213 - RNA, 19 nt, Artificial Sequence
  Description of Artificial Sequence: Synthetic oligonucleotide
  Antisense strand to SEQ ID NO: 1401212
acucaaggaauaaacucau

SEQ ID NO: 1401214 - RNA, 19 nt, Artificial Sequence
  Description of Artificial Sequence: Synthetic oligonucleotide
  Sense strand starting at position 3097 of SEQ ID NO: 1243204
ugaguuuauuccuugaguc

SEQ ID NO: 1401215 - RNA, 19 nt, Artificial Sequence
  Description of Artificial Sequence: Synthetic oligonucleotide
  Antisense strand to SEQ ID NO: 1401214
gacucaaggaauaaacuca

SEQ ID NO: 1401216 - RNA, 19 nt, Artificial Sequence
  Description of Artificial Sequence: Synthetic oligonucleotide
  Sense strand starting at position 3098 of SEQ ID NO: 1243204
gaguuuauuccuugagucc

SEQ ID NO: 1401217 - RNA, 19 nt, Artificial Sequence
  Description of Artificial Sequence: Synthetic oligonucleotide
  Antisense strand to SEQ ID NO: 1401216
ggacucaaggaauaaacuc

SEQ ID NO: 1401218 - RNA, 19 nt, Artificial Sequence
  Description of Artificial Sequence: Synthetic oligonucleotide
  Sense strand starting at position 3521 of SEQ ID NO: 1243204
gagcuuucuugauggaaac

SEQ ID NO: 1401219 - RNA, 19 nt, Artificial Sequence
  Description of Artificial Sequence: Synthetic oligonucleotide
  Antisense strand to SEQ ID NO: 1401218
guuuccaucaagaaagcuc

SEQ ID NO: 1401220 - RNA, 19 nt, Artificial Sequence
  Description of Artificial Sequence: Synthetic oligonucleotide
  Sense strand starting at position 3534 of SEQ ID NO: 1243204
ggaaaccuguaguccagaa

SEQ ID NO: 1401221 - RNA, 19 nt, Artificial Sequence
  Description of Artificial Sequence: Synthetic oligonucleotide
  Antisense strand to SEQ ID NO: 1401220
uucuggacuacagguuucc

SEQ ID NO: 1401222 - RNA, 19 nt, Artificial Sequence
  Description of Artificial Sequence: Synthetic oligonucleotide
  Sense strand starting at position 3538 of SEQ ID NO: 1243204
accuguaguccagaaaccu

SEQ ID NO: 1401223 - RNA, 19 nt, Artificial Sequence
  Description of Artificial Sequence: Synthetic oligonucleotide
  Antisense strand to SEQ ID NO: 1401222
agguuucuggacuacaggu

SEQ ID NO: 1401224 - RNA, 19 nt, Artificial Sequence
  Description of Artificial Sequence: Synthetic oligonucleotide
  Sense strand starting at position 3594 of SEQ ID NO: 1243204
uuaggcaucugggaacaaa

SEQ ID NO: 1401225 - RNA, 19 nt, Artificial Sequence
  Description of Artificial Sequence: Synthetic oligonucleotide
  Antisense strand to SEQ ID NO: 1401224
uuuguucccagaugccuaa

SEQ ID NO: 1401226 - RNA, 19 nt, Artificial Sequence
  Description of Artificial Sequence: Synthetic oligonucleotide
  Sense strand starting at position 3699 of SEQ ID NO: 1243204
cuuagcuugcguucugcua

SEQ ID NO: 1401227 - RNA, 19 nt, Artificial Sequence
  Description of Artificial Sequence: Synthetic oligonucleotide
  Antisense strand to SEQ ID NO: 1401226
uagcagaacgcaagcuaag

SEQ ID NO: 1401228 - RNA, 19 nt, Artificial Sequence
  Description of Artificial Sequence: Synthetic oligonucleotide
  Sense strand starting at position 3700 of SEQ ID NO: 1243204
uuagcuugcguucugcuaa

SEQ ID NO: 1401229 - RNA, 19 nt, Artificial Sequence
  Description of Artificial Sequence: Synthetic oligonucleotide
  Antisense strand to SEQ ID NO: 1401228
uuagcagaacgcaagcuaa

SEQ ID NO: 1401230 - RNA, 19 nt, Artificial Sequence
  Description of Artificial Sequence: Synthetic oligonucleotide
  Sense strand starting at position 3714 of SEQ ID NO: 1243204
gcuaauugucaccacagca

SEQ ID NO: 1401231 - RNA, 19 nt, Artificial Sequence
  Description of Artificial Sequence: Synthetic oligonucleotide
  Antisense strand to SEQ ID NO: 1401230
ugcuguggugacaauuagc

SEQ ID NO: 1401232 - RNA, 19 nt, Artificial Sequence
  Description of Artificial Sequence: Synthetic oligonucleotide
  Sense strand starting at position 3746 of SEQ ID NO: 1243204
guugccauaucuccuauuu

SEQ ID NO: 1401233 - RNA, 19 nt, Artificial Sequence
  Description of Artificial Sequence: Synthetic oligonucleotide
  Antisense strand to SEQ ID NO: 1401232
aaauaggagauauggcaac

SEQ ID NO: 1401234 - RNA, 19 nt, Artificial Sequence
  Description of Artificial Sequence: Synthetic oligonucleotide
  Sense strand starting at position 606 of SEQ ID NO: 1243205
cgccguuagcuguuacauu

SEQ ID NO: 1401235 - RNA, 19 nt, Artificial Sequence
  Description of Artificial Sequence: Synthetic oligonucleotide
  Antisense strand to SEQ ID NO: 1401234
aauguaacagcuaacggcg

SEQ ID NO: 1401236 - RNA, 19 nt, Artificial Sequence
  Description of Artificial Sequence: Synthetic oligonucleotide
  Sense strand starting at position 607 of SEQ ID NO: 1243205
gccguuagcuguuacauua

SEQ ID NO: 1401237 - RNA, 19 nt, Artificial Sequence
  Description of Artificial Sequence: Synthetic oligonucleotide
  Antisense strand to SEQ ID NO: 1401236
uaauguaacagcuaacggc

SEQ ID NO: 1401238 - RNA, 19 nt, Artificial Sequence
  Description of Artificial Sequence: Synthetic oligonucleotide
  Sense strand starting at position 614 of SEQ ID NO: 1243205
gcuguuacauuauccuuau

SEQ ID NO: 1401239 - RNA, 19 nt, Artificial Sequence
  Description of Artificial Sequence: Synthetic oligonucleotide
  Antisense strand to SEQ ID NO: 1401238
auaaggauaauguaacagc

SEQ ID NO: 1401240 - RNA, 19 nt, Artificial Sequence
  Description of Artificial Sequence: Synthetic oligonucleotide
  Sense strand starting at position 626 of SEQ ID NO: 1243205
uccuuauuacuauguuagu

SEQ ID NO: 1401241 - RNA, 19 nt, Artificial Sequence
  Description of Artificial Sequence: Synthetic oligonucleotide
  Antisense strand to SEQ ID NO: 1401240
acuaacauaguaauaagga

SEQ ID NO: 1401242 - RNA, 19 nt, Artificial Sequence
  Description of Artificial Sequence: Synthetic oligonucleotide
  Sense strand starting at position 627 of SEQ ID NO: 1243205
ccuuauuacuauguuaguu

SEQ ID NO: 1401243 - RNA, 19 nt, Artificial Sequence
  Description of Artificial Sequence: Synthetic oligonucleotide
  Antisense strand to SEQ ID NO: 1401242
aacuaacauaguaauaagg

SEQ ID NO: 1401244 - RNA, 19 nt, Artificial Sequence
  Description of Artificial Sequence: Synthetic oligonucleotide
  Sense strand starting at position 687 of SEQ ID NO: 1243205
ggaacuuacgugugcagaa

SEQ ID NO: 1401245 - RNA, 19 nt, Artificial Sequence
  Description of Artificial Sequence: Synthetic oligonucleotide
  Antisense strand to SEQ ID NO: 1401244
uucugcacacguaaguucc

SEQ ID NO: 1401246 - RNA, 19 nt, Artificial Sequence
  Description of Artificial Sequence: Synthetic oligonucleotide
  Sense strand starting at position 720 of SEQ ID NO: 1243205
gcucaagaaccugaacuuu

SEQ ID NO: 1401247 - RNA, 19 nt, Artificial Sequence
  Description of Artificial Sequence: Synthetic oligonucleotide
  Antisense strand to SEQ ID NO: 1401246
aaaguucagguucuugagc

SEQ ID NO: 1401248 - RNA, 19 nt, Artificial Sequence
  Description of Artificial Sequence: Synthetic oligonucleotide
  Sense strand starting at position 903 of SEQ ID NO: 1243205
uggcuaacauauguauaua

SEQ ID NO: 1401249 - RNA, 19 nt, Artificial Sequence
  Description of Artificial Sequence: Synthetic oligonucleotide
  Antisense strand to SEQ ID NO: 1401248
uauauacauauguuagcca

SEQ ID NO: 1401250 - RNA, 19 nt, Artificial Sequence
  Description of Artificial Sequence: Synthetic oligonucleotide
  Sense strand starting at position 1990 of SEQ ID NO: 1243205
ugcgcauugccucagucua

SEQ ID NO: 1401251 - RNA, 19 nt, Artificial Sequence
  Description of Artificial Sequence: Synthetic oligonucleotide
  Antisense strand to SEQ ID NO: 1401250
uagacugaggcaaugcgca

SEQ ID NO: 1401252 - RNA, 19 nt, Artificial Sequence
  Description of Artificial Sequence: Synthetic oligonucleotide
  Sense strand starting at position 2119 of SEQ ID NO: 1243205
ggcguuaccgggagucuca

SEQ ID NO: 1401253 - RNA, 19 nt, Artificial Sequence
  Description of Artificial Sequence: Synthetic oligonucleotide
  Antisense strand to SEQ ID NO: 1401252
ugagacucccgguaacgcc

SEQ ID NO: 1401254 - RNA, 19 nt, Artificial Sequence
  Description of Artificial Sequence: Synthetic oligonucleotide
  Sense strand starting at position 2196 of SEQ ID NO: 1243205
ggcgauuucugcccuugau

SEQ ID NO: 1401255 - RNA, 19 nt, Artificial Sequence
  Description of Artificial Sequence: Synthetic oligonucleotide
  Antisense strand to SEQ ID NO: 1401254
aucaagggcagaaaucgcc

SEQ ID NO: 1401256 - RNA, 19 nt, Artificial Sequence
  Description of Artificial Sequence: Synthetic oligonucleotide
  Sense strand starting at position 2265 of SEQ ID NO: 1243205
uauggaguaggaugcuaaa

SEQ ID NO: 1401257 - RNA, 19 nt, Artificial Sequence
  Description of Artificial Sequence: Synthetic oligonucleotide
  Antisense strand to SEQ ID NO: 1401256
uuuagcauccuacuccaua

SEQ ID NO: 1401258 - RNA, 19 nt, Artificial Sequence
  Description of Artificial Sequence: Synthetic oligonucleotide
  Sense strand starting at position 2268 of SEQ ID NO: 1243205
ggaguaggaugcuaaauuc

SEQ ID NO: 1401259 - RNA, 19 nt, Artificial Sequence
  Description of Artificial Sequence: Synthetic oligonucleotide
  Antisense strand to SEQ ID NO: 1401258
gaauuuagcauccuacucc

SEQ ID NO: 1401260 - RNA, 19 nt, Artificial Sequence
  Description of Artificial Sequence: Synthetic oligonucleotide
  Sense strand starting at position 2346 of SEQ ID NO: 1243205
cugagaagcucguucccuu

SEQ ID NO: 1401261 - RNA, 19 nt, Artificial Sequence
  Description of Artificial Sequence: Synthetic oligonucleotide
  Antisense strand to SEQ ID NO: 1401260
aagggaacgagcuucucag

SEQ ID NO: 1401262 - RNA, 19 nt, Artificial Sequence
  Description of Artificial Sequence: Synthetic oligonucleotide
  Sense strand starting at position 2425 of SEQ ID NO: 1243205
ugacuugcccuccaugaau

SEQ ID NO: 1401263 - RNA, 19 nt, Artificial Sequence
  Description of Artificial Sequence: Synthetic oligonucleotide
  Antisense strand to SEQ ID NO: 1401262
auucauggagggcaaguca

SEQ ID NO: 1401264 - RNA, 19 nt, Artificial Sequence
  Description of Artificial Sequence: Synthetic oligonucleotide
  Sense strand starting at position 2427 of SEQ ID NO: 1243205
acuugcccuccaugaauga

SEQ ID NO: 1401265 - RNA, 19 nt, Artificial Sequence
  Description of Artificial Sequence: Synthetic oligonucleotide
  Antisense strand to SEQ ID NO: 1401264
ucauucauggagggcaagu

SEQ ID NO: 1401266 - RNA, 19 nt, Artificial Sequence
  Description of Artificial Sequence: Synthetic oligonucleotide
  Sense strand starting at position 2552 of SEQ ID NO: 1243205
cuauuaguuccagaacguu

SEQ ID NO: 1401267 - RNA, 19 nt, Artificial Sequence
  Description of Artificial Sequence: Synthetic oligonucleotide
  Antisense strand to SEQ ID NO: 1401266
aacguucuggaacuaauag

SEQ ID NO: 1401268 - RNA, 19 nt, Artificial Sequence
  Description of Artificial Sequence: Synthetic oligonucleotide
  Sense strand starting at position 3216 of SEQ ID NO: 1243205
aggcgaugcucaugcuuua

SEQ ID NO: 1401269 - RNA, 19 nt, Artificial Sequence
  Description of Artificial Sequence: Synthetic oligonucleotide
  Antisense strand to SEQ ID NO: 1401268
uaaagcaugagcaucgccu

SEQ ID NO: 1401270 - RNA, 19 nt, Artificial Sequence
  Description of Artificial Sequence: Synthetic oligonucleotide
  Sense strand starting at position 3700 of SEQ ID NO: 1243205
uccagccuugagugauacu

SEQ ID NO: 1401271 - RNA, 19 nt, Artificial Sequence
  Description of Artificial Sequence: Synthetic oligonucleotide
  Antisense strand to SEQ ID NO: 1401270
aguaucacucaaggcugga

SEQ ID NO: 1401272 - RNA, 19 nt, Artificial Sequence
  Description of Artificial Sequence: Synthetic oligonucleotide
  Sense strand starting at position 3759 of SEQ ID NO: 1243205
gccaacacaugugguuaau

SEQ ID NO: 1401273 - RNA, 19 nt, Artificial Sequence
  Description of Artificial Sequence: Synthetic oligonucleotide
  Antisense strand to SEQ ID NO: 1401272
auuaaccacauguguuggc

SEQ ID NO: 1401274 - RNA, 19 nt, Artificial Sequence
  Description of Artificial Sequence: Synthetic oligonucleotide
  Sense strand starting at position 3761 of SEQ ID NO: 1243205
caacacaugugguuaaugu

SEQ ID NO: 1401275 - RNA, 19 nt, Artificial Sequence
  Description of Artificial Sequence: Synthetic oligonucleotide
  Antisense strand to SEQ ID NO: 1401274
acauuaaccacauguguug

SEQ ID NO: 1401276 - RNA, 19 nt, Artificial Sequence
  Description of Artificial Sequence: Synthetic oligonucleotide
  Sense strand starting at position 3762 of SEQ ID NO: 1243205
aacacaugugguuaauguu

SEQ ID NO: 1401277 - RNA, 19 nt, Artificial Sequence
  Description of Artificial Sequence: Synthetic oligonucleotide
  Antisense strand to SEQ ID NO: 1401276
aacauuaaccacauguguu

SEQ ID NO: 1401278 - RNA, 19 nt, Artificial Sequence
  Description of Artificial Sequence: Synthetic oligonucleotide
  Sense strand starting at position 37 of SEQ ID NO: 1243206
gcaucugugacaugggaau

SEQ ID NO: 1401279 - RNA, 19 nt, Artificial Sequence
  Description of Artificial Sequence: Synthetic oligonucleotide
  Antisense strand to SEQ ID NO: 1401278
auucccaugucacagaugc

SEQ ID NO: 1401280 - RNA, 19 nt, Artificial Sequence
  Description of Artificial Sequence: Synthetic oligonucleotide
  Sense strand starting at position 101 of SEQ ID NO: 1243206
gccuuacagggcugacaua

SEQ ID NO: 1401281 - RNA, 19 nt, Artificial Sequence
  Description of Artificial Sequence: Synthetic oligonucleotide
  Antisense strand to SEQ ID NO: 1401280
uaugucagcccuguaaggc

SEQ ID NO: 1401282 - RNA, 19 nt, Artificial Sequence
  Description of Artificial Sequence: Synthetic oligonucleotide
  Sense strand starting at position 116 of SEQ ID NO: 1243206
cauaauugcugucugggau

SEQ ID NO: 1401283 - RNA, 19 nt, Artificial Sequence
  Description of Artificial Sequence: Synthetic oligonucleotide
  Antisense strand to SEQ ID NO: 1401282
aucccagacagcaauuaug

SEQ ID NO: 1401284 - RNA, 19 nt, Artificial Sequence
  Description of Artificial Sequence: Synthetic oligonucleotide
  Sense strand starting at position 117 of SEQ ID NO: 1243206
auaauugcugucugggauu

SEQ ID NO: 1401285 - RNA, 19 nt, Artificial Sequence
  Description of Artificial Sequence: Synthetic oligonucleotide
  Antisense strand to SEQ ID NO: 1401284
aaucccagacagcaauuau

SEQ ID NO: 1401286 - RNA, 19 nt, Artificial Sequence
  Description of Artificial Sequence: Synthetic oligonucleotide
  Sense strand starting at position 147 of SEQ ID NO: 1243206
aggagcauucuggauguuu

SEQ ID NO: 1401287 - RNA, 19 nt, Artificial Sequence
  Description of Artificial Sequence: Synthetic oligonucleotide
  Antisense strand to SEQ ID NO: 1401286
aaacauccagaaugcuccu

SEQ ID NO: 1401288 - RNA, 19 nt, Artificial Sequence
  Description of Artificial Sequence: Synthetic oligonucleotide
  Sense strand starting at position 160 of SEQ ID NO: 1243206
auguuucuauucuuggcaa

SEQ ID NO: 1401289 - RNA, 19 nt, Artificial Sequence
  Description of Artificial Sequence: Synthetic oligonucleotide
  Antisense strand to SEQ ID NO: 1401288
uugccaagaauagaaacau

SEQ ID NO: 1401290 - RNA, 19 nt, Artificial Sequence
  Description of Artificial Sequence: Synthetic oligonucleotide
  Sense strand starting at position 163 of SEQ ID NO: 1243206
uuucuauucuuggcaagga

SEQ ID NO: 1401291 - RNA, 19 nt, Artificial Sequence
  Description of Artificial Sequence: Synthetic oligonucleotide
  Antisense strand to SEQ ID NO: 1401290
uccuugccaagaauagaaa

SEQ ID NO: 1401292 - RNA, 19 nt, Artificial Sequence
  Description of Artificial Sequence: Synthetic oligonucleotide
  Sense strand starting at position 220 of SEQ ID NO: 1243206
acaccaauguucucaggga

SEQ ID NO: 1401293 - RNA, 19 nt, Artificial Sequence
  Description of Artificial Sequence: Synthetic oligonucleotide
  Antisense strand to SEQ ID NO: 1401292
ucccugagaacauuggugu

SEQ ID NO: 1401294 - RNA, 19 nt, Artificial Sequence
  Description of Artificial Sequence: Synthetic oligonucleotide
  Sense strand starting at position 241 of SEQ ID NO: 1243206
gaaugauaggcccgugcua

SEQ ID NO: 1401295 - RNA, 19 nt, Artificial Sequence
  Description of Artificial Sequence: Synthetic oligonucleotide
  Antisense strand to SEQ ID NO: 1401294
uagcacgggccuaucauuc

SEQ ID NO: 1401296 - RNA, 19 nt, Artificial Sequence
  Description of Artificial Sequence: Synthetic oligonucleotide
  Sense strand starting at position 254 of SEQ ID NO: 1243206
gugcuaagcggucucaucu

SEQ ID NO: 1401297 - RNA, 19 nt, Artificial Sequence
  Description of Artificial Sequence: Synthetic oligonucleotide
  Antisense strand to SEQ ID NO: 1401296
agaugagaccgcuuagcac

SEQ ID NO: 1401298 - RNA, 19 nt, Artificial Sequence
  Description of Artificial Sequence: Synthetic oligonucleotide
  Sense strand starting at position 255 of SEQ ID NO: 1243206
ugcuaagcggucucaucuu

SEQ ID NO: 1401299 - RNA, 19 nt, Artificial Sequence
  Description of Artificial Sequence: Synthetic oligonucleotide
  Antisense strand to SEQ ID NO: 1401298
aagaugagaccgcuuagca

SEQ ID NO: 1401300 - RNA, 19 nt, Artificial Sequence
  Description of Artificial Sequence: Synthetic oligonucleotide
  Sense strand starting at position 262 of SEQ ID NO: 1243206
cggucucaucuugaguugu

SEQ ID NO: 1401301 - RNA, 19 nt, Artificial Sequence
  Description of Artificial Sequence: Synthetic oligonucleotide
  Antisense strand to SEQ ID NO: 1401300
acaacucaagaugagaccg

SEQ ID NO: 1401302 - RNA, 19 nt, Artificial Sequence
  Description of Artificial Sequence: Synthetic oligonucleotide
  Sense strand starting at position 264 of SEQ ID NO: 1243206
gucucaucuugaguuguga

SEQ ID NO: 1401303 - RNA, 19 nt, Artificial Sequence
  Description of Artificial Sequence: Synthetic oligonucleotide
  Antisense strand to SEQ ID NO: 1401302
ucacaacucaagaugagac

SEQ ID NO: 1401304 - RNA, 19 nt, Artificial Sequence
  Description of Artificial Sequence: Synthetic oligonucleotide
  Sense strand starting at position 266 of SEQ ID NO: 1243206
cucaucuugaguugugaug

SEQ ID NO: 1401305 - RNA, 19 nt, Artificial Sequence
  Description of Artificial Sequence: Synthetic oligonucleotide
  Antisense strand to SEQ ID NO: 1401304
caucacaacucaagaugag

SEQ ID NO: 1401306 - RNA, 19 nt, Artificial Sequence
  Description of Artificial Sequence: Synthetic oligonucleotide
  Sense strand starting at position 327 of SEQ ID NO: 1243206
aaggguagauguguuuaac

SEQ ID NO: 1401307 - RNA, 19 nt, Artificial Sequence
  Description of Artificial Sequence: Synthetic oligonucleotide
  Antisense strand to SEQ ID NO: 1401306
guuaaacacaucuacccuu

SEQ ID NO: 1401308 - RNA, 19 nt, Artificial Sequence
  Description of Artificial Sequence: Synthetic oligonucleotide
  Sense strand starting at position 330 of SEQ ID NO: 1243206
gguagauguguuuaacuaa

SEQ ID NO: 1401309 - RNA, 19 nt, Artificial Sequence
  Description of Artificial Sequence: Synthetic oligonucleotide
  Antisense strand to SEQ ID NO: 1401308
uuaguuaaacacaucuacc

SEQ ID NO: 1401310 - RNA, 19 nt, Artificial Sequence
  Description of Artificial Sequence: Synthetic oligonucleotide
  Sense strand starting at position 391 of SEQ ID NO: 1243206
ggaagguguggacgguuaa

SEQ ID NO: 1401311 - RNA, 19 nt, Artificial Sequence
  Description of Artificial Sequence: Synthetic oligonucleotide
  Antisense strand to SEQ ID NO: 1401310
uuaaccguccacaccuucc

SEQ ID NO: 1401312 - RNA, 19 nt, Artificial Sequence
  Description of Artificial Sequence: Synthetic oligonucleotide
  Sense strand starting at position 1180 of SEQ ID NO: 1243206
gacaguggugguugaagua

SEQ ID NO: 1401313 - RNA, 19 nt, Artificial Sequence
  Description of Artificial Sequence: Synthetic oligonucleotide
  Antisense strand to SEQ ID NO: 1401312
uacuucaaccaccacuguc

SEQ ID NO: 1401314 - RNA, 19 nt, Artificial Sequence
  Description of Artificial Sequence: Synthetic oligonucleotide
  Sense strand starting at position 2090 of SEQ ID NO: 1243206
ggcuucugccugcuuucua

SEQ ID NO: 1401315 - RNA, 19 nt, Artificial Sequence
  Description of Artificial Sequence: Synthetic oligonucleotide
  Antisense strand to SEQ ID NO: 1401314
uagaaagcaggcagaagcc

SEQ ID NO: 1401316 - RNA, 19 nt, Artificial Sequence
  Description of Artificial Sequence: Synthetic oligonucleotide
  Sense strand starting at position 2414 of SEQ ID NO: 1243206
cacgcaaacacguguagau

SEQ ID NO: 1401317 - RNA, 19 nt, Artificial Sequence
  Description of Artificial Sequence: Synthetic oligonucleotide
  Antisense strand to SEQ ID NO: 1401316
aucuacacguguuugcgug

SEQ ID NO: 1401318 - RNA, 19 nt, Artificial Sequence
  Description of Artificial Sequence: Synthetic oligonucleotide
  Sense strand starting at position 2424 of SEQ ID NO: 1243206
cguguagaugcacagagaa

SEQ ID NO: 1401319 - RNA, 19 nt, Artificial Sequence
  Description of Artificial Sequence: Synthetic oligonucleotide
  Antisense strand to SEQ ID NO: 1401318
uucucugugcaucuacacg

SEQ ID NO: 1401320 - RNA, 19 nt, Artificial Sequence
  Description of Artificial Sequence: Synthetic oligonucleotide
  Sense strand starting at position 2505 of SEQ ID NO: 1243206
uuagaaagcucuucugagu

SEQ ID NO: 1401321 - RNA, 19 nt, Artificial Sequence
  Description of Artificial Sequence: Synthetic oligonucleotide
  Antisense strand to SEQ ID NO: 1401320
acucagaagagcuuucuaa

SEQ ID NO: 1401322 - RNA, 19 nt, Artificial Sequence
  Description of Artificial Sequence: Synthetic oligonucleotide
  Sense strand starting at position 2604 of SEQ ID NO: 1243206
ucguuauuugcaugucuuu

SEQ ID NO: 1401323 - RNA, 19 nt, Artificial Sequence
  Description of Artificial Sequence: Synthetic oligonucleotide
  Antisense strand to SEQ ID NO: 1401322
aaagacaugcaaauaacga

SEQ ID NO: 1401324 - RNA, 19 nt, Artificial Sequence
  Description of Artificial Sequence: Synthetic oligonucleotide
  Sense strand starting at position 2717 of SEQ ID NO: 1243206
cccuuuaagguugguccaa

SEQ ID NO: 1401325 - RNA, 19 nt, Artificial Sequence
  Description of Artificial Sequence: Synthetic oligonucleotide
  Antisense strand to SEQ ID NO: 1401324
uuggaccaaccuuaaaggg

SEQ ID NO: 1401326 - RNA, 19 nt, Artificial Sequence
  Description of Artificial Sequence: Synthetic oligonucleotide
  Sense strand starting at position 2748 of SEQ ID NO: 1243206
gucccugaugccugauauu

SEQ ID NO: 1401327 - RNA, 19 nt, Artificial Sequence
  Description of Artificial Sequence: Synthetic oligonucleotide
  Antisense strand to SEQ ID NO: 1401326
aauaucaggcaucagggac

SEQ ID NO: 1401328 - RNA, 19 nt, Artificial Sequence
  Description of Artificial Sequence: Synthetic oligonucleotide
  Sense strand starting at position 2757 of SEQ ID NO: 1243206
gccugauauuggccuucca

SEQ ID NO: 1401329 - RNA, 19 nt, Artificial Sequence
  Description of Artificial Sequence: Synthetic oligonucleotide
  Antisense strand to SEQ ID NO: 1401328
uggaaggccaauaucaggc

SEQ ID NO: 1401330 - RNA, 19 nt, Artificial Sequence
  Description of Artificial Sequence: Synthetic oligonucleotide
  Sense strand starting at position 2784 of SEQ ID NO: 1243206
gcucaauauccuggaaagu

SEQ ID NO: 1401331 - RNA, 19 nt, Artificial Sequence
  Description of Artificial Sequence: Synthetic oligonucleotide
  Antisense strand to SEQ ID NO: 1401330
acuuuccaggauauugagc

SEQ ID NO: 1401332 - RNA, 19 nt, Artificial Sequence
  Description of Artificial Sequence: Synthetic oligonucleotide
  Sense strand starting at position 2857 of SEQ ID NO: 1243206
ucuuucuuucgagacuaac

SEQ ID NO: 1401333 - RNA, 19 nt, Artificial Sequence
  Description of Artificial Sequence: Synthetic oligonucleotide
  Antisense strand to SEQ ID NO: 1401332
guuagucucgaaagaaaga

SEQ ID NO: 1401334 - RNA, 19 nt, Artificial Sequence
  Description of Artificial Sequence: Synthetic oligonucleotide
  Sense strand starting at position 2879 of SEQ ID NO: 1243206
ugcucugucaucuggaguu

SEQ ID NO: 1401335 - RNA, 19 nt, Artificial Sequence
  Description of Artificial Sequence: Synthetic oligonucleotide
  Antisense strand to SEQ ID NO: 1401334
aacuccagaugacagagca

SEQ ID NO: 1401336 - RNA, 19 nt, Artificial Sequence
  Description of Artificial Sequence: Synthetic oligonucleotide
  Sense strand starting at position 3296 of SEQ ID NO: 1243206
ugucuuugaccuugcacua

SEQ ID NO: 1401337 - RNA, 19 nt, Artificial Sequence
  Description of Artificial Sequence: Synthetic oligonucleotide
  Antisense strand to SEQ ID NO: 1401336
uagugcaaggucaaagaca

SEQ ID NO: 1401338 - RNA, 19 nt, Artificial Sequence
  Description of Artificial Sequence: Synthetic oligonucleotide
  Sense strand starting at position 3322 of SEQ ID NO: 1243206
guaggcuccaggcagauau

SEQ ID NO: 1401339 - RNA, 19 nt, Artificial Sequence
  Description of Artificial Sequence: Synthetic oligonucleotide
  Antisense strand to SEQ ID NO: 1401338
auaucugccuggagccuac

SEQ ID NO: 1401340 - RNA, 19 nt, Artificial Sequence
  Description of Artificial Sequence: Synthetic oligonucleotide
  Sense strand starting at position 3335 of SEQ ID NO: 1243206
agauauucgaggugccuuu

SEQ ID NO: 1401341 - RNA, 19 nt, Artificial Sequence
  Description of Artificial Sequence: Synthetic oligonucleotide
  Antisense strand to SEQ ID NO: 1401340
aaaggcaccucgaauaucu

SEQ ID NO: 1401342 - RNA, 19 nt, Artificial Sequence
  Description of Artificial Sequence: Synthetic oligonucleotide
  Sense strand starting at position 3425 of SEQ ID NO: 1243206
gaauaaggagcaugugauu

SEQ ID NO: 1401343 - RNA, 19 nt, Artificial Sequence
  Description of Artificial Sequence: Synthetic oligonucleotide
  Antisense strand to SEQ ID NO: 1401342
aaucacaugcuccuuauuc

SEQ ID NO: 1401344 - RNA, 19 nt, Artificial Sequence
  Description of Artificial Sequence: Synthetic oligonucleotide
  Sense strand starting at position 3430 of SEQ ID NO: 1243206
aggagcaugugauugaauc

SEQ ID NO: 1401345 - RNA, 19 nt, Artificial Sequence
  Description of Artificial Sequence: Synthetic oligonucleotide
  Antisense strand to SEQ ID NO: 1401344
gauucaaucacaugcuccu

SEQ ID NO: 1401346 - RNA, 19 nt, Artificial Sequence
  Description of Artificial Sequence: Synthetic oligonucleotide
  Sense strand starting at position 3438 of SEQ ID NO: 1243206
gugauugaaucccugcuca

SEQ ID NO: 1401347 - RNA, 19 nt, Artificial Sequence
  Description of Artificial Sequence: Synthetic oligonucleotide
  Antisense strand to SEQ ID NO: 1401346
ugagcagggauucaaucac

SEQ ID NO: 1401348 - RNA, 19 nt, Artificial Sequence
  Description of Artificial Sequence: Synthetic oligonucleotide
  Sense strand starting at position 3517 of SEQ ID NO: 1243206
ccaaguucacugcggauga

SEQ ID NO: 1401349 - RNA, 19 nt, Artificial Sequence
  Description of Artificial Sequence: Synthetic oligonucleotide
  Antisense strand to SEQ ID NO: 1401348
ucauccgcagugaacuugg

SEQ ID NO: 1401350 - RNA, 19 nt, Artificial Sequence
  Description of Artificial Sequence: Synthetic oligonucleotide
  Sense strand starting at position 3521 of SEQ ID NO: 1243206
guucacugcggaugaauuu

SEQ ID NO: 1401351 - RNA, 19 nt, Artificial Sequence
  Description of Artificial Sequence: Synthetic oligonucleotide
  Antisense strand to SEQ ID NO: 1401350
aaauucauccgcagugaac

SEQ ID NO: 1401352 - RNA, 19 nt, Artificial Sequence
  Description of Artificial Sequence: Synthetic oligonucleotide
  Sense strand starting at position 3561 of SEQ ID NO: 1243206
cggcucaucgcagaugacu

SEQ ID NO: 1401353 - RNA, 19 nt, Artificial Sequence
  Description of Artificial Sequence: Synthetic oligonucleotide
  Antisense strand to SEQ ID NO: 1401352
agucaucugcgaugagccg

SEQ ID NO: 1401354 - RNA, 19 nt, Artificial Sequence
  Description of Artificial Sequence: Synthetic oligonucleotide
  Sense strand starting at position 3754 of SEQ ID NO: 1243206
gcuguugcuuuacuagaaa

SEQ ID NO: 1401355 - RNA, 19 nt, Artificial Sequence
  Description of Artificial Sequence: Synthetic oligonucleotide
  Antisense strand to SEQ ID NO: 1401354
uuucuaguaaagcaacagc

SEQ ID NO: 1401356 - RNA, 19 nt, Artificial Sequence
  Description of Artificial Sequence: Synthetic oligonucleotide
  Sense strand starting at position 3757 of SEQ ID NO: 1243206
guugcuuuacuagaaauca

SEQ ID NO: 1401357 - RNA, 19 nt, Artificial Sequence
  Description of Artificial Sequence: Synthetic oligonucleotide
  Antisense strand to SEQ ID NO: 1401356
ugauuucuaguaaagcaac

SEQ ID NO: 1401358 - RNA, 19 nt, Artificial Sequence
  Description of Artificial Sequence: Synthetic oligonucleotide
  Sense strand starting at position 97 of SEQ ID NO: 1243207
gggagacagucaucuacca

SEQ ID NO: 1401359 - RNA, 19 nt, Artificial Sequence
  Description of Artificial Sequence: Synthetic oligonucleotide
  Antisense strand to SEQ ID NO: 1401358
ugguagaugacugucuccc

SEQ ID NO: 1401360 - RNA, 19 nt, Artificial Sequence
  Description of Artificial Sequence: Synthetic oligonucleotide
  Sense strand starting at position 102 of SEQ ID NO: 1243207
acagucaucuaccagauag

SEQ ID NO: 1401361 - RNA, 19 nt, Artificial Sequence
  Description of Artificial Sequence: Synthetic oligonucleotide
  Antisense strand to SEQ ID NO: 1401360
cuaucugguagaugacugu

SEQ ID NO: 1401362 - RNA, 19 nt, Artificial Sequence
  Description of Artificial Sequence: Synthetic oligonucleotide
  Sense strand starting at position 104 of SEQ ID NO: 1243207
agucaucuaccagauaguu

SEQ ID NO: 1401363 - RNA, 19 nt, Artificial Sequence
  Description of Artificial Sequence: Synthetic oligonucleotide
  Antisense strand to SEQ ID NO: 1401362
aacuaucugguagaugacu

SEQ ID NO: 1401364 - RNA, 19 nt, Artificial Sequence
  Description of Artificial Sequence: Synthetic oligonucleotide
  Sense strand starting at position 172 of SEQ ID NO: 1243207
gcaagacagguccagguaa

SEQ ID NO: 1401365 - RNA, 19 nt, Artificial Sequence
  Description of Artificial Sequence: Synthetic oligonucleotide
  Antisense strand to SEQ ID NO: 1401364
uuaccuggaccugucuugc

SEQ ID NO: 1401366 - RNA, 19 nt, Artificial Sequence
  Description of Artificial Sequence: Synthetic oligonucleotide
  Sense strand starting at position 174 of SEQ ID NO: 1243207
aagacagguccagguaaug

SEQ ID NO: 1401367 - RNA, 19 nt, Artificial Sequence
  Description of Artificial Sequence: Synthetic oligonucleotide
  Antisense strand to SEQ ID NO: 1401366
cauuaccuggaccugucuu

SEQ ID NO: 1401368 - RNA, 19 nt, Artificial Sequence
  Description of Artificial Sequence: Synthetic oligonucleotide
  Sense strand starting at position 252 of SEQ ID NO: 1243207
ggcacugguuacuuaucau

SEQ ID NO: 1401369 - RNA, 19 nt, Artificial Sequence
  Description of Artificial Sequence: Synthetic oligonucleotide
  Antisense strand to SEQ ID NO: 1401368
augauaaguaaccagugcc

SEQ ID NO: 1401370 - RNA, 19 nt, Artificial Sequence
  Description of Artificial Sequence: Synthetic oligonucleotide
  Sense strand starting at position 258 of SEQ ID NO: 1243207
gguuacuuaucauggcuca

SEQ ID NO: 1401371 - RNA, 19 nt, Artificial Sequence
  Description of Artificial Sequence: Synthetic oligonucleotide
  Antisense strand to SEQ ID NO: 1401370
ugagccaugauaaguaacc

SEQ ID NO: 1401372 - RNA, 19 nt, Artificial Sequence
  Description of Artificial Sequence: Synthetic oligonucleotide
  Sense strand starting at position 274 of SEQ ID NO: 1243207
ucaggauggucugggaagu

SEQ ID NO: 1401373 - RNA, 19 nt, Artificial Sequence
  Description of Artificial Sequence: Synthetic oligonucleotide
  Antisense strand to SEQ ID NO: 1401372
acuucccagaccauccuga

SEQ ID NO: 1401374 - RNA, 19 nt, Artificial Sequence
  Description of Artificial Sequence: Synthetic oligonucleotide
  Sense strand starting at position 275 of SEQ ID NO: 1243207
caggauggucugggaagua

SEQ ID NO: 1401375 - RNA, 19 nt, Artificial Sequence
  Description of Artificial Sequence: Synthetic oligonucleotide
  Antisense strand to SEQ ID NO: 1401374
uacuucccagaccauccug

SEQ ID NO: 1401376 - RNA, 19 nt, Artificial Sequence
  Description of Artificial Sequence: Synthetic oligonucleotide
  Sense strand starting at position 368 of SEQ ID NO: 1243207
gcagguaagcaauggcaga

SEQ ID NO: 1401377 - RNA, 19 nt, Artificial Sequence
  Description of Artificial Sequence: Synthetic oligonucleotide
  Antisense strand to SEQ ID NO: 1401376
ucugccauugcuuaccugc

SEQ ID NO: 1401378 - RNA, 19 nt, Artificial Sequence
  Description of Artificial Sequence: Synthetic oligonucleotide
  Sense strand starting at position 464 of SEQ ID NO: 1243207
accucaaguugaguuguga

SEQ ID NO: 1401379 - RNA, 19 nt, Artificial Sequence
  Description of Artificial Sequence: Synthetic oligonucleotide
  Antisense strand to SEQ ID NO: 1401378
ucacaacucaacuugaggu

SEQ ID NO: 1401380 - RNA, 19 nt, Artificial Sequence
  Description of Artificial Sequence: Synthetic oligonucleotide
  Sense strand starting at position 468 of SEQ ID NO: 1243207
caaguugaguugugaagag

SEQ ID NO: 1401381 - RNA, 19 nt, Artificial Sequence
  Description of Artificial Sequence: Synthetic oligonucleotide
  Antisense strand to SEQ ID NO: 1401380
cucuucacaacucaacuug

SEQ ID NO: 1401382 - RNA, 19 nt, Artificial Sequence
  Description of Artificial Sequence: Synthetic oligonucleotide
  Sense strand starting at position 553 of SEQ ID NO: 1243207
cuccauaaguguccagaca

SEQ ID NO: 1401383 - RNA, 19 nt, Artificial Sequence
  Description of Artificial Sequence: Synthetic oligonucleotide
  Antisense strand to SEQ ID NO: 1401382
ugucuggacacuuauggag

SEQ ID NO: 1401384 - RNA, 19 nt, Artificial Sequence
  Description of Artificial Sequence: Synthetic oligonucleotide
  Sense strand starting at position 554 of SEQ ID NO: 1243207
uccauaaguguccagacaa

SEQ ID NO: 1401385 - RNA, 19 nt, Artificial Sequence
  Description of Artificial Sequence: Synthetic oligonucleotide
  Antisense strand to SEQ ID NO: 1401384
uugucuggacacuuaugga

SEQ ID NO: 1401386 - RNA, 19 nt, Artificial Sequence
  Description of Artificial Sequence: Synthetic oligonucleotide
  Sense strand starting at position 695 of SEQ ID NO: 1243207
ggaguuugauuccagccua

SEQ ID NO: 1401387 - RNA, 19 nt, Artificial Sequence
  Description of Artificial Sequence: Synthetic oligonucleotide
  Antisense strand to SEQ ID NO: 1401386
uaggcuggaaucaaacucc

SEQ ID NO: 1401388 - RNA, 19 nt, Artificial Sequence
  Description of Artificial Sequence: Synthetic oligonucleotide
  Sense strand starting at position 793 of SEQ ID NO: 1243207
ugcccacccuugugagaau

SEQ ID NO: 1401389 - RNA, 19 nt, Artificial Sequence
  Description of Artificial Sequence: Synthetic oligonucleotide
  Antisense strand to SEQ ID NO: 1401388
auucucacaagggugggca

SEQ ID NO: 1401390 - RNA, 19 nt, Artificial Sequence
  Description of Artificial Sequence: Synthetic oligonucleotide
  Sense strand starting at position 806 of SEQ ID NO: 1243207
gagaauguggccuggcaaa

SEQ ID NO: 1401391 - RNA, 19 nt, Artificial Sequence
  Description of Artificial Sequence: Synthetic oligonucleotide
  Antisense strand to SEQ ID NO: 1401390
uuugccaggccacauucuc

SEQ ID NO: 1401392 - RNA, 19 nt, Artificial Sequence
  Description of Artificial Sequence: Synthetic oligonucleotide
  Sense strand starting at position 2204 of SEQ ID NO: 1243207
ccgggcuuuccgcgugaca

SEQ ID NO: 1401393 - RNA, 19 nt, Artificial Sequence
  Description of Artificial Sequence: Synthetic oligonucleotide
  Antisense strand to SEQ ID NO: 1401392
ugucacgcggaaagcccgg

SEQ ID NO: 1401394 - RNA, 19 nt, Artificial Sequence
  Description of Artificial Sequence: Synthetic oligonucleotide
  Sense strand starting at position 2455 of SEQ ID NO: 1243207
ggcccuauccuucgcgcua

SEQ ID NO: 1401395 - RNA, 19 nt, Artificial Sequence
  Description of Artificial Sequence: Synthetic oligonucleotide
  Antisense strand to SEQ ID NO: 1401394
uagcgcgaaggauagggcc

SEQ ID NO: 1401396 - RNA, 19 nt, Artificial Sequence
  Description of Artificial Sequence: Synthetic oligonucleotide
  Sense strand starting at position 2711 of SEQ ID NO: 1243207
cccaucugucuguguucua

SEQ ID NO: 1401397 - RNA, 19 nt, Artificial Sequence
  Description of Artificial Sequence: Synthetic oligonucleotide
  Antisense strand to SEQ ID NO: 1401396
uagaacacagacagauggg

SEQ ID NO: 1401398 - RNA, 19 nt, Artificial Sequence
  Description of Artificial Sequence: Synthetic oligonucleotide
  Sense strand starting at position 2718 of SEQ ID NO: 1243207
gucuguguucuagguccuu

SEQ ID NO: 1401399 - RNA, 19 nt, Artificial Sequence
  Description of Artificial Sequence: Synthetic oligonucleotide
  Antisense strand to SEQ ID NO: 1401398
aaggaccuagaacacagac

SEQ ID NO: 1401400 - RNA, 19 nt, Artificial Sequence
  Description of Artificial Sequence: Synthetic oligonucleotide
  Sense strand starting at position 2757 of SEQ ID NO: 1243207
caccaaagucugcgugcaa

SEQ ID NO: 1401401 - RNA, 19 nt, Artificial Sequence
  Description of Artificial Sequence: Synthetic oligonucleotide
  Antisense strand to SEQ ID NO: 1401400
uugcacgcagacuuuggug

SEQ ID NO: 1401402 - RNA, 19 nt, Artificial Sequence
  Description of Artificial Sequence: Synthetic oligonucleotide
  Sense strand starting at position 2808 of SEQ ID NO: 1243207
cggcguuuguauggucauu

SEQ ID NO: 1401403 - RNA, 19 nt, Artificial Sequence
  Description of Artificial Sequence: Synthetic oligonucleotide
  Antisense strand to SEQ ID NO: 1401402
aaugaccauacaaacgccg

SEQ ID NO: 1401404 - RNA, 19 nt, Artificial Sequence
  Description of Artificial Sequence: Synthetic oligonucleotide
  Sense strand starting at position 2810 of SEQ ID NO: 1243207
gcguuuguauggucauuaa

SEQ ID NO: 1401405 - RNA, 19 nt, Artificial Sequence
  Description of Artificial Sequence: Synthetic oligonucleotide
  Antisense strand to SEQ ID NO: 1401404
uuaaugaccauacaaacgc

SEQ ID NO: 1401406 - RNA, 19 nt, Artificial Sequence
  Description of Artificial Sequence: Synthetic oligonucleotide
  Sense strand starting at position 2813 of SEQ ID NO: 1243207
uuuguauggucauuaacau

SEQ ID NO: 1401407 - RNA, 19 nt, Artificial Sequence
  Description of Artificial Sequence: Synthetic oligonucleotide
  Antisense strand to SEQ ID NO: 1401406
auguuaaugaccauacaaa

SEQ ID NO: 1401408 - RNA, 19 nt, Artificial Sequence
  Description of Artificial Sequence: Synthetic oligonucleotide
  Sense strand starting at position 2814 of SEQ ID NO: 1243207
uuguauggucauuaacaug

SEQ ID NO: 1401409 - RNA, 19 nt, Artificial Sequence
  Description of Artificial Sequence: Synthetic oligonucleotide
  Antisense strand to SEQ ID NO: 1401408
cauguuaaugaccauacaa

SEQ ID NO: 1401410 - RNA, 19 nt, Artificial Sequence
  Description of Artificial Sequence: Synthetic oligonucleotide
  Sense strand starting at position 194 of SEQ ID NO: 1243208
gggagacagucaucuacca

SEQ ID NO: 1401411 - RNA, 19 nt, Artificial Sequence
  Description of Artificial Sequence: Synthetic oligonucleotide
  Antisense strand to SEQ ID NO: 1401410
ugguagaugacugucuccc

SEQ ID NO: 1401412 - RNA, 19 nt, Artificial Sequence
  Description of Artificial Sequence: Synthetic oligonucleotide
  Sense strand starting at position 199 of SEQ ID NO: 1243208
acagucaucuaccagauag

SEQ ID NO: 1401413 - RNA, 19 nt, Artificial Sequence
  Description of Artificial Sequence: Synthetic oligonucleotide
  Antisense strand to SEQ ID NO: 1401412
cuaucugguagaugacugu

SEQ ID NO: 1401414 - RNA, 19 nt, Artificial Sequence
  Description of Artificial Sequence: Synthetic oligonucleotide
  Sense strand starting at position 201 of SEQ ID NO: 1243208
agucaucuaccagauaguu

SEQ ID NO: 1401415 - RNA, 19 nt, Artificial Sequence
  Description of Artificial Sequence: Synthetic oligonucleotide
  Antisense strand to SEQ ID NO: 1401414
aacuaucugguagaugacu

SEQ ID NO: 1401416 - RNA, 19 nt, Artificial Sequence
  Description of Artificial Sequence: Synthetic oligonucleotide
  Sense strand starting at position 269 of SEQ ID NO: 1243208
gcaagacagguccagguaa

SEQ ID NO: 1401417 - RNA, 19 nt, Artificial Sequence
  Description of Artificial Sequence: Synthetic oligonucleotide
  Antisense strand to SEQ ID NO: 1401416
uuaccuggaccugucuugc

SEQ ID NO: 1401418 - RNA, 19 nt, Artificial Sequence
  Description of Artificial Sequence: Synthetic oligonucleotide
  Sense strand starting at position 271 of SEQ ID NO: 1243208
aagacagguccagguaaug

SEQ ID NO: 1401419 - RNA, 19 nt, Artificial Sequence
  Description of Artificial Sequence: Synthetic oligonucleotide
  Antisense strand to SEQ ID NO: 1401418
cauuaccuggaccugucuu

SEQ ID NO: 1401420 - RNA, 19 nt, Artificial Sequence
  Description of Artificial Sequence: Synthetic oligonucleotide
  Sense strand starting at position 349 of SEQ ID NO: 1243208
ggcacugguuacuuaucau

SEQ ID NO: 1401421 - RNA, 19 nt, Artificial Sequence
  Description of Artificial Sequence: Synthetic oligonucleotide
  Antisense strand to SEQ ID NO: 1401420
augauaaguaaccagugcc

SEQ ID NO: 1401422 - RNA, 19 nt, Artificial Sequence
  Description of Artificial Sequence: Synthetic oligonucleotide
  Sense strand starting at position 355 of SEQ ID NO: 1243208
gguuacuuaucauggcuca

SEQ ID NO: 1401423 - RNA, 19 nt, Artificial Sequence
  Description of Artificial Sequence: Synthetic oligonucleotide
  Antisense strand to SEQ ID NO: 1401422
ugagccaugauaaguaacc

SEQ ID NO: 1401424 - RNA, 19 nt, Artificial Sequence
  Description of Artificial Sequence: Synthetic oligonucleotide
  Sense strand starting at position 371 of SEQ ID NO: 1243208
ucaggauggucugggaagu

SEQ ID NO: 1401425 - RNA, 19 nt, Artificial Sequence
  Description of Artificial Sequence: Synthetic oligonucleotide
  Antisense strand to SEQ ID NO: 1401424
acuucccagaccauccuga

SEQ ID NO: 1401426 - RNA, 19 nt, Artificial Sequence
  Description of Artificial Sequence: Synthetic oligonucleotide
  Sense strand starting at position 372 of SEQ ID NO: 1243208
caggauggucugggaagua

SEQ ID NO: 1401427 - RNA, 19 nt, Artificial Sequence
  Description of Artificial Sequence: Synthetic oligonucleotide
  Antisense strand to SEQ ID NO: 1401426
uacuucccagaccauccug

SEQ ID NO: 1401428 - RNA, 19 nt, Artificial Sequence
  Description of Artificial Sequence: Synthetic oligonucleotide
  Sense strand starting at position 465 of SEQ ID NO: 1243208
gcagguaagcaauggcaga

SEQ ID NO: 1401429 - RNA, 19 nt, Artificial Sequence
  Description of Artificial Sequence: Synthetic oligonucleotide
  Antisense strand to SEQ ID NO: 1401428
ucugccauugcuuaccugc

SEQ ID NO: 1401430 - RNA, 19 nt, Artificial Sequence
  Description of Artificial Sequence: Synthetic oligonucleotide
  Sense strand starting at position 561 of SEQ ID NO: 1243208
accucaaguugaguuguga

SEQ ID NO: 1401431 - RNA, 19 nt, Artificial Sequence
  Description of Artificial Sequence: Synthetic oligonucleotide
  Antisense strand to SEQ ID NO: 1401430
ucacaacucaacuugaggu

SEQ ID NO: 1401432 - RNA, 19 nt, Artificial Sequence
  Description of Artificial Sequence: Synthetic oligonucleotide
  Sense strand starting at position 565 of SEQ ID NO: 1243208
caaguugaguugugaagag

SEQ ID NO: 1401433 - RNA, 19 nt, Artificial Sequence
  Description of Artificial Sequence: Synthetic oligonucleotide
  Antisense strand to SEQ ID NO: 1401432
cucuucacaacucaacuug

SEQ ID NO: 1401434 - RNA, 19 nt, Artificial Sequence
  Description of Artificial Sequence: Synthetic oligonucleotide
  Sense strand starting at position 650 of SEQ ID NO: 1243208
cuccauaaguguccagaca

SEQ ID NO: 1401435 - RNA, 19 nt, Artificial Sequence
  Description of Artificial Sequence: Synthetic oligonucleotide
  Antisense strand to SEQ ID NO: 1401434
ugucuggacacuuauggag

SEQ ID NO: 1401436 - RNA, 19 nt, Artificial Sequence
  Description of Artificial Sequence: Synthetic oligonucleotide
  Sense strand starting at position 651 of SEQ ID NO: 1243208
uccauaaguguccagacaa

SEQ ID NO: 1401437 - RNA, 19 nt, Artificial Sequence
  Description of Artificial Sequence: Synthetic oligonucleotide
  Antisense strand to SEQ ID NO: 1401436
uugucuggacacuuaugga

SEQ ID NO: 1401438 - RNA, 19 nt, Artificial Sequence
  Description of Artificial Sequence: Synthetic oligonucleotide
  Sense strand starting at position 792 of SEQ ID NO: 1243208
ggaguuugauuccagccua

SEQ ID NO: 1401439 - RNA, 19 nt, Artificial Sequence
  Description of Artificial Sequence: Synthetic oligonucleotide
  Antisense strand to SEQ ID NO: 1401438
uaggcuggaaucaaacucc

SEQ ID NO: 1401440 - RNA, 19 nt, Artificial Sequence
  Description of Artificial Sequence: Synthetic oligonucleotide
  Sense strand starting at position 890 of SEQ ID NO: 1243208
ugcccacccuugugagaau

SEQ ID NO: 1401441 - RNA, 19 nt, Artificial Sequence
  Description of Artificial Sequence: Synthetic oligonucleotide
  Antisense strand to SEQ ID NO: 1401440
auucucacaagggugggca

SEQ ID NO: 1401442 - RNA, 19 nt, Artificial Sequence
  Description of Artificial Sequence: Synthetic oligonucleotide
  Sense strand starting at position 903 of SEQ ID NO: 1243208
gagaauguggccuggcaaa

SEQ ID NO: 1401443 - RNA, 19 nt, Artificial Sequence
  Description of Artificial Sequence: Synthetic oligonucleotide
  Antisense strand to SEQ ID NO: 1401442
uuugccaggccacauucuc

SEQ ID NO: 1401444 - RNA, 19 nt, Artificial Sequence
  Description of Artificial Sequence: Synthetic oligonucleotide
  Sense strand starting at position 2301 of SEQ ID NO: 1243208
ccgggcuuuccgcgugaca

SEQ ID NO: 1401445 - RNA, 19 nt, Artificial Sequence
  Description of Artificial Sequence: Synthetic oligonucleotide
  Antisense strand to SEQ ID NO: 1401444
ugucacgcggaaagcccgg

SEQ ID NO: 1401446 - RNA, 19 nt, Artificial Sequence
  Description of Artificial Sequence: Synthetic oligonucleotide
  Sense strand starting at position 2552 of SEQ ID NO: 1243208
ggcccuauccuucgcgcua

SEQ ID NO: 1401447 - RNA, 19 nt, Artificial Sequence
  Description of Artificial Sequence: Synthetic oligonucleotide
  Antisense strand to SEQ ID NO: 1401446
uagcgcgaaggauagggcc

SEQ ID NO: 1401448 - RNA, 19 nt, Artificial Sequence
  Description of Artificial Sequence: Synthetic oligonucleotide
  Sense strand starting at position 2808 of SEQ ID NO: 1243208
cccaucugucuguguucua

SEQ ID NO: 1401449 - RNA, 19 nt, Artificial Sequence
  Description of Artificial Sequence: Synthetic oligonucleotide
  Antisense strand to SEQ ID NO: 1401448
uagaacacagacagauggg

SEQ ID NO: 1401450 - RNA, 19 nt, Artificial Sequence
  Description of Artificial Sequence: Synthetic oligonucleotide
  Sense strand starting at position 2815 of SEQ ID NO: 1243208
gucuguguucuagguccuu

SEQ ID NO: 1401451 - RNA, 19 nt, Artificial Sequence
  Description of Artificial Sequence: Synthetic oligonucleotide
  Antisense strand to SEQ ID NO: 1401450
aaggaccuagaacacagac

SEQ ID NO: 1401452 - RNA, 19 nt, Artificial Sequence
  Description of Artificial Sequence: Synthetic oligonucleotide
  Sense strand starting at position 2854 of SEQ ID NO: 1243208
caccaaagucugcgugcaa

SEQ ID NO: 1401453 - RNA, 19 nt, Artificial Sequence
  Description of Artificial Sequence: Synthetic oligonucleotide
  Antisense strand to SEQ ID NO: 1401452
uugcacgcagacuuuggug

SEQ ID NO: 1401454 - RNA, 19 nt, Artificial Sequence
  Description of Artificial Sequence: Synthetic oligonucleotide
  Sense strand starting at position 2905 of SEQ ID NO: 1243208
cggcguuuguauggucauu

SEQ ID NO: 1401455 - RNA, 19 nt, Artificial Sequence
  Description of Artificial Sequence: Synthetic oligonucleotide
  Antisense strand to SEQ ID NO: 1401454
aaugaccauacaaacgccg

SEQ ID NO: 1401456 - RNA, 19 nt, Artificial Sequence
  Description of Artificial Sequence: Synthetic oligonucleotide
  Sense strand starting at position 2907 of SEQ ID NO: 1243208
gcguuuguauggucauuaa

SEQ ID NO: 1401457 - RNA, 19 nt, Artificial Sequence
  Description of Artificial Sequence: Synthetic oligonucleotide
  Antisense strand to SEQ ID NO: 1401456
uuaaugaccauacaaacgc

SEQ ID NO: 1401458 - RNA, 19 nt, Artificial Sequence
  Description of Artificial Sequence: Synthetic oligonucleotide
  Sense strand starting at position 2910 of SEQ ID NO: 1243208
uuuguauggucauuaacau

SEQ ID NO: 1401459 - RNA, 19 nt, Artificial Sequence
  Description of Artificial Sequence: Synthetic oligonucleotide
  Antisense strand to SEQ ID NO: 1401458
auguuaaugaccauacaaa

SEQ ID NO: 1401460 - RNA, 19 nt, Artificial Sequence
  Description of Artificial Sequence: Synthetic oligonucleotide
  Sense strand starting at position 2911 of SEQ ID NO: 1243208
uuguauggucauuaacaug

SEQ ID NO: 1401461 - RNA, 19 nt, Artificial Sequence
  Description of Artificial Sequence: Synthetic oligonucleotide
  Antisense strand to SEQ ID NO: 1401460
cauguuaaugaccauacaa

SEQ ID NO: 1401462 - RNA, 19 nt, Artificial Sequence
  Description of Artificial Sequence: Synthetic oligonucleotide
  Sense strand starting at position 1 of SEQ ID NO: 1243209
aggauuuguuuccauaaga

SEQ ID NO: 1401463 - RNA, 19 nt, Artificial Sequence
  Description of Artificial Sequence: Synthetic oligonucleotide
  Antisense strand to SEQ ID NO: 1401462
ucuuauggaaacaaauccu

SEQ ID NO: 1401464 - RNA, 19 nt, Artificial Sequence
  Description of Artificial Sequence: Synthetic oligonucleotide
  Sense strand starting at position 64 of SEQ ID NO: 1243209
gcuugauugcaggaaguuc

SEQ ID NO: 1401465 - RNA, 19 nt, Artificial Sequence
  Description of Artificial Sequence: Synthetic oligonucleotide
  Antisense strand to SEQ ID NO: 1401464
gaacuuccugcaaucaagc

SEQ ID NO: 1401466 - RNA, 19 nt, Artificial Sequence
  Description of Artificial Sequence: Synthetic oligonucleotide
  Sense strand starting at position 99 of SEQ ID NO: 1243209
ugccuuaguccagagcaga

SEQ ID NO: 1401467 - RNA, 19 nt, Artificial Sequence
  Description of Artificial Sequence: Synthetic oligonucleotide
  Antisense strand to SEQ ID NO: 1401466
ucugcucuggacuaaggca

SEQ ID NO: 1401468 - RNA, 19 nt, Artificial Sequence
  Description of Artificial Sequence: Synthetic oligonucleotide
  Sense strand starting at position 1048 of SEQ ID NO: 1243209
cagcuucugcugcagaaga

SEQ ID NO: 1401469 - RNA, 19 nt, Artificial Sequence
  Description of Artificial Sequence: Synthetic oligonucleotide
  Antisense strand to SEQ ID NO: 1401468
ucuucugcagcagaagcug

SEQ ID NO: 1401470 - RNA, 19 nt, Artificial Sequence
  Description of Artificial Sequence: Synthetic oligonucleotide
  Sense strand starting at position 1125 of SEQ ID NO: 1243209
guagcuauuuccuaccacu

SEQ ID NO: 1401471 - RNA, 19 nt, Artificial Sequence
  Description of Artificial Sequence: Synthetic oligonucleotide
  Antisense strand to SEQ ID NO: 1401470
agugguaggaaauagcuac

SEQ ID NO: 1401472 - RNA, 19 nt, Artificial Sequence
  Description of Artificial Sequence: Synthetic oligonucleotide
  Sense strand starting at position 1200 of SEQ ID NO: 1243209
uggacuaacccuuguagac

SEQ ID NO: 1401473 - RNA, 19 nt, Artificial Sequence
  Description of Artificial Sequence: Synthetic oligonucleotide
  Antisense strand to SEQ ID NO: 1401472
gucuacaaggguuagucca

SEQ ID NO: 1401474 - RNA, 19 nt, Artificial Sequence
  Description of Artificial Sequence: Synthetic oligonucleotide
  Sense strand starting at position 2077 of SEQ ID NO: 1243209
aguccacguuuccuaggaa

SEQ ID NO: 1401475 - RNA, 19 nt, Artificial Sequence
  Description of Artificial Sequence: Synthetic oligonucleotide
  Antisense strand to SEQ ID NO: 1401474
uuccuaggaaacguggacu

SEQ ID NO: 1401476 - RNA, 19 nt, Artificial Sequence
  Description of Artificial Sequence: Synthetic oligonucleotide
  Sense strand starting at position 2078 of SEQ ID NO: 1243209
guccacguuuccuaggaaa

SEQ ID NO: 1401477 - RNA, 19 nt, Artificial Sequence
  Description of Artificial Sequence: Synthetic oligonucleotide
  Antisense strand to SEQ ID NO: 1401476
uuuccuaggaaacguggac

SEQ ID NO: 1401478 - RNA, 19 nt, Artificial Sequence
  Description of Artificial Sequence: Synthetic oligonucleotide
  Sense strand starting at position 2080 of SEQ ID NO: 1243209
ccacguuuccuaggaaacg

SEQ ID NO: 1401479 - RNA, 19 nt, Artificial Sequence
  Description of Artificial Sequence: Synthetic oligonucleotide
  Antisense strand to SEQ ID NO: 1401478
cguuuccuaggaaacgugg

SEQ ID NO: 1401480 - RNA, 19 nt, Artificial Sequence
  Description of Artificial Sequence: Synthetic oligonucleotide
  Sense strand starting at position 2218 of SEQ ID NO: 1243209
uuuauuuagcgcugugugu

SEQ ID NO: 1401481 - RNA, 19 nt, Artificial Sequence
  Description of Artificial Sequence: Synthetic oligonucleotide
  Antisense strand to SEQ ID NO: 1401480
acacacagcgcuaaauaaa

SEQ ID NO: 1401482 - RNA, 19 nt, Artificial Sequence
  Description of Artificial Sequence: Synthetic oligonucleotide
  Sense strand starting at position 2264 of SEQ ID NO: 1243209
gaccgugcacuguguagau

SEQ ID NO: 1401483 - RNA, 19 nt, Artificial Sequence
  Description of Artificial Sequence: Synthetic oligonucleotide
  Antisense strand to SEQ ID NO: 1401482
aucuacacagugcacgguc

SEQ ID NO: 1401484 - RNA, 19 nt, Artificial Sequence
  Description of Artificial Sequence: Synthetic oligonucleotide
  Sense strand starting at position 2337 of SEQ ID NO: 1243209
cugaaaugguuucgaguca

SEQ ID NO: 1401485 - RNA, 19 nt, Artificial Sequence
  Description of Artificial Sequence: Synthetic oligonucleotide
  Antisense strand to SEQ ID NO: 1401484
ugacucgaaaccauuucag

SEQ ID NO: 1401486 - RNA, 19 nt, Artificial Sequence
  Description of Artificial Sequence: Synthetic oligonucleotide
  Sense strand starting at position 2338 of SEQ ID NO: 1243209
ugaaaugguuucgagucaa

SEQ ID NO: 1401487 - RNA, 19 nt, Artificial Sequence
  Description of Artificial Sequence: Synthetic oligonucleotide
  Antisense strand to SEQ ID NO: 1401486
uugacucgaaaccauuuca

SEQ ID NO: 1401488 - RNA, 19 nt, Artificial Sequence
  Description of Artificial Sequence: Synthetic oligonucleotide
  Sense strand starting at position 2419 of SEQ ID NO: 1243209
gcccuuguucuguucccua

SEQ ID NO: 1401489 - RNA, 19 nt, Artificial Sequence
  Description of Artificial Sequence: Synthetic oligonucleotide
  Antisense strand to SEQ ID NO: 1401488
uagggaacagaacaagggc

SEQ ID NO: 1401490 - RNA, 19 nt, Artificial Sequence
  Description of Artificial Sequence: Synthetic oligonucleotide
  Sense strand starting at position 2646 of SEQ ID NO: 1243209
agcuuccucuuccgaggaa

SEQ ID NO: 1401491 - RNA, 19 nt, Artificial Sequence
  Description of Artificial Sequence: Synthetic oligonucleotide
  Antisense strand to SEQ ID NO: 1401490
uuccucggaagaggaagcu

SEQ ID NO: 1401492 - RNA, 19 nt, Artificial Sequence
  Description of Artificial Sequence: Synthetic oligonucleotide
  Sense strand starting at position 2647 of SEQ ID NO: 1243209
gcuuccucuuccgaggaaa

SEQ ID NO: 1401493 - RNA, 19 nt, Artificial Sequence
  Description of Artificial Sequence: Synthetic oligonucleotide
  Antisense strand to SEQ ID NO: 1401492
uuuccucggaagaggaagc

SEQ ID NO: 1401494 - RNA, 19 nt, Artificial Sequence
  Description of Artificial Sequence: Synthetic oligonucleotide
  Sense strand starting at position 3143 of SEQ ID NO: 1243209
gcuuguugcagggaggaga

SEQ ID NO: 1401495 - RNA, 19 nt, Artificial Sequence
  Description of Artificial Sequence: Synthetic oligonucleotide
  Antisense strand to SEQ ID NO: 1401494
ucuccucccugcaacaagc

SEQ ID NO: 1401496 - RNA, 19 nt, Artificial Sequence
  Description of Artificial Sequence: Synthetic oligonucleotide
  Sense strand starting at position 3280 of SEQ ID NO: 1243209
gggcaugacucuucgugac

SEQ ID NO: 1401497 - RNA, 19 nt, Artificial Sequence
  Description of Artificial Sequence: Synthetic oligonucleotide
  Antisense strand to SEQ ID NO: 1401496
gucacgaagagucaugccc

SEQ ID NO: 1401498 - RNA, 19 nt, Artificial Sequence
  Description of Artificial Sequence: Synthetic oligonucleotide
  Sense strand starting at position 3282 of SEQ ID NO: 1243209
gcaugacucuucgugacga

SEQ ID NO: 1401499 - RNA, 19 nt, Artificial Sequence
  Description of Artificial Sequence: Synthetic oligonucleotide
  Antisense strand to SEQ ID NO: 1401498
ucgucacgaagagucaugc

SEQ ID NO: 1401500 - RNA, 19 nt, Artificial Sequence
  Description of Artificial Sequence: Synthetic oligonucleotide
  Sense strand starting at position 3283 of SEQ ID NO: 1243209
caugacucuucgugacgau

SEQ ID NO: 1401501 - RNA, 19 nt, Artificial Sequence
  Description of Artificial Sequence: Synthetic oligonucleotide
  Antisense strand to SEQ ID NO: 1401500
aucgucacgaagagucaug

SEQ ID NO: 1401502 - RNA, 19 nt, Artificial Sequence
  Description of Artificial Sequence: Synthetic oligonucleotide
  Sense strand starting at position 3284 of SEQ ID NO: 1243209
augacucuucgugacgauu

SEQ ID NO: 1401503 - RNA, 19 nt, Artificial Sequence
  Description of Artificial Sequence: Synthetic oligonucleotide
  Antisense strand to SEQ ID NO: 1401502
aaucgucacgaagagucau

SEQ ID NO: 1401504 - RNA, 19 nt, Artificial Sequence
  Description of Artificial Sequence: Synthetic oligonucleotide
  Sense strand starting at position 3286 of SEQ ID NO: 1243209
gacucuucgugacgauucu

SEQ ID NO: 1401505 - RNA, 19 nt, Artificial Sequence
  Description of Artificial Sequence: Synthetic oligonucleotide
  Antisense strand to SEQ ID NO: 1401504
agaaucgucacgaagaguc

SEQ ID NO: 1401506 - RNA, 19 nt, Artificial Sequence
  Description of Artificial Sequence: Synthetic oligonucleotide
  Sense strand starting at position 3344 of SEQ ID NO: 1243209
guucuaucuccagguggac

SEQ ID NO: 1401507 - RNA, 19 nt, Artificial Sequence
  Description of Artificial Sequence: Synthetic oligonucleotide
  Antisense strand to SEQ ID NO: 1401506
guccaccuggagauagaac

SEQ ID NO: 1401508 - RNA, 19 nt, Artificial Sequence
  Description of Artificial Sequence: Synthetic oligonucleotide
  Sense strand starting at position 3560 of SEQ ID NO: 1243209
cuaugacugccuugaguga

SEQ ID NO: 1401509 - RNA, 19 nt, Artificial Sequence
  Description of Artificial Sequence: Synthetic oligonucleotide
  Antisense strand to SEQ ID NO: 1401508
ucacucaaggcagucauag

SEQ ID NO: 1401510 - RNA, 19 nt, Artificial Sequence
  Description of Artificial Sequence: Synthetic oligonucleotide
  Sense strand starting at position 3623 of SEQ ID NO: 1243209
ugguguaucuagguagaca

SEQ ID NO: 1401511 - RNA, 19 nt, Artificial Sequence
  Description of Artificial Sequence: Synthetic oligonucleotide
  Antisense strand to SEQ ID NO: 1401510
ugucuaccuagauacacca

SEQ ID NO: 1401512 - RNA, 19 nt, Artificial Sequence
  Description of Artificial Sequence: Synthetic oligonucleotide
  Sense strand starting at position 3624 of SEQ ID NO: 1243209
gguguaucuagguagacag

SEQ ID NO: 1401513 - RNA, 19 nt, Artificial Sequence
  Description of Artificial Sequence: Synthetic oligonucleotide
  Antisense strand to SEQ ID NO: 1401512
cugucuaccuagauacacc

SEQ ID NO: 1401514 - RNA, 19 nt, Artificial Sequence
  Description of Artificial Sequence: Synthetic oligonucleotide
  Sense strand starting at position 3729 of SEQ ID NO: 1243209
gagcuugaccagugauccu

SEQ ID NO: 1401515 - RNA, 19 nt, Artificial Sequence
  Description of Artificial Sequence: Synthetic oligonucleotide
  Antisense strand to SEQ ID NO: 1401514
aggaucacuggucaagcuc

SEQ ID NO: 1401516 - RNA, 19 nt, Artificial Sequence
  Description of Artificial Sequence: Synthetic oligonucleotide
  Sense strand starting at position 3880 of SEQ ID NO: 1243209
gucccagcuucuggaugaa

SEQ ID NO: 1401517 - RNA, 19 nt, Artificial Sequence
  Description of Artificial Sequence: Synthetic oligonucleotide
  Antisense strand to SEQ ID NO: 1401516
uucauccagaagcugggac

SEQ ID NO: 1401518 - RNA, 19 nt, Artificial Sequence
  Description of Artificial Sequence: Synthetic oligonucleotide
  Sense strand starting at position 3928 of SEQ ID NO: 1243209
acucgugugccuggcugaa

SEQ ID NO: 1401519 - RNA, 19 nt, Artificial Sequence
  Description of Artificial Sequence: Synthetic oligonucleotide
  Antisense strand to SEQ ID NO: 1401518
uucagccaggcacacgagu

SEQ ID NO: 1401520 - RNA, 19 nt, Artificial Sequence
  Description of Artificial Sequence: Synthetic oligonucleotide
  Sense strand starting at position 3942 of SEQ ID NO: 1243209
cugaaagcugccugacacu

SEQ ID NO: 1401521 - RNA, 19 nt, Artificial Sequence
  Description of Artificial Sequence: Synthetic oligonucleotide
  Antisense strand to SEQ ID NO: 1401520
agugucaggcagcuuucag

SEQ ID NO: 1401522 - RNA, 19 nt, Artificial Sequence
  Description of Artificial Sequence: Synthetic oligonucleotide
  Sense strand starting at position 67 of SEQ ID NO: 1243210
cguaucacgaauuaagguu

SEQ ID NO: 1401523 - RNA, 19 nt, Artificial Sequence
  Description of Artificial Sequence: Synthetic oligonucleotide
  Antisense strand to SEQ ID NO: 1401522
aaccuuaauucgugauacg

SEQ ID NO: 1401524 - RNA, 19 nt, Artificial Sequence
  Description of Artificial Sequence: Synthetic oligonucleotide
  Sense strand starting at position 90 of SEQ ID NO: 1243210
ggaagcacucccuaacuua

SEQ ID NO: 1401525 - RNA, 19 nt, Artificial Sequence
  Description of Artificial Sequence: Synthetic oligonucleotide
  Antisense strand to SEQ ID NO: 1401524
uaaguuagggagugcuucc

SEQ ID NO: 1401526 - RNA, 19 nt, Artificial Sequence
  Description of Artificial Sequence: Synthetic oligonucleotide
  Sense strand starting at position 163 of SEQ ID NO: 1243210
ugaacuuagagaugcgaau

SEQ ID NO: 1401527 - RNA, 19 nt, Artificial Sequence
  Description of Artificial Sequence: Synthetic oligonucleotide
  Antisense strand to SEQ ID NO: 1401526
auucgcaucucuaaguuca

SEQ ID NO: 1401528 - RNA, 19 nt, Artificial Sequence
  Description of Artificial Sequence: Synthetic oligonucleotide
  Sense strand starting at position 254 of SEQ ID NO: 1243210
aucucuaugcuugaauaag

SEQ ID NO: 1401529 - RNA, 19 nt, Artificial Sequence
  Description of Artificial Sequence: Synthetic oligonucleotide
  Antisense strand to SEQ ID NO: 1401528
cuuauucaagcauagagau

SEQ ID NO: 1401530 - RNA, 19 nt, Artificial Sequence
  Description of Artificial Sequence: Synthetic oligonucleotide
  Sense strand starting at position 342 of SEQ ID NO: 1243210
uccagucuuggucaagagu

SEQ ID NO: 1401531 - RNA, 19 nt, Artificial Sequence
  Description of Artificial Sequence: Synthetic oligonucleotide
  Antisense strand to SEQ ID NO: 1401530
acucuugaccaagacugga

SEQ ID NO: 1401532 - RNA, 19 nt, Artificial Sequence
  Description of Artificial Sequence: Synthetic oligonucleotide
  Sense strand starting at position 355 of SEQ ID NO: 1243210
aagaguuuggagugguuaa

SEQ ID NO: 1401533 - RNA, 19 nt, Artificial Sequence
  Description of Artificial Sequence: Synthetic oligonucleotide
  Antisense strand to SEQ ID NO: 1401532
uuaaccacuccaaacucuu

SEQ ID NO: 1401534 - RNA, 19 nt, Artificial Sequence
  Description of Artificial Sequence: Synthetic oligonucleotide
  Sense strand starting at position 356 of SEQ ID NO: 1243210
agaguuuggagugguuaau

SEQ ID NO: 1401535 - RNA, 19 nt, Artificial Sequence
  Description of Artificial Sequence: Synthetic oligonucleotide
  Antisense strand to SEQ ID NO: 1401534
auuaaccacuccaaacucu

SEQ ID NO: 1401536 - RNA, 19 nt, Artificial Sequence
  Description of Artificial Sequence: Synthetic oligonucleotide
  Sense strand starting at position 368 of SEQ ID NO: 1243210
gguuaauaucuaugcaaag

SEQ ID NO: 1401537 - RNA, 19 nt, Artificial Sequence
  Description of Artificial Sequence: Synthetic oligonucleotide
  Antisense strand to SEQ ID NO: 1401536
cuuugcauagauauuaacc

SEQ ID NO: 1401538 - RNA, 19 nt, Artificial Sequence
  Description of Artificial Sequence: Synthetic oligonucleotide
  Sense strand starting at position 369 of SEQ ID NO: 1243210
guuaauaucuaugcaaaga

SEQ ID NO: 1401539 - RNA, 19 nt, Artificial Sequence
  Description of Artificial Sequence: Synthetic oligonucleotide
  Antisense strand to SEQ ID NO: 1401538
ucuuugcauagauauuaac

SEQ ID NO: 1401540 - RNA, 19 nt, Artificial Sequence
  Description of Artificial Sequence: Synthetic oligonucleotide
  Sense strand starting at position 431 of SEQ ID NO: 1243210
acucuuagcuuccuaggga

SEQ ID NO: 1401541 - RNA, 19 nt, Artificial Sequence
  Description of Artificial Sequence: Synthetic oligonucleotide
  Antisense strand to SEQ ID NO: 1401540
ucccuaggaagcuaagagu

SEQ ID NO: 1401542 - RNA, 19 nt, Artificial Sequence
  Description of Artificial Sequence: Synthetic oligonucleotide
  Sense strand starting at position 647 of SEQ ID NO: 1243210
uuaagugucagugaaguau

SEQ ID NO: 1401543 - RNA, 19 nt, Artificial Sequence
  Description of Artificial Sequence: Synthetic oligonucleotide
  Antisense strand to SEQ ID NO: 1401542
auacuucacugacacuuaa

SEQ ID NO: 1401544 - RNA, 19 nt, Artificial Sequence
  Description of Artificial Sequence: Synthetic oligonucleotide
  Sense strand starting at position 799 of SEQ ID NO: 1243210
agauguuaagggcagucaa

SEQ ID NO: 1401545 - RNA, 19 nt, Artificial Sequence
  Description of Artificial Sequence: Synthetic oligonucleotide
  Antisense strand to SEQ ID NO: 1401544
uugacugcccuuaacaucu

SEQ ID NO: 1401546 - RNA, 19 nt, Artificial Sequence
  Description of Artificial Sequence: Synthetic oligonucleotide
  Sense strand starting at position 866 of SEQ ID NO: 1243210
gggaguuuaauguguaaag

SEQ ID NO: 1401547 - RNA, 19 nt, Artificial Sequence
  Description of Artificial Sequence: Synthetic oligonucleotide
  Antisense strand to SEQ ID NO: 1401546
cuuuacacauuaaacuccc

SEQ ID NO: 1401548 - RNA, 19 nt, Artificial Sequence
  Description of Artificial Sequence: Synthetic oligonucleotide
  Sense strand starting at position 867 of SEQ ID NO: 1243210
ggaguuuaauguguaaaga

SEQ ID NO: 1401549 - RNA, 19 nt, Artificial Sequence
  Description of Artificial Sequence: Synthetic oligonucleotide
  Antisense strand to SEQ ID NO: 1401548
ucuuuacacauuaaacucc

SEQ ID NO: 1401550 - RNA, 19 nt, Artificial Sequence
  Description of Artificial Sequence: Synthetic oligonucleotide
  Sense strand starting at position 868 of SEQ ID NO: 1243210
gaguuuaauguguaaagag

SEQ ID NO: 1401551 - RNA, 19 nt, Artificial Sequence
  Description of Artificial Sequence: Synthetic oligonucleotide
  Antisense strand to SEQ ID NO: 1401550
cucuuuacacauuaaacuc

SEQ ID NO: 1401552 - RNA, 19 nt, Artificial Sequence
  Description of Artificial Sequence: Synthetic oligonucleotide
  Sense strand starting at position 1110 of SEQ ID NO: 1243210
cugagauccugaguccaau

SEQ ID NO: 1401553 - RNA, 19 nt, Artificial Sequence
  Description of Artificial Sequence: Synthetic oligonucleotide
  Antisense strand to SEQ ID NO: 1401552
auuggacucaggaucucag

SEQ ID NO: 1401554 - RNA, 19 nt, Artificial Sequence
  Description of Artificial Sequence: Synthetic oligonucleotide
  Sense strand starting at position 1371 of SEQ ID NO: 1243210
ccugguacacuuugugaag

SEQ ID NO: 1401555 - RNA, 19 nt, Artificial Sequence
  Description of Artificial Sequence: Synthetic oligonucleotide
  Antisense strand to SEQ ID NO: 1401554
cuucacaaaguguaccagg

SEQ ID NO: 1401556 - RNA, 19 nt, Artificial Sequence
  Description of Artificial Sequence: Synthetic oligonucleotide
  Sense strand starting at position 1372 of SEQ ID NO: 1243210
cugguacacuuugugaaga

SEQ ID NO: 1401557 - RNA, 19 nt, Artificial Sequence
  Description of Artificial Sequence: Synthetic oligonucleotide
  Antisense strand to SEQ ID NO: 1401556
ucuucacaaaguguaccag

SEQ ID NO: 1401558 - RNA, 19 nt, Artificial Sequence
  Description of Artificial Sequence: Synthetic oligonucleotide
  Sense strand starting at position 1380 of SEQ ID NO: 1243210
cuuugugaagauuacucuu

SEQ ID NO: 1401559 - RNA, 19 nt, Artificial Sequence
  Description of Artificial Sequence: Synthetic oligonucleotide
  Antisense strand to SEQ ID NO: 1401558
aagaguaaucuucacaaag

SEQ ID NO: 1401560 - RNA, 19 nt, Artificial Sequence
  Description of Artificial Sequence: Synthetic oligonucleotide
  Sense strand starting at position 1382 of SEQ ID NO: 1243210
uugugaagauuacucuuaa

SEQ ID NO: 1401561 - RNA, 19 nt, Artificial Sequence
  Description of Artificial Sequence: Synthetic oligonucleotide
  Antisense strand to SEQ ID NO: 1401560
uuaagaguaaucuucacaa

SEQ ID NO: 1401562 - RNA, 19 nt, Artificial Sequence
  Description of Artificial Sequence: Synthetic oligonucleotide
  Sense strand starting at position 1383 of SEQ ID NO: 1243210
ugugaagauuacucuuaaa

SEQ ID NO: 1401563 - RNA, 19 nt, Artificial Sequence
  Description of Artificial Sequence: Synthetic oligonucleotide
  Antisense strand to SEQ ID NO: 1401562
uuuaagaguaaucuucaca

SEQ ID NO: 1401564 - RNA, 19 nt, Artificial Sequence
  Description of Artificial Sequence: Synthetic oligonucleotide
  Sense strand starting at position 1430 of SEQ ID NO: 1243210
gaaccaguggccugaauuc

SEQ ID NO: 1401565 - RNA, 19 nt, Artificial Sequence
  Description of Artificial Sequence: Synthetic oligonucleotide
  Antisense strand to SEQ ID NO: 1401564
gaauucaggccacugguuc

SEQ ID NO: 1401566 - RNA, 19 nt, Artificial Sequence
  Description of Artificial Sequence: Synthetic oligonucleotide
  Sense strand starting at position 1905 of SEQ ID NO: 1243210
gcgguucuacucgccgaau

SEQ ID NO: 1401567 - RNA, 19 nt, Artificial Sequence
  Description of Artificial Sequence: Synthetic oligonucleotide
  Antisense strand to SEQ ID NO: 1401566
auucggcgaguagaaccgc

SEQ ID NO: 1401568 - RNA, 19 nt, Artificial Sequence
  Description of Artificial Sequence: Synthetic oligonucleotide
  Sense strand starting at position 2166 of SEQ ID NO: 1243210
uccagucgaccaggaaaua

SEQ ID NO: 1401569 - RNA, 19 nt, Artificial Sequence
  Description of Artificial Sequence: Synthetic oligonucleotide
  Antisense strand to SEQ ID NO: 1401568
uauuuccuggucgacugga

SEQ ID NO: 1401570 - RNA, 19 nt, Artificial Sequence
  Description of Artificial Sequence: Synthetic oligonucleotide
  Sense strand starting at position 2178 of SEQ ID NO: 1243210
ggaaauacugacuggguuu

SEQ ID NO: 1401571 - RNA, 19 nt, Artificial Sequence
  Description of Artificial Sequence: Synthetic oligonucleotide
  Antisense strand to SEQ ID NO: 1401570
aaacccagucaguauuucc

SEQ ID NO: 1401572 - RNA, 19 nt, Artificial Sequence
  Description of Artificial Sequence: Synthetic oligonucleotide
  Sense strand starting at position 2304 of SEQ ID NO: 1243210
aggagugaaacuugccauu

SEQ ID NO: 1401573 - RNA, 19 nt, Artificial Sequence
  Description of Artificial Sequence: Synthetic oligonucleotide
  Antisense strand to SEQ ID NO: 1401572
aauggcaaguuucacuccu

SEQ ID NO: 1401574 - RNA, 19 nt, Artificial Sequence
  Description of Artificial Sequence: Synthetic oligonucleotide
  Sense strand starting at position 2444 of SEQ ID NO: 1243210
auccguugaacugaagagu

SEQ ID NO: 1401575 - RNA, 19 nt, Artificial Sequence
  Description of Artificial Sequence: Synthetic oligonucleotide
  Antisense strand to SEQ ID NO: 1401574
acucuucaguucaacggau

SEQ ID NO: 1401576 - RNA, 19 nt, Artificial Sequence
  Description of Artificial Sequence: Synthetic oligonucleotide
  Sense strand starting at position 2974 of SEQ ID NO: 1243210
uuacuuaggugaucacgga

SEQ ID NO: 1401577 - RNA, 19 nt, Artificial Sequence
  Description of Artificial Sequence: Synthetic oligonucleotide
  Antisense strand to SEQ ID NO: 1401576
uccgugaucaccuaaguaa

SEQ ID NO: 1401578 - RNA, 19 nt, Artificial Sequence
  Description of Artificial Sequence: Synthetic oligonucleotide
  Sense strand starting at position 3029 of SEQ ID NO: 1243210
cugggaauacuaugucgag

SEQ ID NO: 1401579 - RNA, 19 nt, Artificial Sequence
  Description of Artificial Sequence: Synthetic oligonucleotide
  Antisense strand to SEQ ID NO: 1401578
cucgacauaguauucccag

SEQ ID NO: 1401580 - RNA, 19 nt, Artificial Sequence
  Description of Artificial Sequence: Synthetic oligonucleotide
  Sense strand starting at position 3030 of SEQ ID NO: 1243210
ugggaauacuaugucgagu

SEQ ID NO: 1401581 - RNA, 19 nt, Artificial Sequence
  Description of Artificial Sequence: Synthetic oligonucleotide
  Antisense strand to SEQ ID NO: 1401580
acucgacauaguauuccca

SEQ ID NO: 1401582 - RNA, 19 nt, Artificial Sequence
  Description of Artificial Sequence: Synthetic oligonucleotide
  Sense strand starting at position 3033 of SEQ ID NO: 1243210
gaauacuaugucgagugca

SEQ ID NO: 1401583 - RNA, 19 nt, Artificial Sequence
  Description of Artificial Sequence: Synthetic oligonucleotide
  Antisense strand to SEQ ID NO: 1401582
ugcacucgacauaguauuc

SEQ ID NO: 1401584 - RNA, 19 nt, Artificial Sequence
  Description of Artificial Sequence: Synthetic oligonucleotide
  Sense strand starting at position 3041 of SEQ ID NO: 1243210
ugucgagugcaacauauga

SEQ ID NO: 1401585 - RNA, 19 nt, Artificial Sequence
  Description of Artificial Sequence: Synthetic oligonucleotide
  Antisense strand to SEQ ID NO: 1401584
ucauauguugcacucgaca

SEQ ID NO: 1401586 - RNA, 19 nt, Artificial Sequence
  Description of Artificial Sequence: Synthetic oligonucleotide
  Sense strand starting at position 3120 of SEQ ID NO: 1243210
ugggcugacacguaguaga

SEQ ID NO: 1401587 - RNA, 19 nt, Artificial Sequence
  Description of Artificial Sequence: Synthetic oligonucleotide
  Antisense strand to SEQ ID NO: 1401586
ucuacuacgugucagccca

SEQ ID NO: 1401588 - RNA, 19 nt, Artificial Sequence
  Description of Artificial Sequence: Synthetic oligonucleotide
  Sense strand starting at position 3142 of SEQ ID NO: 1243210
ucaauaagcauggguugaa

SEQ ID NO: 1401589 - RNA, 19 nt, Artificial Sequence
  Description of Artificial Sequence: Synthetic oligonucleotide
  Antisense strand to SEQ ID NO: 1401588
uucaacccaugcuuauuga

SEQ ID NO: 1401590 - RNA, 19 nt, Artificial Sequence
  Description of Artificial Sequence: Synthetic oligonucleotide
  Sense strand starting at position 3143 of SEQ ID NO: 1243210
caauaagcauggguugaau

SEQ ID NO: 1401591 - RNA, 19 nt, Artificial Sequence
  Description of Artificial Sequence: Synthetic oligonucleotide
  Antisense strand to SEQ ID NO: 1401590
auucaacccaugcuuauug

SEQ ID NO: 1401592 - RNA, 19 nt, Artificial Sequence
  Description of Artificial Sequence: Synthetic oligonucleotide
  Sense strand starting at position 3145 of SEQ ID NO: 1243210
auaagcauggguugaauga

SEQ ID NO: 1401593 - RNA, 19 nt, Artificial Sequence
  Description of Artificial Sequence: Synthetic oligonucleotide
  Antisense strand to SEQ ID NO: 1401592
ucauucaacccaugcuuau

SEQ ID NO: 1401594 - RNA, 19 nt, Artificial Sequence
  Description of Artificial Sequence: Synthetic oligonucleotide
  Sense strand starting at position 3563 of SEQ ID NO: 1243210
uuauuaguucuggaaugca

SEQ ID NO: 1401595 - RNA, 19 nt, Artificial Sequence
  Description of Artificial Sequence: Synthetic oligonucleotide
  Antisense strand to SEQ ID NO: 1401594
ugcauuccagaacuaauaa

SEQ ID NO: 1401596 - RNA, 19 nt, Artificial Sequence
  Description of Artificial Sequence: Synthetic oligonucleotide
  Sense strand starting at position 3571 of SEQ ID NO: 1243210
ucuggaaugcauuaaaccu

SEQ ID NO: 1401597 - RNA, 19 nt, Artificial Sequence
  Description of Artificial Sequence: Synthetic oligonucleotide
  Antisense strand to SEQ ID NO: 1401596
agguuuaaugcauuccaga

SEQ ID NO: 1401598 - RNA, 19 nt, Artificial Sequence
  Description of Artificial Sequence: Synthetic oligonucleotide
  Sense strand starting at position 3630 of SEQ ID NO: 1243210
ggugcuaaugaaugugaac

SEQ ID NO: 1401599 - RNA, 19 nt, Artificial Sequence
  Description of Artificial Sequence: Synthetic oligonucleotide
  Antisense strand to SEQ ID NO: 1401598
guucacauucauuagcacc

SEQ ID NO: 1401600 - RNA, 19 nt, Artificial Sequence
  Description of Artificial Sequence: Synthetic oligonucleotide
  Sense strand starting at position 3649 of SEQ ID NO: 1243210
ugggaagcagcguauuaau

SEQ ID NO: 1401601 - RNA, 19 nt, Artificial Sequence
  Description of Artificial Sequence: Synthetic oligonucleotide
  Antisense strand to SEQ ID NO: 1401600
auuaauacgcugcuuccca

SEQ ID NO: 1401602 - RNA, 19 nt, Artificial Sequence
  Description of Artificial Sequence: Synthetic oligonucleotide
  Sense strand starting at position 92 of SEQ ID NO: 1243211
aaaccuuggcuuugggaga

SEQ ID NO: 1401603 - RNA, 19 nt, Artificial Sequence
  Description of Artificial Sequence: Synthetic oligonucleotide
  Antisense strand to SEQ ID NO: 1401602
ucucccaaagccaagguuu

SEQ ID NO: 1401604 - RNA, 19 nt, Artificial Sequence
  Description of Artificial Sequence: Synthetic oligonucleotide
  Sense strand starting at position 97 of SEQ ID NO: 1243211
uuggcuuugggagauuaua

SEQ ID NO: 1401605 - RNA, 19 nt, Artificial Sequence
  Description of Artificial Sequence: Synthetic oligonucleotide
  Antisense strand to SEQ ID NO: 1401604
uauaaucucccaaagccaa

SEQ ID NO: 1401606 - RNA, 19 nt, Artificial Sequence
  Description of Artificial Sequence: Synthetic oligonucleotide
  Sense strand starting at position 106 of SEQ ID NO: 1243211
ggagauuauacagguccga

SEQ ID NO: 1401607 - RNA, 19 nt, Artificial Sequence
  Description of Artificial Sequence: Synthetic oligonucleotide
  Antisense strand to SEQ ID NO: 1401606
ucggaccuguauaaucucc

SEQ ID NO: 1401608 - RNA, 19 nt, Artificial Sequence
  Description of Artificial Sequence: Synthetic oligonucleotide
  Sense strand starting at position 132 of SEQ ID NO: 1243211
gugucuacugcagacgaau

SEQ ID NO: 1401609 - RNA, 19 nt, Artificial Sequence
  Description of Artificial Sequence: Synthetic oligonucleotide
  Antisense strand to SEQ ID NO: 1401608
auucgucugcaguagacac

SEQ ID NO: 1401610 - RNA, 19 nt, Artificial Sequence
  Description of Artificial Sequence: Synthetic oligonucleotide
  Sense strand starting at position 174 of SEQ ID NO: 1243211
acagaauuguuaggaaaug

SEQ ID NO: 1401611 - RNA, 19 nt, Artificial Sequence
  Description of Artificial Sequence: Synthetic oligonucleotide
  Antisense strand to SEQ ID NO: 1401610
cauuuccuaacaauucugu

SEQ ID NO: 1401612 - RNA, 19 nt, Artificial Sequence
  Description of Artificial Sequence: Synthetic oligonucleotide
  Sense strand starting at position 175 of SEQ ID NO: 1243211
cagaauuguuaggaaaugu

SEQ ID NO: 1401613 - RNA, 19 nt, Artificial Sequence
  Description of Artificial Sequence: Synthetic oligonucleotide
  Antisense strand to SEQ ID NO: 1401612
acauuuccuaacaauucug

SEQ ID NO: 1401614 - RNA, 19 nt, Artificial Sequence
  Description of Artificial Sequence: Synthetic oligonucleotide
  Sense strand starting at position 260 of SEQ ID NO: 1243211
ggcaaacauuucugacauc

SEQ ID NO: 1401615 - RNA, 19 nt, Artificial Sequence
  Description of Artificial Sequence: Synthetic oligonucleotide
  Antisense strand to SEQ ID NO: 1401614
gaugucagaaauguuugcc

SEQ ID NO: 1401616 - RNA, 19 nt, Artificial Sequence
  Description of Artificial Sequence: Synthetic oligonucleotide
  Sense strand starting at position 342 of SEQ ID NO: 1243211
guugaugccaaguaagauu

SEQ ID NO: 1401617 - RNA, 19 nt, Artificial Sequence
  Description of Artificial Sequence: Synthetic oligonucleotide
  Antisense strand to SEQ ID NO: 1401616
aaucuuacuuggcaucaac

SEQ ID NO: 1401618 - RNA, 19 nt, Artificial Sequence
  Description of Artificial Sequence: Synthetic oligonucleotide
  Sense strand starting at position 378 of SEQ ID NO: 1243211
aaguguuugcgucuuggua

SEQ ID NO: 1401619 - RNA, 19 nt, Artificial Sequence
  Description of Artificial Sequence: Synthetic oligonucleotide
  Antisense strand to SEQ ID NO: 1401618
uaccaagacgcaaacacuu

SEQ ID NO: 1401620 - RNA, 19 nt, Artificial Sequence
  Description of Artificial Sequence: Synthetic oligonucleotide
  Sense strand starting at position 379 of SEQ ID NO: 1243211
aguguuugcgucuugguau

SEQ ID NO: 1401621 - RNA, 19 nt, Artificial Sequence
  Description of Artificial Sequence: Synthetic oligonucleotide
  Antisense strand to SEQ ID NO: 1401620
auaccaagacgcaaacacu

SEQ ID NO: 1401622 - RNA, 19 nt, Artificial Sequence
  Description of Artificial Sequence: Synthetic oligonucleotide
  Sense strand starting at position 386 of SEQ ID NO: 1243211
gcgucuugguauccggaau

SEQ ID NO: 1401623 - RNA, 19 nt, Artificial Sequence
  Description of Artificial Sequence: Synthetic oligonucleotide
  Antisense strand to SEQ ID NO: 1401622
auuccggauaccaagacgc

SEQ ID NO: 1401624 - RNA, 19 nt, Artificial Sequence
  Description of Artificial Sequence: Synthetic oligonucleotide
  Sense strand starting at position 416 of SEQ ID NO: 1243211
guagcaaagcuuuagucau

SEQ ID NO: 1401625 - RNA, 19 nt, Artificial Sequence
  Description of Artificial Sequence: Synthetic oligonucleotide
  Antisense strand to SEQ ID NO: 1401624
augacuaaagcuuugcuac

SEQ ID NO: 1401626 - RNA, 19 nt, Artificial Sequence
  Description of Artificial Sequence: Synthetic oligonucleotide
  Sense strand starting at position 445 of SEQ ID NO: 1243211
ccaauagacguuugugaac

SEQ ID NO: 1401627 - RNA, 19 nt, Artificial Sequence
  Description of Artificial Sequence: Synthetic oligonucleotide
  Antisense strand to SEQ ID NO: 1401626
guucacaaacgucuauugg

SEQ ID NO: 1401628 - RNA, 19 nt, Artificial Sequence
  Description of Artificial Sequence: Synthetic oligonucleotide
  Sense strand starting at position 510 of SEQ ID NO: 1243211
ccaucucgugcuggaugau

SEQ ID NO: 1401629 - RNA, 19 nt, Artificial Sequence
  Description of Artificial Sequence: Synthetic oligonucleotide
  Antisense strand to SEQ ID NO: 1401628
aucauccagcacgagaugg

SEQ ID NO: 1401630 - RNA, 19 nt, Artificial Sequence
  Description of Artificial Sequence: Synthetic oligonucleotide
  Sense strand starting at position 667 of SEQ ID NO: 1243211
ggcuguucccauugacaag

SEQ ID NO: 1401631 - RNA, 19 nt, Artificial Sequence
  Description of Artificial Sequence: Synthetic oligonucleotide
  Antisense strand to SEQ ID NO: 1401630
cuugucaaugggaacagcc

SEQ ID NO: 1401632 - RNA, 19 nt, Artificial Sequence
  Description of Artificial Sequence: Synthetic oligonucleotide
  Sense strand starting at position 775 of SEQ ID NO: 1243211
gguucccaacucugguaau

SEQ ID NO: 1401633 - RNA, 19 nt, Artificial Sequence
  Description of Artificial Sequence: Synthetic oligonucleotide
  Antisense strand to SEQ ID NO: 1401632
auuaccagaguugggaacc

SEQ ID NO: 1401634 - RNA, 19 nt, Artificial Sequence
  Description of Artificial Sequence: Synthetic oligonucleotide
  Sense strand starting at position 778 of SEQ ID NO: 1243211
ucccaacucugguaauuag

SEQ ID NO: 1401635 - RNA, 19 nt, Artificial Sequence
  Description of Artificial Sequence: Synthetic oligonucleotide
  Antisense strand to SEQ ID NO: 1401634
cuaauuaccagaguuggga

SEQ ID NO: 1401636 - RNA, 19 nt, Artificial Sequence
  Description of Artificial Sequence: Synthetic oligonucleotide
  Sense strand starting at position 787 of SEQ ID NO: 1243211
ugguaauuagguuaucgag

SEQ ID NO: 1401637 - RNA, 19 nt, Artificial Sequence
  Description of Artificial Sequence: Synthetic oligonucleotide
  Antisense strand to SEQ ID NO: 1401636
cucgauaaccuaauuacca

SEQ ID NO: 1401638 - RNA, 19 nt, Artificial Sequence
  Description of Artificial Sequence: Synthetic oligonucleotide
  Sense strand starting at position 789 of SEQ ID NO: 1243211
guaauuagguuaucgagcu

SEQ ID NO: 1401639 - RNA, 19 nt, Artificial Sequence
  Description of Artificial Sequence: Synthetic oligonucleotide
  Antisense strand to SEQ ID NO: 1401638
agcucgauaaccuaauuac

SEQ ID NO: 1401640 - RNA, 19 nt, Artificial Sequence
  Description of Artificial Sequence: Synthetic oligonucleotide
  Sense strand starting at position 796 of SEQ ID NO: 1243211
gguuaucgagcucacugua

SEQ ID NO: 1401641 - RNA, 19 nt, Artificial Sequence
  Description of Artificial Sequence: Synthetic oligonucleotide
  Antisense strand to SEQ ID NO: 1401640
uacagugagcucgauaacc

SEQ ID NO: 1401642 - RNA, 19 nt, Artificial Sequence
  Description of Artificial Sequence: Synthetic oligonucleotide
  Sense strand starting at position 827 of SEQ ID NO: 1243211
gaaaucaucuuucuacggu

SEQ ID NO: 1401643 - RNA, 19 nt, Artificial Sequence
  Description of Artificial Sequence: Synthetic oligonucleotide
  Antisense strand to SEQ ID NO: 1401642
accguagaaagaugauuuc

SEQ ID NO: 1401644 - RNA, 19 nt, Artificial Sequence
  Description of Artificial Sequence: Synthetic oligonucleotide
  Sense strand starting at position 961 of SEQ ID NO: 1243211
cuugcugugcaggaacaau

SEQ ID NO: 1401645 - RNA, 19 nt, Artificial Sequence
  Description of Artificial Sequence: Synthetic oligonucleotide
  Antisense strand to SEQ ID NO: 1401644
auuguuccugcacagcaag

SEQ ID NO: 1401646 - RNA, 19 nt, Artificial Sequence
  Description of Artificial Sequence: Synthetic oligonucleotide
  Sense strand starting at position 1127 of SEQ ID NO: 1243211
gcguguuugccucagagag

SEQ ID NO: 1401647 - RNA, 19 nt, Artificial Sequence
  Description of Artificial Sequence: Synthetic oligonucleotide
  Antisense strand to SEQ ID NO: 1401646
cucucugaggcaaacacgc

SEQ ID NO: 1401648 - RNA, 19 nt, Artificial Sequence
  Description of Artificial Sequence: Synthetic oligonucleotide
  Sense strand starting at position 2378 of SEQ ID NO: 1243211
ccuggucauccagggugaa

SEQ ID NO: 1401649 - RNA, 19 nt, Artificial Sequence
  Description of Artificial Sequence: Synthetic oligonucleotide
  Antisense strand to SEQ ID NO: 1401648
uucacccuggaugaccagg

SEQ ID NO: 1401650 - RNA, 19 nt, Artificial Sequence
  Description of Artificial Sequence: Synthetic oligonucleotide
  Sense strand starting at position 2379 of SEQ ID NO: 1243211
cuggucauccagggugaaa

SEQ ID NO: 1401651 - RNA, 19 nt, Artificial Sequence
  Description of Artificial Sequence: Synthetic oligonucleotide
  Antisense strand to SEQ ID NO: 1401650
uuucacccuggaugaccag

SEQ ID NO: 1401652 - RNA, 19 nt, Artificial Sequence
  Description of Artificial Sequence: Synthetic oligonucleotide
  Sense strand starting at position 2405 of SEQ ID NO: 1243211
cucucuuuggcaggauaaa

SEQ ID NO: 1401653 - RNA, 19 nt, Artificial Sequence
  Description of Artificial Sequence: Synthetic oligonucleotide
  Antisense strand to SEQ ID NO: 1401652
uuuauccugccaaagagag

SEQ ID NO: 1401654 - RNA, 19 nt, Artificial Sequence
  Description of Artificial Sequence: Synthetic oligonucleotide
  Sense strand starting at position 3236 of SEQ ID NO: 1243211
ccaccuuuguuacagggaa

SEQ ID NO: 1401655 - RNA, 19 nt, Artificial Sequence
  Description of Artificial Sequence: Synthetic oligonucleotide
  Antisense strand to SEQ ID NO: 1401654
uucccuguaacaaaggugg

SEQ ID NO: 1401656 - RNA, 19 nt, Artificial Sequence
  Description of Artificial Sequence: Synthetic oligonucleotide
  Sense strand starting at position 3258 of SEQ ID NO: 1243211
gaagcuauacugugaagca

SEQ ID NO: 1401657 - RNA, 19 nt, Artificial Sequence
  Description of Artificial Sequence: Synthetic oligonucleotide
  Antisense strand to SEQ ID NO: 1401656
ugcuucacaguauagcuuc

SEQ ID NO: 1401658 - RNA, 19 nt, Artificial Sequence
  Description of Artificial Sequence: Synthetic oligonucleotide
  Sense strand starting at position 3359 of SEQ ID NO: 1243211
caggcuuugcacgugugau

SEQ ID NO: 1401659 - RNA, 19 nt, Artificial Sequence
  Description of Artificial Sequence: Synthetic oligonucleotide
  Antisense strand to SEQ ID NO: 1401658
aucacacgugcaaagccug

SEQ ID NO: 1401660 - RNA, 19 nt, Artificial Sequence
  Description of Artificial Sequence: Synthetic oligonucleotide
  Sense strand starting at position 3360 of SEQ ID NO: 1243211
aggcuuugcacgugugaug

SEQ ID NO: 1401661 - RNA, 19 nt, Artificial Sequence
  Description of Artificial Sequence: Synthetic oligonucleotide
  Antisense strand to SEQ ID NO: 1401660
caucacacgugcaaagccu

SEQ ID NO: 1401662 - RNA, 19 nt, Artificial Sequence
  Description of Artificial Sequence: Synthetic oligonucleotide
  Sense strand starting at position 3371 of SEQ ID NO: 1243211
gugugaugcacugacccau

SEQ ID NO: 1401663 - RNA, 19 nt, Artificial Sequence
  Description of Artificial Sequence: Synthetic oligonucleotide
  Antisense strand to SEQ ID NO: 1401662
augggucagugcaucacac

SEQ ID NO: 1401664 - RNA, 19 nt, Artificial Sequence
  Description of Artificial Sequence: Synthetic oligonucleotide
  Sense strand starting at position 3802 of SEQ ID NO: 1243211
auggaaucauacguaugua

SEQ ID NO: 1401665 - RNA, 19 nt, Artificial Sequence
  Description of Artificial Sequence: Synthetic oligonucleotide
  Antisense strand to SEQ ID NO: 1401664
uacauacguaugauuccau

SEQ ID NO: 1401666 - RNA, 19 nt, Artificial Sequence
  Description of Artificial Sequence: Synthetic oligonucleotide
  Sense strand starting at position 3803 of SEQ ID NO: 1243211
uggaaucauacguauguag

SEQ ID NO: 1401667 - RNA, 19 nt, Artificial Sequence
  Description of Artificial Sequence: Synthetic oligonucleotide
  Antisense strand to SEQ ID NO: 1401666
cuacauacguaugauucca

SEQ ID NO: 1401668 - RNA, 19 nt, Artificial Sequence
  Description of Artificial Sequence: Synthetic oligonucleotide
  Sense strand starting at position 3805 of SEQ ID NO: 1243211
gaaucauacguauguaguu

SEQ ID NO: 1401669 - RNA, 19 nt, Artificial Sequence
  Description of Artificial Sequence: Synthetic oligonucleotide
  Antisense strand to SEQ ID NO: 1401668
aacuacauacguaugauuc

SEQ ID NO: 1401670 - RNA, 19 nt, Artificial Sequence
  Description of Artificial Sequence: Synthetic oligonucleotide
  Sense strand starting at position 3835 of SEQ ID NO: 1243211
ggcuucuuccgcuuagcca

SEQ ID NO: 1401671 - RNA, 19 nt, Artificial Sequence
  Description of Artificial Sequence: Synthetic oligonucleotide
  Antisense strand to SEQ ID NO: 1401670
uggcuaagcggaagaagcc

SEQ ID NO: 1401672 - RNA, 19 nt, Artificial Sequence
  Description of Artificial Sequence: Synthetic oligonucleotide
  Sense strand starting at position 3901 of SEQ ID NO: 1243211
gaggcaaaucuauggcaac

SEQ ID NO: 1401673 - RNA, 19 nt, Artificial Sequence
  Description of Artificial Sequence: Synthetic oligonucleotide
  Antisense strand to SEQ ID NO: 1401672
guugccauagauuugccuc

SEQ ID NO: 1401674 - RNA, 19 nt, Artificial Sequence
  Description of Artificial Sequence: Synthetic oligonucleotide
  Sense strand starting at position 3904 of SEQ ID NO: 1243211
gcaaaucuauggcaacaga

SEQ ID NO: 1401675 - RNA, 19 nt, Artificial Sequence
  Description of Artificial Sequence: Synthetic oligonucleotide
  Antisense strand to SEQ ID NO: 1401674
ucuguugccauagauuugc

SEQ ID NO: 1401676 - RNA, 19 nt, Artificial Sequence
  Description of Artificial Sequence: Synthetic oligonucleotide
  Sense strand starting at position 3925 of SEQ ID NO: 1243211
guagguugccagggacuaa

SEQ ID NO: 1401677 - RNA, 19 nt, Artificial Sequence
  Description of Artificial Sequence: Synthetic oligonucleotide
  Antisense strand to SEQ ID NO: 1401676
uuagucccuggcaaccuac

SEQ ID NO: 1401678 - RNA, 19 nt, Artificial Sequence
  Description of Artificial Sequence: Synthetic oligonucleotide
  Sense strand starting at position 3942 of SEQ ID NO: 1243211
aaggaugcugucgaggaau

SEQ ID NO: 1401679 - RNA, 19 nt, Artificial Sequence
  Description of Artificial Sequence: Synthetic oligonucleotide
  Antisense strand to SEQ ID NO: 1401678
auuccucgacagcauccuu

SEQ ID NO: 1401680 - RNA, 19 nt, Artificial Sequence
  Description of Artificial Sequence: Synthetic oligonucleotide
  Sense strand starting at position 3944 of SEQ ID NO: 1243211
ggaugcugucgaggaauga

SEQ ID NO: 1401681 - RNA, 19 nt, Artificial Sequence
  Description of Artificial Sequence: Synthetic oligonucleotide
  Antisense strand to SEQ ID NO: 1401680
ucauuccucgacagcaucc

SEQ ID NO: 1401682 - RNA, 19 nt, Artificial Sequence
  Description of Artificial Sequence: Synthetic oligonucleotide
  Sense strand starting at position 96 of SEQ ID NO: 1243212
ugaccuaccuucuugaaga

SEQ ID NO: 1401683 - RNA, 19 nt, Artificial Sequence
  Description of Artificial Sequence: Synthetic oligonucleotide
  Antisense strand to SEQ ID NO: 1401682
ucuucaagaagguagguca

SEQ ID NO: 1401684 - RNA, 19 nt, Artificial Sequence
  Description of Artificial Sequence: Synthetic oligonucleotide
  Sense strand starting at position 904 of SEQ ID NO: 1243212
accaguaaggcuugggaga

SEQ ID NO: 1401685 - RNA, 19 nt, Artificial Sequence
  Description of Artificial Sequence: Synthetic oligonucleotide
  Antisense strand to SEQ ID NO: 1401684
ucucccaagccuuacuggu

SEQ ID NO: 1401686 - RNA, 19 nt, Artificial Sequence
  Description of Artificial Sequence: Synthetic oligonucleotide
  Sense strand starting at position 1084 of SEQ ID NO: 1243212
aauauuagccgggauuggu

SEQ ID NO: 1401687 - RNA, 19 nt, Artificial Sequence
  Description of Artificial Sequence: Synthetic oligonucleotide
  Antisense strand to SEQ ID NO: 1401686
accaaucccggcuaauauu

SEQ ID NO: 1401688 - RNA, 19 nt, Artificial Sequence
  Description of Artificial Sequence: Synthetic oligonucleotide
  Sense strand starting at position 1091 of SEQ ID NO: 1243212
gccgggauugguugcguau

SEQ ID NO: 1401689 - RNA, 19 nt, Artificial Sequence
  Description of Artificial Sequence: Synthetic oligonucleotide
  Antisense strand to SEQ ID NO: 1401688
auacgcaaccaaucccggc

SEQ ID NO: 1401690 - RNA, 19 nt, Artificial Sequence
  Description of Artificial Sequence: Synthetic oligonucleotide
  Sense strand starting at position 1100 of SEQ ID NO: 1243212
gguugcguaugccuauaau

SEQ ID NO: 1401691 - RNA, 19 nt, Artificial Sequence
  Description of Artificial Sequence: Synthetic oligonucleotide
  Antisense strand to SEQ ID NO: 1401690
auuauaggcauacgcaacc

SEQ ID NO: 1401692 - RNA, 19 nt, Artificial Sequence
  Description of Artificial Sequence: Synthetic oligonucleotide
  Sense strand starting at position 1329 of SEQ ID NO: 1243212
aagaacaguuccuaugugu

SEQ ID NO: 1401693 - RNA, 19 nt, Artificial Sequence
  Description of Artificial Sequence: Synthetic oligonucleotide
  Antisense strand to SEQ ID NO: 1401692
acacauaggaacuguucuu

SEQ ID NO: 1401694 - RNA, 19 nt, Artificial Sequence
  Description of Artificial Sequence: Synthetic oligonucleotide
  Sense strand starting at position 1345 of SEQ ID NO: 1243212
ugugucaaggguugcgaaa

SEQ ID NO: 1401695 - RNA, 19 nt, Artificial Sequence
  Description of Artificial Sequence: Synthetic oligonucleotide
  Antisense strand to SEQ ID NO: 1401694
uuucgcaacccuugacaca

SEQ ID NO: 1401696 - RNA, 19 nt, Artificial Sequence
  Description of Artificial Sequence: Synthetic oligonucleotide
  Sense strand starting at position 2736 of SEQ ID NO: 1243212
cggcucucaccuugaagga

SEQ ID NO: 1401697 - RNA, 19 nt, Artificial Sequence
  Description of Artificial Sequence: Synthetic oligonucleotide
  Antisense strand to SEQ ID NO: 1401696
uccuucaaggugagagccg

SEQ ID NO: 1401698 - RNA, 19 nt, Artificial Sequence
  Description of Artificial Sequence: Synthetic oligonucleotide
  Sense strand starting at position 2991 of SEQ ID NO: 1243212
ugcagcauccugcgaguua

SEQ ID NO: 1401699 - RNA, 19 nt, Artificial Sequence
  Description of Artificial Sequence: Synthetic oligonucleotide
  Antisense strand to SEQ ID NO: 1401698
uaacucgcaggaugcugca

SEQ ID NO: 1401700 - RNA, 19 nt, Artificial Sequence
  Description of Artificial Sequence: Synthetic oligonucleotide
  Sense strand starting at position 3000 of SEQ ID NO: 1243212
cugcgaguuaccugugaga

SEQ ID NO: 1401701 - RNA, 19 nt, Artificial Sequence
  Description of Artificial Sequence: Synthetic oligonucleotide
  Antisense strand to SEQ ID NO: 1401700
ucucacagguaacucgcag

SEQ ID NO: 1401702 - RNA, 19 nt, Artificial Sequence
  Description of Artificial Sequence: Synthetic oligonucleotide
  Sense strand starting at position 3002 of SEQ ID NO: 1243212
gcgaguuaccugugagauc

SEQ ID NO: 1401703 - RNA, 19 nt, Artificial Sequence
  Description of Artificial Sequence: Synthetic oligonucleotide
  Antisense strand to SEQ ID NO: 1401702
gaucucacagguaacucgc

SEQ ID NO: 1401704 - RNA, 19 nt, Artificial Sequence
  Description of Artificial Sequence: Synthetic oligonucleotide
  Sense strand starting at position 3085 of SEQ ID NO: 1243212
aggcuugggucugaggaga

SEQ ID NO: 1401705 - RNA, 19 nt, Artificial Sequence
  Description of Artificial Sequence: Synthetic oligonucleotide
  Antisense strand to SEQ ID NO: 1401704
ucuccucagacccaagccu

SEQ ID NO: 1401706 - RNA, 19 nt, Artificial Sequence
  Description of Artificial Sequence: Synthetic oligonucleotide
  Sense strand starting at position 307 of SEQ ID NO: 1243213
guggcugucaugggaaacu

SEQ ID NO: 1401707 - RNA, 19 nt, Artificial Sequence
  Description of Artificial Sequence: Synthetic oligonucleotide
  Antisense strand to SEQ ID NO: 1401706
aguuucccaugacagccac

SEQ ID NO: 1401708 - RNA, 19 nt, Artificial Sequence
  Description of Artificial Sequence: Synthetic oligonucleotide
  Sense strand starting at position 417 of SEQ ID NO: 1243213
gugugcauucucccuguau

SEQ ID NO: 1401709 - RNA, 19 nt, Artificial Sequence
  Description of Artificial Sequence: Synthetic oligonucleotide
  Antisense strand to SEQ ID NO: 1401708
auacagggagaaugcacac

SEQ ID NO: 1401710 - RNA, 19 nt, Artificial Sequence
  Description of Artificial Sequence: Synthetic oligonucleotide
  Sense strand starting at position 487 of SEQ ID NO: 1243213
gugguaaccuccuuacuga

SEQ ID NO: 1401711 - RNA, 19 nt, Artificial Sequence
  Description of Artificial Sequence: Synthetic oligonucleotide
  Antisense strand to SEQ ID NO: 1401710
ucaguaaggagguuaccac

SEQ ID NO: 1401712 - RNA, 19 nt, Artificial Sequence
  Description of Artificial Sequence: Synthetic oligonucleotide
  Sense strand starting at position 488 of SEQ ID NO: 1243213
ugguaaccuccuuacugau

SEQ ID NO: 1401713 - RNA, 19 nt, Artificial Sequence
  Description of Artificial Sequence: Synthetic oligonucleotide
  Antisense strand to SEQ ID NO: 1401712
aucaguaaggagguuacca

SEQ ID NO: 1401714 - RNA, 19 nt, Artificial Sequence
  Description of Artificial Sequence: Synthetic oligonucleotide
  Sense strand starting at position 1281 of SEQ ID NO: 1243213
cugccauaucaccauuguu

SEQ ID NO: 1401715 - RNA, 19 nt, Artificial Sequence
  Description of Artificial Sequence: Synthetic oligonucleotide
  Antisense strand to SEQ ID NO: 1401714
aacaauggugauauggcag

SEQ ID NO: 1401716 - RNA, 19 nt, Artificial Sequence
  Description of Artificial Sequence: Synthetic oligonucleotide
  Sense strand starting at position 1415 of SEQ ID NO: 1243213
guaccagauuuggaacuca

SEQ ID NO: 1401717 - RNA, 19 nt, Artificial Sequence
  Description of Artificial Sequence: Synthetic oligonucleotide
  Antisense strand to SEQ ID NO: 1401716
ugaguuccaaaucugguac

SEQ ID NO: 1401718 - RNA, 19 nt, Artificial Sequence
  Description of Artificial Sequence: Synthetic oligonucleotide
  Sense strand starting at position 1423 of SEQ ID NO: 1243213
uuuggaacucaaugaaugu

SEQ ID NO: 1401719 - RNA, 19 nt, Artificial Sequence
  Description of Artificial Sequence: Synthetic oligonucleotide
  Antisense strand to SEQ ID NO: 1401718
acauucauugaguuccaaa

SEQ ID NO: 1401720 - RNA, 19 nt, Artificial Sequence
  Description of Artificial Sequence: Synthetic oligonucleotide
  Sense strand starting at position 1453 of SEQ ID NO: 1243213
augaaugaauggccuaauu

SEQ ID NO: 1401721 - RNA, 19 nt, Artificial Sequence
  Description of Artificial Sequence: Synthetic oligonucleotide
  Antisense strand to SEQ ID NO: 1401720
aauuaggccauucauucau

SEQ ID NO: 1401722 - RNA, 19 nt, Artificial Sequence
  Description of Artificial Sequence: Synthetic oligonucleotide
  Sense strand starting at position 1529 of SEQ ID NO: 1243213
ugagaaucucuuggagagu

SEQ ID NO: 1401723 - RNA, 19 nt, Artificial Sequence
  Description of Artificial Sequence: Synthetic oligonucleotide
  Antisense strand to SEQ ID NO: 1401722
acucuccaagagauucuca

SEQ ID NO: 1401724 - RNA, 19 nt, Artificial Sequence
  Description of Artificial Sequence: Synthetic oligonucleotide
  Sense strand starting at position 1612 of SEQ ID NO: 1243213
gggugagucugggcauuau

SEQ ID NO: 1401725 - RNA, 19 nt, Artificial Sequence
  Description of Artificial Sequence: Synthetic oligonucleotide
  Antisense strand to SEQ ID NO: 1401724
auaaugcccagacucaccc

SEQ ID NO: 1401726 - RNA, 19 nt, Artificial Sequence
  Description of Artificial Sequence: Synthetic oligonucleotide
  Sense strand starting at position 1616 of SEQ ID NO: 1243213
gagucugggcauuauuauu

SEQ ID NO: 1401727 - RNA, 19 nt, Artificial Sequence
  Description of Artificial Sequence: Synthetic oligonucleotide
  Antisense strand to SEQ ID NO: 1401726
aauaauaaugcccagacuc

SEQ ID NO: 1401728 - RNA, 19 nt, Artificial Sequence
  Description of Artificial Sequence: Synthetic oligonucleotide
  Sense strand starting at position 1656 of SEQ ID NO: 1243213
gauccuaauguguagccau

SEQ ID NO: 1401729 - RNA, 19 nt, Artificial Sequence
  Description of Artificial Sequence: Synthetic oligonucleotide
  Antisense strand to SEQ ID NO: 1401728
auggcuacacauuaggauc

SEQ ID NO: 1401730 - RNA, 19 nt, Artificial Sequence
  Description of Artificial Sequence: Synthetic oligonucleotide
  Sense strand starting at position 1912 of SEQ ID NO: 1243213
ccuugugaucagggcagga

SEQ ID NO: 1401731 - RNA, 19 nt, Artificial Sequence
  Description of Artificial Sequence: Synthetic oligonucleotide
  Antisense strand to SEQ ID NO: 1401730
uccugcccugaucacaagg

SEQ ID NO: 1401732 - RNA, 19 nt, Artificial Sequence
  Description of Artificial Sequence: Synthetic oligonucleotide
  Sense strand starting at position 2073 of SEQ ID NO: 1243213
ggccauuguugaguaagag

SEQ ID NO: 1401733 - RNA, 19 nt, Artificial Sequence
  Description of Artificial Sequence: Synthetic oligonucleotide
  Antisense strand to SEQ ID NO: 1401732
cucuuacucaacaauggcc

SEQ ID NO: 1401734 - RNA, 19 nt, Artificial Sequence
  Description of Artificial Sequence: Synthetic oligonucleotide
  Sense strand starting at position 2182 of SEQ ID NO: 1243213
ugaacucagugccuauaga

SEQ ID NO: 1401735 - RNA, 19 nt, Artificial Sequence
  Description of Artificial Sequence: Synthetic oligonucleotide
  Antisense strand to SEQ ID NO: 1401734
ucuauaggcacugaguuca

SEQ ID NO: 1401736 - RNA, 19 nt, Artificial Sequence
  Description of Artificial Sequence: Synthetic oligonucleotide
  Sense strand starting at position 2183 of SEQ ID NO: 1243213
gaacucagugccuauagau

SEQ ID NO: 1401737 - RNA, 19 nt, Artificial Sequence
  Description of Artificial Sequence: Synthetic oligonucleotide
  Antisense strand to SEQ ID NO: 1401736
aucuauaggcacugaguuc

SEQ ID NO: 1401738 - RNA, 19 nt, Artificial Sequence
  Description of Artificial Sequence: Synthetic oligonucleotide
  Sense strand starting at position 2190 of SEQ ID NO: 1243213
gugccuauagauuggaauu

SEQ ID NO: 1401739 - RNA, 19 nt, Artificial Sequence
  Description of Artificial Sequence: Synthetic oligonucleotide
  Antisense strand to SEQ ID NO: 1401738
aauuccaaucuauaggcac

SEQ ID NO: 1401740 - RNA, 19 nt, Artificial Sequence
  Description of Artificial Sequence: Synthetic oligonucleotide
  Sense strand starting at position 2234 of SEQ ID NO: 1243213
cuguauggccuugagaaug

SEQ ID NO: 1401741 - RNA, 19 nt, Artificial Sequence
  Description of Artificial Sequence: Synthetic oligonucleotide
  Antisense strand to SEQ ID NO: 1401740
cauucucaaggccauacag

SEQ ID NO: 1401742 - RNA, 19 nt, Artificial Sequence
  Description of Artificial Sequence: Synthetic oligonucleotide
  Sense strand starting at position 2239 of SEQ ID NO: 1243213
uggccuugagaaugucacu

SEQ ID NO: 1401743 - RNA, 19 nt, Artificial Sequence
  Description of Artificial Sequence: Synthetic oligonucleotide
  Antisense strand to SEQ ID NO: 1401742
agugacauucucaaggcca

SEQ ID NO: 1401744 - RNA, 19 nt, Artificial Sequence
  Description of Artificial Sequence: Synthetic oligonucleotide
  Sense strand starting at position 2244 of SEQ ID NO: 1243213
uugagaaugucacuuacuc

SEQ ID NO: 1401745 - RNA, 19 nt, Artificial Sequence
  Description of Artificial Sequence: Synthetic oligonucleotide
  Antisense strand to SEQ ID NO: 1401744
gaguaagugacauucucaa

SEQ ID NO: 1401746 - RNA, 19 nt, Artificial Sequence
  Description of Artificial Sequence: Synthetic oligonucleotide
  Sense strand starting at position 2311 of SEQ ID NO: 1243213
ggguguuguaagcaaagua

SEQ ID NO: 1401747 - RNA, 19 nt, Artificial Sequence
  Description of Artificial Sequence: Synthetic oligonucleotide
  Antisense strand to SEQ ID NO: 1401746
uacuuugcuuacaacaccc

SEQ ID NO: 1401748 - RNA, 19 nt, Artificial Sequence
  Description of Artificial Sequence: Synthetic oligonucleotide
  Sense strand starting at position 2654 of SEQ ID NO: 1243213
uccagucuuugcccaaaug

SEQ ID NO: 1401749 - RNA, 19 nt, Artificial Sequence
  Description of Artificial Sequence: Synthetic oligonucleotide
  Antisense strand to SEQ ID NO: 1401748
cauuugggcaaagacugga

SEQ ID NO: 1401750 - RNA, 19 nt, Artificial Sequence
  Description of Artificial Sequence: Synthetic oligonucleotide
  Sense strand starting at position 2655 of SEQ ID NO: 1243213
ccagucuuugcccaaaugu

SEQ ID NO: 1401751 - RNA, 19 nt, Artificial Sequence
  Description of Artificial Sequence: Synthetic oligonucleotide
  Antisense strand to SEQ ID NO: 1401750
acauuugggcaaagacugg

SEQ ID NO: 1401752 - RNA, 19 nt, Artificial Sequence
  Description of Artificial Sequence: Synthetic oligonucleotide
  Sense strand starting at position 2695 of SEQ ID NO: 1243213
ccuggccacuuuguuuaaa

SEQ ID NO: 1401753 - RNA, 19 nt, Artificial Sequence
  Description of Artificial Sequence: Synthetic oligonucleotide
  Antisense strand to SEQ ID NO: 1401752
uuuaaacaaaguggccagg

SEQ ID NO: 1401754 - RNA, 19 nt, Artificial Sequence
  Description of Artificial Sequence: Synthetic oligonucleotide
  Sense strand starting at position 2696 of SEQ ID NO: 1243213
cuggccacuuuguuuaaau

SEQ ID NO: 1401755 - RNA, 19 nt, Artificial Sequence
  Description of Artificial Sequence: Synthetic oligonucleotide
  Antisense strand to SEQ ID NO: 1401754
auuuaaacaaaguggccag

SEQ ID NO: 1401756 - RNA, 19 nt, Artificial Sequence
  Description of Artificial Sequence: Synthetic oligonucleotide
  Sense strand starting at position 2697 of SEQ ID NO: 1243213
uggccacuuuguuuaaauu

SEQ ID NO: 1401757 - RNA, 19 nt, Artificial Sequence
  Description of Artificial Sequence: Synthetic oligonucleotide
  Antisense strand to SEQ ID NO: 1401756
aauuuaaacaaaguggcca

SEQ ID NO: 1401758 - RNA, 19 nt, Artificial Sequence
  Description of Artificial Sequence: Synthetic oligonucleotide
  Sense strand starting at position 2826 of SEQ ID NO: 1243213
ggugauaggugcucaguaa

SEQ ID NO: 1401759 - RNA, 19 nt, Artificial Sequence
  Description of Artificial Sequence: Synthetic oligonucleotide
  Antisense strand to SEQ ID NO: 1401758
uuacugagcaccuaucacc

SEQ ID NO: 1401760 - RNA, 19 nt, Artificial Sequence
  Description of Artificial Sequence: Synthetic oligonucleotide
  Sense strand starting at position 3343 of SEQ ID NO: 1243213
uguuuaaaugcaugacuuc

SEQ ID NO: 1401761 - RNA, 19 nt, Artificial Sequence
  Description of Artificial Sequence: Synthetic oligonucleotide
  Antisense strand to SEQ ID NO: 1401760
gaagucaugcauuuaaaca

SEQ ID NO: 1401762 - RNA, 19 nt, Artificial Sequence
  Description of Artificial Sequence: Synthetic oligonucleotide
  Sense strand starting at position 3397 of SEQ ID NO: 1243213
ucuccaggauuugaucaau

SEQ ID NO: 1401763 - RNA, 19 nt, Artificial Sequence
  Description of Artificial Sequence: Synthetic oligonucleotide
  Antisense strand to SEQ ID NO: 1401762
auugaucaaauccuggaga

SEQ ID NO: 1401764 - RNA, 19 nt, Artificial Sequence
  Description of Artificial Sequence: Synthetic oligonucleotide
  Sense strand starting at position 3489 of SEQ ID NO: 1243213
ugaauaucugaaugucuua

SEQ ID NO: 1401765 - RNA, 19 nt, Artificial Sequence
  Description of Artificial Sequence: Synthetic oligonucleotide
  Antisense strand to SEQ ID NO: 1401764
uaagacauucagauauuca

SEQ ID NO: 1401766 - RNA, 19 nt, Artificial Sequence
  Description of Artificial Sequence: Synthetic oligonucleotide
  Sense strand starting at position 3494 of SEQ ID NO: 1243213
aucugaaugucuuaauuug

SEQ ID NO: 1401767 - RNA, 19 nt, Artificial Sequence
  Description of Artificial Sequence: Synthetic oligonucleotide
  Antisense strand to SEQ ID NO: 1401766
caaauuaagacauucagau

SEQ ID NO: 1401768 - RNA, 19 nt, Artificial Sequence
  Description of Artificial Sequence: Synthetic oligonucleotide
  Sense strand starting at position 3572 of SEQ ID NO: 1243213
ugcaaauaauuccugggau

SEQ ID NO: 1401769 - RNA, 19 nt, Artificial Sequence
  Description of Artificial Sequence: Synthetic oligonucleotide
  Antisense strand to SEQ ID NO: 1401768
aucccaggaauuauuugca

SEQ ID NO: 1401770 - RNA, 19 nt, Artificial Sequence
  Description of Artificial Sequence: Synthetic oligonucleotide
  Sense strand starting at position 3574 of SEQ ID NO: 1243213
caaauaauuccugggaugu

SEQ ID NO: 1401771 - RNA, 19 nt, Artificial Sequence
  Description of Artificial Sequence: Synthetic oligonucleotide
  Antisense strand to SEQ ID NO: 1401770
acaucccaggaauuauuug

SEQ ID NO: 1401772 - RNA, 19 nt, Artificial Sequence
  Description of Artificial Sequence: Synthetic oligonucleotide
  Sense strand starting at position 3575 of SEQ ID NO: 1243213
aaauaauuccugggaugug

SEQ ID NO: 1401773 - RNA, 19 nt, Artificial Sequence
  Description of Artificial Sequence: Synthetic oligonucleotide
  Antisense strand to SEQ ID NO: 1401772
cacaucccaggaauuauuu

SEQ ID NO: 1401774 - RNA, 19 nt, Artificial Sequence
  Description of Artificial Sequence: Synthetic oligonucleotide
  Sense strand starting at position 3578 of SEQ ID NO: 1243213
uaauuccugggauguguuu

SEQ ID NO: 1401775 - RNA, 19 nt, Artificial Sequence
  Description of Artificial Sequence: Synthetic oligonucleotide
  Antisense strand to SEQ ID NO: 1401774
aaacacaucccaggaauua

SEQ ID NO: 1401776 - RNA, 19 nt, Artificial Sequence
  Description of Artificial Sequence: Synthetic oligonucleotide
  Sense strand starting at position 3584 of SEQ ID NO: 1243213
cugggauguguuugacucu

SEQ ID NO: 1401777 - RNA, 19 nt, Artificial Sequence
  Description of Artificial Sequence: Synthetic oligonucleotide
  Antisense strand to SEQ ID NO: 1401776
agagucaaacacaucccag

SEQ ID NO: 1401778 - RNA, 19 nt, Artificial Sequence
  Description of Artificial Sequence: Synthetic oligonucleotide
  Sense strand starting at position 3629 of SEQ ID NO: 1243213
ucuagucuggcauauauua

SEQ ID NO: 1401779 - RNA, 19 nt, Artificial Sequence
  Description of Artificial Sequence: Synthetic oligonucleotide
  Antisense strand to SEQ ID NO: 1401778
uaauauaugccagacuaga

SEQ ID NO: 1401780 - RNA, 19 nt, Artificial Sequence
  Description of Artificial Sequence: Synthetic oligonucleotide
  Sense strand starting at position 3667 of SEQ ID NO: 1243213
ugucaacuguuagucacaa

SEQ ID NO: 1401781 - RNA, 19 nt, Artificial Sequence
  Description of Artificial Sequence: Synthetic oligonucleotide
  Antisense strand to SEQ ID NO: 1401780
uugugacuaacaguugaca

SEQ ID NO: 1401782 - RNA, 19 nt, Artificial Sequence
  Description of Artificial Sequence: Synthetic oligonucleotide
  Sense strand starting at position 3668 of SEQ ID NO: 1243213
gucaacuguuagucacaaa

SEQ ID NO: 1401783 - RNA, 19 nt, Artificial Sequence
  Description of Artificial Sequence: Synthetic oligonucleotide
  Antisense strand to SEQ ID NO: 1401782
uuugugacuaacaguugac

SEQ ID NO: 1401784 - RNA, 19 nt, Artificial Sequence
  Description of Artificial Sequence: Synthetic oligonucleotide
  Sense strand starting at position 3696 of SEQ ID NO: 1243213
uuggguuauuaucccaaau

SEQ ID NO: 1401785 - RNA, 19 nt, Artificial Sequence
  Description of Artificial Sequence: Synthetic oligonucleotide
  Antisense strand to SEQ ID NO: 1401784
auuugggauaauaacccaa

SEQ ID NO: 1401786 - RNA, 19 nt, Artificial Sequence
  Description of Artificial Sequence: Synthetic oligonucleotide
  Sense strand starting at position 300 of SEQ ID NO: 1243214
ugcgcacagucauucugua

SEQ ID NO: 1401787 - RNA, 19 nt, Artificial Sequence
  Description of Artificial Sequence: Synthetic oligonucleotide
  Antisense strand to SEQ ID NO: 1401786
uacagaaugacugugcgca

SEQ ID NO: 1401788 - RNA, 19 nt, Artificial Sequence
  Description of Artificial Sequence: Synthetic oligonucleotide
  Sense strand starting at position 304 of SEQ ID NO: 1243214
cacagucauucuguacgua

SEQ ID NO: 1401789 - RNA, 19 nt, Artificial Sequence
  Description of Artificial Sequence: Synthetic oligonucleotide
  Antisense strand to SEQ ID NO: 1401788
uacguacagaaugacugug

SEQ ID NO: 1401790 - RNA, 19 nt, Artificial Sequence
  Description of Artificial Sequence: Synthetic oligonucleotide
  Sense strand starting at position 305 of SEQ ID NO: 1243214
acagucauucuguacguau

SEQ ID NO: 1401791 - RNA, 19 nt, Artificial Sequence
  Description of Artificial Sequence: Synthetic oligonucleotide
  Antisense strand to SEQ ID NO: 1401790
auacguacagaaugacugu

SEQ ID NO: 1401792 - RNA, 19 nt, Artificial Sequence
  Description of Artificial Sequence: Synthetic oligonucleotide
  Sense strand starting at position 307 of SEQ ID NO: 1243214
agucauucuguacguauuu

SEQ ID NO: 1401793 - RNA, 19 nt, Artificial Sequence
  Description of Artificial Sequence: Synthetic oligonucleotide
  Antisense strand to SEQ ID NO: 1401792
aaauacguacagaaugacu

SEQ ID NO: 1401794 - RNA, 19 nt, Artificial Sequence
  Description of Artificial Sequence: Synthetic oligonucleotide
  Sense strand starting at position 353 of SEQ ID NO: 1243214
ucuggcuuuccugauaaga

SEQ ID NO: 1401795 - RNA, 19 nt, Artificial Sequence
  Description of Artificial Sequence: Synthetic oligonucleotide
  Antisense strand to SEQ ID NO: 1401794
ucuuaucaggaaagccaga

SEQ ID NO: 1401796 - RNA, 19 nt, Artificial Sequence
  Description of Artificial Sequence: Synthetic oligonucleotide
  Sense strand starting at position 355 of SEQ ID NO: 1243214
uggcuuuccugauaagagu

SEQ ID NO: 1401797 - RNA, 19 nt, Artificial Sequence
  Description of Artificial Sequence: Synthetic oligonucleotide
  Antisense strand to SEQ ID NO: 1401796
acucuuaucaggaaagcca

SEQ ID NO: 1401798 - RNA, 19 nt, Artificial Sequence
  Description of Artificial Sequence: Synthetic oligonucleotide
  Sense strand starting at position 358 of SEQ ID NO: 1243214
cuuuccugauaagaguauu

SEQ ID NO: 1401799 - RNA, 19 nt, Artificial Sequence
  Description of Artificial Sequence: Synthetic oligonucleotide
  Antisense strand to SEQ ID NO: 1401798
aauacucuuaucaggaaag

SEQ ID NO: 1401800 - RNA, 19 nt, Artificial Sequence
  Description of Artificial Sequence: Synthetic oligonucleotide
  Sense strand starting at position 430 of SEQ ID NO: 1243214
auucuuuacggcuggaaau

SEQ ID NO: 1401801 - RNA, 19 nt, Artificial Sequence
  Description of Artificial Sequence: Synthetic oligonucleotide
  Antisense strand to SEQ ID NO: 1401800
auuuccagccguaaagaau

SEQ ID NO: 1401802 - RNA, 19 nt, Artificial Sequence
  Description of Artificial Sequence: Synthetic oligonucleotide
  Sense strand starting at position 431 of SEQ ID NO: 1243214
uucuuuacggcuggaaauu

SEQ ID NO: 1401803 - RNA, 19 nt, Artificial Sequence
  Description of Artificial Sequence: Synthetic oligonucleotide
  Antisense strand to SEQ ID NO: 1401802
aauuuccagccguaaagaa

SEQ ID NO: 1401804 - RNA, 19 nt, Artificial Sequence
  Description of Artificial Sequence: Synthetic oligonucleotide
  Sense strand starting at position 448 of SEQ ID NO: 1243214
uuuagagguuguuucuacu

SEQ ID NO: 1401805 - RNA, 19 nt, Artificial Sequence
  Description of Artificial Sequence: Synthetic oligonucleotide
  Antisense strand to SEQ ID NO: 1401804
aguagaaacaaccucuaaa

SEQ ID NO: 1401806 - RNA, 19 nt, Artificial Sequence
  Description of Artificial Sequence: Synthetic oligonucleotide
  Sense strand starting at position 451 of SEQ ID NO: 1243214
agagguuguuucuacuacu

SEQ ID NO: 1401807 - RNA, 19 nt, Artificial Sequence
  Description of Artificial Sequence: Synthetic oligonucleotide
  Antisense strand to SEQ ID NO: 1401806
aguaguagaaacaaccucu

SEQ ID NO: 1401808 - RNA, 19 nt, Artificial Sequence
  Description of Artificial Sequence: Synthetic oligonucleotide
  Sense strand starting at position 823 of SEQ ID NO: 1243214
ugcuuuaugcaguaaccuu

SEQ ID NO: 1401809 - RNA, 19 nt, Artificial Sequence
  Description of Artificial Sequence: Synthetic oligonucleotide
  Antisense strand to SEQ ID NO: 1401808
aagguuacugcauaaagca

SEQ ID NO: 1401810 - RNA, 19 nt, Artificial Sequence
  Description of Artificial Sequence: Synthetic oligonucleotide
  Sense strand starting at position 899 of SEQ ID NO: 1243214
gguguagacucauugccaa

SEQ ID NO: 1401811 - RNA, 19 nt, Artificial Sequence
  Description of Artificial Sequence: Synthetic oligonucleotide
  Antisense strand to SEQ ID NO: 1401810
uuggcaaugagucuacacc

SEQ ID NO: 1401812 - RNA, 19 nt, Artificial Sequence
  Description of Artificial Sequence: Synthetic oligonucleotide
  Sense strand starting at position 902 of SEQ ID NO: 1243214
guagacucauugccaaacu

SEQ ID NO: 1401813 - RNA, 19 nt, Artificial Sequence
  Description of Artificial Sequence: Synthetic oligonucleotide
  Antisense strand to SEQ ID NO: 1401812
aguuuggcaaugagucuac

SEQ ID NO: 1401814 - RNA, 19 nt, Artificial Sequence
  Description of Artificial Sequence: Synthetic oligonucleotide
  Sense strand starting at position 1116 of SEQ ID NO: 1243214
ucgggaucucgagaucauu

SEQ ID NO: 1401815 - RNA, 19 nt, Artificial Sequence
  Description of Artificial Sequence: Synthetic oligonucleotide
  Antisense strand to SEQ ID NO: 1401814
aaugaucucgagaucccga

SEQ ID NO: 1401816 - RNA, 19 nt, Artificial Sequence
  Description of Artificial Sequence: Synthetic oligonucleotide
  Sense strand starting at position 1128 of SEQ ID NO: 1243214
gaucauuugucgggaccuc

SEQ ID NO: 1401817 - RNA, 19 nt, Artificial Sequence
  Description of Artificial Sequence: Synthetic oligonucleotide
  Antisense strand to SEQ ID NO: 1401816
gaggucccgacaaaugauc

SEQ ID NO: 1401818 - RNA, 19 nt, Artificial Sequence
  Description of Artificial Sequence: Synthetic oligonucleotide
  Sense strand starting at position 1225 of SEQ ID NO: 1243214
cggucuguccgggagcaga

SEQ ID NO: 1401819 - RNA, 19 nt, Artificial Sequence
  Description of Artificial Sequence: Synthetic oligonucleotide
  Antisense strand to SEQ ID NO: 1401818
ucugcucccggacagaccg

SEQ ID NO: 1401820 - RNA, 19 nt, Artificial Sequence
  Description of Artificial Sequence: Synthetic oligonucleotide
  Sense strand starting at position 1491 of SEQ ID NO: 1243214
cggcuugccagccuguaaa

SEQ ID NO: 1401821 - RNA, 19 nt, Artificial Sequence
  Description of Artificial Sequence: Synthetic oligonucleotide
  Antisense strand to SEQ ID NO: 1401820
uuuacaggcuggcaagccg

SEQ ID NO: 1401822 - RNA, 19 nt, Artificial Sequence
  Description of Artificial Sequence: Synthetic oligonucleotide
  Sense strand starting at position 2028 of SEQ ID NO: 1243214
gguauugcccaauggcuaa

SEQ ID NO: 1401823 - RNA, 19 nt, Artificial Sequence
  Description of Artificial Sequence: Synthetic oligonucleotide
  Antisense strand to SEQ ID NO: 1401822
uuagccauugggcaauacc

SEQ ID NO: 1401824 - RNA, 19 nt, Artificial Sequence
  Description of Artificial Sequence: Synthetic oligonucleotide
  Sense strand starting at position 2153 of SEQ ID NO: 1243214
gcagucacgugccugagau

SEQ ID NO: 1401825 - RNA, 19 nt, Artificial Sequence
  Description of Artificial Sequence: Synthetic oligonucleotide
  Antisense strand to SEQ ID NO: 1401824
aucucaggcacgugacugc

SEQ ID NO: 1401826 - RNA, 19 nt, Artificial Sequence
  Description of Artificial Sequence: Synthetic oligonucleotide
  Sense strand starting at position 2154 of SEQ ID NO: 1243214
cagucacgugccugagauc

SEQ ID NO: 1401827 - RNA, 19 nt, Artificial Sequence
  Description of Artificial Sequence: Synthetic oligonucleotide
  Antisense strand to SEQ ID NO: 1401826
gaucucaggcacgugacug

SEQ ID NO: 1401828 - RNA, 19 nt, Artificial Sequence
  Description of Artificial Sequence: Synthetic oligonucleotide
  Sense strand starting at position 2226 of SEQ ID NO: 1243214
auuccucaccguuguuaga

SEQ ID NO: 1401829 - RNA, 19 nt, Artificial Sequence
  Description of Artificial Sequence: Synthetic oligonucleotide
  Antisense strand to SEQ ID NO: 1401828
ucuaacaacggugaggaau

SEQ ID NO: 1401830 - RNA, 19 nt, Artificial Sequence
  Description of Artificial Sequence: Synthetic oligonucleotide
  Sense strand starting at position 2623 of SEQ ID NO: 1243214
accuuugacuugguccuaa

SEQ ID NO: 1401831 - RNA, 19 nt, Artificial Sequence
  Description of Artificial Sequence: Synthetic oligonucleotide
  Antisense strand to SEQ ID NO: 1401830
uuaggaccaagucaaaggu

SEQ ID NO: 1401832 - RNA, 19 nt, Artificial Sequence
  Description of Artificial Sequence: Synthetic oligonucleotide
  Sense strand starting at position 2686 of SEQ ID NO: 1243214
cgugguugguggguagaga

SEQ ID NO: 1401833 - RNA, 19 nt, Artificial Sequence
  Description of Artificial Sequence: Synthetic oligonucleotide
  Antisense strand to SEQ ID NO: 1401832
ucucuacccaccaaccacg

SEQ ID NO: 1401834 - RNA, 19 nt, Artificial Sequence
  Description of Artificial Sequence: Synthetic oligonucleotide
  Sense strand starting at position 3059 of SEQ ID NO: 1243214
ggaaguugcacugagguga

SEQ ID NO: 1401835 - RNA, 19 nt, Artificial Sequence
  Description of Artificial Sequence: Synthetic oligonucleotide
  Antisense strand to SEQ ID NO: 1401834
ucaccucagugcaacuucc

SEQ ID NO: 1401836 - RNA, 19 nt, Artificial Sequence
  Description of Artificial Sequence: Synthetic oligonucleotide
  Sense strand starting at position 3504 of SEQ ID NO: 1243214
cccuaaagucuuuaguggu

SEQ ID NO: 1401837 - RNA, 19 nt, Artificial Sequence
  Description of Artificial Sequence: Synthetic oligonucleotide
  Antisense strand to SEQ ID NO: 1401836
accacuaaagacuuuaggg

SEQ ID NO: 1401838 - RNA, 19 nt, Artificial Sequence
  Description of Artificial Sequence: Synthetic oligonucleotide
  Sense strand starting at position 3510 of SEQ ID NO: 1243214
agucuuuagugguuuccca

SEQ ID NO: 1401839 - RNA, 19 nt, Artificial Sequence
  Description of Artificial Sequence: Synthetic oligonucleotide
  Antisense strand to SEQ ID NO: 1401838
ugggaaaccacuaaagacu

SEQ ID NO: 1401840 - RNA, 19 nt, Artificial Sequence
  Description of Artificial Sequence: Synthetic oligonucleotide
  Sense strand starting at position 3514 of SEQ ID NO: 1243214
uuuagugguuucccacaaa

SEQ ID NO: 1401841 - RNA, 19 nt, Artificial Sequence
  Description of Artificial Sequence: Synthetic oligonucleotide
  Antisense strand to SEQ ID NO: 1401840
uuugugggaaaccacuaaa

SEQ ID NO: 1401842 - RNA, 19 nt, Artificial Sequence
  Description of Artificial Sequence: Synthetic oligonucleotide
  Sense strand starting at position 3517 of SEQ ID NO: 1243214
agugguuucccacaaacca

SEQ ID NO: 1401843 - RNA, 19 nt, Artificial Sequence
  Description of Artificial Sequence: Synthetic oligonucleotide
  Antisense strand to SEQ ID NO: 1401842
ugguuugugggaaaccacu

SEQ ID NO: 1401844 - RNA, 19 nt, Artificial Sequence
  Description of Artificial Sequence: Synthetic oligonucleotide
  Sense strand starting at position 3533 of SEQ ID NO: 1243214
ccauuaagcuuugaacuga

SEQ ID NO: 1401845 - RNA, 19 nt, Artificial Sequence
  Description of Artificial Sequence: Synthetic oligonucleotide
  Antisense strand to SEQ ID NO: 1401844
ucaguucaaagcuuaaugg

SEQ ID NO: 1401846 - RNA, 19 nt, Artificial Sequence
  Description of Artificial Sequence: Synthetic oligonucleotide
  Sense strand starting at position 3552 of SEQ ID NO: 1243214
ccauuauauuggccugcua

SEQ ID NO: 1401847 - RNA, 19 nt, Artificial Sequence
  Description of Artificial Sequence: Synthetic oligonucleotide
  Antisense strand to SEQ ID NO: 1401846
uagcaggccaauauaaugg

SEQ ID NO: 1401848 - RNA, 19 nt, Artificial Sequence
  Description of Artificial Sequence: Synthetic oligonucleotide
  Sense strand starting at position 3554 of SEQ ID NO: 1243214
auuauauuggccugcuacu

SEQ ID NO: 1401849 - RNA, 19 nt, Artificial Sequence
  Description of Artificial Sequence: Synthetic oligonucleotide
  Antisense strand to SEQ ID NO: 1401848
aguagcaggccaauauaau

SEQ ID NO: 1401850 - RNA, 19 nt, Artificial Sequence
  Description of Artificial Sequence: Synthetic oligonucleotide
  Sense strand starting at position 3563 of SEQ ID NO: 1243214
gccugcuacugacaauuaa

SEQ ID NO: 1401851 - RNA, 19 nt, Artificial Sequence
  Description of Artificial Sequence: Synthetic oligonucleotide
  Antisense strand to SEQ ID NO: 1401850
uuaauugucaguagcaggc

SEQ ID NO: 1401852 - RNA, 19 nt, Artificial Sequence
  Description of Artificial Sequence: Synthetic oligonucleotide
  Sense strand starting at position 3668 of SEQ ID NO: 1243214
guggcauuccagugaugac

SEQ ID NO: 1401853 - RNA, 19 nt, Artificial Sequence
  Description of Artificial Sequence: Synthetic oligonucleotide
  Antisense strand to SEQ ID NO: 1401852
gucaucacuggaaugccac

SEQ ID NO: 1401854 - RNA, 19 nt, Artificial Sequence
  Description of Artificial Sequence: Synthetic oligonucleotide
  Sense strand starting at position 3717 of SEQ ID NO: 1243214
ucuuguaacuaugguaagu

SEQ ID NO: 1401855 - RNA, 19 nt, Artificial Sequence
  Description of Artificial Sequence: Synthetic oligonucleotide
  Antisense strand to SEQ ID NO: 1401854
acuuaccauaguuacaaga

SEQ ID NO: 1401856 - RNA, 19 nt, Artificial Sequence
  Description of Artificial Sequence: Synthetic oligonucleotide
  Sense strand starting at position 3719 of SEQ ID NO: 1243214
uuguaacuaugguaaguca

SEQ ID NO: 1401857 - RNA, 19 nt, Artificial Sequence
  Description of Artificial Sequence: Synthetic oligonucleotide
  Antisense strand to SEQ ID NO: 1401856
ugacuuaccauaguuacaa

SEQ ID NO: 1401858 - RNA, 19 nt, Artificial Sequence
  Description of Artificial Sequence: Synthetic oligonucleotide
  Sense strand starting at position 3722 of SEQ ID NO: 1243214
uaacuaugguaagucagau

SEQ ID NO: 1401859 - RNA, 19 nt, Artificial Sequence
  Description of Artificial Sequence: Synthetic oligonucleotide
  Antisense strand to SEQ ID NO: 1401858
aucugacuuaccauaguua

SEQ ID NO: 1401860 - RNA, 19 nt, Artificial Sequence
  Description of Artificial Sequence: Synthetic oligonucleotide
  Sense strand starting at position 3742 of SEQ ID NO: 1243214
gaguccuucccuggagaca

SEQ ID NO: 1401861 - RNA, 19 nt, Artificial Sequence
  Description of Artificial Sequence: Synthetic oligonucleotide
  Antisense strand to SEQ ID NO: 1401860
ugucuccagggaaggacuc

SEQ ID NO: 1401862 - RNA, 19 nt, Artificial Sequence
  Description of Artificial Sequence: Synthetic oligonucleotide
  Sense strand starting at position 3870 of SEQ ID NO: 1243214
caaggacguggucacaaua

SEQ ID NO: 1401863 - RNA, 19 nt, Artificial Sequence
  Description of Artificial Sequence: Synthetic oligonucleotide
  Antisense strand to SEQ ID NO: 1401862
uauugugaccacguccuug

SEQ ID NO: 1401864 - RNA, 19 nt, Artificial Sequence
  Description of Artificial Sequence: Synthetic oligonucleotide
  Sense strand starting at position 3909 of SEQ ID NO: 1243214
gcccuuguauauuuauagu

SEQ ID NO: 1401865 - RNA, 19 nt, Artificial Sequence
  Description of Artificial Sequence: Synthetic oligonucleotide
  Antisense strand to SEQ ID NO: 1401864
acuauaaauauacaagggc

SEQ ID NO: 1401866 - RNA, 19 nt, Artificial Sequence
  Description of Artificial Sequence: Synthetic oligonucleotide
  Sense strand starting at position 1327 of SEQ ID NO: 1243215
cgaccacugucaucaagaa

SEQ ID NO: 1401867 - RNA, 19 nt, Artificial Sequence
  Description of Artificial Sequence: Synthetic oligonucleotide
  Antisense strand to SEQ ID NO: 1401866
uucuugaugacaguggucg

SEQ ID NO: 1401868 - RNA, 19 nt, Artificial Sequence
  Description of Artificial Sequence: Synthetic oligonucleotide
  Sense strand starting at position 2244 of SEQ ID NO: 1243215
cgagcugucauuccggcau

SEQ ID NO: 1401869 - RNA, 19 nt, Artificial Sequence
  Description of Artificial Sequence: Synthetic oligonucleotide
  Antisense strand to SEQ ID NO: 1401868
augccggaaugacagcucg

SEQ ID NO: 1401870 - RNA, 19 nt, Artificial Sequence
  Description of Artificial Sequence: Synthetic oligonucleotide
  Sense strand starting at position 2387 of SEQ ID NO: 1243215
ggcgcaacuuugcuaguuu

SEQ ID NO: 1401871 - RNA, 19 nt, Artificial Sequence
  Description of Artificial Sequence: Synthetic oligonucleotide
  Antisense strand to SEQ ID NO: 1401870
aaacuagcaaaguugcgcc

SEQ ID NO: 1401872 - RNA, 19 nt, Artificial Sequence
  Description of Artificial Sequence: Synthetic oligonucleotide
  Sense strand starting at position 2427 of SEQ ID NO: 1243215
gaaggaaaucugggcuauc

SEQ ID NO: 1401873 - RNA, 19 nt, Artificial Sequence
  Description of Artificial Sequence: Synthetic oligonucleotide
  Antisense strand to SEQ ID NO: 1401872
gauagcccagauuuccuuc

SEQ ID NO: 1401874 - RNA, 19 nt, Artificial Sequence
  Description of Artificial Sequence: Synthetic oligonucleotide
  Sense strand starting at position 2428 of SEQ ID NO: 1243215
aaggaaaucugggcuauca

SEQ ID NO: 1401875 - RNA, 19 nt, Artificial Sequence
  Description of Artificial Sequence: Synthetic oligonucleotide
  Antisense strand to SEQ ID NO: 1401874
ugauagcccagauuuccuu

SEQ ID NO: 1401876 - RNA, 19 nt, Artificial Sequence
  Description of Artificial Sequence: Synthetic oligonucleotide
  Sense strand starting at position 2586 of SEQ ID NO: 1243215
ggcgccuuguaguuguuaa

SEQ ID NO: 1401877 - RNA, 19 nt, Artificial Sequence
  Description of Artificial Sequence: Synthetic oligonucleotide
  Antisense strand to SEQ ID NO: 1401876
uuaacaacuacaaggcgcc

SEQ ID NO: 1401878 - RNA, 19 nt, Artificial Sequence
  Description of Artificial Sequence: Synthetic oligonucleotide
  Sense strand starting at position 2587 of SEQ ID NO: 1243215
gcgccuuguaguuguuaau

SEQ ID NO: 1401879 - RNA, 19 nt, Artificial Sequence
  Description of Artificial Sequence: Synthetic oligonucleotide
  Antisense strand to SEQ ID NO: 1401878
auuaacaacuacaaggcgc

SEQ ID NO: 1401880 - RNA, 19 nt, Artificial Sequence
  Description of Artificial Sequence: Synthetic oligonucleotide
  Sense strand starting at position 2593 of SEQ ID NO: 1243215
uguaguuguuaaugucgau

SEQ ID NO: 1401881 - RNA, 19 nt, Artificial Sequence
  Description of Artificial Sequence: Synthetic oligonucleotide
  Antisense strand to SEQ ID NO: 1401880
aucgacauuaacaacuaca

SEQ ID NO: 1401882 - RNA, 19 nt, Artificial Sequence
  Description of Artificial Sequence: Synthetic oligonucleotide
  Sense strand starting at position 2596 of SEQ ID NO: 1243215
aguuguuaaugucgauaau

SEQ ID NO: 1401883 - RNA, 19 nt, Artificial Sequence
  Description of Artificial Sequence: Synthetic oligonucleotide
  Antisense strand to SEQ ID NO: 1401882
auuaucgacauuaacaacu

SEQ ID NO: 1401884 - RNA, 19 nt, Artificial Sequence
  Description of Artificial Sequence: Synthetic oligonucleotide
  Sense strand starting at position 2597 of SEQ ID NO: 1243215
guuguuaaugucgauaaug

SEQ ID NO: 1401885 - RNA, 19 nt, Artificial Sequence
  Description of Artificial Sequence: Synthetic oligonucleotide
  Antisense strand to SEQ ID NO: 1401884
cauuaucgacauuaacaac

SEQ ID NO: 1401886 - RNA, 19 nt, Artificial Sequence
  Description of Artificial Sequence: Synthetic oligonucleotide
  Sense strand starting at position 3246 of SEQ ID NO: 1243215
ccaugcaguucuugaguaa

SEQ ID NO: 1401887 - RNA, 19 nt, Artificial Sequence
  Description of Artificial Sequence: Synthetic oligonucleotide
  Antisense strand to SEQ ID NO: 1401886
uuacucaagaacugcaugg

SEQ ID NO: 1401888 - RNA, 19 nt, Artificial Sequence
  Description of Artificial Sequence: Synthetic oligonucleotide
  Sense strand starting at position 3247 of SEQ ID NO: 1243215
caugcaguucuugaguaau

SEQ ID NO: 1401889 - RNA, 19 nt, Artificial Sequence
  Description of Artificial Sequence: Synthetic oligonucleotide
  Antisense strand to SEQ ID NO: 1401888
auuacucaagaacugcaug

SEQ ID NO: 1401890 - RNA, 19 nt, Artificial Sequence
  Description of Artificial Sequence: Synthetic oligonucleotide
  Sense strand starting at position 3250 of SEQ ID NO: 1243215
gcaguucuugaguaaugca

SEQ ID NO: 1401891 - RNA, 19 nt, Artificial Sequence
  Description of Artificial Sequence: Synthetic oligonucleotide
  Antisense strand to SEQ ID NO: 1401890
ugcauuacucaagaacugc

SEQ ID NO: 1401892 - RNA, 19 nt, Artificial Sequence
  Description of Artificial Sequence: Synthetic oligonucleotide
  Sense strand starting at position 3499 of SEQ ID NO: 1243215
gccagaaugcuuggccaag

SEQ ID NO: 1401893 - RNA, 19 nt, Artificial Sequence
  Description of Artificial Sequence: Synthetic oligonucleotide
  Antisense strand to SEQ ID NO: 1401892
cuuggccaagcauucuggc

SEQ ID NO: 1401894 - RNA, 19 nt, Artificial Sequence
  Description of Artificial Sequence: Synthetic oligonucleotide
  Sense strand starting at position 3696 of SEQ ID NO: 1243215
acccuuuccugccgagaac

SEQ ID NO: 1401895 - RNA, 19 nt, Artificial Sequence
  Description of Artificial Sequence: Synthetic oligonucleotide
  Antisense strand to SEQ ID NO: 1401894
guucucggcaggaaagggu

SEQ ID NO: 1401896 - RNA, 19 nt, Artificial Sequence
  Description of Artificial Sequence: Synthetic oligonucleotide
  Sense strand starting at position 3707 of SEQ ID NO: 1243215
ccgagaaccucugucuaug

SEQ ID NO: 1401897 - RNA, 19 nt, Artificial Sequence
  Description of Artificial Sequence: Synthetic oligonucleotide
  Antisense strand to SEQ ID NO: 1401896
cauagacagagguucucgg

SEQ ID NO: 1401898 - RNA, 19 nt, Artificial Sequence
  Description of Artificial Sequence: Synthetic oligonucleotide
  Sense strand starting at position 3719 of SEQ ID NO: 1243215
gucuauggccaauggauga

SEQ ID NO: 1401899 - RNA, 19 nt, Artificial Sequence
  Description of Artificial Sequence: Synthetic oligonucleotide
  Antisense strand to SEQ ID NO: 1401898
ucauccauuggccauagac

SEQ ID NO: 1401900 - RNA, 19 nt, Artificial Sequence
  Description of Artificial Sequence: Synthetic oligonucleotide
  Sense strand starting at position 3955 of SEQ ID NO: 1243215
cccuacagcugguguauua

SEQ ID NO: 1401901 - RNA, 19 nt, Artificial Sequence
  Description of Artificial Sequence: Synthetic oligonucleotide
  Antisense strand to SEQ ID NO: 1401900
uaauacaccagcuguaggg

SEQ ID NO: 1401902 - RNA, 19 nt, Artificial Sequence
  Description of Artificial Sequence: Synthetic oligonucleotide
  Sense strand starting at position 3962 of SEQ ID NO: 1243215
gcugguguauuaguuauau

SEQ ID NO: 1401903 - RNA, 19 nt, Artificial Sequence
  Description of Artificial Sequence: Synthetic oligonucleotide
  Antisense strand to SEQ ID NO: 1401902
auauaacuaauacaccagc

SEQ ID NO: 1401904 - RNA, 19 nt, Artificial Sequence
  Description of Artificial Sequence: Synthetic oligonucleotide
  Sense strand starting at position 3964 of SEQ ID NO: 1243215
ugguguauuaguuauauac

SEQ ID NO: 1401905 - RNA, 19 nt, Artificial Sequence
  Description of Artificial Sequence: Synthetic oligonucleotide
  Antisense strand to SEQ ID NO: 1401904
guauauaacuaauacacca

SEQ ID NO: 1401906 - RNA, 19 nt, Artificial Sequence
  Description of Artificial Sequence: Synthetic oligonucleotide
  Sense strand starting at position 3966 of SEQ ID NO: 1243215
guguauuaguuauauacug

SEQ ID NO: 1401907 - RNA, 19 nt, Artificial Sequence
  Description of Artificial Sequence: Synthetic oligonucleotide
  Antisense strand to SEQ ID NO: 1401906
caguauauaacuaauacac

SEQ ID NO: 1401908 - RNA, 19 nt, Artificial Sequence
  Description of Artificial Sequence: Synthetic oligonucleotide
  Sense strand starting at position 3974 of SEQ ID NO: 1243215
guuauauacugcuguguaa

SEQ ID NO: 1401909 - RNA, 19 nt, Artificial Sequence
  Description of Artificial Sequence: Synthetic oligonucleotide
  Antisense strand to SEQ ID NO: 1401908
uuacacagcaguauauaac

SEQ ID NO: 1401910 - RNA, 19 nt, Artificial Sequence
  Description of Artificial Sequence: Synthetic oligonucleotide
  Sense strand starting at position 3977 of SEQ ID NO: 1243215
auauacugcuguguaacaa

SEQ ID NO: 1401911 - RNA, 19 nt, Artificial Sequence
  Description of Artificial Sequence: Synthetic oligonucleotide
  Antisense strand to SEQ ID NO: 1401910
uuguuacacagcaguauau

SEQ ID NO: 1401912 - RNA, 19 nt, Artificial Sequence
  Description of Artificial Sequence: Synthetic oligonucleotide
  Sense strand starting at position 94 of SEQ ID NO: 1243216
gacagauucccacggucca

SEQ ID NO: 1401913 - RNA, 19 nt, Artificial Sequence
  Description of Artificial Sequence: Synthetic oligonucleotide
  Antisense strand to SEQ ID NO: 1401912
uggaccgugggaaucuguc

SEQ ID NO: 1401914 - RNA, 19 nt, Artificial Sequence
  Description of Artificial Sequence: Synthetic oligonucleotide
  Sense strand starting at position 178 of SEQ ID NO: 1243216
acgcaaguuuaagaaauua

SEQ ID NO: 1401915 - RNA, 19 nt, Artificial Sequence
  Description of Artificial Sequence: Synthetic oligonucleotide
  Antisense strand to SEQ ID NO: 1401914
uaauuucuuaaacuugcgu

SEQ ID NO: 1401916 - RNA, 19 nt, Artificial Sequence
  Description of Artificial Sequence: Synthetic oligonucleotide
  Sense strand starting at position 597 of SEQ ID NO: 1243216
cguuuacaugcaugcggaa

SEQ ID NO: 1401917 - RNA, 19 nt, Artificial Sequence
  Description of Artificial Sequence: Synthetic oligonucleotide
  Antisense strand to SEQ ID NO: 1401916
uuccgcaugcauguaaacg

SEQ ID NO: 1401918 - RNA, 19 nt, Artificial Sequence
  Description of Artificial Sequence: Synthetic oligonucleotide
  Sense strand starting at position 672 of SEQ ID NO: 1243216
gucaaacauuaagaaggaa

SEQ ID NO: 1401919 - RNA, 19 nt, Artificial Sequence
  Description of Artificial Sequence: Synthetic oligonucleotide
  Antisense strand to SEQ ID NO: 1401918
uuccuucuuaauguuugac

SEQ ID NO: 1401920 - RNA, 19 nt, Artificial Sequence
  Description of Artificial Sequence: Synthetic oligonucleotide
  Sense strand starting at position 2008 of SEQ ID NO: 1243216
ggauauaaguuugaugacu

SEQ ID NO: 1401921 - RNA, 19 nt, Artificial Sequence
  Description of Artificial Sequence: Synthetic oligonucleotide
  Antisense strand to SEQ ID NO: 1401920
agucaucaaacuuauaucc

SEQ ID NO: 1401922 - RNA, 19 nt, Artificial Sequence
  Description of Artificial Sequence: Synthetic oligonucleotide
  Sense strand starting at position 2010 of SEQ ID NO: 1243216
auauaaguuugaugacugu

SEQ ID NO: 1401923 - RNA, 19 nt, Artificial Sequence
  Description of Artificial Sequence: Synthetic oligonucleotide
  Antisense strand to SEQ ID NO: 1401922
acagucaucaaacuuauau

SEQ ID NO: 1401924 - RNA, 19 nt, Artificial Sequence
  Description of Artificial Sequence: Synthetic oligonucleotide
  Sense strand starting at position 2014 of SEQ ID NO: 1243216
aaguuugaugacugucuuu

SEQ ID NO: 1401925 - RNA, 19 nt, Artificial Sequence
  Description of Artificial Sequence: Synthetic oligonucleotide
  Antisense strand to SEQ ID NO: 1401924
aaagacagucaucaaacuu

SEQ ID NO: 1401926 - RNA, 19 nt, Artificial Sequence
  Description of Artificial Sequence: Synthetic oligonucleotide
  Sense strand starting at position 2046 of SEQ ID NO: 1243216
cacgaucucugucgacaga

SEQ ID NO: 1401927 - RNA, 19 nt, Artificial Sequence
  Description of Artificial Sequence: Synthetic oligonucleotide
  Antisense strand to SEQ ID NO: 1401926
ucugucgacagagaucgug

SEQ ID NO: 1401928 - RNA, 19 nt, Artificial Sequence
  Description of Artificial Sequence: Synthetic oligonucleotide
  Sense strand starting at position 2047 of SEQ ID NO: 1243216
acgaucucugucgacagaa

SEQ ID NO: 1401929 - RNA, 19 nt, Artificial Sequence
  Description of Artificial Sequence: Synthetic oligonucleotide
  Antisense strand to SEQ ID NO: 1401928
uucugucgacagagaucgu

SEQ ID NO: 1401930 - RNA, 19 nt, Artificial Sequence
  Description of Artificial Sequence: Synthetic oligonucleotide
  Sense strand starting at position 2057 of SEQ ID NO: 1243216
ucgacagaaccuuagucuu

SEQ ID NO: 1401931 - RNA, 19 nt, Artificial Sequence
  Description of Artificial Sequence: Synthetic oligonucleotide
  Antisense strand to SEQ ID NO: 1401930
aagacuaagguucugucga

SEQ ID NO: 1401932 - RNA, 19 nt, Artificial Sequence
  Description of Artificial Sequence: Synthetic oligonucleotide
  Sense strand starting at position 2060 of SEQ ID NO: 1243216
acagaaccuuagucuuaug

SEQ ID NO: 1401933 - RNA, 19 nt, Artificial Sequence
  Description of Artificial Sequence: Synthetic oligonucleotide
  Antisense strand to SEQ ID NO: 1401932
cauaagacuaagguucugu

SEQ ID NO: 1401934 - RNA, 19 nt, Artificial Sequence
  Description of Artificial Sequence: Synthetic oligonucleotide
  Sense strand starting at position 2065 of SEQ ID NO: 1243216
accuuagucuuaugcauag

SEQ ID NO: 1401935 - RNA, 19 nt, Artificial Sequence
  Description of Artificial Sequence: Synthetic oligonucleotide
  Antisense strand to SEQ ID NO: 1401934
cuaugcauaagacuaaggu

SEQ ID NO: 1401936 - RNA, 19 nt, Artificial Sequence
  Description of Artificial Sequence: Synthetic oligonucleotide
  Sense strand starting at position 2130 of SEQ ID NO: 1243216
auauuauaugcauaagggu

SEQ ID NO: 1401937 - RNA, 19 nt, Artificial Sequence
  Description of Artificial Sequence: Synthetic oligonucleotide
  Antisense strand to SEQ ID NO: 1401936
acccuuaugcauauaauau

SEQ ID NO: 1401938 - RNA, 19 nt, Artificial Sequence
  Description of Artificial Sequence: Synthetic oligonucleotide
  Sense strand starting at position 2275 of SEQ ID NO: 1243216
gagauaggcucacuauguu

SEQ ID NO: 1401939 - RNA, 19 nt, Artificial Sequence
  Description of Artificial Sequence: Synthetic oligonucleotide
  Antisense strand to SEQ ID NO: 1401938
aacauagugagccuaucuc

SEQ ID NO: 1401940 - RNA, 19 nt, Artificial Sequence
  Description of Artificial Sequence: Synthetic oligonucleotide
  Sense strand starting at position 2442 of SEQ ID NO: 1243216
gggauccagcaauguacaa

SEQ ID NO: 1401941 - RNA, 19 nt, Artificial Sequence
  Description of Artificial Sequence: Synthetic oligonucleotide
  Antisense strand to SEQ ID NO: 1401940
uuguacauugcuggauccc

SEQ ID NO: 1401942 - RNA, 19 nt, Artificial Sequence
  Description of Artificial Sequence: Synthetic oligonucleotide
  Sense strand starting at position 2588 of SEQ ID NO: 1243216
ccagaugaggucugccaga

SEQ ID NO: 1401943 - RNA, 19 nt, Artificial Sequence
  Description of Artificial Sequence: Synthetic oligonucleotide
  Antisense strand to SEQ ID NO: 1401942
ucuggcagaccucaucugg

SEQ ID NO: 1401944 - RNA, 19 nt, Artificial Sequence
  Description of Artificial Sequence: Synthetic oligonucleotide
  Sense strand starting at position 2624 of SEQ ID NO: 1243216
gccauaggcuccugugcua

SEQ ID NO: 1401945 - RNA, 19 nt, Artificial Sequence
  Description of Artificial Sequence: Synthetic oligonucleotide
  Antisense strand to SEQ ID NO: 1401944
uagcacaggagccuauggc

SEQ ID NO: 1401946 - RNA, 19 nt, Artificial Sequence
  Description of Artificial Sequence: Synthetic oligonucleotide
  Sense strand starting at position 2627 of SEQ ID NO: 1243216
auaggcuccugugcuagau

SEQ ID NO: 1401947 - RNA, 19 nt, Artificial Sequence
  Description of Artificial Sequence: Synthetic oligonucleotide
  Antisense strand to SEQ ID NO: 1401946
aucuagcacaggagccuau

SEQ ID NO: 1401948 - RNA, 19 nt, Artificial Sequence
  Description of Artificial Sequence: Synthetic oligonucleotide
  Sense strand starting at position 2629 of SEQ ID NO: 1243216
aggcuccugugcuagauaa

SEQ ID NO: 1401949 - RNA, 19 nt, Artificial Sequence
  Description of Artificial Sequence: Synthetic oligonucleotide
  Antisense strand to SEQ ID NO: 1401948
uuaucuagcacaggagccu

SEQ ID NO: 1401950 - RNA, 19 nt, Artificial Sequence
  Description of Artificial Sequence: Synthetic oligonucleotide
  Sense strand starting at position 2631 of SEQ ID NO: 1243216
gcuccugugcuagauaaau

SEQ ID NO: 1401951 - RNA, 19 nt, Artificial Sequence
  Description of Artificial Sequence: Synthetic oligonucleotide
  Antisense strand to SEQ ID NO: 1401950
auuuaucuagcacaggagc

SEQ ID NO: 1401952 - RNA, 19 nt, Artificial Sequence
  Description of Artificial Sequence: Synthetic oligonucleotide
  Sense strand starting at position 2717 of SEQ ID NO: 1243216
ugaccaauuugagacauuc

SEQ ID NO: 1401953 - RNA, 19 nt, Artificial Sequence
  Description of Artificial Sequence: Synthetic oligonucleotide
  Antisense strand to SEQ ID NO: 1401952
gaaugucucaaauugguca

SEQ ID NO: 1401954 - RNA, 19 nt, Artificial Sequence
  Description of Artificial Sequence: Synthetic oligonucleotide
  Sense strand starting at position 2829 of SEQ ID NO: 1243216
gcacaugaauuugggagaa

SEQ ID NO: 1401955 - RNA, 19 nt, Artificial Sequence
  Description of Artificial Sequence: Synthetic oligonucleotide
  Antisense strand to SEQ ID NO: 1401954
uucucccaaauucaugugc

SEQ ID NO: 1401956 - RNA, 19 nt, Artificial Sequence
  Description of Artificial Sequence: Synthetic oligonucleotide
  Sense strand starting at position 2842 of SEQ ID NO: 1243216
ggagaaaccugguugucug

SEQ ID NO: 1401957 - RNA, 19 nt, Artificial Sequence
  Description of Artificial Sequence: Synthetic oligonucleotide
  Antisense strand to SEQ ID NO: 1401956
cagacaaccagguuucucc

SEQ ID NO: 1401958 - RNA, 19 nt, Artificial Sequence
  Description of Artificial Sequence: Synthetic oligonucleotide
  Sense strand starting at position 2849 of SEQ ID NO: 1243216
ccugguugucugcaggaga

SEQ ID NO: 1401959 - RNA, 19 nt, Artificial Sequence
  Description of Artificial Sequence: Synthetic oligonucleotide
  Antisense strand to SEQ ID NO: 1401958
ucuccugcagacaaccagg

SEQ ID NO: 1401960 - RNA, 19 nt, Artificial Sequence
  Description of Artificial Sequence: Synthetic oligonucleotide
  Sense strand starting at position 2910 of SEQ ID NO: 1243216
uucuguuuacgugcaguaa

SEQ ID NO: 1401961 - RNA, 19 nt, Artificial Sequence
  Description of Artificial Sequence: Synthetic oligonucleotide
  Antisense strand to SEQ ID NO: 1401960
uuacugcacguaaacagaa

SEQ ID NO: 1401962 - RNA, 19 nt, Artificial Sequence
  Description of Artificial Sequence: Synthetic oligonucleotide
  Sense strand starting at position 2911 of SEQ ID NO: 1243216
ucuguuuacgugcaguaaa

SEQ ID NO: 1401963 - RNA, 19 nt, Artificial Sequence
  Description of Artificial Sequence: Synthetic oligonucleotide
  Antisense strand to SEQ ID NO: 1401962
uuuacugcacguaaacaga

SEQ ID NO: 1401964 - RNA, 19 nt, Artificial Sequence
  Description of Artificial Sequence: Synthetic oligonucleotide
  Sense strand starting at position 2932 of SEQ ID NO: 1243216
gcaaacaaaugguguagau

SEQ ID NO: 1401965 - RNA, 19 nt, Artificial Sequence
  Description of Artificial Sequence: Synthetic oligonucleotide
  Antisense strand to SEQ ID NO: 1401964
aucuacaccauuuguuugc

SEQ ID NO: 1401966 - RNA, 19 nt, Artificial Sequence
  Description of Artificial Sequence: Synthetic oligonucleotide
  Sense strand starting at position 3340 of SEQ ID NO: 1243216
aaagaugggucuuguccuu

SEQ ID NO: 1401967 - RNA, 19 nt, Artificial Sequence
  Description of Artificial Sequence: Synthetic oligonucleotide
  Antisense strand to SEQ ID NO: 1401966
aaggacaagacccaucuuu

SEQ ID NO: 1401968 - RNA, 19 nt, Artificial Sequence
  Description of Artificial Sequence: Synthetic oligonucleotide
  Sense strand starting at position 3356 of SEQ ID NO: 1243216
cuuaguagguucucauaac

SEQ ID NO: 1401969 - RNA, 19 nt, Artificial Sequence
  Description of Artificial Sequence: Synthetic oligonucleotide
  Antisense strand to SEQ ID NO: 1401968
guuaugagaaccuacuaag

SEQ ID NO: 1401970 - RNA, 19 nt, Artificial Sequence
  Description of Artificial Sequence: Synthetic oligonucleotide
  Sense strand starting at position 3914 of SEQ ID NO: 1243216
ugcugaggcuggcauuaaa

SEQ ID NO: 1401971 - RNA, 19 nt, Artificial Sequence
  Description of Artificial Sequence: Synthetic oligonucleotide
  Antisense strand to SEQ ID NO: 1401970
uuuaaugccagccucagca

SEQ ID NO: 1401972 - RNA, 19 nt, Artificial Sequence
  Description of Artificial Sequence: Synthetic oligonucleotide
  Sense strand starting at position 99 of SEQ ID NO: 1243217
uacucaacugcugguguua

SEQ ID NO: 1401973 - RNA, 19 nt, Artificial Sequence
  Description of Artificial Sequence: Synthetic oligonucleotide
  Antisense strand to SEQ ID NO: 1401972
uaacaccagcaguugagua

SEQ ID NO: 1401974 - RNA, 19 nt, Artificial Sequence
  Description of Artificial Sequence: Synthetic oligonucleotide
  Sense strand starting at position 172 of SEQ ID NO: 1243217
cagagaauucuccagcgug

SEQ ID NO: 1401975 - RNA, 19 nt, Artificial Sequence
  Description of Artificial Sequence: Synthetic oligonucleotide
  Antisense strand to SEQ ID NO: 1401974
cacgcuggagaauucucug

SEQ ID NO: 1401976 - RNA, 19 nt, Artificial Sequence
  Description of Artificial Sequence: Synthetic oligonucleotide
  Sense strand starting at position 583 of SEQ ID NO: 1243217
ucaacucuccagugacaag

SEQ ID NO: 1401977 - RNA, 19 nt, Artificial Sequence
  Description of Artificial Sequence: Synthetic oligonucleotide
  Antisense strand to SEQ ID NO: 1401976
cuugucacuggagaguuga

SEQ ID NO: 1401978 - RNA, 19 nt, Artificial Sequence
  Description of Artificial Sequence: Synthetic oligonucleotide
  Sense strand starting at position 703 of SEQ ID NO: 1243217
uccugaaugccacaugcau

SEQ ID NO: 1401979 - RNA, 19 nt, Artificial Sequence
  Description of Artificial Sequence: Synthetic oligonucleotide
  Antisense strand to SEQ ID NO: 1401978
augcauguggcauucagga

SEQ ID NO: 1401980 - RNA, 19 nt, Artificial Sequence
  Description of Artificial Sequence: Synthetic oligonucleotide
  Sense strand starting at position 858 of SEQ ID NO: 1243217
gcccuaacacugggacaau

SEQ ID NO: 1401981 - RNA, 19 nt, Artificial Sequence
  Description of Artificial Sequence: Synthetic oligonucleotide
  Antisense strand to SEQ ID NO: 1401980
auugucccaguguuagggc

SEQ ID NO: 1401982 - RNA, 19 nt, Artificial Sequence
  Description of Artificial Sequence: Synthetic oligonucleotide
  Sense strand starting at position 947 of SEQ ID NO: 1243217
gagguaggcucuguuacca

SEQ ID NO: 1401983 - RNA, 19 nt, Artificial Sequence
  Description of Artificial Sequence: Synthetic oligonucleotide
  Antisense strand to SEQ ID NO: 1401982
ugguaacagagccuaccuc

SEQ ID NO: 1401984 - RNA, 19 nt, Artificial Sequence
  Description of Artificial Sequence: Synthetic oligonucleotide
  Sense strand starting at position 1337 of SEQ ID NO: 1243217
ugcagcuggcucugaaaua

SEQ ID NO: 1401985 - RNA, 19 nt, Artificial Sequence
  Description of Artificial Sequence: Synthetic oligonucleotide
  Antisense strand to SEQ ID NO: 1401984
uauuucagagccagcugca

SEQ ID NO: 1401986 - RNA, 19 nt, Artificial Sequence
  Description of Artificial Sequence: Synthetic oligonucleotide
  Sense strand starting at position 1362 of SEQ ID NO: 1243217
gcuucuuuccgggagcauc

SEQ ID NO: 1401987 - RNA, 19 nt, Artificial Sequence
  Description of Artificial Sequence: Synthetic oligonucleotide
  Antisense strand to SEQ ID NO: 1401986
gaugcucccggaaagaagc

SEQ ID NO: 1401988 - RNA, 19 nt, Artificial Sequence
  Description of Artificial Sequence: Synthetic oligonucleotide
  Sense strand starting at position 2338 of SEQ ID NO: 1243217
agugaacgcuguucagaga

SEQ ID NO: 1401989 - RNA, 19 nt, Artificial Sequence
  Description of Artificial Sequence: Synthetic oligonucleotide
  Antisense strand to SEQ ID NO: 1401988
ucucugaacagcguucacu

SEQ ID NO: 1401990 - RNA, 19 nt, Artificial Sequence
  Description of Artificial Sequence: Synthetic oligonucleotide
  Sense strand starting at position 2339 of SEQ ID NO: 1243217
gugaacgcuguucagagaa

SEQ ID NO: 1401991 - RNA, 19 nt, Artificial Sequence
  Description of Artificial Sequence: Synthetic oligonucleotide
  Antisense strand to SEQ ID NO: 1401990
uucucugaacagcguucac

SEQ ID NO: 1401992 - RNA, 19 nt, Artificial Sequence
  Description of Artificial Sequence: Synthetic oligonucleotide
  Sense strand starting at position 2351 of SEQ ID NO: 1243217
cagagaaggcacugaucua

SEQ ID NO: 1401993 - RNA, 19 nt, Artificial Sequence
  Description of Artificial Sequence: Synthetic oligonucleotide
  Antisense strand to SEQ ID NO: 1401992
uagaucagugccuucucug

SEQ ID NO: 1401994 - RNA, 19 nt, Artificial Sequence
  Description of Artificial Sequence: Synthetic oligonucleotide
  Sense strand starting at position 2396 of SEQ ID NO: 1243217
cgccgaauucuagacggaa

SEQ ID NO: 1401995 - RNA, 19 nt, Artificial Sequence
  Description of Artificial Sequence: Synthetic oligonucleotide
  Antisense strand to SEQ ID NO: 1401994
uuccgucuagaauucggcg

SEQ ID NO: 1401996 - RNA, 19 nt, Artificial Sequence
  Description of Artificial Sequence: Synthetic oligonucleotide
  Sense strand starting at position 2538 of SEQ ID NO: 1243217
gcagcucuaggagaucauu

SEQ ID NO: 1401997 - RNA, 19 nt, Artificial Sequence
  Description of Artificial Sequence: Synthetic oligonucleotide
  Antisense strand to SEQ ID NO: 1401996
aaugaucuccuagagcugc

SEQ ID NO: 1401998 - RNA, 19 nt, Artificial Sequence
  Description of Artificial Sequence: Synthetic oligonucleotide
  Sense strand starting at position 2541 of SEQ ID NO: 1243217
gcucuaggagaucauuauc

SEQ ID NO: 1401999 - RNA, 19 nt, Artificial Sequence
  Description of Artificial Sequence: Synthetic oligonucleotide
  Antisense strand to SEQ ID NO: 1401998
gauaaugaucuccuagagc

SEQ ID NO: 1402000 - RNA, 19 nt, Artificial Sequence
  Description of Artificial Sequence: Synthetic oligonucleotide
  Sense strand starting at position 2572 of SEQ ID NO: 1243217
ugccgaucuagguaggauu

SEQ ID NO: 1402001 - RNA, 19 nt, Artificial Sequence
  Description of Artificial Sequence: Synthetic oligonucleotide
  Antisense strand to SEQ ID NO: 1402000
aauccuaccuagaucggca

SEQ ID NO: 1402002 - RNA, 19 nt, Artificial Sequence
  Description of Artificial Sequence: Synthetic oligonucleotide
  Sense strand starting at position 2677 of SEQ ID NO: 1243217
uuaucuuguuaaccgauga

SEQ ID NO: 1402003 - RNA, 19 nt, Artificial Sequence
  Description of Artificial Sequence: Synthetic oligonucleotide
  Antisense strand to SEQ ID NO: 1402002
ucaucgguuaacaagauaa

SEQ ID NO: 1402004 - RNA, 19 nt, Artificial Sequence
  Description of Artificial Sequence: Synthetic oligonucleotide
  Sense strand starting at position 2681 of SEQ ID NO: 1243217
cuuguuaaccgaugaacug

SEQ ID NO: 1402005 - RNA, 19 nt, Artificial Sequence
  Description of Artificial Sequence: Synthetic oligonucleotide
  Antisense strand to SEQ ID NO: 1402004
caguucaucgguuaacaag

SEQ ID NO: 1402006 - RNA, 19 nt, Artificial Sequence
  Description of Artificial Sequence: Synthetic oligonucleotide
  Sense strand starting at position 2682 of SEQ ID NO: 1243217
uuguuaaccgaugaacuga

SEQ ID NO: 1402007 - RNA, 19 nt, Artificial Sequence
  Description of Artificial Sequence: Synthetic oligonucleotide
  Antisense strand to SEQ ID NO: 1402006
ucaguucaucgguuaacaa

SEQ ID NO: 1402008 - RNA, 19 nt, Artificial Sequence
  Description of Artificial Sequence: Synthetic oligonucleotide
  Sense strand starting at position 2897 of SEQ ID NO: 1243217
ggcguacauuugcuuagua

SEQ ID NO: 1402009 - RNA, 19 nt, Artificial Sequence
  Description of Artificial Sequence: Synthetic oligonucleotide
  Antisense strand to SEQ ID NO: 1402008
uacuaagcaaauguacgcc

SEQ ID NO: 1402010 - RNA, 19 nt, Artificial Sequence
  Description of Artificial Sequence: Synthetic oligonucleotide
  Sense strand starting at position 2925 of SEQ ID NO: 1243217
caccuuaaugugggaaacu

SEQ ID NO: 1402011 - RNA, 19 nt, Artificial Sequence
  Description of Artificial Sequence: Synthetic oligonucleotide
  Antisense strand to SEQ ID NO: 1402010
aguuucccacauuaaggug

SEQ ID NO: 1402012 - RNA, 19 nt, Artificial Sequence
  Description of Artificial Sequence: Synthetic oligonucleotide
  Sense strand starting at position 2934 of SEQ ID NO: 1243217
gugggaaacugauauagac

SEQ ID NO: 1402013 - RNA, 19 nt, Artificial Sequence
  Description of Artificial Sequence: Synthetic oligonucleotide
  Antisense strand to SEQ ID NO: 1402012
gucuauaucaguuucccac

SEQ ID NO: 1402014 - RNA, 19 nt, Artificial Sequence
  Description of Artificial Sequence: Synthetic oligonucleotide
  Sense strand starting at position 3036 of SEQ ID NO: 1243217
acucuucgucccgaaaucu

SEQ ID NO: 1402015 - RNA, 19 nt, Artificial Sequence
  Description of Artificial Sequence: Synthetic oligonucleotide
  Antisense strand to SEQ ID NO: 1402014
agauuucgggacgaagagu

SEQ ID NO: 1402016 - RNA, 19 nt, Artificial Sequence
  Description of Artificial Sequence: Synthetic oligonucleotide
  Sense strand starting at position 3044 of SEQ ID NO: 1243217
ucccgaaaucuguguaaac

SEQ ID NO: 1402017 - RNA, 19 nt, Artificial Sequence
  Description of Artificial Sequence: Synthetic oligonucleotide
  Antisense strand to SEQ ID NO: 1402016
guuuacacagauuucggga

SEQ ID NO: 1402018 - RNA, 19 nt, Artificial Sequence
  Description of Artificial Sequence: Synthetic oligonucleotide
  Sense strand starting at position 3045 of SEQ ID NO: 1243217
cccgaaaucuguguaaaca

SEQ ID NO: 1402019 - RNA, 19 nt, Artificial Sequence
  Description of Artificial Sequence: Synthetic oligonucleotide
  Antisense strand to SEQ ID NO: 1402018
uguuuacacagauuucggg

SEQ ID NO: 1402020 - RNA, 19 nt, Artificial Sequence
  Description of Artificial Sequence: Synthetic oligonucleotide
  Sense strand starting at position 3046 of SEQ ID NO: 1243217
ccgaaaucuguguaaacag

SEQ ID NO: 1402021 - RNA, 19 nt, Artificial Sequence
  Description of Artificial Sequence: Synthetic oligonucleotide
  Antisense strand to SEQ ID NO: 1402020
cuguuuacacagauuucgg

SEQ ID NO: 1402022 - RNA, 19 nt, Artificial Sequence
  Description of Artificial Sequence: Synthetic oligonucleotide
  Sense strand starting at position 3099 of SEQ ID NO: 1243217
agcuaucuacguuguauuu

SEQ ID NO: 1402023 - RNA, 19 nt, Artificial Sequence
  Description of Artificial Sequence: Synthetic oligonucleotide
  Antisense strand to SEQ ID NO: 1402022
aaauacaacguagauagcu

SEQ ID NO: 1402024 - RNA, 19 nt, Artificial Sequence
  Description of Artificial Sequence: Synthetic oligonucleotide
  Sense strand starting at position 3105 of SEQ ID NO: 1243217
cuacguuguauuugguaaa

SEQ ID NO: 1402025 - RNA, 19 nt, Artificial Sequence
  Description of Artificial Sequence: Synthetic oligonucleotide
  Antisense strand to SEQ ID NO: 1402024
uuuaccaaauacaacguag

SEQ ID NO: 1402026 - RNA, 19 nt, Artificial Sequence
  Description of Artificial Sequence: Synthetic oligonucleotide
  Sense strand starting at position 3116 of SEQ ID NO: 1243217
uugguaaauugccugguua

SEQ ID NO: 1402027 - RNA, 19 nt, Artificial Sequence
  Description of Artificial Sequence: Synthetic oligonucleotide
  Antisense strand to SEQ ID NO: 1402026
uaaccaggcaauuuaccaa

SEQ ID NO: 1402028 - RNA, 19 nt, Artificial Sequence
  Description of Artificial Sequence: Synthetic oligonucleotide
  Sense strand starting at position 3117 of SEQ ID NO: 1243217
ugguaaauugccugguuau

SEQ ID NO: 1402029 - RNA, 19 nt, Artificial Sequence
  Description of Artificial Sequence: Synthetic oligonucleotide
  Antisense strand to SEQ ID NO: 1402028
auaaccaggcaauuuacca

SEQ ID NO: 1402030 - RNA, 19 nt, Artificial Sequence
  Description of Artificial Sequence: Synthetic oligonucleotide
  Sense strand starting at position 3118 of SEQ ID NO: 1243217
gguaaauugccugguuaug

SEQ ID NO: 1402031 - RNA, 19 nt, Artificial Sequence
  Description of Artificial Sequence: Synthetic oligonucleotide
  Antisense strand to SEQ ID NO: 1402030
cauaaccaggcaauuuacc

SEQ ID NO: 1402032 - RNA, 19 nt, Artificial Sequence
  Description of Artificial Sequence: Synthetic oligonucleotide
  Sense strand starting at position 3124 of SEQ ID NO: 1243217
uugccugguuauguuaaua

SEQ ID NO: 1402033 - RNA, 19 nt, Artificial Sequence
  Description of Artificial Sequence: Synthetic oligonucleotide
  Antisense strand to SEQ ID NO: 1402032
uauuaacauaaccaggcaa

SEQ ID NO: 1402034 - RNA, 19 nt, Artificial Sequence
  Description of Artificial Sequence: Synthetic oligonucleotide
  Sense strand starting at position 3195 of SEQ ID NO: 1243217
ggauuauucugacucucua

SEQ ID NO: 1402035 - RNA, 19 nt, Artificial Sequence
  Description of Artificial Sequence: Synthetic oligonucleotide
  Antisense strand to SEQ ID NO: 1402034
uagagagucagaauaaucc

SEQ ID NO: 1402036 - RNA, 19 nt, Artificial Sequence
  Description of Artificial Sequence: Synthetic oligonucleotide
  Sense strand starting at position 3339 of SEQ ID NO: 1243217
aguuuaaacaguuguacag

SEQ ID NO: 1402037 - RNA, 19 nt, Artificial Sequence
  Description of Artificial Sequence: Synthetic oligonucleotide
  Antisense strand to SEQ ID NO: 1402036
cuguacaacuguuuaaacu

SEQ ID NO: 1402038 - RNA, 19 nt, Artificial Sequence
  Description of Artificial Sequence: Synthetic oligonucleotide
  Sense strand starting at position 3346 of SEQ ID NO: 1243217
acaguuguacagugaacaa

SEQ ID NO: 1402039 - RNA, 19 nt, Artificial Sequence
  Description of Artificial Sequence: Synthetic oligonucleotide
  Antisense strand to SEQ ID NO: 1402038
uuguucacuguacaacugu

SEQ ID NO: 1402040 - RNA, 19 nt, Artificial Sequence
  Description of Artificial Sequence: Synthetic oligonucleotide
  Sense strand starting at position 3437 of SEQ ID NO: 1243217
uccauccaucgauauaugu

SEQ ID NO: 1402041 - RNA, 19 nt, Artificial Sequence
  Description of Artificial Sequence: Synthetic oligonucleotide
  Antisense strand to SEQ ID NO: 1402040
acauauaucgauggaugga

SEQ ID NO: 1402042 - RNA, 19 nt, Artificial Sequence
  Description of Artificial Sequence: Synthetic oligonucleotide
  Sense strand starting at position 3446 of SEQ ID NO: 1243217
cgauauauguuaguacauu

SEQ ID NO: 1402043 - RNA, 19 nt, Artificial Sequence
  Description of Artificial Sequence: Synthetic oligonucleotide
  Antisense strand to SEQ ID NO: 1402042
aauguacuaacauauaucg

SEQ ID NO: 1402044 - RNA, 19 nt, Artificial Sequence
  Description of Artificial Sequence: Synthetic oligonucleotide
  Sense strand starting at position 3528 of SEQ ID NO: 1243217
caaguuucuguggauuaca

SEQ ID NO: 1402045 - RNA, 19 nt, Artificial Sequence
  Description of Artificial Sequence: Synthetic oligonucleotide
  Antisense strand to SEQ ID NO: 1402044
uguaauccacagaaacuug

SEQ ID NO: 1402046 - RNA, 19 nt, Artificial Sequence
  Description of Artificial Sequence: Synthetic oligonucleotide
  Sense strand starting at position 3531 of SEQ ID NO: 1243217
guuucuguggauuacauua

SEQ ID NO: 1402047 - RNA, 19 nt, Artificial Sequence
  Description of Artificial Sequence: Synthetic oligonucleotide
  Antisense strand to SEQ ID NO: 1402046
uaauguaauccacagaaac

SEQ ID NO: 1402048 - RNA, 19 nt, Artificial Sequence
  Description of Artificial Sequence: Synthetic oligonucleotide
  Sense strand starting at position 3703 of SEQ ID NO: 1243217
gacaguugugcuggaaaua

SEQ ID NO: 1402049 - RNA, 19 nt, Artificial Sequence
  Description of Artificial Sequence: Synthetic oligonucleotide
  Antisense strand to SEQ ID NO: 1402048
uauuuccagcacaacuguc

SEQ ID NO: 1402050 - RNA, 19 nt, Artificial Sequence
  Description of Artificial Sequence: Synthetic oligonucleotide
  Sense strand starting at position 3704 of SEQ ID NO: 1243217
acaguugugcuggaaauag

SEQ ID NO: 1402051 - RNA, 19 nt, Artificial Sequence
  Description of Artificial Sequence: Synthetic oligonucleotide
  Antisense strand to SEQ ID NO: 1402050
cuauuuccagcacaacugu

SEQ ID NO: 1402052 - RNA, 19 nt, Artificial Sequence
  Description of Artificial Sequence: Synthetic oligonucleotide
  Sense strand starting at position 355 of SEQ ID NO: 1243218
ucaacucuccagugacaag

SEQ ID NO: 1402053 - RNA, 19 nt, Artificial Sequence
  Description of Artificial Sequence: Synthetic oligonucleotide
  Antisense strand to SEQ ID NO: 1402052
cuugucacuggagaguuga

SEQ ID NO: 1402054 - RNA, 19 nt, Artificial Sequence
  Description of Artificial Sequence: Synthetic oligonucleotide
  Sense strand starting at position 475 of SEQ ID NO: 1243218
uccugaaugccacaugcau

SEQ ID NO: 1402055 - RNA, 19 nt, Artificial Sequence
  Description of Artificial Sequence: Synthetic oligonucleotide
  Antisense strand to SEQ ID NO: 1402054
augcauguggcauucagga

SEQ ID NO: 1402056 - RNA, 19 nt, Artificial Sequence
  Description of Artificial Sequence: Synthetic oligonucleotide
  Sense strand starting at position 630 of SEQ ID NO: 1243218
gcccuaacacugggacaau

SEQ ID NO: 1402057 - RNA, 19 nt, Artificial Sequence
  Description of Artificial Sequence: Synthetic oligonucleotide
  Antisense strand to SEQ ID NO: 1402056
auugucccaguguuagggc

SEQ ID NO: 1402058 - RNA, 19 nt, Artificial Sequence
  Description of Artificial Sequence: Synthetic oligonucleotide
  Sense strand starting at position 719 of SEQ ID NO: 1243218
gagguaggcucuguuacca

SEQ ID NO: 1402059 - RNA, 19 nt, Artificial Sequence
  Description of Artificial Sequence: Synthetic oligonucleotide
  Antisense strand to SEQ ID NO: 1402058
ugguaacagagccuaccuc

SEQ ID NO: 1402060 - RNA, 19 nt, Artificial Sequence
  Description of Artificial Sequence: Synthetic oligonucleotide
  Sense strand starting at position 1109 of SEQ ID NO: 1243218
ugcagcuggcucugaaaua

SEQ ID NO: 1402061 - RNA, 19 nt, Artificial Sequence
  Description of Artificial Sequence: Synthetic oligonucleotide
  Antisense strand to SEQ ID NO: 1402060
uauuucagagccagcugca

SEQ ID NO: 1402062 - RNA, 19 nt, Artificial Sequence
  Description of Artificial Sequence: Synthetic oligonucleotide
  Sense strand starting at position 1134 of SEQ ID NO: 1243218
gcuucuuuccgggagcauc

SEQ ID NO: 1402063 - RNA, 19 nt, Artificial Sequence
  Description of Artificial Sequence: Synthetic oligonucleotide
  Antisense strand to SEQ ID NO: 1402062
gaugcucccggaaagaagc

SEQ ID NO: 1402064 - RNA, 19 nt, Artificial Sequence
  Description of Artificial Sequence: Synthetic oligonucleotide
  Sense strand starting at position 2110 of SEQ ID NO: 1243218
agugaacgcuguucagaga

SEQ ID NO: 1402065 - RNA, 19 nt, Artificial Sequence
  Description of Artificial Sequence: Synthetic oligonucleotide
  Antisense strand to SEQ ID NO: 1402064
ucucugaacagcguucacu

SEQ ID NO: 1402066 - RNA, 19 nt, Artificial Sequence
  Description of Artificial Sequence: Synthetic oligonucleotide
  Sense strand starting at position 2111 of SEQ ID NO: 1243218
gugaacgcuguucagagaa

SEQ ID NO: 1402067 - RNA, 19 nt, Artificial Sequence
  Description of Artificial Sequence: Synthetic oligonucleotide
  Antisense strand to SEQ ID NO: 1402066
uucucugaacagcguucac

SEQ ID NO: 1402068 - RNA, 19 nt, Artificial Sequence
  Description of Artificial Sequence: Synthetic oligonucleotide
  Sense strand starting at position 2123 of SEQ ID NO: 1243218
cagagaaggcacugaucua

SEQ ID NO: 1402069 - RNA, 19 nt, Artificial Sequence
  Description of Artificial Sequence: Synthetic oligonucleotide
  Antisense strand to SEQ ID NO: 1402068
uagaucagugccuucucug

SEQ ID NO: 1402070 - RNA, 19 nt, Artificial Sequence
  Description of Artificial Sequence: Synthetic oligonucleotide
  Sense strand starting at position 2168 of SEQ ID NO: 1243218
cgccgaauucuagacggaa

SEQ ID NO: 1402071 - RNA, 19 nt, Artificial Sequence
  Description of Artificial Sequence: Synthetic oligonucleotide
  Antisense strand to SEQ ID NO: 1402070
uuccgucuagaauucggcg

SEQ ID NO: 1402072 - RNA, 19 nt, Artificial Sequence
  Description of Artificial Sequence: Synthetic oligonucleotide
  Sense strand starting at position 2310 of SEQ ID NO: 1243218
gcagcucuaggagaucauu

SEQ ID NO: 1402073 - RNA, 19 nt, Artificial Sequence
  Description of Artificial Sequence: Synthetic oligonucleotide
  Antisense strand to SEQ ID NO: 1402072
aaugaucuccuagagcugc

SEQ ID NO: 1402074 - RNA, 19 nt, Artificial Sequence
  Description of Artificial Sequence: Synthetic oligonucleotide
  Sense strand starting at position 2313 of SEQ ID NO: 1243218
gcucuaggagaucauuauc

SEQ ID NO: 1402075 - RNA, 19 nt, Artificial Sequence
  Description of Artificial Sequence: Synthetic oligonucleotide
  Antisense strand to SEQ ID NO: 1402074
gauaaugaucuccuagagc

SEQ ID NO: 1402076 - RNA, 19 nt, Artificial Sequence
  Description of Artificial Sequence: Synthetic oligonucleotide
  Sense strand starting at position 2344 of SEQ ID NO: 1243218
ugccgaucuagguaggauu

SEQ ID NO: 1402077 - RNA, 19 nt, Artificial Sequence
  Description of Artificial Sequence: Synthetic oligonucleotide
  Antisense strand to SEQ ID NO: 1402076
aauccuaccuagaucggca

SEQ ID NO: 1402078 - RNA, 19 nt, Artificial Sequence
  Description of Artificial Sequence: Synthetic oligonucleotide
  Sense strand starting at position 2449 of SEQ ID NO: 1243218
uuaucuuguuaaccgauga

SEQ ID NO: 1402079 - RNA, 19 nt, Artificial Sequence
  Description of Artificial Sequence: Synthetic oligonucleotide
  Antisense strand to SEQ ID NO: 1402078
ucaucgguuaacaagauaa

SEQ ID NO: 1402080 - RNA, 19 nt, Artificial Sequence
  Description of Artificial Sequence: Synthetic oligonucleotide
  Sense strand starting at position 2453 of SEQ ID NO: 1243218
cuuguuaaccgaugaacug

SEQ ID NO: 1402081 - RNA, 19 nt, Artificial Sequence
  Description of Artificial Sequence: Synthetic oligonucleotide
  Antisense strand to SEQ ID NO: 1402080
caguucaucgguuaacaag

SEQ ID NO: 1402082 - RNA, 19 nt, Artificial Sequence
  Description of Artificial Sequence: Synthetic oligonucleotide
  Sense strand starting at position 2454 of SEQ ID NO: 1243218
uuguuaaccgaugaacuga

SEQ ID NO: 1402083 - RNA, 19 nt, Artificial Sequence
  Description of Artificial Sequence: Synthetic oligonucleotide
  Antisense strand to SEQ ID NO: 1402082
ucaguucaucgguuaacaa

SEQ ID NO: 1402084 - RNA, 19 nt, Artificial Sequence
  Description of Artificial Sequence: Synthetic oligonucleotide
  Sense strand starting at position 2669 of SEQ ID NO: 1243218
ggcguacauuugcuuagua

SEQ ID NO: 1402085 - RNA, 19 nt, Artificial Sequence
  Description of Artificial Sequence: Synthetic oligonucleotide
  Antisense strand to SEQ ID NO: 1402084
uacuaagcaaauguacgcc

SEQ ID NO: 1402086 - RNA, 19 nt, Artificial Sequence
  Description of Artificial Sequence: Synthetic oligonucleotide
  Sense strand starting at position 2697 of SEQ ID NO: 1243218
caccuuaaugugggaaacu

SEQ ID NO: 1402087 - RNA, 19 nt, Artificial Sequence
  Description of Artificial Sequence: Synthetic oligonucleotide
  Antisense strand to SEQ ID NO: 1402086
aguuucccacauuaaggug

SEQ ID NO: 1402088 - RNA, 19 nt, Artificial Sequence
  Description of Artificial Sequence: Synthetic oligonucleotide
  Sense strand starting at position 2706 of SEQ ID NO: 1243218
gugggaaacugauauagac

SEQ ID NO: 1402089 - RNA, 19 nt, Artificial Sequence
  Description of Artificial Sequence: Synthetic oligonucleotide
  Antisense strand to SEQ ID NO: 1402088
gucuauaucaguuucccac

SEQ ID NO: 1402090 - RNA, 19 nt, Artificial Sequence
  Description of Artificial Sequence: Synthetic oligonucleotide
  Sense strand starting at position 2804 of SEQ ID NO: 1243218
uuauacucuucgucccgaa

SEQ ID NO: 1402091 - RNA, 19 nt, Artificial Sequence
  Description of Artificial Sequence: Synthetic oligonucleotide
  Antisense strand to SEQ ID NO: 1402090
uucgggacgaagaguauaa

SEQ ID NO: 1402092 - RNA, 19 nt, Artificial Sequence
  Description of Artificial Sequence: Synthetic oligonucleotide
  Sense strand starting at position 2808 of SEQ ID NO: 1243218
acucuucgucccgaaaucu

SEQ ID NO: 1402093 - RNA, 19 nt, Artificial Sequence
  Description of Artificial Sequence: Synthetic oligonucleotide
  Antisense strand to SEQ ID NO: 1402092
agauuucgggacgaagagu

SEQ ID NO: 1402094 - RNA, 19 nt, Artificial Sequence
  Description of Artificial Sequence: Synthetic oligonucleotide
  Sense strand starting at position 2816 of SEQ ID NO: 1243218
ucccgaaaucuguguaaac

SEQ ID NO: 1402095 - RNA, 19 nt, Artificial Sequence
  Description of Artificial Sequence: Synthetic oligonucleotide
  Antisense strand to SEQ ID NO: 1402094
guuuacacagauuucggga

SEQ ID NO: 1402096 - RNA, 19 nt, Artificial Sequence
  Description of Artificial Sequence: Synthetic oligonucleotide
  Sense strand starting at position 2817 of SEQ ID NO: 1243218
cccgaaaucuguguaaaca

SEQ ID NO: 1402097 - RNA, 19 nt, Artificial Sequence
  Description of Artificial Sequence: Synthetic oligonucleotide
  Antisense strand to SEQ ID NO: 1402096
uguuuacacagauuucggg

SEQ ID NO: 1402098 - RNA, 19 nt, Artificial Sequence
  Description of Artificial Sequence: Synthetic oligonucleotide
  Sense strand starting at position 2818 of SEQ ID NO: 1243218
ccgaaaucuguguaaacag

SEQ ID NO: 1402099 - RNA, 19 nt, Artificial Sequence
  Description of Artificial Sequence: Synthetic oligonucleotide
  Antisense strand to SEQ ID NO: 1402098
cuguuuacacagauuucgg

SEQ ID NO: 1402100 - RNA, 19 nt, Artificial Sequence
  Description of Artificial Sequence: Synthetic oligonucleotide
  Sense strand starting at position 2871 of SEQ ID NO: 1243218
agcuaucuacguuguauuu

SEQ ID NO: 1402101 - RNA, 19 nt, Artificial Sequence
  Description of Artificial Sequence: Synthetic oligonucleotide
  Antisense strand to SEQ ID NO: 1402100
aaauacaacguagauagcu

SEQ ID NO: 1402102 - RNA, 19 nt, Artificial Sequence
  Description of Artificial Sequence: Synthetic oligonucleotide
  Sense strand starting at position 2877 of SEQ ID NO: 1243218
cuacguuguauuugguaaa

SEQ ID NO: 1402103 - RNA, 19 nt, Artificial Sequence
  Description of Artificial Sequence: Synthetic oligonucleotide
  Antisense strand to SEQ ID NO: 1402102
uuuaccaaauacaacguag

SEQ ID NO: 1402104 - RNA, 19 nt, Artificial Sequence
  Description of Artificial Sequence: Synthetic oligonucleotide
  Sense strand starting at position 2888 of SEQ ID NO: 1243218
uugguaaauugccugguua

SEQ ID NO: 1402105 - RNA, 19 nt, Artificial Sequence
  Description of Artificial Sequence: Synthetic oligonucleotide
  Antisense strand to SEQ ID NO: 1402104
uaaccaggcaauuuaccaa

SEQ ID NO: 1402106 - RNA, 19 nt, Artificial Sequence
  Description of Artificial Sequence: Synthetic oligonucleotide
  Sense strand starting at position 2889 of SEQ ID NO: 1243218
ugguaaauugccugguuau

SEQ ID NO: 1402107 - RNA, 19 nt, Artificial Sequence
  Description of Artificial Sequence: Synthetic oligonucleotide
  Antisense strand to SEQ ID NO: 1402106
auaaccaggcaauuuacca

SEQ ID NO: 1402108 - RNA, 19 nt, Artificial Sequence
  Description of Artificial Sequence: Synthetic oligonucleotide
  Sense strand starting at position 2890 of SEQ ID NO: 1243218
gguaaauugccugguuaug

SEQ ID NO: 1402109 - RNA, 19 nt, Artificial Sequence
  Description of Artificial Sequence: Synthetic oligonucleotide
  Antisense strand to SEQ ID NO: 1402108
cauaaccaggcaauuuacc

SEQ ID NO: 1402110 - RNA, 19 nt, Artificial Sequence
  Description of Artificial Sequence: Synthetic oligonucleotide
  Sense strand starting at position 2896 of SEQ ID NO: 1243218
uugccugguuauguuaaua

SEQ ID NO: 1402111 - RNA, 19 nt, Artificial Sequence
  Description of Artificial Sequence: Synthetic oligonucleotide
  Antisense strand to SEQ ID NO: 1402110
uauuaacauaaccaggcaa

SEQ ID NO: 1402112 - RNA, 19 nt, Artificial Sequence
  Description of Artificial Sequence: Synthetic oligonucleotide
  Sense strand starting at position 2967 of SEQ ID NO: 1243218
ggauuauucugacucucua

SEQ ID NO: 1402113 - RNA, 19 nt, Artificial Sequence
  Description of Artificial Sequence: Synthetic oligonucleotide
  Antisense strand to SEQ ID NO: 1402112
uagagagucagaauaaucc

SEQ ID NO: 1402114 - RNA, 19 nt, Artificial Sequence
  Description of Artificial Sequence: Synthetic oligonucleotide
  Sense strand starting at position 3111 of SEQ ID NO: 1243218
aguuuaaacaguuguacag

SEQ ID NO: 1402115 - RNA, 19 nt, Artificial Sequence
  Description of Artificial Sequence: Synthetic oligonucleotide
  Antisense strand to SEQ ID NO: 1402114
cuguacaacuguuuaaacu

SEQ ID NO: 1402116 - RNA, 19 nt, Artificial Sequence
  Description of Artificial Sequence: Synthetic oligonucleotide
  Sense strand starting at position 3118 of SEQ ID NO: 1243218
acaguuguacagugaacaa

SEQ ID NO: 1402117 - RNA, 19 nt, Artificial Sequence
  Description of Artificial Sequence: Synthetic oligonucleotide
  Antisense strand to SEQ ID NO: 1402116
uuguucacuguacaacugu

SEQ ID NO: 1402118 - RNA, 19 nt, Artificial Sequence
  Description of Artificial Sequence: Synthetic oligonucleotide
  Sense strand starting at position 3209 of SEQ ID NO: 1243218
uccauccaucgauauaugu

SEQ ID NO: 1402119 - RNA, 19 nt, Artificial Sequence
  Description of Artificial Sequence: Synthetic oligonucleotide
  Antisense strand to SEQ ID NO: 1402118
acauauaucgauggaugga

SEQ ID NO: 1402120 - RNA, 19 nt, Artificial Sequence
  Description of Artificial Sequence: Synthetic oligonucleotide
  Sense strand starting at position 3218 of SEQ ID NO: 1243218
cgauauauguuaguacauu

SEQ ID NO: 1402121 - RNA, 19 nt, Artificial Sequence
  Description of Artificial Sequence: Synthetic oligonucleotide
  Antisense strand to SEQ ID NO: 1402120
aauguacuaacauauaucg

SEQ ID NO: 1402122 - RNA, 19 nt, Artificial Sequence
  Description of Artificial Sequence: Synthetic oligonucleotide
  Sense strand starting at position 3300 of SEQ ID NO: 1243218
caaguuucuguggauuaca

SEQ ID NO: 1402123 - RNA, 19 nt, Artificial Sequence
  Description of Artificial Sequence: Synthetic oligonucleotide
  Antisense strand to SEQ ID NO: 1402122
uguaauccacagaaacuug

SEQ ID NO: 1402124 - RNA, 19 nt, Artificial Sequence
  Description of Artificial Sequence: Synthetic oligonucleotide
  Sense strand starting at position 3303 of SEQ ID NO: 1243218
guuucuguggauuacauua

SEQ ID NO: 1402125 - RNA, 19 nt, Artificial Sequence
  Description of Artificial Sequence: Synthetic oligonucleotide
  Antisense strand to SEQ ID NO: 1402124
uaauguaauccacagaaac

SEQ ID NO: 1402126 - RNA, 19 nt, Artificial Sequence
  Description of Artificial Sequence: Synthetic oligonucleotide
  Sense strand starting at position 3310 of SEQ ID NO: 1243218
uggauuacauuacaaagua

SEQ ID NO: 1402127 - RNA, 19 nt, Artificial Sequence
  Description of Artificial Sequence: Synthetic oligonucleotide
  Antisense strand to SEQ ID NO: 1402126
uacuuuguaauguaaucca

SEQ ID NO: 1402128 - RNA, 19 nt, Artificial Sequence
  Description of Artificial Sequence: Synthetic oligonucleotide
  Sense strand starting at position 3475 of SEQ ID NO: 1243218
gacaguugugcuggaaaua

SEQ ID NO: 1402129 - RNA, 19 nt, Artificial Sequence
  Description of Artificial Sequence: Synthetic oligonucleotide
  Antisense strand to SEQ ID NO: 1402128
uauuuccagcacaacuguc

SEQ ID NO: 1402130 - RNA, 19 nt, Artificial Sequence
  Description of Artificial Sequence: Synthetic oligonucleotide
  Sense strand starting at position 3476 of SEQ ID NO: 1243218
acaguugugcuggaaauag

SEQ ID NO: 1402131 - RNA, 19 nt, Artificial Sequence
  Description of Artificial Sequence: Synthetic oligonucleotide
  Antisense strand to SEQ ID NO: 1402130
cuauuuccagcacaacugu

SEQ ID NO: 1402132 - RNA, 19 nt, Artificial Sequence
  Description of Artificial Sequence: Synthetic oligonucleotide
  Sense strand starting at position 12 of SEQ ID NO: 1243219
cagagaauucuccagcgug

SEQ ID NO: 1402133 - RNA, 19 nt, Artificial Sequence
  Description of Artificial Sequence: Synthetic oligonucleotide
  Antisense strand to SEQ ID NO: 1402132
cacgcuggagaauucucug

SEQ ID NO: 1402134 - RNA, 19 nt, Artificial Sequence
  Description of Artificial Sequence: Synthetic oligonucleotide
  Sense strand starting at position 423 of SEQ ID NO: 1243219
ucaacucuccagugacaag

SEQ ID NO: 1402135 - RNA, 19 nt, Artificial Sequence
  Description of Artificial Sequence: Synthetic oligonucleotide
  Antisense strand to SEQ ID NO: 1402134
cuugucacuggagaguuga

SEQ ID NO: 1402136 - RNA, 19 nt, Artificial Sequence
  Description of Artificial Sequence: Synthetic oligonucleotide
  Sense strand starting at position 543 of SEQ ID NO: 1243219
uccugaaugccacaugcau

SEQ ID NO: 1402137 - RNA, 19 nt, Artificial Sequence
  Description of Artificial Sequence: Synthetic oligonucleotide
  Antisense strand to SEQ ID NO: 1402136
augcauguggcauucagga

SEQ ID NO: 1402138 - RNA, 19 nt, Artificial Sequence
  Description of Artificial Sequence: Synthetic oligonucleotide
  Sense strand starting at position 698 of SEQ ID NO: 1243219
gcccuaacacugggacaau

SEQ ID NO: 1402139 - RNA, 19 nt, Artificial Sequence
  Description of Artificial Sequence: Synthetic oligonucleotide
  Antisense strand to SEQ ID NO: 1402138
auugucccaguguuagggc

SEQ ID NO: 1402140 - RNA, 19 nt, Artificial Sequence
  Description of Artificial Sequence: Synthetic oligonucleotide
  Sense strand starting at position 787 of SEQ ID NO: 1243219
gagguaggcucuguuacca

SEQ ID NO: 1402141 - RNA, 19 nt, Artificial Sequence
  Description of Artificial Sequence: Synthetic oligonucleotide
  Antisense strand to SEQ ID NO: 1402140
ugguaacagagccuaccuc

SEQ ID NO: 1402142 - RNA, 19 nt, Artificial Sequence
  Description of Artificial Sequence: Synthetic oligonucleotide
  Sense strand starting at position 1177 of SEQ ID NO: 1243219
ugcagcuggcucugaaaua

SEQ ID NO: 1402143 - RNA, 19 nt, Artificial Sequence
  Description of Artificial Sequence: Synthetic oligonucleotide
  Antisense strand to SEQ ID NO: 1402142
uauuucagagccagcugca

SEQ ID NO: 1402144 - RNA, 19 nt, Artificial Sequence
  Description of Artificial Sequence: Synthetic oligonucleotide
  Sense strand starting at position 1202 of SEQ ID NO: 1243219
gcuucuuuccgggagcauc

SEQ ID NO: 1402145 - RNA, 19 nt, Artificial Sequence
  Description of Artificial Sequence: Synthetic oligonucleotide
  Antisense strand to SEQ ID NO: 1402144
gaugcucccggaaagaagc

SEQ ID NO: 1402146 - RNA, 19 nt, Artificial Sequence
  Description of Artificial Sequence: Synthetic oligonucleotide
  Sense strand starting at position 2178 of SEQ ID NO: 1243219
agugaacgcuguucagaga

SEQ ID NO: 1402147 - RNA, 19 nt, Artificial Sequence
  Description of Artificial Sequence: Synthetic oligonucleotide
  Antisense strand to SEQ ID NO: 1402146
ucucugaacagcguucacu

SEQ ID NO: 1402148 - RNA, 19 nt, Artificial Sequence
  Description of Artificial Sequence: Synthetic oligonucleotide
  Sense strand starting at position 2179 of SEQ ID NO: 1243219
gugaacgcuguucagagaa

SEQ ID NO: 1402149 - RNA, 19 nt, Artificial Sequence
  Description of Artificial Sequence: Synthetic oligonucleotide
  Antisense strand to SEQ ID NO: 1402148
uucucugaacagcguucac

SEQ ID NO: 1402150 - RNA, 19 nt, Artificial Sequence
  Description of Artificial Sequence: Synthetic oligonucleotide
  Sense strand starting at position 2191 of SEQ ID NO: 1243219
cagagaaggcacugaucua

SEQ ID NO: 1402151 - RNA, 19 nt, Artificial Sequence
  Description of Artificial Sequence: Synthetic oligonucleotide
  Antisense strand to SEQ ID NO: 1402150
uagaucagugccuucucug

SEQ ID NO: 1402152 - RNA, 19 nt, Artificial Sequence
  Description of Artificial Sequence: Synthetic oligonucleotide
  Sense strand starting at position 2236 of SEQ ID NO: 1243219
cgccgaauucuagacggaa

SEQ ID NO: 1402153 - RNA, 19 nt, Artificial Sequence
  Description of Artificial Sequence: Synthetic oligonucleotide
  Antisense strand to SEQ ID NO: 1402152
uuccgucuagaauucggcg

SEQ ID NO: 1402154 - RNA, 19 nt, Artificial Sequence
  Description of Artificial Sequence: Synthetic oligonucleotide
  Sense strand starting at position 2378 of SEQ ID NO: 1243219
gcagcucuaggagaucauu

SEQ ID NO: 1402155 - RNA, 19 nt, Artificial Sequence
  Description of Artificial Sequence: Synthetic oligonucleotide
  Antisense strand to SEQ ID NO: 1402154
aaugaucuccuagagcugc

SEQ ID NO: 1402156 - RNA, 19 nt, Artificial Sequence
  Description of Artificial Sequence: Synthetic oligonucleotide
  Sense strand starting at position 2381 of SEQ ID NO: 1243219
gcucuaggagaucauuauc

SEQ ID NO: 1402157 - RNA, 19 nt, Artificial Sequence
  Description of Artificial Sequence: Synthetic oligonucleotide
  Antisense strand to SEQ ID NO: 1402156
gauaaugaucuccuagagc

SEQ ID NO: 1402158 - RNA, 19 nt, Artificial Sequence
  Description of Artificial Sequence: Synthetic oligonucleotide
  Sense strand starting at position 2412 of SEQ ID NO: 1243219
ugccgaucuagguaggauu

SEQ ID NO: 1402159 - RNA, 19 nt, Artificial Sequence
  Description of Artificial Sequence: Synthetic oligonucleotide
  Antisense strand to SEQ ID NO: 1402158
aauccuaccuagaucggca

SEQ ID NO: 1402160 - RNA, 19 nt, Artificial Sequence
  Description of Artificial Sequence: Synthetic oligonucleotide
  Sense strand starting at position 2517 of SEQ ID NO: 1243219
uuaucuuguuaaccgauga

SEQ ID NO: 1402161 - RNA, 19 nt, Artificial Sequence
  Description of Artificial Sequence: Synthetic oligonucleotide
  Antisense strand to SEQ ID NO: 1402160
ucaucgguuaacaagauaa

SEQ ID NO: 1402162 - RNA, 19 nt, Artificial Sequence
  Description of Artificial Sequence: Synthetic oligonucleotide
  Sense strand starting at position 2521 of SEQ ID NO: 1243219
cuuguuaaccgaugaacug

SEQ ID NO: 1402163 - RNA, 19 nt, Artificial Sequence
  Description of Artificial Sequence: Synthetic oligonucleotide
  Antisense strand to SEQ ID NO: 1402162
caguucaucgguuaacaag

SEQ ID NO: 1402164 - RNA, 19 nt, Artificial Sequence
  Description of Artificial Sequence: Synthetic oligonucleotide
  Sense strand starting at position 2522 of SEQ ID NO: 1243219
uuguuaaccgaugaacuga

SEQ ID NO: 1402165 - RNA, 19 nt, Artificial Sequence
  Description of Artificial Sequence: Synthetic oligonucleotide
  Antisense strand to SEQ ID NO: 1402164
ucaguucaucgguuaacaa

SEQ ID NO: 1402166 - RNA, 19 nt, Artificial Sequence
  Description of Artificial Sequence: Synthetic oligonucleotide
  Sense strand starting at position 2737 of SEQ ID NO: 1243219
ggcguacauuugcuuagua

SEQ ID NO: 1402167 - RNA, 19 nt, Artificial Sequence
  Description of Artificial Sequence: Synthetic oligonucleotide
  Antisense strand to SEQ ID NO: 1402166
uacuaagcaaauguacgcc

SEQ ID NO: 1402168 - RNA, 19 nt, Artificial Sequence
  Description of Artificial Sequence: Synthetic oligonucleotide
  Sense strand starting at position 2765 of SEQ ID NO: 1243219
caccuuaaugugggaaacu

SEQ ID NO: 1402169 - RNA, 19 nt, Artificial Sequence
  Description of Artificial Sequence: Synthetic oligonucleotide
  Antisense strand to SEQ ID NO: 1402168
aguuucccacauuaaggug

SEQ ID NO: 1402170 - RNA, 19 nt, Artificial Sequence
  Description of Artificial Sequence: Synthetic oligonucleotide
  Sense strand starting at position 2774 of SEQ ID NO: 1243219
gugggaaacugauauagac

SEQ ID NO: 1402171 - RNA, 19 nt, Artificial Sequence
  Description of Artificial Sequence: Synthetic oligonucleotide
  Antisense strand to SEQ ID NO: 1402170
gucuauaucaguuucccac

SEQ ID NO: 1402172 - RNA, 19 nt, Artificial Sequence
  Description of Artificial Sequence: Synthetic oligonucleotide
  Sense strand starting at position 2872 of SEQ ID NO: 1243219
uuauacucuucgucccgaa

SEQ ID NO: 1402173 - RNA, 19 nt, Artificial Sequence
  Description of Artificial Sequence: Synthetic oligonucleotide
  Antisense strand to SEQ ID NO: 1402172
uucgggacgaagaguauaa

SEQ ID NO: 1402174 - RNA, 19 nt, Artificial Sequence
  Description of Artificial Sequence: Synthetic oligonucleotide
  Sense strand starting at position 2876 of SEQ ID NO: 1243219
acucuucgucccgaaaucu

SEQ ID NO: 1402175 - RNA, 19 nt, Artificial Sequence
  Description of Artificial Sequence: Synthetic oligonucleotide
  Antisense strand to SEQ ID NO: 1402174
agauuucgggacgaagagu

SEQ ID NO: 1402176 - RNA, 19 nt, Artificial Sequence
  Description of Artificial Sequence: Synthetic oligonucleotide
  Sense strand starting at position 2884 of SEQ ID NO: 1243219
ucccgaaaucuguguaaac

SEQ ID NO: 1402177 - RNA, 19 nt, Artificial Sequence
  Description of Artificial Sequence: Synthetic oligonucleotide
  Antisense strand to SEQ ID NO: 1402176
guuuacacagauuucggga

SEQ ID NO: 1402178 - RNA, 19 nt, Artificial Sequence
  Description of Artificial Sequence: Synthetic oligonucleotide
  Sense strand starting at position 2885 of SEQ ID NO: 1243219
cccgaaaucuguguaaaca

SEQ ID NO: 1402179 - RNA, 19 nt, Artificial Sequence
  Description of Artificial Sequence: Synthetic oligonucleotide
  Antisense strand to SEQ ID NO: 1402178
uguuuacacagauuucggg

SEQ ID NO: 1402180 - RNA, 19 nt, Artificial Sequence
  Description of Artificial Sequence: Synthetic oligonucleotide
  Sense strand starting at position 2886 of SEQ ID NO: 1243219
ccgaaaucuguguaaacag

SEQ ID NO: 1402181 - RNA, 19 nt, Artificial Sequence
  Description of Artificial Sequence: Synthetic oligonucleotide
  Antisense strand to SEQ ID NO: 1402180
cuguuuacacagauuucgg

SEQ ID NO: 1402182 - RNA, 19 nt, Artificial Sequence
  Description of Artificial Sequence: Synthetic oligonucleotide
  Sense strand starting at position 2939 of SEQ ID NO: 1243219
agcuaucuacguuguauuu

SEQ ID NO: 1402183 - RNA, 19 nt, Artificial Sequence
  Description of Artificial Sequence: Synthetic oligonucleotide
  Antisense strand to SEQ ID NO: 1402182
aaauacaacguagauagcu

SEQ ID NO: 1402184 - RNA, 19 nt, Artificial Sequence
  Description of Artificial Sequence: Synthetic oligonucleotide
  Sense strand starting at position 2945 of SEQ ID NO: 1243219
cuacguuguauuugguaaa

SEQ ID NO: 1402185 - RNA, 19 nt, Artificial Sequence
  Description of Artificial Sequence: Synthetic oligonucleotide
  Antisense strand to SEQ ID NO: 1402184
uuuaccaaauacaacguag

SEQ ID NO: 1402186 - RNA, 19 nt, Artificial Sequence
  Description of Artificial Sequence: Synthetic oligonucleotide
  Sense strand starting at position 2956 of SEQ ID NO: 1243219
uugguaaauugccugguua

SEQ ID NO: 1402187 - RNA, 19 nt, Artificial Sequence
  Description of Artificial Sequence: Synthetic oligonucleotide
  Antisense strand to SEQ ID NO: 1402186
uaaccaggcaauuuaccaa

SEQ ID NO: 1402188 - RNA, 19 nt, Artificial Sequence
  Description of Artificial Sequence: Synthetic oligonucleotide
  Sense strand starting at position 2957 of SEQ ID NO: 1243219
ugguaaauugccugguuau

SEQ ID NO: 1402189 - RNA, 19 nt, Artificial Sequence
  Description of Artificial Sequence: Synthetic oligonucleotide
  Antisense strand to SEQ ID NO: 1402188
auaaccaggcaauuuacca

SEQ ID NO: 1402190 - RNA, 19 nt, Artificial Sequence
  Description of Artificial Sequence: Synthetic oligonucleotide
  Sense strand starting at position 2958 of SEQ ID NO: 1243219
gguaaauugccugguuaug

SEQ ID NO: 1402191 - RNA, 19 nt, Artificial Sequence
  Description of Artificial Sequence: Synthetic oligonucleotide
  Antisense strand to SEQ ID NO: 1402190
cauaaccaggcaauuuacc

SEQ ID NO: 1402192 - RNA, 19 nt, Artificial Sequence
  Description of Artificial Sequence: Synthetic oligonucleotide
  Sense strand starting at position 2964 of SEQ ID NO: 1243219
uugccugguuauguuaaua

SEQ ID NO: 1402193 - RNA, 19 nt, Artificial Sequence
  Description of Artificial Sequence: Synthetic oligonucleotide
  Antisense strand to SEQ ID NO: 1402192
uauuaacauaaccaggcaa

SEQ ID NO: 1402194 - RNA, 19 nt, Artificial Sequence
  Description of Artificial Sequence: Synthetic oligonucleotide
  Sense strand starting at position 3035 of SEQ ID NO: 1243219
ggauuauucugacucucua

SEQ ID NO: 1402195 - RNA, 19 nt, Artificial Sequence
  Description of Artificial Sequence: Synthetic oligonucleotide
  Antisense strand to SEQ ID NO: 1402194
uagagagucagaauaaucc

SEQ ID NO: 1402196 - RNA, 19 nt, Artificial Sequence
  Description of Artificial Sequence: Synthetic oligonucleotide
  Sense strand starting at position 3179 of SEQ ID NO: 1243219
aguuuaaacaguuguacag

SEQ ID NO: 1402197 - RNA, 19 nt, Artificial Sequence
  Description of Artificial Sequence: Synthetic oligonucleotide
  Antisense strand to SEQ ID NO: 1402196
cuguacaacuguuuaaacu

SEQ ID NO: 1402198 - RNA, 19 nt, Artificial Sequence
  Description of Artificial Sequence: Synthetic oligonucleotide
  Sense strand starting at position 3186 of SEQ ID NO: 1243219
acaguuguacagugaacaa

SEQ ID NO: 1402199 - RNA, 19 nt, Artificial Sequence
  Description of Artificial Sequence: Synthetic oligonucleotide
  Antisense strand to SEQ ID NO: 1402198
uuguucacuguacaacugu

SEQ ID NO: 1402200 - RNA, 19 nt, Artificial Sequence
  Description of Artificial Sequence: Synthetic oligonucleotide
  Sense strand starting at position 3277 of SEQ ID NO: 1243219
uccauccaucgauauaugu

SEQ ID NO: 1402201 - RNA, 19 nt, Artificial Sequence
  Description of Artificial Sequence: Synthetic oligonucleotide
  Antisense strand to SEQ ID NO: 1402200
acauauaucgauggaugga

SEQ ID NO: 1402202 - RNA, 19 nt, Artificial Sequence
  Description of Artificial Sequence: Synthetic oligonucleotide
  Sense strand starting at position 3286 of SEQ ID NO: 1243219
cgauauauguuaguacauu

SEQ ID NO: 1402203 - RNA, 19 nt, Artificial Sequence
  Description of Artificial Sequence: Synthetic oligonucleotide
  Antisense strand to SEQ ID NO: 1402202
aauguacuaacauauaucg

SEQ ID NO: 1402204 - RNA, 19 nt, Artificial Sequence
  Description of Artificial Sequence: Synthetic oligonucleotide
  Sense strand starting at position 3368 of SEQ ID NO: 1243219
caaguuucuguggauuaca

SEQ ID NO: 1402205 - RNA, 19 nt, Artificial Sequence
  Description of Artificial Sequence: Synthetic oligonucleotide
  Antisense strand to SEQ ID NO: 1402204
uguaauccacagaaacuug

SEQ ID NO: 1402206 - RNA, 19 nt, Artificial Sequence
  Description of Artificial Sequence: Synthetic oligonucleotide
  Sense strand starting at position 3371 of SEQ ID NO: 1243219
guuucuguggauuacauua

SEQ ID NO: 1402207 - RNA, 19 nt, Artificial Sequence
  Description of Artificial Sequence: Synthetic oligonucleotide
  Antisense strand to SEQ ID NO: 1402206
uaauguaauccacagaaac

SEQ ID NO: 1402208 - RNA, 19 nt, Artificial Sequence
  Description of Artificial Sequence: Synthetic oligonucleotide
  Sense strand starting at position 3543 of SEQ ID NO: 1243219
gacaguugugcuggaaaua

SEQ ID NO: 1402209 - RNA, 19 nt, Artificial Sequence
  Description of Artificial Sequence: Synthetic oligonucleotide
  Antisense strand to SEQ ID NO: 1402208
uauuuccagcacaacuguc

SEQ ID NO: 1402210 - RNA, 19 nt, Artificial Sequence
  Description of Artificial Sequence: Synthetic oligonucleotide
  Sense strand starting at position 3544 of SEQ ID NO: 1243219
acaguugugcuggaaauag

SEQ ID NO: 1402211 - RNA, 19 nt, Artificial Sequence
  Description of Artificial Sequence: Synthetic oligonucleotide
  Antisense strand to SEQ ID NO: 1402210
cuauuuccagcacaacugu

SEQ ID NO: 1402212 - RNA, 19 nt, Artificial Sequence
  Description of Artificial Sequence: Synthetic oligonucleotide
  Sense strand starting at position 81 of SEQ ID NO: 1243220
gcaugcucaggaugaacua

SEQ ID NO: 1402213 - RNA, 19 nt, Artificial Sequence
  Description of Artificial Sequence: Synthetic oligonucleotide
  Antisense strand to SEQ ID NO: 1402212
uaguucauccugagcaugc

SEQ ID NO: 1402214 - RNA, 19 nt, Artificial Sequence
  Description of Artificial Sequence: Synthetic oligonucleotide
  Sense strand starting at position 186 of SEQ ID NO: 1243220
ugcuguugaaagugagauc

SEQ ID NO: 1402215 - RNA, 19 nt, Artificial Sequence
  Description of Artificial Sequence: Synthetic oligonucleotide
  Antisense strand to SEQ ID NO: 1402214
gaucucacuuucaacagca

SEQ ID NO: 1402216 - RNA, 19 nt, Artificial Sequence
  Description of Artificial Sequence: Synthetic oligonucleotide
  Sense strand starting at position 286 of SEQ ID NO: 1243220
gcacuaugguccucggaga

SEQ ID NO: 1402217 - RNA, 19 nt, Artificial Sequence
  Description of Artificial Sequence: Synthetic oligonucleotide
  Antisense strand to SEQ ID NO: 1402216
ucuccgaggaccauagugc

SEQ ID NO: 1402218 - RNA, 19 nt, Artificial Sequence
  Description of Artificial Sequence: Synthetic oligonucleotide
  Sense strand starting at position 358 of SEQ ID NO: 1243220
aggcuagucagacagcaau

SEQ ID NO: 1402219 - RNA, 19 nt, Artificial Sequence
  Description of Artificial Sequence: Synthetic oligonucleotide
  Antisense strand to SEQ ID NO: 1402218
auugcugucugacuagccu

SEQ ID NO: 1402220 - RNA, 19 nt, Artificial Sequence
  Description of Artificial Sequence: Synthetic oligonucleotide
  Sense strand starting at position 528 of SEQ ID NO: 1243220
acaagaauugcucagugca

SEQ ID NO: 1402221 - RNA, 19 nt, Artificial Sequence
  Description of Artificial Sequence: Synthetic oligonucleotide
  Antisense strand to SEQ ID NO: 1402220
ugcacugagcaauucuugu

SEQ ID NO: 1402222 - RNA, 19 nt, Artificial Sequence
  Description of Artificial Sequence: Synthetic oligonucleotide
  Sense strand starting at position 531 of SEQ ID NO: 1243220
agaauugcucagugcagga

SEQ ID NO: 1402223 - RNA, 19 nt, Artificial Sequence
  Description of Artificial Sequence: Synthetic oligonucleotide
  Antisense strand to SEQ ID NO: 1402222
uccugcacugagcaauucu

SEQ ID NO: 1402224 - RNA, 19 nt, Artificial Sequence
  Description of Artificial Sequence: Synthetic oligonucleotide
  Sense strand starting at position 597 of SEQ ID NO: 1243220
gugauuagagccugggcaa

SEQ ID NO: 1402225 - RNA, 19 nt, Artificial Sequence
  Description of Artificial Sequence: Synthetic oligonucleotide
  Antisense strand to SEQ ID NO: 1402224
uugcccaggcucuaaucac

SEQ ID NO: 1402226 - RNA, 19 nt, Artificial Sequence
  Description of Artificial Sequence: Synthetic oligonucleotide
  Sense strand starting at position 746 of SEQ ID NO: 1243220
gugaaacaccguugcuacu

SEQ ID NO: 1402227 - RNA, 19 nt, Artificial Sequence
  Description of Artificial Sequence: Synthetic oligonucleotide
  Antisense strand to SEQ ID NO: 1402226
aguagcaacgguguuucac

SEQ ID NO: 1402228 - RNA, 19 nt, Artificial Sequence
  Description of Artificial Sequence: Synthetic oligonucleotide
  Sense strand starting at position 1199 of SEQ ID NO: 1243220
ggcuccuuacuaugugauu

SEQ ID NO: 1402229 - RNA, 19 nt, Artificial Sequence
  Description of Artificial Sequence: Synthetic oligonucleotide
  Antisense strand to SEQ ID NO: 1402228
aaucacauaguaaggagcc

SEQ ID NO: 1402230 - RNA, 19 nt, Artificial Sequence
  Description of Artificial Sequence: Synthetic oligonucleotide
  Sense strand starting at position 1200 of SEQ ID NO: 1243220
gcuccuuacuaugugauuu

SEQ ID NO: 1402231 - RNA, 19 nt, Artificial Sequence
  Description of Artificial Sequence: Synthetic oligonucleotide
  Antisense strand to SEQ ID NO: 1402230
aaaucacauaguaaggagc

SEQ ID NO: 1402232 - RNA, 19 nt, Artificial Sequence
  Description of Artificial Sequence: Synthetic oligonucleotide
  Sense strand starting at position 1224 of SEQ ID NO: 1243220
uuaugauguucuccaugga

SEQ ID NO: 1402233 - RNA, 19 nt, Artificial Sequence
  Description of Artificial Sequence: Synthetic oligonucleotide
  Antisense strand to SEQ ID NO: 1402232
uccauggagaacaucauaa

SEQ ID NO: 1402234 - RNA, 19 nt, Artificial Sequence
  Description of Artificial Sequence: Synthetic oligonucleotide
  Sense strand starting at position 1350 of SEQ ID NO: 1243220
guggaacuguucccuaucu

SEQ ID NO: 1402235 - RNA, 19 nt, Artificial Sequence
  Description of Artificial Sequence: Synthetic oligonucleotide
  Antisense strand to SEQ ID NO: 1402234
agauagggaacaguuccac

SEQ ID NO: 1402236 - RNA, 19 nt, Artificial Sequence
  Description of Artificial Sequence: Synthetic oligonucleotide
  Sense strand starting at position 1351 of SEQ ID NO: 1243220
uggaacuguucccuaucuu

SEQ ID NO: 1402237 - RNA, 19 nt, Artificial Sequence
  Description of Artificial Sequence: Synthetic oligonucleotide
  Antisense strand to SEQ ID NO: 1402236
aagauagggaacaguucca

SEQ ID NO: 1402238 - RNA, 19 nt, Artificial Sequence
  Description of Artificial Sequence: Synthetic oligonucleotide
  Sense strand starting at position 1352 of SEQ ID NO: 1243220
ggaacuguucccuaucuug

SEQ ID NO: 1402239 - RNA, 19 nt, Artificial Sequence
  Description of Artificial Sequence: Synthetic oligonucleotide
  Antisense strand to SEQ ID NO: 1402238
caagauagggaacaguucc

SEQ ID NO: 1402240 - RNA, 19 nt, Artificial Sequence
  Description of Artificial Sequence: Synthetic oligonucleotide
  Sense strand starting at position 1436 of SEQ ID NO: 1243220
aucuuacugcauggaaauu

SEQ ID NO: 1402241 - RNA, 19 nt, Artificial Sequence
  Description of Artificial Sequence: Synthetic oligonucleotide
  Antisense strand to SEQ ID NO: 1402240
aauuuccaugcaguaagau

SEQ ID NO: 1402242 - RNA, 19 nt, Artificial Sequence
  Description of Artificial Sequence: Synthetic oligonucleotide
  Sense strand starting at position 2148 of SEQ ID NO: 1243220
accauuguacuguauggaa

SEQ ID NO: 1402243 - RNA, 19 nt, Artificial Sequence
  Description of Artificial Sequence: Synthetic oligonucleotide
  Antisense strand to SEQ ID NO: 1402242
uuccauacaguacaauggu

SEQ ID NO: 1402244 - RNA, 19 nt, Artificial Sequence
  Description of Artificial Sequence: Synthetic oligonucleotide
  Sense strand starting at position 2150 of SEQ ID NO: 1243220
cauuguacuguauggaaac

SEQ ID NO: 1402245 - RNA, 19 nt, Artificial Sequence
  Description of Artificial Sequence: Synthetic oligonucleotide
  Antisense strand to SEQ ID NO: 1402244
guuuccauacaguacaaug

SEQ ID NO: 1402246 - RNA, 19 nt, Artificial Sequence
  Description of Artificial Sequence: Synthetic oligonucleotide
  Sense strand starting at position 2164 of SEQ ID NO: 1243220
gaaacuucugcagagguua

SEQ ID NO: 1402247 - RNA, 19 nt, Artificial Sequence
  Description of Artificial Sequence: Synthetic oligonucleotide
  Antisense strand to SEQ ID NO: 1402246
uaaccucugcagaaguuuc

SEQ ID NO: 1402248 - RNA, 19 nt, Artificial Sequence
  Description of Artificial Sequence: Synthetic oligonucleotide
  Sense strand starting at position 2389 of SEQ ID NO: 1243220
uggugaaccuaagaaauag

SEQ ID NO: 1402249 - RNA, 19 nt, Artificial Sequence
  Description of Artificial Sequence: Synthetic oligonucleotide
  Antisense strand to SEQ ID NO: 1402248
cuauuucuuagguucacca

SEQ ID NO: 1402250 - RNA, 19 nt, Artificial Sequence
  Description of Artificial Sequence: Synthetic oligonucleotide
  Sense strand starting at position 2431 of SEQ ID NO: 1243220
gggugucucaaagauguga

SEQ ID NO: 1402251 - RNA, 19 nt, Artificial Sequence
  Description of Artificial Sequence: Synthetic oligonucleotide
  Antisense strand to SEQ ID NO: 1402250
ucacaucuuugagacaccc

SEQ ID NO: 1402252 - RNA, 19 nt, Artificial Sequence
  Description of Artificial Sequence: Synthetic oligonucleotide
  Sense strand starting at position 2451 of SEQ ID NO: 1243220
guggucugcagaggaagau

SEQ ID NO: 1402253 - RNA, 19 nt, Artificial Sequence
  Description of Artificial Sequence: Synthetic oligonucleotide
  Antisense strand to SEQ ID NO: 1402252
aucuuccucugcagaccac

SEQ ID NO: 1402254 - RNA, 19 nt, Artificial Sequence
  Description of Artificial Sequence: Synthetic oligonucleotide
  Sense strand starting at position 2572 of SEQ ID NO: 1243220
gcuccaaugcuuuggaacu

SEQ ID NO: 1402255 - RNA, 19 nt, Artificial Sequence
  Description of Artificial Sequence: Synthetic oligonucleotide
  Antisense strand to SEQ ID NO: 1402254
aguuccaaagcauuggagc

SEQ ID NO: 1402256 - RNA, 19 nt, Artificial Sequence
  Description of Artificial Sequence: Synthetic oligonucleotide
  Sense strand starting at position 2649 of SEQ ID NO: 1243220
augagucacuauuaggaga

SEQ ID NO: 1402257 - RNA, 19 nt, Artificial Sequence
  Description of Artificial Sequence: Synthetic oligonucleotide
  Antisense strand to SEQ ID NO: 1402256
ucuccuaauagugacucau

SEQ ID NO: 1402258 - RNA, 19 nt, Artificial Sequence
  Description of Artificial Sequence: Synthetic oligonucleotide
  Sense strand starting at position 2747 of SEQ ID NO: 1243220
gggagcuguucugucauuu

SEQ ID NO: 1402259 - RNA, 19 nt, Artificial Sequence
  Description of Artificial Sequence: Synthetic oligonucleotide
  Antisense strand to SEQ ID NO: 1402258
aaaugacagaacagcuccc

SEQ ID NO: 1402260 - RNA, 19 nt, Artificial Sequence
  Description of Artificial Sequence: Synthetic oligonucleotide
  Sense strand starting at position 2751 of SEQ ID NO: 1243220
gcuguucugucauuuacug

SEQ ID NO: 1402261 - RNA, 19 nt, Artificial Sequence
  Description of Artificial Sequence: Synthetic oligonucleotide
  Antisense strand to SEQ ID NO: 1402260
caguaaaugacagaacagc

SEQ ID NO: 1402262 - RNA, 19 nt, Artificial Sequence
  Description of Artificial Sequence: Synthetic oligonucleotide
  Sense strand starting at position 2911 of SEQ ID NO: 1243220
gucuaacaccuguaauccu

SEQ ID NO: 1402263 - RNA, 19 nt, Artificial Sequence
  Description of Artificial Sequence: Synthetic oligonucleotide
  Antisense strand to SEQ ID NO: 1402262
aggauuacagguguuagac

SEQ ID NO: 1402264 - RNA, 19 nt, Artificial Sequence
  Description of Artificial Sequence: Synthetic oligonucleotide
  Sense strand starting at position 3130 of SEQ ID NO: 1243220
augauugagucaccaccuu

SEQ ID NO: 1402265 - RNA, 19 nt, Artificial Sequence
  Description of Artificial Sequence: Synthetic oligonucleotide
  Antisense strand to SEQ ID NO: 1402264
aagguggugacucaaucau

SEQ ID NO: 1402266 - RNA, 19 nt, Artificial Sequence
  Description of Artificial Sequence: Synthetic oligonucleotide
  Sense strand starting at position 3238 of SEQ ID NO: 1243220
gagguaggcccugguguua

SEQ ID NO: 1402267 - RNA, 19 nt, Artificial Sequence
  Description of Artificial Sequence: Synthetic oligonucleotide
  Antisense strand to SEQ ID NO: 1402266
uaacaccagggccuaccuc

SEQ ID NO: 1402268 - RNA, 19 nt, Artificial Sequence
  Description of Artificial Sequence: Synthetic oligonucleotide
  Sense strand starting at position 3266 of SEQ ID NO: 1243220
ugaugaaacugagaggcua

SEQ ID NO: 1402269 - RNA, 19 nt, Artificial Sequence
  Description of Artificial Sequence: Synthetic oligonucleotide
  Antisense strand to SEQ ID NO: 1402268
uagccucucaguuucauca

SEQ ID NO: 1402270 - RNA, 19 nt, Artificial Sequence
  Description of Artificial Sequence: Synthetic oligonucleotide
  Sense strand starting at position 3346 of SEQ ID NO: 1243220
ugcaaagauuuccauggua

SEQ ID NO: 1402271 - RNA, 19 nt, Artificial Sequence
  Description of Artificial Sequence: Synthetic oligonucleotide
  Antisense strand to SEQ ID NO: 1402270
uaccauggaaaucuuugca

SEQ ID NO: 1402272 - RNA, 19 nt, Artificial Sequence
  Description of Artificial Sequence: Synthetic oligonucleotide
  Sense strand starting at position 3351 of SEQ ID NO: 1243220
agauuuccaugguagaucu

SEQ ID NO: 1402273 - RNA, 19 nt, Artificial Sequence
  Description of Artificial Sequence: Synthetic oligonucleotide
  Antisense strand to SEQ ID NO: 1402272
agaucuaccauggaaaucu

SEQ ID NO: 1402274 - RNA, 19 nt, Artificial Sequence
  Description of Artificial Sequence: Synthetic oligonucleotide
  Sense strand starting at position 3367 of SEQ ID NO: 1243220
ucugguuauguccaagcuu

SEQ ID NO: 1402275 - RNA, 19 nt, Artificial Sequence
  Description of Artificial Sequence: Synthetic oligonucleotide
  Antisense strand to SEQ ID NO: 1402274
aagcuuggacauaaccaga

SEQ ID NO: 1402276 - RNA, 19 nt, Artificial Sequence
  Description of Artificial Sequence: Synthetic oligonucleotide
  Sense strand starting at position 3424 of SEQ ID NO: 1243220
agggcagauuccucuuuag

SEQ ID NO: 1402277 - RNA, 19 nt, Artificial Sequence
  Description of Artificial Sequence: Synthetic oligonucleotide
  Antisense strand to SEQ ID NO: 1402276
cuaaagaggaaucugcccu

SEQ ID NO: 1402278 - RNA, 19 nt, Artificial Sequence
  Description of Artificial Sequence: Synthetic oligonucleotide
  Sense strand starting at position 3427 of SEQ ID NO: 1243220
gcagauuccucuuuagguu

SEQ ID NO: 1402279 - RNA, 19 nt, Artificial Sequence
  Description of Artificial Sequence: Synthetic oligonucleotide
  Antisense strand to SEQ ID NO: 1402278
aaccuaaagaggaaucugc

SEQ ID NO: 1402280 - RNA, 19 nt, Artificial Sequence
  Description of Artificial Sequence: Synthetic oligonucleotide
  Sense strand starting at position 3805 of SEQ ID NO: 1243220
ucaagucuccuguggguga

SEQ ID NO: 1402281 - RNA, 19 nt, Artificial Sequence
  Description of Artificial Sequence: Synthetic oligonucleotide
  Antisense strand to SEQ ID NO: 1402280
ucacccacaggagacuuga

SEQ ID NO: 1402282 - RNA, 19 nt, Artificial Sequence
  Description of Artificial Sequence: Synthetic oligonucleotide
  Sense strand starting at position 3941 of SEQ ID NO: 1243220
aggguaagaguuuguggga

SEQ ID NO: 1402283 - RNA, 19 nt, Artificial Sequence
  Description of Artificial Sequence: Synthetic oligonucleotide
  Antisense strand to SEQ ID NO: 1402282
ucccacaaacucuuacccu

SEQ ID NO: 1402284 - RNA, 19 nt, Artificial Sequence
  Description of Artificial Sequence: Synthetic oligonucleotide
  Sense strand starting at position 3942 of SEQ ID NO: 1243220
ggguaagaguuugugggaa

SEQ ID NO: 1402285 - RNA, 19 nt, Artificial Sequence
  Description of Artificial Sequence: Synthetic oligonucleotide
  Antisense strand to SEQ ID NO: 1402284
uucccacaaacucuuaccc

SEQ ID NO: 1402286 - RNA, 19 nt, Artificial Sequence
  Description of Artificial Sequence: Synthetic oligonucleotide
  Sense strand starting at position 3946 of SEQ ID NO: 1243220
aagaguuugugggaauaga

SEQ ID NO: 1402287 - RNA, 19 nt, Artificial Sequence
  Description of Artificial Sequence: Synthetic oligonucleotide
  Antisense strand to SEQ ID NO: 1402286
ucuauucccacaaacucuu

SEQ ID NO: 1402288 - RNA, 19 nt, Artificial Sequence
  Description of Artificial Sequence: Synthetic oligonucleotide
  Sense strand starting at position 3980 of SEQ ID NO: 1243220
ugguucugugauggagcau

SEQ ID NO: 1402289 - RNA, 19 nt, Artificial Sequence
  Description of Artificial Sequence: Synthetic oligonucleotide
  Antisense strand to SEQ ID NO: 1402288
augcuccaucacagaacca

SEQ ID NO: 1402290 - RNA, 19 nt, Artificial Sequence
  Description of Artificial Sequence: Synthetic oligonucleotide
  Sense strand starting at position 3981 of SEQ ID NO: 1243220
gguucugugauggagcaua

SEQ ID NO: 1402291 - RNA, 19 nt, Artificial Sequence
  Description of Artificial Sequence: Synthetic oligonucleotide
  Antisense strand to SEQ ID NO: 1402290
uaugcuccaucacagaacc

SEQ ID NO: 1402292 - RNA, 19 nt, Artificial Sequence
  Description of Artificial Sequence: Synthetic oligonucleotide
  Sense strand starting at position 170 of SEQ ID NO: 1243221
gguagcugcuccguccaaa

SEQ ID NO: 1402293 - RNA, 19 nt, Artificial Sequence
  Description of Artificial Sequence: Synthetic oligonucleotide
  Antisense strand to SEQ ID NO: 1402292
uuuggacggagcagcuacc

SEQ ID NO: 1402294 - RNA, 19 nt, Artificial Sequence
  Description of Artificial Sequence: Synthetic oligonucleotide
  Sense strand starting at position 171 of SEQ ID NO: 1243221
guagcugcuccguccaaau

SEQ ID NO: 1402295 - RNA, 19 nt, Artificial Sequence
  Description of Artificial Sequence: Synthetic oligonucleotide
  Antisense strand to SEQ ID NO: 1402294
auuuggacggagcagcuac

SEQ ID NO: 1402296 - RNA, 19 nt, Artificial Sequence
  Description of Artificial Sequence: Synthetic oligonucleotide
  Sense strand starting at position 183 of SEQ ID NO: 1243221
uccaaaucaccuggguaua

SEQ ID NO: 1402297 - RNA, 19 nt, Artificial Sequence
  Description of Artificial Sequence: Synthetic oligonucleotide
  Antisense strand to SEQ ID NO: 1402296
uauacccaggugauuugga

SEQ ID NO: 1402298 - RNA, 19 nt, Artificial Sequence
  Description of Artificial Sequence: Synthetic oligonucleotide
  Sense strand starting at position 184 of SEQ ID NO: 1243221
ccaaaucaccuggguauaa

SEQ ID NO: 1402299 - RNA, 19 nt, Artificial Sequence
  Description of Artificial Sequence: Synthetic oligonucleotide
  Antisense strand to SEQ ID NO: 1402298
uuauacccaggugauuugg

SEQ ID NO: 1402300 - RNA, 19 nt, Artificial Sequence
  Description of Artificial Sequence: Synthetic oligonucleotide
  Sense strand starting at position 196 of SEQ ID NO: 1243221
gguauaaaugcacacuuga

SEQ ID NO: 1402301 - RNA, 19 nt, Artificial Sequence
  Description of Artificial Sequence: Synthetic oligonucleotide
  Antisense strand to SEQ ID NO: 1402300
ucaagugugcauuuauacc

SEQ ID NO: 1402302 - RNA, 19 nt, Artificial Sequence
  Description of Artificial Sequence: Synthetic oligonucleotide
  Sense strand starting at position 284 of SEQ ID NO: 1243221
gacacucaguugugacauc

SEQ ID NO: 1402303 - RNA, 19 nt, Artificial Sequence
  Description of Artificial Sequence: Synthetic oligonucleotide
  Antisense strand to SEQ ID NO: 1402302
gaugucacaacugaguguc

SEQ ID NO: 1402304 - RNA, 19 nt, Artificial Sequence
  Description of Artificial Sequence: Synthetic oligonucleotide
  Sense strand starting at position 534 of SEQ ID NO: 1243221
uggaucccugaaugaguuu

SEQ ID NO: 1402305 - RNA, 19 nt, Artificial Sequence
  Description of Artificial Sequence: Synthetic oligonucleotide
  Antisense strand to SEQ ID NO: 1402304
aaacucauucagggaucca

SEQ ID NO: 1402306 - RNA, 19 nt, Artificial Sequence
  Description of Artificial Sequence: Synthetic oligonucleotide
  Sense strand starting at position 701 of SEQ ID NO: 1243221
aagugcaucuucgauuaca

SEQ ID NO: 1402307 - RNA, 19 nt, Artificial Sequence
  Description of Artificial Sequence: Synthetic oligonucleotide
  Antisense strand to SEQ ID NO: 1402306
uguaaucgaagaugcacuu

SEQ ID NO: 1402308 - RNA, 19 nt, Artificial Sequence
  Description of Artificial Sequence: Synthetic oligonucleotide
  Sense strand starting at position 839 of SEQ ID NO: 1243221
ccuauuaauuuggguaacu

SEQ ID NO: 1402309 - RNA, 19 nt, Artificial Sequence
  Description of Artificial Sequence: Synthetic oligonucleotide
  Antisense strand to SEQ ID NO: 1402308
aguuacccaaauuaauagg

SEQ ID NO: 1402310 - RNA, 19 nt, Artificial Sequence
  Description of Artificial Sequence: Synthetic oligonucleotide
  Sense strand starting at position 931 of SEQ ID NO: 1243221
gucggcuaugcugucaaca

SEQ ID NO: 1402311 - RNA, 19 nt, Artificial Sequence
  Description of Artificial Sequence: Synthetic oligonucleotide
  Antisense strand to SEQ ID NO: 1402310
uguugacagcauagccgac

SEQ ID NO: 1402312 - RNA, 19 nt, Artificial Sequence
  Description of Artificial Sequence: Synthetic oligonucleotide
  Sense strand starting at position 936 of SEQ ID NO: 1243221
cuaugcugucaacauagaa

SEQ ID NO: 1402313 - RNA, 19 nt, Artificial Sequence
  Description of Artificial Sequence: Synthetic oligonucleotide
  Antisense strand to SEQ ID NO: 1402312
uucuauguugacagcauag

SEQ ID NO: 1402314 - RNA, 19 nt, Artificial Sequence
  Description of Artificial Sequence: Synthetic oligonucleotide
  Sense strand starting at position 981 of SEQ ID NO: 1243221
cgcagucacuuuccugauu

SEQ ID NO: 1402315 - RNA, 19 nt, Artificial Sequence
  Description of Artificial Sequence: Synthetic oligonucleotide
  Antisense strand to SEQ ID NO: 1402314
aaucaggaaagugacugcg

SEQ ID NO: 1402316 - RNA, 19 nt, Artificial Sequence
  Description of Artificial Sequence: Synthetic oligonucleotide
  Sense strand starting at position 982 of SEQ ID NO: 1243221
gcagucacuuuccugauua

SEQ ID NO: 1402317 - RNA, 19 nt, Artificial Sequence
  Description of Artificial Sequence: Synthetic oligonucleotide
  Antisense strand to SEQ ID NO: 1402316
uaaucaggaaagugacugc

SEQ ID NO: 1402318 - RNA, 19 nt, Artificial Sequence
  Description of Artificial Sequence: Synthetic oligonucleotide
  Sense strand starting at position 984 of SEQ ID NO: 1243221
agucacuuuccugauuauu

SEQ ID NO: 1402319 - RNA, 19 nt, Artificial Sequence
  Description of Artificial Sequence: Synthetic oligonucleotide
  Antisense strand to SEQ ID NO: 1402318
aauaaucaggaaagugacu

SEQ ID NO: 1402320 - RNA, 19 nt, Artificial Sequence
  Description of Artificial Sequence: Synthetic oligonucleotide
  Sense strand starting at position 1071 of SEQ ID NO: 1243221
ggaggaugucuguguccag

SEQ ID NO: 1402321 - RNA, 19 nt, Artificial Sequence
  Description of Artificial Sequence: Synthetic oligonucleotide
  Antisense strand to SEQ ID NO: 1402320
cuggacacagacauccucc

SEQ ID NO: 1402322 - RNA, 19 nt, Artificial Sequence
  Description of Artificial Sequence: Synthetic oligonucleotide
  Sense strand starting at position 1125 of SEQ ID NO: 1243221
ugccguauuccugggacac

SEQ ID NO: 1402323 - RNA, 19 nt, Artificial Sequence
  Description of Artificial Sequence: Synthetic oligonucleotide
  Antisense strand to SEQ ID NO: 1402322
gugucccaggaauacggca

SEQ ID NO: 1402324 - RNA, 19 nt, Artificial Sequence
  Description of Artificial Sequence: Synthetic oligonucleotide
  Sense strand starting at position 1425 of SEQ ID NO: 1243221
agcugaagugcgggucaaa

SEQ ID NO: 1402325 - RNA, 19 nt, Artificial Sequence
  Description of Artificial Sequence: Synthetic oligonucleotide
  Antisense strand to SEQ ID NO: 1402324
uuugacccgcacuucagcu

SEQ ID NO: 1402326 - RNA, 19 nt, Artificial Sequence
  Description of Artificial Sequence: Synthetic oligonucleotide
  Sense strand starting at position 2227 of SEQ ID NO: 1243221
aagcgcucgcugcggaaau

SEQ ID NO: 1402327 - RNA, 19 nt, Artificial Sequence
  Description of Artificial Sequence: Synthetic oligonucleotide
  Antisense strand to SEQ ID NO: 1402326
auuuccgcagcgagcgcuu

SEQ ID NO: 1402328 - RNA, 19 nt, Artificial Sequence
  Description of Artificial Sequence: Synthetic oligonucleotide
  Sense strand starting at position 2319 of SEQ ID NO: 1243221
gcgaguggucagccuaggu

SEQ ID NO: 1402329 - RNA, 19 nt, Artificial Sequence
  Description of Artificial Sequence: Synthetic oligonucleotide
  Antisense strand to SEQ ID NO: 1402328
accuaggcugaccacucgc

SEQ ID NO: 1402330 - RNA, 19 nt, Artificial Sequence
  Description of Artificial Sequence: Synthetic oligonucleotide
  Sense strand starting at position 2575 of SEQ ID NO: 1243221
gcgccucaguccuuugcaa

SEQ ID NO: 1402331 - RNA, 19 nt, Artificial Sequence
  Description of Artificial Sequence: Synthetic oligonucleotide
  Antisense strand to SEQ ID NO: 1402330
uugcaaaggacugaggcgc

SEQ ID NO: 1402332 - RNA, 19 nt, Artificial Sequence
  Description of Artificial Sequence: Synthetic oligonucleotide
  Sense strand starting at position 2603 of SEQ ID NO: 1243221
cccgguuccuuggagguaa

SEQ ID NO: 1402333 - RNA, 19 nt, Artificial Sequence
  Description of Artificial Sequence: Synthetic oligonucleotide
  Antisense strand to SEQ ID NO: 1402332
uuaccuccaaggaaccggg

SEQ ID NO: 1402334 - RNA, 19 nt, Artificial Sequence
  Description of Artificial Sequence: Synthetic oligonucleotide
  Sense strand starting at position 2686 of SEQ ID NO: 1243221
cagugauugcucgccguca

SEQ ID NO: 1402335 - RNA, 19 nt, Artificial Sequence
  Description of Artificial Sequence: Synthetic oligonucleotide
  Antisense strand to SEQ ID NO: 1402334
ugacggcgagcaaucacug

SEQ ID NO: 1402336 - RNA, 19 nt, Artificial Sequence
  Description of Artificial Sequence: Synthetic oligonucleotide
  Sense strand starting at position 2687 of SEQ ID NO: 1243221
agugauugcucgccgucau

SEQ ID NO: 1402337 - RNA, 19 nt, Artificial Sequence
  Description of Artificial Sequence: Synthetic oligonucleotide
  Antisense strand to SEQ ID NO: 1402336
augacggcgagcaaucacu

SEQ ID NO: 1402338 - RNA, 19 nt, Artificial Sequence
  Description of Artificial Sequence: Synthetic oligonucleotide
  Sense strand starting at position 2697 of SEQ ID NO: 1243221
cgccgucaucgucaucaau

SEQ ID NO: 1402339 - RNA, 19 nt, Artificial Sequence
  Description of Artificial Sequence: Synthetic oligonucleotide
  Antisense strand to SEQ ID NO: 1402338
auugaugacgaugacggcg

SEQ ID NO: 1402340 - RNA, 19 nt, Artificial Sequence
  Description of Artificial Sequence: Synthetic oligonucleotide
  Sense strand starting at position 2699 of SEQ ID NO: 1243221
ccgucaucgucaucaauua

SEQ ID NO: 1402341 - RNA, 19 nt, Artificial Sequence
  Description of Artificial Sequence: Synthetic oligonucleotide
  Antisense strand to SEQ ID NO: 1402340
uaauugaugacgaugacgg

SEQ ID NO: 1402342 - RNA, 19 nt, Artificial Sequence
  Description of Artificial Sequence: Synthetic oligonucleotide
  Sense strand starting at position 2700 of SEQ ID NO: 1243221
cgucaucgucaucaauuau

SEQ ID NO: 1402343 - RNA, 19 nt, Artificial Sequence
  Description of Artificial Sequence: Synthetic oligonucleotide
  Antisense strand to SEQ ID NO: 1402342
auaauugaugacgaugacg

SEQ ID NO: 1402344 - RNA, 19 nt, Artificial Sequence
  Description of Artificial Sequence: Synthetic oligonucleotide
  Sense strand starting at position 2706 of SEQ ID NO: 1243221
cgucaucaauuauuaggua

SEQ ID NO: 1402345 - RNA, 19 nt, Artificial Sequence
  Description of Artificial Sequence: Synthetic oligonucleotide
  Antisense strand to SEQ ID NO: 1402344
uaccuaauaauugaugacg

SEQ ID NO: 1402346 - RNA, 19 nt, Artificial Sequence
  Description of Artificial Sequence: Synthetic oligonucleotide
  Sense strand starting at position 2707 of SEQ ID NO: 1243221
gucaucaauuauuagguau

SEQ ID NO: 1402347 - RNA, 19 nt, Artificial Sequence
  Description of Artificial Sequence: Synthetic oligonucleotide
  Antisense strand to SEQ ID NO: 1402346
auaccuaauaauugaugac

SEQ ID NO: 1402348 - RNA, 19 nt, Artificial Sequence
  Description of Artificial Sequence: Synthetic oligonucleotide
  Sense strand starting at position 3557 of SEQ ID NO: 1243221
augugaugcuccuaccuaa

SEQ ID NO: 1402349 - RNA, 19 nt, Artificial Sequence
  Description of Artificial Sequence: Synthetic oligonucleotide
  Antisense strand to SEQ ID NO: 1402348
uuagguaggagcaucacau

SEQ ID NO: 1402350 - RNA, 19 nt, Artificial Sequence
  Description of Artificial Sequence: Synthetic oligonucleotide
  Sense strand starting at position 3775 of SEQ ID NO: 1243221
auauguauaugcuugugua

SEQ ID NO: 1402351 - RNA, 19 nt, Artificial Sequence
  Description of Artificial Sequence: Synthetic oligonucleotide
  Antisense strand to SEQ ID NO: 1402350
uacacaagcauauacauau

SEQ ID NO: 1402352 - RNA, 19 nt, Artificial Sequence
  Description of Artificial Sequence: Synthetic oligonucleotide
  Sense strand starting at position 3776 of SEQ ID NO: 1243221
uauguauaugcuuguguaa

SEQ ID NO: 1402353 - RNA, 19 nt, Artificial Sequence
  Description of Artificial Sequence: Synthetic oligonucleotide
  Antisense strand to SEQ ID NO: 1402352
uuacacaagcauauacaua

SEQ ID NO: 1402354 - RNA, 19 nt, Artificial Sequence
  Description of Artificial Sequence: Synthetic oligonucleotide
  Sense strand starting at position 3779 of SEQ ID NO: 1243221
guauaugcuuguguaaaca

SEQ ID NO: 1402355 - RNA, 19 nt, Artificial Sequence
  Description of Artificial Sequence: Synthetic oligonucleotide
  Antisense strand to SEQ ID NO: 1402354
uguuuacacaagcauauac

SEQ ID NO: 1402356 - RNA, 19 nt, Artificial Sequence
  Description of Artificial Sequence: Synthetic oligonucleotide
  Sense strand starting at position 3846 of SEQ ID NO: 1243221
ucuuguuccuauccaguca

SEQ ID NO: 1402357 - RNA, 19 nt, Artificial Sequence
  Description of Artificial Sequence: Synthetic oligonucleotide
  Antisense strand to SEQ ID NO: 1402356
ugacuggauaggaacaaga

SEQ ID NO: 1402358 - RNA, 19 nt, Artificial Sequence
  Description of Artificial Sequence: Synthetic oligonucleotide
  Sense strand starting at position 3875 of SEQ ID NO: 1243221
gcacauugcugacuacuuu

SEQ ID NO: 1402359 - RNA, 19 nt, Artificial Sequence
  Description of Artificial Sequence: Synthetic oligonucleotide
  Antisense strand to SEQ ID NO: 1402358
aaaguagucagcaaugugc

SEQ ID NO: 1402360 - RNA, 19 nt, Artificial Sequence
  Description of Artificial Sequence: Synthetic oligonucleotide
  Sense strand starting at position 3929 of SEQ ID NO: 1243221
uccggacugcuuuauacuu

SEQ ID NO: 1402361 - RNA, 19 nt, Artificial Sequence
  Description of Artificial Sequence: Synthetic oligonucleotide
  Antisense strand to SEQ ID NO: 1402360
aaguauaaagcaguccgga

SEQ ID NO: 1402362 - RNA, 19 nt, Artificial Sequence
  Description of Artificial Sequence: Synthetic oligonucleotide
  Sense strand starting at position 3934 of SEQ ID NO: 1243221
acugcuuuauacuugggau

SEQ ID NO: 1402363 - RNA, 19 nt, Artificial Sequence
  Description of Artificial Sequence: Synthetic oligonucleotide
  Antisense strand to SEQ ID NO: 1402362
aucccaaguauaaagcagu

SEQ ID NO: 1402364 - RNA, 19 nt, Artificial Sequence
  Description of Artificial Sequence: Synthetic oligonucleotide
  Sense strand starting at position 3936 of SEQ ID NO: 1243221
ugcuuuauacuugggauua

SEQ ID NO: 1402365 - RNA, 19 nt, Artificial Sequence
  Description of Artificial Sequence: Synthetic oligonucleotide
  Antisense strand to SEQ ID NO: 1402364
uaaucccaaguauaaagca

SEQ ID NO: 1402366 - RNA, 19 nt, Artificial Sequence
  Description of Artificial Sequence: Synthetic oligonucleotide
  Sense strand starting at position 3937 of SEQ ID NO: 1243221
gcuuuauacuugggauuau

SEQ ID NO: 1402367 - RNA, 19 nt, Artificial Sequence
  Description of Artificial Sequence: Synthetic oligonucleotide
  Antisense strand to SEQ ID NO: 1402366
auaaucccaaguauaaagc

SEQ ID NO: 1402368 - RNA, 19 nt, Artificial Sequence
  Description of Artificial Sequence: Synthetic oligonucleotide
  Sense strand starting at position 3938 of SEQ ID NO: 1243221
cuuuauacuugggauuaua

SEQ ID NO: 1402369 - RNA, 19 nt, Artificial Sequence
  Description of Artificial Sequence: Synthetic oligonucleotide
  Antisense strand to SEQ ID NO: 1402368
uauaaucccaaguauaaag

SEQ ID NO: 1402370 - RNA, 19 nt, Artificial Sequence
  Description of Artificial Sequence: Synthetic oligonucleotide
  Sense strand starting at position 3978 of SEQ ID NO: 1243221
gcuucuacgguuuaacaua

SEQ ID NO: 1402371 - RNA, 19 nt, Artificial Sequence
  Description of Artificial Sequence: Synthetic oligonucleotide
  Antisense strand to SEQ ID NO: 1402370
uauguuaaaccguagaagc

SEQ ID NO: 1402372 - RNA, 19 nt, Artificial Sequence
  Description of Artificial Sequence: Synthetic oligonucleotide
  Sense strand starting at position 153 of SEQ ID NO: 1243222
guuaaagagaaauguugca

SEQ ID NO: 1402373 - RNA, 19 nt, Artificial Sequence
  Description of Artificial Sequence: Synthetic oligonucleotide
  Antisense strand to SEQ ID NO: 1402372
ugcaacauuucucuuuaac

SEQ ID NO: 1402374 - RNA, 19 nt, Artificial Sequence
  Description of Artificial Sequence: Synthetic oligonucleotide
  Sense strand starting at position 192 of SEQ ID NO: 1243222
uacucaggucccuguaaga

SEQ ID NO: 1402375 - RNA, 19 nt, Artificial Sequence
  Description of Artificial Sequence: Synthetic oligonucleotide
  Antisense strand to SEQ ID NO: 1402374
ucuuacagggaccugagua

SEQ ID NO: 1402376 - RNA, 19 nt, Artificial Sequence
  Description of Artificial Sequence: Synthetic oligonucleotide
  Sense strand starting at position 266 of SEQ ID NO: 1243222
uccagauagccacaucguu

SEQ ID NO: 1402377 - RNA, 19 nt, Artificial Sequence
  Description of Artificial Sequence: Synthetic oligonucleotide
  Antisense strand to SEQ ID NO: 1402376
aacgauguggcuaucugga

SEQ ID NO: 1402378 - RNA, 19 nt, Artificial Sequence
  Description of Artificial Sequence: Synthetic oligonucleotide
  Sense strand starting at position 347 of SEQ ID NO: 1243222
acaugugacuauuccaagu

SEQ ID NO: 1402379 - RNA, 19 nt, Artificial Sequence
  Description of Artificial Sequence: Synthetic oligonucleotide
  Antisense strand to SEQ ID NO: 1402378
acuuggaauagucacaugu

SEQ ID NO: 1402380 - RNA, 19 nt, Artificial Sequence
  Description of Artificial Sequence: Synthetic oligonucleotide
  Sense strand starting at position 454 of SEQ ID NO: 1243222
guauauaaagcugaacuuu

SEQ ID NO: 1402381 - RNA, 19 nt, Artificial Sequence
  Description of Artificial Sequence: Synthetic oligonucleotide
  Antisense strand to SEQ ID NO: 1402380
aaaguucagcuuuauauac

SEQ ID NO: 1402382 - RNA, 19 nt, Artificial Sequence
  Description of Artificial Sequence: Synthetic oligonucleotide
  Sense strand starting at position 498 of SEQ ID NO: 1243222
uucgguguaugauuucuga

SEQ ID NO: 1402383 - RNA, 19 nt, Artificial Sequence
  Description of Artificial Sequence: Synthetic oligonucleotide
  Antisense strand to SEQ ID NO: 1402382
ucagaaaucauacaccgaa

SEQ ID NO: 1402384 - RNA, 19 nt, Artificial Sequence
  Description of Artificial Sequence: Synthetic oligonucleotide
  Sense strand starting at position 1051 of SEQ ID NO: 1243222
ggaagcuccuuagcugaaa

SEQ ID NO: 1402385 - RNA, 19 nt, Artificial Sequence
  Description of Artificial Sequence: Synthetic oligonucleotide
  Antisense strand to SEQ ID NO: 1402384
uuucagcuaaggagcuucc

SEQ ID NO: 1402386 - RNA, 19 nt, Artificial Sequence
  Description of Artificial Sequence: Synthetic oligonucleotide
  Sense strand starting at position 1193 of SEQ ID NO: 1243222
aagucaguucgggacacuu

SEQ ID NO: 1402387 - RNA, 19 nt, Artificial Sequence
  Description of Artificial Sequence: Synthetic oligonucleotide
  Antisense strand to SEQ ID NO: 1402386
aagugucccgaacugacuu

SEQ ID NO: 1402388 - RNA, 19 nt, Artificial Sequence
  Description of Artificial Sequence: Synthetic oligonucleotide
  Sense strand starting at position 1354 of SEQ ID NO: 1243222
caguuucugcuagauagau

SEQ ID NO: 1402389 - RNA, 19 nt, Artificial Sequence
  Description of Artificial Sequence: Synthetic oligonucleotide
  Antisense strand to SEQ ID NO: 1402388
aucuaucuagcagaaacug

SEQ ID NO: 1402390 - RNA, 19 nt, Artificial Sequence
  Description of Artificial Sequence: Synthetic oligonucleotide
  Sense strand starting at position 1356 of SEQ ID NO: 1243222
guuucugcuagauagauga

SEQ ID NO: 1402391 - RNA, 19 nt, Artificial Sequence
  Description of Artificial Sequence: Synthetic oligonucleotide
  Antisense strand to SEQ ID NO: 1402390
ucaucuaucuagcagaaac

SEQ ID NO: 1402392 - RNA, 19 nt, Artificial Sequence
  Description of Artificial Sequence: Synthetic oligonucleotide
  Sense strand starting at position 1375 of SEQ ID NO: 1243222
caggucuacugcuuagaac

SEQ ID NO: 1402393 - RNA, 19 nt, Artificial Sequence
  Description of Artificial Sequence: Synthetic oligonucleotide
  Antisense strand to SEQ ID NO: 1402392
guucuaagcaguagaccug

SEQ ID NO: 1402394 - RNA, 19 nt, Artificial Sequence
  Description of Artificial Sequence: Synthetic oligonucleotide
  Sense strand starting at position 1445 of SEQ ID NO: 1243222
cggcuuucugcagccagau

SEQ ID NO: 1402395 - RNA, 19 nt, Artificial Sequence
  Description of Artificial Sequence: Synthetic oligonucleotide
  Antisense strand to SEQ ID NO: 1402394
aucuggcugcagaaagccg

SEQ ID NO: 1402396 - RNA, 19 nt, Artificial Sequence
  Description of Artificial Sequence: Synthetic oligonucleotide
  Sense strand starting at position 1471 of SEQ ID NO: 1243222
acaucugacuuggucugau

SEQ ID NO: 1402397 - RNA, 19 nt, Artificial Sequence
  Description of Artificial Sequence: Synthetic oligonucleotide
  Antisense strand to SEQ ID NO: 1402396
aucagaccaagucagaugu

SEQ ID NO: 1402398 - RNA, 19 nt, Artificial Sequence
  Description of Artificial Sequence: Synthetic oligonucleotide
  Sense strand starting at position 1474 of SEQ ID NO: 1243222
ucugacuuggucugauuaa

SEQ ID NO: 1402399 - RNA, 19 nt, Artificial Sequence
  Description of Artificial Sequence: Synthetic oligonucleotide
  Antisense strand to SEQ ID NO: 1402398
uuaaucagaccaagucaga

SEQ ID NO: 1402400 - RNA, 19 nt, Artificial Sequence
  Description of Artificial Sequence: Synthetic oligonucleotide
  Sense strand starting at position 1486 of SEQ ID NO: 1243222
ugauuaagcuaucugacuu

SEQ ID NO: 1402401 - RNA, 19 nt, Artificial Sequence
  Description of Artificial Sequence: Synthetic oligonucleotide
  Antisense strand to SEQ ID NO: 1402400
aagucagauagcuuaauca

SEQ ID NO: 1402402 - RNA, 19 nt, Artificial Sequence
  Description of Artificial Sequence: Synthetic oligonucleotide
  Sense strand starting at position 1551 of SEQ ID NO: 1243222
uucccuuucccaggaaugu

SEQ ID NO: 1402403 - RNA, 19 nt, Artificial Sequence
  Description of Artificial Sequence: Synthetic oligonucleotide
  Antisense strand to SEQ ID NO: 1402402
acauuccugggaaagggaa

SEQ ID NO: 1402404 - RNA, 19 nt, Artificial Sequence
  Description of Artificial Sequence: Synthetic oligonucleotide
  Sense strand starting at position 1709 of SEQ ID NO: 1243222
ggaggaagauauuagaaac

SEQ ID NO: 1402405 - RNA, 19 nt, Artificial Sequence
  Description of Artificial Sequence: Synthetic oligonucleotide
  Antisense strand to SEQ ID NO: 1402404
guuucuaauaucuuccucc

SEQ ID NO: 1402406 - RNA, 19 nt, Artificial Sequence
  Description of Artificial Sequence: Synthetic oligonucleotide
  Sense strand starting at position 2780 of SEQ ID NO: 1243222
gcuuccugauuccuaggaa

SEQ ID NO: 1402407 - RNA, 19 nt, Artificial Sequence
  Description of Artificial Sequence: Synthetic oligonucleotide
  Antisense strand to SEQ ID NO: 1402406
uuccuaggaaucaggaagc

SEQ ID NO: 1402408 - RNA, 19 nt, Artificial Sequence
  Description of Artificial Sequence: Synthetic oligonucleotide
  Sense strand starting at position 2783 of SEQ ID NO: 1243222
uccugauuccuaggaaucu

SEQ ID NO: 1402409 - RNA, 19 nt, Artificial Sequence
  Description of Artificial Sequence: Synthetic oligonucleotide
  Antisense strand to SEQ ID NO: 1402408
agauuccuaggaaucagga

SEQ ID NO: 1402410 - RNA, 19 nt, Artificial Sequence
  Description of Artificial Sequence: Synthetic oligonucleotide
  Sense strand starting at position 2974 of SEQ ID NO: 1243222
ggccacaacuuucuaugaa

SEQ ID NO: 1402411 - RNA, 19 nt, Artificial Sequence
  Description of Artificial Sequence: Synthetic oligonucleotide
  Antisense strand to SEQ ID NO: 1402410
uucauagaaaguuguggcc

SEQ ID NO: 1402412 - RNA, 19 nt, Artificial Sequence
  Description of Artificial Sequence: Synthetic oligonucleotide
  Sense strand starting at position 2983 of SEQ ID NO: 1243222
uuucuaugaagcgaaugua

SEQ ID NO: 1402413 - RNA, 19 nt, Artificial Sequence
  Description of Artificial Sequence: Synthetic oligonucleotide
  Antisense strand to SEQ ID NO: 1402412
uacauucgcuucauagaaa

SEQ ID NO: 1402414 - RNA, 19 nt, Artificial Sequence
  Description of Artificial Sequence: Synthetic oligonucleotide
  Sense strand starting at position 3064 of SEQ ID NO: 1243222
cccaaugccuccuugggaa

SEQ ID NO: 1402415 - RNA, 19 nt, Artificial Sequence
  Description of Artificial Sequence: Synthetic oligonucleotide
  Antisense strand to SEQ ID NO: 1402414
uucccaaggaggcauuggg

SEQ ID NO: 1402416 - RNA, 19 nt, Artificial Sequence
  Description of Artificial Sequence: Synthetic oligonucleotide
  Sense strand starting at position 3117 of SEQ ID NO: 1243222
cugccuguucuuucgugua

SEQ ID NO: 1402417 - RNA, 19 nt, Artificial Sequence
  Description of Artificial Sequence: Synthetic oligonucleotide
  Antisense strand to SEQ ID NO: 1402416
uacacgaaagaacaggcag

SEQ ID NO: 1402418 - RNA, 19 nt, Artificial Sequence
  Description of Artificial Sequence: Synthetic oligonucleotide
  Sense strand starting at position 3188 of SEQ ID NO: 1243222
gcuaacuuguucuuggaaa

SEQ ID NO: 1402419 - RNA, 19 nt, Artificial Sequence
  Description of Artificial Sequence: Synthetic oligonucleotide
  Antisense strand to SEQ ID NO: 1402418
uuuccaagaacaaguuagc

SEQ ID NO: 1402420 - RNA, 19 nt, Artificial Sequence
  Description of Artificial Sequence: Synthetic oligonucleotide
  Sense strand starting at position 3201 of SEQ ID NO: 1243222
uggaaauucuuugcuuuga

SEQ ID NO: 1402421 - RNA, 19 nt, Artificial Sequence
  Description of Artificial Sequence: Synthetic oligonucleotide
  Antisense strand to SEQ ID NO: 1402420
ucaaagcaaagaauuucca

SEQ ID NO: 1402422 - RNA, 19 nt, Artificial Sequence
  Description of Artificial Sequence: Synthetic oligonucleotide
  Sense strand starting at position 3202 of SEQ ID NO: 1243222
ggaaauucuuugcuuugac

SEQ ID NO: 1402423 - RNA, 19 nt, Artificial Sequence
  Description of Artificial Sequence: Synthetic oligonucleotide
  Antisense strand to SEQ ID NO: 1402422
gucaaagcaaagaauuucc

SEQ ID NO: 1402424 - RNA, 19 nt, Artificial Sequence
  Description of Artificial Sequence: Synthetic oligonucleotide
  Sense strand starting at position 3214 of SEQ ID NO: 1243222
cuuugacaaucguuaaacu

SEQ ID NO: 1402425 - RNA, 19 nt, Artificial Sequence
  Description of Artificial Sequence: Synthetic oligonucleotide
  Antisense strand to SEQ ID NO: 1402424
aguuuaacgauugucaaag

SEQ ID NO: 1402426 - RNA, 19 nt, Artificial Sequence
  Description of Artificial Sequence: Synthetic oligonucleotide
  Sense strand starting at position 3215 of SEQ ID NO: 1243222
uuugacaaucguuaaacua

SEQ ID NO: 1402427 - RNA, 19 nt, Artificial Sequence
  Description of Artificial Sequence: Synthetic oligonucleotide
  Antisense strand to SEQ ID NO: 1402426
uaguuuaacgauugucaaa

SEQ ID NO: 1402428 - RNA, 19 nt, Artificial Sequence
  Description of Artificial Sequence: Synthetic oligonucleotide
  Sense strand starting at position 3279 of SEQ ID NO: 1243222
uaggguucuugaguaccua

SEQ ID NO: 1402429 - RNA, 19 nt, Artificial Sequence
  Description of Artificial Sequence: Synthetic oligonucleotide
  Antisense strand to SEQ ID NO: 1402428
uagguacucaagaacccua

SEQ ID NO: 1402430 - RNA, 19 nt, Artificial Sequence
  Description of Artificial Sequence: Synthetic oligonucleotide
  Sense strand starting at position 3283 of SEQ ID NO: 1243222
guucuugaguaccuacaga

SEQ ID NO: 1402431 - RNA, 19 nt, Artificial Sequence
  Description of Artificial Sequence: Synthetic oligonucleotide
  Antisense strand to SEQ ID NO: 1402430
ucuguagguacucaagaac

SEQ ID NO: 1402432 - RNA, 19 nt, Artificial Sequence
  Description of Artificial Sequence: Synthetic oligonucleotide
  Sense strand starting at position 3510 of SEQ ID NO: 1243222
gagaguagccuugacuuua

SEQ ID NO: 1402433 - RNA, 19 nt, Artificial Sequence
  Description of Artificial Sequence: Synthetic oligonucleotide
  Antisense strand to SEQ ID NO: 1402432
uaaagucaaggcuacucuc

SEQ ID NO: 1402434 - RNA, 19 nt, Artificial Sequence
  Description of Artificial Sequence: Synthetic oligonucleotide
  Sense strand starting at position 3631 of SEQ ID NO: 1243222
gagggucuuggaggauuca

SEQ ID NO: 1402435 - RNA, 19 nt, Artificial Sequence
  Description of Artificial Sequence: Synthetic oligonucleotide
  Antisense strand to SEQ ID NO: 1402434
ugaauccuccaagacccuc

SEQ ID NO: 1402436 - RNA, 19 nt, Artificial Sequence
  Description of Artificial Sequence: Synthetic oligonucleotide
  Sense strand starting at position 3716 of SEQ ID NO: 1243222
uggugugaugcaucugugu

SEQ ID NO: 1402437 - RNA, 19 nt, Artificial Sequence
  Description of Artificial Sequence: Synthetic oligonucleotide
  Antisense strand to SEQ ID NO: 1402436
acacagaugcaucacacca

SEQ ID NO: 1402438 - RNA, 19 nt, Artificial Sequence
  Description of Artificial Sequence: Synthetic oligonucleotide
  Sense strand starting at position 3722 of SEQ ID NO: 1243222
gaugcaucuguguaaugaa

SEQ ID NO: 1402439 - RNA, 19 nt, Artificial Sequence
  Description of Artificial Sequence: Synthetic oligonucleotide
  Antisense strand to SEQ ID NO: 1402438
uucauuacacagaugcauc

SEQ ID NO: 1402440 - RNA, 19 nt, Artificial Sequence
  Description of Artificial Sequence: Synthetic oligonucleotide
  Sense strand starting at position 3757 of SEQ ID NO: 1243222
gggacagcauugcuagauu

SEQ ID NO: 1402441 - RNA, 19 nt, Artificial Sequence
  Description of Artificial Sequence: Synthetic oligonucleotide
  Antisense strand to SEQ ID NO: 1402440
aaucuagcaaugcuguccc

SEQ ID NO: 1402442 - RNA, 19 nt, Artificial Sequence
  Description of Artificial Sequence: Synthetic oligonucleotide
  Sense strand starting at position 3787 of SEQ ID NO: 1243222
agucuugacauguaguaua

SEQ ID NO: 1402443 - RNA, 19 nt, Artificial Sequence
  Description of Artificial Sequence: Synthetic oligonucleotide
  Antisense strand to SEQ ID NO: 1402442
uauacuacaugucaagacu

SEQ ID NO: 1402444 - RNA, 19 nt, Artificial Sequence
  Description of Artificial Sequence: Synthetic oligonucleotide
  Sense strand starting at position 3792 of SEQ ID NO: 1243222
ugacauguaguauaguuau

SEQ ID NO: 1402445 - RNA, 19 nt, Artificial Sequence
  Description of Artificial Sequence: Synthetic oligonucleotide
  Antisense strand to SEQ ID NO: 1402444
auaacuauacuacauguca

SEQ ID NO: 1402446 - RNA, 19 nt, Artificial Sequence
  Description of Artificial Sequence: Synthetic oligonucleotide
  Sense strand starting at position 3795 of SEQ ID NO: 1243222
cauguaguauaguuauaag

SEQ ID NO: 1402447 - RNA, 19 nt, Artificial Sequence
  Description of Artificial Sequence: Synthetic oligonucleotide
  Antisense strand to SEQ ID NO: 1402446
cuuauaacuauacuacaug

SEQ ID NO: 1402448 - RNA, 19 nt, Artificial Sequence
  Description of Artificial Sequence: Synthetic oligonucleotide
  Sense strand starting at position 3925 of SEQ ID NO: 1243222
ugcuacuuugaacauugaa

SEQ ID NO: 1402449 - RNA, 19 nt, Artificial Sequence
  Description of Artificial Sequence: Synthetic oligonucleotide
  Antisense strand to SEQ ID NO: 1402448
uucaauguucaaaguagca

SEQ ID NO: 1402450 - RNA, 19 nt, Artificial Sequence
  Description of Artificial Sequence: Synthetic oligonucleotide
  Sense strand starting at position 3960 of SEQ ID NO: 1243222
aggcaucuccauuggacua

SEQ ID NO: 1402451 - RNA, 19 nt, Artificial Sequence
  Description of Artificial Sequence: Synthetic oligonucleotide
  Antisense strand to SEQ ID NO: 1402450
uaguccaauggagaugccu

SEQ ID NO: 1402452 - RNA, 19 nt, Artificial Sequence
  Description of Artificial Sequence: Synthetic oligonucleotide
  Sense strand starting at position 217 of SEQ ID NO: 1243223
ugaguuugaggccauguuu

SEQ ID NO: 1402453 - RNA, 19 nt, Artificial Sequence
  Description of Artificial Sequence: Synthetic oligonucleotide
  Antisense strand to SEQ ID NO: 1402452
aaacauggccucaaacuca

SEQ ID NO: 1402454 - RNA, 19 nt, Artificial Sequence
  Description of Artificial Sequence: Synthetic oligonucleotide
  Sense strand starting at position 398 of SEQ ID NO: 1243223
ucuggaaucccauagcacu

SEQ ID NO: 1402455 - RNA, 19 nt, Artificial Sequence
  Description of Artificial Sequence: Synthetic oligonucleotide
  Antisense strand to SEQ ID NO: 1402454
agugcuaugggauuccaga

SEQ ID NO: 1402456 - RNA, 19 nt, Artificial Sequence
  Description of Artificial Sequence: Synthetic oligonucleotide
  Sense strand starting at position 475 of SEQ ID NO: 1243223
agucacuucggguggagua

SEQ ID NO: 1402457 - RNA, 19 nt, Artificial Sequence
  Description of Artificial Sequence: Synthetic oligonucleotide
  Antisense strand to SEQ ID NO: 1402456
uacuccacccgaagugacu

SEQ ID NO: 1402458 - RNA, 19 nt, Artificial Sequence
  Description of Artificial Sequence: Synthetic oligonucleotide
  Sense strand starting at position 488 of SEQ ID NO: 1243223
ggaguaccuccagggcaua

SEQ ID NO: 1402459 - RNA, 19 nt, Artificial Sequence
  Description of Artificial Sequence: Synthetic oligonucleotide
  Antisense strand to SEQ ID NO: 1402458
uaugcccuggagguacucc

SEQ ID NO: 1402460 - RNA, 19 nt, Artificial Sequence
  Description of Artificial Sequence: Synthetic oligonucleotide
  Sense strand starting at position 526 of SEQ ID NO: 1243223
ccguguugagcuuuguguu

SEQ ID NO: 1402461 - RNA, 19 nt, Artificial Sequence
  Description of Artificial Sequence: Synthetic oligonucleotide
  Antisense strand to SEQ ID NO: 1402460
aacacaaagcucaacacgg

SEQ ID NO: 1402462 - RNA, 19 nt, Artificial Sequence
  Description of Artificial Sequence: Synthetic oligonucleotide
  Sense strand starting at position 536 of SEQ ID NO: 1243223
cuuuguguugaaggcauaa

SEQ ID NO: 1402463 - RNA, 19 nt, Artificial Sequence
  Description of Artificial Sequence: Synthetic oligonucleotide
  Antisense strand to SEQ ID NO: 1402462
uuaugccuucaacacaaag

SEQ ID NO: 1402464 - RNA, 19 nt, Artificial Sequence
  Description of Artificial Sequence: Synthetic oligonucleotide
  Sense strand starting at position 538 of SEQ ID NO: 1243223
uuguguugaaggcauaaau

SEQ ID NO: 1402465 - RNA, 19 nt, Artificial Sequence
  Description of Artificial Sequence: Synthetic oligonucleotide
  Antisense strand to SEQ ID NO: 1402464
auuuaugccuucaacacaa

SEQ ID NO: 1402466 - RNA, 19 nt, Artificial Sequence
  Description of Artificial Sequence: Synthetic oligonucleotide
  Sense strand starting at position 591 of SEQ ID NO: 1243223
guaagagucuagucacuag

SEQ ID NO: 1402467 - RNA, 19 nt, Artificial Sequence
  Description of Artificial Sequence: Synthetic oligonucleotide
  Antisense strand to SEQ ID NO: 1402466
cuagugacuagacucuuac

SEQ ID NO: 1402468 - RNA, 19 nt, Artificial Sequence
  Description of Artificial Sequence: Synthetic oligonucleotide
  Sense strand starting at position 595 of SEQ ID NO: 1243223
gagucuagucacuaggugu

SEQ ID NO: 1402469 - RNA, 19 nt, Artificial Sequence
  Description of Artificial Sequence: Synthetic oligonucleotide
  Antisense strand to SEQ ID NO: 1402468
acaccuagugacuagacuc

SEQ ID NO: 1402470 - RNA, 19 nt, Artificial Sequence
  Description of Artificial Sequence: Synthetic oligonucleotide
  Sense strand starting at position 606 of SEQ ID NO: 1243223
cuagguguucuccacugau

SEQ ID NO: 1402471 - RNA, 19 nt, Artificial Sequence
  Description of Artificial Sequence: Synthetic oligonucleotide
  Antisense strand to SEQ ID NO: 1402470
aucaguggagaacaccuag

SEQ ID NO: 1402472 - RNA, 19 nt, Artificial Sequence
  Description of Artificial Sequence: Synthetic oligonucleotide
  Sense strand starting at position 609 of SEQ ID NO: 1243223
gguguucuccacugaucac

SEQ ID NO: 1402473 - RNA, 19 nt, Artificial Sequence
  Description of Artificial Sequence: Synthetic oligonucleotide
  Antisense strand to SEQ ID NO: 1402472
gugaucaguggagaacacc

SEQ ID NO: 1402474 - RNA, 19 nt, Artificial Sequence
  Description of Artificial Sequence: Synthetic oligonucleotide
  Sense strand starting at position 2248 of SEQ ID NO: 1243223
cucggucuccuccaagcau

SEQ ID NO: 1402475 - RNA, 19 nt, Artificial Sequence
  Description of Artificial Sequence: Synthetic oligonucleotide
  Antisense strand to SEQ ID NO: 1402474
augcuuggaggagaccgag

SEQ ID NO: 1402476 - RNA, 19 nt, Artificial Sequence
  Description of Artificial Sequence: Synthetic oligonucleotide
  Sense strand starting at position 2630 of SEQ ID NO: 1243223
agcguuuacuaucugggau

SEQ ID NO: 1402477 - RNA, 19 nt, Artificial Sequence
  Description of Artificial Sequence: Synthetic oligonucleotide
  Antisense strand to SEQ ID NO: 1402476
aucccagauaguaaacgcu

SEQ ID NO: 1402478 - RNA, 19 nt, Artificial Sequence
  Description of Artificial Sequence: Synthetic oligonucleotide
  Sense strand starting at position 2634 of SEQ ID NO: 1243223
uuuacuaucugggauuuac

SEQ ID NO: 1402479 - RNA, 19 nt, Artificial Sequence
  Description of Artificial Sequence: Synthetic oligonucleotide
  Antisense strand to SEQ ID NO: 1402478
guaaaucccagauaguaaa

SEQ ID NO: 1402480 - RNA, 19 nt, Artificial Sequence
  Description of Artificial Sequence: Synthetic oligonucleotide
  Sense strand starting at position 2690 of SEQ ID NO: 1243223
guaucacacucuguucuaa

SEQ ID NO: 1402481 - RNA, 19 nt, Artificial Sequence
  Description of Artificial Sequence: Synthetic oligonucleotide
  Antisense strand to SEQ ID NO: 1402480
uuagaacagagugugauac

SEQ ID NO: 1402482 - RNA, 19 nt, Artificial Sequence
  Description of Artificial Sequence: Synthetic oligonucleotide
  Sense strand starting at position 2710 of SEQ ID NO: 1243223
cccaccagguuguuagauu

SEQ ID NO: 1402483 - RNA, 19 nt, Artificial Sequence
  Description of Artificial Sequence: Synthetic oligonucleotide
  Antisense strand to SEQ ID NO: 1402482
aaucuaacaaccugguggg

SEQ ID NO: 1402484 - RNA, 19 nt, Artificial Sequence
  Description of Artificial Sequence: Synthetic oligonucleotide
  Sense strand starting at position 2719 of SEQ ID NO: 1243223
uuguuagauucugccagga

SEQ ID NO: 1402485 - RNA, 19 nt, Artificial Sequence
  Description of Artificial Sequence: Synthetic oligonucleotide
  Antisense strand to SEQ ID NO: 1402484
uccuggcagaaucuaacaa

SEQ ID NO: 1402486 - RNA, 19 nt, Artificial Sequence
  Description of Artificial Sequence: Synthetic oligonucleotide
  Sense strand starting at position 2723 of SEQ ID NO: 1243223
uagauucugccaggaguga

SEQ ID NO: 1402487 - RNA, 19 nt, Artificial Sequence
  Description of Artificial Sequence: Synthetic oligonucleotide
  Antisense strand to SEQ ID NO: 1402486
ucacuccuggcagaaucua

SEQ ID NO: 1402488 - RNA, 19 nt, Artificial Sequence
  Description of Artificial Sequence: Synthetic oligonucleotide
  Sense strand starting at position 2734 of SEQ ID NO: 1243223
aggagugacucagugcaua

SEQ ID NO: 1402489 - RNA, 19 nt, Artificial Sequence
  Description of Artificial Sequence: Synthetic oligonucleotide
  Antisense strand to SEQ ID NO: 1402488
uaugcacugagucacuccu

SEQ ID NO: 1402490 - RNA, 19 nt, Artificial Sequence
  Description of Artificial Sequence: Synthetic oligonucleotide
  Sense strand starting at position 2790 of SEQ ID NO: 1243223
gucuaagaccuaggaacua

SEQ ID NO: 1402491 - RNA, 19 nt, Artificial Sequence
  Description of Artificial Sequence: Synthetic oligonucleotide
  Antisense strand to SEQ ID NO: 1402490
uaguuccuaggucuuagac

SEQ ID NO: 1402492 - RNA, 19 nt, Artificial Sequence
  Description of Artificial Sequence: Synthetic oligonucleotide
  Sense strand starting at position 2923 of SEQ ID NO: 1243223
gauuacaauuaugagggaa

SEQ ID NO: 1402493 - RNA, 19 nt, Artificial Sequence
  Description of Artificial Sequence: Synthetic oligonucleotide
  Antisense strand to SEQ ID NO: 1402492
uucccucauaauuguaauc

SEQ ID NO: 1402494 - RNA, 19 nt, Artificial Sequence
  Description of Artificial Sequence: Synthetic oligonucleotide
  Sense strand starting at position 2969 of SEQ ID NO: 1243223
agaguacuaugacucuaua

SEQ ID NO: 1402495 - RNA, 19 nt, Artificial Sequence
  Description of Artificial Sequence: Synthetic oligonucleotide
  Antisense strand to SEQ ID NO: 1402494
uauagagucauaguacucu

SEQ ID NO: 1402496 - RNA, 19 nt, Artificial Sequence
  Description of Artificial Sequence: Synthetic oligonucleotide
  Sense strand starting at position 3031 of SEQ ID NO: 1243223
uuagauuuguuguuuggua

SEQ ID NO: 1402497 - RNA, 19 nt, Artificial Sequence
  Description of Artificial Sequence: Synthetic oligonucleotide
  Antisense strand to SEQ ID NO: 1402496
uaccaaacaacaaaucuaa

SEQ ID NO: 1402498 - RNA, 19 nt, Artificial Sequence
  Description of Artificial Sequence: Synthetic oligonucleotide
  Sense strand starting at position 3033 of SEQ ID NO: 1243223
agauuuguuguuugguaau

SEQ ID NO: 1402499 - RNA, 19 nt, Artificial Sequence
  Description of Artificial Sequence: Synthetic oligonucleotide
  Antisense strand to SEQ ID NO: 1402498
auuaccaaacaacaaaucu

SEQ ID NO: 1402500 - RNA, 19 nt, Artificial Sequence
  Description of Artificial Sequence: Synthetic oligonucleotide
  Sense strand starting at position 3044 of SEQ ID NO: 1243223
uugguaauauaacaggaua

SEQ ID NO: 1402501 - RNA, 19 nt, Artificial Sequence
  Description of Artificial Sequence: Synthetic oligonucleotide
  Antisense strand to SEQ ID NO: 1402500
uauccuguuauauuaccaa

SEQ ID NO: 1402502 - RNA, 19 nt, Artificial Sequence
  Description of Artificial Sequence: Synthetic oligonucleotide
  Sense strand starting at position 3067 of SEQ ID NO: 1243223
uucugaagcugaguaauca

SEQ ID NO: 1402503 - RNA, 19 nt, Artificial Sequence
  Description of Artificial Sequence: Synthetic oligonucleotide
  Antisense strand to SEQ ID NO: 1402502
ugauuacucagcuucagaa

SEQ ID NO: 1402504 - RNA, 19 nt, Artificial Sequence
  Description of Artificial Sequence: Synthetic oligonucleotide
  Sense strand starting at position 3068 of SEQ ID NO: 1243223
ucugaagcugaguaaucaa

SEQ ID NO: 1402505 - RNA, 19 nt, Artificial Sequence
  Description of Artificial Sequence: Synthetic oligonucleotide
  Antisense strand to SEQ ID NO: 1402504
uugauuacucagcuucaga

SEQ ID NO: 1402506 - RNA, 19 nt, Artificial Sequence
  Description of Artificial Sequence: Synthetic oligonucleotide
  Sense strand starting at position 3111 of SEQ ID NO: 1243223
gguucuuaacugugggaau

SEQ ID NO: 1402507 - RNA, 19 nt, Artificial Sequence
  Description of Artificial Sequence: Synthetic oligonucleotide
  Antisense strand to SEQ ID NO: 1402506
auucccacaguuaagaacc

SEQ ID NO: 1402508 - RNA, 19 nt, Artificial Sequence
  Description of Artificial Sequence: Synthetic oligonucleotide
  Sense strand starting at position 3113 of SEQ ID NO: 1243223
uucuuaacugugggaaucu

SEQ ID NO: 1402509 - RNA, 19 nt, Artificial Sequence
  Description of Artificial Sequence: Synthetic oligonucleotide
  Antisense strand to SEQ ID NO: 1402508
agauucccacaguuaagaa

SEQ ID NO: 1402510 - RNA, 19 nt, Artificial Sequence
  Description of Artificial Sequence: Synthetic oligonucleotide
  Sense strand starting at position 3170 of SEQ ID NO: 1243223
cccuaugauugacuggaau

SEQ ID NO: 1402511 - RNA, 19 nt, Artificial Sequence
  Description of Artificial Sequence: Synthetic oligonucleotide
  Antisense strand to SEQ ID NO: 1402510
auuccagucaaucauaggg

SEQ ID NO: 1402512 - RNA, 19 nt, Artificial Sequence
  Description of Artificial Sequence: Synthetic oligonucleotide
  Sense strand starting at position 3396 of SEQ ID NO: 1243223
aggugagucuggagugauu

SEQ ID NO: 1402513 - RNA, 19 nt, Artificial Sequence
  Description of Artificial Sequence: Synthetic oligonucleotide
  Antisense strand to SEQ ID NO: 1402512
aaucacuccagacucaccu

SEQ ID NO: 1402514 - RNA, 19 nt, Artificial Sequence
  Description of Artificial Sequence: Synthetic oligonucleotide
  Sense strand starting at position 3403 of SEQ ID NO: 1243223
ucuggagugauuugugcca

SEQ ID NO: 1402515 - RNA, 19 nt, Artificial Sequence
  Description of Artificial Sequence: Synthetic oligonucleotide
  Antisense strand to SEQ ID NO: 1402514
uggcacaaaucacuccaga

SEQ ID NO: 1402516 - RNA, 19 nt, Artificial Sequence
  Description of Artificial Sequence: Synthetic oligonucleotide
  Sense strand starting at position 3415 of SEQ ID NO: 1243223
ugugccagacauuacuaau

SEQ ID NO: 1402517 - RNA, 19 nt, Artificial Sequence
  Description of Artificial Sequence: Synthetic oligonucleotide
  Antisense strand to SEQ ID NO: 1402516
auuaguaaugucuggcaca

SEQ ID NO: 1402518 - RNA, 19 nt, Artificial Sequence
  Description of Artificial Sequence: Synthetic oligonucleotide
  Sense strand starting at position 3440 of SEQ ID NO: 1243223
ggcuuaucacaaggacaca

SEQ ID NO: 1402519 - RNA, 19 nt, Artificial Sequence
  Description of Artificial Sequence: Synthetic oligonucleotide
  Antisense strand to SEQ ID NO: 1402518
uguguccuugugauaagcc

SEQ ID NO: 1402520 - RNA, 19 nt, Artificial Sequence
  Description of Artificial Sequence: Synthetic oligonucleotide
  Sense strand starting at position 3473 of SEQ ID NO: 1243223
aggguuuccauaggucaau

SEQ ID NO: 1402521 - RNA, 19 nt, Artificial Sequence
  Description of Artificial Sequence: Synthetic oligonucleotide
  Antisense strand to SEQ ID NO: 1402520
auugaccuauggaaacccu

SEQ ID NO: 1402522 - RNA, 19 nt, Artificial Sequence
  Description of Artificial Sequence: Synthetic oligonucleotide
  Sense strand starting at position 3474 of SEQ ID NO: 1243223
ggguuuccauaggucaaua

SEQ ID NO: 1402523 - RNA, 19 nt, Artificial Sequence
  Description of Artificial Sequence: Synthetic oligonucleotide
  Antisense strand to SEQ ID NO: 1402522
uauugaccuauggaaaccc

SEQ ID NO: 1402524 - RNA, 19 nt, Artificial Sequence
  Description of Artificial Sequence: Synthetic oligonucleotide
  Sense strand starting at position 3567 of SEQ ID NO: 1243223
gugagugacugacuacaca

SEQ ID NO: 1402525 - RNA, 19 nt, Artificial Sequence
  Description of Artificial Sequence: Synthetic oligonucleotide
  Antisense strand to SEQ ID NO: 1402524
uguguagucagucacucac

SEQ ID NO: 1402526 - RNA, 19 nt, Artificial Sequence
  Description of Artificial Sequence: Synthetic oligonucleotide
  Sense strand starting at position 3621 of SEQ ID NO: 1243223
cgguuaacucacgcgugua

SEQ ID NO: 1402527 - RNA, 19 nt, Artificial Sequence
  Description of Artificial Sequence: Synthetic oligonucleotide
  Antisense strand to SEQ ID NO: 1402526
uacacgcgugaguuaaccg

SEQ ID NO: 1402528 - RNA, 19 nt, Artificial Sequence
  Description of Artificial Sequence: Synthetic oligonucleotide
  Sense strand starting at position 3623 of SEQ ID NO: 1243223
guuaacucacgcguguaau

SEQ ID NO: 1402529 - RNA, 19 nt, Artificial Sequence
  Description of Artificial Sequence: Synthetic oligonucleotide
  Antisense strand to SEQ ID NO: 1402528
auuacacgcgugaguuaac

SEQ ID NO: 1402530 - RNA, 19 nt, Artificial Sequence
  Description of Artificial Sequence: Synthetic oligonucleotide
  Sense strand starting at position 3913 of SEQ ID NO: 1243223
acuuaagaucuaugcguug

SEQ ID NO: 1402531 - RNA, 19 nt, Artificial Sequence
  Description of Artificial Sequence: Synthetic oligonucleotide
  Antisense strand to SEQ ID NO: 1402530
caacgcauagaucuuaagu

SEQ ID NO: 1402532 - RNA, 19 nt, Artificial Sequence
  Description of Artificial Sequence: Synthetic oligonucleotide
  Sense strand starting at position 440 of SEQ ID NO: 1243224
auaucugaccuauggugua

SEQ ID NO: 1402533 - RNA, 19 nt, Artificial Sequence
  Description of Artificial Sequence: Synthetic oligonucleotide
  Antisense strand to SEQ ID NO: 1402532
uacaccauaggucagauau

SEQ ID NO: 1402534 - RNA, 19 nt, Artificial Sequence
  Description of Artificial Sequence: Synthetic oligonucleotide
  Sense strand starting at position 445 of SEQ ID NO: 1243224
ugaccuaugguguauucca

SEQ ID NO: 1402535 - RNA, 19 nt, Artificial Sequence
  Description of Artificial Sequence: Synthetic oligonucleotide
  Antisense strand to SEQ ID NO: 1402534
uggaauacaccauagguca

SEQ ID NO: 1402536 - RNA, 19 nt, Artificial Sequence
  Description of Artificial Sequence: Synthetic oligonucleotide
  Sense strand starting at position 523 of SEQ ID NO: 1243224
ucagccuuccaaggacaaa

SEQ ID NO: 1402537 - RNA, 19 nt, Artificial Sequence
  Description of Artificial Sequence: Synthetic oligonucleotide
  Antisense strand to SEQ ID NO: 1402536
uuuguccuuggaaggcuga

SEQ ID NO: 1402538 - RNA, 19 nt, Artificial Sequence
  Description of Artificial Sequence: Synthetic oligonucleotide
  Sense strand starting at position 572 of SEQ ID NO: 1243224
ucaguuccggcagaauuaa

SEQ ID NO: 1402539 - RNA, 19 nt, Artificial Sequence
  Description of Artificial Sequence: Synthetic oligonucleotide
  Antisense strand to SEQ ID NO: 1402538
uuaauucugccggaacuga

SEQ ID NO: 1402540 - RNA, 19 nt, Artificial Sequence
  Description of Artificial Sequence: Synthetic oligonucleotide
  Sense strand starting at position 640 of SEQ ID NO: 1243224
guagaauuagagugguaaa

SEQ ID NO: 1402541 - RNA, 19 nt, Artificial Sequence
  Description of Artificial Sequence: Synthetic oligonucleotide
  Antisense strand to SEQ ID NO: 1402540
uuuaccacucuaauucuac

SEQ ID NO: 1402542 - RNA, 19 nt, Artificial Sequence
  Description of Artificial Sequence: Synthetic oligonucleotide
  Sense strand starting at position 818 of SEQ ID NO: 1243224
gguuguaguggcaguggua

SEQ ID NO: 1402543 - RNA, 19 nt, Artificial Sequence
  Description of Artificial Sequence: Synthetic oligonucleotide
  Antisense strand to SEQ ID NO: 1402542
uaccacugccacuacaacc

SEQ ID NO: 1402544 - RNA, 19 nt, Artificial Sequence
  Description of Artificial Sequence: Synthetic oligonucleotide
  Sense strand starting at position 835 of SEQ ID NO: 1243224
uagugucugcuccauaaag

SEQ ID NO: 1402545 - RNA, 19 nt, Artificial Sequence
  Description of Artificial Sequence: Synthetic oligonucleotide
  Antisense strand to SEQ ID NO: 1402544
cuuuauggagcagacacua

SEQ ID NO: 1402546 - RNA, 19 nt, Artificial Sequence
  Description of Artificial Sequence: Synthetic oligonucleotide
  Sense strand starting at position 891 of SEQ ID NO: 1243224
ucucuuucucgagaaccaa

SEQ ID NO: 1402547 - RNA, 19 nt, Artificial Sequence
  Description of Artificial Sequence: Synthetic oligonucleotide
  Antisense strand to SEQ ID NO: 1402546
uugguucucgagaaagaga

SEQ ID NO: 1402548 - RNA, 19 nt, Artificial Sequence
  Description of Artificial Sequence: Synthetic oligonucleotide
  Sense strand starting at position 978 of SEQ ID NO: 1243224
gaaagaaaucguuagcuag

SEQ ID NO: 1402549 - RNA, 19 nt, Artificial Sequence
  Description of Artificial Sequence: Synthetic oligonucleotide
  Antisense strand to SEQ ID NO: 1402548
cuagcuaacgauuucuuuc

SEQ ID NO: 1402550 - RNA, 19 nt, Artificial Sequence
  Description of Artificial Sequence: Synthetic oligonucleotide
  Sense strand starting at position 981 of SEQ ID NO: 1243224
agaaaucguuagcuagaac

SEQ ID NO: 1402551 - RNA, 19 nt, Artificial Sequence
  Description of Artificial Sequence: Synthetic oligonucleotide
  Antisense strand to SEQ ID NO: 1402550
guucuagcuaacgauuucu

SEQ ID NO: 1402552 - RNA, 19 nt, Artificial Sequence
  Description of Artificial Sequence: Synthetic oligonucleotide
  Sense strand starting at position 984 of SEQ ID NO: 1243224
aaucguuagcuagaacauc

SEQ ID NO: 1402553 - RNA, 19 nt, Artificial Sequence
  Description of Artificial Sequence: Synthetic oligonucleotide
  Antisense strand to SEQ ID NO: 1402552
gauguucuagcuaacgauu

SEQ ID NO: 1402554 - RNA, 19 nt, Artificial Sequence
  Description of Artificial Sequence: Synthetic oligonucleotide
  Sense strand starting at position 1002 of SEQ ID NO: 1243224
cugacugaauuagacauuu

SEQ ID NO: 1402555 - RNA, 19 nt, Artificial Sequence
  Description of Artificial Sequence: Synthetic oligonucleotide
  Antisense strand to SEQ ID NO: 1402554
aaaugucuaauucagucag

SEQ ID NO: 1402556 - RNA, 19 nt, Artificial Sequence
  Description of Artificial Sequence: Synthetic oligonucleotide
  Sense strand starting at position 1209 of SEQ ID NO: 1243224
acgugucaagaauaacgaa

SEQ ID NO: 1402557 - RNA, 19 nt, Artificial Sequence
  Description of Artificial Sequence: Synthetic oligonucleotide
  Antisense strand to SEQ ID NO: 1402556
uucguuauucuugacacgu

SEQ ID NO: 1402558 - RNA, 19 nt, Artificial Sequence
  Description of Artificial Sequence: Synthetic oligonucleotide
  Sense strand starting at position 1310 of SEQ ID NO: 1243224
aagacuagccuagguaaga

SEQ ID NO: 1402559 - RNA, 19 nt, Artificial Sequence
  Description of Artificial Sequence: Synthetic oligonucleotide
  Antisense strand to SEQ ID NO: 1402558
ucuuaccuaggcuagucuu

SEQ ID NO: 1402560 - RNA, 19 nt, Artificial Sequence
  Description of Artificial Sequence: Synthetic oligonucleotide
  Sense strand starting at position 1495 of SEQ ID NO: 1243224
acccuaucugggugacaga

SEQ ID NO: 1402561 - RNA, 19 nt, Artificial Sequence
  Description of Artificial Sequence: Synthetic oligonucleotide
  Antisense strand to SEQ ID NO: 1402560
ucugucacccagauagggu

SEQ ID NO: 1402562 - RNA, 19 nt, Artificial Sequence
  Description of Artificial Sequence: Synthetic oligonucleotide
  Sense strand starting at position 1734 of SEQ ID NO: 1243224
gaggcagaggugugaagau

SEQ ID NO: 1402563 - RNA, 19 nt, Artificial Sequence
  Description of Artificial Sequence: Synthetic oligonucleotide
  Antisense strand to SEQ ID NO: 1402562
aucuucacaccucugccuc

SEQ ID NO: 1402564 - RNA, 19 nt, Artificial Sequence
  Description of Artificial Sequence: Synthetic oligonucleotide
  Sense strand starting at position 1848 of SEQ ID NO: 1243224
gaaacuuuaggcugggcaa

SEQ ID NO: 1402565 - RNA, 19 nt, Artificial Sequence
  Description of Artificial Sequence: Synthetic oligonucleotide
  Antisense strand to SEQ ID NO: 1402564
uugcccagccuaaaguuuc

SEQ ID NO: 1402566 - RNA, 19 nt, Artificial Sequence
  Description of Artificial Sequence: Synthetic oligonucleotide
  Sense strand starting at position 2265 of SEQ ID NO: 1243224
ucaauauugcuuuagagau

SEQ ID NO: 1402567 - RNA, 19 nt, Artificial Sequence
  Description of Artificial Sequence: Synthetic oligonucleotide
  Antisense strand to SEQ ID NO: 1402566
aucucuaaagcaauauuga

SEQ ID NO: 1402568 - RNA, 19 nt, Artificial Sequence
  Description of Artificial Sequence: Synthetic oligonucleotide
  Sense strand starting at position 2279 of SEQ ID NO: 1243224
gagauacaacuguguuaau

SEQ ID NO: 1402569 - RNA, 19 nt, Artificial Sequence
  Description of Artificial Sequence: Synthetic oligonucleotide
  Antisense strand to SEQ ID NO: 1402568
auuaacacaguuguaucuc

SEQ ID NO: 1402570 - RNA, 19 nt, Artificial Sequence
  Description of Artificial Sequence: Synthetic oligonucleotide
  Sense strand starting at position 2280 of SEQ ID NO: 1243224
agauacaacuguguuaaua

SEQ ID NO: 1402571 - RNA, 19 nt, Artificial Sequence
  Description of Artificial Sequence: Synthetic oligonucleotide
  Antisense strand to SEQ ID NO: 1402570
uauuaacacaguuguaucu

SEQ ID NO: 1402572 - RNA, 19 nt, Artificial Sequence
  Description of Artificial Sequence: Synthetic oligonucleotide
  Sense strand starting at position 2429 of SEQ ID NO: 1243224
guacaugucuccuuaugaa

SEQ ID NO: 1402573 - RNA, 19 nt, Artificial Sequence
  Description of Artificial Sequence: Synthetic oligonucleotide
  Antisense strand to SEQ ID NO: 1402572
uucauaaggagacauguac

SEQ ID NO: 1402574 - RNA, 19 nt, Artificial Sequence
  Description of Artificial Sequence: Synthetic oligonucleotide
  Sense strand starting at position 2568 of SEQ ID NO: 1243224
ugucgcauuugauaauuua

SEQ ID NO: 1402575 - RNA, 19 nt, Artificial Sequence
  Description of Artificial Sequence: Synthetic oligonucleotide
  Antisense strand to SEQ ID NO: 1402574
uaaauuaucaaaugcgaca

SEQ ID NO: 1402576 - RNA, 19 nt, Artificial Sequence
  Description of Artificial Sequence: Synthetic oligonucleotide
  Sense strand starting at position 2655 of SEQ ID NO: 1243224
guuucuaaagaucagcauu

SEQ ID NO: 1402577 - RNA, 19 nt, Artificial Sequence
  Description of Artificial Sequence: Synthetic oligonucleotide
  Antisense strand to SEQ ID NO: 1402576
aaugcugaucuuuagaaac

SEQ ID NO: 1402578 - RNA, 19 nt, Artificial Sequence
  Description of Artificial Sequence: Synthetic oligonucleotide
  Sense strand starting at position 2666 of SEQ ID NO: 1243224
ucagcauuugccugcucua

SEQ ID NO: 1402579 - RNA, 19 nt, Artificial Sequence
  Description of Artificial Sequence: Synthetic oligonucleotide
  Antisense strand to SEQ ID NO: 1402578
uagagcaggcaaaugcuga

SEQ ID NO: 1402580 - RNA, 19 nt, Artificial Sequence
  Description of Artificial Sequence: Synthetic oligonucleotide
  Sense strand starting at position 2694 of SEQ ID NO: 1243224
ugggcuauuucuguucuuu

SEQ ID NO: 1402581 - RNA, 19 nt, Artificial Sequence
  Description of Artificial Sequence: Synthetic oligonucleotide
  Antisense strand to SEQ ID NO: 1402580
aaagaacagaaauagccca

SEQ ID NO: 1402582 - RNA, 19 nt, Artificial Sequence
  Description of Artificial Sequence: Synthetic oligonucleotide
  Sense strand starting at position 2734 of SEQ ID NO: 1243224
cugacauuuccgcagccau

SEQ ID NO: 1402583 - RNA, 19 nt, Artificial Sequence
  Description of Artificial Sequence: Synthetic oligonucleotide
  Antisense strand to SEQ ID NO: 1402582
auggcugcggaaaugucag

SEQ ID NO: 1402584 - RNA, 19 nt, Artificial Sequence
  Description of Artificial Sequence: Synthetic oligonucleotide
  Sense strand starting at position 3066 of SEQ ID NO: 1243224
auacuacaucgaugacaau

SEQ ID NO: 1402585 - RNA, 19 nt, Artificial Sequence
  Description of Artificial Sequence: Synthetic oligonucleotide
  Antisense strand to SEQ ID NO: 1402584
auugucaucgauguaguau

SEQ ID NO: 1402586 - RNA, 19 nt, Artificial Sequence
  Description of Artificial Sequence: Synthetic oligonucleotide
  Sense strand starting at position 3072 of SEQ ID NO: 1243224
caucgaugacaauggguuu

SEQ ID NO: 1402587 - RNA, 19 nt, Artificial Sequence
  Description of Artificial Sequence: Synthetic oligonucleotide
  Antisense strand to SEQ ID NO: 1402586
aaacccauugucaucgaug

SEQ ID NO: 1402588 - RNA, 19 nt, Artificial Sequence
  Description of Artificial Sequence: Synthetic oligonucleotide
  Sense strand starting at position 3151 of SEQ ID NO: 1243224
cacagaaguguuuguagaa

SEQ ID NO: 1402589 - RNA, 19 nt, Artificial Sequence
  Description of Artificial Sequence: Synthetic oligonucleotide
  Antisense strand to SEQ ID NO: 1402588
uucuacaaacacuucugug

SEQ ID NO: 1402590 - RNA, 19 nt, Artificial Sequence
  Description of Artificial Sequence: Synthetic oligonucleotide
  Sense strand starting at position 3152 of SEQ ID NO: 1243224
acagaaguguuuguagaac

SEQ ID NO: 1402591 - RNA, 19 nt, Artificial Sequence
  Description of Artificial Sequence: Synthetic oligonucleotide
  Antisense strand to SEQ ID NO: 1402590
guucuacaaacacuucugu

SEQ ID NO: 1402592 - RNA, 19 nt, Artificial Sequence
  Description of Artificial Sequence: Synthetic oligonucleotide
  Sense strand starting at position 3160 of SEQ ID NO: 1243224
guuuguagaacucagcuga

SEQ ID NO: 1402593 - RNA, 19 nt, Artificial Sequence
  Description of Artificial Sequence: Synthetic oligonucleotide
  Antisense strand to SEQ ID NO: 1402592
ucagcugaguucuacaaac

SEQ ID NO: 1402594 - RNA, 19 nt, Artificial Sequence
  Description of Artificial Sequence: Synthetic oligonucleotide
  Sense strand starting at position 3330 of SEQ ID NO: 1243224
aguaguauuccucauugga

SEQ ID NO: 1402595 - RNA, 19 nt, Artificial Sequence
  Description of Artificial Sequence: Synthetic oligonucleotide
  Antisense strand to SEQ ID NO: 1402594
uccaaugaggaauacuacu

SEQ ID NO: 1402596 - RNA, 19 nt, Artificial Sequence
  Description of Artificial Sequence: Synthetic oligonucleotide
  Sense strand starting at position 3398 of SEQ ID NO: 1243224
gauuaaauauuugagggua

SEQ ID NO: 1402597 - RNA, 19 nt, Artificial Sequence
  Description of Artificial Sequence: Synthetic oligonucleotide
  Antisense strand to SEQ ID NO: 1402596
uacccucaaauauuuaauc

SEQ ID NO: 1402598 - RNA, 19 nt, Artificial Sequence
  Description of Artificial Sequence: Synthetic oligonucleotide
  Sense strand starting at position 3493 of SEQ ID NO: 1243224
gaguaagaauggcuuuauu

SEQ ID NO: 1402599 - RNA, 19 nt, Artificial Sequence
  Description of Artificial Sequence: Synthetic oligonucleotide
  Antisense strand to SEQ ID NO: 1402598
aauaaagccauucuuacuc

SEQ ID NO: 1402600 - RNA, 19 nt, Artificial Sequence
  Description of Artificial Sequence: Synthetic oligonucleotide
  Sense strand starting at position 3496 of SEQ ID NO: 1243224
uaagaauggcuuuauuguu

SEQ ID NO: 1402601 - RNA, 19 nt, Artificial Sequence
  Description of Artificial Sequence: Synthetic oligonucleotide
  Antisense strand to SEQ ID NO: 1402600
aacaauaaagccauucuua

SEQ ID NO: 1402602 - RNA, 19 nt, Artificial Sequence
  Description of Artificial Sequence: Synthetic oligonucleotide
  Sense strand starting at position 3616 of SEQ ID NO: 1243224
aggauaaaucccugcuaca

SEQ ID NO: 1402603 - RNA, 19 nt, Artificial Sequence
  Description of Artificial Sequence: Synthetic oligonucleotide
  Antisense strand to SEQ ID NO: 1402602
uguagcagggauuuauccu

SEQ ID NO: 1402604 - RNA, 19 nt, Artificial Sequence
  Description of Artificial Sequence: Synthetic oligonucleotide
  Sense strand starting at position 3705 of SEQ ID NO: 1243224
gggcuuacugcauaaacau

SEQ ID NO: 1402605 - RNA, 19 nt, Artificial Sequence
  Description of Artificial Sequence: Synthetic oligonucleotide
  Antisense strand to SEQ ID NO: 1402604
auguuuaugcaguaagccc

SEQ ID NO: 1402606 - RNA, 19 nt, Artificial Sequence
  Description of Artificial Sequence: Synthetic oligonucleotide
  Sense strand starting at position 3726 of SEQ ID NO: 1243224
ggaccaucguauuuguacu

SEQ ID NO: 1402607 - RNA, 19 nt, Artificial Sequence
  Description of Artificial Sequence: Synthetic oligonucleotide
  Antisense strand to SEQ ID NO: 1402606
aguacaaauacgauggucc

SEQ ID NO: 1402608 - RNA, 19 nt, Artificial Sequence
  Description of Artificial Sequence: Synthetic oligonucleotide
  Sense strand starting at position 3914 of SEQ ID NO: 1243224
auucucuacucaguggaga

SEQ ID NO: 1402609 - RNA, 19 nt, Artificial Sequence
  Description of Artificial Sequence: Synthetic oligonucleotide
  Antisense strand to SEQ ID NO: 1402608
ucuccacugaguagagaau

SEQ ID NO: 1402610 - RNA, 19 nt, Artificial Sequence
  Description of Artificial Sequence: Synthetic oligonucleotide
  Sense strand starting at position 3915 of SEQ ID NO: 1243224
uucucuacucaguggagaa

SEQ ID NO: 1402611 - RNA, 19 nt, Artificial Sequence
  Description of Artificial Sequence: Synthetic oligonucleotide
  Antisense strand to SEQ ID NO: 1402610
uucuccacugaguagagaa

SEQ ID NO: 1402612 - RNA, 19 nt, Artificial Sequence
  Description of Artificial Sequence: Synthetic oligonucleotide
  Sense strand starting at position 24 of SEQ ID NO: 1243225
uccugaauuccucauguag

SEQ ID NO: 1402613 - RNA, 19 nt, Artificial Sequence
  Description of Artificial Sequence: Synthetic oligonucleotide
  Antisense strand to SEQ ID NO: 1402612
cuacaugaggaauucagga

SEQ ID NO: 1402614 - RNA, 19 nt, Artificial Sequence
  Description of Artificial Sequence: Synthetic oligonucleotide
  Sense strand starting at position 326 of SEQ ID NO: 1243225
gcuagcugccuguugcaua

SEQ ID NO: 1402615 - RNA, 19 nt, Artificial Sequence
  Description of Artificial Sequence: Synthetic oligonucleotide
  Antisense strand to SEQ ID NO: 1402614
uaugcaacaggcagcuagc

SEQ ID NO: 1402616 - RNA, 19 nt, Artificial Sequence
  Description of Artificial Sequence: Synthetic oligonucleotide
  Sense strand starting at position 616 of SEQ ID NO: 1243225
gggugaugucuucaggugu

SEQ ID NO: 1402617 - RNA, 19 nt, Artificial Sequence
  Description of Artificial Sequence: Synthetic oligonucleotide
  Antisense strand to SEQ ID NO: 1402616
acaccugaagacaucaccc

SEQ ID NO: 1402618 - RNA, 19 nt, Artificial Sequence
  Description of Artificial Sequence: Synthetic oligonucleotide
  Sense strand starting at position 1612 of SEQ ID NO: 1243225
uguugagaauacucaccuu

SEQ ID NO: 1402619 - RNA, 19 nt, Artificial Sequence
  Description of Artificial Sequence: Synthetic oligonucleotide
  Antisense strand to SEQ ID NO: 1402618
aaggugaguauucucaaca

SEQ ID NO: 1402620 - RNA, 19 nt, Artificial Sequence
  Description of Artificial Sequence: Synthetic oligonucleotide
  Sense strand starting at position 1647 of SEQ ID NO: 1243225
uuccuuaucagagaugcgu

SEQ ID NO: 1402621 - RNA, 19 nt, Artificial Sequence
  Description of Artificial Sequence: Synthetic oligonucleotide
  Antisense strand to SEQ ID NO: 1402620
acgcaucucugauaaggaa

SEQ ID NO: 1402622 - RNA, 19 nt, Artificial Sequence
  Description of Artificial Sequence: Synthetic oligonucleotide
  Sense strand starting at position 1660 of SEQ ID NO: 1243225
augcgugcgaccuucuuaa

SEQ ID NO: 1402623 - RNA, 19 nt, Artificial Sequence
  Description of Artificial Sequence: Synthetic oligonucleotide
  Antisense strand to SEQ ID NO: 1402622
uuaagaaggucgcacgcau

SEQ ID NO: 1402624 - RNA, 19 nt, Artificial Sequence
  Description of Artificial Sequence: Synthetic oligonucleotide
  Sense strand starting at position 1667 of SEQ ID NO: 1243225
cgaccuucuuaagcaaauu

SEQ ID NO: 1402625 - RNA, 19 nt, Artificial Sequence
  Description of Artificial Sequence: Synthetic oligonucleotide
  Antisense strand to SEQ ID NO: 1402624
aauuugcuuaagaaggucg

SEQ ID NO: 1402626 - RNA, 19 nt, Artificial Sequence
  Description of Artificial Sequence: Synthetic oligonucleotide
  Sense strand starting at position 1802 of SEQ ID NO: 1243225
ugugacccgguuuaugauu

SEQ ID NO: 1402627 - RNA, 19 nt, Artificial Sequence
  Description of Artificial Sequence: Synthetic oligonucleotide
  Antisense strand to SEQ ID NO: 1402626
aaucauaaaccgggucaca

SEQ ID NO: 1402628 - RNA, 19 nt, Artificial Sequence
  Description of Artificial Sequence: Synthetic oligonucleotide
  Sense strand starting at position 1815 of SEQ ID NO: 1243225
augauuuauuugcaaggcu

SEQ ID NO: 1402629 - RNA, 19 nt, Artificial Sequence
  Description of Artificial Sequence: Synthetic oligonucleotide
  Antisense strand to SEQ ID NO: 1402628
agccuugcaaauaaaucau

SEQ ID NO: 1402630 - RNA, 19 nt, Artificial Sequence
  Description of Artificial Sequence: Synthetic oligonucleotide
  Sense strand starting at position 1893 of SEQ ID NO: 1243225
uucguucucgcagugauag

SEQ ID NO: 1402631 - RNA, 19 nt, Artificial Sequence
  Description of Artificial Sequence: Synthetic oligonucleotide
  Antisense strand to SEQ ID NO: 1402630
cuaucacugcgagaacgaa

SEQ ID NO: 1402632 - RNA, 19 nt, Artificial Sequence
  Description of Artificial Sequence: Synthetic oligonucleotide
  Sense strand starting at position 2024 of SEQ ID NO: 1243225
guucuuaagcugugagaaa

SEQ ID NO: 1402633 - RNA, 19 nt, Artificial Sequence
  Description of Artificial Sequence: Synthetic oligonucleotide
  Antisense strand to SEQ ID NO: 1402632
uuucucacagcuuaagaac

SEQ ID NO: 1402634 - RNA, 19 nt, Artificial Sequence
  Description of Artificial Sequence: Synthetic oligonucleotide
  Sense strand starting at position 2154 of SEQ ID NO: 1243225
uccaaucgguuucucgaaa

SEQ ID NO: 1402635 - RNA, 19 nt, Artificial Sequence
  Description of Artificial Sequence: Synthetic oligonucleotide
  Antisense strand to SEQ ID NO: 1402634
uuucgagaaaccgauugga

SEQ ID NO: 1402636 - RNA, 19 nt, Artificial Sequence
  Description of Artificial Sequence: Synthetic oligonucleotide
  Sense strand starting at position 2178 of SEQ ID NO: 1243225
ucugucgauuccuccuaaa

SEQ ID NO: 1402637 - RNA, 19 nt, Artificial Sequence
  Description of Artificial Sequence: Synthetic oligonucleotide
  Antisense strand to SEQ ID NO: 1402636
uuuaggaggaaucgacaga

SEQ ID NO: 1402638 - RNA, 19 nt, Artificial Sequence
  Description of Artificial Sequence: Synthetic oligonucleotide
  Sense strand starting at position 2243 of SEQ ID NO: 1243225
ucauacauaggguguugaa

SEQ ID NO: 1402639 - RNA, 19 nt, Artificial Sequence
  Description of Artificial Sequence: Synthetic oligonucleotide
  Antisense strand to SEQ ID NO: 1402638
uucaacacccuauguauga

SEQ ID NO: 1402640 - RNA, 19 nt, Artificial Sequence
  Description of Artificial Sequence: Synthetic oligonucleotide
  Sense strand starting at position 2619 of SEQ ID NO: 1243225
gacuaacuguaugucuaga

SEQ ID NO: 1402641 - RNA, 19 nt, Artificial Sequence
  Description of Artificial Sequence: Synthetic oligonucleotide
  Antisense strand to SEQ ID NO: 1402640
ucuagacauacaguuaguc

SEQ ID NO: 1402642 - RNA, 19 nt, Artificial Sequence
  Description of Artificial Sequence: Synthetic oligonucleotide
  Sense strand starting at position 2621 of SEQ ID NO: 1243225
cuaacuguaugucuagaau

SEQ ID NO: 1402643 - RNA, 19 nt, Artificial Sequence
  Description of Artificial Sequence: Synthetic oligonucleotide
  Antisense strand to SEQ ID NO: 1402642
auucuagacauacaguuag

SEQ ID NO: 1402644 - RNA, 19 nt, Artificial Sequence
  Description of Artificial Sequence: Synthetic oligonucleotide
  Sense strand starting at position 2624 of SEQ ID NO: 1243225
acuguaugucuagaauaau

SEQ ID NO: 1402645 - RNA, 19 nt, Artificial Sequence
  Description of Artificial Sequence: Synthetic oligonucleotide
  Antisense strand to SEQ ID NO: 1402644
auuauucuagacauacagu

SEQ ID NO: 1402646 - RNA, 19 nt, Artificial Sequence
  Description of Artificial Sequence: Synthetic oligonucleotide
  Sense strand starting at position 2644 of SEQ ID NO: 1243225
gcaggcuuaguacaagacu

SEQ ID NO: 1402647 - RNA, 19 nt, Artificial Sequence
  Description of Artificial Sequence: Synthetic oligonucleotide
  Antisense strand to SEQ ID NO: 1402646
agucuuguacuaagccugc

SEQ ID NO: 1402648 - RNA, 19 nt, Artificial Sequence
  Description of Artificial Sequence: Synthetic oligonucleotide
  Sense strand starting at position 2703 of SEQ ID NO: 1243225
auguauccauuuggagaua

SEQ ID NO: 1402649 - RNA, 19 nt, Artificial Sequence
  Description of Artificial Sequence: Synthetic oligonucleotide
  Antisense strand to SEQ ID NO: 1402648
uaucuccaaauggauacau

SEQ ID NO: 1402650 - RNA, 19 nt, Artificial Sequence
  Description of Artificial Sequence: Synthetic oligonucleotide
  Sense strand starting at position 2704 of SEQ ID NO: 1243225
uguauccauuuggagauau

SEQ ID NO: 1402651 - RNA, 19 nt, Artificial Sequence
  Description of Artificial Sequence: Synthetic oligonucleotide
  Antisense strand to SEQ ID NO: 1402650
auaucuccaaauggauaca

SEQ ID NO: 1402652 - RNA, 19 nt, Artificial Sequence
  Description of Artificial Sequence: Synthetic oligonucleotide
  Sense strand starting at position 2794 of SEQ ID NO: 1243225
guuagcuuuguauauacca

SEQ ID NO: 1402653 - RNA, 19 nt, Artificial Sequence
  Description of Artificial Sequence: Synthetic oligonucleotide
  Antisense strand to SEQ ID NO: 1402652
ugguauauacaaagcuaac

SEQ ID NO: 1402654 - RNA, 19 nt, Artificial Sequence
  Description of Artificial Sequence: Synthetic oligonucleotide
  Sense strand starting at position 2867 of SEQ ID NO: 1243225
acgauuugucacugugagu

SEQ ID NO: 1402655 - RNA, 19 nt, Artificial Sequence
  Description of Artificial Sequence: Synthetic oligonucleotide
  Antisense strand to SEQ ID NO: 1402654
acucacagugacaaaucgu

SEQ ID NO: 1402656 - RNA, 19 nt, Artificial Sequence
  Description of Artificial Sequence: Synthetic oligonucleotide
  Sense strand starting at position 2878 of SEQ ID NO: 1243225
cugugagucugguuuaagg

SEQ ID NO: 1402657 - RNA, 19 nt, Artificial Sequence
  Description of Artificial Sequence: Synthetic oligonucleotide
  Antisense strand to SEQ ID NO: 1402656
ccuuaaaccagacucacag

SEQ ID NO: 1402658 - RNA, 19 nt, Artificial Sequence
  Description of Artificial Sequence: Synthetic oligonucleotide
  Sense strand starting at position 2885 of SEQ ID NO: 1243225
ucugguuuaaggugggaga

SEQ ID NO: 1402659 - RNA, 19 nt, Artificial Sequence
  Description of Artificial Sequence: Synthetic oligonucleotide
  Antisense strand to SEQ ID NO: 1402658
ucucccaccuuaaaccaga

SEQ ID NO: 1402660 - RNA, 19 nt, Artificial Sequence
  Description of Artificial Sequence: Synthetic oligonucleotide
  Sense strand starting at position 2886 of SEQ ID NO: 1243225
cugguuuaaggugggagaa

SEQ ID NO: 1402661 - RNA, 19 nt, Artificial Sequence
  Description of Artificial Sequence: Synthetic oligonucleotide
  Antisense strand to SEQ ID NO: 1402660
uucucccaccuuaaaccag

SEQ ID NO: 1402662 - RNA, 19 nt, Artificial Sequence
  Description of Artificial Sequence: Synthetic oligonucleotide
  Sense strand starting at position 2887 of SEQ ID NO: 1243225
ugguuuaaggugggagaaa

SEQ ID NO: 1402663 - RNA, 19 nt, Artificial Sequence
  Description of Artificial Sequence: Synthetic oligonucleotide
  Antisense strand to SEQ ID NO: 1402662
uuucucccaccuuaaacca

SEQ ID NO: 1402664 - RNA, 19 nt, Artificial Sequence
  Description of Artificial Sequence: Synthetic oligonucleotide
  Sense strand starting at position 2957 of SEQ ID NO: 1243225
caggaaagguacucaaagu

SEQ ID NO: 1402665 - RNA, 19 nt, Artificial Sequence
  Description of Artificial Sequence: Synthetic oligonucleotide
  Antisense strand to SEQ ID NO: 1402664
acuuugaguaccuuuccug

SEQ ID NO: 1402666 - RNA, 19 nt, Artificial Sequence
  Description of Artificial Sequence: Synthetic oligonucleotide
  Sense strand starting at position 2966 of SEQ ID NO: 1243225
uacucaaaguaguuggauu

SEQ ID NO: 1402667 - RNA, 19 nt, Artificial Sequence
  Description of Artificial Sequence: Synthetic oligonucleotide
  Antisense strand to SEQ ID NO: 1402666
aauccaacuacuuugagua

SEQ ID NO: 1402668 - RNA, 19 nt, Artificial Sequence
  Description of Artificial Sequence: Synthetic oligonucleotide
  Sense strand starting at position 3004 of SEQ ID NO: 1243225
gguaauuucucccaacaag

SEQ ID NO: 1402669 - RNA, 19 nt, Artificial Sequence
  Description of Artificial Sequence: Synthetic oligonucleotide
  Antisense strand to SEQ ID NO: 1402668
cuuguugggagaaauuacc

SEQ ID NO: 1402670 - RNA, 19 nt, Artificial Sequence
  Description of Artificial Sequence: Synthetic oligonucleotide
  Sense strand starting at position 3107 of SEQ ID NO: 1243225
ugugguuuagaacaagugu

SEQ ID NO: 1402671 - RNA, 19 nt, Artificial Sequence
  Description of Artificial Sequence: Synthetic oligonucleotide
  Antisense strand to SEQ ID NO: 1402670
acacuuguucuaaaccaca

SEQ ID NO: 1402672 - RNA, 19 nt, Artificial Sequence
  Description of Artificial Sequence: Synthetic oligonucleotide
  Sense strand starting at position 3397 of SEQ ID NO: 1243225
gggagacucuugucucaag

SEQ ID NO: 1402673 - RNA, 19 nt, Artificial Sequence
  Description of Artificial Sequence: Synthetic oligonucleotide
  Antisense strand to SEQ ID NO: 1402672
cuugagacaagagucuccc

SEQ ID NO: 1402674 - RNA, 19 nt, Artificial Sequence
  Description of Artificial Sequence: Synthetic oligonucleotide
  Sense strand starting at position 3753 of SEQ ID NO: 1243225
guaagagucuguuucuuga

SEQ ID NO: 1402675 - RNA, 19 nt, Artificial Sequence
  Description of Artificial Sequence: Synthetic oligonucleotide
  Antisense strand to SEQ ID NO: 1402674
ucaagaaacagacucuuac

SEQ ID NO: 1402676 - RNA, 19 nt, Artificial Sequence
  Description of Artificial Sequence: Synthetic oligonucleotide
  Sense strand starting at position 3804 of SEQ ID NO: 1243225
aguagaagcucuuuauuga

SEQ ID NO: 1402677 - RNA, 19 nt, Artificial Sequence
  Description of Artificial Sequence: Synthetic oligonucleotide
  Antisense strand to SEQ ID NO: 1402676
ucaauaaagagcuucuacu

SEQ ID NO: 1402678 - RNA, 19 nt, Artificial Sequence
  Description of Artificial Sequence: Synthetic oligonucleotide
  Sense strand starting at position 3805 of SEQ ID NO: 1243225
guagaagcucuuuauugac

SEQ ID NO: 1402679 - RNA, 19 nt, Artificial Sequence
  Description of Artificial Sequence: Synthetic oligonucleotide
  Antisense strand to SEQ ID NO: 1402678
gucaauaaagagcuucuac

SEQ ID NO: 1402680 - RNA, 19 nt, Artificial Sequence
  Description of Artificial Sequence: Synthetic oligonucleotide
  Sense strand starting at position 3811 of SEQ ID NO: 1243225
gcucuuuauugacugacua

SEQ ID NO: 1402681 - RNA, 19 nt, Artificial Sequence
  Description of Artificial Sequence: Synthetic oligonucleotide
  Antisense strand to SEQ ID NO: 1402680
uagucagucaauaaagagc

SEQ ID NO: 1402682 - RNA, 19 nt, Artificial Sequence
  Description of Artificial Sequence: Synthetic oligonucleotide
  Sense strand starting at position 3843 of SEQ ID NO: 1243225
gaucuuguugcagaacuaa

SEQ ID NO: 1402683 - RNA, 19 nt, Artificial Sequence
  Description of Artificial Sequence: Synthetic oligonucleotide
  Antisense strand to SEQ ID NO: 1402682
uuaguucugcaacaagauc

SEQ ID NO: 1402684 - RNA, 19 nt, Artificial Sequence
  Description of Artificial Sequence: Synthetic oligonucleotide
  Sense strand starting at position 3882 of SEQ ID NO: 1243225
aacagcaguggugaauaau

SEQ ID NO: 1402685 - RNA, 19 nt, Artificial Sequence
  Description of Artificial Sequence: Synthetic oligonucleotide
  Antisense strand to SEQ ID NO: 1402684
auuauucaccacugcuguu

SEQ ID NO: 1402686 - RNA, 19 nt, Artificial Sequence
  Description of Artificial Sequence: Synthetic oligonucleotide
  Sense strand starting at position 3888 of SEQ ID NO: 1243225
aguggugaauaauuguuua

SEQ ID NO: 1402687 - RNA, 19 nt, Artificial Sequence
  Description of Artificial Sequence: Synthetic oligonucleotide
  Antisense strand to SEQ ID NO: 1402686
uaaacaauuauucaccacu

SEQ ID NO: 1402688 - RNA, 19 nt, Artificial Sequence
  Description of Artificial Sequence: Synthetic oligonucleotide
  Sense strand starting at position 3902 of SEQ ID NO: 1243225
guuuaauuaaagggauagu

SEQ ID NO: 1402689 - RNA, 19 nt, Artificial Sequence
  Description of Artificial Sequence: Synthetic oligonucleotide
  Antisense strand to SEQ ID NO: 1402688
acuaucccuuuaauuaaac

SEQ ID NO: 1402690 - RNA, 19 nt, Artificial Sequence
  Description of Artificial Sequence: Synthetic oligonucleotide
  Sense strand starting at position 3923 of SEQ ID NO: 1243225
gcauaagcauugcuauuua

SEQ ID NO: 1402691 - RNA, 19 nt, Artificial Sequence
  Description of Artificial Sequence: Synthetic oligonucleotide
  Antisense strand to SEQ ID NO: 1402690
uaaauagcaaugcuuaugc

SEQ ID NO: 1402692 - RNA, 19 nt, Artificial Sequence
  Description of Artificial Sequence: Synthetic oligonucleotide
  Sense strand starting at position 34 of SEQ ID NO: 1243226
gagacuuuauuugggacca

SEQ ID NO: 1402693 - RNA, 19 nt, Artificial Sequence
  Description of Artificial Sequence: Synthetic oligonucleotide
  Antisense strand to SEQ ID NO: 1402692
uggucccaaauaaagucuc

SEQ ID NO: 1402694 - RNA, 19 nt, Artificial Sequence
  Description of Artificial Sequence: Synthetic oligonucleotide
  Sense strand starting at position 36 of SEQ ID NO: 1243226
gacuuuauuugggaccagu

SEQ ID NO: 1402695 - RNA, 19 nt, Artificial Sequence
  Description of Artificial Sequence: Synthetic oligonucleotide
  Antisense strand to SEQ ID NO: 1402694
acuggucccaaauaaaguc

SEQ ID NO: 1402696 - RNA, 19 nt, Artificial Sequence
  Description of Artificial Sequence: Synthetic oligonucleotide
  Sense strand starting at position 86 of SEQ ID NO: 1243226
acagucagucaucacuauu

SEQ ID NO: 1402697 - RNA, 19 nt, Artificial Sequence
  Description of Artificial Sequence: Synthetic oligonucleotide
  Antisense strand to SEQ ID NO: 1402696
aauagugaugacugacugu

SEQ ID NO: 1402698 - RNA, 19 nt, Artificial Sequence
  Description of Artificial Sequence: Synthetic oligonucleotide
  Sense strand starting at position 89 of SEQ ID NO: 1243226
gucagucaucacuauucuu

SEQ ID NO: 1402699 - RNA, 19 nt, Artificial Sequence
  Description of Artificial Sequence: Synthetic oligonucleotide
  Antisense strand to SEQ ID NO: 1402698
aagaauagugaugacugac

SEQ ID NO: 1402700 - RNA, 19 nt, Artificial Sequence
  Description of Artificial Sequence: Synthetic oligonucleotide
  Sense strand starting at position 226 of SEQ ID NO: 1243226
gcggauagcaaucgagaag

SEQ ID NO: 1402701 - RNA, 19 nt, Artificial Sequence
  Description of Artificial Sequence: Synthetic oligonucleotide
  Antisense strand to SEQ ID NO: 1402700
cuucucgauugcuauccgc

SEQ ID NO: 1402702 - RNA, 19 nt, Artificial Sequence
  Description of Artificial Sequence: Synthetic oligonucleotide
  Sense strand starting at position 229 of SEQ ID NO: 1243226
gauagcaaucgagaaggca

SEQ ID NO: 1402703 - RNA, 19 nt, Artificial Sequence
  Description of Artificial Sequence: Synthetic oligonucleotide
  Antisense strand to SEQ ID NO: 1402702
ugccuucucgauugcuauc

SEQ ID NO: 1402704 - RNA, 19 nt, Artificial Sequence
  Description of Artificial Sequence: Synthetic oligonucleotide
  Sense strand starting at position 528 of SEQ ID NO: 1243226
auggaacgaucagugugaa

SEQ ID NO: 1402705 - RNA, 19 nt, Artificial Sequence
  Description of Artificial Sequence: Synthetic oligonucleotide
  Antisense strand to SEQ ID NO: 1402704
uucacacugaucguuccau

SEQ ID NO: 1402706 - RNA, 19 nt, Artificial Sequence
  Description of Artificial Sequence: Synthetic oligonucleotide
  Sense strand starting at position 547 of SEQ ID NO: 1243226
cgggacguuucagaagcuu

SEQ ID NO: 1402707 - RNA, 19 nt, Artificial Sequence
  Description of Artificial Sequence: Synthetic oligonucleotide
  Antisense strand to SEQ ID NO: 1402706
aagcuucugaaacgucccg

SEQ ID NO: 1402708 - RNA, 19 nt, Artificial Sequence
  Description of Artificial Sequence: Synthetic oligonucleotide
  Sense strand starting at position 784 of SEQ ID NO: 1243226
auugauuccugucuagaaa

SEQ ID NO: 1402709 - RNA, 19 nt, Artificial Sequence
  Description of Artificial Sequence: Synthetic oligonucleotide
  Antisense strand to SEQ ID NO: 1402708
uuucuagacaggaaucaau

SEQ ID NO: 1402710 - RNA, 19 nt, Artificial Sequence
  Description of Artificial Sequence: Synthetic oligonucleotide
  Sense strand starting at position 826 of SEQ ID NO: 1243226
uucugugcgaccgaucaaa

SEQ ID NO: 1402711 - RNA, 19 nt, Artificial Sequence
  Description of Artificial Sequence: Synthetic oligonucleotide
  Antisense strand to SEQ ID NO: 1402710
uuugaucggucgcacagaa

SEQ ID NO: 1402712 - RNA, 19 nt, Artificial Sequence
  Description of Artificial Sequence: Synthetic oligonucleotide
  Sense strand starting at position 1002 of SEQ ID NO: 1243226
cccacuuguccguggguua

SEQ ID NO: 1402713 - RNA, 19 nt, Artificial Sequence
  Description of Artificial Sequence: Synthetic oligonucleotide
  Antisense strand to SEQ ID NO: 1402712
uaacccacggacaaguggg

SEQ ID NO: 1402714 - RNA, 19 nt, Artificial Sequence
  Description of Artificial Sequence: Synthetic oligonucleotide
  Sense strand starting at position 1003 of SEQ ID NO: 1243226
ccacuuguccguggguuaa

SEQ ID NO: 1402715 - RNA, 19 nt, Artificial Sequence
  Description of Artificial Sequence: Synthetic oligonucleotide
  Antisense strand to SEQ ID NO: 1402714
uuaacccacggacaagugg

SEQ ID NO: 1402716 - RNA, 19 nt, Artificial Sequence
  Description of Artificial Sequence: Synthetic oligonucleotide
  Sense strand starting at position 1005 of SEQ ID NO: 1243226
acuuguccguggguuaauu

SEQ ID NO: 1402717 - RNA, 19 nt, Artificial Sequence
  Description of Artificial Sequence: Synthetic oligonucleotide
  Antisense strand to SEQ ID NO: 1402716
aauuaacccacggacaagu

SEQ ID NO: 1402718 - RNA, 19 nt, Artificial Sequence
  Description of Artificial Sequence: Synthetic oligonucleotide
  Sense strand starting at position 1013 of SEQ ID NO: 1243226
guggguuaauuccauccga

SEQ ID NO: 1402719 - RNA, 19 nt, Artificial Sequence
  Description of Artificial Sequence: Synthetic oligonucleotide
  Antisense strand to SEQ ID NO: 1402718
ucggauggaauuaacccac

SEQ ID NO: 1402720 - RNA, 19 nt, Artificial Sequence
  Description of Artificial Sequence: Synthetic oligonucleotide
  Sense strand starting at position 1028 of SEQ ID NO: 1243226
ccgacugcuucccagauca

SEQ ID NO: 1402721 - RNA, 19 nt, Artificial Sequence
  Description of Artificial Sequence: Synthetic oligonucleotide
  Antisense strand to SEQ ID NO: 1402720
ugaucugggaagcagucgg

SEQ ID NO: 1402722 - RNA, 19 nt, Artificial Sequence
  Description of Artificial Sequence: Synthetic oligonucleotide
  Sense strand starting at position 1150 of SEQ ID NO: 1243226
ccgggugugcuucgcgaaa

SEQ ID NO: 1402723 - RNA, 19 nt, Artificial Sequence
  Description of Artificial Sequence: Synthetic oligonucleotide
  Antisense strand to SEQ ID NO: 1402722
uuucgcgaagcacacccgg

SEQ ID NO: 1402724 - RNA, 19 nt, Artificial Sequence
  Description of Artificial Sequence: Synthetic oligonucleotide
  Sense strand starting at position 1490 of SEQ ID NO: 1243226
cccagauugucaggaaguc

SEQ ID NO: 1402725 - RNA, 19 nt, Artificial Sequence
  Description of Artificial Sequence: Synthetic oligonucleotide
  Antisense strand to SEQ ID NO: 1402724
gacuuccugacaaucuggg

SEQ ID NO: 1402726 - RNA, 19 nt, Artificial Sequence
  Description of Artificial Sequence: Synthetic oligonucleotide
  Sense strand starting at position 1499 of SEQ ID NO: 1243226
ucaggaaguccugaugcaa

SEQ ID NO: 1402727 - RNA, 19 nt, Artificial Sequence
  Description of Artificial Sequence: Synthetic oligonucleotide
  Antisense strand to SEQ ID NO: 1402726
uugcaucaggacuuccuga

SEQ ID NO: 1402728 - RNA, 19 nt, Artificial Sequence
  Description of Artificial Sequence: Synthetic oligonucleotide
  Sense strand starting at position 1770 of SEQ ID NO: 1243226
cgcgcucaugcuucaggaa

SEQ ID NO: 1402729 - RNA, 19 nt, Artificial Sequence
  Description of Artificial Sequence: Synthetic oligonucleotide
  Antisense strand to SEQ ID NO: 1402728
uuccugaagcaugagcgcg

SEQ ID NO: 1402730 - RNA, 19 nt, Artificial Sequence
  Description of Artificial Sequence: Synthetic oligonucleotide
  Sense strand starting at position 2707 of SEQ ID NO: 1243226
ccuaguggucccggaggga

SEQ ID NO: 1402731 - RNA, 19 nt, Artificial Sequence
  Description of Artificial Sequence: Synthetic oligonucleotide
  Antisense strand to SEQ ID NO: 1402730
ucccuccgggaccacuagg

SEQ ID NO: 1402732 - RNA, 19 nt, Artificial Sequence
  Description of Artificial Sequence: Synthetic oligonucleotide
  Sense strand starting at position 3012 of SEQ ID NO: 1243226
ccguuuaauugggcucagu

SEQ ID NO: 1402733 - RNA, 19 nt, Artificial Sequence
  Description of Artificial Sequence: Synthetic oligonucleotide
  Antisense strand to SEQ ID NO: 1402732
acugagcccaauuaaacgg

SEQ ID NO: 1402734 - RNA, 19 nt, Artificial Sequence
  Description of Artificial Sequence: Synthetic oligonucleotide
  Sense strand starting at position 3837 of SEQ ID NO: 1243226
ugggaagucuaguguuuaa

SEQ ID NO: 1402735 - RNA, 19 nt, Artificial Sequence
  Description of Artificial Sequence: Synthetic oligonucleotide
  Antisense strand to SEQ ID NO: 1402734
uuaaacacuagacuuccca

SEQ ID NO: 1402736 - RNA, 19 nt, Artificial Sequence
  Description of Artificial Sequence: Synthetic oligonucleotide
  Sense strand starting at position 3840 of SEQ ID NO: 1243226
gaagucuaguguuuaaagg

SEQ ID NO: 1402737 - RNA, 19 nt, Artificial Sequence
  Description of Artificial Sequence: Synthetic oligonucleotide
  Antisense strand to SEQ ID NO: 1402736
ccuuuaaacacuagacuuc

SEQ ID NO: 1402738 - RNA, 19 nt, Artificial Sequence
  Description of Artificial Sequence: Synthetic oligonucleotide
  Sense strand starting at position 3848 of SEQ ID NO: 1243226
guguuuaaaggcugauaua

SEQ ID NO: 1402739 - RNA, 19 nt, Artificial Sequence
  Description of Artificial Sequence: Synthetic oligonucleotide
  Antisense strand to SEQ ID NO: 1402738
uauaucagccuuuaaacac

SEQ ID NO: 1402740 - RNA, 19 nt, Artificial Sequence
  Description of Artificial Sequence: Synthetic oligonucleotide
  Sense strand starting at position 3849 of SEQ ID NO: 1243226
uguuuaaaggcugauauag

SEQ ID NO: 1402741 - RNA, 19 nt, Artificial Sequence
  Description of Artificial Sequence: Synthetic oligonucleotide
  Antisense strand to SEQ ID NO: 1402740
cuauaucagccuuuaaaca

SEQ ID NO: 1402742 - RNA, 19 nt, Artificial Sequence
  Description of Artificial Sequence: Synthetic oligonucleotide
  Sense strand starting at position 7 of SEQ ID NO: 1243227
cgaucugugcgcuuucuuu

SEQ ID NO: 1402743 - RNA, 19 nt, Artificial Sequence
  Description of Artificial Sequence: Synthetic oligonucleotide
  Antisense strand to SEQ ID NO: 1402742
aaagaaagcgcacagaucg

SEQ ID NO: 1402744 - RNA, 19 nt, Artificial Sequence
  Description of Artificial Sequence: Synthetic oligonucleotide
  Sense strand starting at position 13 of SEQ ID NO: 1243227
gugcgcuuucuuugugugu

SEQ ID NO: 1402745 - RNA, 19 nt, Artificial Sequence
  Description of Artificial Sequence: Synthetic oligonucleotide
  Antisense strand to SEQ ID NO: 1402744
acacacaaagaaagcgcac

SEQ ID NO: 1402746 - RNA, 19 nt, Artificial Sequence
  Description of Artificial Sequence: Synthetic oligonucleotide
  Sense strand starting at position 14 of SEQ ID NO: 1243227
ugcgcuuucuuugugugua

SEQ ID NO: 1402747 - RNA, 19 nt, Artificial Sequence
  Description of Artificial Sequence: Synthetic oligonucleotide
  Antisense strand to SEQ ID NO: 1402746
uacacacaaagaaagcgca

SEQ ID NO: 1402748 - RNA, 19 nt, Artificial Sequence
  Description of Artificial Sequence: Synthetic oligonucleotide
  Sense strand starting at position 15 of SEQ ID NO: 1243227
gcgcuuucuuuguguguau

SEQ ID NO: 1402749 - RNA, 19 nt, Artificial Sequence
  Description of Artificial Sequence: Synthetic oligonucleotide
  Antisense strand to SEQ ID NO: 1402748
auacacacaaagaaagcgc

SEQ ID NO: 1402750 - RNA, 19 nt, Artificial Sequence
  Description of Artificial Sequence: Synthetic oligonucleotide
  Sense strand starting at position 16 of SEQ ID NO: 1243227
cgcuuucuuuguguguauu

SEQ ID NO: 1402751 - RNA, 19 nt, Artificial Sequence
  Description of Artificial Sequence: Synthetic oligonucleotide
  Antisense strand to SEQ ID NO: 1402750
aauacacacaaagaaagcg

SEQ ID NO: 1402752 - RNA, 19 nt, Artificial Sequence
  Description of Artificial Sequence: Synthetic oligonucleotide
  Sense strand starting at position 19 of SEQ ID NO: 1243227
uuucuuuguguguauucuu

SEQ ID NO: 1402753 - RNA, 19 nt, Artificial Sequence
  Description of Artificial Sequence: Synthetic oligonucleotide
  Antisense strand to SEQ ID NO: 1402752
aagaauacacacaaagaaa

SEQ ID NO: 1402754 - RNA, 19 nt, Artificial Sequence
  Description of Artificial Sequence: Synthetic oligonucleotide
  Sense strand starting at position 26 of SEQ ID NO: 1243227
guguguauucuuugugcuu

SEQ ID NO: 1402755 - RNA, 19 nt, Artificial Sequence
  Description of Artificial Sequence: Synthetic oligonucleotide
  Antisense strand to SEQ ID NO: 1402754
aagcacaaagaauacacac

SEQ ID NO: 1402756 - RNA, 19 nt, Artificial Sequence
  Description of Artificial Sequence: Synthetic oligonucleotide
  Sense strand starting at position 75 of SEQ ID NO: 1243227
gugccuugugucuaccgaa

SEQ ID NO: 1402757 - RNA, 19 nt, Artificial Sequence
  Description of Artificial Sequence: Synthetic oligonucleotide
  Antisense strand to SEQ ID NO: 1402756
uucgguagacacaaggcac

SEQ ID NO: 1402758 - RNA, 19 nt, Artificial Sequence
  Description of Artificial Sequence: Synthetic oligonucleotide
  Sense strand starting at position 78 of SEQ ID NO: 1243227
ccuugugucuaccgaagga

SEQ ID NO: 1402759 - RNA, 19 nt, Artificial Sequence
  Description of Artificial Sequence: Synthetic oligonucleotide
  Antisense strand to SEQ ID NO: 1402758
uccuucgguagacacaagg

SEQ ID NO: 1402760 - RNA, 19 nt, Artificial Sequence
  Description of Artificial Sequence: Synthetic oligonucleotide
  Sense strand starting at position 116 of SEQ ID NO: 1243227
cucuucucugucgaguagu

SEQ ID NO: 1402761 - RNA, 19 nt, Artificial Sequence
  Description of Artificial Sequence: Synthetic oligonucleotide
  Antisense strand to SEQ ID NO: 1402760
acuacucgacagagaagag

SEQ ID NO: 1402762 - RNA, 19 nt, Artificial Sequence
  Description of Artificial Sequence: Synthetic oligonucleotide
  Sense strand starting at position 122 of SEQ ID NO: 1243227
ucugucgaguagugagaga

SEQ ID NO: 1402763 - RNA, 19 nt, Artificial Sequence
  Description of Artificial Sequence: Synthetic oligonucleotide
  Antisense strand to SEQ ID NO: 1402762
ucucucacuacucgacaga

SEQ ID NO: 1402764 - RNA, 19 nt, Artificial Sequence
  Description of Artificial Sequence: Synthetic oligonucleotide
  Sense strand starting at position 264 of SEQ ID NO: 1243227
agaagcgaucgauagcaga

SEQ ID NO: 1402765 - RNA, 19 nt, Artificial Sequence
  Description of Artificial Sequence: Synthetic oligonucleotide
  Antisense strand to SEQ ID NO: 1402764
ucugcuaucgaucgcuucu

SEQ ID NO: 1402766 - RNA, 19 nt, Artificial Sequence
  Description of Artificial Sequence: Synthetic oligonucleotide
  Sense strand starting at position 307 of SEQ ID NO: 1243227
acgugagcaucuuuaaaga

SEQ ID NO: 1402767 - RNA, 19 nt, Artificial Sequence
  Description of Artificial Sequence: Synthetic oligonucleotide
  Antisense strand to SEQ ID NO: 1402766
ucuuuaaagaugcucacgu

SEQ ID NO: 1402768 - RNA, 19 nt, Artificial Sequence
  Description of Artificial Sequence: Synthetic oligonucleotide
  Sense strand starting at position 947 of SEQ ID NO: 1243227
agaagagcuuccucugcua

SEQ ID NO: 1402769 - RNA, 19 nt, Artificial Sequence
  Description of Artificial Sequence: Synthetic oligonucleotide
  Antisense strand to SEQ ID NO: 1402768
uagcagaggaagcucuucu

SEQ ID NO: 1402770 - RNA, 19 nt, Artificial Sequence
  Description of Artificial Sequence: Synthetic oligonucleotide
  Sense strand starting at position 950 of SEQ ID NO: 1243227
agagcuuccucugcuaaga

SEQ ID NO: 1402771 - RNA, 19 nt, Artificial Sequence
  Description of Artificial Sequence: Synthetic oligonucleotide
  Antisense strand to SEQ ID NO: 1402770
ucuuagcagaggaagcucu

SEQ ID NO: 1402772 - RNA, 19 nt, Artificial Sequence
  Description of Artificial Sequence: Synthetic oligonucleotide
  Sense strand starting at position 952 of SEQ ID NO: 1243227
agcuuccucugcuaagaau

SEQ ID NO: 1402773 - RNA, 19 nt, Artificial Sequence
  Description of Artificial Sequence: Synthetic oligonucleotide
  Antisense strand to SEQ ID NO: 1402772
auucuuagcagaggaagcu

SEQ ID NO: 1402774 - RNA, 19 nt, Artificial Sequence
  Description of Artificial Sequence: Synthetic oligonucleotide
  Sense strand starting at position 977 of SEQ ID NO: 1243227
gagugcucuugagaagcca

SEQ ID NO: 1402775 - RNA, 19 nt, Artificial Sequence
  Description of Artificial Sequence: Synthetic oligonucleotide
  Antisense strand to SEQ ID NO: 1402774
uggcuucucaagagcacuc

SEQ ID NO: 1402776 - RNA, 19 nt, Artificial Sequence
  Description of Artificial Sequence: Synthetic oligonucleotide
  Sense strand starting at position 1149 of SEQ ID NO: 1243227
ccacaagagcucuggagaa

SEQ ID NO: 1402777 - RNA, 19 nt, Artificial Sequence
  Description of Artificial Sequence: Synthetic oligonucleotide
  Antisense strand to SEQ ID NO: 1402776
uucuccagagcucuugugg

SEQ ID NO: 1402778 - RNA, 19 nt, Artificial Sequence
  Description of Artificial Sequence: Synthetic oligonucleotide
  Sense strand starting at position 1177 of SEQ ID NO: 1243227
cccagcgccuuguuugaaa

SEQ ID NO: 1402779 - RNA, 19 nt, Artificial Sequence
  Description of Artificial Sequence: Synthetic oligonucleotide
  Antisense strand to SEQ ID NO: 1402778
uuucaaacaaggcgcuggg

SEQ ID NO: 1402780 - RNA, 19 nt, Artificial Sequence
  Description of Artificial Sequence: Synthetic oligonucleotide
  Sense strand starting at position 1609 of SEQ ID NO: 1243227
uugggaagagccuacgauu

SEQ ID NO: 1402781 - RNA, 19 nt, Artificial Sequence
  Description of Artificial Sequence: Synthetic oligonucleotide
  Antisense strand to SEQ ID NO: 1402780
aaucguaggcucuucccaa

SEQ ID NO: 1402782 - RNA, 19 nt, Artificial Sequence
  Description of Artificial Sequence: Synthetic oligonucleotide
  Sense strand starting at position 2161 of SEQ ID NO: 1243227
ucgguuuccucaccugaga

SEQ ID NO: 1402783 - RNA, 19 nt, Artificial Sequence
  Description of Artificial Sequence: Synthetic oligonucleotide
  Antisense strand to SEQ ID NO: 1402782
ucucaggugaggaaaccga

SEQ ID NO: 1402784 - RNA, 19 nt, Artificial Sequence
  Description of Artificial Sequence: Synthetic oligonucleotide
  Sense strand starting at position 2164 of SEQ ID NO: 1243227
guuuccucaccugagaaac

SEQ ID NO: 1402785 - RNA, 19 nt, Artificial Sequence
  Description of Artificial Sequence: Synthetic oligonucleotide
  Antisense strand to SEQ ID NO: 1402784
guuucucaggugaggaaac

SEQ ID NO: 1402786 - RNA, 19 nt, Artificial Sequence
  Description of Artificial Sequence: Synthetic oligonucleotide
  Sense strand starting at position 2347 of SEQ ID NO: 1243227
gccaguggugccgggaauu

SEQ ID NO: 1402787 - RNA, 19 nt, Artificial Sequence
  Description of Artificial Sequence: Synthetic oligonucleotide
  Antisense strand to SEQ ID NO: 1402786
aauucccggcaccacuggc

SEQ ID NO: 1402788 - RNA, 19 nt, Artificial Sequence
  Description of Artificial Sequence: Synthetic oligonucleotide
  Sense strand starting at position 2401 of SEQ ID NO: 1243227
cagcgaucgucaggagaga

SEQ ID NO: 1402789 - RNA, 19 nt, Artificial Sequence
  Description of Artificial Sequence: Synthetic oligonucleotide
  Antisense strand to SEQ ID NO: 1402788
ucucuccugacgaucgcug

SEQ ID NO: 1402790 - RNA, 19 nt, Artificial Sequence
  Description of Artificial Sequence: Synthetic oligonucleotide
  Sense strand starting at position 2402 of SEQ ID NO: 1243227
agcgaucgucaggagagaa

SEQ ID NO: 1402791 - RNA, 19 nt, Artificial Sequence
  Description of Artificial Sequence: Synthetic oligonucleotide
  Antisense strand to SEQ ID NO: 1402790
uucucuccugacgaucgcu

SEQ ID NO: 1402792 - RNA, 19 nt, Artificial Sequence
  Description of Artificial Sequence: Synthetic oligonucleotide
  Sense strand starting at position 2530 of SEQ ID NO: 1243228
cagguuuccuggcugagag

SEQ ID NO: 1402793 - RNA, 19 nt, Artificial Sequence
  Description of Artificial Sequence: Synthetic oligonucleotide
  Antisense strand to SEQ ID NO: 1402792
cucucagccaggaaaccug

SEQ ID NO: 1402794 - RNA, 19 nt, Artificial Sequence
  Description of Artificial Sequence: Synthetic oligonucleotide
  Sense strand starting at position 2531 of SEQ ID NO: 1243228
agguuuccuggcugagaga

SEQ ID NO: 1402795 - RNA, 19 nt, Artificial Sequence
  Description of Artificial Sequence: Synthetic oligonucleotide
  Antisense strand to SEQ ID NO: 1402794
ucucucagccaggaaaccu

SEQ ID NO: 1402796 - RNA, 19 nt, Artificial Sequence
  Description of Artificial Sequence: Synthetic oligonucleotide
  Sense strand starting at position 2826 of SEQ ID NO: 1243228
gaagguggaucccuugagu

SEQ ID NO: 1402797 - RNA, 19 nt, Artificial Sequence
  Description of Artificial Sequence: Synthetic oligonucleotide
  Antisense strand to SEQ ID NO: 1402796
acucaagggauccaccuuc

SEQ ID NO: 1402798 - RNA, 19 nt, Artificial Sequence
  Description of Artificial Sequence: Synthetic oligonucleotide
  Sense strand starting at position 3396 of SEQ ID NO: 1243228
ugguaaggcugcgauugua

SEQ ID NO: 1402799 - RNA, 19 nt, Artificial Sequence
  Description of Artificial Sequence: Synthetic oligonucleotide
  Antisense strand to SEQ ID NO: 1402798
uacaaucgcagccuuacca

SEQ ID NO: 1402800 - RNA, 19 nt, Artificial Sequence
  Description of Artificial Sequence: Synthetic oligonucleotide
  Sense strand starting at position 3404 of SEQ ID NO: 1243228
cugcgauuguauuccaaac

SEQ ID NO: 1402801 - RNA, 19 nt, Artificial Sequence
  Description of Artificial Sequence: Synthetic oligonucleotide
  Antisense strand to SEQ ID NO: 1402800
guuuggaauacaaucgcag

SEQ ID NO: 1402802 - RNA, 19 nt, Artificial Sequence
  Description of Artificial Sequence: Synthetic oligonucleotide
  Sense strand starting at position 3491 of SEQ ID NO: 1243228
acaagaaacugcugccaaa

SEQ ID NO: 1402803 - RNA, 19 nt, Artificial Sequence
  Description of Artificial Sequence: Synthetic oligonucleotide
  Antisense strand to SEQ ID NO: 1402802
uuuggcagcaguuucuugu

SEQ ID NO: 1402804 - RNA, 19 nt, Artificial Sequence
  Description of Artificial Sequence: Synthetic oligonucleotide
  Sense strand starting at position 3494 of SEQ ID NO: 1243228
agaaacugcugccaaauga

SEQ ID NO: 1402805 - RNA, 19 nt, Artificial Sequence
  Description of Artificial Sequence: Synthetic oligonucleotide
  Antisense strand to SEQ ID NO: 1402804
ucauuuggcagcaguuucu

SEQ ID NO: 1402806 - RNA, 19 nt, Artificial Sequence
  Description of Artificial Sequence: Synthetic oligonucleotide
  Sense strand starting at position 3530 of SEQ ID NO: 1243228
agucucaaugauuguuuga

SEQ ID NO: 1402807 - RNA, 19 nt, Artificial Sequence
  Description of Artificial Sequence: Synthetic oligonucleotide
  Antisense strand to SEQ ID NO: 1402806
ucaaacaaucauugagacu

SEQ ID NO: 1402808 - RNA, 19 nt, Artificial Sequence
  Description of Artificial Sequence: Synthetic oligonucleotide
  Sense strand starting at position 3532 of SEQ ID NO: 1243228
ucucaaugauuguuugaag

SEQ ID NO: 1402809 - RNA, 19 nt, Artificial Sequence
  Description of Artificial Sequence: Synthetic oligonucleotide
  Antisense strand to SEQ ID NO: 1402808
cuucaaacaaucauugaga

SEQ ID NO: 1402810 - RNA, 19 nt, Artificial Sequence
  Description of Artificial Sequence: Synthetic oligonucleotide
  Sense strand starting at position 3568 of SEQ ID NO: 1243228
ugcaauuguuuagaaagga

SEQ ID NO: 1402811 - RNA, 19 nt, Artificial Sequence
  Description of Artificial Sequence: Synthetic oligonucleotide
  Antisense strand to SEQ ID NO: 1402810
uccuuucuaaacaauugca

SEQ ID NO: 1402812 - RNA, 19 nt, Artificial Sequence
  Description of Artificial Sequence: Synthetic oligonucleotide
  Sense strand starting at position 3620 of SEQ ID NO: 1243228
gcaaauuaguuaccuggaa

SEQ ID NO: 1402813 - RNA, 19 nt, Artificial Sequence
  Description of Artificial Sequence: Synthetic oligonucleotide
  Antisense strand to SEQ ID NO: 1402812
uuccagguaacuaauuugc

SEQ ID NO: 1402814 - RNA, 19 nt, Artificial Sequence
  Description of Artificial Sequence: Synthetic oligonucleotide
  Sense strand starting at position 3976 of SEQ ID NO: 1243228
aaauccauguggugagaca

SEQ ID NO: 1402815 - RNA, 19 nt, Artificial Sequence
  Description of Artificial Sequence: Synthetic oligonucleotide
  Antisense strand to SEQ ID NO: 1402814
ugucucaccacauggauuu

SEQ ID NO: 1402816 - RNA, 19 nt, Artificial Sequence
  Description of Artificial Sequence: Synthetic oligonucleotide
  Sense strand starting at position 65 of SEQ ID NO: 1243229
ggccaugucucauuucuca

SEQ ID NO: 1402817 - RNA, 19 nt, Artificial Sequence
  Description of Artificial Sequence: Synthetic oligonucleotide
  Antisense strand to SEQ ID NO: 1402816
ugagaaaugagacauggcc

SEQ ID NO: 1402818 - RNA, 19 nt, Artificial Sequence
  Description of Artificial Sequence: Synthetic oligonucleotide
  Sense strand starting at position 126 of SEQ ID NO: 1243229
caaggugcccaguaggaaa

SEQ ID NO: 1402819 - RNA, 19 nt, Artificial Sequence
  Description of Artificial Sequence: Synthetic oligonucleotide
  Antisense strand to SEQ ID NO: 1402818
uuuccuacugggcaccuug

SEQ ID NO: 1402820 - RNA, 19 nt, Artificial Sequence
  Description of Artificial Sequence: Synthetic oligonucleotide
  Sense strand starting at position 141 of SEQ ID NO: 1243229
gaaagucaggcuuagcauu

SEQ ID NO: 1402821 - RNA, 19 nt, Artificial Sequence
  Description of Artificial Sequence: Synthetic oligonucleotide
  Antisense strand to SEQ ID NO: 1402820
aaugcuaagccugacuuuc

SEQ ID NO: 1402822 - RNA, 19 nt, Artificial Sequence
  Description of Artificial Sequence: Synthetic oligonucleotide
  Sense strand starting at position 655 of SEQ ID NO: 1243229
gugucuaggcacugggaaa

SEQ ID NO: 1402823 - RNA, 19 nt, Artificial Sequence
  Description of Artificial Sequence: Synthetic oligonucleotide
  Antisense strand to SEQ ID NO: 1402822
uuucccagugccuagacac

SEQ ID NO: 1402824 - RNA, 19 nt, Artificial Sequence
  Description of Artificial Sequence: Synthetic oligonucleotide
  Sense strand starting at position 710 of SEQ ID NO: 1243229
gcuuguagucuaggaggga

SEQ ID NO: 1402825 - RNA, 19 nt, Artificial Sequence
  Description of Artificial Sequence: Synthetic oligonucleotide
  Antisense strand to SEQ ID NO: 1402824
ucccuccuagacuacaagc

SEQ ID NO: 1402826 - RNA, 19 nt, Artificial Sequence
  Description of Artificial Sequence: Synthetic oligonucleotide
  Sense strand starting at position 743 of SEQ ID NO: 1243229
cuguuuaagccacagcaaa

SEQ ID NO: 1402827 - RNA, 19 nt, Artificial Sequence
  Description of Artificial Sequence: Synthetic oligonucleotide
  Antisense strand to SEQ ID NO: 1402826
uuugcuguggcuuaaacag

SEQ ID NO: 1402828 - RNA, 19 nt, Artificial Sequence
  Description of Artificial Sequence: Synthetic oligonucleotide
  Sense strand starting at position 760 of SEQ ID NO: 1243229
aaaguacugccuuggaagu

SEQ ID NO: 1402829 - RNA, 19 nt, Artificial Sequence
  Description of Artificial Sequence: Synthetic oligonucleotide
  Antisense strand to SEQ ID NO: 1402828
acuuccaaggcaguacuuu

SEQ ID NO: 1402830 - RNA, 19 nt, Artificial Sequence
  Description of Artificial Sequence: Synthetic oligonucleotide
  Sense strand starting at position 894 of SEQ ID NO: 1243229
ugugaauggaacuaugcua

SEQ ID NO: 1402831 - RNA, 19 nt, Artificial Sequence
  Description of Artificial Sequence: Synthetic oligonucleotide
  Antisense strand to SEQ ID NO: 1402830
uagcauaguuccauucaca

SEQ ID NO: 1402832 - RNA, 19 nt, Artificial Sequence
  Description of Artificial Sequence: Synthetic oligonucleotide
  Sense strand starting at position 1367 of SEQ ID NO: 1243229
uucucauuguuauuguaag

SEQ ID NO: 1402833 - RNA, 19 nt, Artificial Sequence
  Description of Artificial Sequence: Synthetic oligonucleotide
  Antisense strand to SEQ ID NO: 1402832
cuuacaauaacaaugagaa

SEQ ID NO: 1402834 - RNA, 19 nt, Artificial Sequence
  Description of Artificial Sequence: Synthetic oligonucleotide
  Sense strand starting at position 1417 of SEQ ID NO: 1243229
aggauagugccuggcacua

SEQ ID NO: 1402835 - RNA, 19 nt, Artificial Sequence
  Description of Artificial Sequence: Synthetic oligonucleotide
  Antisense strand to SEQ ID NO: 1402834
uagugccaggcacuauccu

SEQ ID NO: 1402836 - RNA, 19 nt, Artificial Sequence
  Description of Artificial Sequence: Synthetic oligonucleotide
  Sense strand starting at position 1456 of SEQ ID NO: 1243229
gucagaguauuacuauuag

SEQ ID NO: 1402837 - RNA, 19 nt, Artificial Sequence
  Description of Artificial Sequence: Synthetic oligonucleotide
  Antisense strand to SEQ ID NO: 1402836
cuaauaguaauacucugac

SEQ ID NO: 1402838 - RNA, 19 nt, Artificial Sequence
  Description of Artificial Sequence: Synthetic oligonucleotide
  Sense strand starting at position 1527 of SEQ ID NO: 1243229
uucugugcuaggcauuaga

SEQ ID NO: 1402839 - RNA, 19 nt, Artificial Sequence
  Description of Artificial Sequence: Synthetic oligonucleotide
  Antisense strand to SEQ ID NO: 1402838
ucuaaugccuagcacagaa

SEQ ID NO: 1402840 - RNA, 19 nt, Artificial Sequence
  Description of Artificial Sequence: Synthetic oligonucleotide
  Sense strand starting at position 1530 of SEQ ID NO: 1243229
ugugcuaggcauuagacau

SEQ ID NO: 1402841 - RNA, 19 nt, Artificial Sequence
  Description of Artificial Sequence: Synthetic oligonucleotide
  Antisense strand to SEQ ID NO: 1402840
augucuaaugccuagcaca

SEQ ID NO: 1402842 - RNA, 19 nt, Artificial Sequence
  Description of Artificial Sequence: Synthetic oligonucleotide
  Sense strand starting at position 1584 of SEQ ID NO: 1243229
guauccauaccaugagaau

SEQ ID NO: 1402843 - RNA, 19 nt, Artificial Sequence
  Description of Artificial Sequence: Synthetic oligonucleotide
  Antisense strand to SEQ ID NO: 1402842
auucucaugguauggauac

SEQ ID NO: 1402844 - RNA, 19 nt, Artificial Sequence
  Description of Artificial Sequence: Synthetic oligonucleotide
  Sense strand starting at position 1596 of SEQ ID NO: 1243229
ugagaauuaggucguauua

SEQ ID NO: 1402845 - RNA, 19 nt, Artificial Sequence
  Description of Artificial Sequence: Synthetic oligonucleotide
  Antisense strand to SEQ ID NO: 1402844
uaauacgaccuaauucuca

SEQ ID NO: 1402846 - RNA, 19 nt, Artificial Sequence
  Description of Artificial Sequence: Synthetic oligonucleotide
  Sense strand starting at position 1606 of SEQ ID NO: 1243229
gucguauuaauuuguucca

SEQ ID NO: 1402847 - RNA, 19 nt, Artificial Sequence
  Description of Artificial Sequence: Synthetic oligonucleotide
  Antisense strand to SEQ ID NO: 1402846
uggaacaaauuaauacgac

SEQ ID NO: 1402848 - RNA, 19 nt, Artificial Sequence
  Description of Artificial Sequence: Synthetic oligonucleotide
  Sense strand starting at position 1607 of SEQ ID NO: 1243229
ucguauuaauuuguuccau

SEQ ID NO: 1402849 - RNA, 19 nt, Artificial Sequence
  Description of Artificial Sequence: Synthetic oligonucleotide
  Antisense strand to SEQ ID NO: 1402848
auggaacaaauuaauacga

SEQ ID NO: 1402850 - RNA, 19 nt, Artificial Sequence
  Description of Artificial Sequence: Synthetic oligonucleotide
  Sense strand starting at position 1609 of SEQ ID NO: 1243229
guauuaauuuguuccaugu

SEQ ID NO: 1402851 - RNA, 19 nt, Artificial Sequence
  Description of Artificial Sequence: Synthetic oligonucleotide
  Antisense strand to SEQ ID NO: 1402850
acauggaacaaauuaauac

SEQ ID NO: 1402852 - RNA, 19 nt, Artificial Sequence
  Description of Artificial Sequence: Synthetic oligonucleotide
  Sense strand starting at position 1636 of SEQ ID NO: 1243229
gugagaagugauggcaaga

SEQ ID NO: 1402853 - RNA, 19 nt, Artificial Sequence
  Description of Artificial Sequence: Synthetic oligonucleotide
  Antisense strand to SEQ ID NO: 1402852
ucuugccaucacuucucac

SEQ ID NO: 1402854 - RNA, 19 nt, Artificial Sequence
  Description of Artificial Sequence: Synthetic oligonucleotide
  Sense strand starting at position 1708 of SEQ ID NO: 1243229
guuccauuccgugccaagu

SEQ ID NO: 1402855 - RNA, 19 nt, Artificial Sequence
  Description of Artificial Sequence: Synthetic oligonucleotide
  Antisense strand to SEQ ID NO: 1402854
acuuggcacggaauggaac

SEQ ID NO: 1402856 - RNA, 19 nt, Artificial Sequence
  Description of Artificial Sequence: Synthetic oligonucleotide
  Sense strand starting at position 1763 of SEQ ID NO: 1243229
agaugugcuucugcagaaa

SEQ ID NO: 1402857 - RNA, 19 nt, Artificial Sequence
  Description of Artificial Sequence: Synthetic oligonucleotide
  Antisense strand to SEQ ID NO: 1402856
uuucugcagaagcacaucu

SEQ ID NO: 1402858 - RNA, 19 nt, Artificial Sequence
  Description of Artificial Sequence: Synthetic oligonucleotide
  Sense strand starting at position 1766 of SEQ ID NO: 1243229
ugugcuucugcagaaacca

SEQ ID NO: 1402859 - RNA, 19 nt, Artificial Sequence
  Description of Artificial Sequence: Synthetic oligonucleotide
  Antisense strand to SEQ ID NO: 1402858
ugguuucugcagaagcaca

SEQ ID NO: 1402860 - RNA, 19 nt, Artificial Sequence
  Description of Artificial Sequence: Synthetic oligonucleotide
  Sense strand starting at position 1790 of SEQ ID NO: 1243229
ugccuucguccugaaugaa

SEQ ID NO: 1402861 - RNA, 19 nt, Artificial Sequence
  Description of Artificial Sequence: Synthetic oligonucleotide
  Antisense strand to SEQ ID NO: 1402860
uucauucaggacgaaggca

SEQ ID NO: 1402862 - RNA, 19 nt, Artificial Sequence
  Description of Artificial Sequence: Synthetic oligonucleotide
  Sense strand starting at position 2223 of SEQ ID NO: 1243229
gauggucuucucgggaaag

SEQ ID NO: 1402863 - RNA, 19 nt, Artificial Sequence
  Description of Artificial Sequence: Synthetic oligonucleotide
  Antisense strand to SEQ ID NO: 1402862
cuuucccgagaagaccauc

SEQ ID NO: 1402864 - RNA, 19 nt, Artificial Sequence
  Description of Artificial Sequence: Synthetic oligonucleotide
  Sense strand starting at position 2225 of SEQ ID NO: 1243229
uggucuucucgggaaagau

SEQ ID NO: 1402865 - RNA, 19 nt, Artificial Sequence
  Description of Artificial Sequence: Synthetic oligonucleotide
  Antisense strand to SEQ ID NO: 1402864
aucuuucccgagaagacca

SEQ ID NO: 1402866 - RNA, 19 nt, Artificial Sequence
  Description of Artificial Sequence: Synthetic oligonucleotide
  Sense strand starting at position 2330 of SEQ ID NO: 1243229
cccugagggcuguauguuu

SEQ ID NO: 1402867 - RNA, 19 nt, Artificial Sequence
  Description of Artificial Sequence: Synthetic oligonucleotide
  Antisense strand to SEQ ID NO: 1402866
aaacauacagcccucaggg

SEQ ID NO: 1402868 - RNA, 19 nt, Artificial Sequence
  Description of Artificial Sequence: Synthetic oligonucleotide
  Sense strand starting at position 2368 of SEQ ID NO: 1243229
gugggaagugugugauaaa

SEQ ID NO: 1402869 - RNA, 19 nt, Artificial Sequence
  Description of Artificial Sequence: Synthetic oligonucleotide
  Antisense strand to SEQ ID NO: 1402868
uuuaucacacacuucccac

SEQ ID NO: 1402870 - RNA, 19 nt, Artificial Sequence
  Description of Artificial Sequence: Synthetic oligonucleotide
  Sense strand starting at position 2576 of SEQ ID NO: 1243229
cccauaccugcuggagaau

SEQ ID NO: 1402871 - RNA, 19 nt, Artificial Sequence
  Description of Artificial Sequence: Synthetic oligonucleotide
  Antisense strand to SEQ ID NO: 1402870
auucuccagcagguauggg

SEQ ID NO: 1402872 - RNA, 19 nt, Artificial Sequence
  Description of Artificial Sequence: Synthetic oligonucleotide
  Sense strand starting at position 2620 of SEQ ID NO: 1243229
augucauaagcucagaacu

SEQ ID NO: 1402873 - RNA, 19 nt, Artificial Sequence
  Description of Artificial Sequence: Synthetic oligonucleotide
  Antisense strand to SEQ ID NO: 1402872
aguucugagcuuaugacau

SEQ ID NO: 1402874 - RNA, 19 nt, Artificial Sequence
  Description of Artificial Sequence: Synthetic oligonucleotide
  Sense strand starting at position 2676 of SEQ ID NO: 1243229
uuccaugguccauggauca

SEQ ID NO: 1402875 - RNA, 19 nt, Artificial Sequence
  Description of Artificial Sequence: Synthetic oligonucleotide
  Antisense strand to SEQ ID NO: 1402874
ugauccauggaccauggaa

SEQ ID NO: 1402876 - RNA, 19 nt, Artificial Sequence
  Description of Artificial Sequence: Synthetic oligonucleotide
  Sense strand starting at position 2735 of SEQ ID NO: 1243229
ucuggccuccgagaguauu

SEQ ID NO: 1402877 - RNA, 19 nt, Artificial Sequence
  Description of Artificial Sequence: Synthetic oligonucleotide
  Antisense strand to SEQ ID NO: 1402876
aauacucucggaggccaga

SEQ ID NO: 1402878 - RNA, 19 nt, Artificial Sequence
  Description of Artificial Sequence: Synthetic oligonucleotide
  Sense strand starting at position 2777 of SEQ ID NO: 1243229
ggagaaacaagcugucucu

SEQ ID NO: 1402879 - RNA, 19 nt, Artificial Sequence
  Description of Artificial Sequence: Synthetic oligonucleotide
  Antisense strand to SEQ ID NO: 1402878
agagacagcuuguuucucc

SEQ ID NO: 1402880 - RNA, 19 nt, Artificial Sequence
  Description of Artificial Sequence: Synthetic oligonucleotide
  Sense strand starting at position 2827 of SEQ ID NO: 1243229
uauugugggcaaugugaua

SEQ ID NO: 1402881 - RNA, 19 nt, Artificial Sequence
  Description of Artificial Sequence: Synthetic oligonucleotide
  Antisense strand to SEQ ID NO: 1402880
uaucacauugcccacaaua

SEQ ID NO: 1402882 - RNA, 19 nt, Artificial Sequence
  Description of Artificial Sequence: Synthetic oligonucleotide
  Sense strand starting at position 2932 of SEQ ID NO: 1243229
ugugaaaugccauaugaau

SEQ ID NO: 1402883 - RNA, 19 nt, Artificial Sequence
  Description of Artificial Sequence: Synthetic oligonucleotide
  Antisense strand to SEQ ID NO: 1402882
auucauauggcauuucaca

SEQ ID NO: 1402884 - RNA, 19 nt, Artificial Sequence
  Description of Artificial Sequence: Synthetic oligonucleotide
  Sense strand starting at position 2949 of SEQ ID NO: 1243229
auaagauuauucuuggcag

SEQ ID NO: 1402885 - RNA, 19 nt, Artificial Sequence
  Description of Artificial Sequence: Synthetic oligonucleotide
  Antisense strand to SEQ ID NO: 1402884
cugccaagaauaaucuuau

SEQ ID NO: 1402886 - RNA, 19 nt, Artificial Sequence
  Description of Artificial Sequence: Synthetic oligonucleotide
  Sense strand starting at position 2952 of SEQ ID NO: 1243229
agauuauucuuggcagaau

SEQ ID NO: 1402887 - RNA, 19 nt, Artificial Sequence
  Description of Artificial Sequence: Synthetic oligonucleotide
  Antisense strand to SEQ ID NO: 1402886
auucugccaagaauaaucu

SEQ ID NO: 1402888 - RNA, 19 nt, Artificial Sequence
  Description of Artificial Sequence: Synthetic oligonucleotide
  Sense strand starting at position 2963 of SEQ ID NO: 1243229
ggcagaauuuguuaagaag

SEQ ID NO: 1402889 - RNA, 19 nt, Artificial Sequence
  Description of Artificial Sequence: Synthetic oligonucleotide
  Antisense strand to SEQ ID NO: 1402888
cuucuuaacaaauucugcc

SEQ ID NO: 1402890 - RNA, 19 nt, Artificial Sequence
  Description of Artificial Sequence: Synthetic oligonucleotide
  Sense strand starting at position 2999 of SEQ ID NO: 1243229
cuaaauguccauugauagg

SEQ ID NO: 1402891 - RNA, 19 nt, Artificial Sequence
  Description of Artificial Sequence: Synthetic oligonucleotide
  Antisense strand to SEQ ID NO: 1402890
ccuaucaauggacauuuag

SEQ ID NO: 1402892 - RNA, 19 nt, Artificial Sequence
  Description of Artificial Sequence: Synthetic oligonucleotide
  Sense strand starting at position 3080 of SEQ ID NO: 1243229
ucugcaaauuuggaaggau

SEQ ID NO: 1402893 - RNA, 19 nt, Artificial Sequence
  Description of Artificial Sequence: Synthetic oligonucleotide
  Antisense strand to SEQ ID NO: 1402892
auccuuccaaauuugcaga

SEQ ID NO: 1402894 - RNA, 19 nt, Artificial Sequence
  Description of Artificial Sequence: Synthetic oligonucleotide
  Sense strand starting at position 3400 of SEQ ID NO: 1243229
gccaauguaccuggugaga

SEQ ID NO: 1402895 - RNA, 19 nt, Artificial Sequence
  Description of Artificial Sequence: Synthetic oligonucleotide
  Antisense strand to SEQ ID NO: 1402894
ucucaccagguacauuggc

SEQ ID NO: 1402896 - RNA, 19 nt, Artificial Sequence
  Description of Artificial Sequence: Synthetic oligonucleotide
  Sense strand starting at position 3 of SEQ ID NO: 1243230
gcggaaguggugcgauuua

SEQ ID NO: 1402897 - RNA, 19 nt, Artificial Sequence
  Description of Artificial Sequence: Synthetic oligonucleotide
  Antisense strand to SEQ ID NO: 1402896
uaaaucgcaccacuuccgc

SEQ ID NO: 1402898 - RNA, 19 nt, Artificial Sequence
  Description of Artificial Sequence: Synthetic oligonucleotide
  Sense strand starting at position 124 of SEQ ID NO: 1243230
aucguuuggcuccaggagu

SEQ ID NO: 1402899 - RNA, 19 nt, Artificial Sequence
  Description of Artificial Sequence: Synthetic oligonucleotide
  Antisense strand to SEQ ID NO: 1402898
acuccuggagccaaacgau

SEQ ID NO: 1402900 - RNA, 19 nt, Artificial Sequence
  Description of Artificial Sequence: Synthetic oligonucleotide
  Sense strand starting at position 216 of SEQ ID NO: 1243230
cccaauaucugaguguuuc

SEQ ID NO: 1402901 - RNA, 19 nt, Artificial Sequence
  Description of Artificial Sequence: Synthetic oligonucleotide
  Antisense strand to SEQ ID NO: 1402900
gaaacacucagauauuggg

SEQ ID NO: 1402902 - RNA, 19 nt, Artificial Sequence
  Description of Artificial Sequence: Synthetic oligonucleotide
  Sense strand starting at position 217 of SEQ ID NO: 1243230
ccaauaucugaguguuucu

SEQ ID NO: 1402903 - RNA, 19 nt, Artificial Sequence
  Description of Artificial Sequence: Synthetic oligonucleotide
  Antisense strand to SEQ ID NO: 1402902
agaaacacucagauauugg

SEQ ID NO: 1402904 - RNA, 19 nt, Artificial Sequence
  Description of Artificial Sequence: Synthetic oligonucleotide
  Sense strand starting at position 222 of SEQ ID NO: 1243230
aucugaguguuucuggguu

SEQ ID NO: 1402905 - RNA, 19 nt, Artificial Sequence
  Description of Artificial Sequence: Synthetic oligonucleotide
  Antisense strand to SEQ ID NO: 1402904
aacccagaaacacucagau

SEQ ID NO: 1402906 - RNA, 19 nt, Artificial Sequence
  Description of Artificial Sequence: Synthetic oligonucleotide
  Sense strand starting at position 226 of SEQ ID NO: 1243230
gaguguuucuggguuuauc

SEQ ID NO: 1402907 - RNA, 19 nt, Artificial Sequence
  Description of Artificial Sequence: Synthetic oligonucleotide
  Antisense strand to SEQ ID NO: 1402906
gauaaacccagaaacacuc

SEQ ID NO: 1402908 - RNA, 19 nt, Artificial Sequence
  Description of Artificial Sequence: Synthetic oligonucleotide
  Sense strand starting at position 240 of SEQ ID NO: 1243230
uuaucuggguucccugaga

SEQ ID NO: 1402909 - RNA, 19 nt, Artificial Sequence
  Description of Artificial Sequence: Synthetic oligonucleotide
  Antisense strand to SEQ ID NO: 1402908
ucucagggaacccagauaa

SEQ ID NO: 1402910 - RNA, 19 nt, Artificial Sequence
  Description of Artificial Sequence: Synthetic oligonucleotide
  Sense strand starting at position 245 of SEQ ID NO: 1243230
uggguucccugagaggaga

SEQ ID NO: 1402911 - RNA, 19 nt, Artificial Sequence
  Description of Artificial Sequence: Synthetic oligonucleotide
  Antisense strand to SEQ ID NO: 1402910
ucuccucucagggaaccca

SEQ ID NO: 1402912 - RNA, 19 nt, Artificial Sequence
  Description of Artificial Sequence: Synthetic oligonucleotide
  Sense strand starting at position 247 of SEQ ID NO: 1243230
gguucccugagaggagaua

SEQ ID NO: 1402913 - RNA, 19 nt, Artificial Sequence
  Description of Artificial Sequence: Synthetic oligonucleotide
  Antisense strand to SEQ ID NO: 1402912
uaucuccucucagggaacc

SEQ ID NO: 1402914 - RNA, 19 nt, Artificial Sequence
  Description of Artificial Sequence: Synthetic oligonucleotide
  Sense strand starting at position 489 of SEQ ID NO: 1243230
guggcuucugggugcuaga

SEQ ID NO: 1402915 - RNA, 19 nt, Artificial Sequence
  Description of Artificial Sequence: Synthetic oligonucleotide
  Antisense strand to SEQ ID NO: 1402914
ucuagcacccagaagccac

SEQ ID NO: 1402916 - RNA, 19 nt, Artificial Sequence
  Description of Artificial Sequence: Synthetic oligonucleotide
  Sense strand starting at position 597 of SEQ ID NO: 1243230
ugcggugucugucuuagau

SEQ ID NO: 1402917 - RNA, 19 nt, Artificial Sequence
  Description of Artificial Sequence: Synthetic oligonucleotide
  Antisense strand to SEQ ID NO: 1402916
aucuaagacagacaccgca

SEQ ID NO: 1402918 - RNA, 19 nt, Artificial Sequence
  Description of Artificial Sequence: Synthetic oligonucleotide
  Sense strand starting at position 599 of SEQ ID NO: 1243230
cggugucugucuuagauug

SEQ ID NO: 1402919 - RNA, 19 nt, Artificial Sequence
  Description of Artificial Sequence: Synthetic oligonucleotide
  Antisense strand to SEQ ID NO: 1402918
caaucuaagacagacaccg

SEQ ID NO: 1402920 - RNA, 19 nt, Artificial Sequence
  Description of Artificial Sequence: Synthetic oligonucleotide
  Sense strand starting at position 650 of SEQ ID NO: 1243230
uugugugcagguuauuuau

SEQ ID NO: 1402921 - RNA, 19 nt, Artificial Sequence
  Description of Artificial Sequence: Synthetic oligonucleotide
  Antisense strand to SEQ ID NO: 1402920
auaaauaaccugcacacaa

SEQ ID NO: 1402922 - RNA, 19 nt, Artificial Sequence
  Description of Artificial Sequence: Synthetic oligonucleotide
  Sense strand starting at position 1025 of SEQ ID NO: 1243230
gcuagagugcaguguauga

SEQ ID NO: 1402923 - RNA, 19 nt, Artificial Sequence
  Description of Artificial Sequence: Synthetic oligonucleotide
  Antisense strand to SEQ ID NO: 1402922
ucauacacugcacucuagc

SEQ ID NO: 1402924 - RNA, 19 nt, Artificial Sequence
  Description of Artificial Sequence: Synthetic oligonucleotide
  Sense strand starting at position 1035 of SEQ ID NO: 1243230
aguguaugaucucugugca

SEQ ID NO: 1402925 - RNA, 19 nt, Artificial Sequence
  Description of Artificial Sequence: Synthetic oligonucleotide
  Antisense strand to SEQ ID NO: 1402924
ugcacagagaucauacacu

SEQ ID NO: 1402926 - RNA, 19 nt, Artificial Sequence
  Description of Artificial Sequence: Synthetic oligonucleotide
  Sense strand starting at position 1036 of SEQ ID NO: 1243230
guguaugaucucugugcac

SEQ ID NO: 1402927 - RNA, 19 nt, Artificial Sequence
  Description of Artificial Sequence: Synthetic oligonucleotide
  Antisense strand to SEQ ID NO: 1402926
gugcacagagaucauacac

SEQ ID NO: 1402928 - RNA, 19 nt, Artificial Sequence
  Description of Artificial Sequence: Synthetic oligonucleotide
  Sense strand starting at position 1038 of SEQ ID NO: 1243230
guaugaucucugugcacug

SEQ ID NO: 1402929 - RNA, 19 nt, Artificial Sequence
  Description of Artificial Sequence: Synthetic oligonucleotide
  Antisense strand to SEQ ID NO: 1402928
cagugcacagagaucauac

SEQ ID NO: 1402930 - RNA, 19 nt, Artificial Sequence
  Description of Artificial Sequence: Synthetic oligonucleotide
  Sense strand starting at position 1281 of SEQ ID NO: 1243230
uugugugcagguuauugau

SEQ ID NO: 1402931 - RNA, 19 nt, Artificial Sequence
  Description of Artificial Sequence: Synthetic oligonucleotide
  Antisense strand to SEQ ID NO: 1402930
aucaauaaccugcacacaa

SEQ ID NO: 1402932 - RNA, 19 nt, Artificial Sequence
  Description of Artificial Sequence: Synthetic oligonucleotide
  Sense strand starting at position 1414 of SEQ ID NO: 1243230
ugaaguguaaguugcacaa

SEQ ID NO: 1402933 - RNA, 19 nt, Artificial Sequence
  Description of Artificial Sequence: Synthetic oligonucleotide
  Antisense strand to SEQ ID NO: 1402932
uugugcaacuuacacuuca

SEQ ID NO: 1402934 - RNA, 19 nt, Artificial Sequence
  Description of Artificial Sequence: Synthetic oligonucleotide
  Sense strand starting at position 1418 of SEQ ID NO: 1243230
guguaaguugcacaacuga

SEQ ID NO: 1402935 - RNA, 19 nt, Artificial Sequence
  Description of Artificial Sequence: Synthetic oligonucleotide
  Antisense strand to SEQ ID NO: 1402934
ucaguugugcaacuuacac

SEQ ID NO: 1402936 - RNA, 19 nt, Artificial Sequence
  Description of Artificial Sequence: Synthetic oligonucleotide
  Sense strand starting at position 1455 of SEQ ID NO: 1243230
cagagaagcugggcuauua

SEQ ID NO: 1402937 - RNA, 19 nt, Artificial Sequence
  Description of Artificial Sequence: Synthetic oligonucleotide
  Antisense strand to SEQ ID NO: 1402936
uaauagcccagcuucucug

SEQ ID NO: 1402938 - RNA, 19 nt, Artificial Sequence
  Description of Artificial Sequence: Synthetic oligonucleotide
  Sense strand starting at position 1578 of SEQ ID NO: 1243230
gcugcaaaguuucuccaga

SEQ ID NO: 1402939 - RNA, 19 nt, Artificial Sequence
  Description of Artificial Sequence: Synthetic oligonucleotide
  Antisense strand to SEQ ID NO: 1402938
ucuggagaaacuuugcagc

SEQ ID NO: 1402940 - RNA, 19 nt, Artificial Sequence
  Description of Artificial Sequence: Synthetic oligonucleotide
  Sense strand starting at position 1625 of SEQ ID NO: 1243230
ugcugucaauucccugauu

SEQ ID NO: 1402941 - RNA, 19 nt, Artificial Sequence
  Description of Artificial Sequence: Synthetic oligonucleotide
  Antisense strand to SEQ ID NO: 1402940
aaucagggaauugacagca

SEQ ID NO: 1402942 - RNA, 19 nt, Artificial Sequence
  Description of Artificial Sequence: Synthetic oligonucleotide
  Sense strand starting at position 1626 of SEQ ID NO: 1243230
gcugucaauucccugauuu

SEQ ID NO: 1402943 - RNA, 19 nt, Artificial Sequence
  Description of Artificial Sequence: Synthetic oligonucleotide
  Antisense strand to SEQ ID NO: 1402942
aaaucagggaauugacagc

SEQ ID NO: 1402944 - RNA, 19 nt, Artificial Sequence
  Description of Artificial Sequence: Synthetic oligonucleotide
  Sense strand starting at position 1677 of SEQ ID NO: 1243230
acaggcucugaauggaauu

SEQ ID NO: 1402945 - RNA, 19 nt, Artificial Sequence
  Description of Artificial Sequence: Synthetic oligonucleotide
  Antisense strand to SEQ ID NO: 1402944
aauuccauucagagccugu

SEQ ID NO: 1402946 - RNA, 19 nt, Artificial Sequence
  Description of Artificial Sequence: Synthetic oligonucleotide
  Sense strand starting at position 1851 of SEQ ID NO: 1243230
uggugacccugagcagaau

SEQ ID NO: 1402947 - RNA, 19 nt, Artificial Sequence
  Description of Artificial Sequence: Synthetic oligonucleotide
  Antisense strand to SEQ ID NO: 1402946
auucugcucagggucacca

SEQ ID NO: 1402948 - RNA, 19 nt, Artificial Sequence
  Description of Artificial Sequence: Synthetic oligonucleotide
  Sense strand starting at position 1955 of SEQ ID NO: 1243230
ugcuaucaucuggauguuu

SEQ ID NO: 1402949 - RNA, 19 nt, Artificial Sequence
  Description of Artificial Sequence: Synthetic oligonucleotide
  Antisense strand to SEQ ID NO: 1402948
aaacauccagaugauagca

SEQ ID NO: 1402950 - RNA, 19 nt, Artificial Sequence
  Description of Artificial Sequence: Synthetic oligonucleotide
  Sense strand starting at position 1957 of SEQ ID NO: 1243230
cuaucaucuggauguuugu

SEQ ID NO: 1402951 - RNA, 19 nt, Artificial Sequence
  Description of Artificial Sequence: Synthetic oligonucleotide
  Antisense strand to SEQ ID NO: 1402950
acaaacauccagaugauag

SEQ ID NO: 1402952 - RNA, 19 nt, Artificial Sequence
  Description of Artificial Sequence: Synthetic oligonucleotide
  Sense strand starting at position 2090 of SEQ ID NO: 1243230
gcgaguucuugcucuauua

SEQ ID NO: 1402953 - RNA, 19 nt, Artificial Sequence
  Description of Artificial Sequence: Synthetic oligonucleotide
  Antisense strand to SEQ ID NO: 1402952
uaauagagcaagaacucgc

SEQ ID NO: 1402954 - RNA, 19 nt, Artificial Sequence
  Description of Artificial Sequence: Synthetic oligonucleotide
  Sense strand starting at position 2529 of SEQ ID NO: 1243230
gauacagauguccagucuu

SEQ ID NO: 1402955 - RNA, 19 nt, Artificial Sequence
  Description of Artificial Sequence: Synthetic oligonucleotide
  Antisense strand to SEQ ID NO: 1402954
aagacuggacaucuguauc

SEQ ID NO: 1402956 - RNA, 19 nt, Artificial Sequence
  Description of Artificial Sequence: Synthetic oligonucleotide
  Sense strand starting at position 2535 of SEQ ID NO: 1243230
gauguccagucuuggauuu

SEQ ID NO: 1402957 - RNA, 19 nt, Artificial Sequence
  Description of Artificial Sequence: Synthetic oligonucleotide
  Antisense strand to SEQ ID NO: 1402956
aaauccaagacuggacauc

SEQ ID NO: 1402958 - RNA, 19 nt, Artificial Sequence
  Description of Artificial Sequence: Synthetic oligonucleotide
  Sense strand starting at position 3334 of SEQ ID NO: 1243230
cuucucaaguccuuugaga

SEQ ID NO: 1402959 - RNA, 19 nt, Artificial Sequence
  Description of Artificial Sequence: Synthetic oligonucleotide
  Antisense strand to SEQ ID NO: 1402958
ucucaaaggacuugagaag

SEQ ID NO: 1402960 - RNA, 19 nt, Artificial Sequence
  Description of Artificial Sequence: Synthetic oligonucleotide
  Sense strand starting at position 3336 of SEQ ID NO: 1243230
ucucaaguccuuugagagg

SEQ ID NO: 1402961 - RNA, 19 nt, Artificial Sequence
  Description of Artificial Sequence: Synthetic oligonucleotide
  Antisense strand to SEQ ID NO: 1402960
ccucucaaaggacuugaga

SEQ ID NO: 1402962 - RNA, 19 nt, Artificial Sequence
  Description of Artificial Sequence: Synthetic oligonucleotide
  Sense strand starting at position 3339 of SEQ ID NO: 1243230
caaguccuuugagagggua

SEQ ID NO: 1402963 - RNA, 19 nt, Artificial Sequence
  Description of Artificial Sequence: Synthetic oligonucleotide
  Antisense strand to SEQ ID NO: 1402962
uacccucucaaaggacuug

SEQ ID NO: 1402964 - RNA, 19 nt, Artificial Sequence
  Description of Artificial Sequence: Synthetic oligonucleotide
  Sense strand starting at position 3448 of SEQ ID NO: 1243230
ugagucauggccugacuga

SEQ ID NO: 1402965 - RNA, 19 nt, Artificial Sequence
  Description of Artificial Sequence: Synthetic oligonucleotide
  Antisense strand to SEQ ID NO: 1402964
ucagucaggccaugacuca

SEQ ID NO: 1402966 - RNA, 19 nt, Artificial Sequence
  Description of Artificial Sequence: Synthetic oligonucleotide
  Sense strand starting at position 3449 of SEQ ID NO: 1243230
gagucauggccugacugaa

SEQ ID NO: 1402967 - RNA, 19 nt, Artificial Sequence
  Description of Artificial Sequence: Synthetic oligonucleotide
  Antisense strand to SEQ ID NO: 1402966
uucagucaggccaugacuc

SEQ ID NO: 1402968 - RNA, 19 nt, Artificial Sequence
  Description of Artificial Sequence: Synthetic oligonucleotide
  Sense strand starting at position 3541 of SEQ ID NO: 1243230
cuguccuugucacuuauga

SEQ ID NO: 1402969 - RNA, 19 nt, Artificial Sequence
  Description of Artificial Sequence: Synthetic oligonucleotide
  Antisense strand to SEQ ID NO: 1402968
ucauaagugacaaggacag

SEQ ID NO: 1402970 - RNA, 19 nt, Artificial Sequence
  Description of Artificial Sequence: Synthetic oligonucleotide
  Sense strand starting at position 3567 of SEQ ID NO: 1243230
ccuugugugcaucacuuaa

SEQ ID NO: 1402971 - RNA, 19 nt, Artificial Sequence
  Description of Artificial Sequence: Synthetic oligonucleotide
  Antisense strand to SEQ ID NO: 1402970
uuaagugaugcacacaagg

SEQ ID NO: 1402972 - RNA, 19 nt, Artificial Sequence
  Description of Artificial Sequence: Synthetic oligonucleotide
  Sense strand starting at position 3569 of SEQ ID NO: 1243230
uugugugcaucacuuaaac

SEQ ID NO: 1402973 - RNA, 19 nt, Artificial Sequence
  Description of Artificial Sequence: Synthetic oligonucleotide
  Antisense strand to SEQ ID NO: 1402972
guuuaagugaugcacacaa

SEQ ID NO: 1402974 - RNA, 19 nt, Artificial Sequence
  Description of Artificial Sequence: Synthetic oligonucleotide
  Sense strand starting at position 3952 of SEQ ID NO: 1243230
cuagauaauuucugugauu

SEQ ID NO: 1402975 - RNA, 19 nt, Artificial Sequence
  Description of Artificial Sequence: Synthetic oligonucleotide
  Antisense strand to SEQ ID NO: 1402974
aaucacagaaauuaucuag

SEQ ID NO: 1402976 - RNA, 19 nt, Artificial Sequence
  Description of Artificial Sequence: Synthetic oligonucleotide
  Sense strand starting at position 18 of SEQ ID NO: 1243231
uggugucaccaauacaauu

SEQ ID NO: 1402977 - RNA, 19 nt, Artificial Sequence
  Description of Artificial Sequence: Synthetic oligonucleotide
  Antisense strand to SEQ ID NO: 1402976
aauuguauuggugacacca

SEQ ID NO: 1402978 - RNA, 19 nt, Artificial Sequence
  Description of Artificial Sequence: Synthetic oligonucleotide
  Sense strand starting at position 145 of SEQ ID NO: 1243231
gcuaaucagcaucaugaaa

SEQ ID NO: 1402979 - RNA, 19 nt, Artificial Sequence
  Description of Artificial Sequence: Synthetic oligonucleotide
  Antisense strand to SEQ ID NO: 1402978
uuucaugaugcugauuagc

SEQ ID NO: 1402980 - RNA, 19 nt, Artificial Sequence
  Description of Artificial Sequence: Synthetic oligonucleotide
  Sense strand starting at position 176 of SEQ ID NO: 1243231
guaucaucccauggucuaa

SEQ ID NO: 1402981 - RNA, 19 nt, Artificial Sequence
  Description of Artificial Sequence: Synthetic oligonucleotide
  Antisense strand to SEQ ID NO: 1402980
uuagaccaugggaugauac

SEQ ID NO: 1402982 - RNA, 19 nt, Artificial Sequence
  Description of Artificial Sequence: Synthetic oligonucleotide
  Sense strand starting at position 342 of SEQ ID NO: 1243231
augagauccgaaugaaguu

SEQ ID NO: 1402983 - RNA, 19 nt, Artificial Sequence
  Description of Artificial Sequence: Synthetic oligonucleotide
  Antisense strand to SEQ ID NO: 1402982
aacuucauucggaucucau

SEQ ID NO: 1402984 - RNA, 19 nt, Artificial Sequence
  Description of Artificial Sequence: Synthetic oligonucleotide
  Sense strand starting at position 874 of SEQ ID NO: 1243231
auauguguuccuuaccaca

SEQ ID NO: 1402985 - RNA, 19 nt, Artificial Sequence
  Description of Artificial Sequence: Synthetic oligonucleotide
  Antisense strand to SEQ ID NO: 1402984
ugugguaaggaacacauau

SEQ ID NO: 1402986 - RNA, 19 nt, Artificial Sequence
  Description of Artificial Sequence: Synthetic oligonucleotide
  Sense strand starting at position 876 of SEQ ID NO: 1243231
auguguuccuuaccacaag

SEQ ID NO: 1402987 - RNA, 19 nt, Artificial Sequence
  Description of Artificial Sequence: Synthetic oligonucleotide
  Antisense strand to SEQ ID NO: 1402986
cuugugguaaggaacacau

SEQ ID NO: 1402988 - RNA, 19 nt, Artificial Sequence
  Description of Artificial Sequence: Synthetic oligonucleotide
  Sense strand starting at position 903 of SEQ ID NO: 1243231
uuacuuuaucuacacguua

SEQ ID NO: 1402989 - RNA, 19 nt, Artificial Sequence
  Description of Artificial Sequence: Synthetic oligonucleotide
  Antisense strand to SEQ ID NO: 1402988
uaacguguagauaaaguaa

SEQ ID NO: 1402990 - RNA, 19 nt, Artificial Sequence
  Description of Artificial Sequence: Synthetic oligonucleotide
  Sense strand starting at position 908 of SEQ ID NO: 1243231
uuaucuacacguuaaugaa

SEQ ID NO: 1402991 - RNA, 19 nt, Artificial Sequence
  Description of Artificial Sequence: Synthetic oligonucleotide
  Antisense strand to SEQ ID NO: 1402990
uucauuaacguguagauaa

SEQ ID NO: 1402992 - RNA, 19 nt, Artificial Sequence
  Description of Artificial Sequence: Synthetic oligonucleotide
  Sense strand starting at position 940 of SEQ ID NO: 1243231
auauaauaauggcuuggau

SEQ ID NO: 1402993 - RNA, 19 nt, Artificial Sequence
  Description of Artificial Sequence: Synthetic oligonucleotide
  Antisense strand to SEQ ID NO: 1402992
auccaagccauuauuauau

SEQ ID NO: 1402994 - RNA, 19 nt, Artificial Sequence
  Description of Artificial Sequence: Synthetic oligonucleotide
  Sense strand starting at position 975 of SEQ ID NO: 1243231
aagauuauggugcauaacu

SEQ ID NO: 1402995 - RNA, 19 nt, Artificial Sequence
  Description of Artificial Sequence: Synthetic oligonucleotide
  Antisense strand to SEQ ID NO: 1402994
aguuaugcaccauaaucuu

SEQ ID NO: 1402996 - RNA, 19 nt, Artificial Sequence
  Description of Artificial Sequence: Synthetic oligonucleotide
  Sense strand starting at position 977 of SEQ ID NO: 1243231
gauuauggugcauaacuuu

SEQ ID NO: 1402997 - RNA, 19 nt, Artificial Sequence
  Description of Artificial Sequence: Synthetic oligonucleotide
  Antisense strand to SEQ ID NO: 1402996
aaaguuaugcaccauaauc

SEQ ID NO: 1402998 - RNA, 19 nt, Artificial Sequence
  Description of Artificial Sequence: Synthetic oligonucleotide
  Sense strand starting at position 1340 of SEQ ID NO: 1243231
gguagauacucuuccucuu

SEQ ID NO: 1402999 - RNA, 19 nt, Artificial Sequence
  Description of Artificial Sequence: Synthetic oligonucleotide
  Antisense strand to SEQ ID NO: 1402998
aagaggaagaguaucuacc

SEQ ID NO: 1403000 - RNA, 19 nt, Artificial Sequence
  Description of Artificial Sequence: Synthetic oligonucleotide
  Sense strand starting at position 1343 of SEQ ID NO: 1243231
agauacucuuccucuuagu

SEQ ID NO: 1403001 - RNA, 19 nt, Artificial Sequence
  Description of Artificial Sequence: Synthetic oligonucleotide
  Antisense strand to SEQ ID NO: 1403000
acuaagaggaagaguaucu

SEQ ID NO: 1403002 - RNA, 19 nt, Artificial Sequence
  Description of Artificial Sequence: Synthetic oligonucleotide
  Sense strand starting at position 1426 of SEQ ID NO: 1243231
caaaguuucugucuuugga

SEQ ID NO: 1403003 - RNA, 19 nt, Artificial Sequence
  Description of Artificial Sequence: Synthetic oligonucleotide
  Antisense strand to SEQ ID NO: 1403002
uccaaagacagaaacuuug

SEQ ID NO: 1403004 - RNA, 19 nt, Artificial Sequence
  Description of Artificial Sequence: Synthetic oligonucleotide
  Sense strand starting at position 1473 of SEQ ID NO: 1243231
cagguaaguuaacuuuaga

SEQ ID NO: 1403005 - RNA, 19 nt, Artificial Sequence
  Description of Artificial Sequence: Synthetic oligonucleotide
  Antisense strand to SEQ ID NO: 1403004
ucuaaaguuaacuuaccug

SEQ ID NO: 1403006 - RNA, 19 nt, Artificial Sequence
  Description of Artificial Sequence: Synthetic oligonucleotide
  Sense strand starting at position 1567 of SEQ ID NO: 1243231
gaggaaagaugguaaugaa

SEQ ID NO: 1403007 - RNA, 19 nt, Artificial Sequence
  Description of Artificial Sequence: Synthetic oligonucleotide
  Antisense strand to SEQ ID NO: 1403006
uucauuaccaucuuuccuc

SEQ ID NO: 1403008 - RNA, 19 nt, Artificial Sequence
  Description of Artificial Sequence: Synthetic oligonucleotide
  Sense strand starting at position 1583 of SEQ ID NO: 1243231
gaaguaaagugacugguuu

SEQ ID NO: 1403009 - RNA, 19 nt, Artificial Sequence
  Description of Artificial Sequence: Synthetic oligonucleotide
  Antisense strand to SEQ ID NO: 1403008
aaaccagucacuuuacuuc

SEQ ID NO: 1403010 - RNA, 19 nt, Artificial Sequence
  Description of Artificial Sequence: Synthetic oligonucleotide
  Sense strand starting at position 1695 of SEQ ID NO: 1243231
cagggucuuaccuggguau

SEQ ID NO: 1403011 - RNA, 19 nt, Artificial Sequence
  Description of Artificial Sequence: Synthetic oligonucleotide
  Antisense strand to SEQ ID NO: 1403010
auacccagguaagacccug

SEQ ID NO: 1403012 - RNA, 19 nt, Artificial Sequence
  Description of Artificial Sequence: Synthetic oligonucleotide
  Sense strand starting at position 1696 of SEQ ID NO: 1243231
agggucuuaccuggguauu

SEQ ID NO: 1403013 - RNA, 19 nt, Artificial Sequence
  Description of Artificial Sequence: Synthetic oligonucleotide
  Antisense strand to SEQ ID NO: 1403012
aauacccagguaagacccu

SEQ ID NO: 1403014 - RNA, 19 nt, Artificial Sequence
  Description of Artificial Sequence: Synthetic oligonucleotide
  Sense strand starting at position 1708 of SEQ ID NO: 1243231
ggguauuuguugucuugau

SEQ ID NO: 1403015 - RNA, 19 nt, Artificial Sequence
  Description of Artificial Sequence: Synthetic oligonucleotide
  Antisense strand to SEQ ID NO: 1403014
aucaagacaacaaauaccc

SEQ ID NO: 1403016 - RNA, 19 nt, Artificial Sequence
  Description of Artificial Sequence: Synthetic oligonucleotide
  Sense strand starting at position 1709 of SEQ ID NO: 1243231
gguauuuguugucuugaug

SEQ ID NO: 1403017 - RNA, 19 nt, Artificial Sequence
  Description of Artificial Sequence: Synthetic oligonucleotide
  Antisense strand to SEQ ID NO: 1403016
caucaagacaacaaauacc

SEQ ID NO: 1403018 - RNA, 19 nt, Artificial Sequence
  Description of Artificial Sequence: Synthetic oligonucleotide
  Sense strand starting at position 1712 of SEQ ID NO: 1243231
auuuguugucuugaugcuu

SEQ ID NO: 1403019 - RNA, 19 nt, Artificial Sequence
  Description of Artificial Sequence: Synthetic oligonucleotide
  Antisense strand to SEQ ID NO: 1403018
aagcaucaagacaacaaau

SEQ ID NO: 1403020 - RNA, 19 nt, Artificial Sequence
  Description of Artificial Sequence: Synthetic oligonucleotide
  Sense strand starting at position 1781 of SEQ ID NO: 1243231
gauagucccggaugagauc

SEQ ID NO: 1403021 - RNA, 19 nt, Artificial Sequence
  Description of Artificial Sequence: Synthetic oligonucleotide
  Antisense strand to SEQ ID NO: 1403020
gaucucauccgggacuauc

SEQ ID NO: 1403022 - RNA, 19 nt, Artificial Sequence
  Description of Artificial Sequence: Synthetic oligonucleotide
  Sense strand starting at position 1828 of SEQ ID NO: 1243231
aggaauccucucugcacau

SEQ ID NO: 1403023 - RNA, 19 nt, Artificial Sequence
  Description of Artificial Sequence: Synthetic oligonucleotide
  Antisense strand to SEQ ID NO: 1403022
augugcagagaggauuccu

SEQ ID NO: 1403024 - RNA, 19 nt, Artificial Sequence
  Description of Artificial Sequence: Synthetic oligonucleotide
  Sense strand starting at position 1864 of SEQ ID NO: 1243231
uccucaaagcugcauugaa

SEQ ID NO: 1403025 - RNA, 19 nt, Artificial Sequence
  Description of Artificial Sequence: Synthetic oligonucleotide
  Antisense strand to SEQ ID NO: 1403024
uucaaugcagcuuugagga

SEQ ID NO: 1403026 - RNA, 19 nt, Artificial Sequence
  Description of Artificial Sequence: Synthetic oligonucleotide
  Sense strand starting at position 1956 of SEQ ID NO: 1243231
uguucugauguauaaccaa

SEQ ID NO: 1403027 - RNA, 19 nt, Artificial Sequence
  Description of Artificial Sequence: Synthetic oligonucleotide
  Antisense strand to SEQ ID NO: 1403026
uugguuauacaucagaaca

SEQ ID NO: 1403028 - RNA, 19 nt, Artificial Sequence
  Description of Artificial Sequence: Synthetic oligonucleotide
  Sense strand starting at position 1979 of SEQ ID NO: 1243231
agcuuccuccuuugaagaa

SEQ ID NO: 1403029 - RNA, 19 nt, Artificial Sequence
  Description of Artificial Sequence: Synthetic oligonucleotide
  Antisense strand to SEQ ID NO: 1403028
uucuucaaaggaggaagcu

SEQ ID NO: 1403030 - RNA, 19 nt, Artificial Sequence
  Description of Artificial Sequence: Synthetic oligonucleotide
  Sense strand starting at position 2245 of SEQ ID NO: 1243231
cgaauaugccuuuagcaaa

SEQ ID NO: 1403031 - RNA, 19 nt, Artificial Sequence
  Description of Artificial Sequence: Synthetic oligonucleotide
  Antisense strand to SEQ ID NO: 1403030
uuugcuaaaggcauauucg

SEQ ID NO: 1403032 - RNA, 19 nt, Artificial Sequence
  Description of Artificial Sequence: Synthetic oligonucleotide
  Sense strand starting at position 2259 of SEQ ID NO: 1243231
gcaaauagagaucgauuau

SEQ ID NO: 1403033 - RNA, 19 nt, Artificial Sequence
  Description of Artificial Sequence: Synthetic oligonucleotide
  Antisense strand to SEQ ID NO: 1403032
auaaucgaucucuauuugc

SEQ ID NO: 1403034 - RNA, 19 nt, Artificial Sequence
  Description of Artificial Sequence: Synthetic oligonucleotide
  Sense strand starting at position 2272 of SEQ ID NO: 1243231
gauuauaaagcugagucua

SEQ ID NO: 1403035 - RNA, 19 nt, Artificial Sequence
  Description of Artificial Sequence: Synthetic oligonucleotide
  Antisense strand to SEQ ID NO: 1403034
uagacucagcuuuauaauc

SEQ ID NO: 1403036 - RNA, 19 nt, Artificial Sequence
  Description of Artificial Sequence: Synthetic oligonucleotide
  Sense strand starting at position 3012 of SEQ ID NO: 1243231
gcaugaugucaugggauac

SEQ ID NO: 1403037 - RNA, 19 nt, Artificial Sequence
  Description of Artificial Sequence: Synthetic oligonucleotide
  Antisense strand to SEQ ID NO: 1403036
guaucccaugacaucaugc

SEQ ID NO: 1403038 - RNA, 19 nt, Artificial Sequence
  Description of Artificial Sequence: Synthetic oligonucleotide
  Sense strand starting at position 3040 of SEQ ID NO: 1243231
uuaagaagguuacuauagu

SEQ ID NO: 1403039 - RNA, 19 nt, Artificial Sequence
  Description of Artificial Sequence: Synthetic oligonucleotide
  Antisense strand to SEQ ID NO: 1403038
acuauaguaaccuucuuaa

SEQ ID NO: 1403040 - RNA, 19 nt, Artificial Sequence
  Description of Artificial Sequence: Synthetic oligonucleotide
  Sense strand starting at position 3143 of SEQ ID NO: 1243231
augaauccugucuacugua

SEQ ID NO: 1403041 - RNA, 19 nt, Artificial Sequence
  Description of Artificial Sequence: Synthetic oligonucleotide
  Antisense strand to SEQ ID NO: 1403040
uacaguagacaggauucau

SEQ ID NO: 1403042 - RNA, 19 nt, Artificial Sequence
  Description of Artificial Sequence: Synthetic oligonucleotide
  Sense strand starting at position 3762 of SEQ ID NO: 1243231
auccaucacguguauuaca

SEQ ID NO: 1403043 - RNA, 19 nt, Artificial Sequence
  Description of Artificial Sequence: Synthetic oligonucleotide
  Antisense strand to SEQ ID NO: 1403042
uguaauacacgugauggau

SEQ ID NO: 1403044 - RNA, 19 nt, Artificial Sequence
  Description of Artificial Sequence: Synthetic oligonucleotide
  Sense strand starting at position 3769 of SEQ ID NO: 1243231
acguguauuacagcucguu

SEQ ID NO: 1403045 - RNA, 19 nt, Artificial Sequence
  Description of Artificial Sequence: Synthetic oligonucleotide
  Antisense strand to SEQ ID NO: 1403044
aacgagcuguaauacacgu

SEQ ID NO: 1403046 - RNA, 19 nt, Artificial Sequence
  Description of Artificial Sequence: Synthetic oligonucleotide
  Sense strand starting at position 3771 of SEQ ID NO: 1243231
guguauuacagcucguucu

SEQ ID NO: 1403047 - RNA, 19 nt, Artificial Sequence
  Description of Artificial Sequence: Synthetic oligonucleotide
  Antisense strand to SEQ ID NO: 1403046
agaacgagcuguaauacac

SEQ ID NO: 1403048 - RNA, 19 nt, Artificial Sequence
  Description of Artificial Sequence: Synthetic oligonucleotide
  Sense strand starting at position 3857 of SEQ ID NO: 1243231
ggguuaagaugguuaucca

SEQ ID NO: 1403049 - RNA, 19 nt, Artificial Sequence
  Description of Artificial Sequence: Synthetic oligonucleotide
  Antisense strand to SEQ ID NO: 1403048
uggauaaccaucuuaaccc

SEQ ID NO: 1403050 - RNA, 19 nt, Artificial Sequence
  Description of Artificial Sequence: Synthetic oligonucleotide
  Sense strand starting at position 3858 of SEQ ID NO: 1243231
gguuaagaugguuauccag

SEQ ID NO: 1403051 - RNA, 19 nt, Artificial Sequence
  Description of Artificial Sequence: Synthetic oligonucleotide
  Antisense strand to SEQ ID NO: 1403050
cuggauaaccaucuuaacc

SEQ ID NO: 1403052 - RNA, 19 nt, Artificial Sequence
  Description of Artificial Sequence: Synthetic oligonucleotide
  Sense strand starting at position 3864 of SEQ ID NO: 1243231
gaugguuauccagauaguc

SEQ ID NO: 1403053 - RNA, 19 nt, Artificial Sequence
  Description of Artificial Sequence: Synthetic oligonucleotide
  Antisense strand to SEQ ID NO: 1403052
gacuaucuggauaaccauc

SEQ ID NO: 1403054 - RNA, 19 nt, Artificial Sequence
  Description of Artificial Sequence: Synthetic oligonucleotide
  Sense strand starting at position 3882 of SEQ ID NO: 1243231
ccaaaugaugcuuauguua

SEQ ID NO: 1403055 - RNA, 19 nt, Artificial Sequence
  Description of Artificial Sequence: Synthetic oligonucleotide
  Antisense strand to SEQ ID NO: 1403054
uaacauaagcaucauuugg

SEQ ID NO: 1403056 - RNA, 19 nt, Artificial Sequence
  Description of Artificial Sequence: Synthetic oligonucleotide
  Sense strand starting at position 228 of SEQ ID NO: 1243232
auuggauuggaccguggaa

SEQ ID NO: 1403057 - RNA, 19 nt, Artificial Sequence
  Description of Artificial Sequence: Synthetic oligonucleotide
  Antisense strand to SEQ ID NO: 1403056
uuccacgguccaauccaau

SEQ ID NO: 1403058 - RNA, 19 nt, Artificial Sequence
  Description of Artificial Sequence: Synthetic oligonucleotide
  Sense strand starting at position 259 of SEQ ID NO: 1243232
caagguauuguuuguuugu

SEQ ID NO: 1403059 - RNA, 19 nt, Artificial Sequence
  Description of Artificial Sequence: Synthetic oligonucleotide
  Antisense strand to SEQ ID NO: 1403058
acaaacaaacaauaccuug

SEQ ID NO: 1403060 - RNA, 19 nt, Artificial Sequence
  Description of Artificial Sequence: Synthetic oligonucleotide
  Sense strand starting at position 260 of SEQ ID NO: 1243232
aagguauuguuuguuuguu

SEQ ID NO: 1403061 - RNA, 19 nt, Artificial Sequence
  Description of Artificial Sequence: Synthetic oligonucleotide
  Antisense strand to SEQ ID NO: 1403060
aacaaacaaacaauaccuu

SEQ ID NO: 1403062 - RNA, 19 nt, Artificial Sequence
  Description of Artificial Sequence: Synthetic oligonucleotide
  Sense strand starting at position 415 of SEQ ID NO: 1243232
gugccaacacacuagaaua

SEQ ID NO: 1403063 - RNA, 19 nt, Artificial Sequence
  Description of Artificial Sequence: Synthetic oligonucleotide
  Antisense strand to SEQ ID NO: 1403062
uauucuaguguguuggcac

SEQ ID NO: 1403064 - RNA, 19 nt, Artificial Sequence
  Description of Artificial Sequence: Synthetic oligonucleotide
  Sense strand starting at position 905 of SEQ ID NO: 1243232
ccuccaucuuguggagacu

SEQ ID NO: 1403065 - RNA, 19 nt, Artificial Sequence
  Description of Artificial Sequence: Synthetic oligonucleotide
  Antisense strand to SEQ ID NO: 1403064
agucuccacaagauggagg

SEQ ID NO: 1403066 - RNA, 19 nt, Artificial Sequence
  Description of Artificial Sequence: Synthetic oligonucleotide
  Sense strand starting at position 917 of SEQ ID NO: 1243232
ggagacucuuccucugacu

SEQ ID NO: 1403067 - RNA, 19 nt, Artificial Sequence
  Description of Artificial Sequence: Synthetic oligonucleotide
  Antisense strand to SEQ ID NO: 1403066
agucagaggaagagucucc

SEQ ID NO: 1403068 - RNA, 19 nt, Artificial Sequence
  Description of Artificial Sequence: Synthetic oligonucleotide
  Sense strand starting at position 999 of SEQ ID NO: 1243232
ggaggucacuggucacaag

SEQ ID NO: 1403069 - RNA, 19 nt, Artificial Sequence
  Description of Artificial Sequence: Synthetic oligonucleotide
  Antisense strand to SEQ ID NO: 1403068
cuugugaccagugaccucc

SEQ ID NO: 1403070 - RNA, 19 nt, Artificial Sequence
  Description of Artificial Sequence: Synthetic oligonucleotide
  Sense strand starting at position 1187 of SEQ ID NO: 1243232
cagggugucccugagcuaa

SEQ ID NO: 1403071 - RNA, 19 nt, Artificial Sequence
  Description of Artificial Sequence: Synthetic oligonucleotide
  Antisense strand to SEQ ID NO: 1403070
uuagcucagggacacccug

SEQ ID NO: 1403072 - RNA, 19 nt, Artificial Sequence
  Description of Artificial Sequence: Synthetic oligonucleotide
  Sense strand starting at position 1395 of SEQ ID NO: 1243232
gggcugucacgagggaaga

SEQ ID NO: 1403073 - RNA, 19 nt, Artificial Sequence
  Description of Artificial Sequence: Synthetic oligonucleotide
  Antisense strand to SEQ ID NO: 1403072
ucuucccucgugacagccc

SEQ ID NO: 1403074 - RNA, 19 nt, Artificial Sequence
  Description of Artificial Sequence: Synthetic oligonucleotide
  Sense strand starting at position 2198 of SEQ ID NO: 1243232
cguaguguuuggguccaua

SEQ ID NO: 1403075 - RNA, 19 nt, Artificial Sequence
  Description of Artificial Sequence: Synthetic oligonucleotide
  Antisense strand to SEQ ID NO: 1403074
uauggacccaaacacuacg

SEQ ID NO: 1403076 - RNA, 19 nt, Artificial Sequence
  Description of Artificial Sequence: Synthetic oligonucleotide
  Sense strand starting at position 2258 of SEQ ID NO: 1243232
aggguuacuccggguagga

SEQ ID NO: 1403077 - RNA, 19 nt, Artificial Sequence
  Description of Artificial Sequence: Synthetic oligonucleotide
  Antisense strand to SEQ ID NO: 1403076
uccuacccggaguaacccu

SEQ ID NO: 1403078 - RNA, 19 nt, Artificial Sequence
  Description of Artificial Sequence: Synthetic oligonucleotide
  Sense strand starting at position 2421 of SEQ ID NO: 1243232
ccaggaagcucuccagaua

SEQ ID NO: 1403079 - RNA, 19 nt, Artificial Sequence
  Description of Artificial Sequence: Synthetic oligonucleotide
  Antisense strand to SEQ ID NO: 1403078
uaucuggagagcuuccugg

SEQ ID NO: 1403080 - RNA, 19 nt, Artificial Sequence
  Description of Artificial Sequence: Synthetic oligonucleotide
  Sense strand starting at position 2600 of SEQ ID NO: 1243232
ccgaguaugugagaucaca

SEQ ID NO: 1403081 - RNA, 19 nt, Artificial Sequence
  Description of Artificial Sequence: Synthetic oligonucleotide
  Antisense strand to SEQ ID NO: 1403080
ugugaucucacauacucgg

SEQ ID NO: 1403082 - RNA, 19 nt, Artificial Sequence
  Description of Artificial Sequence: Synthetic oligonucleotide
  Sense strand starting at position 2928 of SEQ ID NO: 1243232
ccgcgauuggccgcaggau

SEQ ID NO: 1403083 - RNA, 19 nt, Artificial Sequence
  Description of Artificial Sequence: Synthetic oligonucleotide
  Antisense strand to SEQ ID NO: 1403082
auccugcggccaaucgcgg

SEQ ID NO: 1403084 - RNA, 19 nt, Artificial Sequence
  Description of Artificial Sequence: Synthetic oligonucleotide
  Sense strand starting at position 2994 of SEQ ID NO: 1243232
auucucugaguuugagacu

SEQ ID NO: 1403085 - RNA, 19 nt, Artificial Sequence
  Description of Artificial Sequence: Synthetic oligonucleotide
  Antisense strand to SEQ ID NO: 1403084
agucucaaacucagagaau

SEQ ID NO: 1403086 - RNA, 19 nt, Artificial Sequence
  Description of Artificial Sequence: Synthetic oligonucleotide
  Sense strand starting at position 2995 of SEQ ID NO: 1243232
uucucugaguuugagacuu

SEQ ID NO: 1403087 - RNA, 19 nt, Artificial Sequence
  Description of Artificial Sequence: Synthetic oligonucleotide
  Antisense strand to SEQ ID NO: 1403086
aagucucaaacucagagaa

SEQ ID NO: 1403088 - RNA, 19 nt, Artificial Sequence
  Description of Artificial Sequence: Synthetic oligonucleotide
  Sense strand starting at position 3003 of SEQ ID NO: 1243232
guuugagacuugcucucag

SEQ ID NO: 1403089 - RNA, 19 nt, Artificial Sequence
  Description of Artificial Sequence: Synthetic oligonucleotide
  Antisense strand to SEQ ID NO: 1403088
cugagagcaagucucaaac

SEQ ID NO: 1403090 - RNA, 19 nt, Artificial Sequence
  Description of Artificial Sequence: Synthetic oligonucleotide
  Sense strand starting at position 3007 of SEQ ID NO: 1243232
gagacuugcucucagcuca

SEQ ID NO: 1403091 - RNA, 19 nt, Artificial Sequence
  Description of Artificial Sequence: Synthetic oligonucleotide
  Antisense strand to SEQ ID NO: 1403090
ugagcugagagcaagucuc

SEQ ID NO: 1403092 - RNA, 19 nt, Artificial Sequence
  Description of Artificial Sequence: Synthetic oligonucleotide
  Sense strand starting at position 3047 of SEQ ID NO: 1243232
gcugaacgaccuugggaau

SEQ ID NO: 1403093 - RNA, 19 nt, Artificial Sequence
  Description of Artificial Sequence: Synthetic oligonucleotide
  Antisense strand to SEQ ID NO: 1403092
auucccaaggucguucagc

SEQ ID NO: 1403094 - RNA, 19 nt, Artificial Sequence
  Description of Artificial Sequence: Synthetic oligonucleotide
  Sense strand starting at position 3075 of SEQ ID NO: 1243232
cuuucugagcuucggauua

SEQ ID NO: 1403095 - RNA, 19 nt, Artificial Sequence
  Description of Artificial Sequence: Synthetic oligonucleotide
  Antisense strand to SEQ ID NO: 1403094
uaauccgaagcucagaaag

SEQ ID NO: 1403096 - RNA, 19 nt, Artificial Sequence
  Description of Artificial Sequence: Synthetic oligonucleotide
  Sense strand starting at position 3088 of SEQ ID NO: 1243232
ggauuagucuccucuccug

SEQ ID NO: 1403097 - RNA, 19 nt, Artificial Sequence
  Description of Artificial Sequence: Synthetic oligonucleotide
  Antisense strand to SEQ ID NO: 1403096
caggagaggagacuaaucc

SEQ ID NO: 1403098 - RNA, 19 nt, Artificial Sequence
  Description of Artificial Sequence: Synthetic oligonucleotide
  Sense strand starting at position 3173 of SEQ ID NO: 1243232
gcaagucgggcuagggauu

SEQ ID NO: 1403099 - RNA, 19 nt, Artificial Sequence
  Description of Artificial Sequence: Synthetic oligonucleotide
  Antisense strand to SEQ ID NO: 1403098
aaucccuagcccgacuugc

SEQ ID NO: 1403100 - RNA, 19 nt, Artificial Sequence
  Description of Artificial Sequence: Synthetic oligonucleotide
  Sense strand starting at position 3211 of SEQ ID NO: 1243232
ggcucuuuaucuguuuaac

SEQ ID NO: 1403101 - RNA, 19 nt, Artificial Sequence
  Description of Artificial Sequence: Synthetic oligonucleotide
  Antisense strand to SEQ ID NO: 1403100
guuaaacagauaaagagcc

SEQ ID NO: 1403102 - RNA, 19 nt, Artificial Sequence
  Description of Artificial Sequence: Synthetic oligonucleotide
  Sense strand starting at position 3310 of SEQ ID NO: 1243232
uugcuauugcccugaucuc

SEQ ID NO: 1403103 - RNA, 19 nt, Artificial Sequence
  Description of Artificial Sequence: Synthetic oligonucleotide
  Antisense strand to SEQ ID NO: 1403102
gagaucagggcaauagcaa

SEQ ID NO: 1403104 - RNA, 19 nt, Artificial Sequence
  Description of Artificial Sequence: Synthetic oligonucleotide
  Sense strand starting at position 3324 of SEQ ID NO: 1243232
aucucuguccgauguucua

SEQ ID NO: 1403105 - RNA, 19 nt, Artificial Sequence
  Description of Artificial Sequence: Synthetic oligonucleotide
  Antisense strand to SEQ ID NO: 1403104
uagaacaucggacagagau

SEQ ID NO: 1403106 - RNA, 19 nt, Artificial Sequence
  Description of Artificial Sequence: Synthetic oligonucleotide
  Sense strand starting at position 3351 of SEQ ID NO: 1243232
uugugaguuuacuuguuga

SEQ ID NO: 1403107 - RNA, 19 nt, Artificial Sequence
  Description of Artificial Sequence: Synthetic oligonucleotide
  Antisense strand to SEQ ID NO: 1403106
ucaacaaguaaacucacaa

SEQ ID NO: 1403108 - RNA, 19 nt, Artificial Sequence
  Description of Artificial Sequence: Synthetic oligonucleotide
  Sense strand starting at position 3354 of SEQ ID NO: 1243232
ugaguuuacuuguugacua

SEQ ID NO: 1403109 - RNA, 19 nt, Artificial Sequence
  Description of Artificial Sequence: Synthetic oligonucleotide
  Antisense strand to SEQ ID NO: 1403108
uagucaacaaguaaacuca

SEQ ID NO: 1403110 - RNA, 19 nt, Artificial Sequence
  Description of Artificial Sequence: Synthetic oligonucleotide
  Sense strand starting at position 3355 of SEQ ID NO: 1243232
gaguuuacuuguugacuac

SEQ ID NO: 1403111 - RNA, 19 nt, Artificial Sequence
  Description of Artificial Sequence: Synthetic oligonucleotide
  Antisense strand to SEQ ID NO: 1403110
guagucaacaaguaaacuc

SEQ ID NO: 1403112 - RNA, 19 nt, Artificial Sequence
  Description of Artificial Sequence: Synthetic oligonucleotide
  Sense strand starting at position 3486 of SEQ ID NO: 1243232
ucuguaaacguucugugca

SEQ ID NO: 1403113 - RNA, 19 nt, Artificial Sequence
  Description of Artificial Sequence: Synthetic oligonucleotide
  Antisense strand to SEQ ID NO: 1403112
ugcacagaacguuuacaga

SEQ ID NO: 1403114 - RNA, 19 nt, Artificial Sequence
  Description of Artificial Sequence: Synthetic oligonucleotide
  Sense strand starting at position 3619 of SEQ ID NO: 1243232
gcaggauccuuguugauga

SEQ ID NO: 1403115 - RNA, 19 nt, Artificial Sequence
  Description of Artificial Sequence: Synthetic oligonucleotide
  Antisense strand to SEQ ID NO: 1403114
ucaucaacaaggauccugc

SEQ ID NO: 1403116 - RNA, 19 nt, Artificial Sequence
  Description of Artificial Sequence: Synthetic oligonucleotide
  Sense strand starting at position 3626 of SEQ ID NO: 1243232
ccuuguugaugacuccaga

SEQ ID NO: 1403117 - RNA, 19 nt, Artificial Sequence
  Description of Artificial Sequence: Synthetic oligonucleotide
  Antisense strand to SEQ ID NO: 1403116
ucuggagucaucaacaagg

SEQ ID NO: 1403118 - RNA, 19 nt, Artificial Sequence
  Description of Artificial Sequence: Synthetic oligonucleotide
  Sense strand starting at position 3803 of SEQ ID NO: 1243232
acacaugcuuccgauguaa

SEQ ID NO: 1403119 - RNA, 19 nt, Artificial Sequence
  Description of Artificial Sequence: Synthetic oligonucleotide
  Antisense strand to SEQ ID NO: 1403118
uuacaucggaagcaugugu

SEQ ID NO: 1403120 - RNA, 19 nt, Artificial Sequence
  Description of Artificial Sequence: Synthetic oligonucleotide
  Sense strand starting at position 3805 of SEQ ID NO: 1243232
acaugcuuccgauguaaau

SEQ ID NO: 1403121 - RNA, 19 nt, Artificial Sequence
  Description of Artificial Sequence: Synthetic oligonucleotide
  Antisense strand to SEQ ID NO: 1403120
auuuacaucggaagcaugu

SEQ ID NO: 1403122 - RNA, 19 nt, Artificial Sequence
  Description of Artificial Sequence: Synthetic oligonucleotide
  Sense strand starting at position 3874 of SEQ ID NO: 1243232
guagauggagcagauaagu

SEQ ID NO: 1403123 - RNA, 19 nt, Artificial Sequence
  Description of Artificial Sequence: Synthetic oligonucleotide
  Antisense strand to SEQ ID NO: 1403122
acuuaucugcuccaucuac

SEQ ID NO: 1403124 - RNA, 19 nt, Artificial Sequence
  Description of Artificial Sequence: Synthetic oligonucleotide
  Sense strand starting at position 3885 of SEQ ID NO: 1243232
agauaagugcgugguguga

SEQ ID NO: 1403125 - RNA, 19 nt, Artificial Sequence
  Description of Artificial Sequence: Synthetic oligonucleotide
  Antisense strand to SEQ ID NO: 1403124
ucacaccacgcacuuaucu

SEQ ID NO: 1403126 - RNA, 19 nt, Artificial Sequence
  Description of Artificial Sequence: Synthetic oligonucleotide
  Sense strand starting at position 3891 of SEQ ID NO: 1243232
gugcguggugugagggaaa

SEQ ID NO: 1403127 - RNA, 19 nt, Artificial Sequence
  Description of Artificial Sequence: Synthetic oligonucleotide
  Antisense strand to SEQ ID NO: 1403126
uuucccucacaccacgcac

SEQ ID NO: 1403128 - RNA, 19 nt, Artificial Sequence
  Description of Artificial Sequence: Synthetic oligonucleotide
  Sense strand starting at position 3894 of SEQ ID NO: 1243232
cguggugugagggaaacua

SEQ ID NO: 1403129 - RNA, 19 nt, Artificial Sequence
  Description of Artificial Sequence: Synthetic oligonucleotide
  Antisense strand to SEQ ID NO: 1403128
uaguuucccucacaccacg

SEQ ID NO: 1403130 - RNA, 19 nt, Artificial Sequence
  Description of Artificial Sequence: Synthetic oligonucleotide
  Sense strand starting at position 3932 of SEQ ID NO: 1243232
cccaguuucugcgugugua

SEQ ID NO: 1403131 - RNA, 19 nt, Artificial Sequence
  Description of Artificial Sequence: Synthetic oligonucleotide
  Antisense strand to SEQ ID NO: 1403130
uacacacgcagaaacuggg

SEQ ID NO: 1403132 - RNA, 19 nt, Artificial Sequence
  Description of Artificial Sequence: Synthetic oligonucleotide
  Sense strand starting at position 3933 of SEQ ID NO: 1243232
ccaguuucugcguguguaa

SEQ ID NO: 1403133 - RNA, 19 nt, Artificial Sequence
  Description of Artificial Sequence: Synthetic oligonucleotide
  Antisense strand to SEQ ID NO: 1403132
uuacacacgcagaaacugg

SEQ ID NO: 1403134 - RNA, 19 nt, Artificial Sequence
  Description of Artificial Sequence: Synthetic oligonucleotide
  Sense strand starting at position 3934 of SEQ ID NO: 1243232
caguuucugcguguguaaa

SEQ ID NO: 1403135 - RNA, 19 nt, Artificial Sequence
  Description of Artificial Sequence: Synthetic oligonucleotide
  Antisense strand to SEQ ID NO: 1403134
uuuacacacgcagaaacug

SEQ ID NO: 1403136 - RNA, 19 nt, Artificial Sequence
  Description of Artificial Sequence: Synthetic oligonucleotide
  Sense strand starting at position 5 of SEQ ID NO: 1243234
uggaaauggccuugccuau

SEQ ID NO: 1403137 - RNA, 19 nt, Artificial Sequence
  Description of Artificial Sequence: Synthetic oligonucleotide
  Antisense strand to SEQ ID NO: 1403136
auaggcaaggccauuucca

SEQ ID NO: 1403138 - RNA, 19 nt, Artificial Sequence
  Description of Artificial Sequence: Synthetic oligonucleotide
  Sense strand starting at position 37 of SEQ ID NO: 1243234
ugcccagggucuucuguau

SEQ ID NO: 1403139 - RNA, 19 nt, Artificial Sequence
  Description of Artificial Sequence: Synthetic oligonucleotide
  Antisense strand to SEQ ID NO: 1403138
auacagaagacccugggca

SEQ ID NO: 1403140 - RNA, 19 nt, Artificial Sequence
  Description of Artificial Sequence: Synthetic oligonucleotide
  Sense strand starting at position 41 of SEQ ID NO: 1243234
cagggucuucuguaucaca

SEQ ID NO: 1403141 - RNA, 19 nt, Artificial Sequence
  Description of Artificial Sequence: Synthetic oligonucleotide
  Antisense strand to SEQ ID NO: 1403140
ugugauacagaagacccug

SEQ ID NO: 1403142 - RNA, 19 nt, Artificial Sequence
  Description of Artificial Sequence: Synthetic oligonucleotide
  Sense strand starting at position 102 of SEQ ID NO: 1243234
ccuagaggauucugaucuu

SEQ ID NO: 1403143 - RNA, 19 nt, Artificial Sequence
  Description of Artificial Sequence: Synthetic oligonucleotide
  Antisense strand to SEQ ID NO: 1403142
aagaucagaauccucuagg

SEQ ID NO: 1403144 - RNA, 19 nt, Artificial Sequence
  Description of Artificial Sequence: Synthetic oligonucleotide
  Sense strand starting at position 105 of SEQ ID NO: 1243234
agaggauucugaucuucug

SEQ ID NO: 1403145 - RNA, 19 nt, Artificial Sequence
  Description of Artificial Sequence: Synthetic oligonucleotide
  Antisense strand to SEQ ID NO: 1403144
cagaagaucagaauccucu

SEQ ID NO: 1403146 - RNA, 19 nt, Artificial Sequence
  Description of Artificial Sequence: Synthetic oligonucleotide
  Sense strand starting at position 108 of SEQ ID NO: 1243234
ggauucugaucuucugaca

SEQ ID NO: 1403147 - RNA, 19 nt, Artificial Sequence
  Description of Artificial Sequence: Synthetic oligonucleotide
  Antisense strand to SEQ ID NO: 1403146
ugucagaagaucagaaucc

SEQ ID NO: 1403148 - RNA, 19 nt, Artificial Sequence
  Description of Artificial Sequence: Synthetic oligonucleotide
  Sense strand starting at position 113 of SEQ ID NO: 1243234
cugaucuucugacagucaa

SEQ ID NO: 1403149 - RNA, 19 nt, Artificial Sequence
  Description of Artificial Sequence: Synthetic oligonucleotide
  Antisense strand to SEQ ID NO: 1403148
uugacugucagaagaucag

SEQ ID NO: 1403150 - RNA, 19 nt, Artificial Sequence
  Description of Artificial Sequence: Synthetic oligonucleotide
  Sense strand starting at position 153 of SEQ ID NO: 1243234
ccaggagcugcuuauccaa

SEQ ID NO: 1403151 - RNA, 19 nt, Artificial Sequence
  Description of Artificial Sequence: Synthetic oligonucleotide
  Antisense strand to SEQ ID NO: 1403150
uuggauaagcagcuccugg

SEQ ID NO: 1403152 - RNA, 19 nt, Artificial Sequence
  Description of Artificial Sequence: Synthetic oligonucleotide
  Sense strand starting at position 182 of SEQ ID NO: 1243234
ugaggucucccagggcuaa

SEQ ID NO: 1403153 - RNA, 19 nt, Artificial Sequence
  Description of Artificial Sequence: Synthetic oligonucleotide
  Antisense strand to SEQ ID NO: 1403152
uuagcccugggagaccuca

SEQ ID NO: 1403154 - RNA, 19 nt, Artificial Sequence
  Description of Artificial Sequence: Synthetic oligonucleotide
  Sense strand starting at position 220 of SEQ ID NO: 1243234
ugagaagcugggcauguua

SEQ ID NO: 1403155 - RNA, 19 nt, Artificial Sequence
  Description of Artificial Sequence: Synthetic oligonucleotide
  Antisense strand to SEQ ID NO: 1403154
uaacaugcccagcuucuca

SEQ ID NO: 1403156 - RNA, 19 nt, Artificial Sequence
  Description of Artificial Sequence: Synthetic oligonucleotide
  Sense strand starting at position 277 of SEQ ID NO: 1243234
gcucuucugcugugaccaa

SEQ ID NO: 1403157 - RNA, 19 nt, Artificial Sequence
  Description of Artificial Sequence: Synthetic oligonucleotide
  Antisense strand to SEQ ID NO: 1403156
uuggucacagcagaagagc

SEQ ID NO: 1403158 - RNA, 19 nt, Artificial Sequence
  Description of Artificial Sequence: Synthetic oligonucleotide
  Sense strand starting at position 284 of SEQ ID NO: 1243234
ugcugugaccaaggauaaa

SEQ ID NO: 1403159 - RNA, 19 nt, Artificial Sequence
  Description of Artificial Sequence: Synthetic oligonucleotide
  Antisense strand to SEQ ID NO: 1403158
uuuauccuuggucacagca

SEQ ID NO: 1403160 - RNA, 19 nt, Artificial Sequence
  Description of Artificial Sequence: Synthetic oligonucleotide
  Sense strand starting at position 312 of SEQ ID NO: 1243234
ugaauugaugagugcgguu

SEQ ID NO: 1403161 - RNA, 19 nt, Artificial Sequence
  Description of Artificial Sequence: Synthetic oligonucleotide
  Antisense strand to SEQ ID NO: 1403160
aaccgcacucaucaauuca

SEQ ID NO: 1403162 - RNA, 19 nt, Artificial Sequence
  Description of Artificial Sequence: Synthetic oligonucleotide
  Sense strand starting at position 439 of SEQ ID NO: 1243234
cccugaggcccucaagaua

SEQ ID NO: 1403163 - RNA, 19 nt, Artificial Sequence
  Description of Artificial Sequence: Synthetic oligonucleotide
  Antisense strand to SEQ ID NO: 1403162
uaucuugagggccucaggg

SEQ ID NO: 1403164 - RNA, 19 nt, Artificial Sequence
  Description of Artificial Sequence: Synthetic oligonucleotide
  Sense strand starting at position 633 of SEQ ID NO: 1243234
gguggauucucugugcuug

SEQ ID NO: 1403165 - RNA, 19 nt, Artificial Sequence
  Description of Artificial Sequence: Synthetic oligonucleotide
  Antisense strand to SEQ ID NO: 1403164
caagcacagagaauccacc

SEQ ID NO: 1403166 - RNA, 19 nt, Artificial Sequence
  Description of Artificial Sequence: Synthetic oligonucleotide
  Sense strand starting at position 675 of SEQ ID NO: 1243234
ggaucacuguuauuccuau

SEQ ID NO: 1403167 - RNA, 19 nt, Artificial Sequence
  Description of Artificial Sequence: Synthetic oligonucleotide
  Antisense strand to SEQ ID NO: 1403166
auaggaauaacagugaucc

SEQ ID NO: 1403168 - RNA, 19 nt, Artificial Sequence
  Description of Artificial Sequence: Synthetic oligonucleotide
  Sense strand starting at position 716 of SEQ ID NO: 1243234
ggccaagucugcccaaauc

SEQ ID NO: 1403169 - RNA, 19 nt, Artificial Sequence
  Description of Artificial Sequence: Synthetic oligonucleotide
  Antisense strand to SEQ ID NO: 1403168
gauuugggcagacuuggcc

SEQ ID NO: 1403170 - RNA, 19 nt, Artificial Sequence
  Description of Artificial Sequence: Synthetic oligonucleotide
  Sense strand starting at position 726 of SEQ ID NO: 1243234
gcccaaaucccauggugaa

SEQ ID NO: 1403171 - RNA, 19 nt, Artificial Sequence
  Description of Artificial Sequence: Synthetic oligonucleotide
  Antisense strand to SEQ ID NO: 1403170
uucaccaugggauuugggc

SEQ ID NO: 1403172 - RNA, 19 nt, Artificial Sequence
  Description of Artificial Sequence: Synthetic oligonucleotide
  Sense strand starting at position 829 of SEQ ID NO: 1243234
acccuucugugauuugcau

SEQ ID NO: 1403173 - RNA, 19 nt, Artificial Sequence
  Description of Artificial Sequence: Synthetic oligonucleotide
  Antisense strand to SEQ ID NO: 1403172
augcaaaucacagaagggu

SEQ ID NO: 1403174 - RNA, 19 nt, Artificial Sequence
  Description of Artificial Sequence: Synthetic oligonucleotide
  Sense strand starting at position 1038 of SEQ ID NO: 1243234
ccaucccugcaaggaaaua

SEQ ID NO: 1403175 - RNA, 19 nt, Artificial Sequence
  Description of Artificial Sequence: Synthetic oligonucleotide
  Antisense strand to SEQ ID NO: 1403174
uauuuccuugcagggaugg

SEQ ID NO: 1403176 - RNA, 19 nt, Artificial Sequence
  Description of Artificial Sequence: Synthetic oligonucleotide
  Sense strand starting at position 1265 of SEQ ID NO: 1243234
ugccacacaucugauaagu

SEQ ID NO: 1403177 - RNA, 19 nt, Artificial Sequence
  Description of Artificial Sequence: Synthetic oligonucleotide
  Antisense strand to SEQ ID NO: 1403176
acuuaucagauguguggca

SEQ ID NO: 1403178 - RNA, 19 nt, Artificial Sequence
  Description of Artificial Sequence: Synthetic oligonucleotide
  Sense strand starting at position 1274 of SEQ ID NO: 1243234
ucugauaaguugugggagu

SEQ ID NO: 1403179 - RNA, 19 nt, Artificial Sequence
  Description of Artificial Sequence: Synthetic oligonucleotide
  Antisense strand to SEQ ID NO: 1403178
acucccacaacuuaucaga

SEQ ID NO: 1403180 - RNA, 19 nt, Artificial Sequence
  Description of Artificial Sequence: Synthetic oligonucleotide
  Sense strand starting at position 1276 of SEQ ID NO: 1243234
ugauaaguugugggaguug

SEQ ID NO: 1403181 - RNA, 19 nt, Artificial Sequence
  Description of Artificial Sequence: Synthetic oligonucleotide
  Antisense strand to SEQ ID NO: 1403180
caacucccacaacuuauca

SEQ ID NO: 1403182 - RNA, 19 nt, Artificial Sequence
  Description of Artificial Sequence: Synthetic oligonucleotide
  Sense strand starting at position 1287 of SEQ ID NO: 1243234
gggaguugguggccagcua

SEQ ID NO: 1403183 - RNA, 19 nt, Artificial Sequence
  Description of Artificial Sequence: Synthetic oligonucleotide
  Antisense strand to SEQ ID NO: 1403182
uagcuggccaccaacuccc

SEQ ID NO: 1403184 - RNA, 19 nt, Artificial Sequence
  Description of Artificial Sequence: Synthetic oligonucleotide
  Sense strand starting at position 1311 of SEQ ID NO: 1243234
gcaauccuuucccuaagga

SEQ ID NO: 1403185 - RNA, 19 nt, Artificial Sequence
  Description of Artificial Sequence: Synthetic oligonucleotide
  Antisense strand to SEQ ID NO: 1403184
uccuuagggaaaggauugc

SEQ ID NO: 1403186 - RNA, 19 nt, Artificial Sequence
  Description of Artificial Sequence: Synthetic oligonucleotide
  Sense strand starting at position 1352 of SEQ ID NO: 1243234
uggcauauguggcauugga

SEQ ID NO: 1403187 - RNA, 19 nt, Artificial Sequence
  Description of Artificial Sequence: Synthetic oligonucleotide
  Antisense strand to SEQ ID NO: 1403186
uccaaugccacauaugcca

SEQ ID NO: 1403188 - RNA, 19 nt, Artificial Sequence
  Description of Artificial Sequence: Synthetic oligonucleotide
  Sense strand starting at position 1466 of SEQ ID NO: 1243234
ggcugaagcaccugucuuu

SEQ ID NO: 1403189 - RNA, 19 nt, Artificial Sequence
  Description of Artificial Sequence: Synthetic oligonucleotide
  Antisense strand to SEQ ID NO: 1403188
aaagacaggugcuucagcc

SEQ ID NO: 1403190 - RNA, 19 nt, Artificial Sequence
  Description of Artificial Sequence: Synthetic oligonucleotide
  Sense strand starting at position 1650 of SEQ ID NO: 1243234
agaucuagaucaccuaagu

SEQ ID NO: 1403191 - RNA, 19 nt, Artificial Sequence
  Description of Artificial Sequence: Synthetic oligonucleotide
  Antisense strand to SEQ ID NO: 1403190
acuuaggugaucuagaucu

SEQ ID NO: 1403192 - RNA, 19 nt, Artificial Sequence
  Description of Artificial Sequence: Synthetic oligonucleotide
  Sense strand starting at position 2168 of SEQ ID NO: 1243234
caucgauggaucgagguau

SEQ ID NO: 1403193 - RNA, 19 nt, Artificial Sequence
  Description of Artificial Sequence: Synthetic oligonucleotide
  Antisense strand to SEQ ID NO: 1403192
auaccucgauccaucgaug

SEQ ID NO: 1403194 - RNA, 19 nt, Artificial Sequence
  Description of Artificial Sequence: Synthetic oligonucleotide
  Sense strand starting at position 2397 of SEQ ID NO: 1243234
aagugagucccggacaguu

SEQ ID NO: 1403195 - RNA, 19 nt, Artificial Sequence
  Description of Artificial Sequence: Synthetic oligonucleotide
  Antisense strand to SEQ ID NO: 1403194
aacuguccgggacucacuu

SEQ ID NO: 1403196 - RNA, 19 nt, Artificial Sequence
  Description of Artificial Sequence: Synthetic oligonucleotide
  Sense strand starting at position 2840 of SEQ ID NO: 1243234
agaccugacagcugguuau

SEQ ID NO: 1403197 - RNA, 19 nt, Artificial Sequence
  Description of Artificial Sequence: Synthetic oligonucleotide
  Antisense strand to SEQ ID NO: 1403196
auaaccagcugucaggucu

SEQ ID NO: 1403198 - RNA, 19 nt, Artificial Sequence
  Description of Artificial Sequence: Synthetic oligonucleotide
  Sense strand starting at position 2854 of SEQ ID NO: 1243234
guuauaugccagcaccaua

SEQ ID NO: 1403199 - RNA, 19 nt, Artificial Sequence
  Description of Artificial Sequence: Synthetic oligonucleotide
  Antisense strand to SEQ ID NO: 1403198
uauggugcuggcauauaac

SEQ ID NO: 1403200 - RNA, 19 nt, Artificial Sequence
  Description of Artificial Sequence: Synthetic oligonucleotide
  Sense strand starting at position 2893 of SEQ ID NO: 1243234
acgagaguauuugggaaau

SEQ ID NO: 1403201 - RNA, 19 nt, Artificial Sequence
  Description of Artificial Sequence: Synthetic oligonucleotide
  Antisense strand to SEQ ID NO: 1403200
auuucccaaauacucucgu

SEQ ID NO: 1403202 - RNA, 19 nt, Artificial Sequence
  Description of Artificial Sequence: Synthetic oligonucleotide
  Sense strand starting at position 2895 of SEQ ID NO: 1243234
gagaguauuugggaaauag

SEQ ID NO: 1403203 - RNA, 19 nt, Artificial Sequence
  Description of Artificial Sequence: Synthetic oligonucleotide
  Antisense strand to SEQ ID NO: 1403202
cuauuucccaaauacucuc

SEQ ID NO: 1403204 - RNA, 19 nt, Artificial Sequence
  Description of Artificial Sequence: Synthetic oligonucleotide
  Sense strand starting at position 2970 of SEQ ID NO: 1243234
cccaccuggucccaagaaa

SEQ ID NO: 1403205 - RNA, 19 nt, Artificial Sequence
  Description of Artificial Sequence: Synthetic oligonucleotide
  Antisense strand to SEQ ID NO: 1403204
uuucuugggaccagguggg

SEQ ID NO: 1403206 - RNA, 19 nt, Artificial Sequence
  Description of Artificial Sequence: Synthetic oligonucleotide
  Sense strand starting at position 3062 of SEQ ID NO: 1243234
cuucucgaguucuuauagu

SEQ ID NO: 1403207 - RNA, 19 nt, Artificial Sequence
  Description of Artificial Sequence: Synthetic oligonucleotide
  Antisense strand to SEQ ID NO: 1403206
acuauaagaacucgagaag

SEQ ID NO: 1403208 - RNA, 19 nt, Artificial Sequence
  Description of Artificial Sequence: Synthetic oligonucleotide
  Sense strand starting at position 3068 of SEQ ID NO: 1243234
gaguucuuauagugaaaca

SEQ ID NO: 1403209 - RNA, 19 nt, Artificial Sequence
  Description of Artificial Sequence: Synthetic oligonucleotide
  Antisense strand to SEQ ID NO: 1403208
uguuucacuauaagaacuc

SEQ ID NO: 1403210 - RNA, 19 nt, Artificial Sequence
  Description of Artificial Sequence: Synthetic oligonucleotide
  Sense strand starting at position 3079 of SEQ ID NO: 1243234
gugaaacauguuggugacu

SEQ ID NO: 1403211 - RNA, 19 nt, Artificial Sequence
  Description of Artificial Sequence: Synthetic oligonucleotide
  Antisense strand to SEQ ID NO: 1403210
agucaccaacauguuucac

SEQ ID NO: 1403212 - RNA, 19 nt, Artificial Sequence
  Description of Artificial Sequence: Synthetic oligonucleotide
  Sense strand starting at position 3869 of SEQ ID NO: 1243234
ugaagacccaucuggugaa

SEQ ID NO: 1403213 - RNA, 19 nt, Artificial Sequence
  Description of Artificial Sequence: Synthetic oligonucleotide
  Antisense strand to SEQ ID NO: 1403212
uucaccagaugggucuuca

SEQ ID NO: 1403214 - RNA, 19 nt, Artificial Sequence
  Description of Artificial Sequence: Synthetic oligonucleotide
  Sense strand starting at position 3870 of SEQ ID NO: 1243234
gaagacccaucuggugaaa

SEQ ID NO: 1403215 - RNA, 19 nt, Artificial Sequence
  Description of Artificial Sequence: Synthetic oligonucleotide
  Antisense strand to SEQ ID NO: 1403214
uuucaccagaugggucuuc

SEQ ID NO: 1403216 - RNA, 19 nt, Artificial Sequence
  Description of Artificial Sequence: Synthetic oligonucleotide
  Sense strand starting at position 10 of SEQ ID NO: 1243235
gcaacuguaugaguauaau

SEQ ID NO: 1403217 - RNA, 19 nt, Artificial Sequence
  Description of Artificial Sequence: Synthetic oligonucleotide
  Antisense strand to SEQ ID NO: 1403216
auuauacucauacaguugc

SEQ ID NO: 1403218 - RNA, 19 nt, Artificial Sequence
  Description of Artificial Sequence: Synthetic oligonucleotide
  Sense strand starting at position 57 of SEQ ID NO: 1243235
cugguaaauccaggagagu

SEQ ID NO: 1403219 - RNA, 19 nt, Artificial Sequence
  Description of Artificial Sequence: Synthetic oligonucleotide
  Antisense strand to SEQ ID NO: 1403218
acucuccuggauuuaccag

SEQ ID NO: 1403220 - RNA, 19 nt, Artificial Sequence
  Description of Artificial Sequence: Synthetic oligonucleotide
  Sense strand starting at position 66 of SEQ ID NO: 1243235
ccaggagagugguuacuau

SEQ ID NO: 1403221 - RNA, 19 nt, Artificial Sequence
  Description of Artificial Sequence: Synthetic oligonucleotide
  Antisense strand to SEQ ID NO: 1403220
auaguaaccacucuccugg

SEQ ID NO: 1403222 - RNA, 19 nt, Artificial Sequence
  Description of Artificial Sequence: Synthetic oligonucleotide
  Sense strand starting at position 70 of SEQ ID NO: 1243235
gagagugguuacuauuuau

SEQ ID NO: 1403223 - RNA, 19 nt, Artificial Sequence
  Description of Artificial Sequence: Synthetic oligonucleotide
  Antisense strand to SEQ ID NO: 1403222
auaaauaguaaccacucuc

SEQ ID NO: 1403224 - RNA, 19 nt, Artificial Sequence
  Description of Artificial Sequence: Synthetic oligonucleotide
  Sense strand starting at position 139 of SEQ ID NO: 1243235
ugaugauguaacgggcaaa

SEQ ID NO: 1403225 - RNA, 19 nt, Artificial Sequence
  Description of Artificial Sequence: Synthetic oligonucleotide
  Antisense strand to SEQ ID NO: 1403224
uuugcccguuacaucauca

SEQ ID NO: 1403226 - RNA, 19 nt, Artificial Sequence
  Description of Artificial Sequence: Synthetic oligonucleotide
  Sense strand starting at position 140 of SEQ ID NO: 1243235
gaugauguaacgggcaaau

SEQ ID NO: 1403227 - RNA, 19 nt, Artificial Sequence
  Description of Artificial Sequence: Synthetic oligonucleotide
  Antisense strand to SEQ ID NO: 1403226
auuugcccguuacaucauc

SEQ ID NO: 1403228 - RNA, 19 nt, Artificial Sequence
  Description of Artificial Sequence: Synthetic oligonucleotide
  Sense strand starting at position 165 of SEQ ID NO: 1243235
cuuuguguucuugcuguuu

SEQ ID NO: 1403229 - RNA, 19 nt, Artificial Sequence
  Description of Artificial Sequence: Synthetic oligonucleotide
  Antisense strand to SEQ ID NO: 1403228
aaacagcaagaacacaaag

SEQ ID NO: 1403230 - RNA, 19 nt, Artificial Sequence
  Description of Artificial Sequence: Synthetic oligonucleotide
  Sense strand starting at position 505 of SEQ ID NO: 1243235
gugccugaccaagaaaugu

SEQ ID NO: 1403231 - RNA, 19 nt, Artificial Sequence
  Description of Artificial Sequence: Synthetic oligonucleotide
  Antisense strand to SEQ ID NO: 1403230
acauuucuuggucaggcac

SEQ ID NO: 1403232 - RNA, 19 nt, Artificial Sequence
  Description of Artificial Sequence: Synthetic oligonucleotide
  Sense strand starting at position 658 of SEQ ID NO: 1243235
gcaucauuaggugacuuaa

SEQ ID NO: 1403233 - RNA, 19 nt, Artificial Sequence
  Description of Artificial Sequence: Synthetic oligonucleotide
  Antisense strand to SEQ ID NO: 1403232
uuaagucaccuaaugaugc

SEQ ID NO: 1403234 - RNA, 19 nt, Artificial Sequence
  Description of Artificial Sequence: Synthetic oligonucleotide
  Sense strand starting at position 660 of SEQ ID NO: 1243235
aucauuaggugacuuaaac

SEQ ID NO: 1403235 - RNA, 19 nt, Artificial Sequence
  Description of Artificial Sequence: Synthetic oligonucleotide
  Antisense strand to SEQ ID NO: 1403234
guuuaagucaccuaaugau

SEQ ID NO: 1403236 - RNA, 19 nt, Artificial Sequence
  Description of Artificial Sequence: Synthetic oligonucleotide
  Sense strand starting at position 697 of SEQ ID NO: 1243235
gacgauugucccugagcug

SEQ ID NO: 1403237 - RNA, 19 nt, Artificial Sequence
  Description of Artificial Sequence: Synthetic oligonucleotide
  Antisense strand to SEQ ID NO: 1403236
cagcucagggacaaucguc

SEQ ID NO: 1403238 - RNA, 19 nt, Artificial Sequence
  Description of Artificial Sequence: Synthetic oligonucleotide
  Sense strand starting at position 700 of SEQ ID NO: 1243235
gauugucccugagcuggua

SEQ ID NO: 1403239 - RNA, 19 nt, Artificial Sequence
  Description of Artificial Sequence: Synthetic oligonucleotide
  Antisense strand to SEQ ID NO: 1403238
uaccagcucagggacaauc

SEQ ID NO: 1403240 - RNA, 19 nt, Artificial Sequence
  Description of Artificial Sequence: Synthetic oligonucleotide
  Sense strand starting at position 747 of SEQ ID NO: 1243235
agagaaacugcuugaggcu

SEQ ID NO: 1403241 - RNA, 19 nt, Artificial Sequence
  Description of Artificial Sequence: Synthetic oligonucleotide
  Antisense strand to SEQ ID NO: 1403240
agccucaagcaguuucucu

SEQ ID NO: 1403242 - RNA, 19 nt, Artificial Sequence
  Description of Artificial Sequence: Synthetic oligonucleotide
  Sense strand starting at position 796 of SEQ ID NO: 1243235
cccgcagaacuguagucaa

SEQ ID NO: 1403243 - RNA, 19 nt, Artificial Sequence
  Description of Artificial Sequence: Synthetic oligonucleotide
  Antisense strand to SEQ ID NO: 1403242
uugacuacaguucugcggg

SEQ ID NO: 1403244 - RNA, 19 nt, Artificial Sequence
  Description of Artificial Sequence: Synthetic oligonucleotide
  Sense strand starting at position 799 of SEQ ID NO: 1243235
gcagaacuguagucaagga

SEQ ID NO: 1403245 - RNA, 19 nt, Artificial Sequence
  Description of Artificial Sequence: Synthetic oligonucleotide
  Antisense strand to SEQ ID NO: 1403244
uccuugacuacaguucugc

SEQ ID NO: 1403246 - RNA, 19 nt, Artificial Sequence
  Description of Artificial Sequence: Synthetic oligonucleotide
  Sense strand starting at position 834 of SEQ ID NO: 1243235
agagaaugcccuugaacca

SEQ ID NO: 1403247 - RNA, 19 nt, Artificial Sequence
  Description of Artificial Sequence: Synthetic oligonucleotide
  Antisense strand to SEQ ID NO: 1403246
ugguucaagggcauucucu

SEQ ID NO: 1403248 - RNA, 19 nt, Artificial Sequence
  Description of Artificial Sequence: Synthetic oligonucleotide
  Sense strand starting at position 1206 of SEQ ID NO: 1243235
cgucuuuaaccugaacucu

SEQ ID NO: 1403249 - RNA, 19 nt, Artificial Sequence
  Description of Artificial Sequence: Synthetic oligonucleotide
  Antisense strand to SEQ ID NO: 1403248
agaguucagguuaaagacg

SEQ ID NO: 1403250 - RNA, 19 nt, Artificial Sequence
  Description of Artificial Sequence: Synthetic oligonucleotide
  Sense strand starting at position 1291 of SEQ ID NO: 1243235
acgcauaauuacgcagaca

SEQ ID NO: 1403251 - RNA, 19 nt, Artificial Sequence
  Description of Artificial Sequence: Synthetic oligonucleotide
  Antisense strand to SEQ ID NO: 1403250
ugucugcguaauuaugcgu

SEQ ID NO: 1403252 - RNA, 19 nt, Artificial Sequence
  Description of Artificial Sequence: Synthetic oligonucleotide
  Sense strand starting at position 2369 of SEQ ID NO: 1243235
ucgagaguucgagacagca

SEQ ID NO: 1403253 - RNA, 19 nt, Artificial Sequence
  Description of Artificial Sequence: Synthetic oligonucleotide
  Antisense strand to SEQ ID NO: 1403252
ugcugucucgaacucucga

SEQ ID NO: 1403254 - RNA, 19 nt, Artificial Sequence
  Description of Artificial Sequence: Synthetic oligonucleotide
  Sense strand starting at position 2371 of SEQ ID NO: 1243235
gagaguucgagacagcaau

SEQ ID NO: 1403255 - RNA, 19 nt, Artificial Sequence
  Description of Artificial Sequence: Synthetic oligonucleotide
  Antisense strand to SEQ ID NO: 1403254
auugcugucucgaacucuc

SEQ ID NO: 1403256 - RNA, 19 nt, Artificial Sequence
  Description of Artificial Sequence: Synthetic oligonucleotide
  Sense strand starting at position 2467 of SEQ ID NO: 1243235
acaauuacccgccaggaau

SEQ ID NO: 1403257 - RNA, 19 nt, Artificial Sequence
  Description of Artificial Sequence: Synthetic oligonucleotide
  Antisense strand to SEQ ID NO: 1403256
auuccuggcggguaauugu

SEQ ID NO: 1403258 - RNA, 19 nt, Artificial Sequence
  Description of Artificial Sequence: Synthetic oligonucleotide
  Sense strand starting at position 2659 of SEQ ID NO: 1243235
gacaauugaugucccguuu

SEQ ID NO: 1403259 - RNA, 19 nt, Artificial Sequence
  Description of Artificial Sequence: Synthetic oligonucleotide
  Antisense strand to SEQ ID NO: 1403258
aaacgggacaucaauuguc

SEQ ID NO: 1403260 - RNA, 19 nt, Artificial Sequence
  Description of Artificial Sequence: Synthetic oligonucleotide
  Sense strand starting at position 2698 of SEQ ID NO: 1243235
gcuaauauguucuuuaaga

SEQ ID NO: 1403261 - RNA, 19 nt, Artificial Sequence
  Description of Artificial Sequence: Synthetic oligonucleotide
  Antisense strand to SEQ ID NO: 1403260
ucuuaaagaacauauuagc

SEQ ID NO: 1403262 - RNA, 19 nt, Artificial Sequence
  Description of Artificial Sequence: Synthetic oligonucleotide
  Sense strand starting at position 2741 of SEQ ID NO: 1243235
gcaugaagcuaucugauuc

SEQ ID NO: 1403263 - RNA, 19 nt, Artificial Sequence
  Description of Artificial Sequence: Synthetic oligonucleotide
  Antisense strand to SEQ ID NO: 1403262
gaaucagauagcuucaugc

SEQ ID NO: 1403264 - RNA, 19 nt, Artificial Sequence
  Description of Artificial Sequence: Synthetic oligonucleotide
  Sense strand starting at position 2767 of SEQ ID NO: 1243235
uccuaugcucuuugaugga

SEQ ID NO: 1403265 - RNA, 19 nt, Artificial Sequence
  Description of Artificial Sequence: Synthetic oligonucleotide
  Antisense strand to SEQ ID NO: 1403264
uccaucaaagagcauagga

SEQ ID NO: 1403266 - RNA, 19 nt, Artificial Sequence
  Description of Artificial Sequence: Synthetic oligonucleotide
  Sense strand starting at position 2771 of SEQ ID NO: 1243235
augcucuuugauggaggua

SEQ ID NO: 1403267 - RNA, 19 nt, Artificial Sequence
  Description of Artificial Sequence: Synthetic oligonucleotide
  Antisense strand to SEQ ID NO: 1403266
uaccuccaucaaagagcau

SEQ ID NO: 1403268 - RNA, 19 nt, Artificial Sequence
  Description of Artificial Sequence: Synthetic oligonucleotide
  Sense strand starting at position 2772 of SEQ ID NO: 1243235
ugcucuuugauggagguau

SEQ ID NO: 1403269 - RNA, 19 nt, Artificial Sequence
  Description of Artificial Sequence: Synthetic oligonucleotide
  Antisense strand to SEQ ID NO: 1403268
auaccuccaucaaagagca

SEQ ID NO: 1403270 - RNA, 19 nt, Artificial Sequence
  Description of Artificial Sequence: Synthetic oligonucleotide
  Sense strand starting at position 2776 of SEQ ID NO: 1243235
cuuugauggagguaucuuu

SEQ ID NO: 1403271 - RNA, 19 nt, Artificial Sequence
  Description of Artificial Sequence: Synthetic oligonucleotide
  Antisense strand to SEQ ID NO: 1403270
aaagauaccuccaucaaag

SEQ ID NO: 1403272 - RNA, 19 nt, Artificial Sequence
  Description of Artificial Sequence: Synthetic oligonucleotide
  Sense strand starting at position 2783 of SEQ ID NO: 1243235
ggagguaucuuuguuguga

SEQ ID NO: 1403273 - RNA, 19 nt, Artificial Sequence
  Description of Artificial Sequence: Synthetic oligonucleotide
  Antisense strand to SEQ ID NO: 1403272
ucacaacaaagauaccucc

SEQ ID NO: 1403274 - RNA, 19 nt, Artificial Sequence
  Description of Artificial Sequence: Synthetic oligonucleotide
  Sense strand starting at position 2784 of SEQ ID NO: 1243235
gagguaucuuuguugugac

SEQ ID NO: 1403275 - RNA, 19 nt, Artificial Sequence
  Description of Artificial Sequence: Synthetic oligonucleotide
  Antisense strand to SEQ ID NO: 1403274
gucacaacaaagauaccuc

SEQ ID NO: 1403276 - RNA, 19 nt, Artificial Sequence
  Description of Artificial Sequence: Synthetic oligonucleotide
  Sense strand starting at position 2857 of SEQ ID NO: 1243235
caaguugcuugaguuauag

SEQ ID NO: 1403277 - RNA, 19 nt, Artificial Sequence
  Description of Artificial Sequence: Synthetic oligonucleotide
  Antisense strand to SEQ ID NO: 1403276
cuauaacucaagcaacuug

SEQ ID NO: 1403278 - RNA, 19 nt, Artificial Sequence
  Description of Artificial Sequence: Synthetic oligonucleotide
  Sense strand starting at position 2859 of SEQ ID NO: 1243235
aguugcuugaguuauagcu

SEQ ID NO: 1403279 - RNA, 19 nt, Artificial Sequence
  Description of Artificial Sequence: Synthetic oligonucleotide
  Antisense strand to SEQ ID NO: 1403278
agcuauaacucaagcaacu

SEQ ID NO: 1403280 - RNA, 19 nt, Artificial Sequence
  Description of Artificial Sequence: Synthetic oligonucleotide
  Sense strand starting at position 3586 of SEQ ID NO: 1243235
auaggacucguuugugacu

SEQ ID NO: 1403281 - RNA, 19 nt, Artificial Sequence
  Description of Artificial Sequence: Synthetic oligonucleotide
  Antisense strand to SEQ ID NO: 1403280
agucacaaacgaguccuau

SEQ ID NO: 1403282 - RNA, 19 nt, Artificial Sequence
  Description of Artificial Sequence: Synthetic oligonucleotide
  Sense strand starting at position 3605 of SEQ ID NO: 1243235
ucacaagaucuguggauuc

SEQ ID NO: 1403283 - RNA, 19 nt, Artificial Sequence
  Description of Artificial Sequence: Synthetic oligonucleotide
  Antisense strand to SEQ ID NO: 1403282
gaauccacagaucuuguga

SEQ ID NO: 1403284 - RNA, 19 nt, Artificial Sequence
  Description of Artificial Sequence: Synthetic oligonucleotide
  Sense strand starting at position 3647 of SEQ ID NO: 1243235
gcguguauagcugugcuca

SEQ ID NO: 1403285 - RNA, 19 nt, Artificial Sequence
  Description of Artificial Sequence: Synthetic oligonucleotide
  Antisense strand to SEQ ID NO: 1403284
ugagcacagcuauacacgc

SEQ ID NO: 1403286 - RNA, 19 nt, Artificial Sequence
  Description of Artificial Sequence: Synthetic oligonucleotide
  Sense strand starting at position 3658 of SEQ ID NO: 1243235
ugugcucaucaccacagau

SEQ ID NO: 1403287 - RNA, 19 nt, Artificial Sequence
  Description of Artificial Sequence: Synthetic oligonucleotide
  Antisense strand to SEQ ID NO: 1403286
aucuguggugaugagcaca

SEQ ID NO: 1403288 - RNA, 19 nt, Artificial Sequence
  Description of Artificial Sequence: Synthetic oligonucleotide
  Sense strand starting at position 3734 of SEQ ID NO: 1243235
acuugaagucauugggcca

SEQ ID NO: 1403289 - RNA, 19 nt, Artificial Sequence
  Description of Artificial Sequence: Synthetic oligonucleotide
  Antisense strand to SEQ ID NO: 1403288
uggcccaaugacuucaagu

SEQ ID NO: 1403290 - RNA, 19 nt, Artificial Sequence
  Description of Artificial Sequence: Synthetic oligonucleotide
  Sense strand starting at position 3735 of SEQ ID NO: 1243235
cuugaagucauugggccaa

SEQ ID NO: 1403291 - RNA, 19 nt, Artificial Sequence
  Description of Artificial Sequence: Synthetic oligonucleotide
  Antisense strand to SEQ ID NO: 1403290
uuggcccaaugacuucaag

SEQ ID NO: 1403292 - RNA, 19 nt, Artificial Sequence
  Description of Artificial Sequence: Synthetic oligonucleotide
  Sense strand starting at position 3737 of SEQ ID NO: 1243235
ugaagucauugggccaauu

SEQ ID NO: 1403293 - RNA, 19 nt, Artificial Sequence
  Description of Artificial Sequence: Synthetic oligonucleotide
  Antisense strand to SEQ ID NO: 1403292
aauuggcccaaugacuuca

SEQ ID NO: 1403294 - RNA, 19 nt, Artificial Sequence
  Description of Artificial Sequence: Synthetic oligonucleotide
  Sense strand starting at position 3960 of SEQ ID NO: 1243235
uggguuaagucucuugaug

SEQ ID NO: 1403295 - RNA, 19 nt, Artificial Sequence
  Description of Artificial Sequence: Synthetic oligonucleotide
  Antisense strand to SEQ ID NO: 1403294
caucaagagacuuaaccca

SEQ ID NO: 1403296 - RNA, 19 nt, Artificial Sequence
  Description of Artificial Sequence: Synthetic oligonucleotide
  Sense strand starting at position 3325 of SEQ ID NO: 1243236
cuccaaacuccuugguaug

SEQ ID NO: 1403297 - RNA, 19 nt, Artificial Sequence
  Description of Artificial Sequence: Synthetic oligonucleotide
  Antisense strand to SEQ ID NO: 1403296
cauaccaaggaguuuggag

SEQ ID NO: 1403298 - RNA, 19 nt, Artificial Sequence
  Description of Artificial Sequence: Synthetic oligonucleotide
  Sense strand starting at position 3326 of SEQ ID NO: 1243236
uccaaacuccuugguauga

SEQ ID NO: 1403299 - RNA, 19 nt, Artificial Sequence
  Description of Artificial Sequence: Synthetic oligonucleotide
  Antisense strand to SEQ ID NO: 1403298
ucauaccaaggaguuugga

SEQ ID NO: 1403300 - RNA, 19 nt, Artificial Sequence
  Description of Artificial Sequence: Synthetic oligonucleotide
  Sense strand starting at position 3411 of SEQ ID NO: 1243236
ucugauuacuagucuaguc

SEQ ID NO: 1403301 - RNA, 19 nt, Artificial Sequence
  Description of Artificial Sequence: Synthetic oligonucleotide
  Antisense strand to SEQ ID NO: 1403300
gacuagacuaguaaucaga

SEQ ID NO: 1403302 - RNA, 19 nt, Artificial Sequence
  Description of Artificial Sequence: Synthetic oligonucleotide
  Sense strand starting at position 3416 of SEQ ID NO: 1243236
uuacuagucuagucucaca

SEQ ID NO: 1403303 - RNA, 19 nt, Artificial Sequence
  Description of Artificial Sequence: Synthetic oligonucleotide
  Antisense strand to SEQ ID NO: 1403302
ugugagacuagacuaguaa

SEQ ID NO: 1403304 - RNA, 19 nt, Artificial Sequence
  Description of Artificial Sequence: Synthetic oligonucleotide
  Sense strand starting at position 3898 of SEQ ID NO: 1243236
cccgacaaauaaugacauu

SEQ ID NO: 1403305 - RNA, 19 nt, Artificial Sequence
  Description of Artificial Sequence: Synthetic oligonucleotide
  Antisense strand to SEQ ID NO: 1403304
aaugucauuauuugucggg

SEQ ID NO: 1403306 - RNA, 19 nt, Artificial Sequence
  Description of Artificial Sequence: Synthetic oligonucleotide
  Sense strand starting at position 3943 of SEQ ID NO: 1243236
cuggguagauucuucccau

SEQ ID NO: 1403307 - RNA, 19 nt, Artificial Sequence
  Description of Artificial Sequence: Synthetic oligonucleotide
  Antisense strand to SEQ ID NO: 1403306
augggaagaaucuacccag

SEQ ID NO: 1403308 - RNA, 19 nt, Artificial Sequence
  Description of Artificial Sequence: Synthetic oligonucleotide
  Sense strand starting at position 3944 of SEQ ID NO: 1243236
uggguagauucuucccauu

SEQ ID NO: 1403309 - RNA, 19 nt, Artificial Sequence
  Description of Artificial Sequence: Synthetic oligonucleotide
  Antisense strand to SEQ ID NO: 1403308
aaugggaagaaucuaccca

SEQ ID NO: 1403310 - RNA, 19 nt, Artificial Sequence
  Description of Artificial Sequence: Synthetic oligonucleotide
  Sense strand starting at position 3946 of SEQ ID NO: 1243236
gguagauucuucccauuaa

SEQ ID NO: 1403311 - RNA, 19 nt, Artificial Sequence
  Description of Artificial Sequence: Synthetic oligonucleotide
  Antisense strand to SEQ ID NO: 1403310
uuaaugggaagaaucuacc

SEQ ID NO: 1403312 - RNA, 19 nt, Artificial Sequence
  Description of Artificial Sequence: Synthetic oligonucleotide
  Sense strand starting at position 43 of SEQ ID NO: 1243237
gccuguacuucgggccuaa

SEQ ID NO: 1403313 - RNA, 19 nt, Artificial Sequence
  Description of Artificial Sequence: Synthetic oligonucleotide
  Antisense strand to SEQ ID NO: 1403312
uuaggcccgaaguacaggc

SEQ ID NO: 1403314 - RNA, 19 nt, Artificial Sequence
  Description of Artificial Sequence: Synthetic oligonucleotide
  Sense strand starting at position 445 of SEQ ID NO: 1243237
agggaaaugacuugggucu

SEQ ID NO: 1403315 - RNA, 19 nt, Artificial Sequence
  Description of Artificial Sequence: Synthetic oligonucleotide
  Antisense strand to SEQ ID NO: 1403314
agacccaagucauuucccu

SEQ ID NO: 1403316 - RNA, 19 nt, Artificial Sequence
  Description of Artificial Sequence: Synthetic oligonucleotide
  Sense strand starting at position 482 of SEQ ID NO: 1243238
gccuguacuucgggccuaa

SEQ ID NO: 1403317 - RNA, 19 nt, Artificial Sequence
  Description of Artificial Sequence: Synthetic oligonucleotide
  Antisense strand to SEQ ID NO: 1403316
uuaggcccgaaguacaggc

SEQ ID NO: 1403318 - RNA, 19 nt, Artificial Sequence
  Description of Artificial Sequence: Synthetic oligonucleotide
  Sense strand starting at position 884 of SEQ ID NO: 1243238
agggaaaugacuugggucu

SEQ ID NO: 1403319 - RNA, 19 nt, Artificial Sequence
  Description of Artificial Sequence: Synthetic oligonucleotide
  Antisense strand to SEQ ID NO: 1403318
agacccaagucauuucccu

SEQ ID NO: 1403320 - RNA, 19 nt, Artificial Sequence
  Description of Artificial Sequence: Synthetic oligonucleotide
  Sense strand starting at position 485 of SEQ ID NO: 1243239
gccuguacuucgggccuaa

SEQ ID NO: 1403321 - RNA, 19 nt, Artificial Sequence
  Description of Artificial Sequence: Synthetic oligonucleotide
  Antisense strand to SEQ ID NO: 1403320
uuaggcccgaaguacaggc

SEQ ID NO: 1403322 - RNA, 19 nt, Artificial Sequence
  Description of Artificial Sequence: Synthetic oligonucleotide
  Sense strand starting at position 887 of SEQ ID NO: 1243239
agggaaaugacuugggucu

SEQ ID NO: 1403323 - RNA, 19 nt, Artificial Sequence
  Description of Artificial Sequence: Synthetic oligonucleotide
  Antisense strand to SEQ ID NO: 1403322
agacccaagucauuucccu

SEQ ID NO: 1403324 - RNA, 19 nt, Artificial Sequence
  Description of Artificial Sequence: Synthetic oligonucleotide
  Sense strand starting at position 2662 of SEQ ID NO: 1243240
cuccaaacuccuugguaug

SEQ ID NO: 1403325 - RNA, 19 nt, Artificial Sequence
  Description of Artificial Sequence: Synthetic oligonucleotide
  Antisense strand to SEQ ID NO: 1403324
cauaccaaggaguuuggag

SEQ ID NO: 1403326 - RNA, 19 nt, Artificial Sequence
  Description of Artificial Sequence: Synthetic oligonucleotide
  Sense strand starting at position 2663 of SEQ ID NO: 1243240
uccaaacuccuugguauga

SEQ ID NO: 1403327 - RNA, 19 nt, Artificial Sequence
  Description of Artificial Sequence: Synthetic oligonucleotide
  Antisense strand to SEQ ID NO: 1403326
ucauaccaaggaguuugga

SEQ ID NO: 1403328 - RNA, 19 nt, Artificial Sequence
  Description of Artificial Sequence: Synthetic oligonucleotide
  Sense strand starting at position 2748 of SEQ ID NO: 1243240
ucugauuacuagucuaguc

SEQ ID NO: 1403329 - RNA, 19 nt, Artificial Sequence
  Description of Artificial Sequence: Synthetic oligonucleotide
  Antisense strand to SEQ ID NO: 1403328
gacuagacuaguaaucaga

SEQ ID NO: 1403330 - RNA, 19 nt, Artificial Sequence
  Description of Artificial Sequence: Synthetic oligonucleotide
  Sense strand starting at position 2753 of SEQ ID NO: 1243240
uuacuagucuagucucaca

SEQ ID NO: 1403331 - RNA, 19 nt, Artificial Sequence
  Description of Artificial Sequence: Synthetic oligonucleotide
  Antisense strand to SEQ ID NO: 1403330
ugugagacuagacuaguaa

SEQ ID NO: 1403332 - RNA, 19 nt, Artificial Sequence
  Description of Artificial Sequence: Synthetic oligonucleotide
  Sense strand starting at position 3235 of SEQ ID NO: 1243240
cccgacaaauaaugacauu

SEQ ID NO: 1403333 - RNA, 19 nt, Artificial Sequence
  Description of Artificial Sequence: Synthetic oligonucleotide
  Antisense strand to SEQ ID NO: 1403332
aaugucauuauuugucggg

SEQ ID NO: 1403334 - RNA, 19 nt, Artificial Sequence
  Description of Artificial Sequence: Synthetic oligonucleotide
  Sense strand starting at position 3280 of SEQ ID NO: 1243240
cuggguagauucuucccau

SEQ ID NO: 1403335 - RNA, 19 nt, Artificial Sequence
  Description of Artificial Sequence: Synthetic oligonucleotide
  Antisense strand to SEQ ID NO: 1403334
augggaagaaucuacccag

SEQ ID NO: 1403336 - RNA, 19 nt, Artificial Sequence
  Description of Artificial Sequence: Synthetic oligonucleotide
  Sense strand starting at position 3281 of SEQ ID NO: 1243240
uggguagauucuucccauu

SEQ ID NO: 1403337 - RNA, 19 nt, Artificial Sequence
  Description of Artificial Sequence: Synthetic oligonucleotide
  Antisense strand to SEQ ID NO: 1403336
aaugggaagaaucuaccca

SEQ ID NO: 1403338 - RNA, 19 nt, Artificial Sequence
  Description of Artificial Sequence: Synthetic oligonucleotide
  Sense strand starting at position 3283 of SEQ ID NO: 1243240
gguagauucuucccauuaa

SEQ ID NO: 1403339 - RNA, 19 nt, Artificial Sequence
  Description of Artificial Sequence: Synthetic oligonucleotide
  Antisense strand to SEQ ID NO: 1403338
uuaaugggaagaaucuacc

SEQ ID NO: 1403340 - RNA, 19 nt, Artificial Sequence
  Description of Artificial Sequence: Synthetic oligonucleotide
  Sense strand starting at position 3326 of SEQ ID NO: 1243240
agccuuaugaagugaguau

SEQ ID NO: 1403341 - RNA, 19 nt, Artificial Sequence
  Description of Artificial Sequence: Synthetic oligonucleotide
  Antisense strand to SEQ ID NO: 1403340
auacucacuucauaaggcu

SEQ ID NO: 1403342 - RNA, 19 nt, Artificial Sequence
  Description of Artificial Sequence: Synthetic oligonucleotide
  Sense strand starting at position 3327 of SEQ ID NO: 1243240
gccuuaugaagugaguaug

SEQ ID NO: 1403343 - RNA, 19 nt, Artificial Sequence
  Description of Artificial Sequence: Synthetic oligonucleotide
  Antisense strand to SEQ ID NO: 1403342
cauacucacuucauaaggc

SEQ ID NO: 1403344 - RNA, 19 nt, Artificial Sequence
  Description of Artificial Sequence: Synthetic oligonucleotide
  Sense strand starting at position 3333 of SEQ ID NO: 1243240
ugaagugaguaugauuauc

SEQ ID NO: 1403345 - RNA, 19 nt, Artificial Sequence
  Description of Artificial Sequence: Synthetic oligonucleotide
  Antisense strand to SEQ ID NO: 1403344
gauaaucauacucacuuca

SEQ ID NO: 1403346 - RNA, 19 nt, Artificial Sequence
  Description of Artificial Sequence: Synthetic oligonucleotide
  Sense strand starting at position 3335 of SEQ ID NO: 1243240
aagugaguaugauuaucuc

SEQ ID NO: 1403347 - RNA, 19 nt, Artificial Sequence
  Description of Artificial Sequence: Synthetic oligonucleotide
  Antisense strand to SEQ ID NO: 1403346
gagauaaucauacucacuu

SEQ ID NO: 1403348 - RNA, 19 nt, Artificial Sequence
  Description of Artificial Sequence: Synthetic oligonucleotide
  Sense strand starting at position 3338 of SEQ ID NO: 1243240
ugaguaugauuaucucauu

SEQ ID NO: 1403349 - RNA, 19 nt, Artificial Sequence
  Description of Artificial Sequence: Synthetic oligonucleotide
  Antisense strand to SEQ ID NO: 1403348
aaugagauaaucauacuca

SEQ ID NO: 1403350 - RNA, 19 nt, Artificial Sequence
  Description of Artificial Sequence: Synthetic oligonucleotide
  Sense strand starting at position 3341 of SEQ ID NO: 1243240
guaugauuaucucauuuga

SEQ ID NO: 1403351 - RNA, 19 nt, Artificial Sequence
  Description of Artificial Sequence: Synthetic oligonucleotide
  Antisense strand to SEQ ID NO: 1403350
ucaaaugagauaaucauac

SEQ ID NO: 1403352 - RNA, 19 nt, Artificial Sequence
  Description of Artificial Sequence: Synthetic oligonucleotide
  Sense strand starting at position 3346 of SEQ ID NO: 1243240
auuaucucauuugagagau

SEQ ID NO: 1403353 - RNA, 19 nt, Artificial Sequence
  Description of Artificial Sequence: Synthetic oligonucleotide
  Antisense strand to SEQ ID NO: 1403352
aucucucaaaugagauaau

SEQ ID NO: 1403354 - RNA, 19 nt, Artificial Sequence
  Description of Artificial Sequence: Synthetic oligonucleotide
  Sense strand starting at position 3348 of SEQ ID NO: 1243240
uaucucauuugagagauga

SEQ ID NO: 1403355 - RNA, 19 nt, Artificial Sequence
  Description of Artificial Sequence: Synthetic oligonucleotide
  Antisense strand to SEQ ID NO: 1403354
ucaucucucaaaugagaua

SEQ ID NO: 1403356 - RNA, 19 nt, Artificial Sequence
  Description of Artificial Sequence: Synthetic oligonucleotide
  Sense strand starting at position 3404 of SEQ ID NO: 1243240
gaaugacacuugugaguga

SEQ ID NO: 1403357 - RNA, 19 nt, Artificial Sequence
  Description of Artificial Sequence: Synthetic oligonucleotide
  Antisense strand to SEQ ID NO: 1403356
ucacucacaagugucauuc

SEQ ID NO: 1403358 - RNA, 19 nt, Artificial Sequence
  Description of Artificial Sequence: Synthetic oligonucleotide
  Sense strand starting at position 3430 of SEQ ID NO: 1243240
ggcuguugacucuaaacug

SEQ ID NO: 1403359 - RNA, 19 nt, Artificial Sequence
  Description of Artificial Sequence: Synthetic oligonucleotide
  Antisense strand to SEQ ID NO: 1403358
caguuuagagucaacagcc

SEQ ID NO: 1403360 - RNA, 19 nt, Artificial Sequence
  Description of Artificial Sequence: Synthetic oligonucleotide
  Sense strand starting at position 3708 of SEQ ID NO: 1243240
gccugagugaccugacuga

SEQ ID NO: 1403361 - RNA, 19 nt, Artificial Sequence
  Description of Artificial Sequence: Synthetic oligonucleotide
  Antisense strand to SEQ ID NO: 1403360
ucagucaggucacucaggc

SEQ ID NO: 1403362 - RNA, 19 nt, Artificial Sequence
  Description of Artificial Sequence: Synthetic oligonucleotide
  Sense strand starting at position 3712 of SEQ ID NO: 1243240
gagugaccugacugagacu

SEQ ID NO: 1403363 - RNA, 19 nt, Artificial Sequence
  Description of Artificial Sequence: Synthetic oligonucleotide
  Antisense strand to SEQ ID NO: 1403362
agucucagucaggucacuc

SEQ ID NO: 1403364 - RNA, 19 nt, Artificial Sequence
  Description of Artificial Sequence: Synthetic oligonucleotide
  Sense strand starting at position 3769 of SEQ ID NO: 1243240
acuguugacgacuaguuaa

SEQ ID NO: 1403365 - RNA, 19 nt, Artificial Sequence
  Description of Artificial Sequence: Synthetic oligonucleotide
  Antisense strand to SEQ ID NO: 1403364
uuaacuagucgucaacagu

SEQ ID NO: 1403366 - RNA, 19 nt, Artificial Sequence
  Description of Artificial Sequence: Synthetic oligonucleotide
  Sense strand starting at position 3772 of SEQ ID NO: 1243240
guugacgacuaguuaacua

SEQ ID NO: 1403367 - RNA, 19 nt, Artificial Sequence
  Description of Artificial Sequence: Synthetic oligonucleotide
  Antisense strand to SEQ ID NO: 1403366
uaguuaacuagucgucaac

SEQ ID NO: 1403368 - RNA, 19 nt, Artificial Sequence
  Description of Artificial Sequence: Synthetic oligonucleotide
  Sense strand starting at position 3798 of SEQ ID NO: 1243240
uuaucacuguggccuguaa

SEQ ID NO: 1403369 - RNA, 19 nt, Artificial Sequence
  Description of Artificial Sequence: Synthetic oligonucleotide
  Antisense strand to SEQ ID NO: 1403368
uuacaggccacagugauaa

SEQ ID NO: 1403370 - RNA, 19 nt, Artificial Sequence
  Description of Artificial Sequence: Synthetic oligonucleotide
  Sense strand starting at position 3802 of SEQ ID NO: 1243240
cacuguggccuguaaacaa

SEQ ID NO: 1403371 - RNA, 19 nt, Artificial Sequence
  Description of Artificial Sequence: Synthetic oligonucleotide
  Antisense strand to SEQ ID NO: 1403370
uuguuuacaggccacagug

SEQ ID NO: 1403372 - RNA, 19 nt, Artificial Sequence
  Description of Artificial Sequence: Synthetic oligonucleotide
  Sense strand starting at position 3907 of SEQ ID NO: 1243240
aguauaaccuuccaagugu

SEQ ID NO: 1403373 - RNA, 19 nt, Artificial Sequence
  Description of Artificial Sequence: Synthetic oligonucleotide
  Antisense strand to SEQ ID NO: 1403372
acacuuggaagguuauacu

SEQ ID NO: 1403374 - RNA, 19 nt, Artificial Sequence
  Description of Artificial Sequence: Synthetic oligonucleotide
  Sense strand starting at position 3913 of SEQ ID NO: 1243240
accuuccaagugugucaaa

SEQ ID NO: 1403375 - RNA, 19 nt, Artificial Sequence
  Description of Artificial Sequence: Synthetic oligonucleotide
  Antisense strand to SEQ ID NO: 1403374
uuugacacacuuggaaggu

SEQ ID NO: 1403376 - RNA, 19 nt, Artificial Sequence
  Description of Artificial Sequence: Synthetic oligonucleotide
  Sense strand starting at position 3951 of SEQ ID NO: 1243240
gccagaaaguagguuaguu

SEQ ID NO: 1403377 - RNA, 19 nt, Artificial Sequence
  Description of Artificial Sequence: Synthetic oligonucleotide
  Antisense strand to SEQ ID NO: 1403376
aacuaaccuacuuucuggc

SEQ ID NO: 1403378 - RNA, 19 nt, Artificial Sequence
  Description of Artificial Sequence: Synthetic oligonucleotide
  Sense strand starting at position 3955 of SEQ ID NO: 1243240
gaaaguagguuaguuauua

SEQ ID NO: 1403379 - RNA, 19 nt, Artificial Sequence
  Description of Artificial Sequence: Synthetic oligonucleotide
  Antisense strand to SEQ ID NO: 1403378
uaauaacuaaccuacuuuc

SEQ ID NO: 1403380 - RNA, 19 nt, Artificial Sequence
  Description of Artificial Sequence: Synthetic oligonucleotide
  Sense strand starting at position 3959 of SEQ ID NO: 1243240
guagguuaguuauuaccua

SEQ ID NO: 1403381 - RNA, 19 nt, Artificial Sequence
  Description of Artificial Sequence: Synthetic oligonucleotide
  Antisense strand to SEQ ID NO: 1403380
uagguaauaacuaaccuac

SEQ ID NO: 1403382 - RNA, 19 nt, Artificial Sequence
  Description of Artificial Sequence: Synthetic oligonucleotide
  Sense strand starting at position 3966 of SEQ ID NO: 1243240
aguuauuaccuagggcuga

SEQ ID NO: 1403383 - RNA, 19 nt, Artificial Sequence
  Description of Artificial Sequence: Synthetic oligonucleotide
  Antisense strand to SEQ ID NO: 1403382
ucagcccuagguaauaacu

SEQ ID NO: 1403384 - RNA, 19 nt, Artificial Sequence
  Description of Artificial Sequence: Synthetic oligonucleotide
  Sense strand starting at position 9 of SEQ ID NO: 1243241
ucugacaucugucaaugca

SEQ ID NO: 1403385 - RNA, 19 nt, Artificial Sequence
  Description of Artificial Sequence: Synthetic oligonucleotide
  Antisense strand to SEQ ID NO: 1403384
ugcauugacagaugucaga

SEQ ID NO: 1403386 - RNA, 19 nt, Artificial Sequence
  Description of Artificial Sequence: Synthetic oligonucleotide
  Sense strand starting at position 12 of SEQ ID NO: 1243241
gacaucugucaaugcagaa

SEQ ID NO: 1403387 - RNA, 19 nt, Artificial Sequence
  Description of Artificial Sequence: Synthetic oligonucleotide
  Antisense strand to SEQ ID NO: 1403386
uucugcauugacagauguc

SEQ ID NO: 1403388 - RNA, 19 nt, Artificial Sequence
  Description of Artificial Sequence: Synthetic oligonucleotide
  Sense strand starting at position 22 of SEQ ID NO: 1243241
aaugcagaaggcuaguuaa

SEQ ID NO: 1403389 - RNA, 19 nt, Artificial Sequence
  Description of Artificial Sequence: Synthetic oligonucleotide
  Antisense strand to SEQ ID NO: 1403388
uuaacuagccuucugcauu

SEQ ID NO: 1403390 - RNA, 19 nt, Artificial Sequence
  Description of Artificial Sequence: Synthetic oligonucleotide
  Sense strand starting at position 25 of SEQ ID NO: 1243241
gcagaaggcuaguuaaggu

SEQ ID NO: 1403391 - RNA, 19 nt, Artificial Sequence
  Description of Artificial Sequence: Synthetic oligonucleotide
  Antisense strand to SEQ ID NO: 1403390
accuuaacuagccuucugc

SEQ ID NO: 1403392 - RNA, 19 nt, Artificial Sequence
  Description of Artificial Sequence: Synthetic oligonucleotide
  Sense strand starting at position 33 of SEQ ID NO: 1243241
cuaguuaagguuugaccau

SEQ ID NO: 1403393 - RNA, 19 nt, Artificial Sequence
  Description of Artificial Sequence: Synthetic oligonucleotide
  Antisense strand to SEQ ID NO: 1403392
auggucaaaccuuaacuag

SEQ ID NO: 1403394 - RNA, 19 nt, Artificial Sequence
  Description of Artificial Sequence: Synthetic oligonucleotide
  Sense strand starting at position 103 of SEQ ID NO: 1243241
aggcuugcccaggaaucuu

SEQ ID NO: 1403395 - RNA, 19 nt, Artificial Sequence
  Description of Artificial Sequence: Synthetic oligonucleotide
  Antisense strand to SEQ ID NO: 1403394
aagauuccugggcaagccu

SEQ ID NO: 1403396 - RNA, 19 nt, Artificial Sequence
  Description of Artificial Sequence: Synthetic oligonucleotide
  Sense strand starting at position 184 of SEQ ID NO: 1243241
gggcuaugcuuugaaacag

SEQ ID NO: 1403397 - RNA, 19 nt, Artificial Sequence
  Description of Artificial Sequence: Synthetic oligonucleotide
  Antisense strand to SEQ ID NO: 1403396
cuguuucaaagcauagccc

SEQ ID NO: 1403398 - RNA, 19 nt, Artificial Sequence
  Description of Artificial Sequence: Synthetic oligonucleotide
  Sense strand starting at position 264 of SEQ ID NO: 1243241
cuuggcaagucugugaaga

SEQ ID NO: 1403399 - RNA, 19 nt, Artificial Sequence
  Description of Artificial Sequence: Synthetic oligonucleotide
  Antisense strand to SEQ ID NO: 1403398
ucuucacagacuugccaag

SEQ ID NO: 1403400 - RNA, 19 nt, Artificial Sequence
  Description of Artificial Sequence: Synthetic oligonucleotide
  Sense strand starting at position 265 of SEQ ID NO: 1243241
uuggcaagucugugaagaa

SEQ ID NO: 1403401 - RNA, 19 nt, Artificial Sequence
  Description of Artificial Sequence: Synthetic oligonucleotide
  Antisense strand to SEQ ID NO: 1403400
uucuucacagacuugccaa

SEQ ID NO: 1403402 - RNA, 19 nt, Artificial Sequence
  Description of Artificial Sequence: Synthetic oligonucleotide
  Sense strand starting at position 266 of SEQ ID NO: 1243241
uggcaagucugugaagaau

SEQ ID NO: 1403403 - RNA, 19 nt, Artificial Sequence
  Description of Artificial Sequence: Synthetic oligonucleotide
  Antisense strand to SEQ ID NO: 1403402
auucuucacagacuugcca

SEQ ID NO: 1403404 - RNA, 19 nt, Artificial Sequence
  Description of Artificial Sequence: Synthetic oligonucleotide
  Sense strand starting at position 362 of SEQ ID NO: 1243241
aaaugcuguccucguauua

SEQ ID NO: 1403405 - RNA, 19 nt, Artificial Sequence
  Description of Artificial Sequence: Synthetic oligonucleotide
  Antisense strand to SEQ ID NO: 1403404
uaauacgaggacagcauuu

SEQ ID NO: 1403406 - RNA, 19 nt, Artificial Sequence
  Description of Artificial Sequence: Synthetic oligonucleotide
  Sense strand starting at position 367 of SEQ ID NO: 1243241
cuguccucguauuacugaa

SEQ ID NO: 1403407 - RNA, 19 nt, Artificial Sequence
  Description of Artificial Sequence: Synthetic oligonucleotide
  Antisense strand to SEQ ID NO: 1403406
uucaguaauacgaggacag

SEQ ID NO: 1403408 - RNA, 19 nt, Artificial Sequence
  Description of Artificial Sequence: Synthetic oligonucleotide
  Sense strand starting at position 513 of SEQ ID NO: 1243241
augcaucuguaggcaagau

SEQ ID NO: 1403409 - RNA, 19 nt, Artificial Sequence
  Description of Artificial Sequence: Synthetic oligonucleotide
  Antisense strand to SEQ ID NO: 1403408
aucuugccuacagaugcau

SEQ ID NO: 1403410 - RNA, 19 nt, Artificial Sequence
  Description of Artificial Sequence: Synthetic oligonucleotide
  Sense strand starting at position 514 of SEQ ID NO: 1243241
ugcaucuguaggcaagaua

SEQ ID NO: 1403411 - RNA, 19 nt, Artificial Sequence
  Description of Artificial Sequence: Synthetic oligonucleotide
  Antisense strand to SEQ ID NO: 1403410
uaucuugccuacagaugca

SEQ ID NO: 1403412 - RNA, 19 nt, Artificial Sequence
  Description of Artificial Sequence: Synthetic oligonucleotide
  Sense strand starting at position 583 of SEQ ID NO: 1243241
gccucuuguagugauguca

SEQ ID NO: 1403413 - RNA, 19 nt, Artificial Sequence
  Description of Artificial Sequence: Synthetic oligonucleotide
  Antisense strand to SEQ ID NO: 1403412
ugacaucacuacaagaggc

SEQ ID NO: 1403414 - RNA, 19 nt, Artificial Sequence
  Description of Artificial Sequence: Synthetic oligonucleotide
  Sense strand starting at position 931 of SEQ ID NO: 1243241
ggguuucucuccuucccua

SEQ ID NO: 1403415 - RNA, 19 nt, Artificial Sequence
  Description of Artificial Sequence: Synthetic oligonucleotide
  Antisense strand to SEQ ID NO: 1403414
uagggaaggagagaaaccc

SEQ ID NO: 1403416 - RNA, 19 nt, Artificial Sequence
  Description of Artificial Sequence: Synthetic oligonucleotide
  Sense strand starting at position 1108 of SEQ ID NO: 1243241
ucccuuuccugacucguau

SEQ ID NO: 1403417 - RNA, 19 nt, Artificial Sequence
  Description of Artificial Sequence: Synthetic oligonucleotide
  Antisense strand to SEQ ID NO: 1403416
auacgagucaggaaaggga

SEQ ID NO: 1403418 - RNA, 19 nt, Artificial Sequence
  Description of Artificial Sequence: Synthetic oligonucleotide
  Sense strand starting at position 1384 of SEQ ID NO: 1243241
agacacuuuccauacguaa

SEQ ID NO: 1403419 - RNA, 19 nt, Artificial Sequence
  Description of Artificial Sequence: Synthetic oligonucleotide
  Antisense strand to SEQ ID NO: 1403418
uuacguauggaaagugucu

SEQ ID NO: 1403420 - RNA, 19 nt, Artificial Sequence
  Description of Artificial Sequence: Synthetic oligonucleotide
  Sense strand starting at position 2284 of SEQ ID NO: 1243241
cgggaaagcuccugcgguu

SEQ ID NO: 1403421 - RNA, 19 nt, Artificial Sequence
  Description of Artificial Sequence: Synthetic oligonucleotide
  Antisense strand to SEQ ID NO: 1403420
aaccgcaggagcuuucccg

SEQ ID NO: 1403422 - RNA, 19 nt, Artificial Sequence
  Description of Artificial Sequence: Synthetic oligonucleotide
  Sense strand starting at position 2439 of SEQ ID NO: 1243241
gucaguguccgccucucaa

SEQ ID NO: 1403423 - RNA, 19 nt, Artificial Sequence
  Description of Artificial Sequence: Synthetic oligonucleotide
  Antisense strand to SEQ ID NO: 1403422
uugagaggcggacacugac

SEQ ID NO: 1403424 - RNA, 19 nt, Artificial Sequence
  Description of Artificial Sequence: Synthetic oligonucleotide
  Sense strand starting at position 2458 of SEQ ID NO: 1243241
caagacugcucaggugauu

SEQ ID NO: 1403425 - RNA, 19 nt, Artificial Sequence
  Description of Artificial Sequence: Synthetic oligonucleotide
  Antisense strand to SEQ ID NO: 1403424
aaucaccugagcagucuug

SEQ ID NO: 1403426 - RNA, 19 nt, Artificial Sequence
  Description of Artificial Sequence: Synthetic oligonucleotide
  Sense strand starting at position 2467 of SEQ ID NO: 1243241
ucaggugauuccuacacau

SEQ ID NO: 1403427 - RNA, 19 nt, Artificial Sequence
  Description of Artificial Sequence: Synthetic oligonucleotide
  Antisense strand to SEQ ID NO: 1403426
auguguaggaaucaccuga

SEQ ID NO: 1403428 - RNA, 19 nt, Artificial Sequence
  Description of Artificial Sequence: Synthetic oligonucleotide
  Sense strand starting at position 2605 of SEQ ID NO: 1243241
gagggaagguuggaagaau

SEQ ID NO: 1403429 - RNA, 19 nt, Artificial Sequence
  Description of Artificial Sequence: Synthetic oligonucleotide
  Antisense strand to SEQ ID NO: 1403428
auucuuccaaccuucccuc

SEQ ID NO: 1403430 - RNA, 19 nt, Artificial Sequence
  Description of Artificial Sequence: Synthetic oligonucleotide
  Sense strand starting at position 2614 of SEQ ID NO: 1243241
uuggaagaaugccuagcaa

SEQ ID NO: 1403431 - RNA, 19 nt, Artificial Sequence
  Description of Artificial Sequence: Synthetic oligonucleotide
  Antisense strand to SEQ ID NO: 1403430
uugcuaggcauucuuccaa

SEQ ID NO: 1403432 - RNA, 19 nt, Artificial Sequence
  Description of Artificial Sequence: Synthetic oligonucleotide
  Sense strand starting at position 2637 of SEQ ID NO: 1243241
gcaggucauagccaaaugu

SEQ ID NO: 1403433 - RNA, 19 nt, Artificial Sequence
  Description of Artificial Sequence: Synthetic oligonucleotide
  Antisense strand to SEQ ID NO: 1403432
acauuuggcuaugaccugc

SEQ ID NO: 1403434 - RNA, 19 nt, Artificial Sequence
  Description of Artificial Sequence: Synthetic oligonucleotide
  Sense strand starting at position 3065 of SEQ ID NO: 1243241
gcuacuuacucugugccua

SEQ ID NO: 1403435 - RNA, 19 nt, Artificial Sequence
  Description of Artificial Sequence: Synthetic oligonucleotide
  Antisense strand to SEQ ID NO: 1403434
uaggcacagaguaaguagc

SEQ ID NO: 1403436 - RNA, 19 nt, Artificial Sequence
  Description of Artificial Sequence: Synthetic oligonucleotide
  Sense strand starting at position 3117 of SEQ ID NO: 1243241
cccguuuguucuguaggua

SEQ ID NO: 1403437 - RNA, 19 nt, Artificial Sequence
  Description of Artificial Sequence: Synthetic oligonucleotide
  Antisense strand to SEQ ID NO: 1403436
uaccuacagaacaaacggg

SEQ ID NO: 1403438 - RNA, 19 nt, Artificial Sequence
  Description of Artificial Sequence: Synthetic oligonucleotide
  Sense strand starting at position 3120 of SEQ ID NO: 1243241
guuuguucuguagguacuu

SEQ ID NO: 1403439 - RNA, 19 nt, Artificial Sequence
  Description of Artificial Sequence: Synthetic oligonucleotide
  Antisense strand to SEQ ID NO: 1403438
aaguaccuacagaacaaac

SEQ ID NO: 1403440 - RNA, 19 nt, Artificial Sequence
  Description of Artificial Sequence: Synthetic oligonucleotide
  Sense strand starting at position 3331 of SEQ ID NO: 1243241
cagagcagugcuugguaaa

SEQ ID NO: 1403441 - RNA, 19 nt, Artificial Sequence
  Description of Artificial Sequence: Synthetic oligonucleotide
  Antisense strand to SEQ ID NO: 1403440
uuuaccaagcacugcucug

SEQ ID NO: 1403442 - RNA, 19 nt, Artificial Sequence
  Description of Artificial Sequence: Synthetic oligonucleotide
  Sense strand starting at position 3619 of SEQ ID NO: 1243241
cuccuagucugaugaugua

SEQ ID NO: 1403443 - RNA, 19 nt, Artificial Sequence
  Description of Artificial Sequence: Synthetic oligonucleotide
  Antisense strand to SEQ ID NO: 1403442
uacaucaucagacuaggag

SEQ ID NO: 1403444 - RNA, 19 nt, Artificial Sequence
  Description of Artificial Sequence: Synthetic oligonucleotide
  Sense strand starting at position 3622 of SEQ ID NO: 1243241
cuagucugaugauguacua

SEQ ID NO: 1403445 - RNA, 19 nt, Artificial Sequence
  Description of Artificial Sequence: Synthetic oligonucleotide
  Antisense strand to SEQ ID NO: 1403444
uaguacaucaucagacuag

SEQ ID NO: 1403446 - RNA, 19 nt, Artificial Sequence
  Description of Artificial Sequence: Synthetic oligonucleotide
  Sense strand starting at position 3651 of SEQ ID NO: 1243241
agacucagccuguagucau

SEQ ID NO: 1403447 - RNA, 19 nt, Artificial Sequence
  Description of Artificial Sequence: Synthetic oligonucleotide
  Antisense strand to SEQ ID NO: 1403446
augacuacaggcugagucu

SEQ ID NO: 1403448 - RNA, 19 nt, Artificial Sequence
  Description of Artificial Sequence: Synthetic oligonucleotide
  Sense strand starting at position 3813 of SEQ ID NO: 1243241
agcaaucaguugugacaac

SEQ ID NO: 1403449 - RNA, 19 nt, Artificial Sequence
  Description of Artificial Sequence: Synthetic oligonucleotide
  Antisense strand to SEQ ID NO: 1403448
guugucacaacugauugcu

SEQ ID NO: 1403450 - RNA, 19 nt, Artificial Sequence
  Description of Artificial Sequence: Synthetic oligonucleotide
  Sense strand starting at position 3823 of SEQ ID NO: 1243241
ugugacaacccaugugcaa

SEQ ID NO: 1403451 - RNA, 19 nt, Artificial Sequence
  Description of Artificial Sequence: Synthetic oligonucleotide
  Antisense strand to SEQ ID NO: 1403450
uugcacauggguugucaca

SEQ ID NO: 1403452 - RNA, 19 nt, Artificial Sequence
  Description of Artificial Sequence: Synthetic oligonucleotide
  Sense strand starting at position 3830 of SEQ ID NO: 1243241
acccaugugcaauguugua

SEQ ID NO: 1403453 - RNA, 19 nt, Artificial Sequence
  Description of Artificial Sequence: Synthetic oligonucleotide
  Antisense strand to SEQ ID NO: 1403452
uacaacauugcacaugggu

SEQ ID NO: 1403454 - RNA, 19 nt, Artificial Sequence
  Description of Artificial Sequence: Synthetic oligonucleotide
  Sense strand starting at position 3835 of SEQ ID NO: 1243241
ugugcaauguuguauacaa

SEQ ID NO: 1403455 - RNA, 19 nt, Artificial Sequence
  Description of Artificial Sequence: Synthetic oligonucleotide
  Antisense strand to SEQ ID NO: 1403454
uuguauacaacauugcaca

SEQ ID NO: 1403456 - RNA, 19 nt, Artificial Sequence
  Description of Artificial Sequence: Synthetic oligonucleotide
  Sense strand starting at position 3962 of SEQ ID NO: 1243241
gggcauaacccacauuguu

SEQ ID NO: 1403457 - RNA, 19 nt, Artificial Sequence
  Description of Artificial Sequence: Synthetic oligonucleotide
  Antisense strand to SEQ ID NO: 1403456
aacaauguggguuaugccc

SEQ ID NO: 1403458 - RNA, 19 nt, Artificial Sequence
  Description of Artificial Sequence: Synthetic oligonucleotide
  Sense strand starting at position 3970 of SEQ ID NO: 1243241
cccacauuguuuguacgaa

SEQ ID NO: 1403459 - RNA, 19 nt, Artificial Sequence
  Description of Artificial Sequence: Synthetic oligonucleotide
  Antisense strand to SEQ ID NO: 1403458
uucguacaaacaauguggg

SEQ ID NO: 1403460 - RNA, 19 nt, Artificial Sequence
  Description of Artificial Sequence: Synthetic oligonucleotide
  Sense strand starting at position 3971 of SEQ ID NO: 1243241
ccacauuguuuguacgaac

SEQ ID NO: 1403461 - RNA, 19 nt, Artificial Sequence
  Description of Artificial Sequence: Synthetic oligonucleotide
  Antisense strand to SEQ ID NO: 1403460
guucguacaaacaaugugg

SEQ ID NO: 1403462 - RNA, 19 nt, Artificial Sequence
  Description of Artificial Sequence: Synthetic oligonucleotide
  Sense strand starting at position 3974 of SEQ ID NO: 1243241
cauuguuuguacgaacagu

SEQ ID NO: 1403463 - RNA, 19 nt, Artificial Sequence
  Description of Artificial Sequence: Synthetic oligonucleotide
  Antisense strand to SEQ ID NO: 1403462
acuguucguacaaacaaug

SEQ ID NO: 1403464 - RNA, 19 nt, Artificial Sequence
  Description of Artificial Sequence: Synthetic oligonucleotide
  Sense strand starting at position 49 of SEQ ID NO: 1243242
guuggcuacucccugcaaa

SEQ ID NO: 1403465 - RNA, 19 nt, Artificial Sequence
  Description of Artificial Sequence: Synthetic oligonucleotide
  Antisense strand to SEQ ID NO: 1403464
uuugcagggaguagccaac

SEQ ID NO: 1403466 - RNA, 19 nt, Artificial Sequence
  Description of Artificial Sequence: Synthetic oligonucleotide
  Sense strand starting at position 50 of SEQ ID NO: 1243242
uuggcuacucccugcaaau

SEQ ID NO: 1403467 - RNA, 19 nt, Artificial Sequence
  Description of Artificial Sequence: Synthetic oligonucleotide
  Antisense strand to SEQ ID NO: 1403466
auuugcagggaguagccaa

SEQ ID NO: 1403468 - RNA, 19 nt, Artificial Sequence
  Description of Artificial Sequence: Synthetic oligonucleotide
  Sense strand starting at position 52 of SEQ ID NO: 1243242
ggcuacucccugcaaauua

SEQ ID NO: 1403469 - RNA, 19 nt, Artificial Sequence
  Description of Artificial Sequence: Synthetic oligonucleotide
  Antisense strand to SEQ ID NO: 1403468
uaauuugcagggaguagcc

SEQ ID NO: 1403470 - RNA, 19 nt, Artificial Sequence
  Description of Artificial Sequence: Synthetic oligonucleotide
  Sense strand starting at position 134 of SEQ ID NO: 1243242
cugcgucugccucagauuu

SEQ ID NO: 1403471 - RNA, 19 nt, Artificial Sequence
  Description of Artificial Sequence: Synthetic oligonucleotide
  Antisense strand to SEQ ID NO: 1403470
aaaucugaggcagacgcag

SEQ ID NO: 1403472 - RNA, 19 nt, Artificial Sequence
  Description of Artificial Sequence: Synthetic oligonucleotide
  Sense strand starting at position 153 of SEQ ID NO: 1243242
cagugaagucucugcucaa

SEQ ID NO: 1403473 - RNA, 19 nt, Artificial Sequence
  Description of Artificial Sequence: Synthetic oligonucleotide
  Antisense strand to SEQ ID NO: 1403472
uugagcagagacuucacug

SEQ ID NO: 1403474 - RNA, 19 nt, Artificial Sequence
  Description of Artificial Sequence: Synthetic oligonucleotide
  Sense strand starting at position 154 of SEQ ID NO: 1243242
agugaagucucugcucaaa

SEQ ID NO: 1403475 - RNA, 19 nt, Artificial Sequence
  Description of Artificial Sequence: Synthetic oligonucleotide
  Antisense strand to SEQ ID NO: 1403474
uuugagcagagacuucacu

SEQ ID NO: 1403476 - RNA, 19 nt, Artificial Sequence
  Description of Artificial Sequence: Synthetic oligonucleotide
  Sense strand starting at position 189 of SEQ ID NO: 1243242
aagccuuccuggucgugaa

SEQ ID NO: 1403477 - RNA, 19 nt, Artificial Sequence
  Description of Artificial Sequence: Synthetic oligonucleotide
  Antisense strand to SEQ ID NO: 1403476
uucacgaccaggaaggcuu

SEQ ID NO: 1403478 - RNA, 19 nt, Artificial Sequence
  Description of Artificial Sequence: Synthetic oligonucleotide
  Sense strand starting at position 190 of SEQ ID NO: 1243242
agccuuccuggucgugaaa

SEQ ID NO: 1403479 - RNA, 19 nt, Artificial Sequence
  Description of Artificial Sequence: Synthetic oligonucleotide
  Antisense strand to SEQ ID NO: 1403478
uuucacgaccaggaaggcu

SEQ ID NO: 1403480 - RNA, 19 nt, Artificial Sequence
  Description of Artificial Sequence: Synthetic oligonucleotide
  Sense strand starting at position 193 of SEQ ID NO: 1243242
cuuccuggucgugaaauug

SEQ ID NO: 1403481 - RNA, 19 nt, Artificial Sequence
  Description of Artificial Sequence: Synthetic oligonucleotide
  Antisense strand to SEQ ID NO: 1403480
caauuucacgaccaggaag

SEQ ID NO: 1403482 - RNA, 19 nt, Artificial Sequence
  Description of Artificial Sequence: Synthetic oligonucleotide
  Sense strand starting at position 201 of SEQ ID NO: 1243242
ucgugaaauugcucuccuu

SEQ ID NO: 1403483 - RNA, 19 nt, Artificial Sequence
  Description of Artificial Sequence: Synthetic oligonucleotide
  Antisense strand to SEQ ID NO: 1403482
aaggagagcaauuucacga

SEQ ID NO: 1403484 - RNA, 19 nt, Artificial Sequence
  Description of Artificial Sequence: Synthetic oligonucleotide
  Sense strand starting at position 366 of SEQ ID NO: 1243242
auuaaaugauuccaggaac

SEQ ID NO: 1403485 - RNA, 19 nt, Artificial Sequence
  Description of Artificial Sequence: Synthetic oligonucleotide
  Antisense strand to SEQ ID NO: 1403484
guuccuggaaucauuuaau

SEQ ID NO: 1403486 - RNA, 19 nt, Artificial Sequence
  Description of Artificial Sequence: Synthetic oligonucleotide
  Sense strand starting at position 476 of SEQ ID NO: 1243242
aaaugaauuucuggcugua

SEQ ID NO: 1403487 - RNA, 19 nt, Artificial Sequence
  Description of Artificial Sequence: Synthetic oligonucleotide
  Antisense strand to SEQ ID NO: 1403486
uacagccagaaauucauuu

SEQ ID NO: 1403488 - RNA, 19 nt, Artificial Sequence
  Description of Artificial Sequence: Synthetic oligonucleotide
  Sense strand starting at position 479 of SEQ ID NO: 1243242
ugaauuucuggcuguacuu

SEQ ID NO: 1403489 - RNA, 19 nt, Artificial Sequence
  Description of Artificial Sequence: Synthetic oligonucleotide
  Antisense strand to SEQ ID NO: 1403488
aaguacagccagaaauuca

SEQ ID NO: 1403490 - RNA, 19 nt, Artificial Sequence
  Description of Artificial Sequence: Synthetic oligonucleotide
  Sense strand starting at position 489 of SEQ ID NO: 1243242
gcuguacuuccugagauuc

SEQ ID NO: 1403491 - RNA, 19 nt, Artificial Sequence
  Description of Artificial Sequence: Synthetic oligonucleotide
  Antisense strand to SEQ ID NO: 1403490
gaaucucaggaaguacagc

SEQ ID NO: 1403492 - RNA, 19 nt, Artificial Sequence
  Description of Artificial Sequence: Synthetic oligonucleotide
  Sense strand starting at position 506 of SEQ ID NO: 1243242
ucaaauuccgauugcacau

SEQ ID NO: 1403493 - RNA, 19 nt, Artificial Sequence
  Description of Artificial Sequence: Synthetic oligonucleotide
  Antisense strand to SEQ ID NO: 1403492
augugcaaucggaauuuga

SEQ ID NO: 1403494 - RNA, 19 nt, Artificial Sequence
  Description of Artificial Sequence: Synthetic oligonucleotide
  Sense strand starting at position 793 of SEQ ID NO: 1243242
cucgcuggauugcuaagaa

SEQ ID NO: 1403495 - RNA, 19 nt, Artificial Sequence
  Description of Artificial Sequence: Synthetic oligonucleotide
  Antisense strand to SEQ ID NO: 1403494
uucuuagcaauccagcgag

SEQ ID NO: 1403496 - RNA, 19 nt, Artificial Sequence
  Description of Artificial Sequence: Synthetic oligonucleotide
  Sense strand starting at position 797 of SEQ ID NO: 1243242
cuggauugcuaagaaauac

SEQ ID NO: 1403497 - RNA, 19 nt, Artificial Sequence
  Description of Artificial Sequence: Synthetic oligonucleotide
  Antisense strand to SEQ ID NO: 1403496
guauuucuuagcaauccag

SEQ ID NO: 1403498 - RNA, 19 nt, Artificial Sequence
  Description of Artificial Sequence: Synthetic oligonucleotide
  Sense strand starting at position 838 of SEQ ID NO: 1243242
ccaccugaguccucugaaa

SEQ ID NO: 1403499 - RNA, 19 nt, Artificial Sequence
  Description of Artificial Sequence: Synthetic oligonucleotide
  Antisense strand to SEQ ID NO: 1403498
uuucagaggacucaggugg

SEQ ID NO: 1403500 - RNA, 19 nt, Artificial Sequence
  Description of Artificial Sequence: Synthetic oligonucleotide
  Sense strand starting at position 1193 of SEQ ID NO: 1243242
ggaugugcccucuagauua

SEQ ID NO: 1403501 - RNA, 19 nt, Artificial Sequence
  Description of Artificial Sequence: Synthetic oligonucleotide
  Antisense strand to SEQ ID NO: 1403500
uaaucuagagggcacaucc

SEQ ID NO: 1403502 - RNA, 19 nt, Artificial Sequence
  Description of Artificial Sequence: Synthetic oligonucleotide
  Sense strand starting at position 1195 of SEQ ID NO: 1243242
augugcccucuagauuaga

SEQ ID NO: 1403503 - RNA, 19 nt, Artificial Sequence
  Description of Artificial Sequence: Synthetic oligonucleotide
  Antisense strand to SEQ ID NO: 1403502
ucuaaucuagagggcacau

SEQ ID NO: 1403504 - RNA, 19 nt, Artificial Sequence
  Description of Artificial Sequence: Synthetic oligonucleotide
  Sense strand starting at position 1198 of SEQ ID NO: 1243242
ugcccucuagauuagauga

SEQ ID NO: 1403505 - RNA, 19 nt, Artificial Sequence
  Description of Artificial Sequence: Synthetic oligonucleotide
  Antisense strand to SEQ ID NO: 1403504
ucaucuaaucuagagggca

SEQ ID NO: 1403506 - RNA, 19 nt, Artificial Sequence
  Description of Artificial Sequence: Synthetic oligonucleotide
  Sense strand starting at position 1205 of SEQ ID NO: 1243242
uagauuagaugaggaaugu

SEQ ID NO: 1403507 - RNA, 19 nt, Artificial Sequence
  Description of Artificial Sequence: Synthetic oligonucleotide
  Antisense strand to SEQ ID NO: 1403506
acauuccucaucuaaucua

SEQ ID NO: 1403508 - RNA, 19 nt, Artificial Sequence
  Description of Artificial Sequence: Synthetic oligonucleotide
  Sense strand starting at position 1523 of SEQ ID NO: 1243242
ggguagugucguggugaga

SEQ ID NO: 1403509 - RNA, 19 nt, Artificial Sequence
  Description of Artificial Sequence: Synthetic oligonucleotide
  Antisense strand to SEQ ID NO: 1403508
ucucaccacgacacuaccc

SEQ ID NO: 1403510 - RNA, 19 nt, Artificial Sequence
  Description of Artificial Sequence: Synthetic oligonucleotide
  Sense strand starting at position 1843 of SEQ ID NO: 1243242
cuaacuuucgacgggaacu

SEQ ID NO: 1403511 - RNA, 19 nt, Artificial Sequence
  Description of Artificial Sequence: Synthetic oligonucleotide
  Antisense strand to SEQ ID NO: 1403510
aguucccgucgaaaguuag

SEQ ID NO: 1403512 - RNA, 19 nt, Artificial Sequence
  Description of Artificial Sequence: Synthetic oligonucleotide
  Sense strand starting at position 2272 of SEQ ID NO: 1243242
uagggauaaacuuguggua

SEQ ID NO: 1403513 - RNA, 19 nt, Artificial Sequence
  Description of Artificial Sequence: Synthetic oligonucleotide
  Antisense strand to SEQ ID NO: 1403512
uaccacaaguuuaucccua

SEQ ID NO: 1403514 - RNA, 19 nt, Artificial Sequence
  Description of Artificial Sequence: Synthetic oligonucleotide
  Sense strand starting at position 2369 of SEQ ID NO: 1243242
ugaagagucccgggagaag

SEQ ID NO: 1403515 - RNA, 19 nt, Artificial Sequence
  Description of Artificial Sequence: Synthetic oligonucleotide
  Antisense strand to SEQ ID NO: 1403514
cuucucccgggacucuuca

SEQ ID NO: 1403516 - RNA, 19 nt, Artificial Sequence
  Description of Artificial Sequence: Synthetic oligonucleotide
  Sense strand starting at position 2535 of SEQ ID NO: 1243242
aaagaagaauccugggaga

SEQ ID NO: 1403517 - RNA, 19 nt, Artificial Sequence
  Description of Artificial Sequence: Synthetic oligonucleotide
  Antisense strand to SEQ ID NO: 1403516
ucucccaggauucuucuuu

SEQ ID NO: 1403518 - RNA, 19 nt, Artificial Sequence
  Description of Artificial Sequence: Synthetic oligonucleotide
  Sense strand starting at position 2684 of SEQ ID NO: 1243242
caguuuccucgucugucau

SEQ ID NO: 1403519 - RNA, 19 nt, Artificial Sequence
  Description of Artificial Sequence: Synthetic oligonucleotide
  Antisense strand to SEQ ID NO: 1403518
augacagacgaggaaacug

SEQ ID NO: 1403520 - RNA, 19 nt, Artificial Sequence
  Description of Artificial Sequence: Synthetic oligonucleotide
  Sense strand starting at position 2694 of SEQ ID NO: 1243242
gucugucauauagauacga

SEQ ID NO: 1403521 - RNA, 19 nt, Artificial Sequence
  Description of Artificial Sequence: Synthetic oligonucleotide
  Antisense strand to SEQ ID NO: 1403520
ucguaucuauaugacagac

SEQ ID NO: 1403522 - RNA, 19 nt, Artificial Sequence
  Description of Artificial Sequence: Synthetic oligonucleotide
  Sense strand starting at position 2698 of SEQ ID NO: 1243242
gucauauagauacgaagga

SEQ ID NO: 1403523 - RNA, 19 nt, Artificial Sequence
  Description of Artificial Sequence: Synthetic oligonucleotide
  Antisense strand to SEQ ID NO: 1403522
uccuucguaucuauaugac

SEQ ID NO: 1403524 - RNA, 19 nt, Artificial Sequence
  Description of Artificial Sequence: Synthetic oligonucleotide
  Sense strand starting at position 2699 of SEQ ID NO: 1243242
ucauauagauacgaaggaa

SEQ ID NO: 1403525 - RNA, 19 nt, Artificial Sequence
  Description of Artificial Sequence: Synthetic oligonucleotide
  Antisense strand to SEQ ID NO: 1403524
uuccuucguaucuauauga

SEQ ID NO: 1403526 - RNA, 19 nt, Artificial Sequence
  Description of Artificial Sequence: Synthetic oligonucleotide
  Sense strand starting at position 2728 of SEQ ID NO: 1243242
cagagcguuguagggaaua

SEQ ID NO: 1403527 - RNA, 19 nt, Artificial Sequence
  Description of Artificial Sequence: Synthetic oligonucleotide
  Antisense strand to SEQ ID NO: 1403526
uauucccuacaacgcucug

SEQ ID NO: 1403528 - RNA, 19 nt, Artificial Sequence
  Description of Artificial Sequence: Synthetic oligonucleotide
  Sense strand starting at position 2730 of SEQ ID NO: 1243242
gagcguuguagggaauaaa

SEQ ID NO: 1403529 - RNA, 19 nt, Artificial Sequence
  Description of Artificial Sequence: Synthetic oligonucleotide
  Antisense strand to SEQ ID NO: 1403528
uuuauucccuacaacgcuc

SEQ ID NO: 1403530 - RNA, 19 nt, Artificial Sequence
  Description of Artificial Sequence: Synthetic oligonucleotide
  Sense strand starting at position 2733 of SEQ ID NO: 1243242
cguuguagggaauaaauga

SEQ ID NO: 1403531 - RNA, 19 nt, Artificial Sequence
  Description of Artificial Sequence: Synthetic oligonucleotide
  Antisense strand to SEQ ID NO: 1403530
ucauuuauucccuacaacg

SEQ ID NO: 1403532 - RNA, 19 nt, Artificial Sequence
  Description of Artificial Sequence: Synthetic oligonucleotide
  Sense strand starting at position 2883 of SEQ ID NO: 1243242
gagguuugcacagauaggu

SEQ ID NO: 1403533 - RNA, 19 nt, Artificial Sequence
  Description of Artificial Sequence: Synthetic oligonucleotide
  Antisense strand to SEQ ID NO: 1403532
accuaucugugcaaaccuc

SEQ ID NO: 1403534 - RNA, 19 nt, Artificial Sequence
  Description of Artificial Sequence: Synthetic oligonucleotide
  Sense strand starting at position 2892 of SEQ ID NO: 1243242
acagauaggucaucaugca

SEQ ID NO: 1403535 - RNA, 19 nt, Artificial Sequence
  Description of Artificial Sequence: Synthetic oligonucleotide
  Antisense strand to SEQ ID NO: 1403534
ugcaugaugaccuaucugu

SEQ ID NO: 1403536 - RNA, 19 nt, Artificial Sequence
  Description of Artificial Sequence: Synthetic oligonucleotide
  Sense strand starting at position 2893 of SEQ ID NO: 1243242
cagauaggucaucaugcau

SEQ ID NO: 1403537 - RNA, 19 nt, Artificial Sequence
  Description of Artificial Sequence: Synthetic oligonucleotide
  Antisense strand to SEQ ID NO: 1403536
augcaugaugaccuaucug

SEQ ID NO: 1403538 - RNA, 19 nt, Artificial Sequence
  Description of Artificial Sequence: Synthetic oligonucleotide
  Sense strand starting at position 3848 of SEQ ID NO: 1243242
gauggagucuugcuggaau

SEQ ID NO: 1403539 - RNA, 19 nt, Artificial Sequence
  Description of Artificial Sequence: Synthetic oligonucleotide
  Antisense strand to SEQ ID NO: 1403538
auuccagcaagacuccauc

SEQ ID NO: 1403540 - RNA, 19 nt, Artificial Sequence
  Description of Artificial Sequence: Synthetic oligonucleotide
  Sense strand starting at position 3850 of SEQ ID NO: 1243242
uggagucuugcuggaauua

SEQ ID NO: 1403541 - RNA, 19 nt, Artificial Sequence
  Description of Artificial Sequence: Synthetic oligonucleotide
  Antisense strand to SEQ ID NO: 1403540
uaauuccagcaagacucca

SEQ ID NO: 1403542 - RNA, 19 nt, Artificial Sequence
  Description of Artificial Sequence: Synthetic oligonucleotide
  Sense strand starting at position 3851 of SEQ ID NO: 1243242
ggagucuugcuggaauuac

SEQ ID NO: 1403543 - RNA, 19 nt, Artificial Sequence
  Description of Artificial Sequence: Synthetic oligonucleotide
  Antisense strand to SEQ ID NO: 1403542
guaauuccagcaagacucc

SEQ ID NO: 1403544 - RNA, 19 nt, Artificial Sequence
  Description of Artificial Sequence: Synthetic oligonucleotide
  Sense strand starting at position 350 of SEQ ID NO: 1243243
gagagaauguuagcaacaa

SEQ ID NO: 1403545 - RNA, 19 nt, Artificial Sequence
  Description of Artificial Sequence: Synthetic oligonucleotide
  Antisense strand to SEQ ID NO: 1403544
uuguugcuaacauucucuc

SEQ ID NO: 1403546 - RNA, 19 nt, Artificial Sequence
  Description of Artificial Sequence: Synthetic oligonucleotide
  Sense strand starting at position 354 of SEQ ID NO: 1243243
gaauguuagcaacaauagu

SEQ ID NO: 1403547 - RNA, 19 nt, Artificial Sequence
  Description of Artificial Sequence: Synthetic oligonucleotide
  Antisense strand to SEQ ID NO: 1403546
acuauuguugcuaacauuc

SEQ ID NO: 1403548 - RNA, 19 nt, Artificial Sequence
  Description of Artificial Sequence: Synthetic oligonucleotide
  Sense strand starting at position 420 of SEQ ID NO: 1243243
auaccaagucuuuggaaua

SEQ ID NO: 1403549 - RNA, 19 nt, Artificial Sequence
  Description of Artificial Sequence: Synthetic oligonucleotide
  Antisense strand to SEQ ID NO: 1403548
uauuccaaagacuugguau

SEQ ID NO: 1403550 - RNA, 19 nt, Artificial Sequence
  Description of Artificial Sequence: Synthetic oligonucleotide
  Sense strand starting at position 432 of SEQ ID NO: 1243243
uggaauaggugaucaucau

SEQ ID NO: 1403551 - RNA, 19 nt, Artificial Sequence
  Description of Artificial Sequence: Synthetic oligonucleotide
  Antisense strand to SEQ ID NO: 1403550
augaugaucaccuauucca

SEQ ID NO: 1403552 - RNA, 19 nt, Artificial Sequence
  Description of Artificial Sequence: Synthetic oligonucleotide
  Sense strand starting at position 481 of SEQ ID NO: 1243243
uagaguaggugaucacaau

SEQ ID NO: 1403553 - RNA, 19 nt, Artificial Sequence
  Description of Artificial Sequence: Synthetic oligonucleotide
  Antisense strand to SEQ ID NO: 1403552
auugugaucaccuacucua

SEQ ID NO: 1403554 - RNA, 19 nt, Artificial Sequence
  Description of Artificial Sequence: Synthetic oligonucleotide
  Sense strand starting at position 650 of SEQ ID NO: 1243243
ugaugcuuauuacuggaau

SEQ ID NO: 1403555 - RNA, 19 nt, Artificial Sequence
  Description of Artificial Sequence: Synthetic oligonucleotide
  Antisense strand to SEQ ID NO: 1403554
auuccaguaauaagcauca

SEQ ID NO: 1403556 - RNA, 19 nt, Artificial Sequence
  Description of Artificial Sequence: Synthetic oligonucleotide
  Sense strand starting at position 737 of SEQ ID NO: 1243243
ggagccuuaccucaucuuu

SEQ ID NO: 1403557 - RNA, 19 nt, Artificial Sequence
  Description of Artificial Sequence: Synthetic oligonucleotide
  Antisense strand to SEQ ID NO: 1403556
aaagaugagguaaggcucc

SEQ ID NO: 1403558 - RNA, 19 nt, Artificial Sequence
  Description of Artificial Sequence: Synthetic oligonucleotide
  Sense strand starting at position 829 of SEQ ID NO: 1243243
ccaaguauuuaagauggaa

SEQ ID NO: 1403559 - RNA, 19 nt, Artificial Sequence
  Description of Artificial Sequence: Synthetic oligonucleotide
  Antisense strand to SEQ ID NO: 1403558
uuccaucuuaaauacuugg

SEQ ID NO: 1403560 - RNA, 19 nt, Artificial Sequence
  Description of Artificial Sequence: Synthetic oligonucleotide
  Sense strand starting at position 1170 of SEQ ID NO: 1243243
acaugaugugcaugaccua

SEQ ID NO: 1403561 - RNA, 19 nt, Artificial Sequence
  Description of Artificial Sequence: Synthetic oligonucleotide
  Antisense strand to SEQ ID NO: 1403560
uaggucaugcacaucaugu

SEQ ID NO: 1403562 - RNA, 19 nt, Artificial Sequence
  Description of Artificial Sequence: Synthetic oligonucleotide
  Sense strand starting at position 1393 of SEQ ID NO: 1243243
aauguugaugcucauaaag

SEQ ID NO: 1403563 - RNA, 19 nt, Artificial Sequence
  Description of Artificial Sequence: Synthetic oligonucleotide
  Antisense strand to SEQ ID NO: 1403562
cuuuaugagcaucaacauu

SEQ ID NO: 1403564 - RNA, 19 nt, Artificial Sequence
  Description of Artificial Sequence: Synthetic oligonucleotide
  Sense strand starting at position 1421 of SEQ ID NO: 1243243
augugaagugcugagacuu

SEQ ID NO: 1403565 - RNA, 19 nt, Artificial Sequence
  Description of Artificial Sequence: Synthetic oligonucleotide
  Antisense strand to SEQ ID NO: 1403564
aagucucagcacuucacau

SEQ ID NO: 1403566 - RNA, 19 nt, Artificial Sequence
  Description of Artificial Sequence: Synthetic oligonucleotide
  Sense strand starting at position 1427 of SEQ ID NO: 1243243
agugcugagacuuaucuag

SEQ ID NO: 1403567 - RNA, 19 nt, Artificial Sequence
  Description of Artificial Sequence: Synthetic oligonucleotide
  Antisense strand to SEQ ID NO: 1403566
cuagauaagucucagcacu

SEQ ID NO: 1403568 - RNA, 19 nt, Artificial Sequence
  Description of Artificial Sequence: Synthetic oligonucleotide
  Sense strand starting at position 1434 of SEQ ID NO: 1243243
agacuuaucuagcuagaaa

SEQ ID NO: 1403569 - RNA, 19 nt, Artificial Sequence
  Description of Artificial Sequence: Synthetic oligonucleotide
  Antisense strand to SEQ ID NO: 1403568
uuucuagcuagauaagucu

SEQ ID NO: 1403570 - RNA, 19 nt, Artificial Sequence
  Description of Artificial Sequence: Synthetic oligonucleotide
  Sense strand starting at position 1525 of SEQ ID NO: 1243243
augcacugagcuuauuaaa

SEQ ID NO: 1403571 - RNA, 19 nt, Artificial Sequence
  Description of Artificial Sequence: Synthetic oligonucleotide
  Antisense strand to SEQ ID NO: 1403570
uuuaauaagcucagugcau

SEQ ID NO: 1403572 - RNA, 19 nt, Artificial Sequence
  Description of Artificial Sequence: Synthetic oligonucleotide
  Sense strand starting at position 1695 of SEQ ID NO: 1243243
gaaagaauguuggugauau

SEQ ID NO: 1403573 - RNA, 19 nt, Artificial Sequence
  Description of Artificial Sequence: Synthetic oligonucleotide
  Antisense strand to SEQ ID NO: 1403572
auaucaccaacauucuuuc

SEQ ID NO: 1403574 - RNA, 19 nt, Artificial Sequence
  Description of Artificial Sequence: Synthetic oligonucleotide
  Sense strand starting at position 1705 of SEQ ID NO: 1243243
uggugauauguggaaucug

SEQ ID NO: 1403575 - RNA, 19 nt, Artificial Sequence
  Description of Artificial Sequence: Synthetic oligonucleotide
  Antisense strand to SEQ ID NO: 1403574
cagauuccacauaucacca

SEQ ID NO: 1403576 - RNA, 19 nt, Artificial Sequence
  Description of Artificial Sequence: Synthetic oligonucleotide
  Sense strand starting at position 1917 of SEQ ID NO: 1243243
cuacauguccuuuaugagu

SEQ ID NO: 1403577 - RNA, 19 nt, Artificial Sequence
  Description of Artificial Sequence: Synthetic oligonucleotide
  Antisense strand to SEQ ID NO: 1403576
acucauaaaggacauguag

SEQ ID NO: 1403578 - RNA, 19 nt, Artificial Sequence
  Description of Artificial Sequence: Synthetic oligonucleotide
  Sense strand starting at position 2006 of SEQ ID NO: 1243243
guauguugccuguugccau

SEQ ID NO: 1403579 - RNA, 19 nt, Artificial Sequence
  Description of Artificial Sequence: Synthetic oligonucleotide
  Antisense strand to SEQ ID NO: 1403578
auggcaacaggcaacauac

SEQ ID NO: 1403580 - RNA, 19 nt, Artificial Sequence
  Description of Artificial Sequence: Synthetic oligonucleotide
  Sense strand starting at position 2043 of SEQ ID NO: 1243243
uggugaaucaccuacuggu

SEQ ID NO: 1403581 - RNA, 19 nt, Artificial Sequence
  Description of Artificial Sequence: Synthetic oligonucleotide
  Antisense strand to SEQ ID NO: 1403580
accaguaggugauucacca

SEQ ID NO: 1403582 - RNA, 19 nt, Artificial Sequence
  Description of Artificial Sequence: Synthetic oligonucleotide
  Sense strand starting at position 2060 of SEQ ID NO: 1243243
guucuuaaagcggaaguga

SEQ ID NO: 1403583 - RNA, 19 nt, Artificial Sequence
  Description of Artificial Sequence: Synthetic oligonucleotide
  Antisense strand to SEQ ID NO: 1403582
ucacuuccgcuuuaagaac

SEQ ID NO: 1403584 - RNA, 19 nt, Artificial Sequence
  Description of Artificial Sequence: Synthetic oligonucleotide
  Sense strand starting at position 2191 of SEQ ID NO: 1243243
uuugguuucugaccaccaa

SEQ ID NO: 1403585 - RNA, 19 nt, Artificial Sequence
  Description of Artificial Sequence: Synthetic oligonucleotide
  Antisense strand to SEQ ID NO: 1403584
uugguggucagaaaccaaa

SEQ ID NO: 1403586 - RNA, 19 nt, Artificial Sequence
  Description of Artificial Sequence: Synthetic oligonucleotide
  Sense strand starting at position 2192 of SEQ ID NO: 1243243
uugguuucugaccaccaaa

SEQ ID NO: 1403587 - RNA, 19 nt, Artificial Sequence
  Description of Artificial Sequence: Synthetic oligonucleotide
  Antisense strand to SEQ ID NO: 1403586
uuugguggucagaaaccaa

SEQ ID NO: 1403588 - RNA, 19 nt, Artificial Sequence
  Description of Artificial Sequence: Synthetic oligonucleotide
  Sense strand starting at position 2436 of SEQ ID NO: 1243243
gaugcaggauugcuacaaa

SEQ ID NO: 1403589 - RNA, 19 nt, Artificial Sequence
  Description of Artificial Sequence: Synthetic oligonucleotide
  Antisense strand to SEQ ID NO: 1403588
uuuguagcaauccugcauc

SEQ ID NO: 1403590 - RNA, 19 nt, Artificial Sequence
  Description of Artificial Sequence: Synthetic oligonucleotide
  Sense strand starting at position 2722 of SEQ ID NO: 1243243
auaaauggccuuuagaagu

SEQ ID NO: 1403591 - RNA, 19 nt, Artificial Sequence
  Description of Artificial Sequence: Synthetic oligonucleotide
  Antisense strand to SEQ ID NO: 1403590
acuucuaaaggccauuuau

SEQ ID NO: 1403592 - RNA, 19 nt, Artificial Sequence
  Description of Artificial Sequence: Synthetic oligonucleotide
  Sense strand starting at position 2791 of SEQ ID NO: 1243243
cuuucuuuaggaggaacua

SEQ ID NO: 1403593 - RNA, 19 nt, Artificial Sequence
  Description of Artificial Sequence: Synthetic oligonucleotide
  Antisense strand to SEQ ID NO: 1403592
uaguuccuccuaaagaaag

SEQ ID NO: 1403594 - RNA, 19 nt, Artificial Sequence
  Description of Artificial Sequence: Synthetic oligonucleotide
  Sense strand starting at position 2837 of SEQ ID NO: 1243243
guuguaauggaacaaaugu

SEQ ID NO: 1403595 - RNA, 19 nt, Artificial Sequence
  Description of Artificial Sequence: Synthetic oligonucleotide
  Antisense strand to SEQ ID NO: 1403594
acauuuguuccauuacaac

SEQ ID NO: 1403596 - RNA, 19 nt, Artificial Sequence
  Description of Artificial Sequence: Synthetic oligonucleotide
  Sense strand starting at position 2846 of SEQ ID NO: 1243243
gaacaaauguauccuugag

SEQ ID NO: 1403597 - RNA, 19 nt, Artificial Sequence
  Description of Artificial Sequence: Synthetic oligonucleotide
  Antisense strand to SEQ ID NO: 1403596
cucaaggauacauuuguuc

SEQ ID NO: 1403598 - RNA, 19 nt, Artificial Sequence
  Description of Artificial Sequence: Synthetic oligonucleotide
  Sense strand starting at position 3118 of SEQ ID NO: 1243243
gaguuuguuccaugaagga

SEQ ID NO: 1403599 - RNA, 19 nt, Artificial Sequence
  Description of Artificial Sequence: Synthetic oligonucleotide
  Antisense strand to SEQ ID NO: 1403598
uccuucauggaacaaacuc

SEQ ID NO: 1403600 - RNA, 19 nt, Artificial Sequence
  Description of Artificial Sequence: Synthetic oligonucleotide
  Sense strand starting at position 3204 of SEQ ID NO: 1243243
ggaaguguuauaugauaag

SEQ ID NO: 1403601 - RNA, 19 nt, Artificial Sequence
  Description of Artificial Sequence: Synthetic oligonucleotide
  Antisense strand to SEQ ID NO: 1403600
cuuaucauauaacacuucc

SEQ ID NO: 1403602 - RNA, 19 nt, Artificial Sequence
  Description of Artificial Sequence: Synthetic oligonucleotide
  Sense strand starting at position 3227 of SEQ ID NO: 1243243
ugauacauuugacaguaau

SEQ ID NO: 1403603 - RNA, 19 nt, Artificial Sequence
  Description of Artificial Sequence: Synthetic oligonucleotide
  Antisense strand to SEQ ID NO: 1403602
auuacugucaaauguauca

SEQ ID NO: 1403604 - RNA, 19 nt, Artificial Sequence
  Description of Artificial Sequence: Synthetic oligonucleotide
  Sense strand starting at position 3242 of SEQ ID NO: 1243243
uaauguuugccagauggau

SEQ ID NO: 1403605 - RNA, 19 nt, Artificial Sequence
  Description of Artificial Sequence: Synthetic oligonucleotide
  Antisense strand to SEQ ID NO: 1403604
auccaucuggcaaacauua

SEQ ID NO: 1403606 - RNA, 19 nt, Artificial Sequence
  Description of Artificial Sequence: Synthetic oligonucleotide
  Sense strand starting at position 3244 of SEQ ID NO: 1243243
auguuugccagauggauag

SEQ ID NO: 1403607 - RNA, 19 nt, Artificial Sequence
  Description of Artificial Sequence: Synthetic oligonucleotide
  Antisense strand to SEQ ID NO: 1403606
cuauccaucuggcaaacau

SEQ ID NO: 1403608 - RNA, 19 nt, Artificial Sequence
  Description of Artificial Sequence: Synthetic oligonucleotide
  Sense strand starting at position 3335 of SEQ ID NO: 1243243
aggaguauggcuggacaga

SEQ ID NO: 1403609 - RNA, 19 nt, Artificial Sequence
  Description of Artificial Sequence: Synthetic oligonucleotide
  Antisense strand to SEQ ID NO: 1403608
ucuguccagccauacuccu

SEQ ID NO: 1403610 - RNA, 19 nt, Artificial Sequence
  Description of Artificial Sequence: Synthetic oligonucleotide
  Sense strand starting at position 3595 of SEQ ID NO: 1243243
aggacuucucuuggugaca

SEQ ID NO: 1403611 - RNA, 19 nt, Artificial Sequence
  Description of Artificial Sequence: Synthetic oligonucleotide
  Antisense strand to SEQ ID NO: 1403610
ugucaccaagagaaguccu

SEQ ID NO: 1403612 - RNA, 19 nt, Artificial Sequence
  Description of Artificial Sequence: Synthetic oligonucleotide
  Sense strand starting at position 3596 of SEQ ID NO: 1243243
ggacuucucuuggugacag

SEQ ID NO: 1403613 - RNA, 19 nt, Artificial Sequence
  Description of Artificial Sequence: Synthetic oligonucleotide
  Antisense strand to SEQ ID NO: 1403612
cugucaccaagagaagucc

SEQ ID NO: 1403614 - RNA, 19 nt, Artificial Sequence
  Description of Artificial Sequence: Synthetic oligonucleotide
  Sense strand starting at position 3610 of SEQ ID NO: 1243243
gacagcugugccuaaagaa

SEQ ID NO: 1403615 - RNA, 19 nt, Artificial Sequence
  Description of Artificial Sequence: Synthetic oligonucleotide
  Antisense strand to SEQ ID NO: 1403614
uucuuuaggcacagcuguc

SEQ ID NO: 1403616 - RNA, 19 nt, Artificial Sequence
  Description of Artificial Sequence: Synthetic oligonucleotide
  Sense strand starting at position 3622 of SEQ ID NO: 1243243
uaaagaaaugauuguagug

SEQ ID NO: 1403617 - RNA, 19 nt, Artificial Sequence
  Description of Artificial Sequence: Synthetic oligonucleotide
  Antisense strand to SEQ ID NO: 1403616
cacuacaaucauuucuuua

SEQ ID NO: 1403618 - RNA, 19 nt, Artificial Sequence
  Description of Artificial Sequence: Synthetic oligonucleotide
  Sense strand starting at position 3740 of SEQ ID NO: 1243243
accucaaaugggugacuaa

SEQ ID NO: 1403619 - RNA, 19 nt, Artificial Sequence
  Description of Artificial Sequence: Synthetic oligonucleotide
  Antisense strand to SEQ ID NO: 1403618
uuagucacccauuugaggu

SEQ ID NO: 1403620 - RNA, 19 nt, Artificial Sequence
  Description of Artificial Sequence: Synthetic oligonucleotide
  Sense strand starting at position 3875 of SEQ ID NO: 1243243
gagaaagcaccacgacuuu

SEQ ID NO: 1403621 - RNA, 19 nt, Artificial Sequence
  Description of Artificial Sequence: Synthetic oligonucleotide
  Antisense strand to SEQ ID NO: 1403620
aaagucguggugcuuucuc

SEQ ID NO: 1403622 - RNA, 19 nt, Artificial Sequence
  Description of Artificial Sequence: Synthetic oligonucleotide
  Sense strand starting at position 3914 of SEQ ID NO: 1243243
ucaugauucccucacaguu

SEQ ID NO: 1403623 - RNA, 19 nt, Artificial Sequence
  Description of Artificial Sequence: Synthetic oligonucleotide
  Antisense strand to SEQ ID NO: 1403622
aacugugagggaaucauga

SEQ ID NO: 1403624 - RNA, 19 nt, Artificial Sequence
  Description of Artificial Sequence: Synthetic oligonucleotide
  Sense strand starting at position 73 of SEQ ID NO: 1243244
acagaacugguaugaaguu

SEQ ID NO: 1403625 - RNA, 19 nt, Artificial Sequence
  Description of Artificial Sequence: Synthetic oligonucleotide
  Antisense strand to SEQ ID NO: 1403624
aacuucauaccaguucugu

SEQ ID NO: 1403626 - RNA, 19 nt, Artificial Sequence
  Description of Artificial Sequence: Synthetic oligonucleotide
  Sense strand starting at position 102 of SEQ ID NO: 1243244
ccaguaaugcagcaggaaa

SEQ ID NO: 1403627 - RNA, 19 nt, Artificial Sequence
  Description of Artificial Sequence: Synthetic oligonucleotide
  Antisense strand to SEQ ID NO: 1403626
uuuccugcugcauuacugg

SEQ ID NO: 1403628 - RNA, 19 nt, Artificial Sequence
  Description of Artificial Sequence: Synthetic oligonucleotide
  Sense strand starting at position 178 of SEQ ID NO: 1243244
gcauaugguacaugggaca

SEQ ID NO: 1403629 - RNA, 19 nt, Artificial Sequence
  Description of Artificial Sequence: Synthetic oligonucleotide
  Antisense strand to SEQ ID NO: 1403628
ugucccauguaccauaugc

SEQ ID NO: 1403630 - RNA, 19 nt, Artificial Sequence
  Description of Artificial Sequence: Synthetic oligonucleotide
  Sense strand starting at position 635 of SEQ ID NO: 1243244
gagagaauguuagcaacaa

SEQ ID NO: 1403631 - RNA, 19 nt, Artificial Sequence
  Description of Artificial Sequence: Synthetic oligonucleotide
  Antisense strand to SEQ ID NO: 1403630
uuguugcuaacauucucuc

SEQ ID NO: 1403632 - RNA, 19 nt, Artificial Sequence
  Description of Artificial Sequence: Synthetic oligonucleotide
  Sense strand starting at position 639 of SEQ ID NO: 1243244
gaauguuagcaacaauagu

SEQ ID NO: 1403633 - RNA, 19 nt, Artificial Sequence
  Description of Artificial Sequence: Synthetic oligonucleotide
  Antisense strand to SEQ ID NO: 1403632
acuauuguugcuaacauuc

SEQ ID NO: 1403634 - RNA, 19 nt, Artificial Sequence
  Description of Artificial Sequence: Synthetic oligonucleotide
  Sense strand starting at position 705 of SEQ ID NO: 1243244
auaccaagucuuuggaaua

SEQ ID NO: 1403635 - RNA, 19 nt, Artificial Sequence
  Description of Artificial Sequence: Synthetic oligonucleotide
  Antisense strand to SEQ ID NO: 1403634
uauuccaaagacuugguau

SEQ ID NO: 1403636 - RNA, 19 nt, Artificial Sequence
  Description of Artificial Sequence: Synthetic oligonucleotide
  Sense strand starting at position 717 of SEQ ID NO: 1243244
uggaauaggugaucaucau

SEQ ID NO: 1403637 - RNA, 19 nt, Artificial Sequence
  Description of Artificial Sequence: Synthetic oligonucleotide
  Antisense strand to SEQ ID NO: 1403636
augaugaucaccuauucca

SEQ ID NO: 1403638 - RNA, 19 nt, Artificial Sequence
  Description of Artificial Sequence: Synthetic oligonucleotide
  Sense strand starting at position 766 of SEQ ID NO: 1243244
uagaguaggugaucacaau

SEQ ID NO: 1403639 - RNA, 19 nt, Artificial Sequence
  Description of Artificial Sequence: Synthetic oligonucleotide
  Antisense strand to SEQ ID NO: 1403638
auugugaucaccuacucua

SEQ ID NO: 1403640 - RNA, 19 nt, Artificial Sequence
  Description of Artificial Sequence: Synthetic oligonucleotide
  Sense strand starting at position 935 of SEQ ID NO: 1243244
ugaugcuuauuacuggaau

SEQ ID NO: 1403641 - RNA, 19 nt, Artificial Sequence
  Description of Artificial Sequence: Synthetic oligonucleotide
  Antisense strand to SEQ ID NO: 1403640
auuccaguaauaagcauca

SEQ ID NO: 1403642 - RNA, 19 nt, Artificial Sequence
  Description of Artificial Sequence: Synthetic oligonucleotide
  Sense strand starting at position 1022 of SEQ ID NO: 1243244
ggagccuuaccucaucuuu

SEQ ID NO: 1403643 - RNA, 19 nt, Artificial Sequence
  Description of Artificial Sequence: Synthetic oligonucleotide
  Antisense strand to SEQ ID NO: 1403642
aaagaugagguaaggcucc

SEQ ID NO: 1403644 - RNA, 19 nt, Artificial Sequence
  Description of Artificial Sequence: Synthetic oligonucleotide
  Sense strand starting at position 1114 of SEQ ID NO: 1243244
ccaaguauuuaagauggaa

SEQ ID NO: 1403645 - RNA, 19 nt, Artificial Sequence
  Description of Artificial Sequence: Synthetic oligonucleotide
  Antisense strand to SEQ ID NO: 1403644
uuccaucuuaaauacuugg

SEQ ID NO: 1403646 - RNA, 19 nt, Artificial Sequence
  Description of Artificial Sequence: Synthetic oligonucleotide
  Sense strand starting at position 1455 of SEQ ID NO: 1243244
acaugaugugcaugaccua

SEQ ID NO: 1403647 - RNA, 19 nt, Artificial Sequence
  Description of Artificial Sequence: Synthetic oligonucleotide
  Antisense strand to SEQ ID NO: 1403646
uaggucaugcacaucaugu

SEQ ID NO: 1403648 - RNA, 19 nt, Artificial Sequence
  Description of Artificial Sequence: Synthetic oligonucleotide
  Sense strand starting at position 1678 of SEQ ID NO: 1243244
aauguugaugcucauaaag

SEQ ID NO: 1403649 - RNA, 19 nt, Artificial Sequence
  Description of Artificial Sequence: Synthetic oligonucleotide
  Antisense strand to SEQ ID NO: 1403648
cuuuaugagcaucaacauu

SEQ ID NO: 1403650 - RNA, 19 nt, Artificial Sequence
  Description of Artificial Sequence: Synthetic oligonucleotide
  Sense strand starting at position 1706 of SEQ ID NO: 1243244
augugaagugcugagacuu

SEQ ID NO: 1403651 - RNA, 19 nt, Artificial Sequence
  Description of Artificial Sequence: Synthetic oligonucleotide
  Antisense strand to SEQ ID NO: 1403650
aagucucagcacuucacau

SEQ ID NO: 1403652 - RNA, 19 nt, Artificial Sequence
  Description of Artificial Sequence: Synthetic oligonucleotide
  Sense strand starting at position 1712 of SEQ ID NO: 1243244
agugcugagacuuaucuag

SEQ ID NO: 1403653 - RNA, 19 nt, Artificial Sequence
  Description of Artificial Sequence: Synthetic oligonucleotide
  Antisense strand to SEQ ID NO: 1403652
cuagauaagucucagcacu

SEQ ID NO: 1403654 - RNA, 19 nt, Artificial Sequence
  Description of Artificial Sequence: Synthetic oligonucleotide
  Sense strand starting at position 1719 of SEQ ID NO: 1243244
agacuuaucuagcuagaaa

SEQ ID NO: 1403655 - RNA, 19 nt, Artificial Sequence
  Description of Artificial Sequence: Synthetic oligonucleotide
  Antisense strand to SEQ ID NO: 1403654
uuucuagcuagauaagucu

SEQ ID NO: 1403656 - RNA, 19 nt, Artificial Sequence
  Description of Artificial Sequence: Synthetic oligonucleotide
  Sense strand starting at position 1810 of SEQ ID NO: 1243244
augcacugagcuuauuaaa

SEQ ID NO: 1403657 - RNA, 19 nt, Artificial Sequence
  Description of Artificial Sequence: Synthetic oligonucleotide
  Antisense strand to SEQ ID NO: 1403656
uuuaauaagcucagugcau

SEQ ID NO: 1403658 - RNA, 19 nt, Artificial Sequence
  Description of Artificial Sequence: Synthetic oligonucleotide
  Sense strand starting at position 1980 of SEQ ID NO: 1243244
gaaagaauguuggugauau

SEQ ID NO: 1403659 - RNA, 19 nt, Artificial Sequence
  Description of Artificial Sequence: Synthetic oligonucleotide
  Antisense strand to SEQ ID NO: 1403658
auaucaccaacauucuuuc

SEQ ID NO: 1403660 - RNA, 19 nt, Artificial Sequence
  Description of Artificial Sequence: Synthetic oligonucleotide
  Sense strand starting at position 1990 of SEQ ID NO: 1243244
uggugauauguggaaucug

SEQ ID NO: 1403661 - RNA, 19 nt, Artificial Sequence
  Description of Artificial Sequence: Synthetic oligonucleotide
  Antisense strand to SEQ ID NO: 1403660
cagauuccacauaucacca

SEQ ID NO: 1403662 - RNA, 19 nt, Artificial Sequence
  Description of Artificial Sequence: Synthetic oligonucleotide
  Sense strand starting at position 2202 of SEQ ID NO: 1243244
cuacauguccuuuaugagu

SEQ ID NO: 1403663 - RNA, 19 nt, Artificial Sequence
  Description of Artificial Sequence: Synthetic oligonucleotide
  Antisense strand to SEQ ID NO: 1403662
acucauaaaggacauguag

SEQ ID NO: 1403664 - RNA, 19 nt, Artificial Sequence
  Description of Artificial Sequence: Synthetic oligonucleotide
  Sense strand starting at position 2291 of SEQ ID NO: 1243244
guauguugccuguugccau

SEQ ID NO: 1403665 - RNA, 19 nt, Artificial Sequence
  Description of Artificial Sequence: Synthetic oligonucleotide
  Antisense strand to SEQ ID NO: 1403664
auggcaacaggcaacauac

SEQ ID NO: 1403666 - RNA, 19 nt, Artificial Sequence
  Description of Artificial Sequence: Synthetic oligonucleotide
  Sense strand starting at position 2328 of SEQ ID NO: 1243244
uggugaaucaccuacuggu

SEQ ID NO: 1403667 - RNA, 19 nt, Artificial Sequence
  Description of Artificial Sequence: Synthetic oligonucleotide
  Antisense strand to SEQ ID NO: 1403666
accaguaggugauucacca

SEQ ID NO: 1403668 - RNA, 19 nt, Artificial Sequence
  Description of Artificial Sequence: Synthetic oligonucleotide
  Sense strand starting at position 2345 of SEQ ID NO: 1243244
guucuuaaagcggaaguga

SEQ ID NO: 1403669 - RNA, 19 nt, Artificial Sequence
  Description of Artificial Sequence: Synthetic oligonucleotide
  Antisense strand to SEQ ID NO: 1403668
ucacuuccgcuuuaagaac

SEQ ID NO: 1403670 - RNA, 19 nt, Artificial Sequence
  Description of Artificial Sequence: Synthetic oligonucleotide
  Sense strand starting at position 2476 of SEQ ID NO: 1243244
uuugguuucugaccaccaa

SEQ ID NO: 1403671 - RNA, 19 nt, Artificial Sequence
  Description of Artificial Sequence: Synthetic oligonucleotide
  Antisense strand to SEQ ID NO: 1403670
uugguggucagaaaccaaa

SEQ ID NO: 1403672 - RNA, 19 nt, Artificial Sequence
  Description of Artificial Sequence: Synthetic oligonucleotide
  Sense strand starting at position 2477 of SEQ ID NO: 1243244
uugguuucugaccaccaaa

SEQ ID NO: 1403673 - RNA, 19 nt, Artificial Sequence
  Description of Artificial Sequence: Synthetic oligonucleotide
  Antisense strand to SEQ ID NO: 1403672
uuugguggucagaaaccaa

SEQ ID NO: 1403674 - RNA, 19 nt, Artificial Sequence
  Description of Artificial Sequence: Synthetic oligonucleotide
  Sense strand starting at position 2721 of SEQ ID NO: 1243244
gaugcaggauugcuacaaa

SEQ ID NO: 1403675 - RNA, 19 nt, Artificial Sequence
  Description of Artificial Sequence: Synthetic oligonucleotide
  Antisense strand to SEQ ID NO: 1403674
uuuguagcaauccugcauc

SEQ ID NO: 1403676 - RNA, 19 nt, Artificial Sequence
  Description of Artificial Sequence: Synthetic oligonucleotide
  Sense strand starting at position 3007 of SEQ ID NO: 1243244
auaaauggccuuuagaagu

SEQ ID NO: 1403677 - RNA, 19 nt, Artificial Sequence
  Description of Artificial Sequence: Synthetic oligonucleotide
  Antisense strand to SEQ ID NO: 1403676
acuucuaaaggccauuuau

SEQ ID NO: 1403678 - RNA, 19 nt, Artificial Sequence
  Description of Artificial Sequence: Synthetic oligonucleotide
  Sense strand starting at position 3076 of SEQ ID NO: 1243244
cuuucuuuaggaggaacua

SEQ ID NO: 1403679 - RNA, 19 nt, Artificial Sequence
  Description of Artificial Sequence: Synthetic oligonucleotide
  Antisense strand to SEQ ID NO: 1403678
uaguuccuccuaaagaaag

SEQ ID NO: 1403680 - RNA, 19 nt, Artificial Sequence
  Description of Artificial Sequence: Synthetic oligonucleotide
  Sense strand starting at position 3122 of SEQ ID NO: 1243244
guuguaauggaacaaaugu

SEQ ID NO: 1403681 - RNA, 19 nt, Artificial Sequence
  Description of Artificial Sequence: Synthetic oligonucleotide
  Antisense strand to SEQ ID NO: 1403680
acauuuguuccauuacaac

SEQ ID NO: 1403682 - RNA, 19 nt, Artificial Sequence
  Description of Artificial Sequence: Synthetic oligonucleotide
  Sense strand starting at position 3131 of SEQ ID NO: 1243244
gaacaaauguauccuugag

SEQ ID NO: 1403683 - RNA, 19 nt, Artificial Sequence
  Description of Artificial Sequence: Synthetic oligonucleotide
  Antisense strand to SEQ ID NO: 1403682
cucaaggauacauuuguuc

SEQ ID NO: 1403684 - RNA, 19 nt, Artificial Sequence
  Description of Artificial Sequence: Synthetic oligonucleotide
  Sense strand starting at position 3403 of SEQ ID NO: 1243244
gaguuuguuccaugaagga

SEQ ID NO: 1403685 - RNA, 19 nt, Artificial Sequence
  Description of Artificial Sequence: Synthetic oligonucleotide
  Antisense strand to SEQ ID NO: 1403684
uccuucauggaacaaacuc

SEQ ID NO: 1403686 - RNA, 19 nt, Artificial Sequence
  Description of Artificial Sequence: Synthetic oligonucleotide
  Sense strand starting at position 3489 of SEQ ID NO: 1243244
ggaaguguuauaugauaag

SEQ ID NO: 1403687 - RNA, 19 nt, Artificial Sequence
  Description of Artificial Sequence: Synthetic oligonucleotide
  Antisense strand to SEQ ID NO: 1403686
cuuaucauauaacacuucc

SEQ ID NO: 1403688 - RNA, 19 nt, Artificial Sequence
  Description of Artificial Sequence: Synthetic oligonucleotide
  Sense strand starting at position 3512 of SEQ ID NO: 1243244
ugauacauuugacaguaau

SEQ ID NO: 1403689 - RNA, 19 nt, Artificial Sequence
  Description of Artificial Sequence: Synthetic oligonucleotide
  Antisense strand to SEQ ID NO: 1403688
auuacugucaaauguauca

SEQ ID NO: 1403690 - RNA, 19 nt, Artificial Sequence
  Description of Artificial Sequence: Synthetic oligonucleotide
  Sense strand starting at position 3527 of SEQ ID NO: 1243244
uaauguuugccagauggau

SEQ ID NO: 1403691 - RNA, 19 nt, Artificial Sequence
  Description of Artificial Sequence: Synthetic oligonucleotide
  Antisense strand to SEQ ID NO: 1403690
auccaucuggcaaacauua

SEQ ID NO: 1403692 - RNA, 19 nt, Artificial Sequence
  Description of Artificial Sequence: Synthetic oligonucleotide
  Sense strand starting at position 3529 of SEQ ID NO: 1243244
auguuugccagauggauag

SEQ ID NO: 1403693 - RNA, 19 nt, Artificial Sequence
  Description of Artificial Sequence: Synthetic oligonucleotide
  Antisense strand to SEQ ID NO: 1403692
cuauccaucuggcaaacau

SEQ ID NO: 1403694 - RNA, 19 nt, Artificial Sequence
  Description of Artificial Sequence: Synthetic oligonucleotide
  Sense strand starting at position 3620 of SEQ ID NO: 1243244
aggaguauggcuggacaga

SEQ ID NO: 1403695 - RNA, 19 nt, Artificial Sequence
  Description of Artificial Sequence: Synthetic oligonucleotide
  Antisense strand to SEQ ID NO: 1403694
ucuguccagccauacuccu

SEQ ID NO: 1403696 - RNA, 19 nt, Artificial Sequence
  Description of Artificial Sequence: Synthetic oligonucleotide
  Sense strand starting at position 3880 of SEQ ID NO: 1243244
aggacuucucuuggugaca

SEQ ID NO: 1403697 - RNA, 19 nt, Artificial Sequence
  Description of Artificial Sequence: Synthetic oligonucleotide
  Antisense strand to SEQ ID NO: 1403696
ugucaccaagagaaguccu

SEQ ID NO: 1403698 - RNA, 19 nt, Artificial Sequence
  Description of Artificial Sequence: Synthetic oligonucleotide
  Sense strand starting at position 3881 of SEQ ID NO: 1243244
ggacuucucuuggugacag

SEQ ID NO: 1403699 - RNA, 19 nt, Artificial Sequence
  Description of Artificial Sequence: Synthetic oligonucleotide
  Antisense strand to SEQ ID NO: 1403698
cugucaccaagagaagucc

SEQ ID NO: 1403700 - RNA, 19 nt, Artificial Sequence
  Description of Artificial Sequence: Synthetic oligonucleotide
  Sense strand starting at position 3895 of SEQ ID NO: 1243244
gacagcugugccuaaagaa

SEQ ID NO: 1403701 - RNA, 19 nt, Artificial Sequence
  Description of Artificial Sequence: Synthetic oligonucleotide
  Antisense strand to SEQ ID NO: 1403700
uucuuuaggcacagcuguc

SEQ ID NO: 1403702 - RNA, 19 nt, Artificial Sequence
  Description of Artificial Sequence: Synthetic oligonucleotide
  Sense strand starting at position 3907 of SEQ ID NO: 1243244
uaaagaaaugauuguagug

SEQ ID NO: 1403703 - RNA, 19 nt, Artificial Sequence
  Description of Artificial Sequence: Synthetic oligonucleotide
  Antisense strand to SEQ ID NO: 1403702
cacuacaaucauuucuuua

SEQ ID NO: 1403704 - RNA, 19 nt, Artificial Sequence
  Description of Artificial Sequence: Synthetic oligonucleotide
  Sense strand starting at position 421 of SEQ ID NO: 1243245
ugaggagguuaguucuuca

SEQ ID NO: 1403705 - RNA, 19 nt, Artificial Sequence
  Description of Artificial Sequence: Synthetic oligonucleotide
  Antisense strand to SEQ ID NO: 1403704
ugaagaacuaaccuccuca

SEQ ID NO: 1403706 - RNA, 19 nt, Artificial Sequence
  Description of Artificial Sequence: Synthetic oligonucleotide
  Sense strand starting at position 424 of SEQ ID NO: 1243245
ggagguuaguucuucacug

SEQ ID NO: 1403707 - RNA, 19 nt, Artificial Sequence
  Description of Artificial Sequence: Synthetic oligonucleotide
  Antisense strand to SEQ ID NO: 1403706
cagugaagaacuaaccucc

SEQ ID NO: 1403708 - RNA, 19 nt, Artificial Sequence
  Description of Artificial Sequence: Synthetic oligonucleotide
  Sense strand starting at position 669 of SEQ ID NO: 1243245
cacuaaaguugagugguua

SEQ ID NO: 1403709 - RNA, 19 nt, Artificial Sequence
  Description of Artificial Sequence: Synthetic oligonucleotide
  Antisense strand to SEQ ID NO: 1403708
uaaccacucaacuuuagug

SEQ ID NO: 1403710 - RNA, 19 nt, Artificial Sequence
  Description of Artificial Sequence: Synthetic oligonucleotide
  Sense strand starting at position 673 of SEQ ID NO: 1243245
aaaguugagugguuacuau

SEQ ID NO: 1403711 - RNA, 19 nt, Artificial Sequence
  Description of Artificial Sequence: Synthetic oligonucleotide
  Antisense strand to SEQ ID NO: 1403710
auaguaaccacucaacuuu

SEQ ID NO: 1403712 - RNA, 19 nt, Artificial Sequence
  Description of Artificial Sequence: Synthetic oligonucleotide
  Sense strand starting at position 694 of SEQ ID NO: 1243245
accacauagucagcaaaga

SEQ ID NO: 1403713 - RNA, 19 nt, Artificial Sequence
  Description of Artificial Sequence: Synthetic oligonucleotide
  Antisense strand to SEQ ID NO: 1403712
ucuuugcugacuauguggu

SEQ ID NO: 1403714 - RNA, 19 nt, Artificial Sequence
  Description of Artificial Sequence: Synthetic oligonucleotide
  Sense strand starting at position 799 of SEQ ID NO: 1243245
gugugugaucacugaauuu

SEQ ID NO: 1403715 - RNA, 19 nt, Artificial Sequence
  Description of Artificial Sequence: Synthetic oligonucleotide
  Antisense strand to SEQ ID NO: 1403714
aaauucagugaucacacac

SEQ ID NO: 1403716 - RNA, 19 nt, Artificial Sequence
  Description of Artificial Sequence: Synthetic oligonucleotide
  Sense strand starting at position 834 of SEQ ID NO: 1243245
cuuugaagaacuugggagu

SEQ ID NO: 1403717 - RNA, 19 nt, Artificial Sequence
  Description of Artificial Sequence: Synthetic oligonucleotide
  Antisense strand to SEQ ID NO: 1403716
acucccaaguucuucaaag

SEQ ID NO: 1403718 - RNA, 19 nt, Artificial Sequence
  Description of Artificial Sequence: Synthetic oligonucleotide
  Sense strand starting at position 854 of SEQ ID NO: 1243245
gagcgucaucacuagguaa

SEQ ID NO: 1403719 - RNA, 19 nt, Artificial Sequence
  Description of Artificial Sequence: Synthetic oligonucleotide
  Antisense strand to SEQ ID NO: 1403718
uuaccuagugaugacgcuc

SEQ ID NO: 1403720 - RNA, 19 nt, Artificial Sequence
  Description of Artificial Sequence: Synthetic oligonucleotide
  Sense strand starting at position 898 of SEQ ID NO: 1243245
aaaugauacgucuaagguc

SEQ ID NO: 1403721 - RNA, 19 nt, Artificial Sequence
  Description of Artificial Sequence: Synthetic oligonucleotide
  Antisense strand to SEQ ID NO: 1403720
gaccuuagacguaucauuu

SEQ ID NO: 1403722 - RNA, 19 nt, Artificial Sequence
  Description of Artificial Sequence: Synthetic oligonucleotide
  Sense strand starting at position 949 of SEQ ID NO: 1243245
cauuguuaccaccaagcga

SEQ ID NO: 1403723 - RNA, 19 nt, Artificial Sequence
  Description of Artificial Sequence: Synthetic oligonucleotide
  Antisense strand to SEQ ID NO: 1403722
ucgcuuggugguaacaaug

SEQ ID NO: 1403724 - RNA, 19 nt, Artificial Sequence
  Description of Artificial Sequence: Synthetic oligonucleotide
  Sense strand starting at position 1027 of SEQ ID NO: 1243245
aguugaaauggccaguguu

SEQ ID NO: 1403725 - RNA, 19 nt, Artificial Sequence
  Description of Artificial Sequence: Synthetic oligonucleotide
  Antisense strand to SEQ ID NO: 1403724
aacacuggccauuucaacu

SEQ ID NO: 1403726 - RNA, 19 nt, Artificial Sequence
  Description of Artificial Sequence: Synthetic oligonucleotide
  Sense strand starting at position 1090 of SEQ ID NO: 1243245
ggcugaucguaacugaaac

SEQ ID NO: 1403727 - RNA, 19 nt, Artificial Sequence
  Description of Artificial Sequence: Synthetic oligonucleotide
  Antisense strand to SEQ ID NO: 1403726
guuucaguuacgaucagcc

SEQ ID NO: 1403728 - RNA, 19 nt, Artificial Sequence
  Description of Artificial Sequence: Synthetic oligonucleotide
  Sense strand starting at position 1247 of SEQ ID NO: 1243245
gguggagguggcuacuauu

SEQ ID NO: 1403729 - RNA, 19 nt, Artificial Sequence
  Description of Artificial Sequence: Synthetic oligonucleotide
  Antisense strand to SEQ ID NO: 1403728
aauaguagccaccuccacc

SEQ ID NO: 1403730 - RNA, 19 nt, Artificial Sequence
  Description of Artificial Sequence: Synthetic oligonucleotide
  Sense strand starting at position 1281 of SEQ ID NO: 1243245
uguuguguccaacauacuu

SEQ ID NO: 1403731 - RNA, 19 nt, Artificial Sequence
  Description of Artificial Sequence: Synthetic oligonucleotide
  Antisense strand to SEQ ID NO: 1403730
aaguauguuggacacaaca

SEQ ID NO: 1403732 - RNA, 19 nt, Artificial Sequence
  Description of Artificial Sequence: Synthetic oligonucleotide
  Sense strand starting at position 1420 of SEQ ID NO: 1243245
gaugucaagaggugaagau

SEQ ID NO: 1403733 - RNA, 19 nt, Artificial Sequence
  Description of Artificial Sequence: Synthetic oligonucleotide
  Antisense strand to SEQ ID NO: 1403732
aucuucaccucuugacauc

SEQ ID NO: 1403734 - RNA, 19 nt, Artificial Sequence
  Description of Artificial Sequence: Synthetic oligonucleotide
  Sense strand starting at position 1454 of SEQ ID NO: 1243245
cgguuugaccuggaaaccu

SEQ ID NO: 1403735 - RNA, 19 nt, Artificial Sequence
  Description of Artificial Sequence: Synthetic oligonucleotide
  Antisense strand to SEQ ID NO: 1403734
agguuuccaggucaaaccg

SEQ ID NO: 1403736 - RNA, 19 nt, Artificial Sequence
  Description of Artificial Sequence: Synthetic oligonucleotide
  Sense strand starting at position 1547 of SEQ ID NO: 1243245
cugaucuuggguugaaauc

SEQ ID NO: 1403737 - RNA, 19 nt, Artificial Sequence
  Description of Artificial Sequence: Synthetic oligonucleotide
  Antisense strand to SEQ ID NO: 1403736
gauuucaacccaagaucag

SEQ ID NO: 1403738 - RNA, 19 nt, Artificial Sequence
  Description of Artificial Sequence: Synthetic oligonucleotide
  Sense strand starting at position 1556 of SEQ ID NO: 1243245
gguugaaauccuggucuau

SEQ ID NO: 1403739 - RNA, 19 nt, Artificial Sequence
  Description of Artificial Sequence: Synthetic oligonucleotide
  Antisense strand to SEQ ID NO: 1403738
auagaccaggauuucaacc

SEQ ID NO: 1403740 - RNA, 19 nt, Artificial Sequence
  Description of Artificial Sequence: Synthetic oligonucleotide
  Sense strand starting at position 1558 of SEQ ID NO: 1243245
uugaaauccuggucuauca

SEQ ID NO: 1403741 - RNA, 19 nt, Artificial Sequence
  Description of Artificial Sequence: Synthetic oligonucleotide
  Antisense strand to SEQ ID NO: 1403740
ugauagaccaggauuucaa

SEQ ID NO: 1403742 - RNA, 19 nt, Artificial Sequence
  Description of Artificial Sequence: Synthetic oligonucleotide
  Sense strand starting at position 1560 of SEQ ID NO: 1243245
gaaauccuggucuaucagu

SEQ ID NO: 1403743 - RNA, 19 nt, Artificial Sequence
  Description of Artificial Sequence: Synthetic oligonucleotide
  Antisense strand to SEQ ID NO: 1403742
acugauagaccaggauuuc

SEQ ID NO: 1403744 - RNA, 19 nt, Artificial Sequence
  Description of Artificial Sequence: Synthetic oligonucleotide
  Sense strand starting at position 2298 of SEQ ID NO: 1243245
cgaggauccgugggaggaa

SEQ ID NO: 1403745 - RNA, 19 nt, Artificial Sequence
  Description of Artificial Sequence: Synthetic oligonucleotide
  Antisense strand to SEQ ID NO: 1403744
uuccucccacggauccucg

SEQ ID NO: 1403746 - RNA, 19 nt, Artificial Sequence
  Description of Artificial Sequence: Synthetic oligonucleotide
  Sense strand starting at position 2325 of SEQ ID NO: 1243245
guguguuacaguucgcuuu

SEQ ID NO: 1403747 - RNA, 19 nt, Artificial Sequence
  Description of Artificial Sequence: Synthetic oligonucleotide
  Antisense strand to SEQ ID NO: 1403746
aaagcgaacuguaacacac

SEQ ID NO: 1403748 - RNA, 19 nt, Artificial Sequence
  Description of Artificial Sequence: Synthetic oligonucleotide
  Sense strand starting at position 2444 of SEQ ID NO: 1243245
cugaaaccauccucugguu

SEQ ID NO: 1403749 - RNA, 19 nt, Artificial Sequence
  Description of Artificial Sequence: Synthetic oligonucleotide
  Antisense strand to SEQ ID NO: 1403748
aaccagaggaugguuucag

SEQ ID NO: 1403750 - RNA, 19 nt, Artificial Sequence
  Description of Artificial Sequence: Synthetic oligonucleotide
  Sense strand starting at position 2760 of SEQ ID NO: 1243245
acagauuuguugcucgagu

SEQ ID NO: 1403751 - RNA, 19 nt, Artificial Sequence
  Description of Artificial Sequence: Synthetic oligonucleotide
  Antisense strand to SEQ ID NO: 1403750
acucgagcaacaaaucugu

SEQ ID NO: 1403752 - RNA, 19 nt, Artificial Sequence
  Description of Artificial Sequence: Synthetic oligonucleotide
  Sense strand starting at position 2761 of SEQ ID NO: 1243245
cagauuuguugcucgaguu

SEQ ID NO: 1403753 - RNA, 19 nt, Artificial Sequence
  Description of Artificial Sequence: Synthetic oligonucleotide
  Antisense strand to SEQ ID NO: 1403752
aacucgagcaacaaaucug

SEQ ID NO: 1403754 - RNA, 19 nt, Artificial Sequence
  Description of Artificial Sequence: Synthetic oligonucleotide
  Sense strand starting at position 2762 of SEQ ID NO: 1243245
agauuuguugcucgaguuc

SEQ ID NO: 1403755 - RNA, 19 nt, Artificial Sequence
  Description of Artificial Sequence: Synthetic oligonucleotide
  Antisense strand to SEQ ID NO: 1403754
gaacucgagcaacaaaucu

SEQ ID NO: 1403756 - RNA, 19 nt, Artificial Sequence
  Description of Artificial Sequence: Synthetic oligonucleotide
  Sense strand starting at position 2920 of SEQ ID NO: 1243245
uuuggaauugccuggugga

SEQ ID NO: 1403757 - RNA, 19 nt, Artificial Sequence
  Description of Artificial Sequence: Synthetic oligonucleotide
  Antisense strand to SEQ ID NO: 1403756
uccaccaggcaauuccaaa

SEQ ID NO: 1403758 - RNA, 19 nt, Artificial Sequence
  Description of Artificial Sequence: Synthetic oligonucleotide
  Sense strand starting at position 2921 of SEQ ID NO: 1243245
uuggaauugccugguggaa

SEQ ID NO: 1403759 - RNA, 19 nt, Artificial Sequence
  Description of Artificial Sequence: Synthetic oligonucleotide
  Antisense strand to SEQ ID NO: 1403758
uuccaccaggcaauuccaa

SEQ ID NO: 1403760 - RNA, 19 nt, Artificial Sequence
  Description of Artificial Sequence: Synthetic oligonucleotide
  Sense strand starting at position 3030 of SEQ ID NO: 1243245
agugauaacuaucuuagau

SEQ ID NO: 1403761 - RNA, 19 nt, Artificial Sequence
  Description of Artificial Sequence: Synthetic oligonucleotide
  Antisense strand to SEQ ID NO: 1403760
aucuaagauaguuaucacu

SEQ ID NO: 1403762 - RNA, 19 nt, Artificial Sequence
  Description of Artificial Sequence: Synthetic oligonucleotide
  Sense strand starting at position 3052 of SEQ ID NO: 1243245
uguugugaugcccacauga

SEQ ID NO: 1403763 - RNA, 19 nt, Artificial Sequence
  Description of Artificial Sequence: Synthetic oligonucleotide
  Antisense strand to SEQ ID NO: 1403762
ucaugugggcaucacaaca

SEQ ID NO: 1403764 - RNA, 19 nt, Artificial Sequence
  Description of Artificial Sequence: Synthetic oligonucleotide
  Sense strand starting at position 3054 of SEQ ID NO: 1243245
uugugaugcccacaugaga

SEQ ID NO: 1403765 - RNA, 19 nt, Artificial Sequence
  Description of Artificial Sequence: Synthetic oligonucleotide
  Antisense strand to SEQ ID NO: 1403764
ucucaugugggcaucacaa

SEQ ID NO: 1403766 - RNA, 19 nt, Artificial Sequence
  Description of Artificial Sequence: Synthetic oligonucleotide
  Sense strand starting at position 3181 of SEQ ID NO: 1243245
gguugaguuccaugagaga

SEQ ID NO: 1403767 - RNA, 19 nt, Artificial Sequence
  Description of Artificial Sequence: Synthetic oligonucleotide
  Antisense strand to SEQ ID NO: 1403766
ucucucauggaacucaacc

SEQ ID NO: 1403768 - RNA, 19 nt, Artificial Sequence
  Description of Artificial Sequence: Synthetic oligonucleotide
  Sense strand starting at position 3426 of SEQ ID NO: 1243245
gguuccugucacgacugaa

SEQ ID NO: 1403769 - RNA, 19 nt, Artificial Sequence
  Description of Artificial Sequence: Synthetic oligonucleotide
  Antisense strand to SEQ ID NO: 1403768
uucagucgugacaggaacc

SEQ ID NO: 1403770 - RNA, 19 nt, Artificial Sequence
  Description of Artificial Sequence: Synthetic oligonucleotide
  Sense strand starting at position 3530 of SEQ ID NO: 1243245
ugccucaugagugggauau

SEQ ID NO: 1403771 - RNA, 19 nt, Artificial Sequence
  Description of Artificial Sequence: Synthetic oligonucleotide
  Antisense strand to SEQ ID NO: 1403770
auaucccacucaugaggca

SEQ ID NO: 1403772 - RNA, 19 nt, Artificial Sequence
  Description of Artificial Sequence: Synthetic oligonucleotide
  Sense strand starting at position 3531 of SEQ ID NO: 1243245
gccucaugagugggauauc

SEQ ID NO: 1403773 - RNA, 19 nt, Artificial Sequence
  Description of Artificial Sequence: Synthetic oligonucleotide
  Antisense strand to SEQ ID NO: 1403772
gauaucccacucaugaggc

SEQ ID NO: 1403774 - RNA, 19 nt, Artificial Sequence
  Description of Artificial Sequence: Synthetic oligonucleotide
  Sense strand starting at position 3591 of SEQ ID NO: 1243245
uacggagacugguugguau

SEQ ID NO: 1403775 - RNA, 19 nt, Artificial Sequence
  Description of Artificial Sequence: Synthetic oligonucleotide
  Antisense strand to SEQ ID NO: 1403774
auaccaaccagucuccgua

SEQ ID NO: 1403776 - RNA, 19 nt, Artificial Sequence
  Description of Artificial Sequence: Synthetic oligonucleotide
  Sense strand starting at position 3602 of SEQ ID NO: 1243245
guugguauccuguaucuga

SEQ ID NO: 1403777 - RNA, 19 nt, Artificial Sequence
  Description of Artificial Sequence: Synthetic oligonucleotide
  Antisense strand to SEQ ID NO: 1403776
ucagauacaggauaccaac

SEQ ID NO: 1403778 - RNA, 19 nt, Artificial Sequence
  Description of Artificial Sequence: Synthetic oligonucleotide
  Sense strand starting at position 3681 of SEQ ID NO: 1243245
cauacugucccauggcaga

SEQ ID NO: 1403779 - RNA, 19 nt, Artificial Sequence
  Description of Artificial Sequence: Synthetic oligonucleotide
  Antisense strand to SEQ ID NO: 1403778
ucugccaugggacaguaug

SEQ ID NO: 1403780 - RNA, 19 nt, Artificial Sequence
  Description of Artificial Sequence: Synthetic oligonucleotide
  Sense strand starting at position 3840 of SEQ ID NO: 1243245
ggguacaucagaugcucaa

SEQ ID NO: 1403781 - RNA, 19 nt, Artificial Sequence
  Description of Artificial Sequence: Synthetic oligonucleotide
  Antisense strand to SEQ ID NO: 1403780
uugagcaucugauguaccc

SEQ ID NO: 1403782 - RNA, 19 nt, Artificial Sequence
  Description of Artificial Sequence: Synthetic oligonucleotide
  Sense strand starting at position 3844 of SEQ ID NO: 1243245
acaucagaugcucaaguga

SEQ ID NO: 1403783 - RNA, 19 nt, Artificial Sequence
  Description of Artificial Sequence: Synthetic oligonucleotide
  Antisense strand to SEQ ID NO: 1403782
ucacuugagcaucugaugu

SEQ ID NO: 1403784 - RNA, 19 nt, Artificial Sequence
  Description of Artificial Sequence: Synthetic oligonucleotide
  Sense strand starting at position 49 of SEQ ID NO: 1243246
gucugaauauuugaugcca

SEQ ID NO: 1403785 - RNA, 19 nt, Artificial Sequence
  Description of Artificial Sequence: Synthetic oligonucleotide
  Antisense strand to SEQ ID NO: 1403784
uggcaucaaauauucagac

SEQ ID NO: 1403786 - RNA, 19 nt, Artificial Sequence
  Description of Artificial Sequence: Synthetic oligonucleotide
  Sense strand starting at position 51 of SEQ ID NO: 1243246
cugaauauuugaugccaca

SEQ ID NO: 1403787 - RNA, 19 nt, Artificial Sequence
  Description of Artificial Sequence: Synthetic oligonucleotide
  Antisense strand to SEQ ID NO: 1403786
uguggcaucaaauauucag

SEQ ID NO: 1403788 - RNA, 19 nt, Artificial Sequence
  Description of Artificial Sequence: Synthetic oligonucleotide
  Sense strand starting at position 62 of SEQ ID NO: 1243246
augccacagcuaugacuua

SEQ ID NO: 1403789 - RNA, 19 nt, Artificial Sequence
  Description of Artificial Sequence: Synthetic oligonucleotide
  Antisense strand to SEQ ID NO: 1403788
uaagucauagcuguggcau

SEQ ID NO: 1403790 - RNA, 19 nt, Artificial Sequence
  Description of Artificial Sequence: Synthetic oligonucleotide
  Sense strand starting at position 118 of SEQ ID NO: 1243246
cucagaaaugcuugaagua

SEQ ID NO: 1403791 - RNA, 19 nt, Artificial Sequence
  Description of Artificial Sequence: Synthetic oligonucleotide
  Antisense strand to SEQ ID NO: 1403790
uacuucaagcauuucugag

SEQ ID NO: 1403792 - RNA, 19 nt, Artificial Sequence
  Description of Artificial Sequence: Synthetic oligonucleotide
  Sense strand starting at position 119 of SEQ ID NO: 1243246
ucagaaaugcuugaaguau

SEQ ID NO: 1403793 - RNA, 19 nt, Artificial Sequence
  Description of Artificial Sequence: Synthetic oligonucleotide
  Antisense strand to SEQ ID NO: 1403792
auacuucaagcauuucuga

SEQ ID NO: 1403794 - RNA, 19 nt, Artificial Sequence
  Description of Artificial Sequence: Synthetic oligonucleotide
  Sense strand starting at position 358 of SEQ ID NO: 1243246
uuugcauucccagagcuua

SEQ ID NO: 1403795 - RNA, 19 nt, Artificial Sequence
  Description of Artificial Sequence: Synthetic oligonucleotide
  Antisense strand to SEQ ID NO: 1403794
uaagcucugggaaugcaaa

SEQ ID NO: 1403796 - RNA, 19 nt, Artificial Sequence
  Description of Artificial Sequence: Synthetic oligonucleotide
  Sense strand starting at position 506 of SEQ ID NO: 1243246
acauuacccugauaaggau

SEQ ID NO: 1403797 - RNA, 19 nt, Artificial Sequence
  Description of Artificial Sequence: Synthetic oligonucleotide
  Antisense strand to SEQ ID NO: 1403796
auccuuaucaggguaaugu

SEQ ID NO: 1403798 - RNA, 19 nt, Artificial Sequence
  Description of Artificial Sequence: Synthetic oligonucleotide
  Sense strand starting at position 522 of SEQ ID NO: 1243246
gaucauuaguggccgaaug

SEQ ID NO: 1403799 - RNA, 19 nt, Artificial Sequence
  Description of Artificial Sequence: Synthetic oligonucleotide
  Antisense strand to SEQ ID NO: 1403798
cauucggccacuaaugauc

SEQ ID NO: 1403800 - RNA, 19 nt, Artificial Sequence
  Description of Artificial Sequence: Synthetic oligonucleotide
  Sense strand starting at position 524 of SEQ ID NO: 1243246
ucauuaguggccgaauguu

SEQ ID NO: 1403801 - RNA, 19 nt, Artificial Sequence
  Description of Artificial Sequence: Synthetic oligonucleotide
  Antisense strand to SEQ ID NO: 1403800
aacauucggccacuaauga

SEQ ID NO: 1403802 - RNA, 19 nt, Artificial Sequence
  Description of Artificial Sequence: Synthetic oligonucleotide
  Sense strand starting at position 912 of SEQ ID NO: 1243246
ucagguguuccucagucuu

SEQ ID NO: 1403803 - RNA, 19 nt, Artificial Sequence
  Description of Artificial Sequence: Synthetic oligonucleotide
  Antisense strand to SEQ ID NO: 1403802
aagacugaggaacaccuga

SEQ ID NO: 1403804 - RNA, 19 nt, Artificial Sequence
  Description of Artificial Sequence: Synthetic oligonucleotide
  Sense strand starting at position 1419 of SEQ ID NO: 1243246
uggucaagucuccagcaau

SEQ ID NO: 1403805 - RNA, 19 nt, Artificial Sequence
  Description of Artificial Sequence: Synthetic oligonucleotide
  Antisense strand to SEQ ID NO: 1403804
auugcuggagacuugacca

SEQ ID NO: 1403806 - RNA, 19 nt, Artificial Sequence
  Description of Artificial Sequence: Synthetic oligonucleotide
  Sense strand starting at position 1422 of SEQ ID NO: 1243246
ucaagucuccagcaaugca

SEQ ID NO: 1403807 - RNA, 19 nt, Artificial Sequence
  Description of Artificial Sequence: Synthetic oligonucleotide
  Antisense strand to SEQ ID NO: 1403806
ugcauugcuggagacuuga

SEQ ID NO: 1403808 - RNA, 19 nt, Artificial Sequence
  Description of Artificial Sequence: Synthetic oligonucleotide
  Sense strand starting at position 1549 of SEQ ID NO: 1243246
gggagucgcuuaccuauua

SEQ ID NO: 1403809 - RNA, 19 nt, Artificial Sequence
  Description of Artificial Sequence: Synthetic oligonucleotide
  Antisense strand to SEQ ID NO: 1403808
uaauagguaagcgacuccc

SEQ ID NO: 1403810 - RNA, 19 nt, Artificial Sequence
  Description of Artificial Sequence: Synthetic oligonucleotide
  Sense strand starting at position 1550 of SEQ ID NO: 1243246
ggagucgcuuaccuauuau

SEQ ID NO: 1403811 - RNA, 19 nt, Artificial Sequence
  Description of Artificial Sequence: Synthetic oligonucleotide
  Antisense strand to SEQ ID NO: 1403810
auaauagguaagcgacucc

SEQ ID NO: 1403812 - RNA, 19 nt, Artificial Sequence
  Description of Artificial Sequence: Synthetic oligonucleotide
  Sense strand starting at position 2072 of SEQ ID NO: 1243246
ugcggccuccugcuuuaaa

SEQ ID NO: 1403813 - RNA, 19 nt, Artificial Sequence
  Description of Artificial Sequence: Synthetic oligonucleotide
  Antisense strand to SEQ ID NO: 1403812
uuuaaagcaggaggccgca

SEQ ID NO: 1403814 - RNA, 19 nt, Artificial Sequence
  Description of Artificial Sequence: Synthetic oligonucleotide
  Sense strand starting at position 2227 of SEQ ID NO: 1243246
cgugguaguacuguuugua

SEQ ID NO: 1403815 - RNA, 19 nt, Artificial Sequence
  Description of Artificial Sequence: Synthetic oligonucleotide
  Antisense strand to SEQ ID NO: 1403814
uacaaacaguacuaccacg

SEQ ID NO: 1403816 - RNA, 19 nt, Artificial Sequence
  Description of Artificial Sequence: Synthetic oligonucleotide
  Sense strand starting at position 2239 of SEQ ID NO: 1243246
guuuguacuguccauugau

SEQ ID NO: 1403817 - RNA, 19 nt, Artificial Sequence
  Description of Artificial Sequence: Synthetic oligonucleotide
  Antisense strand to SEQ ID NO: 1403816
aucaauggacaguacaaac

SEQ ID NO: 1403818 - RNA, 19 nt, Artificial Sequence
  Description of Artificial Sequence: Synthetic oligonucleotide
  Sense strand starting at position 2245 of SEQ ID NO: 1243246
acuguccauugauaagaga

SEQ ID NO: 1403819 - RNA, 19 nt, Artificial Sequence
  Description of Artificial Sequence: Synthetic oligonucleotide
  Antisense strand to SEQ ID NO: 1403818
ucucuuaucaauggacagu

SEQ ID NO: 1403820 - RNA, 19 nt, Artificial Sequence
  Description of Artificial Sequence: Synthetic oligonucleotide
  Sense strand starting at position 2258 of SEQ ID NO: 1243246
aagagaccugguggaguau

SEQ ID NO: 1403821 - RNA, 19 nt, Artificial Sequence
  Description of Artificial Sequence: Synthetic oligonucleotide
  Antisense strand to SEQ ID NO: 1403820
auacuccaccaggucucuu

SEQ ID NO: 1403822 - RNA, 19 nt, Artificial Sequence
  Description of Artificial Sequence: Synthetic oligonucleotide
  Sense strand starting at position 2364 of SEQ ID NO: 1243246
agcaaaguauaccugaauu

SEQ ID NO: 1403823 - RNA, 19 nt, Artificial Sequence
  Description of Artificial Sequence: Synthetic oligonucleotide
  Antisense strand to SEQ ID NO: 1403822
aauucagguauacuuugcu

SEQ ID NO: 1403824 - RNA, 19 nt, Artificial Sequence
  Description of Artificial Sequence: Synthetic oligonucleotide
  Sense strand starting at position 2508 of SEQ ID NO: 1243246
gugggaacucuuugucucu

SEQ ID NO: 1403825 - RNA, 19 nt, Artificial Sequence
  Description of Artificial Sequence: Synthetic oligonucleotide
  Antisense strand to SEQ ID NO: 1403824
agagacaaagaguucccac

SEQ ID NO: 1403826 - RNA, 19 nt, Artificial Sequence
  Description of Artificial Sequence: Synthetic oligonucleotide
  Sense strand starting at position 2562 of SEQ ID NO: 1243246
gugcaugcucaacaaagaa

SEQ ID NO: 1403827 - RNA, 19 nt, Artificial Sequence
  Description of Artificial Sequence: Synthetic oligonucleotide
  Antisense strand to SEQ ID NO: 1403826
uucuuuguugagcaugcac

SEQ ID NO: 1403828 - RNA, 19 nt, Artificial Sequence
  Description of Artificial Sequence: Synthetic oligonucleotide
  Sense strand starting at position 2689 of SEQ ID NO: 1243246
auuuaagaguugggagaag

SEQ ID NO: 1403829 - RNA, 19 nt, Artificial Sequence
  Description of Artificial Sequence: Synthetic oligonucleotide
  Antisense strand to SEQ ID NO: 1403828
cuucucccaacucuuaaau

SEQ ID NO: 1403830 - RNA, 19 nt, Artificial Sequence
  Description of Artificial Sequence: Synthetic oligonucleotide
  Sense strand starting at position 2721 of SEQ ID NO: 1243246
agaggaguuugccuuugca

SEQ ID NO: 1403831 - RNA, 19 nt, Artificial Sequence
  Description of Artificial Sequence: Synthetic oligonucleotide
  Antisense strand to SEQ ID NO: 1403830
ugcaaaggcaaacuccucu

SEQ ID NO: 1403832 - RNA, 19 nt, Artificial Sequence
  Description of Artificial Sequence: Synthetic oligonucleotide
  Sense strand starting at position 2724 of SEQ ID NO: 1243246
ggaguuugccuuugcaaag

SEQ ID NO: 1403833 - RNA, 19 nt, Artificial Sequence
  Description of Artificial Sequence: Synthetic oligonucleotide
  Antisense strand to SEQ ID NO: 1403832
cuuugcaaaggcaaacucc

SEQ ID NO: 1403834 - RNA, 19 nt, Artificial Sequence
  Description of Artificial Sequence: Synthetic oligonucleotide
  Sense strand starting at position 2725 of SEQ ID NO: 1243246
gaguuugccuuugcaaaga

SEQ ID NO: 1403835 - RNA, 19 nt, Artificial Sequence
  Description of Artificial Sequence: Synthetic oligonucleotide
  Antisense strand to SEQ ID NO: 1403834
ucuuugcaaaggcaaacuc

SEQ ID NO: 1403836 - RNA, 19 nt, Artificial Sequence
  Description of Artificial Sequence: Synthetic oligonucleotide
  Sense strand starting at position 2743 of SEQ ID NO: 1243246
agugacaccucuuccugaa

SEQ ID NO: 1403837 - RNA, 19 nt, Artificial Sequence
  Description of Artificial Sequence: Synthetic oligonucleotide
  Antisense strand to SEQ ID NO: 1403836
uucaggaagaggugucacu

SEQ ID NO: 1403838 - RNA, 19 nt, Artificial Sequence
  Description of Artificial Sequence: Synthetic oligonucleotide
  Sense strand starting at position 2779 of SEQ ID NO: 1243246
auggaacccugcuccauaa

SEQ ID NO: 1403839 - RNA, 19 nt, Artificial Sequence
  Description of Artificial Sequence: Synthetic oligonucleotide
  Antisense strand to SEQ ID NO: 1403838
uuauggagcaggguuccau

SEQ ID NO: 1403840 - RNA, 19 nt, Artificial Sequence
  Description of Artificial Sequence: Synthetic oligonucleotide
  Sense strand starting at position 2790 of SEQ ID NO: 1243246
cuccauaaccugugucauc

SEQ ID NO: 1403841 - RNA, 19 nt, Artificial Sequence
  Description of Artificial Sequence: Synthetic oligonucleotide
  Antisense strand to SEQ ID NO: 1403840
gaugacacagguuauggag

SEQ ID NO: 1403842 - RNA, 19 nt, Artificial Sequence
  Description of Artificial Sequence: Synthetic oligonucleotide
  Sense strand starting at position 2791 of SEQ ID NO: 1243246
uccauaaccugugucaucu

SEQ ID NO: 1403843 - RNA, 19 nt, Artificial Sequence
  Description of Artificial Sequence: Synthetic oligonucleotide
  Antisense strand to SEQ ID NO: 1403842
agaugacacagguuaugga

SEQ ID NO: 1403844 - RNA, 19 nt, Artificial Sequence
  Description of Artificial Sequence: Synthetic oligonucleotide
  Sense strand starting at position 2799 of SEQ ID NO: 1243246
cugugucaucuugguaaau

SEQ ID NO: 1403845 - RNA, 19 nt, Artificial Sequence
  Description of Artificial Sequence: Synthetic oligonucleotide
  Antisense strand to SEQ ID NO: 1403844
auuuaccaagaugacacag

SEQ ID NO: 1403846 - RNA, 19 nt, Artificial Sequence
  Description of Artificial Sequence: Synthetic oligonucleotide
  Sense strand starting at position 2800 of SEQ ID NO: 1243246
ugugucaucuugguaaauu

SEQ ID NO: 1403847 - RNA, 19 nt, Artificial Sequence
  Description of Artificial Sequence: Synthetic oligonucleotide
  Antisense strand to SEQ ID NO: 1403846
aauuuaccaagaugacaca

SEQ ID NO: 1403848 - RNA, 19 nt, Artificial Sequence
  Description of Artificial Sequence: Synthetic oligonucleotide
  Sense strand starting at position 2818 of SEQ ID NO: 1243246
uaagaauuaugguugucug

SEQ ID NO: 1403849 - RNA, 19 nt, Artificial Sequence
  Description of Artificial Sequence: Synthetic oligonucleotide
  Antisense strand to SEQ ID NO: 1403848
cagacaaccauaauucuua

SEQ ID NO: 1403850 - RNA, 19 nt, Artificial Sequence
  Description of Artificial Sequence: Synthetic oligonucleotide
  Sense strand starting at position 2821 of SEQ ID NO: 1243246
gaauuaugguugucugcug

SEQ ID NO: 1403851 - RNA, 19 nt, Artificial Sequence
  Description of Artificial Sequence: Synthetic oligonucleotide
  Antisense strand to SEQ ID NO: 1403850
cagcagacaaccauaauuc

SEQ ID NO: 1403852 - RNA, 19 nt, Artificial Sequence
  Description of Artificial Sequence: Synthetic oligonucleotide
  Sense strand starting at position 2828 of SEQ ID NO: 1243246
gguugucugcugaguguaa

SEQ ID NO: 1403853 - RNA, 19 nt, Artificial Sequence
  Description of Artificial Sequence: Synthetic oligonucleotide
  Antisense strand to SEQ ID NO: 1403852
uuacacucagcagacaacc

SEQ ID NO: 1403854 - RNA, 19 nt, Artificial Sequence
  Description of Artificial Sequence: Synthetic oligonucleotide
  Sense strand starting at position 2830 of SEQ ID NO: 1243246
uugucugcugaguguaaga

SEQ ID NO: 1403855 - RNA, 19 nt, Artificial Sequence
  Description of Artificial Sequence: Synthetic oligonucleotide
  Antisense strand to SEQ ID NO: 1403854
ucuuacacucagcagacaa

SEQ ID NO: 1403856 - RNA, 19 nt, Artificial Sequence
  Description of Artificial Sequence: Synthetic oligonucleotide
  Sense strand starting at position 2839 of SEQ ID NO: 1243246
gaguguaagauggaugcua

SEQ ID NO: 1403857 - RNA, 19 nt, Artificial Sequence
  Description of Artificial Sequence: Synthetic oligonucleotide
  Antisense strand to SEQ ID NO: 1403856
uagcauccaucuuacacuc

SEQ ID NO: 1403858 - RNA, 19 nt, Artificial Sequence
  Description of Artificial Sequence: Synthetic oligonucleotide
  Sense strand starting at position 2841 of SEQ ID NO: 1243246
guguaagauggaugcuaug

SEQ ID NO: 1403859 - RNA, 19 nt, Artificial Sequence
  Description of Artificial Sequence: Synthetic oligonucleotide
  Antisense strand to SEQ ID NO: 1403858
cauagcauccaucuuacac

SEQ ID NO: 1403860 - RNA, 19 nt, Artificial Sequence
  Description of Artificial Sequence: Synthetic oligonucleotide
  Sense strand starting at position 3159 of SEQ ID NO: 1243246
agcugauggucugugggaa

SEQ ID NO: 1403861 - RNA, 19 nt, Artificial Sequence
  Description of Artificial Sequence: Synthetic oligonucleotide
  Antisense strand to SEQ ID NO: 1403860
uucccacagaccaucagcu

SEQ ID NO: 1403862 - RNA, 19 nt, Artificial Sequence
  Description of Artificial Sequence: Synthetic oligonucleotide
  Sense strand starting at position 3160 of SEQ ID NO: 1243246
gcugauggucugugggaag

SEQ ID NO: 1403863 - RNA, 19 nt, Artificial Sequence
  Description of Artificial Sequence: Synthetic oligonucleotide
  Antisense strand to SEQ ID NO: 1403862
cuucccacagaccaucagc

SEQ ID NO: 1403864 - RNA, 19 nt, Artificial Sequence
  Description of Artificial Sequence: Synthetic oligonucleotide
  Sense strand starting at position 229 of SEQ ID NO: 1243247
aggauagguucccugacca

SEQ ID NO: 1403865 - RNA, 19 nt, Artificial Sequence
  Description of Artificial Sequence: Synthetic oligonucleotide
  Antisense strand to SEQ ID NO: 1403864
uggucagggaaccuauccu

SEQ ID NO: 1403866 - RNA, 19 nt, Artificial Sequence
  Description of Artificial Sequence: Synthetic oligonucleotide
  Sense strand starting at position 317 of SEQ ID NO: 1243247
gucucaucuuaaucuggaa

SEQ ID NO: 1403867 - RNA, 19 nt, Artificial Sequence
  Description of Artificial Sequence: Synthetic oligonucleotide
  Antisense strand to SEQ ID NO: 1403866
uuccagauuaagaugagac

SEQ ID NO: 1403868 - RNA, 19 nt, Artificial Sequence
  Description of Artificial Sequence: Synthetic oligonucleotide
  Sense strand starting at position 330 of SEQ ID NO: 1243247
cuggaacuaccuggucuau

SEQ ID NO: 1403869 - RNA, 19 nt, Artificial Sequence
  Description of Artificial Sequence: Synthetic oligonucleotide
  Antisense strand to SEQ ID NO: 1403868
auagaccagguaguuccag

SEQ ID NO: 1403870 - RNA, 19 nt, Artificial Sequence
  Description of Artificial Sequence: Synthetic oligonucleotide
  Sense strand starting at position 342 of SEQ ID NO: 1243247
ggucuauuugcucaggugu

SEQ ID NO: 1403871 - RNA, 19 nt, Artificial Sequence
  Description of Artificial Sequence: Synthetic oligonucleotide
  Antisense strand to SEQ ID NO: 1403870
acaccugagcaaauagacc

SEQ ID NO: 1403872 - RNA, 19 nt, Artificial Sequence
  Description of Artificial Sequence: Synthetic oligonucleotide
  Sense strand starting at position 359 of SEQ ID NO: 1243247
guuguuugucuucugcaau

SEQ ID NO: 1403873 - RNA, 19 nt, Artificial Sequence
  Description of Artificial Sequence: Synthetic oligonucleotide
  Antisense strand to SEQ ID NO: 1403872
auugcagaagacaaacaac

SEQ ID NO: 1403874 - RNA, 19 nt, Artificial Sequence
  Description of Artificial Sequence: Synthetic oligonucleotide
  Sense strand starting at position 362 of SEQ ID NO: 1243247
guuugucuucugcaauaga

SEQ ID NO: 1403875 - RNA, 19 nt, Artificial Sequence
  Description of Artificial Sequence: Synthetic oligonucleotide
  Antisense strand to SEQ ID NO: 1403874
ucuauugcagaagacaaac

SEQ ID NO: 1403876 - RNA, 19 nt, Artificial Sequence
  Description of Artificial Sequence: Synthetic oligonucleotide
  Sense strand starting at position 539 of SEQ ID NO: 1243247
guugacacucaauauagua

SEQ ID NO: 1403877 - RNA, 19 nt, Artificial Sequence
  Description of Artificial Sequence: Synthetic oligonucleotide
  Antisense strand to SEQ ID NO: 1403876
uacuauauugagugucaac

SEQ ID NO: 1403878 - RNA, 19 nt, Artificial Sequence
  Description of Artificial Sequence: Synthetic oligonucleotide
  Sense strand starting at position 749 of SEQ ID NO: 1243247
gauaaacggcaguaugguu

SEQ ID NO: 1403879 - RNA, 19 nt, Artificial Sequence
  Description of Artificial Sequence: Synthetic oligonucleotide
  Antisense strand to SEQ ID NO: 1403878
aaccauacugccguuuauc

SEQ ID NO: 1403880 - RNA, 19 nt, Artificial Sequence
  Description of Artificial Sequence: Synthetic oligonucleotide
  Sense strand starting at position 761 of SEQ ID NO: 1243247
uaugguuaaguggguaaga

SEQ ID NO: 1403881 - RNA, 19 nt, Artificial Sequence
  Description of Artificial Sequence: Synthetic oligonucleotide
  Antisense strand to SEQ ID NO: 1403880
ucuuacccacuuaaccaua

SEQ ID NO: 1403882 - RNA, 19 nt, Artificial Sequence
  Description of Artificial Sequence: Synthetic oligonucleotide
  Sense strand starting at position 956 of SEQ ID NO: 1243247
aaacguaaccucugggaag

SEQ ID NO: 1403883 - RNA, 19 nt, Artificial Sequence
  Description of Artificial Sequence: Synthetic oligonucleotide
  Antisense strand to SEQ ID NO: 1403882
cuucccagagguuacguuu

SEQ ID NO: 1403884 - RNA, 19 nt, Artificial Sequence
  Description of Artificial Sequence: Synthetic oligonucleotide
  Sense strand starting at position 967 of SEQ ID NO: 1243247
cugggaagguuuguuauua

SEQ ID NO: 1403885 - RNA, 19 nt, Artificial Sequence
  Description of Artificial Sequence: Synthetic oligonucleotide
  Antisense strand to SEQ ID NO: 1403884
uaauaacaaaccuucccag

SEQ ID NO: 1403886 - RNA, 19 nt, Artificial Sequence
  Description of Artificial Sequence: Synthetic oligonucleotide
  Sense strand starting at position 968 of SEQ ID NO: 1243247
ugggaagguuuguuauuac

SEQ ID NO: 1403887 - RNA, 19 nt, Artificial Sequence
  Description of Artificial Sequence: Synthetic oligonucleotide
  Antisense strand to SEQ ID NO: 1403886
guaauaacaaaccuuccca

SEQ ID NO: 1403888 - RNA, 19 nt, Artificial Sequence
  Description of Artificial Sequence: Synthetic oligonucleotide
  Sense strand starting at position 971 of SEQ ID NO: 1243247
gaagguuuguuauuacuug

SEQ ID NO: 1403889 - RNA, 19 nt, Artificial Sequence
  Description of Artificial Sequence: Synthetic oligonucleotide
  Antisense strand to SEQ ID NO: 1403888
caaguaauaacaaaccuuc

SEQ ID NO: 1403890 - RNA, 19 nt, Artificial Sequence
  Description of Artificial Sequence: Synthetic oligonucleotide
  Sense strand starting at position 975 of SEQ ID NO: 1243247
guuuguuauuacuugacaa

SEQ ID NO: 1403891 - RNA, 19 nt, Artificial Sequence
  Description of Artificial Sequence: Synthetic oligonucleotide
  Antisense strand to SEQ ID NO: 1403890
uugucaaguaauaacaaac

SEQ ID NO: 1403892 - RNA, 19 nt, Artificial Sequence
  Description of Artificial Sequence: Synthetic oligonucleotide
  Sense strand starting at position 1016 of SEQ ID NO: 1243247
ggguaaugacgcuaagcca

SEQ ID NO: 1403893 - RNA, 19 nt, Artificial Sequence
  Description of Artificial Sequence: Synthetic oligonucleotide
  Antisense strand to SEQ ID NO: 1403892
uggcuuagcgucauuaccc

SEQ ID NO: 1403894 - RNA, 19 nt, Artificial Sequence
  Description of Artificial Sequence: Synthetic oligonucleotide
  Sense strand starting at position 1056 of SEQ ID NO: 1243247
gagcgucacccgguuucua

SEQ ID NO: 1403895 - RNA, 19 nt, Artificial Sequence
  Description of Artificial Sequence: Synthetic oligonucleotide
  Antisense strand to SEQ ID NO: 1403894
uagaaaccgggugacgcuc

SEQ ID NO: 1403896 - RNA, 19 nt, Artificial Sequence
  Description of Artificial Sequence: Synthetic oligonucleotide
  Sense strand starting at position 1141 of SEQ ID NO: 1243247
uguggagaucgcuaagauc

SEQ ID NO: 1403897 - RNA, 19 nt, Artificial Sequence
  Description of Artificial Sequence: Synthetic oligonucleotide
  Antisense strand to SEQ ID NO: 1403896
gaucuuagcgaucuccaca

SEQ ID NO: 1403898 - RNA, 19 nt, Artificial Sequence
  Description of Artificial Sequence: Synthetic oligonucleotide
  Sense strand starting at position 1211 of SEQ ID NO: 1243247
gaccuuguuuguuuacuga

SEQ ID NO: 1403899 - RNA, 19 nt, Artificial Sequence
  Description of Artificial Sequence: Synthetic oligonucleotide
  Antisense strand to SEQ ID NO: 1403898
ucaguaaacaaacaagguc

SEQ ID NO: 1403900 - RNA, 19 nt, Artificial Sequence
  Description of Artificial Sequence: Synthetic oligonucleotide
  Sense strand starting at position 1271 of SEQ ID NO: 1243247
agaguuggcucgguaaaca

SEQ ID NO: 1403901 - RNA, 19 nt, Artificial Sequence
  Description of Artificial Sequence: Synthetic oligonucleotide
  Antisense strand to SEQ ID NO: 1403900
uguuuaccgagccaacucu

SEQ ID NO: 1403902 - RNA, 19 nt, Artificial Sequence
  Description of Artificial Sequence: Synthetic oligonucleotide
  Sense strand starting at position 1280 of SEQ ID NO: 1243247
ucgguaaacacugaauggu

SEQ ID NO: 1403903 - RNA, 19 nt, Artificial Sequence
  Description of Artificial Sequence: Synthetic oligonucleotide
  Antisense strand to SEQ ID NO: 1403902
accauucaguguuuaccga

SEQ ID NO: 1403904 - RNA, 19 nt, Artificial Sequence
  Description of Artificial Sequence: Synthetic oligonucleotide
  Sense strand starting at position 1289 of SEQ ID NO: 1243247
acugaaugguugccugaau

SEQ ID NO: 1403905 - RNA, 19 nt, Artificial Sequence
  Description of Artificial Sequence: Synthetic oligonucleotide
  Antisense strand to SEQ ID NO: 1403904
auucaggcaaccauucagu

SEQ ID NO: 1403906 - RNA, 19 nt, Artificial Sequence
  Description of Artificial Sequence: Synthetic oligonucleotide
  Sense strand starting at position 1290 of SEQ ID NO: 1243247
cugaaugguugccugaaua

SEQ ID NO: 1403907 - RNA, 19 nt, Artificial Sequence
  Description of Artificial Sequence: Synthetic oligonucleotide
  Antisense strand to SEQ ID NO: 1403906
uauucaggcaaccauucag

SEQ ID NO: 1403908 - RNA, 19 nt, Artificial Sequence
  Description of Artificial Sequence: Synthetic oligonucleotide
  Sense strand starting at position 1751 of SEQ ID NO: 1243247
uggccuacucgggaaucua

SEQ ID NO: 1403909 - RNA, 19 nt, Artificial Sequence
  Description of Artificial Sequence: Synthetic oligonucleotide
  Antisense strand to SEQ ID NO: 1403908
uagauucccgaguaggcca

SEQ ID NO: 1403910 - RNA, 19 nt, Artificial Sequence
  Description of Artificial Sequence: Synthetic oligonucleotide
  Sense strand starting at position 2240 of SEQ ID NO: 1243247
cugcaauauguuuaugcca

SEQ ID NO: 1403911 - RNA, 19 nt, Artificial Sequence
  Description of Artificial Sequence: Synthetic oligonucleotide
  Antisense strand to SEQ ID NO: 1403910
uggcauaaacauauugcag

SEQ ID NO: 1403912 - RNA, 19 nt, Artificial Sequence
  Description of Artificial Sequence: Synthetic oligonucleotide
  Sense strand starting at position 2423 of SEQ ID NO: 1243247
guugguuccgaauagguau

SEQ ID NO: 1403913 - RNA, 19 nt, Artificial Sequence
  Description of Artificial Sequence: Synthetic oligonucleotide
  Antisense strand to SEQ ID NO: 1403912
auaccuauucggaaccaac

SEQ ID NO: 1403914 - RNA, 19 nt, Artificial Sequence
  Description of Artificial Sequence: Synthetic oligonucleotide
  Sense strand starting at position 2462 of SEQ ID NO: 1243247
gaaacuuuacucugaguug

SEQ ID NO: 1403915 - RNA, 19 nt, Artificial Sequence
  Description of Artificial Sequence: Synthetic oligonucleotide
  Antisense strand to SEQ ID NO: 1403914
caacucagaguaaaguuuc

SEQ ID NO: 1403916 - RNA, 19 nt, Artificial Sequence
  Description of Artificial Sequence: Synthetic oligonucleotide
  Sense strand starting at position 2465 of SEQ ID NO: 1243247
acuuuacucugaguuggau

SEQ ID NO: 1403917 - RNA, 19 nt, Artificial Sequence
  Description of Artificial Sequence: Synthetic oligonucleotide
  Antisense strand to SEQ ID NO: 1403916
auccaacucagaguaaagu

SEQ ID NO: 1403918 - RNA, 19 nt, Artificial Sequence
  Description of Artificial Sequence: Synthetic oligonucleotide
  Sense strand starting at position 2471 of SEQ ID NO: 1243247
cucugaguuggaugguuaa

SEQ ID NO: 1403919 - RNA, 19 nt, Artificial Sequence
  Description of Artificial Sequence: Synthetic oligonucleotide
  Antisense strand to SEQ ID NO: 1403918
uuaaccauccaacucagag

SEQ ID NO: 1403920 - RNA, 19 nt, Artificial Sequence
  Description of Artificial Sequence: Synthetic oligonucleotide
  Sense strand starting at position 2501 of SEQ ID NO: 1243247
cugguuaacccacagguaa

SEQ ID NO: 1403921 - RNA, 19 nt, Artificial Sequence
  Description of Artificial Sequence: Synthetic oligonucleotide
  Antisense strand to SEQ ID NO: 1403920
uuaccuguggguuaaccag

SEQ ID NO: 1403922 - RNA, 19 nt, Artificial Sequence
  Description of Artificial Sequence: Synthetic oligonucleotide
  Sense strand starting at position 2539 of SEQ ID NO: 1243247
gugucuccgggagaagaaa

SEQ ID NO: 1403923 - RNA, 19 nt, Artificial Sequence
  Description of Artificial Sequence: Synthetic oligonucleotide
  Antisense strand to SEQ ID NO: 1403922
uuucuucucccggagacac

SEQ ID NO: 1403924 - RNA, 19 nt, Artificial Sequence
  Description of Artificial Sequence: Synthetic oligonucleotide
  Sense strand starting at position 2553 of SEQ ID NO: 1243247
agaaauugaucugaucaga

SEQ ID NO: 1403925 - RNA, 19 nt, Artificial Sequence
  Description of Artificial Sequence: Synthetic oligonucleotide
  Antisense strand to SEQ ID NO: 1403924
ucugaucagaucaauuucu

SEQ ID NO: 1403926 - RNA, 19 nt, Artificial Sequence
  Description of Artificial Sequence: Synthetic oligonucleotide
  Sense strand starting at position 2704 of SEQ ID NO: 1243247
agguacaaaugcucuuuga

SEQ ID NO: 1403927 - RNA, 19 nt, Artificial Sequence
  Description of Artificial Sequence: Synthetic oligonucleotide
  Antisense strand to SEQ ID NO: 1403926
ucaaagagcauuuguaccu

SEQ ID NO: 1403928 - RNA, 19 nt, Artificial Sequence
  Description of Artificial Sequence: Synthetic oligonucleotide
  Sense strand starting at position 2751 of SEQ ID NO: 1243247
cgagguaacuaaccauuau

SEQ ID NO: 1403929 - RNA, 19 nt, Artificial Sequence
  Description of Artificial Sequence: Synthetic oligonucleotide
  Antisense strand to SEQ ID NO: 1403928
auaaugguuaguuaccucg

SEQ ID NO: 1403930 - RNA, 19 nt, Artificial Sequence
  Description of Artificial Sequence: Synthetic oligonucleotide
  Sense strand starting at position 2781 of SEQ ID NO: 1243247
uaugaacuaugguuugaau

SEQ ID NO: 1403931 - RNA, 19 nt, Artificial Sequence
  Description of Artificial Sequence: Synthetic oligonucleotide
  Antisense strand to SEQ ID NO: 1403930
auucaaaccauaguucaua

SEQ ID NO: 1403932 - RNA, 19 nt, Artificial Sequence
  Description of Artificial Sequence: Synthetic oligonucleotide
  Sense strand starting at position 2783 of SEQ ID NO: 1243247
ugaacuaugguuugaaugu

SEQ ID NO: 1403933 - RNA, 19 nt, Artificial Sequence
  Description of Artificial Sequence: Synthetic oligonucleotide
  Antisense strand to SEQ ID NO: 1403932
acauucaaaccauaguuca

SEQ ID NO: 1403934 - RNA, 19 nt, Artificial Sequence
  Description of Artificial Sequence: Synthetic oligonucleotide
  Sense strand starting at position 2999 of SEQ ID NO: 1243247
gagagaccuuagcuagcaa

SEQ ID NO: 1403935 - RNA, 19 nt, Artificial Sequence
  Description of Artificial Sequence: Synthetic oligonucleotide
  Antisense strand to SEQ ID NO: 1403934
uugcuagcuaaggucucuc

SEQ ID NO: 1403936 - RNA, 19 nt, Artificial Sequence
  Description of Artificial Sequence: Synthetic oligonucleotide
  Sense strand starting at position 3323 of SEQ ID NO: 1243247
guguauggauuugaacaca

SEQ ID NO: 1403937 - RNA, 19 nt, Artificial Sequence
  Description of Artificial Sequence: Synthetic oligonucleotide
  Antisense strand to SEQ ID NO: 1403936
uguguucaaauccauacac

SEQ ID NO: 1403938 - RNA, 19 nt, Artificial Sequence
  Description of Artificial Sequence: Synthetic oligonucleotide
  Sense strand starting at position 3358 of SEQ ID NO: 1243247
ucauauagaucugcaauug

SEQ ID NO: 1403939 - RNA, 19 nt, Artificial Sequence
  Description of Artificial Sequence: Synthetic oligonucleotide
  Antisense strand to SEQ ID NO: 1403938
caauugcagaucuauauga

SEQ ID NO: 1403940 - RNA, 19 nt, Artificial Sequence
  Description of Artificial Sequence: Synthetic oligonucleotide
  Sense strand starting at position 3407 of SEQ ID NO: 1243247
aauaccuauccguguggau

SEQ ID NO: 1403941 - RNA, 19 nt, Artificial Sequence
  Description of Artificial Sequence: Synthetic oligonucleotide
  Antisense strand to SEQ ID NO: 1403940
auccacacggauagguauu

SEQ ID NO: 1403942 - RNA, 19 nt, Artificial Sequence
  Description of Artificial Sequence: Synthetic oligonucleotide
  Sense strand starting at position 3826 of SEQ ID NO: 1243247
gugagaaacucggucucaa

SEQ ID NO: 1403943 - RNA, 19 nt, Artificial Sequence
  Description of Artificial Sequence: Synthetic oligonucleotide
  Antisense strand to SEQ ID NO: 1403942
uugagaccgaguuucucac

SEQ ID NO: 1403944 - RNA, 19 nt, Artificial Sequence
  Description of Artificial Sequence: Synthetic oligonucleotide
  Sense strand starting at position 461 of SEQ ID NO: 1243248
uggaguagcaugcaaacau

SEQ ID NO: 1403945 - RNA, 19 nt, Artificial Sequence
  Description of Artificial Sequence: Synthetic oligonucleotide
  Antisense strand to SEQ ID NO: 1403944
auguuugcaugcuacucca

SEQ ID NO: 1403946 - RNA, 19 nt, Artificial Sequence
  Description of Artificial Sequence: Synthetic oligonucleotide
  Sense strand starting at position 468 of SEQ ID NO: 1243248
gcaugcaaacauuaagacu

SEQ ID NO: 1403947 - RNA, 19 nt, Artificial Sequence
  Description of Artificial Sequence: Synthetic oligonucleotide
  Antisense strand to SEQ ID NO: 1403946
agucuuaauguuugcaugc

SEQ ID NO: 1403948 - RNA, 19 nt, Artificial Sequence
  Description of Artificial Sequence: Synthetic oligonucleotide
  Sense strand starting at position 474 of SEQ ID NO: 1243248
aaacauuaagacugacgua

SEQ ID NO: 1403949 - RNA, 19 nt, Artificial Sequence
  Description of Artificial Sequence: Synthetic oligonucleotide
  Antisense strand to SEQ ID NO: 1403948
uacgucagucuuaauguuu

SEQ ID NO: 1403950 - RNA, 19 nt, Artificial Sequence
  Description of Artificial Sequence: Synthetic oligonucleotide
  Sense strand starting at position 1303 of SEQ ID NO: 1243248
caaugaguaagguggcgau

SEQ ID NO: 1403951 - RNA, 19 nt, Artificial Sequence
  Description of Artificial Sequence: Synthetic oligonucleotide
  Antisense strand to SEQ ID NO: 1403950
aucgccaccuuacucauug

SEQ ID NO: 1403952 - RNA, 19 nt, Artificial Sequence
  Description of Artificial Sequence: Synthetic oligonucleotide
  Sense strand starting at position 1372 of SEQ ID NO: 1243248
ccaugagcacgaugagaga

SEQ ID NO: 1403953 - RNA, 19 nt, Artificial Sequence
  Description of Artificial Sequence: Synthetic oligonucleotide
  Antisense strand to SEQ ID NO: 1403952
ucucucaucgugcucaugg

SEQ ID NO: 1403954 - RNA, 19 nt, Artificial Sequence
  Description of Artificial Sequence: Synthetic oligonucleotide
  Sense strand starting at position 1434 of SEQ ID NO: 1243248
ggcauuaggacuugaaauc

SEQ ID NO: 1403955 - RNA, 19 nt, Artificial Sequence
  Description of Artificial Sequence: Synthetic oligonucleotide
  Antisense strand to SEQ ID NO: 1403954
gauuucaaguccuaaugcc

SEQ ID NO: 1403956 - RNA, 19 nt, Artificial Sequence
  Description of Artificial Sequence: Synthetic oligonucleotide
  Sense strand starting at position 1573 of SEQ ID NO: 1243248
gugccucagcuuuaaggaa

SEQ ID NO: 1403957 - RNA, 19 nt, Artificial Sequence
  Description of Artificial Sequence: Synthetic oligonucleotide
  Antisense strand to SEQ ID NO: 1403956
uuccuuaaagcugaggcac

SEQ ID NO: 1403958 - RNA, 19 nt, Artificial Sequence
  Description of Artificial Sequence: Synthetic oligonucleotide
  Sense strand starting at position 1669 of SEQ ID NO: 1243248
gggcuuucugaguguauug

SEQ ID NO: 1403959 - RNA, 19 nt, Artificial Sequence
  Description of Artificial Sequence: Synthetic oligonucleotide
  Antisense strand to SEQ ID NO: 1403958
caauacacucagaaagccc

SEQ ID NO: 1403960 - RNA, 19 nt, Artificial Sequence
  Description of Artificial Sequence: Synthetic oligonucleotide
  Sense strand starting at position 1671 of SEQ ID NO: 1243248
gcuuucugaguguauugga

SEQ ID NO: 1403961 - RNA, 19 nt, Artificial Sequence
  Description of Artificial Sequence: Synthetic oligonucleotide
  Antisense strand to SEQ ID NO: 1403960
uccaauacacucagaaagc

SEQ ID NO: 1403962 - RNA, 19 nt, Artificial Sequence
  Description of Artificial Sequence: Synthetic oligonucleotide
  Sense strand starting at position 1849 of SEQ ID NO: 1243248
gggugauguugugcacgua

SEQ ID NO: 1403963 - RNA, 19 nt, Artificial Sequence
  Description of Artificial Sequence: Synthetic oligonucleotide
  Antisense strand to SEQ ID NO: 1403962
uacgugcacaacaucaccc

SEQ ID NO: 1403964 - RNA, 19 nt, Artificial Sequence
  Description of Artificial Sequence: Synthetic oligonucleotide
  Sense strand starting at position 2110 of SEQ ID NO: 1243248
ggcugucucgcacuuguca

SEQ ID NO: 1403965 - RNA, 19 nt, Artificial Sequence
  Description of Artificial Sequence: Synthetic oligonucleotide
  Antisense strand to SEQ ID NO: 1403964
ugacaagugcgagacagcc

SEQ ID NO: 1403966 - RNA, 19 nt, Artificial Sequence
  Description of Artificial Sequence: Synthetic oligonucleotide
  Sense strand starting at position 2111 of SEQ ID NO: 1243248
gcugucucgcacuugucau

SEQ ID NO: 1403967 - RNA, 19 nt, Artificial Sequence
  Description of Artificial Sequence: Synthetic oligonucleotide
  Antisense strand to SEQ ID NO: 1403966
augacaagugcgagacagc

SEQ ID NO: 1403968 - RNA, 19 nt, Artificial Sequence
  Description of Artificial Sequence: Synthetic oligonucleotide
  Sense strand starting at position 2117 of SEQ ID NO: 1243248
ucgcacuugucauugguca

SEQ ID NO: 1403969 - RNA, 19 nt, Artificial Sequence
  Description of Artificial Sequence: Synthetic oligonucleotide
  Antisense strand to SEQ ID NO: 1403968
ugaccaaugacaagugcga

SEQ ID NO: 1403970 - RNA, 19 nt, Artificial Sequence
  Description of Artificial Sequence: Synthetic oligonucleotide
  Sense strand starting at position 2621 of SEQ ID NO: 1243248
ccucauuagugagugacau

SEQ ID NO: 1403971 - RNA, 19 nt, Artificial Sequence
  Description of Artificial Sequence: Synthetic oligonucleotide
  Antisense strand to SEQ ID NO: 1403970
augucacucacuaaugagg

SEQ ID NO: 1403972 - RNA, 19 nt, Artificial Sequence
  Description of Artificial Sequence: Synthetic oligonucleotide
  Sense strand starting at position 2622 of SEQ ID NO: 1243248
cucauuagugagugacauc

SEQ ID NO: 1403973 - RNA, 19 nt, Artificial Sequence
  Description of Artificial Sequence: Synthetic oligonucleotide
  Antisense strand to SEQ ID NO: 1403972
gaugucacucacuaaugag

SEQ ID NO: 1403974 - RNA, 19 nt, Artificial Sequence
  Description of Artificial Sequence: Synthetic oligonucleotide
  Sense strand starting at position 2625 of SEQ ID NO: 1243248
auuagugagugacaucaaa

SEQ ID NO: 1403975 - RNA, 19 nt, Artificial Sequence
  Description of Artificial Sequence: Synthetic oligonucleotide
  Antisense strand to SEQ ID NO: 1403974
uuugaugucacucacuaau

SEQ ID NO: 1403976 - RNA, 19 nt, Artificial Sequence
  Description of Artificial Sequence: Synthetic oligonucleotide
  Sense strand starting at position 2904 of SEQ ID NO: 1243248
acccgccuggccuguaaua

SEQ ID NO: 1403977 - RNA, 19 nt, Artificial Sequence
  Description of Artificial Sequence: Synthetic oligonucleotide
  Antisense strand to SEQ ID NO: 1403976
uauuacaggccaggcgggu

SEQ ID NO: 1403978 - RNA, 19 nt, Artificial Sequence
  Description of Artificial Sequence: Synthetic oligonucleotide
  Sense strand starting at position 2992 of SEQ ID NO: 1243248
caagauuaguaguacugau

SEQ ID NO: 1403979 - RNA, 19 nt, Artificial Sequence
  Description of Artificial Sequence: Synthetic oligonucleotide
  Antisense strand to SEQ ID NO: 1403978
aucaguacuacuaaucuug

SEQ ID NO: 1403980 - RNA, 19 nt, Artificial Sequence
  Description of Artificial Sequence: Synthetic oligonucleotide
  Sense strand starting at position 2996 of SEQ ID NO: 1243248
auuaguaguacugauuguu

SEQ ID NO: 1403981 - RNA, 19 nt, Artificial Sequence
  Description of Artificial Sequence: Synthetic oligonucleotide
  Antisense strand to SEQ ID NO: 1403980
aacaaucaguacuacuaau

SEQ ID NO: 1403982 - RNA, 19 nt, Artificial Sequence
  Description of Artificial Sequence: Synthetic oligonucleotide
  Sense strand starting at position 3020 of SEQ ID NO: 1243248
ugccucaagcgucaaucau

SEQ ID NO: 1403983 - RNA, 19 nt, Artificial Sequence
  Description of Artificial Sequence: Synthetic oligonucleotide
  Antisense strand to SEQ ID NO: 1403982
augauugacgcuugaggca

SEQ ID NO: 1403984 - RNA, 19 nt, Artificial Sequence
  Description of Artificial Sequence: Synthetic oligonucleotide
  Sense strand starting at position 3028 of SEQ ID NO: 1243248
gcgucaaucaugugucaaa

SEQ ID NO: 1403985 - RNA, 19 nt, Artificial Sequence
  Description of Artificial Sequence: Synthetic oligonucleotide
  Antisense strand to SEQ ID NO: 1403984
uuugacacaugauugacgc

SEQ ID NO: 1403986 - RNA, 19 nt, Artificial Sequence
  Description of Artificial Sequence: Synthetic oligonucleotide
  Sense strand starting at position 3029 of SEQ ID NO: 1243248
cgucaaucaugugucaaag

SEQ ID NO: 1403987 - RNA, 19 nt, Artificial Sequence
  Description of Artificial Sequence: Synthetic oligonucleotide
  Antisense strand to SEQ ID NO: 1403986
cuuugacacaugauugacg

SEQ ID NO: 1403988 - RNA, 19 nt, Artificial Sequence
  Description of Artificial Sequence: Synthetic oligonucleotide
  Sense strand starting at position 3038 of SEQ ID NO: 1243248
ugugucaaagcgucaguau

SEQ ID NO: 1403989 - RNA, 19 nt, Artificial Sequence
  Description of Artificial Sequence: Synthetic oligonucleotide
  Antisense strand to SEQ ID NO: 1403988
auacugacgcuuugacaca

SEQ ID NO: 1403990 - RNA, 19 nt, Artificial Sequence
  Description of Artificial Sequence: Synthetic oligonucleotide
  Sense strand starting at position 3039 of SEQ ID NO: 1243248
gugucaaagcgucaguauc

SEQ ID NO: 1403991 - RNA, 19 nt, Artificial Sequence
  Description of Artificial Sequence: Synthetic oligonucleotide
  Antisense strand to SEQ ID NO: 1403990
gauacugacgcuuugacac

SEQ ID NO: 1403992 - RNA, 19 nt, Artificial Sequence
  Description of Artificial Sequence: Synthetic oligonucleotide
  Sense strand starting at position 3041 of SEQ ID NO: 1243248
gucaaagcgucaguaucau

SEQ ID NO: 1403993 - RNA, 19 nt, Artificial Sequence
  Description of Artificial Sequence: Synthetic oligonucleotide
  Antisense strand to SEQ ID NO: 1403992
augauacugacgcuuugac

SEQ ID NO: 1403994 - RNA, 19 nt, Artificial Sequence
  Description of Artificial Sequence: Synthetic oligonucleotide
  Sense strand starting at position 3050 of SEQ ID NO: 1243248
ucaguaucaugcuuuggga

SEQ ID NO: 1403995 - RNA, 19 nt, Artificial Sequence
  Description of Artificial Sequence: Synthetic oligonucleotide
  Antisense strand to SEQ ID NO: 1403994
ucccaaagcaugauacuga

SEQ ID NO: 1403996 - RNA, 19 nt, Artificial Sequence
  Description of Artificial Sequence: Synthetic oligonucleotide
  Sense strand starting at position 3057 of SEQ ID NO: 1243248
caugcuuugggacgauacu

SEQ ID NO: 1403997 - RNA, 19 nt, Artificial Sequence
  Description of Artificial Sequence: Synthetic oligonucleotide
  Antisense strand to SEQ ID NO: 1403996
aguaucgucccaaagcaug

SEQ ID NO: 1403998 - RNA, 19 nt, Artificial Sequence
  Description of Artificial Sequence: Synthetic oligonucleotide
  Sense strand starting at position 3106 of SEQ ID NO: 1243248
gacugagucuugguccguu

SEQ ID NO: 1403999 - RNA, 19 nt, Artificial Sequence
  Description of Artificial Sequence: Synthetic oligonucleotide
  Antisense strand to SEQ ID NO: 1403998
aacggaccaagacucaguc

SEQ ID NO: 1404000 - RNA, 19 nt, Artificial Sequence
  Description of Artificial Sequence: Synthetic oligonucleotide
  Sense strand starting at position 3367 of SEQ ID NO: 1243248
uuugcucaucauggauauu

SEQ ID NO: 1404001 - RNA, 19 nt, Artificial Sequence
  Description of Artificial Sequence: Synthetic oligonucleotide
  Antisense strand to SEQ ID NO: 1404000
aauauccaugaugagcaaa

SEQ ID NO: 1404002 - RNA, 19 nt, Artificial Sequence
  Description of Artificial Sequence: Synthetic oligonucleotide
  Sense strand starting at position 3393 of SEQ ID NO: 1243248
ccuuguauuucuuaaaugu

SEQ ID NO: 1404003 - RNA, 19 nt, Artificial Sequence
  Description of Artificial Sequence: Synthetic oligonucleotide
  Antisense strand to SEQ ID NO: 1404002
acauuuaagaaauacaagg

SEQ ID NO: 1404004 - RNA, 19 nt, Artificial Sequence
  Description of Artificial Sequence: Synthetic oligonucleotide
  Sense strand starting at position 3502 of SEQ ID NO: 1243248
uccugaugaucagggauau

SEQ ID NO: 1404005 - RNA, 19 nt, Artificial Sequence
  Description of Artificial Sequence: Synthetic oligonucleotide
  Antisense strand to SEQ ID NO: 1404004
auaucccugaucaucagga

SEQ ID NO: 1404006 - RNA, 19 nt, Artificial Sequence
  Description of Artificial Sequence: Synthetic oligonucleotide
  Sense strand starting at position 3514 of SEQ ID NO: 1243248
gggauauacucagcgugaa

SEQ ID NO: 1404007 - RNA, 19 nt, Artificial Sequence
  Description of Artificial Sequence: Synthetic oligonucleotide
  Antisense strand to SEQ ID NO: 1404006
uucacgcugaguauauccc

SEQ ID NO: 1404008 - RNA, 19 nt, Artificial Sequence
  Description of Artificial Sequence: Synthetic oligonucleotide
  Sense strand starting at position 3515 of SEQ ID NO: 1243248
ggauauacucagcgugaac

SEQ ID NO: 1404009 - RNA, 19 nt, Artificial Sequence
  Description of Artificial Sequence: Synthetic oligonucleotide
  Antisense strand to SEQ ID NO: 1404008
guucacgcugaguauaucc

SEQ ID NO: 1404010 - RNA, 19 nt, Artificial Sequence
  Description of Artificial Sequence: Synthetic oligonucleotide
  Sense strand starting at position 3564 of SEQ ID NO: 1243248
guccucaugugaguuuauu

SEQ ID NO: 1404011 - RNA, 19 nt, Artificial Sequence
  Description of Artificial Sequence: Synthetic oligonucleotide
  Antisense strand to SEQ ID NO: 1404010
aauaaacucacaugaggac

SEQ ID NO: 1404012 - RNA, 19 nt, Artificial Sequence
  Description of Artificial Sequence: Synthetic oligonucleotide
  Sense strand starting at position 3573 of SEQ ID NO: 1243248
ugaguuuauucucuugccu

SEQ ID NO: 1404013 - RNA, 19 nt, Artificial Sequence
  Description of Artificial Sequence: Synthetic oligonucleotide
  Antisense strand to SEQ ID NO: 1404012
aggcaagagaauaaacuca

SEQ ID NO: 1404014 - RNA, 19 nt, Artificial Sequence
  Description of Artificial Sequence: Synthetic oligonucleotide
  Sense strand starting at position 3645 of SEQ ID NO: 1243248
gugaguggaacaugagauu

SEQ ID NO: 1404015 - RNA, 19 nt, Artificial Sequence
  Description of Artificial Sequence: Synthetic oligonucleotide
  Antisense strand to SEQ ID NO: 1404014
aaucucauguuccacucac

SEQ ID NO: 1404016 - RNA, 19 nt, Artificial Sequence
  Description of Artificial Sequence: Synthetic oligonucleotide
  Sense strand starting at position 3746 of SEQ ID NO: 1243248
ccacuaucggcuuguucuu

SEQ ID NO: 1404017 - RNA, 19 nt, Artificial Sequence
  Description of Artificial Sequence: Synthetic oligonucleotide
  Antisense strand to SEQ ID NO: 1404016
aagaacaagccgauagugg

SEQ ID NO: 1404018 - RNA, 19 nt, Artificial Sequence
  Description of Artificial Sequence: Synthetic oligonucleotide
  Sense strand starting at position 3820 of SEQ ID NO: 1243248
uuuguagguuacucuggaa

SEQ ID NO: 1404019 - RNA, 19 nt, Artificial Sequence
  Description of Artificial Sequence: Synthetic oligonucleotide
  Antisense strand to SEQ ID NO: 1404018
uuccagaguaaccuacaaa

SEQ ID NO: 1404020 - RNA, 19 nt, Artificial Sequence
  Description of Artificial Sequence: Synthetic oligonucleotide
  Sense strand starting at position 3905 of SEQ ID NO: 1243248
ggagaaguaaugcguaagu

SEQ ID NO: 1404021 - RNA, 19 nt, Artificial Sequence
  Description of Artificial Sequence: Synthetic oligonucleotide
  Antisense strand to SEQ ID NO: 1404020
acuuacgcauuacuucucc

SEQ ID NO: 1404022 - RNA, 19 nt, Artificial Sequence
  Description of Artificial Sequence: Synthetic oligonucleotide
  Sense strand starting at position 3942 of SEQ ID NO: 1243248
gguuaugugguccaggcuu

SEQ ID NO: 1404023 - RNA, 19 nt, Artificial Sequence
  Description of Artificial Sequence: Synthetic oligonucleotide
  Antisense strand to SEQ ID NO: 1404022
aagccuggaccacauaacc

SEQ ID NO: 1404024 - RNA, 19 nt, Artificial Sequence
  Description of Artificial Sequence: Synthetic oligonucleotide
  Sense strand starting at position 59 of SEQ ID NO: 1243249
uccucaugcuucugggaaa

SEQ ID NO: 1404025 - RNA, 19 nt, Artificial Sequence
  Description of Artificial Sequence: Synthetic oligonucleotide
  Antisense strand to SEQ ID NO: 1404024
uuucccagaagcaugagga

SEQ ID NO: 1404026 - RNA, 19 nt, Artificial Sequence
  Description of Artificial Sequence: Synthetic oligonucleotide
  Sense strand starting at position 60 of SEQ ID NO: 1243249
ccucaugcuucugggaaag

SEQ ID NO: 1404027 - RNA, 19 nt, Artificial Sequence
  Description of Artificial Sequence: Synthetic oligonucleotide
  Antisense strand to SEQ ID NO: 1404026
cuuucccagaagcaugagg

SEQ ID NO: 1404028 - RNA, 19 nt, Artificial Sequence
  Description of Artificial Sequence: Synthetic oligonucleotide
  Sense strand starting at position 224 of SEQ ID NO: 1243249
ggugucugcaugugugaag

SEQ ID NO: 1404029 - RNA, 19 nt, Artificial Sequence
  Description of Artificial Sequence: Synthetic oligonucleotide
  Antisense strand to SEQ ID NO: 1404028
cuucacacaugcagacacc

SEQ ID NO: 1404030 - RNA, 19 nt, Artificial Sequence
  Description of Artificial Sequence: Synthetic oligonucleotide
  Sense strand starting at position 302 of SEQ ID NO: 1243249
ggagcauccaauugugcaa

SEQ ID NO: 1404031 - RNA, 19 nt, Artificial Sequence
  Description of Artificial Sequence: Synthetic oligonucleotide
  Antisense strand to SEQ ID NO: 1404030
uugcacaauuggaugcucc

SEQ ID NO: 1404032 - RNA, 19 nt, Artificial Sequence
  Description of Artificial Sequence: Synthetic oligonucleotide
  Sense strand starting at position 468 of SEQ ID NO: 1243249
ggguaaugccucugagcuu

SEQ ID NO: 1404033 - RNA, 19 nt, Artificial Sequence
  Description of Artificial Sequence: Synthetic oligonucleotide
  Antisense strand to SEQ ID NO: 1404032
aagcucagaggcauuaccc

SEQ ID NO: 1404034 - RNA, 19 nt, Artificial Sequence
  Description of Artificial Sequence: Synthetic oligonucleotide
  Sense strand starting at position 474 of SEQ ID NO: 1243249
ugccucugagcuugaaaga

SEQ ID NO: 1404035 - RNA, 19 nt, Artificial Sequence
  Description of Artificial Sequence: Synthetic oligonucleotide
  Antisense strand to SEQ ID NO: 1404034
ucuuucaagcucagaggca

SEQ ID NO: 1404036 - RNA, 19 nt, Artificial Sequence
  Description of Artificial Sequence: Synthetic oligonucleotide
  Sense strand starting at position 672 of SEQ ID NO: 1243249
ucuccuugccuagggaaga

SEQ ID NO: 1404037 - RNA, 19 nt, Artificial Sequence
  Description of Artificial Sequence: Synthetic oligonucleotide
  Antisense strand to SEQ ID NO: 1404036
ucuucccuaggcaaggaga

SEQ ID NO: 1404038 - RNA, 19 nt, Artificial Sequence
  Description of Artificial Sequence: Synthetic oligonucleotide
  Sense strand starting at position 673 of SEQ ID NO: 1243249
cuccuugccuagggaagaa

SEQ ID NO: 1404039 - RNA, 19 nt, Artificial Sequence
  Description of Artificial Sequence: Synthetic oligonucleotide
  Antisense strand to SEQ ID NO: 1404038
uucuucccuaggcaaggag

SEQ ID NO: 1404040 - RNA, 19 nt, Artificial Sequence
  Description of Artificial Sequence: Synthetic oligonucleotide
  Sense strand starting at position 758 of SEQ ID NO: 1243249
acaggagagccauguaaug

SEQ ID NO: 1404041 - RNA, 19 nt, Artificial Sequence
  Description of Artificial Sequence: Synthetic oligonucleotide
  Antisense strand to SEQ ID NO: 1404040
cauuacauggcucuccugu

SEQ ID NO: 1404042 - RNA, 19 nt, Artificial Sequence
  Description of Artificial Sequence: Synthetic oligonucleotide
  Sense strand starting at position 797 of SEQ ID NO: 1243249
gaagccucuuguccgagaa

SEQ ID NO: 1404043 - RNA, 19 nt, Artificial Sequence
  Description of Artificial Sequence: Synthetic oligonucleotide
  Antisense strand to SEQ ID NO: 1404042
uucucggacaagaggcuuc

SEQ ID NO: 1404044 - RNA, 19 nt, Artificial Sequence
  Description of Artificial Sequence: Synthetic oligonucleotide
  Sense strand starting at position 932 of SEQ ID NO: 1243249
cccuaaaccgguuauuaag

SEQ ID NO: 1404045 - RNA, 19 nt, Artificial Sequence
  Description of Artificial Sequence: Synthetic oligonucleotide
  Antisense strand to SEQ ID NO: 1404044
cuuaauaaccgguuuaggg

SEQ ID NO: 1404046 - RNA, 19 nt, Artificial Sequence
  Description of Artificial Sequence: Synthetic oligonucleotide
  Sense strand starting at position 938 of SEQ ID NO: 1243249
accgguuauuaagugaaca

SEQ ID NO: 1404047 - RNA, 19 nt, Artificial Sequence
  Description of Artificial Sequence: Synthetic oligonucleotide
  Antisense strand to SEQ ID NO: 1404046
uguucacuuaauaaccggu

SEQ ID NO: 1404048 - RNA, 19 nt, Artificial Sequence
  Description of Artificial Sequence: Synthetic oligonucleotide
  Sense strand starting at position 939 of SEQ ID NO: 1243249
ccgguuauuaagugaacac

SEQ ID NO: 1404049 - RNA, 19 nt, Artificial Sequence
  Description of Artificial Sequence: Synthetic oligonucleotide
  Antisense strand to SEQ ID NO: 1404048
guguucacuuaauaaccgg

SEQ ID NO: 1404050 - RNA, 19 nt, Artificial Sequence
  Description of Artificial Sequence: Synthetic oligonucleotide
  Sense strand starting at position 940 of SEQ ID NO: 1243249
cgguuauuaagugaacaca

SEQ ID NO: 1404051 - RNA, 19 nt, Artificial Sequence
  Description of Artificial Sequence: Synthetic oligonucleotide
  Antisense strand to SEQ ID NO: 1404050
uguguucacuuaauaaccg

SEQ ID NO: 1404052 - RNA, 19 nt, Artificial Sequence
  Description of Artificial Sequence: Synthetic oligonucleotide
  Sense strand starting at position 982 of SEQ ID NO: 1243249
ggcugcuucucccugcaaa

SEQ ID NO: 1404053 - RNA, 19 nt, Artificial Sequence
  Description of Artificial Sequence: Synthetic oligonucleotide
  Antisense strand to SEQ ID NO: 1404052
uuugcagggagaagcagcc

SEQ ID NO: 1404054 - RNA, 19 nt, Artificial Sequence
  Description of Artificial Sequence: Synthetic oligonucleotide
  Sense strand starting at position 983 of SEQ ID NO: 1243249
gcugcuucucccugcaaac

SEQ ID NO: 1404055 - RNA, 19 nt, Artificial Sequence
  Description of Artificial Sequence: Synthetic oligonucleotide
  Antisense strand to SEQ ID NO: 1404054
guuugcagggagaagcagc

SEQ ID NO: 1404056 - RNA, 19 nt, Artificial Sequence
  Description of Artificial Sequence: Synthetic oligonucleotide
  Sense strand starting at position 1332 of SEQ ID NO: 1243249
acacuugcgcggucucaga

SEQ ID NO: 1404057 - RNA, 19 nt, Artificial Sequence
  Description of Artificial Sequence: Synthetic oligonucleotide
  Antisense strand to SEQ ID NO: 1404056
ucugagaccgcgcaagugu

SEQ ID NO: 1404058 - RNA, 19 nt, Artificial Sequence
  Description of Artificial Sequence: Synthetic oligonucleotide
  Sense strand starting at position 1868 of SEQ ID NO: 1243249
ggcuguauuugccuuuguu

SEQ ID NO: 1404059 - RNA, 19 nt, Artificial Sequence
  Description of Artificial Sequence: Synthetic oligonucleotide
  Antisense strand to SEQ ID NO: 1404058
aacaaaggcaaauacagcc

SEQ ID NO: 1404060 - RNA, 19 nt, Artificial Sequence
  Description of Artificial Sequence: Synthetic oligonucleotide
  Sense strand starting at position 2102 of SEQ ID NO: 1243249
gugcuuaccuucccgagga

SEQ ID NO: 1404061 - RNA, 19 nt, Artificial Sequence
  Description of Artificial Sequence: Synthetic oligonucleotide
  Antisense strand to SEQ ID NO: 1404060
uccucgggaagguaagcac

SEQ ID NO: 1404062 - RNA, 19 nt, Artificial Sequence
  Description of Artificial Sequence: Synthetic oligonucleotide
  Sense strand starting at position 2430 of SEQ ID NO: 1243249
cucagaugguggcaauuga

SEQ ID NO: 1404063 - RNA, 19 nt, Artificial Sequence
  Description of Artificial Sequence: Synthetic oligonucleotide
  Antisense strand to SEQ ID NO: 1404062
ucaauugccaccaucugag

SEQ ID NO: 1404064 - RNA, 19 nt, Artificial Sequence
  Description of Artificial Sequence: Synthetic oligonucleotide
  Sense strand starting at position 2550 of SEQ ID NO: 1243249
acaguuuacuucuuuguca

SEQ ID NO: 1404065 - RNA, 19 nt, Artificial Sequence
  Description of Artificial Sequence: Synthetic oligonucleotide
  Antisense strand to SEQ ID NO: 1404064
ugacaaagaaguaaacugu

SEQ ID NO: 1404066 - RNA, 19 nt, Artificial Sequence
  Description of Artificial Sequence: Synthetic oligonucleotide
  Sense strand starting at position 2552 of SEQ ID NO: 1243249
aguuuacuucuuugucaaa

SEQ ID NO: 1404067 - RNA, 19 nt, Artificial Sequence
  Description of Artificial Sequence: Synthetic oligonucleotide
  Antisense strand to SEQ ID NO: 1404066
uuugacaaagaaguaaacu

SEQ ID NO: 1404068 - RNA, 19 nt, Artificial Sequence
  Description of Artificial Sequence: Synthetic oligonucleotide
  Sense strand starting at position 2553 of SEQ ID NO: 1243249
guuuacuucuuugucaaac

SEQ ID NO: 1404069 - RNA, 19 nt, Artificial Sequence
  Description of Artificial Sequence: Synthetic oligonucleotide
  Antisense strand to SEQ ID NO: 1404068
guuugacaaagaaguaaac

SEQ ID NO: 1404070 - RNA, 19 nt, Artificial Sequence
  Description of Artificial Sequence: Synthetic oligonucleotide
  Sense strand starting at position 2559 of SEQ ID NO: 1243249
uucuuugucaaacggugau

SEQ ID NO: 1404071 - RNA, 19 nt, Artificial Sequence
  Description of Artificial Sequence: Synthetic oligonucleotide
  Antisense strand to SEQ ID NO: 1404070
aucaccguuugacaaagaa

SEQ ID NO: 1404072 - RNA, 19 nt, Artificial Sequence
  Description of Artificial Sequence: Synthetic oligonucleotide
  Sense strand starting at position 2675 of SEQ ID NO: 1243249
ugccaucucggguggacaa

SEQ ID NO: 1404073 - RNA, 19 nt, Artificial Sequence
  Description of Artificial Sequence: Synthetic oligonucleotide
  Antisense strand to SEQ ID NO: 1404072
uuguccacccgagauggca

SEQ ID NO: 1404074 - RNA, 19 nt, Artificial Sequence
  Description of Artificial Sequence: Synthetic oligonucleotide
  Sense strand starting at position 2766 of SEQ ID NO: 1243249
gcucgauugcggcucagaa

SEQ ID NO: 1404075 - RNA, 19 nt, Artificial Sequence
  Description of Artificial Sequence: Synthetic oligonucleotide
  Antisense strand to SEQ ID NO: 1404074
uucugagccgcaaucgagc

SEQ ID NO: 1404076 - RNA, 19 nt, Artificial Sequence
  Description of Artificial Sequence: Synthetic oligonucleotide
  Sense strand starting at position 2768 of SEQ ID NO: 1243249
ucgauugcggcucagaaca

SEQ ID NO: 1404077 - RNA, 19 nt, Artificial Sequence
  Description of Artificial Sequence: Synthetic oligonucleotide
  Antisense strand to SEQ ID NO: 1404076
uguucugagccgcaaucga

SEQ ID NO: 1404078 - RNA, 19 nt, Artificial Sequence
  Description of Artificial Sequence: Synthetic oligonucleotide
  Sense strand starting at position 2795 of SEQ ID NO: 1243249
gcacaauucugccagcaug

SEQ ID NO: 1404079 - RNA, 19 nt, Artificial Sequence
  Description of Artificial Sequence: Synthetic oligonucleotide
  Antisense strand to SEQ ID NO: 1404078
caugcuggcagaauugugc

SEQ ID NO: 1404080 - RNA, 19 nt, Artificial Sequence
  Description of Artificial Sequence: Synthetic oligonucleotide
  Sense strand starting at position 3066 of SEQ ID NO: 1243249
cuucuaugggugggcuuaa

SEQ ID NO: 1404081 - RNA, 19 nt, Artificial Sequence
  Description of Artificial Sequence: Synthetic oligonucleotide
  Antisense strand to SEQ ID NO: 1404080
uuaagcccacccauagaag

SEQ ID NO: 1404082 - RNA, 19 nt, Artificial Sequence
  Description of Artificial Sequence: Synthetic oligonucleotide
  Sense strand starting at position 3170 of SEQ ID NO: 1243249
ggcgucacguuccaauaau

SEQ ID NO: 1404083 - RNA, 19 nt, Artificial Sequence
  Description of Artificial Sequence: Synthetic oligonucleotide
  Antisense strand to SEQ ID NO: 1404082
auuauuggaacgugacgcc

SEQ ID NO: 1404084 - RNA, 19 nt, Artificial Sequence
  Description of Artificial Sequence: Synthetic oligonucleotide
  Sense strand starting at position 3198 of SEQ ID NO: 1243249
ggcguaaauagagguguga

SEQ ID NO: 1404085 - RNA, 19 nt, Artificial Sequence
  Description of Artificial Sequence: Synthetic oligonucleotide
  Antisense strand to SEQ ID NO: 1404084
ucacaccucuauuuacgcc

SEQ ID NO: 1404086 - RNA, 19 nt, Artificial Sequence
  Description of Artificial Sequence: Synthetic oligonucleotide
  Sense strand starting at position 3200 of SEQ ID NO: 1243249
cguaaauagaggugugauu

SEQ ID NO: 1404087 - RNA, 19 nt, Artificial Sequence
  Description of Artificial Sequence: Synthetic oligonucleotide
  Antisense strand to SEQ ID NO: 1404086
aaucacaccucuauuuacg

SEQ ID NO: 1404088 - RNA, 19 nt, Artificial Sequence
  Description of Artificial Sequence: Synthetic oligonucleotide
  Sense strand starting at position 3209 of SEQ ID NO: 1243249
aggugugauuccuccuaaa

SEQ ID NO: 1404089 - RNA, 19 nt, Artificial Sequence
  Description of Artificial Sequence: Synthetic oligonucleotide
  Antisense strand to SEQ ID NO: 1404088
uuuaggaggaaucacaccu

SEQ ID NO: 1404090 - RNA, 19 nt, Artificial Sequence
  Description of Artificial Sequence: Synthetic oligonucleotide
  Sense strand starting at position 3212 of SEQ ID NO: 1243249
ugugauuccuccuaaaguu

SEQ ID NO: 1404091 - RNA, 19 nt, Artificial Sequence
  Description of Artificial Sequence: Synthetic oligonucleotide
  Antisense strand to SEQ ID NO: 1404090
aacuuuaggaggaaucaca

SEQ ID NO: 1404092 - RNA, 19 nt, Artificial Sequence
  Description of Artificial Sequence: Synthetic oligonucleotide
  Sense strand starting at position 3654 of SEQ ID NO: 1243249
ggauguauugcucagugga

SEQ ID NO: 1404093 - RNA, 19 nt, Artificial Sequence
  Description of Artificial Sequence: Synthetic oligonucleotide
  Antisense strand to SEQ ID NO: 1404092
uccacugagcaauacaucc

SEQ ID NO: 1404094 - RNA, 19 nt, Artificial Sequence
  Description of Artificial Sequence: Synthetic oligonucleotide
  Sense strand starting at position 3656 of SEQ ID NO: 1243249
auguauugcucaguggagu

SEQ ID NO: 1404095 - RNA, 19 nt, Artificial Sequence
  Description of Artificial Sequence: Synthetic oligonucleotide
  Antisense strand to SEQ ID NO: 1404094
acuccacugagcaauacau

SEQ ID NO: 1404096 - RNA, 19 nt, Artificial Sequence
  Description of Artificial Sequence: Synthetic oligonucleotide
  Sense strand starting at position 3657 of SEQ ID NO: 1243249
uguauugcucaguggaguc

SEQ ID NO: 1404097 - RNA, 19 nt, Artificial Sequence
  Description of Artificial Sequence: Synthetic oligonucleotide
  Antisense strand to SEQ ID NO: 1404096
gacuccacugagcaauaca

SEQ ID NO: 1404098 - RNA, 19 nt, Artificial Sequence
  Description of Artificial Sequence: Synthetic oligonucleotide
  Sense strand starting at position 3734 of SEQ ID NO: 1243249
gcuuguuguacacggauga

SEQ ID NO: 1404099 - RNA, 19 nt, Artificial Sequence
  Description of Artificial Sequence: Synthetic oligonucleotide
  Antisense strand to SEQ ID NO: 1404098
ucauccguguacaacaagc

SEQ ID NO: 1404100 - RNA, 19 nt, Artificial Sequence
  Description of Artificial Sequence: Synthetic oligonucleotide
  Sense strand starting at position 3738 of SEQ ID NO: 1243249
guuguacacggaugagaaa

SEQ ID NO: 1404101 - RNA, 19 nt, Artificial Sequence
  Description of Artificial Sequence: Synthetic oligonucleotide
  Antisense strand to SEQ ID NO: 1404100
uuucucauccguguacaac

SEQ ID NO: 1404102 - RNA, 19 nt, Artificial Sequence
  Description of Artificial Sequence: Synthetic oligonucleotide
  Sense strand starting at position 3781 of SEQ ID NO: 1243249
gcuuucucuuugggagcuu

SEQ ID NO: 1404103 - RNA, 19 nt, Artificial Sequence
  Description of Artificial Sequence: Synthetic oligonucleotide
  Antisense strand to SEQ ID NO: 1404102
aagcucccaaagagaaagc

SEQ ID NO: 1404104 - RNA, 19 nt, Artificial Sequence
  Description of Artificial Sequence: Synthetic oligonucleotide
  Sense strand starting at position 238 of SEQ ID NO: 1243250
ggugaccucaguuaaguca

SEQ ID NO: 1404105 - RNA, 19 nt, Artificial Sequence
  Description of Artificial Sequence: Synthetic oligonucleotide
  Antisense strand to SEQ ID NO: 1404104
ugacuuaacugaggucacc

SEQ ID NO: 1404106 - RNA, 19 nt, Artificial Sequence
  Description of Artificial Sequence: Synthetic oligonucleotide
  Sense strand starting at position 254 of SEQ ID NO: 1243250
ucaccagaccucuacgagu

SEQ ID NO: 1404107 - RNA, 19 nt, Artificial Sequence
  Description of Artificial Sequence: Synthetic oligonucleotide
  Antisense strand to SEQ ID NO: 1404106
acucguagaggucugguga

SEQ ID NO: 1404108 - RNA, 19 nt, Artificial Sequence
  Description of Artificial Sequence: Synthetic oligonucleotide
  Sense strand starting at position 274 of SEQ ID NO: 1243250
auggcuuccuauucgauaa

SEQ ID NO: 1404109 - RNA, 19 nt, Artificial Sequence
  Description of Artificial Sequence: Synthetic oligonucleotide
  Antisense strand to SEQ ID NO: 1404108
uuaucgaauaggaagccau

SEQ ID NO: 1404110 - RNA, 19 nt, Artificial Sequence
  Description of Artificial Sequence: Synthetic oligonucleotide
  Sense strand starting at position 409 of SEQ ID NO: 1243250
ucaauaaacguaggguaau

SEQ ID NO: 1404111 - RNA, 19 nt, Artificial Sequence
  Description of Artificial Sequence: Synthetic oligonucleotide
  Antisense strand to SEQ ID NO: 1404110
auuacccuacguuuauuga

SEQ ID NO: 1404112 - RNA, 19 nt, Artificial Sequence
  Description of Artificial Sequence: Synthetic oligonucleotide
  Sense strand starting at position 422 of SEQ ID NO: 1243250
gguaauucugugggcucuu

SEQ ID NO: 1404113 - RNA, 19 nt, Artificial Sequence
  Description of Artificial Sequence: Synthetic oligonucleotide
  Antisense strand to SEQ ID NO: 1404112
aagagcccacagaauuacc

SEQ ID NO: 1404114 - RNA, 19 nt, Artificial Sequence
  Description of Artificial Sequence: Synthetic oligonucleotide
  Sense strand starting at position 695 of SEQ ID NO: 1243250
aauagaauaccuggugauu

SEQ ID NO: 1404115 - RNA, 19 nt, Artificial Sequence
  Description of Artificial Sequence: Synthetic oligonucleotide
  Antisense strand to SEQ ID NO: 1404114
aaucaccagguauucuauu

SEQ ID NO: 1404116 - RNA, 19 nt, Artificial Sequence
  Description of Artificial Sequence: Synthetic oligonucleotide
  Sense strand starting at position 697 of SEQ ID NO: 1243250
uagaauaccuggugauuau

SEQ ID NO: 1404117 - RNA, 19 nt, Artificial Sequence
  Description of Artificial Sequence: Synthetic oligonucleotide
  Antisense strand to SEQ ID NO: 1404116
auaaucaccagguauucua

SEQ ID NO: 1404118 - RNA, 19 nt, Artificial Sequence
  Description of Artificial Sequence: Synthetic oligonucleotide
  Sense strand starting at position 708 of SEQ ID NO: 1243250
gugauuaucaagcacguau

SEQ ID NO: 1404119 - RNA, 19 nt, Artificial Sequence
  Description of Artificial Sequence: Synthetic oligonucleotide
  Antisense strand to SEQ ID NO: 1404118
auacgugcuugauaaucac

SEQ ID NO: 1404120 - RNA, 19 nt, Artificial Sequence
  Description of Artificial Sequence: Synthetic oligonucleotide
  Sense strand starting at position 719 of SEQ ID NO: 1243250
gcacguaugcuguaccaaa

SEQ ID NO: 1404121 - RNA, 19 nt, Artificial Sequence
  Description of Artificial Sequence: Synthetic oligonucleotide
  Antisense strand to SEQ ID NO: 1404120
uuugguacagcauacgugc

SEQ ID NO: 1404122 - RNA, 19 nt, Artificial Sequence
  Description of Artificial Sequence: Synthetic oligonucleotide
  Sense strand starting at position 848 of SEQ ID NO: 1243250
gcuagaaagcggcagaguu

SEQ ID NO: 1404123 - RNA, 19 nt, Artificial Sequence
  Description of Artificial Sequence: Synthetic oligonucleotide
  Antisense strand to SEQ ID NO: 1404122
aacucugccgcuuucuagc

SEQ ID NO: 1404124 - RNA, 19 nt, Artificial Sequence
  Description of Artificial Sequence: Synthetic oligonucleotide
  Sense strand starting at position 956 of SEQ ID NO: 1243250
ucccuaucgugcuuaauuc

SEQ ID NO: 1404125 - RNA, 19 nt, Artificial Sequence
  Description of Artificial Sequence: Synthetic oligonucleotide
  Antisense strand to SEQ ID NO: 1404124
gaauuaagcacgauaggga

SEQ ID NO: 1404126 - RNA, 19 nt, Artificial Sequence
  Description of Artificial Sequence: Synthetic oligonucleotide
  Sense strand starting at position 1010 of SEQ ID NO: 1243250
cacccugaacgugaaugau

SEQ ID NO: 1404127 - RNA, 19 nt, Artificial Sequence
  Description of Artificial Sequence: Synthetic oligonucleotide
  Antisense strand to SEQ ID NO: 1404126
aucauucacguucagggug

SEQ ID NO: 1404128 - RNA, 19 nt, Artificial Sequence
  Description of Artificial Sequence: Synthetic oligonucleotide
  Sense strand starting at position 1016 of SEQ ID NO: 1243250
gaacgugaaugauccaacu

SEQ ID NO: 1404129 - RNA, 19 nt, Artificial Sequence
  Description of Artificial Sequence: Synthetic oligonucleotide
  Antisense strand to SEQ ID NO: 1404128
aguuggaucauucacguuc

SEQ ID NO: 1404130 - RNA, 19 nt, Artificial Sequence
  Description of Artificial Sequence: Synthetic oligonucleotide
  Sense strand starting at position 1042 of SEQ ID NO: 1243250
uuugcauuauggccugaaa

SEQ ID NO: 1404131 - RNA, 19 nt, Artificial Sequence
  Description of Artificial Sequence: Synthetic oligonucleotide
  Antisense strand to SEQ ID NO: 1404130
uuucaggccauaaugcaaa

SEQ ID NO: 1404132 - RNA, 19 nt, Artificial Sequence
  Description of Artificial Sequence: Synthetic oligonucleotide
  Sense strand starting at position 1097 of SEQ ID NO: 1243250
uccuuacuuguggguaacu

SEQ ID NO: 1404133 - RNA, 19 nt, Artificial Sequence
  Description of Artificial Sequence: Synthetic oligonucleotide
  Antisense strand to SEQ ID NO: 1404132
aguuacccacaaguaagga

SEQ ID NO: 1404134 - RNA, 19 nt, Artificial Sequence
  Description of Artificial Sequence: Synthetic oligonucleotide
  Sense strand starting at position 1098 of SEQ ID NO: 1243250
ccuuacuuguggguaacuu

SEQ ID NO: 1404135 - RNA, 19 nt, Artificial Sequence
  Description of Artificial Sequence: Synthetic oligonucleotide
  Antisense strand to SEQ ID NO: 1404134
aaguuacccacaaguaagg

SEQ ID NO: 1404136 - RNA, 19 nt, Artificial Sequence
  Description of Artificial Sequence: Synthetic oligonucleotide
  Sense strand starting at position 1099 of SEQ ID NO: 1243250
cuuacuuguggguaacuuu

SEQ ID NO: 1404137 - RNA, 19 nt, Artificial Sequence
  Description of Artificial Sequence: Synthetic oligonucleotide
  Antisense strand to SEQ ID NO: 1404136
aaaguuacccacaaguaag

SEQ ID NO: 1404138 - RNA, 19 nt, Artificial Sequence
  Description of Artificial Sequence: Synthetic oligonucleotide
  Sense strand starting at position 1106 of SEQ ID NO: 1243250
guggguaacuuugaacaug

SEQ ID NO: 1404139 - RNA, 19 nt, Artificial Sequence
  Description of Artificial Sequence: Synthetic oligonucleotide
  Antisense strand to SEQ ID NO: 1404138
cauguucaaaguuacccac

SEQ ID NO: 1404140 - RNA, 19 nt, Artificial Sequence
  Description of Artificial Sequence: Synthetic oligonucleotide
  Sense strand starting at position 1161 of SEQ ID NO: 1243250
aucuuuaaggguuguugua

SEQ ID NO: 1404141 - RNA, 19 nt, Artificial Sequence
  Description of Artificial Sequence: Synthetic oligonucleotide
  Antisense strand to SEQ ID NO: 1404140
uacaacaacccuuaaagau

SEQ ID NO: 1404142 - RNA, 19 nt, Artificial Sequence
  Description of Artificial Sequence: Synthetic oligonucleotide
  Sense strand starting at position 1163 of SEQ ID NO: 1243250
cuuuaaggguuguuguaau

SEQ ID NO: 1404143 - RNA, 19 nt, Artificial Sequence
  Description of Artificial Sequence: Synthetic oligonucleotide
  Antisense strand to SEQ ID NO: 1404142
auuacaacaacccuuaaag

SEQ ID NO: 1404144 - RNA, 19 nt, Artificial Sequence
  Description of Artificial Sequence: Synthetic oligonucleotide
  Sense strand starting at position 1170 of SEQ ID NO: 1243250
gguuguuguaauuagaaga

SEQ ID NO: 1404145 - RNA, 19 nt, Artificial Sequence
  Description of Artificial Sequence: Synthetic oligonucleotide
  Antisense strand to SEQ ID NO: 1404144
ucuucuaauuacaacaacc

SEQ ID NO: 1404146 - RNA, 19 nt, Artificial Sequence
  Description of Artificial Sequence: Synthetic oligonucleotide
  Sense strand starting at position 1198 of SEQ ID NO: 1243250
aucacagggucuuuaacuu

SEQ ID NO: 1404147 - RNA, 19 nt, Artificial Sequence
  Description of Artificial Sequence: Synthetic oligonucleotide
  Antisense strand to SEQ ID NO: 1404146
aaguuaaagacccugugau

SEQ ID NO: 1404148 - RNA, 19 nt, Artificial Sequence
  Description of Artificial Sequence: Synthetic oligonucleotide
  Sense strand starting at position 1323 of SEQ ID NO: 1243250
uggacuuguuuccuugagu

SEQ ID NO: 1404149 - RNA, 19 nt, Artificial Sequence
  Description of Artificial Sequence: Synthetic oligonucleotide
  Antisense strand to SEQ ID NO: 1404148
acucaaggaaacaagucca

SEQ ID NO: 1404150 - RNA, 19 nt, Artificial Sequence
  Description of Artificial Sequence: Synthetic oligonucleotide
  Sense strand starting at position 1324 of SEQ ID NO: 1243250
ggacuuguuuccuugaguu

SEQ ID NO: 1404151 - RNA, 19 nt, Artificial Sequence
  Description of Artificial Sequence: Synthetic oligonucleotide
  Antisense strand to SEQ ID NO: 1404150
aacucaaggaaacaagucc

SEQ ID NO: 1404152 - RNA, 19 nt, Artificial Sequence
  Description of Artificial Sequence: Synthetic oligonucleotide
  Sense strand starting at position 1326 of SEQ ID NO: 1243250
acuuguuuccuugaguuuc

SEQ ID NO: 1404153 - RNA, 19 nt, Artificial Sequence
  Description of Artificial Sequence: Synthetic oligonucleotide
  Antisense strand to SEQ ID NO: 1404152
gaaacucaaggaaacaagu

SEQ ID NO: 1404154 - RNA, 19 nt, Artificial Sequence
  Description of Artificial Sequence: Synthetic oligonucleotide
  Sense strand starting at position 1337 of SEQ ID NO: 1243250
ugaguuuccuaaguacuuu

SEQ ID NO: 1404155 - RNA, 19 nt, Artificial Sequence
  Description of Artificial Sequence: Synthetic oligonucleotide
  Antisense strand to SEQ ID NO: 1404154
aaaguacuuaggaaacuca

SEQ ID NO: 1404156 - RNA, 19 nt, Artificial Sequence
  Description of Artificial Sequence: Synthetic oligonucleotide
  Sense strand starting at position 1343 of SEQ ID NO: 1243250
uccuaaguacuuuauguaa

SEQ ID NO: 1404157 - RNA, 19 nt, Artificial Sequence
  Description of Artificial Sequence: Synthetic oligonucleotide
  Antisense strand to SEQ ID NO: 1404156
uuacauaaaguacuuagga

SEQ ID NO: 1404158 - RNA, 19 nt, Artificial Sequence
  Description of Artificial Sequence: Synthetic oligonucleotide
  Sense strand starting at position 1375 of SEQ ID NO: 1243250
cuggaaacacaucgucuaa

SEQ ID NO: 1404159 - RNA, 19 nt, Artificial Sequence
  Description of Artificial Sequence: Synthetic oligonucleotide
  Antisense strand to SEQ ID NO: 1404158
uuagacgauguguuuccag

SEQ ID NO: 1404160 - RNA, 19 nt, Artificial Sequence
  Description of Artificial Sequence: Synthetic oligonucleotide
  Sense strand starting at position 1377 of SEQ ID NO: 1243250
ggaaacacaucgucuaaua

SEQ ID NO: 1404161 - RNA, 19 nt, Artificial Sequence
  Description of Artificial Sequence: Synthetic oligonucleotide
  Antisense strand to SEQ ID NO: 1404160
uauuagacgauguguuucc

SEQ ID NO: 1404162 - RNA, 19 nt, Artificial Sequence
  Description of Artificial Sequence: Synthetic oligonucleotide
  Sense strand starting at position 1398 of SEQ ID NO: 1243250
cuuuaagugucuuuaucca

SEQ ID NO: 1404163 - RNA, 19 nt, Artificial Sequence
  Description of Artificial Sequence: Synthetic oligonucleotide
  Antisense strand to SEQ ID NO: 1404162
uggauaaagacacuuaaag

SEQ ID NO: 1404164 - RNA, 19 nt, Artificial Sequence
  Description of Artificial Sequence: Synthetic oligonucleotide
  Sense strand starting at position 1467 of SEQ ID NO: 1243250
ccugcuccucucugggaaa

SEQ ID NO: 1404165 - RNA, 19 nt, Artificial Sequence
  Description of Artificial Sequence: Synthetic oligonucleotide
  Antisense strand to SEQ ID NO: 1404164
uuucccagagaggagcagg

SEQ ID NO: 1404166 - RNA, 19 nt, Artificial Sequence
  Description of Artificial Sequence: Synthetic oligonucleotide
  Sense strand starting at position 1800 of SEQ ID NO: 1243250
agcggacaacucgauucua

SEQ ID NO: 1404167 - RNA, 19 nt, Artificial Sequence
  Description of Artificial Sequence: Synthetic oligonucleotide
  Antisense strand to SEQ ID NO: 1404166
uagaaucgaguuguccgcu

SEQ ID NO: 1404168 - RNA, 19 nt, Artificial Sequence
  Description of Artificial Sequence: Synthetic oligonucleotide
  Sense strand starting at position 2240 of SEQ ID NO: 1243250
cgauguggaggcuauuaga

SEQ ID NO: 1404169 - RNA, 19 nt, Artificial Sequence
  Description of Artificial Sequence: Synthetic oligonucleotide
  Antisense strand to SEQ ID NO: 1404168
ucuaauagccuccacaucg

SEQ ID NO: 1404170 - RNA, 19 nt, Artificial Sequence
  Description of Artificial Sequence: Synthetic oligonucleotide
  Sense strand starting at position 2826 of SEQ ID NO: 1243250
gggcuaggcuuuguaacuu

SEQ ID NO: 1404171 - RNA, 19 nt, Artificial Sequence
  Description of Artificial Sequence: Synthetic oligonucleotide
  Antisense strand to SEQ ID NO: 1404170
aaguuacaaagccuagccc

SEQ ID NO: 1404172 - RNA, 19 nt, Artificial Sequence
  Description of Artificial Sequence: Synthetic oligonucleotide
  Sense strand starting at position 2924 of SEQ ID NO: 1243250
accacaguccuuggaggau

SEQ ID NO: 1404173 - RNA, 19 nt, Artificial Sequence
  Description of Artificial Sequence: Synthetic oligonucleotide
  Antisense strand to SEQ ID NO: 1404172
auccuccaaggacuguggu

SEQ ID NO: 1404174 - RNA, 19 nt, Artificial Sequence
  Description of Artificial Sequence: Synthetic oligonucleotide
  Sense strand starting at position 2996 of SEQ ID NO: 1243250
acgguaggcauauauagau

SEQ ID NO: 1404175 - RNA, 19 nt, Artificial Sequence
  Description of Artificial Sequence: Synthetic oligonucleotide
  Antisense strand to SEQ ID NO: 1404174
aucuauauaugccuaccgu

SEQ ID NO: 1404176 - RNA, 19 nt, Artificial Sequence
  Description of Artificial Sequence: Synthetic oligonucleotide
  Sense strand starting at position 3067 of SEQ ID NO: 1243250
ugugccgucagagaaauau

SEQ ID NO: 1404177 - RNA, 19 nt, Artificial Sequence
  Description of Artificial Sequence: Synthetic oligonucleotide
  Antisense strand to SEQ ID NO: 1404176
auauuucucugacggcaca

SEQ ID NO: 1404178 - RNA, 19 nt, Artificial Sequence
  Description of Artificial Sequence: Synthetic oligonucleotide
  Sense strand starting at position 3078 of SEQ ID NO: 1243250
agaaauauuugccguggac

SEQ ID NO: 1404179 - RNA, 19 nt, Artificial Sequence
  Description of Artificial Sequence: Synthetic oligonucleotide
  Antisense strand to SEQ ID NO: 1404178
guccacggcaaauauuucu

SEQ ID NO: 1404180 - RNA, 19 nt, Artificial Sequence
  Description of Artificial Sequence: Synthetic oligonucleotide
  Sense strand starting at position 3157 of SEQ ID NO: 1243250
gcaugacuucucugauucc

SEQ ID NO: 1404181 - RNA, 19 nt, Artificial Sequence
  Description of Artificial Sequence: Synthetic oligonucleotide
  Antisense strand to SEQ ID NO: 1404180
ggaaucagagaagucaugc

SEQ ID NO: 1404182 - RNA, 19 nt, Artificial Sequence
  Description of Artificial Sequence: Synthetic oligonucleotide
  Sense strand starting at position 3189 of SEQ ID NO: 1243250
ugacauuucuuaguugcuu

SEQ ID NO: 1404183 - RNA, 19 nt, Artificial Sequence
  Description of Artificial Sequence: Synthetic oligonucleotide
  Antisense strand to SEQ ID NO: 1404182
aagcaacuaagaaauguca

SEQ ID NO: 1404184 - RNA, 19 nt, Artificial Sequence
  Description of Artificial Sequence: Synthetic oligonucleotide
  Sense strand starting at position 90 of SEQ ID NO: 1243251
aagugauaugguugccuca

SEQ ID NO: 1404185 - RNA, 19 nt, Artificial Sequence
  Description of Artificial Sequence: Synthetic oligonucleotide
  Antisense strand to SEQ ID NO: 1404184
ugaggcaaccauaucacuu

SEQ ID NO: 1404186 - RNA, 19 nt, Artificial Sequence
  Description of Artificial Sequence: Synthetic oligonucleotide
  Sense strand starting at position 318 of SEQ ID NO: 1243251
agaccuugucuguaauaau

SEQ ID NO: 1404187 - RNA, 19 nt, Artificial Sequence
  Description of Artificial Sequence: Synthetic oligonucleotide
  Antisense strand to SEQ ID NO: 1404186
auuauuacagacaaggucu

SEQ ID NO: 1404188 - RNA, 19 nt, Artificial Sequence
  Description of Artificial Sequence: Synthetic oligonucleotide
  Sense strand starting at position 1295 of SEQ ID NO: 1243251
ccagauuugucuccgugca

SEQ ID NO: 1404189 - RNA, 19 nt, Artificial Sequence
  Description of Artificial Sequence: Synthetic oligonucleotide
  Antisense strand to SEQ ID NO: 1404188
ugcacggagacaaaucugg

SEQ ID NO: 1404190 - RNA, 19 nt, Artificial Sequence
  Description of Artificial Sequence: Synthetic oligonucleotide
  Sense strand starting at position 1296 of SEQ ID NO: 1243251
cagauuugucuccgugcaa

SEQ ID NO: 1404191 - RNA, 19 nt, Artificial Sequence
  Description of Artificial Sequence: Synthetic oligonucleotide
  Antisense strand to SEQ ID NO: 1404190
uugcacggagacaaaucug

SEQ ID NO: 1404192 - RNA, 19 nt, Artificial Sequence
  Description of Artificial Sequence: Synthetic oligonucleotide
  Sense strand starting at position 1297 of SEQ ID NO: 1243251
agauuugucuccgugcaaa

SEQ ID NO: 1404193 - RNA, 19 nt, Artificial Sequence
  Description of Artificial Sequence: Synthetic oligonucleotide
  Antisense strand to SEQ ID NO: 1404192
uuugcacggagacaaaucu

SEQ ID NO: 1404194 - RNA, 19 nt, Artificial Sequence
  Description of Artificial Sequence: Synthetic oligonucleotide
  Sense strand starting at position 1315 of SEQ ID NO: 1243251
aagggaauugugggcagau

SEQ ID NO: 1404195 - RNA, 19 nt, Artificial Sequence
  Description of Artificial Sequence: Synthetic oligonucleotide
  Antisense strand to SEQ ID NO: 1404194
aucugcccacaauucccuu

SEQ ID NO: 1404196 - RNA, 19 nt, Artificial Sequence
  Description of Artificial Sequence: Synthetic oligonucleotide
  Sense strand starting at position 1316 of SEQ ID NO: 1243251
agggaauugugggcagaug

SEQ ID NO: 1404197 - RNA, 19 nt, Artificial Sequence
  Description of Artificial Sequence: Synthetic oligonucleotide
  Antisense strand to SEQ ID NO: 1404196
caucugcccacaauucccu

SEQ ID NO: 1404198 - RNA, 19 nt, Artificial Sequence
  Description of Artificial Sequence: Synthetic oligonucleotide
  Sense strand starting at position 1412 of SEQ ID NO: 1243251
uccuguuaccuacaguaau

SEQ ID NO: 1404199 - RNA, 19 nt, Artificial Sequence
  Description of Artificial Sequence: Synthetic oligonucleotide
  Antisense strand to SEQ ID NO: 1404198
auuacuguagguaacagga

SEQ ID NO: 1404200 - RNA, 19 nt, Artificial Sequence
  Description of Artificial Sequence: Synthetic oligonucleotide
  Sense strand starting at position 1493 of SEQ ID NO: 1243251
cccauucuuccuuggugaa

SEQ ID NO: 1404201 - RNA, 19 nt, Artificial Sequence
  Description of Artificial Sequence: Synthetic oligonucleotide
  Antisense strand to SEQ ID NO: 1404200
uucaccaaggaagaauggg

SEQ ID NO: 1404202 - RNA, 19 nt, Artificial Sequence
  Description of Artificial Sequence: Synthetic oligonucleotide
  Sense strand starting at position 1494 of SEQ ID NO: 1243251
ccauucuuccuuggugaag

SEQ ID NO: 1404203 - RNA, 19 nt, Artificial Sequence
  Description of Artificial Sequence: Synthetic oligonucleotide
  Antisense strand to SEQ ID NO: 1404202
cuucaccaaggaagaaugg

SEQ ID NO: 1404204 - RNA, 19 nt, Artificial Sequence
  Description of Artificial Sequence: Synthetic oligonucleotide
  Sense strand starting at position 1495 of SEQ ID NO: 1243251
cauucuuccuuggugaagu

SEQ ID NO: 1404205 - RNA, 19 nt, Artificial Sequence
  Description of Artificial Sequence: Synthetic oligonucleotide
  Antisense strand to SEQ ID NO: 1404204
acuucaccaaggaagaaug

SEQ ID NO: 1404206 - RNA, 19 nt, Artificial Sequence
  Description of Artificial Sequence: Synthetic oligonucleotide
  Sense strand starting at position 1497 of SEQ ID NO: 1243251
uucuuccuuggugaaguau

SEQ ID NO: 1404207 - RNA, 19 nt, Artificial Sequence
  Description of Artificial Sequence: Synthetic oligonucleotide
  Antisense strand to SEQ ID NO: 1404206
auacuucaccaaggaagaa

SEQ ID NO: 1404208 - RNA, 19 nt, Artificial Sequence
  Description of Artificial Sequence: Synthetic oligonucleotide
  Sense strand starting at position 1505 of SEQ ID NO: 1243251
uggugaaguauauggaaau

SEQ ID NO: 1404209 - RNA, 19 nt, Artificial Sequence
  Description of Artificial Sequence: Synthetic oligonucleotide
  Antisense strand to SEQ ID NO: 1404208
auuuccauauacuucacca

SEQ ID NO: 1404210 - RNA, 19 nt, Artificial Sequence
  Description of Artificial Sequence: Synthetic oligonucleotide
  Sense strand starting at position 1517 of SEQ ID NO: 1243251
uggaaaugucuuugaaggc

SEQ ID NO: 1404211 - RNA, 19 nt, Artificial Sequence
  Description of Artificial Sequence: Synthetic oligonucleotide
  Antisense strand to SEQ ID NO: 1404210
gccuucaaagacauuucca

SEQ ID NO: 1404212 - RNA, 19 nt, Artificial Sequence
  Description of Artificial Sequence: Synthetic oligonucleotide
  Sense strand starting at position 1538 of SEQ ID NO: 1243251
cuuugaccuagaggaagua

SEQ ID NO: 1404213 - RNA, 19 nt, Artificial Sequence
  Description of Artificial Sequence: Synthetic oligonucleotide
  Antisense strand to SEQ ID NO: 1404212
uacuuccucuaggucaaag

SEQ ID NO: 1404214 - RNA, 19 nt, Artificial Sequence
  Description of Artificial Sequence: Synthetic oligonucleotide
  Sense strand starting at position 1639 of SEQ ID NO: 1243251
cugggagucucugugaaac

SEQ ID NO: 1404215 - RNA, 19 nt, Artificial Sequence
  Description of Artificial Sequence: Synthetic oligonucleotide
  Antisense strand to SEQ ID NO: 1404214
guuucacagagacucccag

SEQ ID NO: 1404216 - RNA, 19 nt, Artificial Sequence
  Description of Artificial Sequence: Synthetic oligonucleotide
  Sense strand starting at position 1684 of SEQ ID NO: 1243251
uuguguccuguuuaacuga

SEQ ID NO: 1404217 - RNA, 19 nt, Artificial Sequence
  Description of Artificial Sequence: Synthetic oligonucleotide
  Antisense strand to SEQ ID NO: 1404216
ucaguuaaacaggacacaa

SEQ ID NO: 1404218 - RNA, 19 nt, Artificial Sequence
  Description of Artificial Sequence: Synthetic oligonucleotide
  Sense strand starting at position 1691 of SEQ ID NO: 1243251
cuguuuaacugagcagaca

SEQ ID NO: 1404219 - RNA, 19 nt, Artificial Sequence
  Description of Artificial Sequence: Synthetic oligonucleotide
  Antisense strand to SEQ ID NO: 1404218
ugucugcucaguuaaacag

SEQ ID NO: 1404220 - RNA, 19 nt, Artificial Sequence
  Description of Artificial Sequence: Synthetic oligonucleotide
  Sense strand starting at position 1852 of SEQ ID NO: 1243251
ugcagcacuccagagauca

SEQ ID NO: 1404221 - RNA, 19 nt, Artificial Sequence
  Description of Artificial Sequence: Synthetic oligonucleotide
  Antisense strand to SEQ ID NO: 1404220
ugaucucuggagugcugca

SEQ ID NO: 1404222 - RNA, 19 nt, Artificial Sequence
  Description of Artificial Sequence: Synthetic oligonucleotide
  Sense strand starting at position 2009 of SEQ ID NO: 1243251
uccaauucugaguguggga

SEQ ID NO: 1404223 - RNA, 19 nt, Artificial Sequence
  Description of Artificial Sequence: Synthetic oligonucleotide
  Antisense strand to SEQ ID NO: 1404222
ucccacacucagaauugga

SEQ ID NO: 1404224 - RNA, 19 nt, Artificial Sequence
  Description of Artificial Sequence: Synthetic oligonucleotide
  Sense strand starting at position 2358 of SEQ ID NO: 1243251
ggaguccugaggugugaga

SEQ ID NO: 1404225 - RNA, 19 nt, Artificial Sequence
  Description of Artificial Sequence: Synthetic oligonucleotide
  Antisense strand to SEQ ID NO: 1404224
ucucacaccucaggacucc

SEQ ID NO: 1404226 - RNA, 19 nt, Artificial Sequence
  Description of Artificial Sequence: Synthetic oligonucleotide
  Sense strand starting at position 2560 of SEQ ID NO: 1243251
uaucucucagguugagauu

SEQ ID NO: 1404227 - RNA, 19 nt, Artificial Sequence
  Description of Artificial Sequence: Synthetic oligonucleotide
  Antisense strand to SEQ ID NO: 1404226
aaucucaaccugagagaua

SEQ ID NO: 1404228 - RNA, 19 nt, Artificial Sequence
  Description of Artificial Sequence: Synthetic oligonucleotide
  Sense strand starting at position 2631 of SEQ ID NO: 1243251
gguuucucagguugaggga

SEQ ID NO: 1404229 - RNA, 19 nt, Artificial Sequence
  Description of Artificial Sequence: Synthetic oligonucleotide
  Antisense strand to SEQ ID NO: 1404228
ucccucaaccugagaaacc

SEQ ID NO: 1404230 - RNA, 19 nt, Artificial Sequence
  Description of Artificial Sequence: Synthetic oligonucleotide
  Sense strand starting at position 2690 of SEQ ID NO: 1243251
ggcugauaguauuuguggu

SEQ ID NO: 1404231 - RNA, 19 nt, Artificial Sequence
  Description of Artificial Sequence: Synthetic oligonucleotide
  Antisense strand to SEQ ID NO: 1404230
accacaaauacuaucagcc

SEQ ID NO: 1404232 - RNA, 19 nt, Artificial Sequence
  Description of Artificial Sequence: Synthetic oligonucleotide
  Sense strand starting at position 2691 of SEQ ID NO: 1243251
gcugauaguauuugugguu

SEQ ID NO: 1404233 - RNA, 19 nt, Artificial Sequence
  Description of Artificial Sequence: Synthetic oligonucleotide
  Antisense strand to SEQ ID NO: 1404232
aaccacaaauacuaucagc

SEQ ID NO: 1404234 - RNA, 19 nt, Artificial Sequence
  Description of Artificial Sequence: Synthetic oligonucleotide
  Sense strand starting at position 2692 of SEQ ID NO: 1243251
cugauaguauuugugguuu

SEQ ID NO: 1404235 - RNA, 19 nt, Artificial Sequence
  Description of Artificial Sequence: Synthetic oligonucleotide
  Antisense strand to SEQ ID NO: 1404234
aaaccacaaauacuaucag

SEQ ID NO: 1404236 - RNA, 19 nt, Artificial Sequence
  Description of Artificial Sequence: Synthetic oligonucleotide
  Sense strand starting at position 2813 of SEQ ID NO: 1243251
augaaaggauuugggauau

SEQ ID NO: 1404237 - RNA, 19 nt, Artificial Sequence
  Description of Artificial Sequence: Synthetic oligonucleotide
  Antisense strand to SEQ ID NO: 1404236
auaucccaaauccuuucau

SEQ ID NO: 1404238 - RNA, 19 nt, Artificial Sequence
  Description of Artificial Sequence: Synthetic oligonucleotide
  Sense strand starting at position 2849 of SEQ ID NO: 1243251
cugggucucggguaaagga

SEQ ID NO: 1404239 - RNA, 19 nt, Artificial Sequence
  Description of Artificial Sequence: Synthetic oligonucleotide
  Antisense strand to SEQ ID NO: 1404238
uccuuuacccgagacccag

SEQ ID NO: 1404240 - RNA, 19 nt, Artificial Sequence
  Description of Artificial Sequence: Synthetic oligonucleotide
  Sense strand starting at position 2897 of SEQ ID NO: 1243251
gguguuugacacugagguu

SEQ ID NO: 1404241 - RNA, 19 nt, Artificial Sequence
  Description of Artificial Sequence: Synthetic oligonucleotide
  Antisense strand to SEQ ID NO: 1404240
aaccucagugucaaacacc

SEQ ID NO: 1404242 - RNA, 19 nt, Artificial Sequence
  Description of Artificial Sequence: Synthetic oligonucleotide
  Sense strand starting at position 2898 of SEQ ID NO: 1243251
guguuugacacugagguua

SEQ ID NO: 1404243 - RNA, 19 nt, Artificial Sequence
  Description of Artificial Sequence: Synthetic oligonucleotide
  Antisense strand to SEQ ID NO: 1404242
uaaccucagugucaaacac

SEQ ID NO: 1404244 - RNA, 19 nt, Artificial Sequence
  Description of Artificial Sequence: Synthetic oligonucleotide
  Sense strand starting at position 2913 of SEQ ID NO: 1243251
guuauuugguccuugaagc

SEQ ID NO: 1404245 - RNA, 19 nt, Artificial Sequence
  Description of Artificial Sequence: Synthetic oligonucleotide
  Antisense strand to SEQ ID NO: 1404244
gcuucaaggaccaaauaac

SEQ ID NO: 1404246 - RNA, 19 nt, Artificial Sequence
  Description of Artificial Sequence: Synthetic oligonucleotide
  Sense strand starting at position 2914 of SEQ ID NO: 1243251
uuauuugguccuugaagcu

SEQ ID NO: 1404247 - RNA, 19 nt, Artificial Sequence
  Description of Artificial Sequence: Synthetic oligonucleotide
  Antisense strand to SEQ ID NO: 1404246
agcuucaaggaccaaauaa

SEQ ID NO: 1404248 - RNA, 19 nt, Artificial Sequence
  Description of Artificial Sequence: Synthetic oligonucleotide
  Sense strand starting at position 2983 of SEQ ID NO: 1243251
uggucucucugagauauuu

SEQ ID NO: 1404249 - RNA, 19 nt, Artificial Sequence
  Description of Artificial Sequence: Synthetic oligonucleotide
  Antisense strand to SEQ ID NO: 1404248
aaauaucucagagagacca

SEQ ID NO: 1404250 - RNA, 19 nt, Artificial Sequence
  Description of Artificial Sequence: Synthetic oligonucleotide
  Sense strand starting at position 3043 of SEQ ID NO: 1243251
gggaaauuguggcuccuca

SEQ ID NO: 1404251 - RNA, 19 nt, Artificial Sequence
  Description of Artificial Sequence: Synthetic oligonucleotide
  Antisense strand to SEQ ID NO: 1404250
ugaggagccacaauuuccc

SEQ ID NO: 1404252 - RNA, 19 nt, Artificial Sequence
  Description of Artificial Sequence: Synthetic oligonucleotide
  Sense strand starting at position 3054 of SEQ ID NO: 1243251
gcuccucaggcucagaaua

SEQ ID NO: 1404253 - RNA, 19 nt, Artificial Sequence
  Description of Artificial Sequence: Synthetic oligonucleotide
  Antisense strand to SEQ ID NO: 1404252
uauucugagccugaggagc

SEQ ID NO: 1404254 - RNA, 19 nt, Artificial Sequence
  Description of Artificial Sequence: Synthetic oligonucleotide
  Sense strand starting at position 3100 of SEQ ID NO: 1243251
gauguuccucugggugaag

SEQ ID NO: 1404255 - RNA, 19 nt, Artificial Sequence
  Description of Artificial Sequence: Synthetic oligonucleotide
  Antisense strand to SEQ ID NO: 1404254
cuucacccagaggaacauc

SEQ ID NO: 1404256 - RNA, 19 nt, Artificial Sequence
  Description of Artificial Sequence: Synthetic oligonucleotide
  Sense strand starting at position 3268 of SEQ ID NO: 1243251
auuugaaggucuugggaug

SEQ ID NO: 1404257 - RNA, 19 nt, Artificial Sequence
  Description of Artificial Sequence: Synthetic oligonucleotide
  Antisense strand to SEQ ID NO: 1404256
caucccaagaccuucaaau

SEQ ID NO: 1404258 - RNA, 19 nt, Artificial Sequence
  Description of Artificial Sequence: Synthetic oligonucleotide
  Sense strand starting at position 3269 of SEQ ID NO: 1243251
uuugaaggucuugggauga

SEQ ID NO: 1404259 - RNA, 19 nt, Artificial Sequence
  Description of Artificial Sequence: Synthetic oligonucleotide
  Antisense strand to SEQ ID NO: 1404258
ucaucccaagaccuucaaa

SEQ ID NO: 1404260 - RNA, 19 nt, Artificial Sequence
  Description of Artificial Sequence: Synthetic oligonucleotide
  Sense strand starting at position 3525 of SEQ ID NO: 1243251
cugucagucaugggcacaa

SEQ ID NO: 1404261 - RNA, 19 nt, Artificial Sequence
  Description of Artificial Sequence: Synthetic oligonucleotide
  Antisense strand to SEQ ID NO: 1404260
uugugcccaugacugacag

SEQ ID NO: 1404262 - RNA, 19 nt, Artificial Sequence
  Description of Artificial Sequence: Synthetic oligonucleotide
  Sense strand starting at position 3972 of SEQ ID NO: 1243251
uguauuagcuggccaauuu

SEQ ID NO: 1404263 - RNA, 19 nt, Artificial Sequence
  Description of Artificial Sequence: Synthetic oligonucleotide
  Antisense strand to SEQ ID NO: 1404262
aaauuggccagcuaauaca

SEQ ID NO: 1404264 - RNA, 19 nt, Artificial Sequence
  Description of Artificial Sequence: Synthetic oligonucleotide
  Sense strand starting at position 235 of SEQ ID NO: 1243252
aggacagguucucccagaa

SEQ ID NO: 1404265 - RNA, 19 nt, Artificial Sequence
  Description of Artificial Sequence: Synthetic oligonucleotide
  Antisense strand to SEQ ID NO: 1404264
uucugggagaaccuguccu

SEQ ID NO: 1404266 - RNA, 19 nt, Artificial Sequence
  Description of Artificial Sequence: Synthetic oligonucleotide
  Sense strand starting at position 239 of SEQ ID NO: 1243252
cagguucucccagaaacgu

SEQ ID NO: 1404267 - RNA, 19 nt, Artificial Sequence
  Description of Artificial Sequence: Synthetic oligonucleotide
  Antisense strand to SEQ ID NO: 1404266
acguuucugggagaaccug

SEQ ID NO: 1404268 - RNA, 19 nt, Artificial Sequence
  Description of Artificial Sequence: Synthetic oligonucleotide
  Sense strand starting at position 355 of SEQ ID NO: 1243252
aggugaacuuccuuggcau

SEQ ID NO: 1404269 - RNA, 19 nt, Artificial Sequence
  Description of Artificial Sequence: Synthetic oligonucleotide
  Antisense strand to SEQ ID NO: 1404268
augccaaggaaguucaccu

SEQ ID NO: 1404270 - RNA, 19 nt, Artificial Sequence
  Description of Artificial Sequence: Synthetic oligonucleotide
  Sense strand starting at position 427 of SEQ ID NO: 1243252
cccuguuguggugaagaau

SEQ ID NO: 1404271 - RNA, 19 nt, Artificial Sequence
  Description of Artificial Sequence: Synthetic oligonucleotide
  Antisense strand to SEQ ID NO: 1404270
auucuucaccacaacaggg

SEQ ID NO: 1404272 - RNA, 19 nt, Artificial Sequence
  Description of Artificial Sequence: Synthetic oligonucleotide
  Sense strand starting at position 440 of SEQ ID NO: 1243252
aagaauuccuagccuggga

SEQ ID NO: 1404273 - RNA, 19 nt, Artificial Sequence
  Description of Artificial Sequence: Synthetic oligonucleotide
  Antisense strand to SEQ ID NO: 1404272
ucccaggcuaggaauucuu

SEQ ID NO: 1404274 - RNA, 19 nt, Artificial Sequence
  Description of Artificial Sequence: Synthetic oligonucleotide
  Sense strand starting at position 1056 of SEQ ID NO: 1243252
agugaugugaccgaggagu

SEQ ID NO: 1404275 - RNA, 19 nt, Artificial Sequence
  Description of Artificial Sequence: Synthetic oligonucleotide
  Antisense strand to SEQ ID NO: 1404274
acuccucggucacaucacu

SEQ ID NO: 1404276 - RNA, 19 nt, Artificial Sequence
  Description of Artificial Sequence: Synthetic oligonucleotide
  Sense strand starting at position 2434 of SEQ ID NO: 1243252
cugucacucauucggaaag

SEQ ID NO: 1404277 - RNA, 19 nt, Artificial Sequence
  Description of Artificial Sequence: Synthetic oligonucleotide
  Antisense strand to SEQ ID NO: 1404276
cuuuccgaaugagugacag

SEQ ID NO: 1404278 - RNA, 19 nt, Artificial Sequence
  Description of Artificial Sequence: Synthetic oligonucleotide
  Sense strand starting at position 2549 of SEQ ID NO: 1243252
cagagaagauucuuggcuu

SEQ ID NO: 1404279 - RNA, 19 nt, Artificial Sequence
  Description of Artificial Sequence: Synthetic oligonucleotide
  Antisense strand to SEQ ID NO: 1404278
aagccaagaaucuucucug

SEQ ID NO: 1404280 - RNA, 19 nt, Artificial Sequence
  Description of Artificial Sequence: Synthetic oligonucleotide
  Sense strand starting at position 2580 of SEQ ID NO: 1243252
gcacguuuggaagagaacu

SEQ ID NO: 1404281 - RNA, 19 nt, Artificial Sequence
  Description of Artificial Sequence: Synthetic oligonucleotide
  Antisense strand to SEQ ID NO: 1404280
aguucucuuccaaacgugc

SEQ ID NO: 1404282 - RNA, 19 nt, Artificial Sequence
  Description of Artificial Sequence: Synthetic oligonucleotide
  Sense strand starting at position 2648 of SEQ ID NO: 1243252
guaacauagggcuaauagu

SEQ ID NO: 1404283 - RNA, 19 nt, Artificial Sequence
  Description of Artificial Sequence: Synthetic oligonucleotide
  Antisense strand to SEQ ID NO: 1404282
acuauuagcccuauguuac

SEQ ID NO: 1404284 - RNA, 19 nt, Artificial Sequence
  Description of Artificial Sequence: Synthetic oligonucleotide
  Sense strand starting at position 2732 of SEQ ID NO: 1243252
acaaauucuggucguauuu

SEQ ID NO: 1404285 - RNA, 19 nt, Artificial Sequence
  Description of Artificial Sequence: Synthetic oligonucleotide
  Antisense strand to SEQ ID NO: 1404284
aaauacgaccagaauuugu

SEQ ID NO: 1404286 - RNA, 19 nt, Artificial Sequence
  Description of Artificial Sequence: Synthetic oligonucleotide
  Sense strand starting at position 2856 of SEQ ID NO: 1243252
gcaucuucgacugaaguca

SEQ ID NO: 1404287 - RNA, 19 nt, Artificial Sequence
  Description of Artificial Sequence: Synthetic oligonucleotide
  Antisense strand to SEQ ID NO: 1404286
ugacuucagucgaagaugc

SEQ ID NO: 1404288 - RNA, 19 nt, Artificial Sequence
  Description of Artificial Sequence: Synthetic oligonucleotide
  Sense strand starting at position 2940 of SEQ ID NO: 1243252
ccaggacucucuccuugau

SEQ ID NO: 1404289 - RNA, 19 nt, Artificial Sequence
  Description of Artificial Sequence: Synthetic oligonucleotide
  Antisense strand to SEQ ID NO: 1404288
aucaaggagagaguccugg

SEQ ID NO: 1404290 - RNA, 19 nt, Artificial Sequence
  Description of Artificial Sequence: Synthetic oligonucleotide
  Sense strand starting at position 2944 of SEQ ID NO: 1243252
gacucucuccuugauguga

SEQ ID NO: 1404291 - RNA, 19 nt, Artificial Sequence
  Description of Artificial Sequence: Synthetic oligonucleotide
  Antisense strand to SEQ ID NO: 1404290
ucacaucaaggagagaguc

SEQ ID NO: 1404292 - RNA, 19 nt, Artificial Sequence
  Description of Artificial Sequence: Synthetic oligonucleotide
  Sense strand starting at position 2957 of SEQ ID NO: 1243252
augugaucugaagguaacu

SEQ ID NO: 1404293 - RNA, 19 nt, Artificial Sequence
  Description of Artificial Sequence: Synthetic oligonucleotide
  Antisense strand to SEQ ID NO: 1404292
aguuaccuucagaucacau

SEQ ID NO: 1404294 - RNA, 19 nt, Artificial Sequence
  Description of Artificial Sequence: Synthetic oligonucleotide
  Sense strand starting at position 2980 of SEQ ID NO: 1243252
ggguaauaauugucuacaa

SEQ ID NO: 1404295 - RNA, 19 nt, Artificial Sequence
  Description of Artificial Sequence: Synthetic oligonucleotide
  Antisense strand to SEQ ID NO: 1404294
uuguagacaauuauuaccc

SEQ ID NO: 1404296 - RNA, 19 nt, Artificial Sequence
  Description of Artificial Sequence: Synthetic oligonucleotide
  Sense strand starting at position 2981 of SEQ ID NO: 1243252
gguaauaauugucuacaau

SEQ ID NO: 1404297 - RNA, 19 nt, Artificial Sequence
  Description of Artificial Sequence: Synthetic oligonucleotide
  Antisense strand to SEQ ID NO: 1404296
auuguagacaauuauuacc

SEQ ID NO: 1404298 - RNA, 19 nt, Artificial Sequence
  Description of Artificial Sequence: Synthetic oligonucleotide
  Sense strand starting at position 2982 of SEQ ID NO: 1243252
guaauaauugucuacaaug

SEQ ID NO: 1404299 - RNA, 19 nt, Artificial Sequence
  Description of Artificial Sequence: Synthetic oligonucleotide
  Antisense strand to SEQ ID NO: 1404298
cauuguagacaauuauuac

SEQ ID NO: 1404300 - RNA, 19 nt, Artificial Sequence
  Description of Artificial Sequence: Synthetic oligonucleotide
  Sense strand starting at position 3116 of SEQ ID NO: 1243252
agaccuaggcucugugaga

SEQ ID NO: 1404301 - RNA, 19 nt, Artificial Sequence
  Description of Artificial Sequence: Synthetic oligonucleotide
  Antisense strand to SEQ ID NO: 1404300
ucucacagagccuaggucu

SEQ ID NO: 1404302 - RNA, 19 nt, Artificial Sequence
  Description of Artificial Sequence: Synthetic oligonucleotide
  Sense strand starting at position 3202 of SEQ ID NO: 1243252
aguaaauauugguugauug

SEQ ID NO: 1404303 - RNA, 19 nt, Artificial Sequence
  Description of Artificial Sequence: Synthetic oligonucleotide
  Antisense strand to SEQ ID NO: 1404302
caaucaaccaauauuuacu

SEQ ID NO: 1404304 - RNA, 19 nt, Artificial Sequence
  Description of Artificial Sequence: Synthetic oligonucleotide
  Sense strand starting at position 3203 of SEQ ID NO: 1243252
guaaauauugguugauuga

SEQ ID NO: 1404305 - RNA, 19 nt, Artificial Sequence
  Description of Artificial Sequence: Synthetic oligonucleotide
  Antisense strand to SEQ ID NO: 1404304
ucaaucaaccaauauuuac

SEQ ID NO: 1404306 - RNA, 19 nt, Artificial Sequence
  Description of Artificial Sequence: Synthetic oligonucleotide
  Sense strand starting at position 3291 of SEQ ID NO: 1243252
ccaguagguguuuaauaau

SEQ ID NO: 1404307 - RNA, 19 nt, Artificial Sequence
  Description of Artificial Sequence: Synthetic oligonucleotide
  Antisense strand to SEQ ID NO: 1404306
auuauuaaacaccuacugg

SEQ ID NO: 1404308 - RNA, 19 nt, Artificial Sequence
  Description of Artificial Sequence: Synthetic oligonucleotide
  Sense strand starting at position 3337 of SEQ ID NO: 1243252
guacuugugcugucuuauu

SEQ ID NO: 1404309 - RNA, 19 nt, Artificial Sequence
  Description of Artificial Sequence: Synthetic oligonucleotide
  Antisense strand to SEQ ID NO: 1404308
aauaagacagcacaaguac

SEQ ID NO: 1404310 - RNA, 19 nt, Artificial Sequence
  Description of Artificial Sequence: Synthetic oligonucleotide
  Sense strand starting at position 3364 of SEQ ID NO: 1243252
gcaacaacccuauguagau

SEQ ID NO: 1404311 - RNA, 19 nt, Artificial Sequence
  Description of Artificial Sequence: Synthetic oligonucleotide
  Antisense strand to SEQ ID NO: 1404310
aucuacauaggguuguugc

SEQ ID NO: 1404312 - RNA, 19 nt, Artificial Sequence
  Description of Artificial Sequence: Synthetic oligonucleotide
  Sense strand starting at position 3412 of SEQ ID NO: 1243252
ggagguucagagugauuaa

SEQ ID NO: 1404313 - RNA, 19 nt, Artificial Sequence
  Description of Artificial Sequence: Synthetic oligonucleotide
  Antisense strand to SEQ ID NO: 1404312
uuaaucacucugaaccucc

SEQ ID NO: 1404314 - RNA, 19 nt, Artificial Sequence
  Description of Artificial Sequence: Synthetic oligonucleotide
  Sense strand starting at position 3415 of SEQ ID NO: 1243252
gguucagagugauuaagau

SEQ ID NO: 1404315 - RNA, 19 nt, Artificial Sequence
  Description of Artificial Sequence: Synthetic oligonucleotide
  Antisense strand to SEQ ID NO: 1404314
aucuuaaucacucugaacc

SEQ ID NO: 1404316 - RNA, 19 nt, Artificial Sequence
  Description of Artificial Sequence: Synthetic oligonucleotide
  Sense strand starting at position 3512 of SEQ ID NO: 1243252
cugaguagugguggaugaa

SEQ ID NO: 1404317 - RNA, 19 nt, Artificial Sequence
  Description of Artificial Sequence: Synthetic oligonucleotide
  Antisense strand to SEQ ID NO: 1404316
uucauccaccacuacucag

SEQ ID NO: 1404318 - RNA, 19 nt, Artificial Sequence
  Description of Artificial Sequence: Synthetic oligonucleotide
  Sense strand starting at position 3513 of SEQ ID NO: 1243252
ugaguagugguggaugaag

SEQ ID NO: 1404319 - RNA, 19 nt, Artificial Sequence
  Description of Artificial Sequence: Synthetic oligonucleotide
  Antisense strand to SEQ ID NO: 1404318
cuucauccaccacuacuca

SEQ ID NO: 1404320 - RNA, 19 nt, Artificial Sequence
  Description of Artificial Sequence: Synthetic oligonucleotide
  Sense strand starting at position 3595 of SEQ ID NO: 1243252
agugguaagucauuauuag

SEQ ID NO: 1404321 - RNA, 19 nt, Artificial Sequence
  Description of Artificial Sequence: Synthetic oligonucleotide
  Antisense strand to SEQ ID NO: 1404320
cuaauaaugacuuaccacu

SEQ ID NO: 1404322 - RNA, 19 nt, Artificial Sequence
  Description of Artificial Sequence: Synthetic oligonucleotide
  Sense strand starting at position 3596 of SEQ ID NO: 1243252
gugguaagucauuauuagg

SEQ ID NO: 1404323 - RNA, 19 nt, Artificial Sequence
  Description of Artificial Sequence: Synthetic oligonucleotide
  Antisense strand to SEQ ID NO: 1404322
ccuaauaaugacuuaccac

SEQ ID NO: 1404324 - RNA, 19 nt, Artificial Sequence
  Description of Artificial Sequence: Synthetic oligonucleotide
  Sense strand starting at position 3603 of SEQ ID NO: 1243252
gucauuauuagguagcaug

SEQ ID NO: 1404325 - RNA, 19 nt, Artificial Sequence
  Description of Artificial Sequence: Synthetic oligonucleotide
  Antisense strand to SEQ ID NO: 1404324
caugcuaccuaauaaugac

SEQ ID NO: 1404326 - RNA, 19 nt, Artificial Sequence
  Description of Artificial Sequence: Synthetic oligonucleotide
  Sense strand starting at position 3626 of SEQ ID NO: 1243252
gagcaagggcugcaauaau

SEQ ID NO: 1404327 - RNA, 19 nt, Artificial Sequence
  Description of Artificial Sequence: Synthetic oligonucleotide
  Antisense strand to SEQ ID NO: 1404326
auuauugcagcccuugcuc

SEQ ID NO: 1404328 - RNA, 19 nt, Artificial Sequence
  Description of Artificial Sequence: Synthetic oligonucleotide
  Sense strand starting at position 3650 of SEQ ID NO: 1243252
gucccucuccuacauagua

SEQ ID NO: 1404329 - RNA, 19 nt, Artificial Sequence
  Description of Artificial Sequence: Synthetic oligonucleotide
  Antisense strand to SEQ ID NO: 1404328
uacuauguaggagagggac

SEQ ID NO: 1404330 - RNA, 19 nt, Artificial Sequence
  Description of Artificial Sequence: Synthetic oligonucleotide
  Sense strand starting at position 3708 of SEQ ID NO: 1243252
gguugacauguuugggaaa

SEQ ID NO: 1404331 - RNA, 19 nt, Artificial Sequence
  Description of Artificial Sequence: Synthetic oligonucleotide
  Antisense strand to SEQ ID NO: 1404330
uuucccaaacaugucaacc

SEQ ID NO: 1404332 - RNA, 19 nt, Artificial Sequence
  Description of Artificial Sequence: Synthetic oligonucleotide
  Sense strand starting at position 3743 of SEQ ID NO: 1243252
auuauuaguccuugaagag

SEQ ID NO: 1404333 - RNA, 19 nt, Artificial Sequence
  Description of Artificial Sequence: Synthetic oligonucleotide
  Antisense strand to SEQ ID NO: 1404332
cucuucaaggacuaauaau

SEQ ID NO: 1404334 - RNA, 19 nt, Artificial Sequence
  Description of Artificial Sequence: Synthetic oligonucleotide
  Sense strand starting at position 3875 of SEQ ID NO: 1243252
aaugaagugcccuggauga

SEQ ID NO: 1404335 - RNA, 19 nt, Artificial Sequence
  Description of Artificial Sequence: Synthetic oligonucleotide
  Antisense strand to SEQ ID NO: 1404334
ucauccagggcacuucauu

SEQ ID NO: 1404336 - RNA, 19 nt, Artificial Sequence
  Description of Artificial Sequence: Synthetic oligonucleotide
  Sense strand starting at position 3888 of SEQ ID NO: 1243252
ggaugacuuuggucuguaa

SEQ ID NO: 1404337 - RNA, 19 nt, Artificial Sequence
  Description of Artificial Sequence: Synthetic oligonucleotide
  Antisense strand to SEQ ID NO: 1404336
uuacagaccaaagucaucc

SEQ ID NO: 1404338 - RNA, 19 nt, Artificial Sequence
  Description of Artificial Sequence: Synthetic oligonucleotide
  Sense strand starting at position 3890 of SEQ ID NO: 1243252
augacuuuggucuguaaca

SEQ ID NO: 1404339 - RNA, 19 nt, Artificial Sequence
  Description of Artificial Sequence: Synthetic oligonucleotide
  Antisense strand to SEQ ID NO: 1404338
uguuacagaccaaagucau

SEQ ID NO: 1404340 - RNA, 19 nt, Artificial Sequence
  Description of Artificial Sequence: Synthetic oligonucleotide
  Sense strand starting at position 3891 of SEQ ID NO: 1243252
ugacuuuggucuguaacaa

SEQ ID NO: 1404341 - RNA, 19 nt, Artificial Sequence
  Description of Artificial Sequence: Synthetic oligonucleotide
  Antisense strand to SEQ ID NO: 1404340
uuguuacagaccaaaguca

SEQ ID NO: 1404342 - RNA, 19 nt, Artificial Sequence
  Description of Artificial Sequence: Synthetic oligonucleotide
  Sense strand starting at position 3892 of SEQ ID NO: 1243252
gacuuuggucuguaacaac

SEQ ID NO: 1404343 - RNA, 19 nt, Artificial Sequence
  Description of Artificial Sequence: Synthetic oligonucleotide
  Antisense strand to SEQ ID NO: 1404342
guuguuacagaccaaaguc

SEQ ID NO: 1404344 - RNA, 19 nt, Artificial Sequence
  Description of Artificial Sequence: Synthetic oligonucleotide
  Sense strand starting at position 10 of SEQ ID NO: 1243253
guuggugucccauaaacag

SEQ ID NO: 1404345 - RNA, 19 nt, Artificial Sequence
  Description of Artificial Sequence: Synthetic oligonucleotide
  Antisense strand to SEQ ID NO: 1404344
cuguuuaugggacaccaac

SEQ ID NO: 1404346 - RNA, 19 nt, Artificial Sequence
  Description of Artificial Sequence: Synthetic oligonucleotide
  Sense strand starting at position 28 of SEQ ID NO: 1243253
gaagucauacugugacauu

SEQ ID NO: 1404347 - RNA, 19 nt, Artificial Sequence
  Description of Artificial Sequence: Synthetic oligonucleotide
  Antisense strand to SEQ ID NO: 1404346
aaugucacaguaugacuuc

SEQ ID NO: 1404348 - RNA, 19 nt, Artificial Sequence
  Description of Artificial Sequence: Synthetic oligonucleotide
  Sense strand starting at position 359 of SEQ ID NO: 1243253
guuucuucgguggacauaa

SEQ ID NO: 1404349 - RNA, 19 nt, Artificial Sequence
  Description of Artificial Sequence: Synthetic oligonucleotide
  Antisense strand to SEQ ID NO: 1404348
uuauguccaccgaagaaac

SEQ ID NO: 1404350 - RNA, 19 nt, Artificial Sequence
  Description of Artificial Sequence: Synthetic oligonucleotide
  Sense strand starting at position 369 of SEQ ID NO: 1243253
uggacauaacguugugaaa

SEQ ID NO: 1404351 - RNA, 19 nt, Artificial Sequence
  Description of Artificial Sequence: Synthetic oligonucleotide
  Antisense strand to SEQ ID NO: 1404350
uuucacaacguuaugucca

SEQ ID NO: 1404352 - RNA, 19 nt, Artificial Sequence
  Description of Artificial Sequence: Synthetic oligonucleotide
  Sense strand starting at position 403 of SEQ ID NO: 1243253
uaaagaaaccggugguuaa

SEQ ID NO: 1404353 - RNA, 19 nt, Artificial Sequence
  Description of Artificial Sequence: Synthetic oligonucleotide
  Antisense strand to SEQ ID NO: 1404352
uuaaccaccgguuucuuua

SEQ ID NO: 1404354 - RNA, 19 nt, Artificial Sequence
  Description of Artificial Sequence: Synthetic oligonucleotide
  Sense strand starting at position 466 of SEQ ID NO: 1243253
aauggugcuugauuaaaug

SEQ ID NO: 1404355 - RNA, 19 nt, Artificial Sequence
  Description of Artificial Sequence: Synthetic oligonucleotide
  Antisense strand to SEQ ID NO: 1404354
cauuuaaucaagcaccauu

SEQ ID NO: 1404356 - RNA, 19 nt, Artificial Sequence
  Description of Artificial Sequence: Synthetic oligonucleotide
  Sense strand starting at position 502 of SEQ ID NO: 1243253
cugcuaccuggacaaguua

SEQ ID NO: 1404357 - RNA, 19 nt, Artificial Sequence
  Description of Artificial Sequence: Synthetic oligonucleotide
  Antisense strand to SEQ ID NO: 1404356
uaacuuguccagguagcag

SEQ ID NO: 1404358 - RNA, 19 nt, Artificial Sequence
  Description of Artificial Sequence: Synthetic oligonucleotide
  Sense strand starting at position 510 of SEQ ID NO: 1243253
uggacaaguuaucucugua

SEQ ID NO: 1404359 - RNA, 19 nt, Artificial Sequence
  Description of Artificial Sequence: Synthetic oligonucleotide
  Antisense strand to SEQ ID NO: 1404358
uacagagauaacuugucca

SEQ ID NO: 1404360 - RNA, 19 nt, Artificial Sequence
  Description of Artificial Sequence: Synthetic oligonucleotide
  Sense strand starting at position 594 of SEQ ID NO: 1243253
gauggugacuggcuuaauc

SEQ ID NO: 1404361 - RNA, 19 nt, Artificial Sequence
  Description of Artificial Sequence: Synthetic oligonucleotide
  Antisense strand to SEQ ID NO: 1404360
gauuaagccagucaccauc

SEQ ID NO: 1404362 - RNA, 19 nt, Artificial Sequence
  Description of Artificial Sequence: Synthetic oligonucleotide
  Sense strand starting at position 596 of SEQ ID NO: 1243253
uggugacuggcuuaaucua

SEQ ID NO: 1404363 - RNA, 19 nt, Artificial Sequence
  Description of Artificial Sequence: Synthetic oligonucleotide
  Antisense strand to SEQ ID NO: 1404362
uagauuaagccagucacca

SEQ ID NO: 1404364 - RNA, 19 nt, Artificial Sequence
  Description of Artificial Sequence: Synthetic oligonucleotide
  Sense strand starting at position 631 of SEQ ID NO: 1243253
agaguuccuuuguugaaga

SEQ ID NO: 1404365 - RNA, 19 nt, Artificial Sequence
  Description of Artificial Sequence: Synthetic oligonucleotide
  Antisense strand to SEQ ID NO: 1404364
ucuucaacaaaggaacucu

SEQ ID NO: 1404366 - RNA, 19 nt, Artificial Sequence
  Description of Artificial Sequence: Synthetic oligonucleotide
  Sense strand starting at position 633 of SEQ ID NO: 1243253
aguuccuuuguugaagagu

SEQ ID NO: 1404367 - RNA, 19 nt, Artificial Sequence
  Description of Artificial Sequence: Synthetic oligonucleotide
  Antisense strand to SEQ ID NO: 1404366
acucuucaacaaaggaacu

SEQ ID NO: 1404368 - RNA, 19 nt, Artificial Sequence
  Description of Artificial Sequence: Synthetic oligonucleotide
  Sense strand starting at position 639 of SEQ ID NO: 1243253
uuuguugaagaguggaaau

SEQ ID NO: 1404369 - RNA, 19 nt, Artificial Sequence
  Description of Artificial Sequence: Synthetic oligonucleotide
  Antisense strand to SEQ ID NO: 1404368
auuuccacucuucaacaaa

SEQ ID NO: 1404370 - RNA, 19 nt, Artificial Sequence
  Description of Artificial Sequence: Synthetic oligonucleotide
  Sense strand starting at position 660 of SEQ ID NO: 1243253
cagcuuugggcugaaauaa

SEQ ID NO: 1404371 - RNA, 19 nt, Artificial Sequence
  Description of Artificial Sequence: Synthetic oligonucleotide
  Antisense strand to SEQ ID NO: 1404370
uuauuucagcccaaagcug

SEQ ID NO: 1404372 - RNA, 19 nt, Artificial Sequence
  Description of Artificial Sequence: Synthetic oligonucleotide
  Sense strand starting at position 709 of SEQ ID NO: 1243253
augggaugagcugguucaa

SEQ ID NO: 1404373 - RNA, 19 nt, Artificial Sequence
  Description of Artificial Sequence: Synthetic oligonucleotide
  Antisense strand to SEQ ID NO: 1404372
uugaaccagcucaucccau

SEQ ID NO: 1404374 - RNA, 19 nt, Artificial Sequence
  Description of Artificial Sequence: Synthetic oligonucleotide
  Sense strand starting at position 814 of SEQ ID NO: 1243253
guaaauacuccauggucca

SEQ ID NO: 1404375 - RNA, 19 nt, Artificial Sequence
  Description of Artificial Sequence: Synthetic oligonucleotide
  Antisense strand to SEQ ID NO: 1404374
uggaccauggaguauuuac

SEQ ID NO: 1404376 - RNA, 19 nt, Artificial Sequence
  Description of Artificial Sequence: Synthetic oligonucleotide
  Sense strand starting at position 879 of SEQ ID NO: 1243253
cacaguggguccucaaacu

SEQ ID NO: 1404377 - RNA, 19 nt, Artificial Sequence
  Description of Artificial Sequence: Synthetic oligonucleotide
  Antisense strand to SEQ ID NO: 1404376
aguuugaggacccacugug

SEQ ID NO: 1404378 - RNA, 19 nt, Artificial Sequence
  Description of Artificial Sequence: Synthetic oligonucleotide
  Sense strand starting at position 886 of SEQ ID NO: 1243253
gguccucaaacucgagaga

SEQ ID NO: 1404379 - RNA, 19 nt, Artificial Sequence
  Description of Artificial Sequence: Synthetic oligonucleotide
  Antisense strand to SEQ ID NO: 1404378
ucucucgaguuugaggacc

SEQ ID NO: 1404380 - RNA, 19 nt, Artificial Sequence
  Description of Artificial Sequence: Synthetic oligonucleotide
  Sense strand starting at position 924 of SEQ ID NO: 1243253
uggguagggaucuguuaag

SEQ ID NO: 1404381 - RNA, 19 nt, Artificial Sequence
  Description of Artificial Sequence: Synthetic oligonucleotide
  Antisense strand to SEQ ID NO: 1404380
cuuaacagaucccuaccca

SEQ ID NO: 1404382 - RNA, 19 nt, Artificial Sequence
  Description of Artificial Sequence: Synthetic oligonucleotide
  Sense strand starting at position 1034 of SEQ ID NO: 1243253
cuacuaagaguuuggaaca

SEQ ID NO: 1404383 - RNA, 19 nt, Artificial Sequence
  Description of Artificial Sequence: Synthetic oligonucleotide
  Antisense strand to SEQ ID NO: 1404382
uguuccaaacucuuaguag

SEQ ID NO: 1404384 - RNA, 19 nt, Artificial Sequence
  Description of Artificial Sequence: Synthetic oligonucleotide
  Sense strand starting at position 1597 of SEQ ID NO: 1243253
gaucuugaagucugguaac

SEQ ID NO: 1404385 - RNA, 19 nt, Artificial Sequence
  Description of Artificial Sequence: Synthetic oligonucleotide
  Antisense strand to SEQ ID NO: 1404384
guuaccagacuucaagauc

SEQ ID NO: 1404386 - RNA, 19 nt, Artificial Sequence
  Description of Artificial Sequence: Synthetic oligonucleotide
  Sense strand starting at position 2096 of SEQ ID NO: 1243253
cugcaucauguccauauau

SEQ ID NO: 1404387 - RNA, 19 nt, Artificial Sequence
  Description of Artificial Sequence: Synthetic oligonucleotide
  Antisense strand to SEQ ID NO: 1404386
auauauggacaugaugcag

SEQ ID NO: 1404388 - RNA, 19 nt, Artificial Sequence
  Description of Artificial Sequence: Synthetic oligonucleotide
  Sense strand starting at position 2098 of SEQ ID NO: 1243253
gcaucauguccauauaugg

SEQ ID NO: 1404389 - RNA, 19 nt, Artificial Sequence
  Description of Artificial Sequence: Synthetic oligonucleotide
  Antisense strand to SEQ ID NO: 1404388
ccauauauggacaugaugc

SEQ ID NO: 1404390 - RNA, 19 nt, Artificial Sequence
  Description of Artificial Sequence: Synthetic oligonucleotide
  Sense strand starting at position 2181 of SEQ ID NO: 1243253
agaugacuccuccguggga

SEQ ID NO: 1404391 - RNA, 19 nt, Artificial Sequence
  Description of Artificial Sequence: Synthetic oligonucleotide
  Antisense strand to SEQ ID NO: 1404390
ucccacggaggagucaucu

SEQ ID NO: 1404392 - RNA, 19 nt, Artificial Sequence
  Description of Artificial Sequence: Synthetic oligonucleotide
  Sense strand starting at position 2248 of SEQ ID NO: 1243253
gccuguuccaugccggauu

SEQ ID NO: 1404393 - RNA, 19 nt, Artificial Sequence
  Description of Artificial Sequence: Synthetic oligonucleotide
  Antisense strand to SEQ ID NO: 1404392
aauccggcauggaacaggc

SEQ ID NO: 1404394 - RNA, 19 nt, Artificial Sequence
  Description of Artificial Sequence: Synthetic oligonucleotide
  Sense strand starting at position 2275 of SEQ ID NO: 1243253
ggcccugguauauagugau

SEQ ID NO: 1404395 - RNA, 19 nt, Artificial Sequence
  Description of Artificial Sequence: Synthetic oligonucleotide
  Antisense strand to SEQ ID NO: 1404394
aucacuauauaccagggcc

SEQ ID NO: 1404396 - RNA, 19 nt, Artificial Sequence
  Description of Artificial Sequence: Synthetic oligonucleotide
  Sense strand starting at position 2302 of SEQ ID NO: 1243253
cagacaugcccuuguuaag

SEQ ID NO: 1404397 - RNA, 19 nt, Artificial Sequence
  Description of Artificial Sequence: Synthetic oligonucleotide
  Antisense strand to SEQ ID NO: 1404396
cuuaacaagggcaugucug

SEQ ID NO: 1404398 - RNA, 19 nt, Artificial Sequence
  Description of Artificial Sequence: Synthetic oligonucleotide
  Sense strand starting at position 2716 of SEQ ID NO: 1243253
acuccugaccuugagcaaa

SEQ ID NO: 1404399 - RNA, 19 nt, Artificial Sequence
  Description of Artificial Sequence: Synthetic oligonucleotide
  Antisense strand to SEQ ID NO: 1404398
uuugcucaaggucaggagu

SEQ ID NO: 1404400 - RNA, 19 nt, Artificial Sequence
  Description of Artificial Sequence: Synthetic oligonucleotide
  Sense strand starting at position 2887 of SEQ ID NO: 1243253
cggguuucugaggauaugu

SEQ ID NO: 1404401 - RNA, 19 nt, Artificial Sequence
  Description of Artificial Sequence: Synthetic oligonucleotide
  Antisense strand to SEQ ID NO: 1404400
acauauccucagaaacccg

SEQ ID NO: 1404402 - RNA, 19 nt, Artificial Sequence
  Description of Artificial Sequence: Synthetic oligonucleotide
  Sense strand starting at position 2897 of SEQ ID NO: 1243253
aggauaugugcugggagaa

SEQ ID NO: 1404403 - RNA, 19 nt, Artificial Sequence
  Description of Artificial Sequence: Synthetic oligonucleotide
  Antisense strand to SEQ ID NO: 1404402
uucucccagcacauauccu

SEQ ID NO: 1404404 - RNA, 19 nt, Artificial Sequence
  Description of Artificial Sequence: Synthetic oligonucleotide
  Sense strand starting at position 2898 of SEQ ID NO: 1243253
ggauaugugcugggagaac

SEQ ID NO: 1404405 - RNA, 19 nt, Artificial Sequence
  Description of Artificial Sequence: Synthetic oligonucleotide
  Antisense strand to SEQ ID NO: 1404404
guucucccagcacauaucc

SEQ ID NO: 1404406 - RNA, 19 nt, Artificial Sequence
  Description of Artificial Sequence: Synthetic oligonucleotide
  Sense strand starting at position 2970 of SEQ ID NO: 1243253
acccuaaauggaugcuaua

SEQ ID NO: 1404407 - RNA, 19 nt, Artificial Sequence
  Description of Artificial Sequence: Synthetic oligonucleotide
  Antisense strand to SEQ ID NO: 1404406
uauagcauccauuuagggu

SEQ ID NO: 1404408 - RNA, 19 nt, Artificial Sequence
  Description of Artificial Sequence: Synthetic oligonucleotide
  Sense strand starting at position 3056 of SEQ ID NO: 1243253
ugugcaguucuguuucuau

SEQ ID NO: 1404409 - RNA, 19 nt, Artificial Sequence
  Description of Artificial Sequence: Synthetic oligonucleotide
  Antisense strand to SEQ ID NO: 1404408
auagaaacagaacugcaca

SEQ ID NO: 1404410 - RNA, 19 nt, Artificial Sequence
  Description of Artificial Sequence: Synthetic oligonucleotide
  Sense strand starting at position 3185 of SEQ ID NO: 1243253
ugcuuuggaacuugauaga

SEQ ID NO: 1404411 - RNA, 19 nt, Artificial Sequence
  Description of Artificial Sequence: Synthetic oligonucleotide
  Antisense strand to SEQ ID NO: 1404410
ucuaucaaguuccaaagca

SEQ ID NO: 1404412 - RNA, 19 nt, Artificial Sequence
  Description of Artificial Sequence: Synthetic oligonucleotide
  Sense strand starting at position 3765 of SEQ ID NO: 1243253
ugguuuggcuacuuaaaca

SEQ ID NO: 1404413 - RNA, 19 nt, Artificial Sequence
  Description of Artificial Sequence: Synthetic oligonucleotide
  Antisense strand to SEQ ID NO: 1404412
uguuuaaguagccaaacca

SEQ ID NO: 1404414 - RNA, 19 nt, Artificial Sequence
  Description of Artificial Sequence: Synthetic oligonucleotide
  Sense strand starting at position 3796 of SEQ ID NO: 1243253
gagugaguuggguggaagu

SEQ ID NO: 1404415 - RNA, 19 nt, Artificial Sequence
  Description of Artificial Sequence: Synthetic oligonucleotide
  Antisense strand to SEQ ID NO: 1404414
acuuccacccaacucacuc

SEQ ID NO: 1404416 - RNA, 19 nt, Artificial Sequence
  Description of Artificial Sequence: Synthetic oligonucleotide
  Sense strand starting at position 3798 of SEQ ID NO: 1243253
gugaguuggguggaaguuu

SEQ ID NO: 1404417 - RNA, 19 nt, Artificial Sequence
  Description of Artificial Sequence: Synthetic oligonucleotide
  Antisense strand to SEQ ID NO: 1404416
aaacuuccacccaacucac

SEQ ID NO: 1404418 - RNA, 19 nt, Artificial Sequence
  Description of Artificial Sequence: Synthetic oligonucleotide
  Sense strand starting at position 3828 of SEQ ID NO: 1243253
uaaggagucagaggugauu

SEQ ID NO: 1404419 - RNA, 19 nt, Artificial Sequence
  Description of Artificial Sequence: Synthetic oligonucleotide
  Antisense strand to SEQ ID NO: 1404418
aaucaccucugacuccuua

SEQ ID NO: 1404420 - RNA, 19 nt, Artificial Sequence
  Description of Artificial Sequence: Synthetic oligonucleotide
  Sense strand starting at position 3905 of SEQ ID NO: 1243253
gaugacauauguuugccaa

SEQ ID NO: 1404421 - RNA, 19 nt, Artificial Sequence
  Description of Artificial Sequence: Synthetic oligonucleotide
  Antisense strand to SEQ ID NO: 1404420
uuggcaaacauaugucauc

SEQ ID NO: 1404422 - RNA, 19 nt, Artificial Sequence
  Description of Artificial Sequence: Synthetic oligonucleotide
  Sense strand starting at position 3906 of SEQ ID NO: 1243253
augacauauguuugccaac

SEQ ID NO: 1404423 - RNA, 19 nt, Artificial Sequence
  Description of Artificial Sequence: Synthetic oligonucleotide
  Antisense strand to SEQ ID NO: 1404422
guuggcaaacauaugucau

SEQ ID NO: 1404424 - RNA, 19 nt, Artificial Sequence
  Description of Artificial Sequence: Synthetic oligonucleotide
  Sense strand starting at position 205 of SEQ ID NO: 1243254
agcgaaacuccgucuguuu

SEQ ID NO: 1404425 - RNA, 19 nt, Artificial Sequence
  Description of Artificial Sequence: Synthetic oligonucleotide
  Antisense strand to SEQ ID NO: 1404424
aaacagacggaguuucgcu

SEQ ID NO: 1404426 - RNA, 19 nt, Artificial Sequence
  Description of Artificial Sequence: Synthetic oligonucleotide
  Sense strand starting at position 253 of SEQ ID NO: 1243254
gaaacucguugcuuccuaa

SEQ ID NO: 1404427 - RNA, 19 nt, Artificial Sequence
  Description of Artificial Sequence: Synthetic oligonucleotide
  Antisense strand to SEQ ID NO: 1404426
uuaggaagcaacgaguuuc

SEQ ID NO: 1404428 - RNA, 19 nt, Artificial Sequence
  Description of Artificial Sequence: Synthetic oligonucleotide
  Sense strand starting at position 256 of SEQ ID NO: 1243254
acucguugcuuccuaaaga

SEQ ID NO: 1404429 - RNA, 19 nt, Artificial Sequence
  Description of Artificial Sequence: Synthetic oligonucleotide
  Antisense strand to SEQ ID NO: 1404428
ucuuuaggaagcaacgagu

SEQ ID NO: 1404430 - RNA, 19 nt, Artificial Sequence
  Description of Artificial Sequence: Synthetic oligonucleotide
  Sense strand starting at position 264 of SEQ ID NO: 1243254
cuuccuaaagauuggucau

SEQ ID NO: 1404431 - RNA, 19 nt, Artificial Sequence
  Description of Artificial Sequence: Synthetic oligonucleotide
  Antisense strand to SEQ ID NO: 1404430
augaccaaucuuuaggaag

SEQ ID NO: 1404432 - RNA, 19 nt, Artificial Sequence
  Description of Artificial Sequence: Synthetic oligonucleotide
  Sense strand starting at position 395 of SEQ ID NO: 1243254
cuuccugauccuggaaucu

SEQ ID NO: 1404433 - RNA, 19 nt, Artificial Sequence
  Description of Artificial Sequence: Synthetic oligonucleotide
  Antisense strand to SEQ ID NO: 1404432
agauuccaggaucaggaag

SEQ ID NO: 1404434 - RNA, 19 nt, Artificial Sequence
  Description of Artificial Sequence: Synthetic oligonucleotide
  Sense strand starting at position 415 of SEQ ID NO: 1243254
ugauguaaggauugugaga

SEQ ID NO: 1404435 - RNA, 19 nt, Artificial Sequence
  Description of Artificial Sequence: Synthetic oligonucleotide
  Antisense strand to SEQ ID NO: 1404434
ucucacaauccuuacauca

SEQ ID NO: 1404436 - RNA, 19 nt, Artificial Sequence
  Description of Artificial Sequence: Synthetic oligonucleotide
  Sense strand starting at position 437 of SEQ ID NO: 1243254
ggagguuaucuuggguugu

SEQ ID NO: 1404437 - RNA, 19 nt, Artificial Sequence
  Description of Artificial Sequence: Synthetic oligonucleotide
  Antisense strand to SEQ ID NO: 1404436
acaacccaagauaaccucc

SEQ ID NO: 1404438 - RNA, 19 nt, Artificial Sequence
  Description of Artificial Sequence: Synthetic oligonucleotide
  Sense strand starting at position 443 of SEQ ID NO: 1243254
uaucuuggguuguccagaa

SEQ ID NO: 1404439 - RNA, 19 nt, Artificial Sequence
  Description of Artificial Sequence: Synthetic oligonucleotide
  Antisense strand to SEQ ID NO: 1404438
uucuggacaacccaagaua

SEQ ID NO: 1404440 - RNA, 19 nt, Artificial Sequence
  Description of Artificial Sequence: Synthetic oligonucleotide
  Sense strand starting at position 447 of SEQ ID NO: 1243254
uuggguuguccagaaaguc

SEQ ID NO: 1404441 - RNA, 19 nt, Artificial Sequence
  Description of Artificial Sequence: Synthetic oligonucleotide
  Antisense strand to SEQ ID NO: 1404440
gacuuucuggacaacccaa

SEQ ID NO: 1404442 - RNA, 19 nt, Artificial Sequence
  Description of Artificial Sequence: Synthetic oligonucleotide
  Sense strand starting at position 459 of SEQ ID NO: 1243254
gaaagucccucagugcaau

SEQ ID NO: 1404443 - RNA, 19 nt, Artificial Sequence
  Description of Artificial Sequence: Synthetic oligonucleotide
  Antisense strand to SEQ ID NO: 1404442
auugcacugagggacuuuc

SEQ ID NO: 1404444 - RNA, 19 nt, Artificial Sequence
  Description of Artificial Sequence: Synthetic oligonucleotide
  Sense strand starting at position 835 of SEQ ID NO: 1243254
cuuggcaucuuugugacuu

SEQ ID NO: 1404445 - RNA, 19 nt, Artificial Sequence
  Description of Artificial Sequence: Synthetic oligonucleotide
  Antisense strand to SEQ ID NO: 1404444
aagucacaaagaugccaag

SEQ ID NO: 1404446 - RNA, 19 nt, Artificial Sequence
  Description of Artificial Sequence: Synthetic oligonucleotide
  Sense strand starting at position 839 of SEQ ID NO: 1243254
gcaucuuugugacuuaauu

SEQ ID NO: 1404447 - RNA, 19 nt, Artificial Sequence
  Description of Artificial Sequence: Synthetic oligonucleotide
  Antisense strand to SEQ ID NO: 1404446
aauuaagucacaaagaugc

SEQ ID NO: 1404448 - RNA, 19 nt, Artificial Sequence
  Description of Artificial Sequence: Synthetic oligonucleotide
  Sense strand starting at position 933 of SEQ ID NO: 1243254
agacuaauguggccuuuga

SEQ ID NO: 1404449 - RNA, 19 nt, Artificial Sequence
  Description of Artificial Sequence: Synthetic oligonucleotide
  Antisense strand to SEQ ID NO: 1404448
ucaaaggccacauuagucu

SEQ ID NO: 1404450 - RNA, 19 nt, Artificial Sequence
  Description of Artificial Sequence: Synthetic oligonucleotide
  Sense strand starting at position 1017 of SEQ ID NO: 1243254
ucuccuagguguccugaga

SEQ ID NO: 1404451 - RNA, 19 nt, Artificial Sequence
  Description of Artificial Sequence: Synthetic oligonucleotide
  Antisense strand to SEQ ID NO: 1404450
ucucaggacaccuaggaga

SEQ ID NO: 1404452 - RNA, 19 nt, Artificial Sequence
  Description of Artificial Sequence: Synthetic oligonucleotide
  Sense strand starting at position 1121 of SEQ ID NO: 1243254
gugugauucgugcaaagaa

SEQ ID NO: 1404453 - RNA, 19 nt, Artificial Sequence
  Description of Artificial Sequence: Synthetic oligonucleotide
  Antisense strand to SEQ ID NO: 1404452
uucuuugcacgaaucacac

SEQ ID NO: 1404454 - RNA, 19 nt, Artificial Sequence
  Description of Artificial Sequence: Synthetic oligonucleotide
  Sense strand starting at position 1169 of SEQ ID NO: 1243254
agcuuuauugggcagguga

SEQ ID NO: 1404455 - RNA, 19 nt, Artificial Sequence
  Description of Artificial Sequence: Synthetic oligonucleotide
  Antisense strand to SEQ ID NO: 1404454
ucaccugcccaauaaagcu

SEQ ID NO: 1404456 - RNA, 19 nt, Artificial Sequence
  Description of Artificial Sequence: Synthetic oligonucleotide
  Sense strand starting at position 1280 of SEQ ID NO: 1243254
guguuucuugggcagguga

SEQ ID NO: 1404457 - RNA, 19 nt, Artificial Sequence
  Description of Artificial Sequence: Synthetic oligonucleotide
  Antisense strand to SEQ ID NO: 1404456
ucaccugcccaagaaacac

SEQ ID NO: 1404458 - RNA, 19 nt, Artificial Sequence
  Description of Artificial Sequence: Synthetic oligonucleotide
  Sense strand starting at position 1291 of SEQ ID NO: 1243254
gcaggugacuuucucuuaa

SEQ ID NO: 1404459 - RNA, 19 nt, Artificial Sequence
  Description of Artificial Sequence: Synthetic oligonucleotide
  Antisense strand to SEQ ID NO: 1404458
uuaagagaaagucaccugc

SEQ ID NO: 1404460 - RNA, 19 nt, Artificial Sequence
  Description of Artificial Sequence: Synthetic oligonucleotide
  Sense strand starting at position 1293 of SEQ ID NO: 1243254
aggugacuuucucuuaacu

SEQ ID NO: 1404461 - RNA, 19 nt, Artificial Sequence
  Description of Artificial Sequence: Synthetic oligonucleotide
  Antisense strand to SEQ ID NO: 1404460
aguuaagagaaagucaccu

SEQ ID NO: 1404462 - RNA, 19 nt, Artificial Sequence
  Description of Artificial Sequence: Synthetic oligonucleotide
  Sense strand starting at position 1417 of SEQ ID NO: 1243254
agcuuagugccuucugcau

SEQ ID NO: 1404463 - RNA, 19 nt, Artificial Sequence
  Description of Artificial Sequence: Synthetic oligonucleotide
  Antisense strand to SEQ ID NO: 1404462
augcagaaggcacuaagcu

SEQ ID NO: 1404464 - RNA, 19 nt, Artificial Sequence
  Description of Artificial Sequence: Synthetic oligonucleotide
  Sense strand starting at position 1885 of SEQ ID NO: 1243254
gaccaugguguugggagau

SEQ ID NO: 1404465 - RNA, 19 nt, Artificial Sequence
  Description of Artificial Sequence: Synthetic oligonucleotide
  Antisense strand to SEQ ID NO: 1404464
aucucccaacaccaugguc

SEQ ID NO: 1404466 - RNA, 19 nt, Artificial Sequence
  Description of Artificial Sequence: Synthetic oligonucleotide
  Sense strand starting at position 2280 of SEQ ID NO: 1243254
cgcacauugucauuuggaa

SEQ ID NO: 1404467 - RNA, 19 nt, Artificial Sequence
  Description of Artificial Sequence: Synthetic oligonucleotide
  Antisense strand to SEQ ID NO: 1404466
uuccaaaugacaaugugcg

SEQ ID NO: 1404468 - RNA, 19 nt, Artificial Sequence
  Description of Artificial Sequence: Synthetic oligonucleotide
  Sense strand starting at position 2284 of SEQ ID NO: 1243254
cauugucauuuggaagcuu

SEQ ID NO: 1404469 - RNA, 19 nt, Artificial Sequence
  Description of Artificial Sequence: Synthetic oligonucleotide
  Antisense strand to SEQ ID NO: 1404468
aagcuuccaaaugacaaug

SEQ ID NO: 1404470 - RNA, 19 nt, Artificial Sequence
  Description of Artificial Sequence: Synthetic oligonucleotide
  Sense strand starting at position 2293 of SEQ ID NO: 1243254
uuggaagcuuccuugccaa

SEQ ID NO: 1404471 - RNA, 19 nt, Artificial Sequence
  Description of Artificial Sequence: Synthetic oligonucleotide
  Antisense strand to SEQ ID NO: 1404470
uuggcaaggaagcuuccaa

SEQ ID NO: 1404472 - RNA, 19 nt, Artificial Sequence
  Description of Artificial Sequence: Synthetic oligonucleotide
  Sense strand starting at position 2546 of SEQ ID NO: 1243254
uugugcaaucauggaucau

SEQ ID NO: 1404473 - RNA, 19 nt, Artificial Sequence
  Description of Artificial Sequence: Synthetic oligonucleotide
  Antisense strand to SEQ ID NO: 1404472
augauccaugauugcacaa

SEQ ID NO: 1404474 - RNA, 19 nt, Artificial Sequence
  Description of Artificial Sequence: Synthetic oligonucleotide
  Sense strand starting at position 2550 of SEQ ID NO: 1243254
gcaaucauggaucauagca

SEQ ID NO: 1404475 - RNA, 19 nt, Artificial Sequence
  Description of Artificial Sequence: Synthetic oligonucleotide
  Antisense strand to SEQ ID NO: 1404474
ugcuaugauccaugauugc

SEQ ID NO: 1404476 - RNA, 19 nt, Artificial Sequence
  Description of Artificial Sequence: Synthetic oligonucleotide
  Sense strand starting at position 2833 of SEQ ID NO: 1243254
gcaugaagaaguugaguug

SEQ ID NO: 1404477 - RNA, 19 nt, Artificial Sequence
  Description of Artificial Sequence: Synthetic oligonucleotide
  Antisense strand to SEQ ID NO: 1404476
caacucaacuucuucaugc

SEQ ID NO: 1404478 - RNA, 19 nt, Artificial Sequence
  Description of Artificial Sequence: Synthetic oligonucleotide
  Sense strand starting at position 3021 of SEQ ID NO: 1243254
cucauugaacuuugaugau

SEQ ID NO: 1404479 - RNA, 19 nt, Artificial Sequence
  Description of Artificial Sequence: Synthetic oligonucleotide
  Antisense strand to SEQ ID NO: 1404478
aucaucaaaguucaaugag

SEQ ID NO: 1404480 - RNA, 19 nt, Artificial Sequence
  Description of Artificial Sequence: Synthetic oligonucleotide
  Sense strand starting at position 3154 of SEQ ID NO: 1243254
cagagaucaucccagauga

SEQ ID NO: 1404481 - RNA, 19 nt, Artificial Sequence
  Description of Artificial Sequence: Synthetic oligonucleotide
  Antisense strand to SEQ ID NO: 1404480
ucaucugggaugaucucug

SEQ ID NO: 1404482 - RNA, 19 nt, Artificial Sequence
  Description of Artificial Sequence: Synthetic oligonucleotide
  Sense strand starting at position 3193 of SEQ ID NO: 1243254
ucacgaggguccuuagaag

SEQ ID NO: 1404483 - RNA, 19 nt, Artificial Sequence
  Description of Artificial Sequence: Synthetic oligonucleotide
  Antisense strand to SEQ ID NO: 1404482
cuucuaaggacccucguga

SEQ ID NO: 1404484 - RNA, 19 nt, Artificial Sequence
  Description of Artificial Sequence: Synthetic oligonucleotide
  Sense strand starting at position 3421 of SEQ ID NO: 1243254
ucagaauucugaccugcag

SEQ ID NO: 1404485 - RNA, 19 nt, Artificial Sequence
  Description of Artificial Sequence: Synthetic oligonucleotide
  Antisense strand to SEQ ID NO: 1404484
cugcaggucagaauucuga

SEQ ID NO: 1404486 - RNA, 19 nt, Artificial Sequence
  Description of Artificial Sequence: Synthetic oligonucleotide
  Sense strand starting at position 3433 of SEQ ID NO: 1243254
ccugcagaccuguaagaua

SEQ ID NO: 1404487 - RNA, 19 nt, Artificial Sequence
  Description of Artificial Sequence: Synthetic oligonucleotide
  Antisense strand to SEQ ID NO: 1404486
uaucuuacaggucugcagg

SEQ ID NO: 1404488 - RNA, 19 nt, Artificial Sequence
  Description of Artificial Sequence: Synthetic oligonucleotide
  Sense strand starting at position 3454 of SEQ ID NO: 1243254
gcauuuauguuguuuaaag

SEQ ID NO: 1404489 - RNA, 19 nt, Artificial Sequence
  Description of Artificial Sequence: Synthetic oligonucleotide
  Antisense strand to SEQ ID NO: 1404488
cuuuaaacaacauaaaugc

SEQ ID NO: 1404490 - RNA, 19 nt, Artificial Sequence
  Description of Artificial Sequence: Synthetic oligonucleotide
  Sense strand starting at position 3482 of SEQ ID NO: 1243254
uugugaugaucugucacag

SEQ ID NO: 1404491 - RNA, 19 nt, Artificial Sequence
  Description of Artificial Sequence: Synthetic oligonucleotide
  Antisense strand to SEQ ID NO: 1404490
cugugacagaucaucacaa

SEQ ID NO: 1404492 - RNA, 19 nt, Artificial Sequence
  Description of Artificial Sequence: Synthetic oligonucleotide
  Sense strand starting at position 3547 of SEQ ID NO: 1243254
aggaggugaugggugauau

SEQ ID NO: 1404493 - RNA, 19 nt, Artificial Sequence
  Description of Artificial Sequence: Synthetic oligonucleotide
  Antisense strand to SEQ ID NO: 1404492
auaucacccaucaccuccu

SEQ ID NO: 1404494 - RNA, 19 nt, Artificial Sequence
  Description of Artificial Sequence: Synthetic oligonucleotide
  Sense strand starting at position 3548 of SEQ ID NO: 1243254
ggaggugaugggugauauu

SEQ ID NO: 1404495 - RNA, 19 nt, Artificial Sequence
  Description of Artificial Sequence: Synthetic oligonucleotide
  Antisense strand to SEQ ID NO: 1404494
aauaucacccaucaccucc

SEQ ID NO: 1404496 - RNA, 19 nt, Artificial Sequence
  Description of Artificial Sequence: Synthetic oligonucleotide
  Sense strand starting at position 3589 of SEQ ID NO: 1243254
gcugccucucuuuagggau

SEQ ID NO: 1404497 - RNA, 19 nt, Artificial Sequence
  Description of Artificial Sequence: Synthetic oligonucleotide
  Antisense strand to SEQ ID NO: 1404496
aucccuaaagagaggcagc

SEQ ID NO: 1404498 - RNA, 19 nt, Artificial Sequence
  Description of Artificial Sequence: Synthetic oligonucleotide
  Sense strand starting at position 3606 of SEQ ID NO: 1243254
auaagaagguccuuuauga

SEQ ID NO: 1404499 - RNA, 19 nt, Artificial Sequence
  Description of Artificial Sequence: Synthetic oligonucleotide
  Antisense strand to SEQ ID NO: 1404498
ucauaaaggaccuucuuau

SEQ ID NO: 1404500 - RNA, 19 nt, Artificial Sequence
  Description of Artificial Sequence: Synthetic oligonucleotide
  Sense strand starting at position 3616 of SEQ ID NO: 1243254
ccuuuaugauggcccucaa

SEQ ID NO: 1404501 - RNA, 19 nt, Artificial Sequence
  Description of Artificial Sequence: Synthetic oligonucleotide
  Antisense strand to SEQ ID NO: 1404500
uugagggccaucauaaagg

SEQ ID NO: 1404502 - RNA, 19 nt, Artificial Sequence
  Description of Artificial Sequence: Synthetic oligonucleotide
  Sense strand starting at position 3695 of SEQ ID NO: 1243254
gucaaaucuccauggccaa

SEQ ID NO: 1404503 - RNA, 19 nt, Artificial Sequence
  Description of Artificial Sequence: Synthetic oligonucleotide
  Antisense strand to SEQ ID NO: 1404502
uuggccauggagauuugac

SEQ ID NO: 1404504 - RNA, 19 nt, Artificial Sequence
  Description of Artificial Sequence: Synthetic oligonucleotide
  Sense strand starting at position 369 of SEQ ID NO: 1243255
ucauguuuccugggcaaau

SEQ ID NO: 1404505 - RNA, 19 nt, Artificial Sequence
  Description of Artificial Sequence: Synthetic oligonucleotide
  Antisense strand to SEQ ID NO: 1404504
auuugcccaggaaacauga

SEQ ID NO: 1404506 - RNA, 19 nt, Artificial Sequence
  Description of Artificial Sequence: Synthetic oligonucleotide
  Sense strand starting at position 370 of SEQ ID NO: 1243255
cauguuuccugggcaaaug

SEQ ID NO: 1404507 - RNA, 19 nt, Artificial Sequence
  Description of Artificial Sequence: Synthetic oligonucleotide
  Antisense strand to SEQ ID NO: 1404506
cauuugcccaggaaacaug

SEQ ID NO: 1404508 - RNA, 19 nt, Artificial Sequence
  Description of Artificial Sequence: Synthetic oligonucleotide
  Sense strand starting at position 371 of SEQ ID NO: 1243255
auguuuccugggcaaauga

SEQ ID NO: 1404509 - RNA, 19 nt, Artificial Sequence
  Description of Artificial Sequence: Synthetic oligonucleotide
  Antisense strand to SEQ ID NO: 1404508
ucauuugcccaggaaacau

SEQ ID NO: 1404510 - RNA, 19 nt, Artificial Sequence
  Description of Artificial Sequence: Synthetic oligonucleotide
  Sense strand starting at position 437 of SEQ ID NO: 1243255
aaccgagucauuugugggu

SEQ ID NO: 1404511 - RNA, 19 nt, Artificial Sequence
  Description of Artificial Sequence: Synthetic oligonucleotide
  Antisense strand to SEQ ID NO: 1404510
acccacaaaugacucgguu

SEQ ID NO: 1404512 - RNA, 19 nt, Artificial Sequence
  Description of Artificial Sequence: Synthetic oligonucleotide
  Sense strand starting at position 572 of SEQ ID NO: 1243255
aaccgaggcuucccugaaa

SEQ ID NO: 1404513 - RNA, 19 nt, Artificial Sequence
  Description of Artificial Sequence: Synthetic oligonucleotide
  Antisense strand to SEQ ID NO: 1404512
uuucagggaagccucgguu

SEQ ID NO: 1404514 - RNA, 19 nt, Artificial Sequence
  Description of Artificial Sequence: Synthetic oligonucleotide
  Sense strand starting at position 1126 of SEQ ID NO: 1243255
ucaucugacccaugaguag

SEQ ID NO: 1404515 - RNA, 19 nt, Artificial Sequence
  Description of Artificial Sequence: Synthetic oligonucleotide
  Antisense strand to SEQ ID NO: 1404514
cuacucaugggucagauga

SEQ ID NO: 1404516 - RNA, 19 nt, Artificial Sequence
  Description of Artificial Sequence: Synthetic oligonucleotide
  Sense strand starting at position 1261 of SEQ ID NO: 1243255
ccaagccaguguucuuaaa

SEQ ID NO: 1404517 - RNA, 19 nt, Artificial Sequence
  Description of Artificial Sequence: Synthetic oligonucleotide
  Antisense strand to SEQ ID NO: 1404516
uuuaagaacacuggcuugg

SEQ ID NO: 1404518 - RNA, 19 nt, Artificial Sequence
  Description of Artificial Sequence: Synthetic oligonucleotide
  Sense strand starting at position 1365 of SEQ ID NO: 1243255
cugggacucgcagaggaau

SEQ ID NO: 1404519 - RNA, 19 nt, Artificial Sequence
  Description of Artificial Sequence: Synthetic oligonucleotide
  Antisense strand to SEQ ID NO: 1404518
auuccucugcgagucccag

SEQ ID NO: 1404520 - RNA, 19 nt, Artificial Sequence
  Description of Artificial Sequence: Synthetic oligonucleotide
  Sense strand starting at position 1381 of SEQ ID NO: 1243255
aauuucccgucccagagau

SEQ ID NO: 1404521 - RNA, 19 nt, Artificial Sequence
  Description of Artificial Sequence: Synthetic oligonucleotide
  Antisense strand to SEQ ID NO: 1404520
aucucugggacgggaaauu

SEQ ID NO: 1404522 - RNA, 19 nt, Artificial Sequence
  Description of Artificial Sequence: Synthetic oligonucleotide
  Sense strand starting at position 1400 of SEQ ID NO: 1243255
gggaagauuuggcggagau

SEQ ID NO: 1404523 - RNA, 19 nt, Artificial Sequence
  Description of Artificial Sequence: Synthetic oligonucleotide
  Antisense strand to SEQ ID NO: 1404522
aucuccgccaaaucuuccc

SEQ ID NO: 1404524 - RNA, 19 nt, Artificial Sequence
  Description of Artificial Sequence: Synthetic oligonucleotide
  Sense strand starting at position 1865 of SEQ ID NO: 1243255
aggagaaguuauccugacu

SEQ ID NO: 1404525 - RNA, 19 nt, Artificial Sequence
  Description of Artificial Sequence: Synthetic oligonucleotide
  Antisense strand to SEQ ID NO: 1404524
agucaggauaacuucuccu

SEQ ID NO: 1404526 - RNA, 19 nt, Artificial Sequence
  Description of Artificial Sequence: Synthetic oligonucleotide
  Sense strand starting at position 2235 of SEQ ID NO: 1243255
uggagaaaguuucccuugu

SEQ ID NO: 1404527 - RNA, 19 nt, Artificial Sequence
  Description of Artificial Sequence: Synthetic oligonucleotide
  Antisense strand to SEQ ID NO: 1404526
acaagggaaacuuucucca

SEQ ID NO: 1404528 - RNA, 19 nt, Artificial Sequence
  Description of Artificial Sequence: Synthetic oligonucleotide
  Sense strand starting at position 2236 of SEQ ID NO: 1243255
ggagaaaguuucccuugua

SEQ ID NO: 1404529 - RNA, 19 nt, Artificial Sequence
  Description of Artificial Sequence: Synthetic oligonucleotide
  Antisense strand to SEQ ID NO: 1404528
uacaagggaaacuuucucc

SEQ ID NO: 1404530 - RNA, 19 nt, Artificial Sequence
  Description of Artificial Sequence: Synthetic oligonucleotide
  Sense strand starting at position 2237 of SEQ ID NO: 1243255
gagaaaguuucccuuguag

SEQ ID NO: 1404531 - RNA, 19 nt, Artificial Sequence
  Description of Artificial Sequence: Synthetic oligonucleotide
  Antisense strand to SEQ ID NO: 1404530
cuacaagggaaacuuucuc

SEQ ID NO: 1404532 - RNA, 19 nt, Artificial Sequence
  Description of Artificial Sequence: Synthetic oligonucleotide
  Sense strand starting at position 2352 of SEQ ID NO: 1243255
ucuguugaguuucuugacu

SEQ ID NO: 1404533 - RNA, 19 nt, Artificial Sequence
  Description of Artificial Sequence: Synthetic oligonucleotide
  Antisense strand to SEQ ID NO: 1404532
agucaagaaacucaacaga

SEQ ID NO: 1404534 - RNA, 19 nt, Artificial Sequence
  Description of Artificial Sequence: Synthetic oligonucleotide
  Sense strand starting at position 2357 of SEQ ID NO: 1243255
ugaguuucuugacuguuaa

SEQ ID NO: 1404535 - RNA, 19 nt, Artificial Sequence
  Description of Artificial Sequence: Synthetic oligonucleotide
  Antisense strand to SEQ ID NO: 1404534
uuaacagucaagaaacuca

SEQ ID NO: 1404536 - RNA, 19 nt, Artificial Sequence
  Description of Artificial Sequence: Synthetic oligonucleotide
  Sense strand starting at position 2358 of SEQ ID NO: 1243255
gaguuucuugacuguuaac

SEQ ID NO: 1404537 - RNA, 19 nt, Artificial Sequence
  Description of Artificial Sequence: Synthetic oligonucleotide
  Antisense strand to SEQ ID NO: 1404536
guuaacagucaagaaacuc

SEQ ID NO: 1404538 - RNA, 19 nt, Artificial Sequence
  Description of Artificial Sequence: Synthetic oligonucleotide
  Sense strand starting at position 2368 of SEQ ID NO: 1243255
acuguuaacccuuggaaau

SEQ ID NO: 1404539 - RNA, 19 nt, Artificial Sequence
  Description of Artificial Sequence: Synthetic oligonucleotide
  Antisense strand to SEQ ID NO: 1404538
auuuccaaggguuaacagu

SEQ ID NO: 1404540 - RNA, 19 nt, Artificial Sequence
  Description of Artificial Sequence: Synthetic oligonucleotide
  Sense strand starting at position 2369 of SEQ ID NO: 1243255
cuguuaacccuuggaaaua

SEQ ID NO: 1404541 - RNA, 19 nt, Artificial Sequence
  Description of Artificial Sequence: Synthetic oligonucleotide
  Antisense strand to SEQ ID NO: 1404540
uauuuccaaggguuaacag

SEQ ID NO: 1404542 - RNA, 19 nt, Artificial Sequence
  Description of Artificial Sequence: Synthetic oligonucleotide
  Sense strand starting at position 2478 of SEQ ID NO: 1243255
ugugaaaucuucuugaaag

SEQ ID NO: 1404543 - RNA, 19 nt, Artificial Sequence
  Description of Artificial Sequence: Synthetic oligonucleotide
  Antisense strand to SEQ ID NO: 1404542
cuuucaagaagauuucaca

SEQ ID NO: 1404544 - RNA, 19 nt, Artificial Sequence
  Description of Artificial Sequence: Synthetic oligonucleotide
  Sense strand starting at position 2574 of SEQ ID NO: 1243255
ugcuuugucccugacugau

SEQ ID NO: 1404545 - RNA, 19 nt, Artificial Sequence
  Description of Artificial Sequence: Synthetic oligonucleotide
  Antisense strand to SEQ ID NO: 1404544
aucagucagggacaaagca

SEQ ID NO: 1404546 - RNA, 19 nt, Artificial Sequence
  Description of Artificial Sequence: Synthetic oligonucleotide
  Sense strand starting at position 2711 of SEQ ID NO: 1243255
acaucugugcagcacaauu

SEQ ID NO: 1404547 - RNA, 19 nt, Artificial Sequence
  Description of Artificial Sequence: Synthetic oligonucleotide
  Antisense strand to SEQ ID NO: 1404546
aauugugcugcacagaugu

SEQ ID NO: 1404548 - RNA, 19 nt, Artificial Sequence
  Description of Artificial Sequence: Synthetic oligonucleotide
  Sense strand starting at position 2747 of SEQ ID NO: 1243255
gguuuaggacuuugucuuu

SEQ ID NO: 1404549 - RNA, 19 nt, Artificial Sequence
  Description of Artificial Sequence: Synthetic oligonucleotide
  Antisense strand to SEQ ID NO: 1404548
aaagacaaaguccuaaacc

SEQ ID NO: 1404550 - RNA, 19 nt, Artificial Sequence
  Description of Artificial Sequence: Synthetic oligonucleotide
  Sense strand starting at position 2771 of SEQ ID NO: 1243255
auugaaaugagucguuugu

SEQ ID NO: 1404551 - RNA, 19 nt, Artificial Sequence
  Description of Artificial Sequence: Synthetic oligonucleotide
  Antisense strand to SEQ ID NO: 1404550
acaaacgacucauuucaau

SEQ ID NO: 1404552 - RNA, 19 nt, Artificial Sequence
  Description of Artificial Sequence: Synthetic oligonucleotide
  Sense strand starting at position 2773 of SEQ ID NO: 1243255
ugaaaugagucguuuguac

SEQ ID NO: 1404553 - RNA, 19 nt, Artificial Sequence
  Description of Artificial Sequence: Synthetic oligonucleotide
  Antisense strand to SEQ ID NO: 1404552
guacaaacgacucauuuca

SEQ ID NO: 1404554 - RNA, 19 nt, Artificial Sequence
  Description of Artificial Sequence: Synthetic oligonucleotide
  Sense strand starting at position 2775 of SEQ ID NO: 1243255
aaaugagucguuuguacac

SEQ ID NO: 1404555 - RNA, 19 nt, Artificial Sequence
  Description of Artificial Sequence: Synthetic oligonucleotide
  Antisense strand to SEQ ID NO: 1404554
guguacaaacgacucauuu

SEQ ID NO: 1404556 - RNA, 19 nt, Artificial Sequence
  Description of Artificial Sequence: Synthetic oligonucleotide
  Sense strand starting at position 2781 of SEQ ID NO: 1243255
gucguuuguacacugcaau

SEQ ID NO: 1404557 - RNA, 19 nt, Artificial Sequence
  Description of Artificial Sequence: Synthetic oligonucleotide
  Antisense strand to SEQ ID NO: 1404556
auugcaguguacaaacgac

SEQ ID NO: 1404558 - RNA, 19 nt, Artificial Sequence
  Description of Artificial Sequence: Synthetic oligonucleotide
  Sense strand starting at position 3090 of SEQ ID NO: 1243255
agcgaaacuccgucuguuu

SEQ ID NO: 1404559 - RNA, 19 nt, Artificial Sequence
  Description of Artificial Sequence: Synthetic oligonucleotide
  Antisense strand to SEQ ID NO: 1404558
aaacagacggaguuucgcu

SEQ ID NO: 1404560 - RNA, 19 nt, Artificial Sequence
  Description of Artificial Sequence: Synthetic oligonucleotide
  Sense strand starting at position 3138 of SEQ ID NO: 1243255
gaaacucguugcuuccuaa

SEQ ID NO: 1404561 - RNA, 19 nt, Artificial Sequence
  Description of Artificial Sequence: Synthetic oligonucleotide
  Antisense strand to SEQ ID NO: 1404560
uuaggaagcaacgaguuuc

SEQ ID NO: 1404562 - RNA, 19 nt, Artificial Sequence
  Description of Artificial Sequence: Synthetic oligonucleotide
  Sense strand starting at position 3141 of SEQ ID NO: 1243255
acucguugcuuccuaaaga

SEQ ID NO: 1404563 - RNA, 19 nt, Artificial Sequence
  Description of Artificial Sequence: Synthetic oligonucleotide
  Antisense strand to SEQ ID NO: 1404562
ucuuuaggaagcaacgagu

SEQ ID NO: 1404564 - RNA, 19 nt, Artificial Sequence
  Description of Artificial Sequence: Synthetic oligonucleotide
  Sense strand starting at position 3149 of SEQ ID NO: 1243255
cuuccuaaagauuggucau

SEQ ID NO: 1404565 - RNA, 19 nt, Artificial Sequence
  Description of Artificial Sequence: Synthetic oligonucleotide
  Antisense strand to SEQ ID NO: 1404564
augaccaaucuuuaggaag

SEQ ID NO: 1404566 - RNA, 19 nt, Artificial Sequence
  Description of Artificial Sequence: Synthetic oligonucleotide
  Sense strand starting at position 3280 of SEQ ID NO: 1243255
cuuccugauccuggaaucu

SEQ ID NO: 1404567 - RNA, 19 nt, Artificial Sequence
  Description of Artificial Sequence: Synthetic oligonucleotide
  Antisense strand to SEQ ID NO: 1404566
agauuccaggaucaggaag

SEQ ID NO: 1404568 - RNA, 19 nt, Artificial Sequence
  Description of Artificial Sequence: Synthetic oligonucleotide
  Sense strand starting at position 3300 of SEQ ID NO: 1243255
ugauguaaggauugugaga

SEQ ID NO: 1404569 - RNA, 19 nt, Artificial Sequence
  Description of Artificial Sequence: Synthetic oligonucleotide
  Antisense strand to SEQ ID NO: 1404568
ucucacaauccuuacauca

SEQ ID NO: 1404570 - RNA, 19 nt, Artificial Sequence
  Description of Artificial Sequence: Synthetic oligonucleotide
  Sense strand starting at position 3322 of SEQ ID NO: 1243255
ggagguuaucuuggguugu

SEQ ID NO: 1404571 - RNA, 19 nt, Artificial Sequence
  Description of Artificial Sequence: Synthetic oligonucleotide
  Antisense strand to SEQ ID NO: 1404570
acaacccaagauaaccucc

SEQ ID NO: 1404572 - RNA, 19 nt, Artificial Sequence
  Description of Artificial Sequence: Synthetic oligonucleotide
  Sense strand starting at position 3328 of SEQ ID NO: 1243255
uaucuuggguuguccagaa

SEQ ID NO: 1404573 - RNA, 19 nt, Artificial Sequence
  Description of Artificial Sequence: Synthetic oligonucleotide
  Antisense strand to SEQ ID NO: 1404572
uucuggacaacccaagaua

SEQ ID NO: 1404574 - RNA, 19 nt, Artificial Sequence
  Description of Artificial Sequence: Synthetic oligonucleotide
  Sense strand starting at position 3332 of SEQ ID NO: 1243255
uuggguuguccagaaaguc

SEQ ID NO: 1404575 - RNA, 19 nt, Artificial Sequence
  Description of Artificial Sequence: Synthetic oligonucleotide
  Antisense strand to SEQ ID NO: 1404574
gacuuucuggacaacccaa

SEQ ID NO: 1404576 - RNA, 19 nt, Artificial Sequence
  Description of Artificial Sequence: Synthetic oligonucleotide
  Sense strand starting at position 3344 of SEQ ID NO: 1243255
gaaagucccucagugcaau

SEQ ID NO: 1404577 - RNA, 19 nt, Artificial Sequence
  Description of Artificial Sequence: Synthetic oligonucleotide
  Antisense strand to SEQ ID NO: 1404576
auugcacugagggacuuuc

SEQ ID NO: 1404578 - RNA, 19 nt, Artificial Sequence
  Description of Artificial Sequence: Synthetic oligonucleotide
  Sense strand starting at position 3724 of SEQ ID NO: 1243255
gcaucuuugugacuuaauu

SEQ ID NO: 1404579 - RNA, 19 nt, Artificial Sequence
  Description of Artificial Sequence: Synthetic oligonucleotide
  Antisense strand to SEQ ID NO: 1404578
aauuaagucacaaagaugc

SEQ ID NO: 1404580 - RNA, 19 nt, Artificial Sequence
  Description of Artificial Sequence: Synthetic oligonucleotide
  Sense strand starting at position 3818 of SEQ ID NO: 1243255
agacuaauguggccuuuga

SEQ ID NO: 1404581 - RNA, 19 nt, Artificial Sequence
  Description of Artificial Sequence: Synthetic oligonucleotide
  Antisense strand to SEQ ID NO: 1404580
ucaaaggccacauuagucu

SEQ ID NO: 1404582 - RNA, 19 nt, Artificial Sequence
  Description of Artificial Sequence: Synthetic oligonucleotide
  Sense strand starting at position 3902 of SEQ ID NO: 1243255
ucuccuagguguccugaga

SEQ ID NO: 1404583 - RNA, 19 nt, Artificial Sequence
  Description of Artificial Sequence: Synthetic oligonucleotide
  Antisense strand to SEQ ID NO: 1404582
ucucaggacaccuaggaga

SEQ ID NO: 1404584 - RNA, 19 nt, Artificial Sequence
  Description of Artificial Sequence: Synthetic oligonucleotide
  Sense strand starting at position 223 of SEQ ID NO: 1243256
gcugaaugcccucauccau

SEQ ID NO: 1404585 - RNA, 19 nt, Artificial Sequence
  Description of Artificial Sequence: Synthetic oligonucleotide
  Antisense strand to SEQ ID NO: 1404584
auggaugagggcauucagc

SEQ ID NO: 1404586 - RNA, 19 nt, Artificial Sequence
  Description of Artificial Sequence: Synthetic oligonucleotide
  Sense strand starting at position 263 of SEQ ID NO: 1243256
agcagucuacacuacagau

SEQ ID NO: 1404587 - RNA, 19 nt, Artificial Sequence
  Description of Artificial Sequence: Synthetic oligonucleotide
  Antisense strand to SEQ ID NO: 1404586
aucuguaguguagacugcu

SEQ ID NO: 1404588 - RNA, 19 nt, Artificial Sequence
  Description of Artificial Sequence: Synthetic oligonucleotide
  Sense strand starting at position 285 of SEQ ID NO: 1243256
ggagauauucucugaaccc

SEQ ID NO: 1404589 - RNA, 19 nt, Artificial Sequence
  Description of Artificial Sequence: Synthetic oligonucleotide
  Antisense strand to SEQ ID NO: 1404588
ggguucagagaauaucucc

SEQ ID NO: 1404590 - RNA, 19 nt, Artificial Sequence
  Description of Artificial Sequence: Synthetic oligonucleotide
  Sense strand starting at position 307 of SEQ ID NO: 1243256
cucauucuccaagaguugu

SEQ ID NO: 1404591 - RNA, 19 nt, Artificial Sequence
  Description of Artificial Sequence: Synthetic oligonucleotide
  Antisense strand to SEQ ID NO: 1404590
acaacucuuggagaaugag

SEQ ID NO: 1404592 - RNA, 19 nt, Artificial Sequence
  Description of Artificial Sequence: Synthetic oligonucleotide
  Sense strand starting at position 323 of SEQ ID NO: 1243256
uguaaacuugcauggccau

SEQ ID NO: 1404593 - RNA, 19 nt, Artificial Sequence
  Description of Artificial Sequence: Synthetic oligonucleotide
  Antisense strand to SEQ ID NO: 1404592
auggccaugcaaguuuaca

SEQ ID NO: 1404594 - RNA, 19 nt, Artificial Sequence
  Description of Artificial Sequence: Synthetic oligonucleotide
  Sense strand starting at position 324 of SEQ ID NO: 1243256
guaaacuugcauggccauu

SEQ ID NO: 1404595 - RNA, 19 nt, Artificial Sequence
  Description of Artificial Sequence: Synthetic oligonucleotide
  Antisense strand to SEQ ID NO: 1404594
aauggccaugcaaguuuac

SEQ ID NO: 1404596 - RNA, 19 nt, Artificial Sequence
  Description of Artificial Sequence: Synthetic oligonucleotide
  Sense strand starting at position 382 of SEQ ID NO: 1243256
uguauuagccgucagacug

SEQ ID NO: 1404597 - RNA, 19 nt, Artificial Sequence
  Description of Artificial Sequence: Synthetic oligonucleotide
  Antisense strand to SEQ ID NO: 1404596
cagucugacggcuaauaca

SEQ ID NO: 1404598 - RNA, 19 nt, Artificial Sequence
  Description of Artificial Sequence: Synthetic oligonucleotide
  Sense strand starting at position 497 of SEQ ID NO: 1243256
ggauaucgagucugggagu

SEQ ID NO: 1404599 - RNA, 19 nt, Artificial Sequence
  Description of Artificial Sequence: Synthetic oligonucleotide
  Antisense strand to SEQ ID NO: 1404598
acucccagacucgauaucc

SEQ ID NO: 1404600 - RNA, 19 nt, Artificial Sequence
  Description of Artificial Sequence: Synthetic oligonucleotide
  Sense strand starting at position 1048 of SEQ ID NO: 1243256
cuuagacucuaaugagaga

SEQ ID NO: 1404601 - RNA, 19 nt, Artificial Sequence
  Description of Artificial Sequence: Synthetic oligonucleotide
  Antisense strand to SEQ ID NO: 1404600
ucucucauuagagucuaag

SEQ ID NO: 1404602 - RNA, 19 nt, Artificial Sequence
  Description of Artificial Sequence: Synthetic oligonucleotide
  Sense strand starting at position 1051 of SEQ ID NO: 1243256
agacucuaaugagagagua

SEQ ID NO: 1404603 - RNA, 19 nt, Artificial Sequence
  Description of Artificial Sequence: Synthetic oligonucleotide
  Antisense strand to SEQ ID NO: 1404602
uacucucucauuagagucu

SEQ ID NO: 1404604 - RNA, 19 nt, Artificial Sequence
  Description of Artificial Sequence: Synthetic oligonucleotide
  Sense strand starting at position 1059 of SEQ ID NO: 1243256
augagagaguaauacaaau

SEQ ID NO: 1404605 - RNA, 19 nt, Artificial Sequence
  Description of Artificial Sequence: Synthetic oligonucleotide
  Antisense strand to SEQ ID NO: 1404604
auuuguauuacucucucau

SEQ ID NO: 1404606 - RNA, 19 nt, Artificial Sequence
  Description of Artificial Sequence: Synthetic oligonucleotide
  Sense strand starting at position 1102 of SEQ ID NO: 1243256
uacacagagcguuguagaa

SEQ ID NO: 1404607 - RNA, 19 nt, Artificial Sequence
  Description of Artificial Sequence: Synthetic oligonucleotide
  Antisense strand to SEQ ID NO: 1404606
uucuacaacgcucugugua

SEQ ID NO: 1404608 - RNA, 19 nt, Artificial Sequence
  Description of Artificial Sequence: Synthetic oligonucleotide
  Sense strand starting at position 1140 of SEQ ID NO: 1243256
gaaggacucugaggaaacu

SEQ ID NO: 1404609 - RNA, 19 nt, Artificial Sequence
  Description of Artificial Sequence: Synthetic oligonucleotide
  Antisense strand to SEQ ID NO: 1404608
aguuuccucagaguccuuc

SEQ ID NO: 1404610 - RNA, 19 nt, Artificial Sequence
  Description of Artificial Sequence: Synthetic oligonucleotide
  Sense strand starting at position 1149 of SEQ ID NO: 1243256
ugaggaaacuagcauuuga

SEQ ID NO: 1404611 - RNA, 19 nt, Artificial Sequence
  Description of Artificial Sequence: Synthetic oligonucleotide
  Antisense strand to SEQ ID NO: 1404610
ucaaaugcuaguuuccuca

SEQ ID NO: 1404612 - RNA, 19 nt, Artificial Sequence
  Description of Artificial Sequence: Synthetic oligonucleotide
  Sense strand starting at position 1992 of SEQ ID NO: 1243256
cuggaaagcuaucccauca

SEQ ID NO: 1404613 - RNA, 19 nt, Artificial Sequence
  Description of Artificial Sequence: Synthetic oligonucleotide
  Antisense strand to SEQ ID NO: 1404612
ugaugggauagcuuuccag

SEQ ID NO: 1404614 - RNA, 19 nt, Artificial Sequence
  Description of Artificial Sequence: Synthetic oligonucleotide
  Sense strand starting at position 2066 of SEQ ID NO: 1243256
cgcuguacuccgggugaag

SEQ ID NO: 1404615 - RNA, 19 nt, Artificial Sequence
  Description of Artificial Sequence: Synthetic oligonucleotide
  Antisense strand to SEQ ID NO: 1404614
cuucacccggaguacagcg

SEQ ID NO: 1404616 - RNA, 19 nt, Artificial Sequence
  Description of Artificial Sequence: Synthetic oligonucleotide
  Sense strand starting at position 2112 of SEQ ID NO: 1243256
gcucuugugcucgcuugua

SEQ ID NO: 1404617 - RNA, 19 nt, Artificial Sequence
  Description of Artificial Sequence: Synthetic oligonucleotide
  Antisense strand to SEQ ID NO: 1404616
uacaagcgagcacaagagc

SEQ ID NO: 1404618 - RNA, 19 nt, Artificial Sequence
  Description of Artificial Sequence: Synthetic oligonucleotide
  Sense strand starting at position 2114 of SEQ ID NO: 1243256
ucuugugcucgcuuguaaa

SEQ ID NO: 1404619 - RNA, 19 nt, Artificial Sequence
  Description of Artificial Sequence: Synthetic oligonucleotide
  Antisense strand to SEQ ID NO: 1404618
uuuacaagcgagcacaaga

SEQ ID NO: 1404620 - RNA, 19 nt, Artificial Sequence
  Description of Artificial Sequence: Synthetic oligonucleotide
  Sense strand starting at position 2198 of SEQ ID NO: 1243256
ggagaauaaugucuuccac

SEQ ID NO: 1404621 - RNA, 19 nt, Artificial Sequence
  Description of Artificial Sequence: Synthetic oligonucleotide
  Antisense strand to SEQ ID NO: 1404620
guggaagacauuauucucc

SEQ ID NO: 1404622 - RNA, 19 nt, Artificial Sequence
  Description of Artificial Sequence: Synthetic oligonucleotide
  Sense strand starting at position 2388 of SEQ ID NO: 1243256
ggaaguucugcgcccguca

SEQ ID NO: 1404623 - RNA, 19 nt, Artificial Sequence
  Description of Artificial Sequence: Synthetic oligonucleotide
  Antisense strand to SEQ ID NO: 1404622
ugacgggcgcagaacuucc

SEQ ID NO: 1404624 - RNA, 19 nt, Artificial Sequence
  Description of Artificial Sequence: Synthetic oligonucleotide
  Sense strand starting at position 2418 of SEQ ID NO: 1243256
gcagcguguccgccguaau

SEQ ID NO: 1404625 - RNA, 19 nt, Artificial Sequence
  Description of Artificial Sequence: Synthetic oligonucleotide
  Antisense strand to SEQ ID NO: 1404624
auuacggcggacacgcugc

SEQ ID NO: 1404626 - RNA, 19 nt, Artificial Sequence
  Description of Artificial Sequence: Synthetic oligonucleotide
  Sense strand starting at position 2667 of SEQ ID NO: 1243256
ugggcuucucaggauggua

SEQ ID NO: 1404627 - RNA, 19 nt, Artificial Sequence
  Description of Artificial Sequence: Synthetic oligonucleotide
  Antisense strand to SEQ ID NO: 1404626
uaccauccugagaagccca

SEQ ID NO: 1404628 - RNA, 19 nt, Artificial Sequence
  Description of Artificial Sequence: Synthetic oligonucleotide
  Sense strand starting at position 2669 of SEQ ID NO: 1243256
ggcuucucaggaugguaau

SEQ ID NO: 1404629 - RNA, 19 nt, Artificial Sequence
  Description of Artificial Sequence: Synthetic oligonucleotide
  Antisense strand to SEQ ID NO: 1404628
auuaccauccugagaagcc

SEQ ID NO: 1404630 - RNA, 19 nt, Artificial Sequence
  Description of Artificial Sequence: Synthetic oligonucleotide
  Sense strand starting at position 2791 of SEQ ID NO: 1243256
uguguuuacuacgugccua

SEQ ID NO: 1404631 - RNA, 19 nt, Artificial Sequence
  Description of Artificial Sequence: Synthetic oligonucleotide
  Antisense strand to SEQ ID NO: 1404630
uaggcacguaguaaacaca

SEQ ID NO: 1404632 - RNA, 19 nt, Artificial Sequence
  Description of Artificial Sequence: Synthetic oligonucleotide
  Sense strand starting at position 2796 of SEQ ID NO: 1243256
uuacuacgugccuacgaua

SEQ ID NO: 1404633 - RNA, 19 nt, Artificial Sequence
  Description of Artificial Sequence: Synthetic oligonucleotide
  Antisense strand to SEQ ID NO: 1404632
uaucguaggcacguaguaa

SEQ ID NO: 1404634 - RNA, 19 nt, Artificial Sequence
  Description of Artificial Sequence: Synthetic oligonucleotide
  Sense strand starting at position 2901 of SEQ ID NO: 1243256
gucagaugaugauaaggga

SEQ ID NO: 1404635 - RNA, 19 nt, Artificial Sequence
  Description of Artificial Sequence: Synthetic oligonucleotide
  Antisense strand to SEQ ID NO: 1404634
ucccuuaucaucaucugac

SEQ ID NO: 1404636 - RNA, 19 nt, Artificial Sequence
  Description of Artificial Sequence: Synthetic oligonucleotide
  Sense strand starting at position 2954 of SEQ ID NO: 1243256
gugccacuucagugagagu

SEQ ID NO: 1404637 - RNA, 19 nt, Artificial Sequence
  Description of Artificial Sequence: Synthetic oligonucleotide
  Antisense strand to SEQ ID NO: 1404636
acucucacugaaguggcac

SEQ ID NO: 1404638 - RNA, 19 nt, Artificial Sequence
  Description of Artificial Sequence: Synthetic oligonucleotide
  Sense strand starting at position 2965 of SEQ ID NO: 1243256
gugagagugucacugagga

SEQ ID NO: 1404639 - RNA, 19 nt, Artificial Sequence
  Description of Artificial Sequence: Synthetic oligonucleotide
  Antisense strand to SEQ ID NO: 1404638
uccucagugacacucucac

SEQ ID NO: 1404640 - RNA, 19 nt, Artificial Sequence
  Description of Artificial Sequence: Synthetic oligonucleotide
  Sense strand starting at position 2969 of SEQ ID NO: 1243256
gagugucacugaggaaaug

SEQ ID NO: 1404641 - RNA, 19 nt, Artificial Sequence
  Description of Artificial Sequence: Synthetic oligonucleotide
  Antisense strand to SEQ ID NO: 1404640
cauuuccucagugacacuc

SEQ ID NO: 1404642 - RNA, 19 nt, Artificial Sequence
  Description of Artificial Sequence: Synthetic oligonucleotide
  Sense strand starting at position 3011 of SEQ ID NO: 1243256
aggugaauggcaggguauu

SEQ ID NO: 1404643 - RNA, 19 nt, Artificial Sequence
  Description of Artificial Sequence: Synthetic oligonucleotide
  Antisense strand to SEQ ID NO: 1404642
aauacccugccauucaccu

SEQ ID NO: 1404644 - RNA, 19 nt, Artificial Sequence
  Description of Artificial Sequence: Synthetic oligonucleotide
  Sense strand starting at position 3023 of SEQ ID NO: 1243256
ggguauuccacauaucgag

SEQ ID NO: 1404645 - RNA, 19 nt, Artificial Sequence
  Description of Artificial Sequence: Synthetic oligonucleotide
  Antisense strand to SEQ ID NO: 1404644
cucgauauguggaauaccc

SEQ ID NO: 1404646 - RNA, 19 nt, Artificial Sequence
  Description of Artificial Sequence: Synthetic oligonucleotide
  Sense strand starting at position 3076 of SEQ ID NO: 1243256
gcccuuaagccguuucuuu

SEQ ID NO: 1404647 - RNA, 19 nt, Artificial Sequence
  Description of Artificial Sequence: Synthetic oligonucleotide
  Antisense strand to SEQ ID NO: 1404646
aaagaaacggcuuaagggc

SEQ ID NO: 1404648 - RNA, 19 nt, Artificial Sequence
  Description of Artificial Sequence: Synthetic oligonucleotide
  Sense strand starting at position 3168 of SEQ ID NO: 1243256
agguacuugcaaggacauu

SEQ ID NO: 1404649 - RNA, 19 nt, Artificial Sequence
  Description of Artificial Sequence: Synthetic oligonucleotide
  Antisense strand to SEQ ID NO: 1404648
aauguccuugcaaguaccu

SEQ ID NO: 1404650 - RNA, 19 nt, Artificial Sequence
  Description of Artificial Sequence: Synthetic oligonucleotide
  Sense strand starting at position 3268 of SEQ ID NO: 1243256
aaggaauaguccuggauag

SEQ ID NO: 1404651 - RNA, 19 nt, Artificial Sequence
  Description of Artificial Sequence: Synthetic oligonucleotide
  Antisense strand to SEQ ID NO: 1404650
cuauccaggacuauuccuu

SEQ ID NO: 1404652 - RNA, 19 nt, Artificial Sequence
  Description of Artificial Sequence: Synthetic oligonucleotide
  Sense strand starting at position 3272 of SEQ ID NO: 1243256
aauaguccuggauagcaua

SEQ ID NO: 1404653 - RNA, 19 nt, Artificial Sequence
  Description of Artificial Sequence: Synthetic oligonucleotide
  Antisense strand to SEQ ID NO: 1404652
uaugcuauccaggacuauu

SEQ ID NO: 1404654 - RNA, 19 nt, Artificial Sequence
  Description of Artificial Sequence: Synthetic oligonucleotide
  Sense strand starting at position 3286 of SEQ ID NO: 1243256
gcauaucaaguuugaggua

SEQ ID NO: 1404655 - RNA, 19 nt, Artificial Sequence
  Description of Artificial Sequence: Synthetic oligonucleotide
  Antisense strand to SEQ ID NO: 1404654
uaccucaaacuugauaugc

SEQ ID NO: 1404656 - RNA, 19 nt, Artificial Sequence
  Description of Artificial Sequence: Synthetic oligonucleotide
  Sense strand starting at position 3299 of SEQ ID NO: 1243256
gagguagauuuaggucuag

SEQ ID NO: 1404657 - RNA, 19 nt, Artificial Sequence
  Description of Artificial Sequence: Synthetic oligonucleotide
  Antisense strand to SEQ ID NO: 1404656
cuagaccuaaaucuaccuc

SEQ ID NO: 1404658 - RNA, 19 nt, Artificial Sequence
  Description of Artificial Sequence: Synthetic oligonucleotide
  Sense strand starting at position 3465 of SEQ ID NO: 1243256
cgccuaauccuagcacgua

SEQ ID NO: 1404659 - RNA, 19 nt, Artificial Sequence
  Description of Artificial Sequence: Synthetic oligonucleotide
  Antisense strand to SEQ ID NO: 1404658
uacgugcuaggauuaggcg

SEQ ID NO: 1404660 - RNA, 19 nt, Artificial Sequence
  Description of Artificial Sequence: Synthetic oligonucleotide
  Sense strand starting at position 3708 of SEQ ID NO: 1243256
aggaaauuagcugggcauu

SEQ ID NO: 1404661 - RNA, 19 nt, Artificial Sequence
  Description of Artificial Sequence: Synthetic oligonucleotide
  Antisense strand to SEQ ID NO: 1404660
aaugcccagcuaauuuccu

SEQ ID NO: 1404662 - RNA, 19 nt, Artificial Sequence
  Description of Artificial Sequence: Synthetic oligonucleotide
  Sense strand starting at position 3825 of SEQ ID NO: 1243256
ugcccucugguuugagcaa

SEQ ID NO: 1404663 - RNA, 19 nt, Artificial Sequence
  Description of Artificial Sequence: Synthetic oligonucleotide
  Antisense strand to SEQ ID NO: 1404662
uugcucaaaccagagggca

SEQ ID NO: 1404664 - RNA, 19 nt, Artificial Sequence
  Description of Artificial Sequence: Synthetic oligonucleotide
  Sense strand starting at position 363 of SEQ ID NO: 1243257
gcugaaugcccucauccau

SEQ ID NO: 1404665 - RNA, 19 nt, Artificial Sequence
  Description of Artificial Sequence: Synthetic oligonucleotide
  Antisense strand to SEQ ID NO: 1404664
auggaugagggcauucagc

SEQ ID NO: 1404666 - RNA, 19 nt, Artificial Sequence
  Description of Artificial Sequence: Synthetic oligonucleotide
  Sense strand starting at position 403 of SEQ ID NO: 1243257
agcagucuacacuacagau

SEQ ID NO: 1404667 - RNA, 19 nt, Artificial Sequence
  Description of Artificial Sequence: Synthetic oligonucleotide
  Antisense strand to SEQ ID NO: 1404666
aucuguaguguagacugcu

SEQ ID NO: 1404668 - RNA, 19 nt, Artificial Sequence
  Description of Artificial Sequence: Synthetic oligonucleotide
  Sense strand starting at position 425 of SEQ ID NO: 1243257
ggagauauucucugaaccc

SEQ ID NO: 1404669 - RNA, 19 nt, Artificial Sequence
  Description of Artificial Sequence: Synthetic oligonucleotide
  Antisense strand to SEQ ID NO: 1404668
ggguucagagaauaucucc

SEQ ID NO: 1404670 - RNA, 19 nt, Artificial Sequence
  Description of Artificial Sequence: Synthetic oligonucleotide
  Sense strand starting at position 447 of SEQ ID NO: 1243257
cucauucuccaagaguugu

SEQ ID NO: 1404671 - RNA, 19 nt, Artificial Sequence
  Description of Artificial Sequence: Synthetic oligonucleotide
  Antisense strand to SEQ ID NO: 1404670
acaacucuuggagaaugag

SEQ ID NO: 1404672 - RNA, 19 nt, Artificial Sequence
  Description of Artificial Sequence: Synthetic oligonucleotide
  Sense strand starting at position 463 of SEQ ID NO: 1243257
uguaaacuugcauggccau

SEQ ID NO: 1404673 - RNA, 19 nt, Artificial Sequence
  Description of Artificial Sequence: Synthetic oligonucleotide
  Antisense strand to SEQ ID NO: 1404672
auggccaugcaaguuuaca

SEQ ID NO: 1404674 - RNA, 19 nt, Artificial Sequence
  Description of Artificial Sequence: Synthetic oligonucleotide
  Sense strand starting at position 464 of SEQ ID NO: 1243257
guaaacuugcauggccauu

SEQ ID NO: 1404675 - RNA, 19 nt, Artificial Sequence
  Description of Artificial Sequence: Synthetic oligonucleotide
  Antisense strand to SEQ ID NO: 1404674
aauggccaugcaaguuuac

SEQ ID NO: 1404676 - RNA, 19 nt, Artificial Sequence
  Description of Artificial Sequence: Synthetic oligonucleotide
  Sense strand starting at position 522 of SEQ ID NO: 1243257
uguauuagccgucagacug

SEQ ID NO: 1404677 - RNA, 19 nt, Artificial Sequence
  Description of Artificial Sequence: Synthetic oligonucleotide
  Antisense strand to SEQ ID NO: 1404676
cagucugacggcuaauaca

SEQ ID NO: 1404678 - RNA, 19 nt, Artificial Sequence
  Description of Artificial Sequence: Synthetic oligonucleotide
  Sense strand starting at position 637 of SEQ ID NO: 1243257
ggauaucgagucugggagu

SEQ ID NO: 1404679 - RNA, 19 nt, Artificial Sequence
  Description of Artificial Sequence: Synthetic oligonucleotide
  Antisense strand to SEQ ID NO: 1404678
acucccagacucgauaucc

SEQ ID NO: 1404680 - RNA, 19 nt, Artificial Sequence
  Description of Artificial Sequence: Synthetic oligonucleotide
  Sense strand starting at position 1188 of SEQ ID NO: 1243257
cuuagacucuaaugagaga

SEQ ID NO: 1404681 - RNA, 19 nt, Artificial Sequence
  Description of Artificial Sequence: Synthetic oligonucleotide
  Antisense strand to SEQ ID NO: 1404680
ucucucauuagagucuaag

SEQ ID NO: 1404682 - RNA, 19 nt, Artificial Sequence
  Description of Artificial Sequence: Synthetic oligonucleotide
  Sense strand starting at position 1191 of SEQ ID NO: 1243257
agacucuaaugagagagua

SEQ ID NO: 1404683 - RNA, 19 nt, Artificial Sequence
  Description of Artificial Sequence: Synthetic oligonucleotide
  Antisense strand to SEQ ID NO: 1404682
uacucucucauuagagucu

SEQ ID NO: 1404684 - RNA, 19 nt, Artificial Sequence
  Description of Artificial Sequence: Synthetic oligonucleotide
  Sense strand starting at position 1199 of SEQ ID NO: 1243257
augagagaguaauacaaau

SEQ ID NO: 1404685 - RNA, 19 nt, Artificial Sequence
  Description of Artificial Sequence: Synthetic oligonucleotide
  Antisense strand to SEQ ID NO: 1404684
auuuguauuacucucucau

SEQ ID NO: 1404686 - RNA, 19 nt, Artificial Sequence
  Description of Artificial Sequence: Synthetic oligonucleotide
  Sense strand starting at position 1242 of SEQ ID NO: 1243257
uacacagagcguuguagaa

SEQ ID NO: 1404687 - RNA, 19 nt, Artificial Sequence
  Description of Artificial Sequence: Synthetic oligonucleotide
  Antisense strand to SEQ ID NO: 1404686
uucuacaacgcucugugua

SEQ ID NO: 1404688 - RNA, 19 nt, Artificial Sequence
  Description of Artificial Sequence: Synthetic oligonucleotide
  Sense strand starting at position 1280 of SEQ ID NO: 1243257
gaaggacucugaggaaacu

SEQ ID NO: 1404689 - RNA, 19 nt, Artificial Sequence
  Description of Artificial Sequence: Synthetic oligonucleotide
  Antisense strand to SEQ ID NO: 1404688
aguuuccucagaguccuuc

SEQ ID NO: 1404690 - RNA, 19 nt, Artificial Sequence
  Description of Artificial Sequence: Synthetic oligonucleotide
  Sense strand starting at position 1289 of SEQ ID NO: 1243257
ugaggaaacuagcauuuga

SEQ ID NO: 1404691 - RNA, 19 nt, Artificial Sequence
  Description of Artificial Sequence: Synthetic oligonucleotide
  Antisense strand to SEQ ID NO: 1404690
ucaaaugcuaguuuccuca

SEQ ID NO: 1404692 - RNA, 19 nt, Artificial Sequence
  Description of Artificial Sequence: Synthetic oligonucleotide
  Sense strand starting at position 2132 of SEQ ID NO: 1243257
cuggaaagcuaucccauca

SEQ ID NO: 1404693 - RNA, 19 nt, Artificial Sequence
  Description of Artificial Sequence: Synthetic oligonucleotide
  Antisense strand to SEQ ID NO: 1404692
ugaugggauagcuuuccag

SEQ ID NO: 1404694 - RNA, 19 nt, Artificial Sequence
  Description of Artificial Sequence: Synthetic oligonucleotide
  Sense strand starting at position 2206 of SEQ ID NO: 1243257
cgcuguacuccgggugaag

SEQ ID NO: 1404695 - RNA, 19 nt, Artificial Sequence
  Description of Artificial Sequence: Synthetic oligonucleotide
  Antisense strand to SEQ ID NO: 1404694
cuucacccggaguacagcg

SEQ ID NO: 1404696 - RNA, 19 nt, Artificial Sequence
  Description of Artificial Sequence: Synthetic oligonucleotide
  Sense strand starting at position 2252 of SEQ ID NO: 1243257
gcucuugugcucgcuugua

SEQ ID NO: 1404697 - RNA, 19 nt, Artificial Sequence
  Description of Artificial Sequence: Synthetic oligonucleotide
  Antisense strand to SEQ ID NO: 1404696
uacaagcgagcacaagagc

SEQ ID NO: 1404698 - RNA, 19 nt, Artificial Sequence
  Description of Artificial Sequence: Synthetic oligonucleotide
  Sense strand starting at position 2254 of SEQ ID NO: 1243257
ucuugugcucgcuuguaaa

SEQ ID NO: 1404699 - RNA, 19 nt, Artificial Sequence
  Description of Artificial Sequence: Synthetic oligonucleotide
  Antisense strand to SEQ ID NO: 1404698
uuuacaagcgagcacaaga

SEQ ID NO: 1404700 - RNA, 19 nt, Artificial Sequence
  Description of Artificial Sequence: Synthetic oligonucleotide
  Sense strand starting at position 2338 of SEQ ID NO: 1243257
ggagaauaaugucuuccac

SEQ ID NO: 1404701 - RNA, 19 nt, Artificial Sequence
  Description of Artificial Sequence: Synthetic oligonucleotide
  Antisense strand to SEQ ID NO: 1404700
guggaagacauuauucucc

SEQ ID NO: 1404702 - RNA, 19 nt, Artificial Sequence
  Description of Artificial Sequence: Synthetic oligonucleotide
  Sense strand starting at position 2528 of SEQ ID NO: 1243257
ggaaguucugcgcccguca

SEQ ID NO: 1404703 - RNA, 19 nt, Artificial Sequence
  Description of Artificial Sequence: Synthetic oligonucleotide
  Antisense strand to SEQ ID NO: 1404702
ugacgggcgcagaacuucc

SEQ ID NO: 1404704 - RNA, 19 nt, Artificial Sequence
  Description of Artificial Sequence: Synthetic oligonucleotide
  Sense strand starting at position 2558 of SEQ ID NO: 1243257
gcagcguguccgccguaau

SEQ ID NO: 1404705 - RNA, 19 nt, Artificial Sequence
  Description of Artificial Sequence: Synthetic oligonucleotide
  Antisense strand to SEQ ID NO: 1404704
auuacggcggacacgcugc

SEQ ID NO: 1404706 - RNA, 19 nt, Artificial Sequence
  Description of Artificial Sequence: Synthetic oligonucleotide
  Sense strand starting at position 2807 of SEQ ID NO: 1243257
ugggcuucucaggauggua

SEQ ID NO: 1404707 - RNA, 19 nt, Artificial Sequence
  Description of Artificial Sequence: Synthetic oligonucleotide
  Antisense strand to SEQ ID NO: 1404706
uaccauccugagaagccca

SEQ ID NO: 1404708 - RNA, 19 nt, Artificial Sequence
  Description of Artificial Sequence: Synthetic oligonucleotide
  Sense strand starting at position 2809 of SEQ ID NO: 1243257
ggcuucucaggaugguaau

SEQ ID NO: 1404709 - RNA, 19 nt, Artificial Sequence
  Description of Artificial Sequence: Synthetic oligonucleotide
  Antisense strand to SEQ ID NO: 1404708
auuaccauccugagaagcc

SEQ ID NO: 1404710 - RNA, 19 nt, Artificial Sequence
  Description of Artificial Sequence: Synthetic oligonucleotide
  Sense strand starting at position 2931 of SEQ ID NO: 1243257
uguguuuacuacgugccua

SEQ ID NO: 1404711 - RNA, 19 nt, Artificial Sequence
  Description of Artificial Sequence: Synthetic oligonucleotide
  Antisense strand to SEQ ID NO: 1404710
uaggcacguaguaaacaca

SEQ ID NO: 1404712 - RNA, 19 nt, Artificial Sequence
  Description of Artificial Sequence: Synthetic oligonucleotide
  Sense strand starting at position 2936 of SEQ ID NO: 1243257
uuacuacgugccuacgaua

SEQ ID NO: 1404713 - RNA, 19 nt, Artificial Sequence
  Description of Artificial Sequence: Synthetic oligonucleotide
  Antisense strand to SEQ ID NO: 1404712
uaucguaggcacguaguaa

SEQ ID NO: 1404714 - RNA, 19 nt, Artificial Sequence
  Description of Artificial Sequence: Synthetic oligonucleotide
  Sense strand starting at position 3041 of SEQ ID NO: 1243257
gucagaugaugauaaggga

SEQ ID NO: 1404715 - RNA, 19 nt, Artificial Sequence
  Description of Artificial Sequence: Synthetic oligonucleotide
  Antisense strand to SEQ ID NO: 1404714
ucccuuaucaucaucugac

SEQ ID NO: 1404716 - RNA, 19 nt, Artificial Sequence
  Description of Artificial Sequence: Synthetic oligonucleotide
  Sense strand starting at position 3094 of SEQ ID NO: 1243257
gugccacuucagugagagu

SEQ ID NO: 1404717 - RNA, 19 nt, Artificial Sequence
  Description of Artificial Sequence: Synthetic oligonucleotide
  Antisense strand to SEQ ID NO: 1404716
acucucacugaaguggcac

SEQ ID NO: 1404718 - RNA, 19 nt, Artificial Sequence
  Description of Artificial Sequence: Synthetic oligonucleotide
  Sense strand starting at position 3105 of SEQ ID NO: 1243257
gugagagugucacugagga

SEQ ID NO: 1404719 - RNA, 19 nt, Artificial Sequence
  Description of Artificial Sequence: Synthetic oligonucleotide
  Antisense strand to SEQ ID NO: 1404718
uccucagugacacucucac

SEQ ID NO: 1404720 - RNA, 19 nt, Artificial Sequence
  Description of Artificial Sequence: Synthetic oligonucleotide
  Sense strand starting at position 3109 of SEQ ID NO: 1243257
gagugucacugaggaaaug

SEQ ID NO: 1404721 - RNA, 19 nt, Artificial Sequence
  Description of Artificial Sequence: Synthetic oligonucleotide
  Antisense strand to SEQ ID NO: 1404720
cauuuccucagugacacuc

SEQ ID NO: 1404722 - RNA, 19 nt, Artificial Sequence
  Description of Artificial Sequence: Synthetic oligonucleotide
  Sense strand starting at position 3151 of SEQ ID NO: 1243257
aggugaauggcaggguauu

SEQ ID NO: 1404723 - RNA, 19 nt, Artificial Sequence
  Description of Artificial Sequence: Synthetic oligonucleotide
  Antisense strand to SEQ ID NO: 1404722
aauacccugccauucaccu

SEQ ID NO: 1404724 - RNA, 19 nt, Artificial Sequence
  Description of Artificial Sequence: Synthetic oligonucleotide
  Sense strand starting at position 3163 of SEQ ID NO: 1243257
ggguauuccacauaucgag

SEQ ID NO: 1404725 - RNA, 19 nt, Artificial Sequence
  Description of Artificial Sequence: Synthetic oligonucleotide
  Antisense strand to SEQ ID NO: 1404724
cucgauauguggaauaccc

SEQ ID NO: 1404726 - RNA, 19 nt, Artificial Sequence
  Description of Artificial Sequence: Synthetic oligonucleotide
  Sense strand starting at position 3216 of SEQ ID NO: 1243257
gcccuuaagccguuucuuu

SEQ ID NO: 1404727 - RNA, 19 nt, Artificial Sequence
  Description of Artificial Sequence: Synthetic oligonucleotide
  Antisense strand to SEQ ID NO: 1404726
aaagaaacggcuuaagggc

SEQ ID NO: 1404728 - RNA, 19 nt, Artificial Sequence
  Description of Artificial Sequence: Synthetic oligonucleotide
  Sense strand starting at position 3308 of SEQ ID NO: 1243257
agguacuugcaaggacauu

SEQ ID NO: 1404729 - RNA, 19 nt, Artificial Sequence
  Description of Artificial Sequence: Synthetic oligonucleotide
  Antisense strand to SEQ ID NO: 1404728
aauguccuugcaaguaccu

SEQ ID NO: 1404730 - RNA, 19 nt, Artificial Sequence
  Description of Artificial Sequence: Synthetic oligonucleotide
  Sense strand starting at position 3408 of SEQ ID NO: 1243257
aaggaauaguccuggauag

SEQ ID NO: 1404731 - RNA, 19 nt, Artificial Sequence
  Description of Artificial Sequence: Synthetic oligonucleotide
  Antisense strand to SEQ ID NO: 1404730
cuauccaggacuauuccuu

SEQ ID NO: 1404732 - RNA, 19 nt, Artificial Sequence
  Description of Artificial Sequence: Synthetic oligonucleotide
  Sense strand starting at position 3412 of SEQ ID NO: 1243257
aauaguccuggauagcaua

SEQ ID NO: 1404733 - RNA, 19 nt, Artificial Sequence
  Description of Artificial Sequence: Synthetic oligonucleotide
  Antisense strand to SEQ ID NO: 1404732
uaugcuauccaggacuauu

SEQ ID NO: 1404734 - RNA, 19 nt, Artificial Sequence
  Description of Artificial Sequence: Synthetic oligonucleotide
  Sense strand starting at position 3426 of SEQ ID NO: 1243257
gcauaucaaguuugaggua

SEQ ID NO: 1404735 - RNA, 19 nt, Artificial Sequence
  Description of Artificial Sequence: Synthetic oligonucleotide
  Antisense strand to SEQ ID NO: 1404734
uaccucaaacuugauaugc

SEQ ID NO: 1404736 - RNA, 19 nt, Artificial Sequence
  Description of Artificial Sequence: Synthetic oligonucleotide
  Sense strand starting at position 3439 of SEQ ID NO: 1243257
gagguagauuuaggucuag

SEQ ID NO: 1404737 - RNA, 19 nt, Artificial Sequence
  Description of Artificial Sequence: Synthetic oligonucleotide
  Antisense strand to SEQ ID NO: 1404736
cuagaccuaaaucuaccuc

SEQ ID NO: 1404738 - RNA, 19 nt, Artificial Sequence
  Description of Artificial Sequence: Synthetic oligonucleotide
  Sense strand starting at position 3605 of SEQ ID NO: 1243257
cgccuaauccuagcacgua

SEQ ID NO: 1404739 - RNA, 19 nt, Artificial Sequence
  Description of Artificial Sequence: Synthetic oligonucleotide
  Antisense strand to SEQ ID NO: 1404738
uacgugcuaggauuaggcg

SEQ ID NO: 1404740 - RNA, 19 nt, Artificial Sequence
  Description of Artificial Sequence: Synthetic oligonucleotide
  Sense strand starting at position 3848 of SEQ ID NO: 1243257
aggaaauuagcugggcauu

SEQ ID NO: 1404741 - RNA, 19 nt, Artificial Sequence
  Description of Artificial Sequence: Synthetic oligonucleotide
  Antisense strand to SEQ ID NO: 1404740
aaugcccagcuaauuuccu

SEQ ID NO: 1404742 - RNA, 19 nt, Artificial Sequence
  Description of Artificial Sequence: Synthetic oligonucleotide
  Sense strand starting at position 3965 of SEQ ID NO: 1243257
ugcccucugguuugagcaa

SEQ ID NO: 1404743 - RNA, 19 nt, Artificial Sequence
  Description of Artificial Sequence: Synthetic oligonucleotide
  Antisense strand to SEQ ID NO: 1404742
uugcucaaaccagagggca

SEQ ID NO: 1404744 - RNA, 19 nt, Artificial Sequence
  Description of Artificial Sequence: Synthetic oligonucleotide
  Sense strand starting at position 217 of SEQ ID NO: 1243258
ugucaagagcaaggugaua

SEQ ID NO: 1404745 - RNA, 19 nt, Artificial Sequence
  Description of Artificial Sequence: Synthetic oligonucleotide
  Antisense strand to SEQ ID NO: 1404744
uaucaccuugcucuugaca

SEQ ID NO: 1404746 - RNA, 19 nt, Artificial Sequence
  Description of Artificial Sequence: Synthetic oligonucleotide
  Sense strand starting at position 336 of SEQ ID NO: 1243258
agagaugaauuggacugaa

SEQ ID NO: 1404747 - RNA, 19 nt, Artificial Sequence
  Description of Artificial Sequence: Synthetic oligonucleotide
  Antisense strand to SEQ ID NO: 1404746
uucaguccaauucaucucu

SEQ ID NO: 1404748 - RNA, 19 nt, Artificial Sequence
  Description of Artificial Sequence: Synthetic oligonucleotide
  Sense strand starting at position 387 of SEQ ID NO: 1243258
agguguaggaccuggguaa

SEQ ID NO: 1404749 - RNA, 19 nt, Artificial Sequence
  Description of Artificial Sequence: Synthetic oligonucleotide
  Antisense strand to SEQ ID NO: 1404748
uuacccagguccuacaccu

SEQ ID NO: 1404750 - RNA, 19 nt, Artificial Sequence
  Description of Artificial Sequence: Synthetic oligonucleotide
  Sense strand starting at position 388 of SEQ ID NO: 1243258
gguguaggaccuggguaau

SEQ ID NO: 1404751 - RNA, 19 nt, Artificial Sequence
  Description of Artificial Sequence: Synthetic oligonucleotide
  Antisense strand to SEQ ID NO: 1404750
auuacccagguccuacacc

SEQ ID NO: 1404752 - RNA, 19 nt, Artificial Sequence
  Description of Artificial Sequence: Synthetic oligonucleotide
  Sense strand starting at position 409 of SEQ ID NO: 1243258
cauccacgcuguuuagaga

SEQ ID NO: 1404753 - RNA, 19 nt, Artificial Sequence
  Description of Artificial Sequence: Synthetic oligonucleotide
  Antisense strand to SEQ ID NO: 1404752
ucucuaaacagcguggaug

SEQ ID NO: 1404754 - RNA, 19 nt, Artificial Sequence
  Description of Artificial Sequence: Synthetic oligonucleotide
  Sense strand starting at position 612 of SEQ ID NO: 1243258
augggaagaucgcuugaug

SEQ ID NO: 1404755 - RNA, 19 nt, Artificial Sequence
  Description of Artificial Sequence: Synthetic oligonucleotide
  Antisense strand to SEQ ID NO: 1404754
caucaagcgaucuucccau

SEQ ID NO: 1404756 - RNA, 19 nt, Artificial Sequence
  Description of Artificial Sequence: Synthetic oligonucleotide
  Sense strand starting at position 704 of SEQ ID NO: 1243258
gcagaagaguuucucagag

SEQ ID NO: 1404757 - RNA, 19 nt, Artificial Sequence
  Description of Artificial Sequence: Synthetic oligonucleotide
  Antisense strand to SEQ ID NO: 1404756
cucugagaaacucuucugc

SEQ ID NO: 1404758 - RNA, 19 nt, Artificial Sequence
  Description of Artificial Sequence: Synthetic oligonucleotide
  Sense strand starting at position 720 of SEQ ID NO: 1243258
gaguuacagggaugugguu

SEQ ID NO: 1404759 - RNA, 19 nt, Artificial Sequence
  Description of Artificial Sequence: Synthetic oligonucleotide
  Antisense strand to SEQ ID NO: 1404758
aaccacaucccuguaacuc

SEQ ID NO: 1404760 - RNA, 19 nt, Artificial Sequence
  Description of Artificial Sequence: Synthetic oligonucleotide
  Sense strand starting at position 748 of SEQ ID NO: 1243258
aaucguugguggguggaau

SEQ ID NO: 1404761 - RNA, 19 nt, Artificial Sequence
  Description of Artificial Sequence: Synthetic oligonucleotide
  Antisense strand to SEQ ID NO: 1404760
auuccacccaccaacgauu

SEQ ID NO: 1404762 - RNA, 19 nt, Artificial Sequence
  Description of Artificial Sequence: Synthetic oligonucleotide
  Sense strand starting at position 773 of SEQ ID NO: 1243258
ugcccaauucuagguugga

SEQ ID NO: 1404763 - RNA, 19 nt, Artificial Sequence
  Description of Artificial Sequence: Synthetic oligonucleotide
  Antisense strand to SEQ ID NO: 1404762
uccaaccuagaauugggca

SEQ ID NO: 1404764 - RNA, 19 nt, Artificial Sequence
  Description of Artificial Sequence: Synthetic oligonucleotide
  Sense strand starting at position 776 of SEQ ID NO: 1243258
ccaauucuagguuggagua

SEQ ID NO: 1404765 - RNA, 19 nt, Artificial Sequence
  Description of Artificial Sequence: Synthetic oligonucleotide
  Antisense strand to SEQ ID NO: 1404764
uacuccaaccuagaauugg

SEQ ID NO: 1404766 - RNA, 19 nt, Artificial Sequence
  Description of Artificial Sequence: Synthetic oligonucleotide
  Sense strand starting at position 777 of SEQ ID NO: 1243258
caauucuagguuggaguaa

SEQ ID NO: 1404767 - RNA, 19 nt, Artificial Sequence
  Description of Artificial Sequence: Synthetic oligonucleotide
  Antisense strand to SEQ ID NO: 1404766
uuacuccaaccuagaauug

SEQ ID NO: 1404768 - RNA, 19 nt, Artificial Sequence
  Description of Artificial Sequence: Synthetic oligonucleotide
  Sense strand starting at position 845 of SEQ ID NO: 1243258
guacaacaaugauggauuu

SEQ ID NO: 1404769 - RNA, 19 nt, Artificial Sequence
  Description of Artificial Sequence: Synthetic oligonucleotide
  Antisense strand to SEQ ID NO: 1404768
aaauccaucauuguuguac

SEQ ID NO: 1404770 - RNA, 19 nt, Artificial Sequence
  Description of Artificial Sequence: Synthetic oligonucleotide
  Sense strand starting at position 870 of SEQ ID NO: 1243258
caguuauccucaguaggga

SEQ ID NO: 1404771 - RNA, 19 nt, Artificial Sequence
  Description of Artificial Sequence: Synthetic oligonucleotide
  Antisense strand to SEQ ID NO: 1404770
ucccuacugaggauaacug

SEQ ID NO: 1404772 - RNA, 19 nt, Artificial Sequence
  Description of Artificial Sequence: Synthetic oligonucleotide
  Sense strand starting at position 871 of SEQ ID NO: 1243258
aguuauccucaguagggau

SEQ ID NO: 1404773 - RNA, 19 nt, Artificial Sequence
  Description of Artificial Sequence: Synthetic oligonucleotide
  Antisense strand to SEQ ID NO: 1404772
aucccuacugaggauaacu

SEQ ID NO: 1404774 - RNA, 19 nt, Artificial Sequence
  Description of Artificial Sequence: Synthetic oligonucleotide
  Sense strand starting at position 926 of SEQ ID NO: 1243258
aauagagagucucuugguu

SEQ ID NO: 1404775 - RNA, 19 nt, Artificial Sequence
  Description of Artificial Sequence: Synthetic oligonucleotide
  Antisense strand to SEQ ID NO: 1404774
aaccaagagacucucuauu

SEQ ID NO: 1404776 - RNA, 19 nt, Artificial Sequence
  Description of Artificial Sequence: Synthetic oligonucleotide
  Sense strand starting at position 1653 of SEQ ID NO: 1243258
gaggcuauuuccgcuggau

SEQ ID NO: 1404777 - RNA, 19 nt, Artificial Sequence
  Description of Artificial Sequence: Synthetic oligonucleotide
  Antisense strand to SEQ ID NO: 1404776
auccagcggaaauagccuc

SEQ ID NO: 1404778 - RNA, 19 nt, Artificial Sequence
  Description of Artificial Sequence: Synthetic oligonucleotide
  Sense strand starting at position 2415 of SEQ ID NO: 1243258
aaugccagguuucuugaua

SEQ ID NO: 1404779 - RNA, 19 nt, Artificial Sequence
  Description of Artificial Sequence: Synthetic oligonucleotide
  Antisense strand to SEQ ID NO: 1404778
uaucaagaaaccuggcauu

SEQ ID NO: 1404780 - RNA, 19 nt, Artificial Sequence
  Description of Artificial Sequence: Synthetic oligonucleotide
  Sense strand starting at position 2416 of SEQ ID NO: 1243258
augccagguuucuugauau

SEQ ID NO: 1404781 - RNA, 19 nt, Artificial Sequence
  Description of Artificial Sequence: Synthetic oligonucleotide
  Antisense strand to SEQ ID NO: 1404780
auaucaagaaaccuggcau

SEQ ID NO: 1404782 - RNA, 19 nt, Artificial Sequence
  Description of Artificial Sequence: Synthetic oligonucleotide
  Sense strand starting at position 2422 of SEQ ID NO: 1243258
gguuucuugauauguugag

SEQ ID NO: 1404783 - RNA, 19 nt, Artificial Sequence
  Description of Artificial Sequence: Synthetic oligonucleotide
  Antisense strand to SEQ ID NO: 1404782
cucaacauaucaagaaacc

SEQ ID NO: 1404784 - RNA, 19 nt, Artificial Sequence
  Description of Artificial Sequence: Synthetic oligonucleotide
  Sense strand starting at position 2426 of SEQ ID NO: 1243258
ucuugauauguugaggcaa

SEQ ID NO: 1404785 - RNA, 19 nt, Artificial Sequence
  Description of Artificial Sequence: Synthetic oligonucleotide
  Antisense strand to SEQ ID NO: 1404784
uugccucaacauaucaaga

SEQ ID NO: 1404786 - RNA, 19 nt, Artificial Sequence
  Description of Artificial Sequence: Synthetic oligonucleotide
  Sense strand starting at position 2497 of SEQ ID NO: 1243258
ucguucuuaggccaauaaa

SEQ ID NO: 1404787 - RNA, 19 nt, Artificial Sequence
  Description of Artificial Sequence: Synthetic oligonucleotide
  Antisense strand to SEQ ID NO: 1404786
uuuauuggccuaagaacga

SEQ ID NO: 1404788 - RNA, 19 nt, Artificial Sequence
  Description of Artificial Sequence: Synthetic oligonucleotide
  Sense strand starting at position 2522 of SEQ ID NO: 1243258
cugagugcuaacgauaugu

SEQ ID NO: 1404789 - RNA, 19 nt, Artificial Sequence
  Description of Artificial Sequence: Synthetic oligonucleotide
  Antisense strand to SEQ ID NO: 1404788
acauaucguuagcacucag

SEQ ID NO: 1404790 - RNA, 19 nt, Artificial Sequence
  Description of Artificial Sequence: Synthetic oligonucleotide
  Sense strand starting at position 2524 of SEQ ID NO: 1243258
gagugcuaacgauauguga

SEQ ID NO: 1404791 - RNA, 19 nt, Artificial Sequence
  Description of Artificial Sequence: Synthetic oligonucleotide
  Antisense strand to SEQ ID NO: 1404790
ucacauaucguuagcacuc

SEQ ID NO: 1404792 - RNA, 19 nt, Artificial Sequence
  Description of Artificial Sequence: Synthetic oligonucleotide
  Sense strand starting at position 2526 of SEQ ID NO: 1243258
gugcuaacgauaugugaaa

SEQ ID NO: 1404793 - RNA, 19 nt, Artificial Sequence
  Description of Artificial Sequence: Synthetic oligonucleotide
  Antisense strand to SEQ ID NO: 1404792
uuucacauaucguuagcac

SEQ ID NO: 1404794 - RNA, 19 nt, Artificial Sequence
  Description of Artificial Sequence: Synthetic oligonucleotide
  Sense strand starting at position 2527 of SEQ ID NO: 1243258
ugcuaacgauaugugaaau

SEQ ID NO: 1404795 - RNA, 19 nt, Artificial Sequence
  Description of Artificial Sequence: Synthetic oligonucleotide
  Antisense strand to SEQ ID NO: 1404794
auuucacauaucguuagca

SEQ ID NO: 1404796 - RNA, 19 nt, Artificial Sequence
  Description of Artificial Sequence: Synthetic oligonucleotide
  Sense strand starting at position 2528 of SEQ ID NO: 1243258
gcuaacgauaugugaaauu

SEQ ID NO: 1404797 - RNA, 19 nt, Artificial Sequence
  Description of Artificial Sequence: Synthetic oligonucleotide
  Antisense strand to SEQ ID NO: 1404796
aauuucacauaucguuagc

SEQ ID NO: 1404798 - RNA, 19 nt, Artificial Sequence
  Description of Artificial Sequence: Synthetic oligonucleotide
  Sense strand starting at position 2716 of SEQ ID NO: 1243258
cgccuuguccuggagagau

SEQ ID NO: 1404799 - RNA, 19 nt, Artificial Sequence
  Description of Artificial Sequence: Synthetic oligonucleotide
  Antisense strand to SEQ ID NO: 1404798
aucucuccaggacaaggcg

SEQ ID NO: 1404800 - RNA, 19 nt, Artificial Sequence
  Description of Artificial Sequence: Synthetic oligonucleotide
  Sense strand starting at position 2799 of SEQ ID NO: 1243258
accuacuucuuccuggaga

SEQ ID NO: 1404801 - RNA, 19 nt, Artificial Sequence
  Description of Artificial Sequence: Synthetic oligonucleotide
  Antisense strand to SEQ ID NO: 1404800
ucuccaggaagaaguaggu

SEQ ID NO: 1404802 - RNA, 19 nt, Artificial Sequence
  Description of Artificial Sequence: Synthetic oligonucleotide
  Sense strand starting at position 2801 of SEQ ID NO: 1243258
cuacuucuuccuggagaag

SEQ ID NO: 1404803 - RNA, 19 nt, Artificial Sequence
  Description of Artificial Sequence: Synthetic oligonucleotide
  Antisense strand to SEQ ID NO: 1404802
cuucuccaggaagaaguag

SEQ ID NO: 1404804 - RNA, 19 nt, Artificial Sequence
  Description of Artificial Sequence: Synthetic oligonucleotide
  Sense strand starting at position 2802 of SEQ ID NO: 1243258
uacuucuuccuggagaagu

SEQ ID NO: 1404805 - RNA, 19 nt, Artificial Sequence
  Description of Artificial Sequence: Synthetic oligonucleotide
  Antisense strand to SEQ ID NO: 1404804
acuucuccaggaagaagua

SEQ ID NO: 1404806 - RNA, 19 nt, Artificial Sequence
  Description of Artificial Sequence: Synthetic oligonucleotide
  Sense strand starting at position 2839 of SEQ ID NO: 1243258
cgcagaggucuauaggaca

SEQ ID NO: 1404807 - RNA, 19 nt, Artificial Sequence
  Description of Artificial Sequence: Synthetic oligonucleotide
  Antisense strand to SEQ ID NO: 1404806
uguccuauagaccucugcg

SEQ ID NO: 1404808 - RNA, 19 nt, Artificial Sequence
  Description of Artificial Sequence: Synthetic oligonucleotide
  Sense strand starting at position 2959 of SEQ ID NO: 1243258
guaaauaguccugaggagu

SEQ ID NO: 1404809 - RNA, 19 nt, Artificial Sequence
  Description of Artificial Sequence: Synthetic oligonucleotide
  Antisense strand to SEQ ID NO: 1404808
acuccucaggacuauuuac

SEQ ID NO: 1404810 - RNA, 19 nt, Artificial Sequence
  Description of Artificial Sequence: Synthetic oligonucleotide
  Sense strand starting at position 3144 of SEQ ID NO: 1243258
cccagauucccugguccaa

SEQ ID NO: 1404811 - RNA, 19 nt, Artificial Sequence
  Description of Artificial Sequence: Synthetic oligonucleotide
  Antisense strand to SEQ ID NO: 1404810
uuggaccagggaaucuggg

SEQ ID NO: 1404812 - RNA, 19 nt, Artificial Sequence
  Description of Artificial Sequence: Synthetic oligonucleotide
  Sense strand starting at position 3358 of SEQ ID NO: 1243258
ccuagaauccuggguccga

SEQ ID NO: 1404813 - RNA, 19 nt, Artificial Sequence
  Description of Artificial Sequence: Synthetic oligonucleotide
  Antisense strand to SEQ ID NO: 1404812
ucggacccaggauucuagg

SEQ ID NO: 1404814 - RNA, 19 nt, Artificial Sequence
  Description of Artificial Sequence: Synthetic oligonucleotide
  Sense strand starting at position 3362 of SEQ ID NO: 1243258
gaauccuggguccgagaua

SEQ ID NO: 1404815 - RNA, 19 nt, Artificial Sequence
  Description of Artificial Sequence: Synthetic oligonucleotide
  Antisense strand to SEQ ID NO: 1404814
uaucucggacccaggauuc

SEQ ID NO: 1404816 - RNA, 19 nt, Artificial Sequence
  Description of Artificial Sequence: Synthetic oligonucleotide
  Sense strand starting at position 3763 of SEQ ID NO: 1243258
uggaaagcauaaucgagaa

SEQ ID NO: 1404817 - RNA, 19 nt, Artificial Sequence
  Description of Artificial Sequence: Synthetic oligonucleotide
  Antisense strand to SEQ ID NO: 1404816
uucucgauuaugcuuucca

SEQ ID NO: 1404818 - RNA, 19 nt, Artificial Sequence
  Description of Artificial Sequence: Synthetic oligonucleotide
  Sense strand starting at position 3781 of SEQ ID NO: 1243258
agggcuuaugugggaaaug

SEQ ID NO: 1404819 - RNA, 19 nt, Artificial Sequence
  Description of Artificial Sequence: Synthetic oligonucleotide
  Antisense strand to SEQ ID NO: 1404818
cauuucccacauaagcccu

SEQ ID NO: 1404820 - RNA, 19 nt, Artificial Sequence
  Description of Artificial Sequence: Synthetic oligonucleotide
  Sense strand starting at position 3929 of SEQ ID NO: 1243258
cgugguucuuccacguaga

SEQ ID NO: 1404821 - RNA, 19 nt, Artificial Sequence
  Description of Artificial Sequence: Synthetic oligonucleotide
  Antisense strand to SEQ ID NO: 1404820
ucuacguggaagaaccacg

SEQ ID NO: 1404822 - RNA, 19 nt, Artificial Sequence
  Description of Artificial Sequence: Synthetic oligonucleotide
  Sense strand starting at position 3932 of SEQ ID NO: 1243258
gguucuuccacguagaggu

SEQ ID NO: 1404823 - RNA, 19 nt, Artificial Sequence
  Description of Artificial Sequence: Synthetic oligonucleotide
  Antisense strand to SEQ ID NO: 1404822
accucuacguggaagaacc

SEQ ID NO: 1404824 - RNA, 19 nt, Artificial Sequence
  Description of Artificial Sequence: Synthetic oligonucleotide
  Sense strand starting at position 79 of SEQ ID NO: 1243259
cuagcuuucgagggucaca

SEQ ID NO: 1404825 - RNA, 19 nt, Artificial Sequence
  Description of Artificial Sequence: Synthetic oligonucleotide
  Antisense strand to SEQ ID NO: 1404824
ugugacccucgaaagcuag

SEQ ID NO: 1404826 - RNA, 19 nt, Artificial Sequence
  Description of Artificial Sequence: Synthetic oligonucleotide
  Sense strand starting at position 1153 of SEQ ID NO: 1243259
ugucgucuacucucuguau

SEQ ID NO: 1404827 - RNA, 19 nt, Artificial Sequence
  Description of Artificial Sequence: Synthetic oligonucleotide
  Antisense strand to SEQ ID NO: 1404826
auacagagaguagacgaca

SEQ ID NO: 1404828 - RNA, 19 nt, Artificial Sequence
  Description of Artificial Sequence: Synthetic oligonucleotide
  Sense strand starting at position 1154 of SEQ ID NO: 1243259
gucgucuacucucuguauu

SEQ ID NO: 1404829 - RNA, 19 nt, Artificial Sequence
  Description of Artificial Sequence: Synthetic oligonucleotide
  Antisense strand to SEQ ID NO: 1404828
aauacagagaguagacgac

SEQ ID NO: 1404830 - RNA, 19 nt, Artificial Sequence
  Description of Artificial Sequence: Synthetic oligonucleotide
  Sense strand starting at position 1155 of SEQ ID NO: 1243259
ucgucuacucucuguauuu

SEQ ID NO: 1404831 - RNA, 19 nt, Artificial Sequence
  Description of Artificial Sequence: Synthetic oligonucleotide
  Antisense strand to SEQ ID NO: 1404830
aaauacagagaguagacga

SEQ ID NO: 1404832 - RNA, 19 nt, Artificial Sequence
  Description of Artificial Sequence: Synthetic oligonucleotide
  Sense strand starting at position 1186 of SEQ ID NO: 1243259
guuugcaggucaugucaaa

SEQ ID NO: 1404833 - RNA, 19 nt, Artificial Sequence
  Description of Artificial Sequence: Synthetic oligonucleotide
  Antisense strand to SEQ ID NO: 1404832
uuugacaugaccugcaaac

SEQ ID NO: 1404834 - RNA, 19 nt, Artificial Sequence
  Description of Artificial Sequence: Synthetic oligonucleotide
  Sense strand starting at position 1280 of SEQ ID NO: 1243259
ccuugugcaucugcagaua

SEQ ID NO: 1404835 - RNA, 19 nt, Artificial Sequence
  Description of Artificial Sequence: Synthetic oligonucleotide
  Antisense strand to SEQ ID NO: 1404834
uaucugcagaugcacaagg

SEQ ID NO: 1404836 - RNA, 19 nt, Artificial Sequence
  Description of Artificial Sequence: Synthetic oligonucleotide
  Sense strand starting at position 1435 of SEQ ID NO: 1243259
ggaggcuucugcuggcaaa

SEQ ID NO: 1404837 - RNA, 19 nt, Artificial Sequence
  Description of Artificial Sequence: Synthetic oligonucleotide
  Antisense strand to SEQ ID NO: 1404836
uuugccagcagaagccucc

SEQ ID NO: 1404838 - RNA, 19 nt, Artificial Sequence
  Description of Artificial Sequence: Synthetic oligonucleotide
  Sense strand starting at position 1436 of SEQ ID NO: 1243259
gaggcuucugcuggcaaag

SEQ ID NO: 1404839 - RNA, 19 nt, Artificial Sequence
  Description of Artificial Sequence: Synthetic oligonucleotide
  Antisense strand to SEQ ID NO: 1404838
cuuugccagcagaagccuc

SEQ ID NO: 1404840 - RNA, 19 nt, Artificial Sequence
  Description of Artificial Sequence: Synthetic oligonucleotide
  Sense strand starting at position 2010 of SEQ ID NO: 1243259
cuggcuaggcucugccaaa

SEQ ID NO: 1404841 - RNA, 19 nt, Artificial Sequence
  Description of Artificial Sequence: Synthetic oligonucleotide
  Antisense strand to SEQ ID NO: 1404840
uuuggcagagccuagccag

SEQ ID NO: 1404842 - RNA, 19 nt, Artificial Sequence
  Description of Artificial Sequence: Synthetic oligonucleotide
  Sense strand starting at position 2187 of SEQ ID NO: 1243259
uguccugugguuagaggua

SEQ ID NO: 1404843 - RNA, 19 nt, Artificial Sequence
  Description of Artificial Sequence: Synthetic oligonucleotide
  Antisense strand to SEQ ID NO: 1404842
uaccucuaaccacaggaca

SEQ ID NO: 1404844 - RNA, 19 nt, Artificial Sequence
  Description of Artificial Sequence: Synthetic oligonucleotide
  Sense strand starting at position 2291 of SEQ ID NO: 1243259
gccagaacacaccgucuua

SEQ ID NO: 1404845 - RNA, 19 nt, Artificial Sequence
  Description of Artificial Sequence: Synthetic oligonucleotide
  Antisense strand to SEQ ID NO: 1404844
uaagacgguguguucuggc

SEQ ID NO: 1404846 - RNA, 19 nt, Artificial Sequence
  Description of Artificial Sequence: Synthetic oligonucleotide
  Sense strand starting at position 2303 of SEQ ID NO: 1243259
cgucuuaacuucuaggugu

SEQ ID NO: 1404847 - RNA, 19 nt, Artificial Sequence
  Description of Artificial Sequence: Synthetic oligonucleotide
  Antisense strand to SEQ ID NO: 1404846
acaccuagaaguuaagacg

SEQ ID NO: 1404848 - RNA, 19 nt, Artificial Sequence
  Description of Artificial Sequence: Synthetic oligonucleotide
  Sense strand starting at position 2339 of SEQ ID NO: 1243259
ggaccuuugucaucccuuu

SEQ ID NO: 1404849 - RNA, 19 nt, Artificial Sequence
  Description of Artificial Sequence: Synthetic oligonucleotide
  Antisense strand to SEQ ID NO: 1404848
aaagggaugacaaaggucc

SEQ ID NO: 1404850 - RNA, 19 nt, Artificial Sequence
  Description of Artificial Sequence: Synthetic oligonucleotide
  Sense strand starting at position 2702 of SEQ ID NO: 1243259
uuggaaaggucucgccuca

SEQ ID NO: 1404851 - RNA, 19 nt, Artificial Sequence
  Description of Artificial Sequence: Synthetic oligonucleotide
  Antisense strand to SEQ ID NO: 1404850
ugaggcgagaccuuuccaa

SEQ ID NO: 1404852 - RNA, 19 nt, Artificial Sequence
  Description of Artificial Sequence: Synthetic oligonucleotide
  Sense strand starting at position 2743 of SEQ ID NO: 1243259
gagcaaaugugucucucuu

SEQ ID NO: 1404853 - RNA, 19 nt, Artificial Sequence
  Description of Artificial Sequence: Synthetic oligonucleotide
  Antisense strand to SEQ ID NO: 1404852
aagagagacacauuugcuc

SEQ ID NO: 1404854 - RNA, 19 nt, Artificial Sequence
  Description of Artificial Sequence: Synthetic oligonucleotide
  Sense strand starting at position 2772 of SEQ ID NO: 1243259
ugcgacuucugagcuggua

SEQ ID NO: 1404855 - RNA, 19 nt, Artificial Sequence
  Description of Artificial Sequence: Synthetic oligonucleotide
  Antisense strand to SEQ ID NO: 1404854
uaccagcucagaagucgca

SEQ ID NO: 1404856 - RNA, 19 nt, Artificial Sequence
  Description of Artificial Sequence: Synthetic oligonucleotide
  Sense strand starting at position 2774 of SEQ ID NO: 1243259
cgacuucugagcugguacu

SEQ ID NO: 1404857 - RNA, 19 nt, Artificial Sequence
  Description of Artificial Sequence: Synthetic oligonucleotide
  Antisense strand to SEQ ID NO: 1404856
aguaccagcucagaagucg

SEQ ID NO: 1404858 - RNA, 19 nt, Artificial Sequence
  Description of Artificial Sequence: Synthetic oligonucleotide
  Sense strand starting at position 2784 of SEQ ID NO: 1243259
gcugguacucuuggaagag

SEQ ID NO: 1404859 - RNA, 19 nt, Artificial Sequence
  Description of Artificial Sequence: Synthetic oligonucleotide
  Antisense strand to SEQ ID NO: 1404858
cucuuccaagaguaccagc

SEQ ID NO: 1404860 - RNA, 19 nt, Artificial Sequence
  Description of Artificial Sequence: Synthetic oligonucleotide
  Sense strand starting at position 2928 of SEQ ID NO: 1243259
ggcauugcuccuggugaca

SEQ ID NO: 1404861 - RNA, 19 nt, Artificial Sequence
  Description of Artificial Sequence: Synthetic oligonucleotide
  Antisense strand to SEQ ID NO: 1404860
ugucaccaggagcaaugcc

SEQ ID NO: 1404862 - RNA, 19 nt, Artificial Sequence
  Description of Artificial Sequence: Synthetic oligonucleotide
  Sense strand starting at position 2930 of SEQ ID NO: 1243259
cauugcuccuggugacaca

SEQ ID NO: 1404863 - RNA, 19 nt, Artificial Sequence
  Description of Artificial Sequence: Synthetic oligonucleotide
  Antisense strand to SEQ ID NO: 1404862
ugugucaccaggagcaaug

SEQ ID NO: 1404864 - RNA, 19 nt, Artificial Sequence
  Description of Artificial Sequence: Synthetic oligonucleotide
  Sense strand starting at position 3046 of SEQ ID NO: 1243259
ccaugcuucugguuagcaa

SEQ ID NO: 1404865 - RNA, 19 nt, Artificial Sequence
  Description of Artificial Sequence: Synthetic oligonucleotide
  Antisense strand to SEQ ID NO: 1404864
uugcuaaccagaagcaugg

SEQ ID NO: 1404866 - RNA, 19 nt, Artificial Sequence
  Description of Artificial Sequence: Synthetic oligonucleotide
  Sense strand starting at position 3047 of SEQ ID NO: 1243259
caugcuucugguuagcaaa

SEQ ID NO: 1404867 - RNA, 19 nt, Artificial Sequence
  Description of Artificial Sequence: Synthetic oligonucleotide
  Antisense strand to SEQ ID NO: 1404866
uuugcuaaccagaagcaug

SEQ ID NO: 1404868 - RNA, 19 nt, Artificial Sequence
  Description of Artificial Sequence: Synthetic oligonucleotide
  Sense strand starting at position 3049 of SEQ ID NO: 1243259
ugcuucugguuagcaaaga

SEQ ID NO: 1404869 - RNA, 19 nt, Artificial Sequence
  Description of Artificial Sequence: Synthetic oligonucleotide
  Antisense strand to SEQ ID NO: 1404868
ucuuugcuaaccagaagca

SEQ ID NO: 1404870 - RNA, 19 nt, Artificial Sequence
  Description of Artificial Sequence: Synthetic oligonucleotide
  Sense strand starting at position 3090 of SEQ ID NO: 1243259
gggcgucucuuaaguagga

SEQ ID NO: 1404871 - RNA, 19 nt, Artificial Sequence
  Description of Artificial Sequence: Synthetic oligonucleotide
  Antisense strand to SEQ ID NO: 1404870
uccuacuuaagagacgccc

SEQ ID NO: 1404872 - RNA, 19 nt, Artificial Sequence
  Description of Artificial Sequence: Synthetic oligonucleotide
  Sense strand starting at position 3091 of SEQ ID NO: 1243259
ggcgucucuuaaguaggaa

SEQ ID NO: 1404873 - RNA, 19 nt, Artificial Sequence
  Description of Artificial Sequence: Synthetic oligonucleotide
  Antisense strand to SEQ ID NO: 1404872
uuccuacuuaagagacgcc

SEQ ID NO: 1404874 - RNA, 19 nt, Artificial Sequence
  Description of Artificial Sequence: Synthetic oligonucleotide
  Sense strand starting at position 3092 of SEQ ID NO: 1243259
gcgucucuuaaguaggaaa

SEQ ID NO: 1404875 - RNA, 19 nt, Artificial Sequence
  Description of Artificial Sequence: Synthetic oligonucleotide
  Antisense strand to SEQ ID NO: 1404874
uuuccuacuuaagagacgc

SEQ ID NO: 1404876 - RNA, 19 nt, Artificial Sequence
  Description of Artificial Sequence: Synthetic oligonucleotide
  Sense strand starting at position 3274 of SEQ ID NO: 1243259
ccgggacucccuugaaguu

SEQ ID NO: 1404877 - RNA, 19 nt, Artificial Sequence
  Description of Artificial Sequence: Synthetic oligonucleotide
  Antisense strand to SEQ ID NO: 1404876
aacuucaagggagucccgg

SEQ ID NO: 1404878 - RNA, 19 nt, Artificial Sequence
  Description of Artificial Sequence: Synthetic oligonucleotide
  Sense strand starting at position 3557 of SEQ ID NO: 1243259
ugccgugagcuccaguuaa

SEQ ID NO: 1404879 - RNA, 19 nt, Artificial Sequence
  Description of Artificial Sequence: Synthetic oligonucleotide
  Antisense strand to SEQ ID NO: 1404878
uuaacuggagcucacggca

SEQ ID NO: 1404880 - RNA, 19 nt, Artificial Sequence
  Description of Artificial Sequence: Synthetic oligonucleotide
  Sense strand starting at position 3581 of SEQ ID NO: 1243259
cggagugaguuucuuuggu

SEQ ID NO: 1404881 - RNA, 19 nt, Artificial Sequence
  Description of Artificial Sequence: Synthetic oligonucleotide
  Antisense strand to SEQ ID NO: 1404880
accaaagaaacucacuccg

SEQ ID NO: 1404882 - RNA, 19 nt, Artificial Sequence
  Description of Artificial Sequence: Synthetic oligonucleotide
  Sense strand starting at position 3583 of SEQ ID NO: 1243259
gagugaguuucuuugguga

SEQ ID NO: 1404883 - RNA, 19 nt, Artificial Sequence
  Description of Artificial Sequence: Synthetic oligonucleotide
  Antisense strand to SEQ ID NO: 1404882
ucaccaaagaaacucacuc

SEQ ID NO: 1404884 - RNA, 19 nt, Artificial Sequence
  Description of Artificial Sequence: Synthetic oligonucleotide
  Sense strand starting at position 3585 of SEQ ID NO: 1243259
gugaguuucuuuggugagg

SEQ ID NO: 1404885 - RNA, 19 nt, Artificial Sequence
  Description of Artificial Sequence: Synthetic oligonucleotide
  Antisense strand to SEQ ID NO: 1404884
ccucaccaaagaaacucac

SEQ ID NO: 1404886 - RNA, 19 nt, Artificial Sequence
  Description of Artificial Sequence: Synthetic oligonucleotide
  Sense strand starting at position 3586 of SEQ ID NO: 1243259
ugaguuucuuuggugagga

SEQ ID NO: 1404887 - RNA, 19 nt, Artificial Sequence
  Description of Artificial Sequence: Synthetic oligonucleotide
  Antisense strand to SEQ ID NO: 1404886
uccucaccaaagaaacuca

SEQ ID NO: 1404888 - RNA, 19 nt, Artificial Sequence
  Description of Artificial Sequence: Synthetic oligonucleotide
  Sense strand starting at position 3587 of SEQ ID NO: 1243259
gaguuucuuuggugaggag

SEQ ID NO: 1404889 - RNA, 19 nt, Artificial Sequence
  Description of Artificial Sequence: Synthetic oligonucleotide
  Antisense strand to SEQ ID NO: 1404888
cuccucaccaaagaaacuc

SEQ ID NO: 1404890 - RNA, 19 nt, Artificial Sequence
  Description of Artificial Sequence: Synthetic oligonucleotide
  Sense strand starting at position 3601 of SEQ ID NO: 1243259
aggagcugccuucguuauu

SEQ ID NO: 1404891 - RNA, 19 nt, Artificial Sequence
  Description of Artificial Sequence: Synthetic oligonucleotide
  Antisense strand to SEQ ID NO: 1404890
aauaacgaaggcagcuccu

SEQ ID NO: 1404892 - RNA, 19 nt, Artificial Sequence
  Description of Artificial Sequence: Synthetic oligonucleotide
  Sense strand starting at position 3602 of SEQ ID NO: 1243259
ggagcugccuucguuauuu

SEQ ID NO: 1404893 - RNA, 19 nt, Artificial Sequence
  Description of Artificial Sequence: Synthetic oligonucleotide
  Antisense strand to SEQ ID NO: 1404892
aaauaacgaaggcagcucc

SEQ ID NO: 1404894 - RNA, 19 nt, Artificial Sequence
  Description of Artificial Sequence: Synthetic oligonucleotide
  Sense strand starting at position 3976 of SEQ ID NO: 1243259
gcccuaaagucagcgugaa

SEQ ID NO: 1404895 - RNA, 19 nt, Artificial Sequence
  Description of Artificial Sequence: Synthetic oligonucleotide
  Antisense strand to SEQ ID NO: 1404894
uucacgcugacuuuagggc

SEQ ID NO: 1404896 - RNA, 19 nt, Artificial Sequence
  Description of Artificial Sequence: Synthetic oligonucleotide
  Sense strand starting at position 505 of SEQ ID NO: 1243260
gcuuguccgugauaacaca

SEQ ID NO: 1404897 - RNA, 19 nt, Artificial Sequence
  Description of Artificial Sequence: Synthetic oligonucleotide
  Antisense strand to SEQ ID NO: 1404896
uguguuaucacggacaagc

SEQ ID NO: 1404898 - RNA, 19 nt, Artificial Sequence
  Description of Artificial Sequence: Synthetic oligonucleotide
  Sense strand starting at position 830 of SEQ ID NO: 1243260
cuggucuguggcugagaca

SEQ ID NO: 1404899 - RNA, 19 nt, Artificial Sequence
  Description of Artificial Sequence: Synthetic oligonucleotide
  Antisense strand to SEQ ID NO: 1404898
ugucucagccacagaccag

SEQ ID NO: 1404900 - RNA, 19 nt, Artificial Sequence
  Description of Artificial Sequence: Synthetic oligonucleotide
  Sense strand starting at position 975 of SEQ ID NO: 1243260
cacccauguggaugacaaa

SEQ ID NO: 1404901 - RNA, 19 nt, Artificial Sequence
  Description of Artificial Sequence: Synthetic oligonucleotide
  Antisense strand to SEQ ID NO: 1404900
uuugucauccacaugggug

SEQ ID NO: 1404902 - RNA, 19 nt, Artificial Sequence
  Description of Artificial Sequence: Synthetic oligonucleotide
  Sense strand starting at position 2425 of SEQ ID NO: 1243260
gccgucagcgcuuauccau

SEQ ID NO: 1404903 - RNA, 19 nt, Artificial Sequence
  Description of Artificial Sequence: Synthetic oligonucleotide
  Antisense strand to SEQ ID NO: 1404902
auggauaagcgcugacggc

SEQ ID NO: 1404904 - RNA, 19 nt, Artificial Sequence
  Description of Artificial Sequence: Synthetic oligonucleotide
  Sense strand starting at position 2766 of SEQ ID NO: 1243260
uucccugcuguuugaaaga

SEQ ID NO: 1404905 - RNA, 19 nt, Artificial Sequence
  Description of Artificial Sequence: Synthetic oligonucleotide
  Antisense strand to SEQ ID NO: 1404904
ucuuucaaacagcagggaa

SEQ ID NO: 1404906 - RNA, 19 nt, Artificial Sequence
  Description of Artificial Sequence: Synthetic oligonucleotide
  Sense strand starting at position 3101 of SEQ ID NO: 1243260
cccugcugacucugaaaca

SEQ ID NO: 1404907 - RNA, 19 nt, Artificial Sequence
  Description of Artificial Sequence: Synthetic oligonucleotide
  Antisense strand to SEQ ID NO: 1404906
uguuucagagucagcaggg

SEQ ID NO: 1404908 - RNA, 19 nt, Artificial Sequence
  Description of Artificial Sequence: Synthetic oligonucleotide
  Sense strand starting at position 3875 of SEQ ID NO: 1243260
gcaccuagaugucagcaua

SEQ ID NO: 1404909 - RNA, 19 nt, Artificial Sequence
  Description of Artificial Sequence: Synthetic oligonucleotide
  Antisense strand to SEQ ID NO: 1404908
uaugcugacaucuaggugc

SEQ ID NO: 1404910 - RNA, 19 nt, Artificial Sequence
  Description of Artificial Sequence: Synthetic oligonucleotide
  Sense strand starting at position 3878 of SEQ ID NO: 1243260
ccuagaugucagcauacag

SEQ ID NO: 1404911 - RNA, 19 nt, Artificial Sequence
  Description of Artificial Sequence: Synthetic oligonucleotide
  Antisense strand to SEQ ID NO: 1404910
cuguaugcugacaucuagg

SEQ ID NO: 1404912 - RNA, 19 nt, Artificial Sequence
  Description of Artificial Sequence: Synthetic oligonucleotide
  Sense strand starting at position 1166 of SEQ ID NO: 1243261
gggccacauuccugucuca

SEQ ID NO: 1404913 - RNA, 19 nt, Artificial Sequence
  Description of Artificial Sequence: Synthetic oligonucleotide
  Antisense strand to SEQ ID NO: 1404912
ugagacaggaauguggccc

SEQ ID NO: 1404914 - RNA, 19 nt, Artificial Sequence
  Description of Artificial Sequence: Synthetic oligonucleotide
  Sense strand starting at position 1262 of SEQ ID NO: 1243261
ggaggagugcucuacucaa

SEQ ID NO: 1404915 - RNA, 19 nt, Artificial Sequence
  Description of Artificial Sequence: Synthetic oligonucleotide
  Antisense strand to SEQ ID NO: 1404914
uugaguagagcacuccucc

SEQ ID NO: 1404916 - RNA, 19 nt, Artificial Sequence
  Description of Artificial Sequence: Synthetic oligonucleotide
  Sense strand starting at position 1279 of SEQ ID NO: 1243261
aaagucuucugcuuggaga

SEQ ID NO: 1404917 - RNA, 19 nt, Artificial Sequence
  Description of Artificial Sequence: Synthetic oligonucleotide
  Antisense strand to SEQ ID NO: 1404916
ucuccaagcagaagacuuu

SEQ ID NO: 1404918 - RNA, 19 nt, Artificial Sequence
  Description of Artificial Sequence: Synthetic oligonucleotide
  Sense strand starting at position 1280 of SEQ ID NO: 1243261
aagucuucugcuuggagag

SEQ ID NO: 1404919 - RNA, 19 nt, Artificial Sequence
  Description of Artificial Sequence: Synthetic oligonucleotide
  Antisense strand to SEQ ID NO: 1404918
cucuccaagcagaagacuu

SEQ ID NO: 1404920 - RNA, 19 nt, Artificial Sequence
  Description of Artificial Sequence: Synthetic oligonucleotide
  Sense strand starting at position 1399 of SEQ ID NO: 1243261
aucaacgagcugugcaaau

SEQ ID NO: 1404921 - RNA, 19 nt, Artificial Sequence
  Description of Artificial Sequence: Synthetic oligonucleotide
  Antisense strand to SEQ ID NO: 1404920
auuugcacagcucguugau

SEQ ID NO: 1404922 - RNA, 19 nt, Artificial Sequence
  Description of Artificial Sequence: Synthetic oligonucleotide
  Sense strand starting at position 1565 of SEQ ID NO: 1243261
cugguuaucuccuucgauc

SEQ ID NO: 1404923 - RNA, 19 nt, Artificial Sequence
  Description of Artificial Sequence: Synthetic oligonucleotide
  Antisense strand to SEQ ID NO: 1404922
gaucgaaggagauaaccag

SEQ ID NO: 1404924 - RNA, 19 nt, Artificial Sequence
  Description of Artificial Sequence: Synthetic oligonucleotide
  Sense strand starting at position 2066 of SEQ ID NO: 1243261
agagacgccuccuucuuaa

SEQ ID NO: 1404925 - RNA, 19 nt, Artificial Sequence
  Description of Artificial Sequence: Synthetic oligonucleotide
  Antisense strand to SEQ ID NO: 1404924
uuaagaaggaggcgucucu

SEQ ID NO: 1404926 - RNA, 19 nt, Artificial Sequence
  Description of Artificial Sequence: Synthetic oligonucleotide
  Sense strand starting at position 2151 of SEQ ID NO: 1243261
agaggguucugcgaggaga

SEQ ID NO: 1404927 - RNA, 19 nt, Artificial Sequence
  Description of Artificial Sequence: Synthetic oligonucleotide
  Antisense strand to SEQ ID NO: 1404926
ucuccucgcagaacccucu

SEQ ID NO: 1404928 - RNA, 19 nt, Artificial Sequence
  Description of Artificial Sequence: Synthetic oligonucleotide
  Sense strand starting at position 2283 of SEQ ID NO: 1243261
gagaauggagccugcagaa

SEQ ID NO: 1404929 - RNA, 19 nt, Artificial Sequence
  Description of Artificial Sequence: Synthetic oligonucleotide
  Antisense strand to SEQ ID NO: 1404928
uucugcaggcuccauucuc

SEQ ID NO: 1404930 - RNA, 19 nt, Artificial Sequence
  Description of Artificial Sequence: Synthetic oligonucleotide
  Sense strand starting at position 2686 of SEQ ID NO: 1243261
gccuguccgaguugggaau

SEQ ID NO: 1404931 - RNA, 19 nt, Artificial Sequence
  Description of Artificial Sequence: Synthetic oligonucleotide
  Antisense strand to SEQ ID NO: 1404930
auucccaacucggacaggc

SEQ ID NO: 1404932 - RNA, 19 nt, Artificial Sequence
  Description of Artificial Sequence: Synthetic oligonucleotide
  Sense strand starting at position 2882 of SEQ ID NO: 1243261
gcaguucuuagugagggca

SEQ ID NO: 1404933 - RNA, 19 nt, Artificial Sequence
  Description of Artificial Sequence: Synthetic oligonucleotide
  Antisense strand to SEQ ID NO: 1404932
ugcccucacuaagaacugc

SEQ ID NO: 1404934 - RNA, 19 nt, Artificial Sequence
  Description of Artificial Sequence: Synthetic oligonucleotide
  Sense strand starting at position 2884 of SEQ ID NO: 1243261
aguucuuagugagggcaau

SEQ ID NO: 1404935 - RNA, 19 nt, Artificial Sequence
  Description of Artificial Sequence: Synthetic oligonucleotide
  Antisense strand to SEQ ID NO: 1404934
auugcccucacuaagaacu

SEQ ID NO: 1404936 - RNA, 19 nt, Artificial Sequence
  Description of Artificial Sequence: Synthetic oligonucleotide
  Sense strand starting at position 2885 of SEQ ID NO: 1243261
guucuuagugagggcaauu

SEQ ID NO: 1404937 - RNA, 19 nt, Artificial Sequence
  Description of Artificial Sequence: Synthetic oligonucleotide
  Antisense strand to SEQ ID NO: 1404936
aauugcccucacuaagaac

SEQ ID NO: 1404938 - RNA, 19 nt, Artificial Sequence
  Description of Artificial Sequence: Synthetic oligonucleotide
  Sense strand starting at position 30 of SEQ ID NO: 1243262
gggagagaacuggguguuu

SEQ ID NO: 1404939 - RNA, 19 nt, Artificial Sequence
  Description of Artificial Sequence: Synthetic oligonucleotide
  Antisense strand to SEQ ID NO: 1404938
aaacacccaguucucuccc

SEQ ID NO: 1404940 - RNA, 19 nt, Artificial Sequence
  Description of Artificial Sequence: Synthetic oligonucleotide
  Sense strand starting at position 121 of SEQ ID NO: 1243262
gggcuauugugccuaugca

SEQ ID NO: 1404941 - RNA, 19 nt, Artificial Sequence
  Description of Artificial Sequence: Synthetic oligonucleotide
  Antisense strand to SEQ ID NO: 1404940
ugcauaggcacaauagccc

SEQ ID NO: 1404942 - RNA, 19 nt, Artificial Sequence
  Description of Artificial Sequence: Synthetic oligonucleotide
  Sense strand starting at position 477 of SEQ ID NO: 1243262
ggucacuauagcuggcaga

SEQ ID NO: 1404943 - RNA, 19 nt, Artificial Sequence
  Description of Artificial Sequence: Synthetic oligonucleotide
  Antisense strand to SEQ ID NO: 1404942
ucugccagcuauagugacc

SEQ ID NO: 1404944 - RNA, 19 nt, Artificial Sequence
  Description of Artificial Sequence: Synthetic oligonucleotide
  Sense strand starting at position 478 of SEQ ID NO: 1243262
gucacuauagcuggcagaa

SEQ ID NO: 1404945 - RNA, 19 nt, Artificial Sequence
  Description of Artificial Sequence: Synthetic oligonucleotide
  Antisense strand to SEQ ID NO: 1404944
uucugccagcuauagugac

SEQ ID NO: 1404946 - RNA, 19 nt, Artificial Sequence
  Description of Artificial Sequence: Synthetic oligonucleotide
  Sense strand starting at position 480 of SEQ ID NO: 1243262
cacuauagcuggcagaaga

SEQ ID NO: 1404947 - RNA, 19 nt, Artificial Sequence
  Description of Artificial Sequence: Synthetic oligonucleotide
  Antisense strand to SEQ ID NO: 1404946
ucuucugccagcuauagug

SEQ ID NO: 1404948 - RNA, 19 nt, Artificial Sequence
  Description of Artificial Sequence: Synthetic oligonucleotide
  Sense strand starting at position 892 of SEQ ID NO: 1243262
gugggauggucagugguga

SEQ ID NO: 1404949 - RNA, 19 nt, Artificial Sequence
  Description of Artificial Sequence: Synthetic oligonucleotide
  Antisense strand to SEQ ID NO: 1404948
ucaccacugaccaucccac

SEQ ID NO: 1404950 - RNA, 19 nt, Artificial Sequence
  Description of Artificial Sequence: Synthetic oligonucleotide
  Sense strand starting at position 893 of SEQ ID NO: 1243262
ugggauggucaguggugaa

SEQ ID NO: 1404951 - RNA, 19 nt, Artificial Sequence
  Description of Artificial Sequence: Synthetic oligonucleotide
  Antisense strand to SEQ ID NO: 1404950
uucaccacugaccauccca

SEQ ID NO: 1404952 - RNA, 19 nt, Artificial Sequence
  Description of Artificial Sequence: Synthetic oligonucleotide
  Sense strand starting at position 896 of SEQ ID NO: 1243262
gauggucaguggugaacuu

SEQ ID NO: 1404953 - RNA, 19 nt, Artificial Sequence
  Description of Artificial Sequence: Synthetic oligonucleotide
  Antisense strand to SEQ ID NO: 1404952
aaguucaccacugaccauc

SEQ ID NO: 1404954 - RNA, 19 nt, Artificial Sequence
  Description of Artificial Sequence: Synthetic oligonucleotide
  Sense strand starting at position 905 of SEQ ID NO: 1243262
uggugaacuuuggguugaa

SEQ ID NO: 1404955 - RNA, 19 nt, Artificial Sequence
  Description of Artificial Sequence: Synthetic oligonucleotide
  Antisense strand to SEQ ID NO: 1404954
uucaacccaaaguucacca

SEQ ID NO: 1404956 - RNA, 19 nt, Artificial Sequence
  Description of Artificial Sequence: Synthetic oligonucleotide
  Sense strand starting at position 906 of SEQ ID NO: 1243262
ggugaacuuuggguugaaa

SEQ ID NO: 1404957 - RNA, 19 nt, Artificial Sequence
  Description of Artificial Sequence: Synthetic oligonucleotide
  Antisense strand to SEQ ID NO: 1404956
uuucaacccaaaguucacc

SEQ ID NO: 1404958 - RNA, 19 nt, Artificial Sequence
  Description of Artificial Sequence: Synthetic oligonucleotide
  Sense strand starting at position 953 of SEQ ID NO: 1243262
guggaaauguucuggaaga

SEQ ID NO: 1404959 - RNA, 19 nt, Artificial Sequence
  Description of Artificial Sequence: Synthetic oligonucleotide
  Antisense strand to SEQ ID NO: 1404958
ucuuccagaacauuuccac

SEQ ID NO: 1404960 - RNA, 19 nt, Artificial Sequence
  Description of Artificial Sequence: Synthetic oligonucleotide
  Sense strand starting at position 954 of SEQ ID NO: 1243262
uggaaauguucuggaagaa

SEQ ID NO: 1404961 - RNA, 19 nt, Artificial Sequence
  Description of Artificial Sequence: Synthetic oligonucleotide
  Antisense strand to SEQ ID NO: 1404960
uucuuccagaacauuucca

SEQ ID NO: 1404962 - RNA, 19 nt, Artificial Sequence
  Description of Artificial Sequence: Synthetic oligonucleotide
  Sense strand starting at position 1099 of SEQ ID NO: 1243262
gcccaagucuggcaucaga

SEQ ID NO: 1404963 - RNA, 19 nt, Artificial Sequence
  Description of Artificial Sequence: Synthetic oligonucleotide
  Antisense strand to SEQ ID NO: 1404962
ucugaugccagacuugggc

SEQ ID NO: 1404964 - RNA, 19 nt, Artificial Sequence
  Description of Artificial Sequence: Synthetic oligonucleotide
  Sense strand starting at position 1121 of SEQ ID NO: 1243262
gagguaaaguucgguggca

SEQ ID NO: 1404965 - RNA, 19 nt, Artificial Sequence
  Description of Artificial Sequence: Synthetic oligonucleotide
  Antisense strand to SEQ ID NO: 1404964
ugccaccgaacuuuaccuc

SEQ ID NO: 1404966 - RNA, 19 nt, Artificial Sequence
  Description of Artificial Sequence: Synthetic oligonucleotide
  Sense strand starting at position 1123 of SEQ ID NO: 1243262
gguaaaguucgguggcacu

SEQ ID NO: 1404967 - RNA, 19 nt, Artificial Sequence
  Description of Artificial Sequence: Synthetic oligonucleotide
  Antisense strand to SEQ ID NO: 1404966
agugccaccgaacuuuacc

SEQ ID NO: 1404968 - RNA, 19 nt, Artificial Sequence
  Description of Artificial Sequence: Synthetic oligonucleotide
  Sense strand starting at position 3143 of SEQ ID NO: 1243262
cacaguagcugacaugaaa

SEQ ID NO: 1404969 - RNA, 19 nt, Artificial Sequence
  Description of Artificial Sequence: Synthetic oligonucleotide
  Antisense strand to SEQ ID NO: 1404968
uuucaugucagcuacugug

SEQ ID NO: 1404970 - RNA, 19 nt, Artificial Sequence
  Description of Artificial Sequence: Synthetic oligonucleotide
  Sense strand starting at position 3245 of SEQ ID NO: 1243262
acuugaaacuugggaauag

SEQ ID NO: 1404971 - RNA, 19 nt, Artificial Sequence
  Description of Artificial Sequence: Synthetic oligonucleotide
  Antisense strand to SEQ ID NO: 1404970
cuauucccaaguuucaagu

SEQ ID NO: 1404972 - RNA, 19 nt, Artificial Sequence
  Description of Artificial Sequence: Synthetic oligonucleotide
  Sense strand starting at position 3249 of SEQ ID NO: 1243262
gaaacuugggaauagcgua

SEQ ID NO: 1404973 - RNA, 19 nt, Artificial Sequence
  Description of Artificial Sequence: Synthetic oligonucleotide
  Antisense strand to SEQ ID NO: 1404972
uacgcuauucccaaguuuc

SEQ ID NO: 1404974 - RNA, 19 nt, Artificial Sequence
  Description of Artificial Sequence: Synthetic oligonucleotide
  Sense strand starting at position 3254 of SEQ ID NO: 1243262
uugggaauagcguauucua

SEQ ID NO: 1404975 - RNA, 19 nt, Artificial Sequence
  Description of Artificial Sequence: Synthetic oligonucleotide
  Antisense strand to SEQ ID NO: 1404974
uagaauacgcuauucccaa

SEQ ID NO: 1404976 - RNA, 19 nt, Artificial Sequence
  Description of Artificial Sequence: Synthetic oligonucleotide
  Sense strand starting at position 3285 of SEQ ID NO: 1243262
gcacuaguggaagguuaau

SEQ ID NO: 1404977 - RNA, 19 nt, Artificial Sequence
  Description of Artificial Sequence: Synthetic oligonucleotide
  Antisense strand to SEQ ID NO: 1404976
auuaaccuuccacuagugc

SEQ ID NO: 1404978 - RNA, 19 nt, Artificial Sequence
  Description of Artificial Sequence: Synthetic oligonucleotide
  Sense strand starting at position 3328 of SEQ ID NO: 1243262
gugguuaggcguucugguu

SEQ ID NO: 1404979 - RNA, 19 nt, Artificial Sequence
  Description of Artificial Sequence: Synthetic oligonucleotide
  Antisense strand to SEQ ID NO: 1404978
aaccagaacgccuaaccac

SEQ ID NO: 1404980 - RNA, 19 nt, Artificial Sequence
  Description of Artificial Sequence: Synthetic oligonucleotide
  Sense strand starting at position 3627 of SEQ ID NO: 1243262
guuccugagucccagggau

SEQ ID NO: 1404981 - RNA, 19 nt, Artificial Sequence
  Description of Artificial Sequence: Synthetic oligonucleotide
  Antisense strand to SEQ ID NO: 1404980
aucccugggacucaggaac

SEQ ID NO: 1404982 - RNA, 19 nt, Artificial Sequence
  Description of Artificial Sequence: Synthetic oligonucleotide
  Sense strand starting at position 3701 of SEQ ID NO: 1243262
gccaguccuacccggagau

SEQ ID NO: 1404983 - RNA, 19 nt, Artificial Sequence
  Description of Artificial Sequence: Synthetic oligonucleotide
  Antisense strand to SEQ ID NO: 1404982
aucuccggguaggacuggc

SEQ ID NO: 1404984 - RNA, 19 nt, Artificial Sequence
  Description of Artificial Sequence: Synthetic oligonucleotide
  Sense strand starting at position 3933 of SEQ ID NO: 1243262
cccgacuccugacacauaa

SEQ ID NO: 1404985 - RNA, 19 nt, Artificial Sequence
  Description of Artificial Sequence: Synthetic oligonucleotide
  Antisense strand to SEQ ID NO: 1404984
uuaugugucaggagucggg

SEQ ID NO: 1404986 - RNA, 19 nt, Artificial Sequence
  Description of Artificial Sequence: Synthetic oligonucleotide
  Sense strand starting at position 86 of SEQ ID NO: 1243263
ggaggguacggucaaguuu

SEQ ID NO: 1404987 - RNA, 19 nt, Artificial Sequence
  Description of Artificial Sequence: Synthetic oligonucleotide
  Antisense strand to SEQ ID NO: 1404986
aaacuugaccguacccucc

SEQ ID NO: 1404988 - RNA, 19 nt, Artificial Sequence
  Description of Artificial Sequence: Synthetic oligonucleotide
  Sense strand starting at position 652 of SEQ ID NO: 1243263
cagguauccuggccgcauu

SEQ ID NO: 1404989 - RNA, 19 nt, Artificial Sequence
  Description of Artificial Sequence: Synthetic oligonucleotide
  Antisense strand to SEQ ID NO: 1404988
aaugcggccaggauaccug

SEQ ID NO: 1404990 - RNA, 19 nt, Artificial Sequence
  Description of Artificial Sequence: Synthetic oligonucleotide
  Sense strand starting at position 1711 of SEQ ID NO: 1243263
gcaguuaaggagcaagaga

SEQ ID NO: 1404991 - RNA, 19 nt, Artificial Sequence
  Description of Artificial Sequence: Synthetic oligonucleotide
  Antisense strand to SEQ ID NO: 1404990
ucucuugcuccuuaacugc

SEQ ID NO: 1404992 - RNA, 19 nt, Artificial Sequence
  Description of Artificial Sequence: Synthetic oligonucleotide
  Sense strand starting at position 2209 of SEQ ID NO: 1243263
cccagaggucccugacauu

SEQ ID NO: 1404993 - RNA, 19 nt, Artificial Sequence
  Description of Artificial Sequence: Synthetic oligonucleotide
  Antisense strand to SEQ ID NO: 1404992
aaugucagggaccucuggg

SEQ ID NO: 1404994 - RNA, 19 nt, Artificial Sequence
  Description of Artificial Sequence: Synthetic oligonucleotide
  Sense strand starting at position 2212 of SEQ ID NO: 1243263
agaggucccugacauuaau

SEQ ID NO: 1404995 - RNA, 19 nt, Artificial Sequence
  Description of Artificial Sequence: Synthetic oligonucleotide
  Antisense strand to SEQ ID NO: 1404994
auuaaugucagggaccucu

SEQ ID NO: 1404996 - RNA, 19 nt, Artificial Sequence
  Description of Artificial Sequence: Synthetic oligonucleotide
  Sense strand starting at position 2339 of SEQ ID NO: 1243263
guccuagggccuuagggau

SEQ ID NO: 1404997 - RNA, 19 nt, Artificial Sequence
  Description of Artificial Sequence: Synthetic oligonucleotide
  Antisense strand to SEQ ID NO: 1404996
aucccuaaggcccuaggac

SEQ ID NO: 1404998 - RNA, 19 nt, Artificial Sequence
  Description of Artificial Sequence: Synthetic oligonucleotide
  Sense strand starting at position 2448 of SEQ ID NO: 1243263
ugggaaucccguuaaccca

SEQ ID NO: 1404999 - RNA, 19 nt, Artificial Sequence
  Description of Artificial Sequence: Synthetic oligonucleotide
  Antisense strand to SEQ ID NO: 1404998
uggguuaacgggauuccca

SEQ ID NO: 1405000 - RNA, 19 nt, Artificial Sequence
  Description of Artificial Sequence: Synthetic oligonucleotide
  Sense strand starting at position 2467 of SEQ ID NO: 1243263
cuucccgaaagcugugaau

SEQ ID NO: 1405001 - RNA, 19 nt, Artificial Sequence
  Description of Artificial Sequence: Synthetic oligonucleotide
  Antisense strand to SEQ ID NO: 1405000
auucacagcuuucgggaag

SEQ ID NO: 1405002 - RNA, 19 nt, Artificial Sequence
  Description of Artificial Sequence: Synthetic oligonucleotide
  Sense strand starting at position 2469 of SEQ ID NO: 1243263
ucccgaaagcugugaauca

SEQ ID NO: 1405003 - RNA, 19 nt, Artificial Sequence
  Description of Artificial Sequence: Synthetic oligonucleotide
  Antisense strand to SEQ ID NO: 1405002
ugauucacagcuuucggga

SEQ ID NO: 1405004 - RNA, 19 nt, Artificial Sequence
  Description of Artificial Sequence: Synthetic oligonucleotide
  Sense strand starting at position 2476 of SEQ ID NO: 1243263
agcugugaaucaggugagu

SEQ ID NO: 1405005 - RNA, 19 nt, Artificial Sequence
  Description of Artificial Sequence: Synthetic oligonucleotide
  Antisense strand to SEQ ID NO: 1405004
acucaccugauucacagcu

SEQ ID NO: 1405006 - RNA, 19 nt, Artificial Sequence
  Description of Artificial Sequence: Synthetic oligonucleotide
  Sense strand starting at position 2786 of SEQ ID NO: 1243263
ggcugaauccugugagacc

SEQ ID NO: 1405007 - RNA, 19 nt, Artificial Sequence
  Description of Artificial Sequence: Synthetic oligonucleotide
  Antisense strand to SEQ ID NO: 1405006
ggucucacaggauucagcc

SEQ ID NO: 1405008 - RNA, 19 nt, Artificial Sequence
  Description of Artificial Sequence: Synthetic oligonucleotide
  Sense strand starting at position 2787 of SEQ ID NO: 1243263
gcugaauccugugagaccu

SEQ ID NO: 1405009 - RNA, 19 nt, Artificial Sequence
  Description of Artificial Sequence: Synthetic oligonucleotide
  Antisense strand to SEQ ID NO: 1405008
aggucucacaggauucagc

SEQ ID NO: 1405010 - RNA, 19 nt, Artificial Sequence
  Description of Artificial Sequence: Synthetic oligonucleotide
  Sense strand starting at position 2798 of SEQ ID NO: 1243263
ugagaccuucccugacuca

SEQ ID NO: 1405011 - RNA, 19 nt, Artificial Sequence
  Description of Artificial Sequence: Synthetic oligonucleotide
  Antisense strand to SEQ ID NO: 1405010
ugagucagggaaggucuca

SEQ ID NO: 1405012 - RNA, 19 nt, Artificial Sequence
  Description of Artificial Sequence: Synthetic oligonucleotide
  Sense strand starting at position 3283 of SEQ ID NO: 1243263
cauaguagugaauauguau

SEQ ID NO: 1405013 - RNA, 19 nt, Artificial Sequence
  Description of Artificial Sequence: Synthetic oligonucleotide
  Antisense strand to SEQ ID NO: 1405012
auacauauucacuacuaug

SEQ ID NO: 1405014 - RNA, 19 nt, Artificial Sequence
  Description of Artificial Sequence: Synthetic oligonucleotide
  Sense strand starting at position 3286 of SEQ ID NO: 1243263
aguagugaauauguaugua

SEQ ID NO: 1405015 - RNA, 19 nt, Artificial Sequence
  Description of Artificial Sequence: Synthetic oligonucleotide
  Antisense strand to SEQ ID NO: 1405014
uacauacauauucacuacu

SEQ ID NO: 1405016 - RNA, 19 nt, Artificial Sequence
  Description of Artificial Sequence: Synthetic oligonucleotide
  Sense strand starting at position 3446 of SEQ ID NO: 1243263
uuaagugacuugcccgaga

SEQ ID NO: 1405017 - RNA, 19 nt, Artificial Sequence
  Description of Artificial Sequence: Synthetic oligonucleotide
  Antisense strand to SEQ ID NO: 1405016
ucucgggcaagucacuuaa

SEQ ID NO: 1405018 - RNA, 19 nt, Artificial Sequence
  Description of Artificial Sequence: Synthetic oligonucleotide
  Sense strand starting at position 3448 of SEQ ID NO: 1243263
aagugacuugcccgagauu

SEQ ID NO: 1405019 - RNA, 19 nt, Artificial Sequence
  Description of Artificial Sequence: Synthetic oligonucleotide
  Antisense strand to SEQ ID NO: 1405018
aaucucgggcaagucacuu

SEQ ID NO: 1405020 - RNA, 19 nt, Artificial Sequence
  Description of Artificial Sequence: Synthetic oligonucleotide
  Sense strand starting at position 3457 of SEQ ID NO: 1243263
gcccgagauugcuggguga

SEQ ID NO: 1405021 - RNA, 19 nt, Artificial Sequence
  Description of Artificial Sequence: Synthetic oligonucleotide
  Antisense strand to SEQ ID NO: 1405020
ucacccagcaaucucgggc

SEQ ID NO: 1405022 - RNA, 19 nt, Artificial Sequence
  Description of Artificial Sequence: Synthetic oligonucleotide
  Sense strand starting at position 3459 of SEQ ID NO: 1243263
ccgagauugcugggugagu

SEQ ID NO: 1405023 - RNA, 19 nt, Artificial Sequence
  Description of Artificial Sequence: Synthetic oligonucleotide
  Antisense strand to SEQ ID NO: 1405022
acucacccagcaaucucgg

SEQ ID NO: 1405024 - RNA, 19 nt, Artificial Sequence
  Description of Artificial Sequence: Synthetic oligonucleotide
  Sense strand starting at position 3583 of SEQ ID NO: 1243263
cuaacuugcucccugcaga

SEQ ID NO: 1405025 - RNA, 19 nt, Artificial Sequence
  Description of Artificial Sequence: Synthetic oligonucleotide
  Antisense strand to SEQ ID NO: 1405024
ucugcagggagcaaguuag

SEQ ID NO: 1405026 - RNA, 19 nt, Artificial Sequence
  Description of Artificial Sequence: Synthetic oligonucleotide
  Sense strand starting at position 3713 of SEQ ID NO: 1243263
uccucagucuguuaagggu

SEQ ID NO: 1405027 - RNA, 19 nt, Artificial Sequence
  Description of Artificial Sequence: Synthetic oligonucleotide
  Antisense strand to SEQ ID NO: 1405026
acccuuaacagacugagga

SEQ ID NO: 1405028 - RNA, 19 nt, Artificial Sequence
  Description of Artificial Sequence: Synthetic oligonucleotide
  Sense strand starting at position 3753 of SEQ ID NO: 1243263
ggcacuuucucguggcaga

SEQ ID NO: 1405029 - RNA, 19 nt, Artificial Sequence
  Description of Artificial Sequence: Synthetic oligonucleotide
  Antisense strand to SEQ ID NO: 1405028
ucugccacgagaaagugcc

SEQ ID NO: 1405030 - RNA, 19 nt, Artificial Sequence
  Description of Artificial Sequence: Synthetic oligonucleotide
  Sense strand starting at position 3836 of SEQ ID NO: 1243263
ugcauuauucucuguccca

SEQ ID NO: 1405031 - RNA, 19 nt, Artificial Sequence
  Description of Artificial Sequence: Synthetic oligonucleotide
  Antisense strand to SEQ ID NO: 1405030
ugggacagagaauaaugca

SEQ ID NO: 1405032 - RNA, 19 nt, Artificial Sequence
  Description of Artificial Sequence: Synthetic oligonucleotide
  Sense strand starting at position 3837 of SEQ ID NO: 1243263
gcauuauucucugucccag

SEQ ID NO: 1405033 - RNA, 19 nt, Artificial Sequence
  Description of Artificial Sequence: Synthetic oligonucleotide
  Antisense strand to SEQ ID NO: 1405032
cugggacagagaauaaugc

SEQ ID NO: 1405034 - RNA, 19 nt, Artificial Sequence
  Description of Artificial Sequence: Synthetic oligonucleotide
  Sense strand starting at position 3934 of SEQ ID NO: 1243263
gcagcacugcagcagaaau

SEQ ID NO: 1405035 - RNA, 19 nt, Artificial Sequence
  Description of Artificial Sequence: Synthetic oligonucleotide
  Antisense strand to SEQ ID NO: 1405034
auuucugcugcagugcugc

SEQ ID NO: 1405036 - RNA, 19 nt, Artificial Sequence
  Description of Artificial Sequence: Synthetic oligonucleotide
  Sense strand starting at position 66 of SEQ ID NO: 1243264
aaguccuaaucgugaucua

SEQ ID NO: 1405037 - RNA, 19 nt, Artificial Sequence
  Description of Artificial Sequence: Synthetic oligonucleotide
  Antisense strand to SEQ ID NO: 1405036
uagaucacgauuaggacuu

SEQ ID NO: 1405038 - RNA, 19 nt, Artificial Sequence
  Description of Artificial Sequence: Synthetic oligonucleotide
  Sense strand starting at position 67 of SEQ ID NO: 1243264
aguccuaaucgugaucuag

SEQ ID NO: 1405039 - RNA, 19 nt, Artificial Sequence
  Description of Artificial Sequence: Synthetic oligonucleotide
  Antisense strand to SEQ ID NO: 1405038
cuagaucacgauuaggacu

SEQ ID NO: 1405040 - RNA, 19 nt, Artificial Sequence
  Description of Artificial Sequence: Synthetic oligonucleotide
  Sense strand starting at position 69 of SEQ ID NO: 1243264
uccuaaucgugaucuagag

SEQ ID NO: 1405041 - RNA, 19 nt, Artificial Sequence
  Description of Artificial Sequence: Synthetic oligonucleotide
  Antisense strand to SEQ ID NO: 1405040
cucuagaucacgauuagga

SEQ ID NO: 1405042 - RNA, 19 nt, Artificial Sequence
  Description of Artificial Sequence: Synthetic oligonucleotide
  Sense strand starting at position 71 of SEQ ID NO: 1243264
cuaaucgugaucuagagau

SEQ ID NO: 1405043 - RNA, 19 nt, Artificial Sequence
  Description of Artificial Sequence: Synthetic oligonucleotide
  Antisense strand to SEQ ID NO: 1405042
aucucuagaucacgauuag

SEQ ID NO: 1405044 - RNA, 19 nt, Artificial Sequence
  Description of Artificial Sequence: Synthetic oligonucleotide
  Sense strand starting at position 139 of SEQ ID NO: 1243264
ugcauugucuaccuuggaa

SEQ ID NO: 1405045 - RNA, 19 nt, Artificial Sequence
  Description of Artificial Sequence: Synthetic oligonucleotide
  Antisense strand to SEQ ID NO: 1405044
uuccaagguagacaaugca

SEQ ID NO: 1405046 - RNA, 19 nt, Artificial Sequence
  Description of Artificial Sequence: Synthetic oligonucleotide
  Sense strand starting at position 192 of SEQ ID NO: 1243264
gggagcucugucuacauca

SEQ ID NO: 1405047 - RNA, 19 nt, Artificial Sequence
  Description of Artificial Sequence: Synthetic oligonucleotide
  Antisense strand to SEQ ID NO: 1405046
ugauguagacagagcuccc

SEQ ID NO: 1405048 - RNA, 19 nt, Artificial Sequence
  Description of Artificial Sequence: Synthetic oligonucleotide
  Sense strand starting at position 229 of SEQ ID NO: 1243264
gucuuaucuuagcccagga

SEQ ID NO: 1405049 - RNA, 19 nt, Artificial Sequence
  Description of Artificial Sequence: Synthetic oligonucleotide
  Antisense strand to SEQ ID NO: 1405048
uccugggcuaagauaagac

SEQ ID NO: 1405050 - RNA, 19 nt, Artificial Sequence
  Description of Artificial Sequence: Synthetic oligonucleotide
  Sense strand starting at position 279 of SEQ ID NO: 1243264
gccugaucucagggaaugu

SEQ ID NO: 1405051 - RNA, 19 nt, Artificial Sequence
  Description of Artificial Sequence: Synthetic oligonucleotide
  Antisense strand to SEQ ID NO: 1405050
acauucccugagaucaggc

SEQ ID NO: 1405052 - RNA, 19 nt, Artificial Sequence
  Description of Artificial Sequence: Synthetic oligonucleotide
  Sense strand starting at position 412 of SEQ ID NO: 1243264
gggugucaggagcauuguu

SEQ ID NO: 1405053 - RNA, 19 nt, Artificial Sequence
  Description of Artificial Sequence: Synthetic oligonucleotide
  Antisense strand to SEQ ID NO: 1405052
aacaaugcuccugacaccc

SEQ ID NO: 1405054 - RNA, 19 nt, Artificial Sequence
  Description of Artificial Sequence: Synthetic oligonucleotide
  Sense strand starting at position 443 of SEQ ID NO: 1243264
cugugauucgcugguagcu

SEQ ID NO: 1405055 - RNA, 19 nt, Artificial Sequence
  Description of Artificial Sequence: Synthetic oligonucleotide
  Antisense strand to SEQ ID NO: 1405054
agcuaccagcgaaucacag

SEQ ID NO: 1405056 - RNA, 19 nt, Artificial Sequence
  Description of Artificial Sequence: Synthetic oligonucleotide
  Sense strand starting at position 470 of SEQ ID NO: 1243264
uggugaagcuuagugggua

SEQ ID NO: 1405057 - RNA, 19 nt, Artificial Sequence
  Description of Artificial Sequence: Synthetic oligonucleotide
  Antisense strand to SEQ ID NO: 1405056
uacccacuaagcuucacca

SEQ ID NO: 1405058 - RNA, 19 nt, Artificial Sequence
  Description of Artificial Sequence: Synthetic oligonucleotide
  Sense strand starting at position 562 of SEQ ID NO: 1243264
ggucacagcuguuagugaa

SEQ ID NO: 1405059 - RNA, 19 nt, Artificial Sequence
  Description of Artificial Sequence: Synthetic oligonucleotide
  Antisense strand to SEQ ID NO: 1405058
uucacuaacagcugugacc

SEQ ID NO: 1405060 - RNA, 19 nt, Artificial Sequence
  Description of Artificial Sequence: Synthetic oligonucleotide
  Sense strand starting at position 693 of SEQ ID NO: 1243264
ccauccuugugcugggaga

SEQ ID NO: 1405061 - RNA, 19 nt, Artificial Sequence
  Description of Artificial Sequence: Synthetic oligonucleotide
  Antisense strand to SEQ ID NO: 1405060
ucucccagcacaaggaugg

SEQ ID NO: 1405062 - RNA, 19 nt, Artificial Sequence
  Description of Artificial Sequence: Synthetic oligonucleotide
  Sense strand starting at position 889 of SEQ ID NO: 1243264
ccaggaaugugagagguuu

SEQ ID NO: 1405063 - RNA, 19 nt, Artificial Sequence
  Description of Artificial Sequence: Synthetic oligonucleotide
  Antisense strand to SEQ ID NO: 1405062
aaaccucucacauuccugg

SEQ ID NO: 1405064 - RNA, 19 nt, Artificial Sequence
  Description of Artificial Sequence: Synthetic oligonucleotide
  Sense strand starting at position 1311 of SEQ ID NO: 1243264
ggaggugcugcccaguuau

SEQ ID NO: 1405065 - RNA, 19 nt, Artificial Sequence
  Description of Artificial Sequence: Synthetic oligonucleotide
  Antisense strand to SEQ ID NO: 1405064
auaacugggcagcaccucc

SEQ ID NO: 1405066 - RNA, 19 nt, Artificial Sequence
  Description of Artificial Sequence: Synthetic oligonucleotide
  Sense strand starting at position 1462 of SEQ ID NO: 1243264
cagccugucccagggagua

SEQ ID NO: 1405067 - RNA, 19 nt, Artificial Sequence
  Description of Artificial Sequence: Synthetic oligonucleotide
  Antisense strand to SEQ ID NO: 1405066
uacucccugggacaggcug

SEQ ID NO: 1405068 - RNA, 19 nt, Artificial Sequence
  Description of Artificial Sequence: Synthetic oligonucleotide
  Sense strand starting at position 1683 of SEQ ID NO: 1243264
gcuccaugaaguggaguuu

SEQ ID NO: 1405069 - RNA, 19 nt, Artificial Sequence
  Description of Artificial Sequence: Synthetic oligonucleotide
  Antisense strand to SEQ ID NO: 1405068
aaacuccacuucauggagc

SEQ ID NO: 1405070 - RNA, 19 nt, Artificial Sequence
  Description of Artificial Sequence: Synthetic oligonucleotide
  Sense strand starting at position 1793 of SEQ ID NO: 1243264
ccgacuccuccgugaccua

SEQ ID NO: 1405071 - RNA, 19 nt, Artificial Sequence
  Description of Artificial Sequence: Synthetic oligonucleotide
  Antisense strand to SEQ ID NO: 1405070
uaggucacggaggagucgg

SEQ ID NO: 1405072 - RNA, 19 nt, Artificial Sequence
  Description of Artificial Sequence: Synthetic oligonucleotide
  Sense strand starting at position 3122 of SEQ ID NO: 1243264
gucagucagucauuucuga

SEQ ID NO: 1405073 - RNA, 19 nt, Artificial Sequence
  Description of Artificial Sequence: Synthetic oligonucleotide
  Antisense strand to SEQ ID NO: 1405072
ucagaaaugacugacugac

SEQ ID NO: 1405074 - RNA, 19 nt, Artificial Sequence
  Description of Artificial Sequence: Synthetic oligonucleotide
  Sense strand starting at position 3127 of SEQ ID NO: 1243264
ucagucauuucugagcaga

SEQ ID NO: 1405075 - RNA, 19 nt, Artificial Sequence
  Description of Artificial Sequence: Synthetic oligonucleotide
  Antisense strand to SEQ ID NO: 1405074
ucugcucagaaaugacuga

SEQ ID NO: 1405076 - RNA, 19 nt, Artificial Sequence
  Description of Artificial Sequence: Synthetic oligonucleotide
  Sense strand starting at position 3198 of SEQ ID NO: 1243264
accucaccucagugugaga

SEQ ID NO: 1405077 - RNA, 19 nt, Artificial Sequence
  Description of Artificial Sequence: Synthetic oligonucleotide
  Antisense strand to SEQ ID NO: 1405076
ucucacacugaggugaggu

SEQ ID NO: 1405078 - RNA, 19 nt, Artificial Sequence
  Description of Artificial Sequence: Synthetic oligonucleotide
  Sense strand starting at position 3480 of SEQ ID NO: 1243264
auggcaaugacacgagauu

SEQ ID NO: 1405079 - RNA, 19 nt, Artificial Sequence
  Description of Artificial Sequence: Synthetic oligonucleotide
  Antisense strand to SEQ ID NO: 1405078
aaucucgugucauugccau

SEQ ID NO: 1405080 - RNA, 19 nt, Artificial Sequence
  Description of Artificial Sequence: Synthetic oligonucleotide
  Sense strand starting at position 3583 of SEQ ID NO: 1243264
cggaaaguguuucaaagug

SEQ ID NO: 1405081 - RNA, 19 nt, Artificial Sequence
  Description of Artificial Sequence: Synthetic oligonucleotide
  Antisense strand to SEQ ID NO: 1405080
cacuuugaaacacuuuccg

SEQ ID NO: 1405082 - RNA, 19 nt, Artificial Sequence
  Description of Artificial Sequence: Synthetic oligonucleotide
  Sense strand starting at position 3592 of SEQ ID NO: 1243264
uuucaaagugucuggguga

SEQ ID NO: 1405083 - RNA, 19 nt, Artificial Sequence
  Description of Artificial Sequence: Synthetic oligonucleotide
  Antisense strand to SEQ ID NO: 1405082
ucacccagacacuuugaaa

SEQ ID NO: 1405084 - RNA, 19 nt, Artificial Sequence
  Description of Artificial Sequence: Synthetic oligonucleotide
  Sense strand starting at position 3745 of SEQ ID NO: 1243264
agcccauuccucuaagggu

SEQ ID NO: 1405085 - RNA, 19 nt, Artificial Sequence
  Description of Artificial Sequence: Synthetic oligonucleotide
  Antisense strand to SEQ ID NO: 1405084
acccuuagaggaaugggcu

SEQ ID NO: 1405086 - RNA, 19 nt, Artificial Sequence
  Description of Artificial Sequence: Synthetic oligonucleotide
  Sense strand starting at position 3758 of SEQ ID NO: 1243264
aagggugucucugccuuaa

SEQ ID NO: 1405087 - RNA, 19 nt, Artificial Sequence
  Description of Artificial Sequence: Synthetic oligonucleotide
  Antisense strand to SEQ ID NO: 1405086
uuaaggcagagacacccuu

SEQ ID NO: 1405088 - RNA, 19 nt, Artificial Sequence
  Description of Artificial Sequence: Synthetic oligonucleotide
  Sense strand starting at position 520 of SEQ ID NO: 1243265
gaagcugagcucugaguga

SEQ ID NO: 1405089 - RNA, 19 nt, Artificial Sequence
  Description of Artificial Sequence: Synthetic oligonucleotide
  Antisense strand to SEQ ID NO: 1405088
ucacucagagcucagcuuc

SEQ ID NO: 1405090 - RNA, 19 nt, Artificial Sequence
  Description of Artificial Sequence: Synthetic oligonucleotide
  Sense strand starting at position 1219 of SEQ ID NO: 1243265
caacgauccgacuggacau

SEQ ID NO: 1405091 - RNA, 19 nt, Artificial Sequence
  Description of Artificial Sequence: Synthetic oligonucleotide
  Antisense strand to SEQ ID NO: 1405090
auguccagucggaucguug

SEQ ID NO: 1405092 - RNA, 19 nt, Artificial Sequence
  Description of Artificial Sequence: Synthetic oligonucleotide
  Sense strand starting at position 1435 of SEQ ID NO: 1243265
gggaccagauuauagauuu

SEQ ID NO: 1405093 - RNA, 19 nt, Artificial Sequence
  Description of Artificial Sequence: Synthetic oligonucleotide
  Antisense strand to SEQ ID NO: 1405092
aaaucuauaaucugguccc

SEQ ID NO: 1405094 - RNA, 19 nt, Artificial Sequence
  Description of Artificial Sequence: Synthetic oligonucleotide
  Sense strand starting at position 1442 of SEQ ID NO: 1243265
gauuauagauuugguguca

SEQ ID NO: 1405095 - RNA, 19 nt, Artificial Sequence
  Description of Artificial Sequence: Synthetic oligonucleotide
  Antisense strand to SEQ ID NO: 1405094
ugacaccaaaucuauaauc

SEQ ID NO: 1405096 - RNA, 19 nt, Artificial Sequence
  Description of Artificial Sequence: Synthetic oligonucleotide
  Sense strand starting at position 1447 of SEQ ID NO: 1243265
uagauuuggugucaaauaa

SEQ ID NO: 1405097 - RNA, 19 nt, Artificial Sequence
  Description of Artificial Sequence: Synthetic oligonucleotide
  Antisense strand to SEQ ID NO: 1405096
uuauuugacaccaaaucua

SEQ ID NO: 1405098 - RNA, 19 nt, Artificial Sequence
  Description of Artificial Sequence: Synthetic oligonucleotide
  Sense strand starting at position 1451 of SEQ ID NO: 1243265
uuuggugucaaauaacgga

SEQ ID NO: 1405099 - RNA, 19 nt, Artificial Sequence
  Description of Artificial Sequence: Synthetic oligonucleotide
  Antisense strand to SEQ ID NO: 1405098
uccguuauuugacaccaaa

SEQ ID NO: 1405100 - RNA, 19 nt, Artificial Sequence
  Description of Artificial Sequence: Synthetic oligonucleotide
  Sense strand starting at position 1508 of SEQ ID NO: 1243265
caauguugcccugacauug

SEQ ID NO: 1405101 - RNA, 19 nt, Artificial Sequence
  Description of Artificial Sequence: Synthetic oligonucleotide
  Antisense strand to SEQ ID NO: 1405100
caaugucagggcaacauug

SEQ ID NO: 1405102 - RNA, 19 nt, Artificial Sequence
  Description of Artificial Sequence: Synthetic oligonucleotide
  Sense strand starting at position 1533 of SEQ ID NO: 1243265
gcuuucgugccgucuguua

SEQ ID NO: 1405103 - RNA, 19 nt, Artificial Sequence
  Description of Artificial Sequence: Synthetic oligonucleotide
  Antisense strand to SEQ ID NO: 1405102
uaacagacggcacgaaagc

SEQ ID NO: 1405104 - RNA, 19 nt, Artificial Sequence
  Description of Artificial Sequence: Synthetic oligonucleotide
  Sense strand starting at position 1538 of SEQ ID NO: 1243265
cgugccgucuguuaucuua

SEQ ID NO: 1405105 - RNA, 19 nt, Artificial Sequence
  Description of Artificial Sequence: Synthetic oligonucleotide
  Antisense strand to SEQ ID NO: 1405104
uaagauaacagacggcacg

SEQ ID NO: 1405106 - RNA, 19 nt, Artificial Sequence
  Description of Artificial Sequence: Synthetic oligonucleotide
  Sense strand starting at position 1540 of SEQ ID NO: 1243265
ugccgucuguuaucuuauu

SEQ ID NO: 1405107 - RNA, 19 nt, Artificial Sequence
  Description of Artificial Sequence: Synthetic oligonucleotide
  Antisense strand to SEQ ID NO: 1405106
aauaagauaacagacggca

SEQ ID NO: 1405108 - RNA, 19 nt, Artificial Sequence
  Description of Artificial Sequence: Synthetic oligonucleotide
  Sense strand starting at position 1541 of SEQ ID NO: 1243265
gccgucuguuaucuuauuu

SEQ ID NO: 1405109 - RNA, 19 nt, Artificial Sequence
  Description of Artificial Sequence: Synthetic oligonucleotide
  Antisense strand to SEQ ID NO: 1405108
aaauaagauaacagacggc

SEQ ID NO: 1405110 - RNA, 19 nt, Artificial Sequence
  Description of Artificial Sequence: Synthetic oligonucleotide
  Sense strand starting at position 1648 of SEQ ID NO: 1243265
gucaguggcagagaggauu

SEQ ID NO: 1405111 - RNA, 19 nt, Artificial Sequence
  Description of Artificial Sequence: Synthetic oligonucleotide
  Antisense strand to SEQ ID NO: 1405110
aauccucucugccacugac

SEQ ID NO: 1405112 - RNA, 19 nt, Artificial Sequence
  Description of Artificial Sequence: Synthetic oligonucleotide
  Sense strand starting at position 1663 of SEQ ID NO: 1243265
gauugagcccuuggaauca

SEQ ID NO: 1405113 - RNA, 19 nt, Artificial Sequence
  Description of Artificial Sequence: Synthetic oligonucleotide
  Antisense strand to SEQ ID NO: 1405112
ugauuccaagggcucaauc

SEQ ID NO: 1405114 - RNA, 19 nt, Artificial Sequence
  Description of Artificial Sequence: Synthetic oligonucleotide
  Sense strand starting at position 2013 of SEQ ID NO: 1243265
gacuuauccugguggccca

SEQ ID NO: 1405115 - RNA, 19 nt, Artificial Sequence
  Description of Artificial Sequence: Synthetic oligonucleotide
  Antisense strand to SEQ ID NO: 1405114
ugggccaccaggauaaguc

SEQ ID NO: 1405116 - RNA, 19 nt, Artificial Sequence
  Description of Artificial Sequence: Synthetic oligonucleotide
  Sense strand starting at position 2096 of SEQ ID NO: 1243265
cauccuuggucucgacaga

SEQ ID NO: 1405117 - RNA, 19 nt, Artificial Sequence
  Description of Artificial Sequence: Synthetic oligonucleotide
  Antisense strand to SEQ ID NO: 1405116
ucugucgagaccaaggaug

SEQ ID NO: 1405118 - RNA, 19 nt, Artificial Sequence
  Description of Artificial Sequence: Synthetic oligonucleotide
  Sense strand starting at position 2097 of SEQ ID NO: 1243265
auccuuggucucgacagaa

SEQ ID NO: 1405119 - RNA, 19 nt, Artificial Sequence
  Description of Artificial Sequence: Synthetic oligonucleotide
  Antisense strand to SEQ ID NO: 1405118
uucugucgagaccaaggau

SEQ ID NO: 1405120 - RNA, 19 nt, Artificial Sequence
  Description of Artificial Sequence: Synthetic oligonucleotide
  Sense strand starting at position 3185 of SEQ ID NO: 1243265
ggagcuucugcgcuccauu

SEQ ID NO: 1405121 - RNA, 19 nt, Artificial Sequence
  Description of Artificial Sequence: Synthetic oligonucleotide
  Antisense strand to SEQ ID NO: 1405120
aauggagcgcagaagcucc

SEQ ID NO: 1405122 - RNA, 19 nt, Artificial Sequence
  Description of Artificial Sequence: Synthetic oligonucleotide
  Sense strand starting at position 3197 of SEQ ID NO: 1243265
cuccauuguucuguccaga

SEQ ID NO: 1405123 - RNA, 19 nt, Artificial Sequence
  Description of Artificial Sequence: Synthetic oligonucleotide
  Antisense strand to SEQ ID NO: 1405122
ucuggacagaacaauggag

SEQ ID NO: 1405124 - RNA, 19 nt, Artificial Sequence
  Description of Artificial Sequence: Synthetic oligonucleotide
  Sense strand starting at position 3228 of SEQ ID NO: 1243265
gacggaaguccuggccaga

SEQ ID NO: 1405125 - RNA, 19 nt, Artificial Sequence
  Description of Artificial Sequence: Synthetic oligonucleotide
  Antisense strand to SEQ ID NO: 1405124
ucuggccaggacuuccguc

SEQ ID NO: 1405126 - RNA, 19 nt, Artificial Sequence
  Description of Artificial Sequence: Synthetic oligonucleotide
  Sense strand starting at position 3529 of SEQ ID NO: 1243265
caguguucgcugccuagaa

SEQ ID NO: 1405127 - RNA, 19 nt, Artificial Sequence
  Description of Artificial Sequence: Synthetic oligonucleotide
  Antisense strand to SEQ ID NO: 1405126
uucuaggcagcgaacacug

SEQ ID NO: 1405128 - RNA, 19 nt, Artificial Sequence
  Description of Artificial Sequence: Synthetic oligonucleotide
  Sense strand starting at position 3530 of SEQ ID NO: 1243265
aguguucgcugccuagaag

SEQ ID NO: 1405129 - RNA, 19 nt, Artificial Sequence
  Description of Artificial Sequence: Synthetic oligonucleotide
  Antisense strand to SEQ ID NO: 1405128
cuucuaggcagcgaacacu

SEQ ID NO: 1405130 - RNA, 19 nt, Artificial Sequence
  Description of Artificial Sequence: Synthetic oligonucleotide
  Sense strand starting at position 3531 of SEQ ID NO: 1243265
guguucgcugccuagaagu

SEQ ID NO: 1405131 - RNA, 19 nt, Artificial Sequence
  Description of Artificial Sequence: Synthetic oligonucleotide
  Antisense strand to SEQ ID NO: 1405130
acuucuaggcagcgaacac

SEQ ID NO: 1405132 - RNA, 19 nt, Artificial Sequence
  Description of Artificial Sequence: Synthetic oligonucleotide
  Sense strand starting at position 3558 of SEQ ID NO: 1243265
ucccucucugcauagugaa

SEQ ID NO: 1405133 - RNA, 19 nt, Artificial Sequence
  Description of Artificial Sequence: Synthetic oligonucleotide
  Antisense strand to SEQ ID NO: 1405132
uucacuaugcagagaggga

SEQ ID NO: 1405134 - RNA, 19 nt, Artificial Sequence
  Description of Artificial Sequence: Synthetic oligonucleotide
  Sense strand starting at position 3755 of SEQ ID NO: 1243265
cgagauggguggcucauuu

SEQ ID NO: 1405135 - RNA, 19 nt, Artificial Sequence
  Description of Artificial Sequence: Synthetic oligonucleotide
  Antisense strand to SEQ ID NO: 1405134
aaaugagccacccaucucg

SEQ ID NO: 1405136 - RNA, 19 nt, Artificial Sequence
  Description of Artificial Sequence: Synthetic oligonucleotide
  Sense strand starting at position 86 of SEQ ID NO: 1243266
gggugauuccguggucuua

SEQ ID NO: 1405137 - RNA, 19 nt, Artificial Sequence
  Description of Artificial Sequence: Synthetic oligonucleotide
  Antisense strand to SEQ ID NO: 1405136
uaagaccacggaaucaccc

SEQ ID NO: 1405138 - RNA, 19 nt, Artificial Sequence
  Description of Artificial Sequence: Synthetic oligonucleotide
  Sense strand starting at position 88 of SEQ ID NO: 1243266
gugauuccguggucuuagu

SEQ ID NO: 1405139 - RNA, 19 nt, Artificial Sequence
  Description of Artificial Sequence: Synthetic oligonucleotide
  Antisense strand to SEQ ID NO: 1405138
acuaagaccacggaaucac

SEQ ID NO: 1405140 - RNA, 19 nt, Artificial Sequence
  Description of Artificial Sequence: Synthetic oligonucleotide
  Sense strand starting at position 96 of SEQ ID NO: 1243266
guggucuuaguuugagaau

SEQ ID NO: 1405141 - RNA, 19 nt, Artificial Sequence
  Description of Artificial Sequence: Synthetic oligonucleotide
  Antisense strand to SEQ ID NO: 1405140
auucucaaacuaagaccac

SEQ ID NO: 1405142 - RNA, 19 nt, Artificial Sequence
  Description of Artificial Sequence: Synthetic oligonucleotide
  Sense strand starting at position 97 of SEQ ID NO: 1243266
uggucuuaguuugagaauc

SEQ ID NO: 1405143 - RNA, 19 nt, Artificial Sequence
  Description of Artificial Sequence: Synthetic oligonucleotide
  Antisense strand to SEQ ID NO: 1405142
gauucucaaacuaagacca

SEQ ID NO: 1405144 - RNA, 19 nt, Artificial Sequence
  Description of Artificial Sequence: Synthetic oligonucleotide
  Sense strand starting at position 99 of SEQ ID NO: 1243266
gucuuaguuugagaauccu

SEQ ID NO: 1405145 - RNA, 19 nt, Artificial Sequence
  Description of Artificial Sequence: Synthetic oligonucleotide
  Antisense strand to SEQ ID NO: 1405144
aggauucucaaacuaagac

SEQ ID NO: 1405146 - RNA, 19 nt, Artificial Sequence
  Description of Artificial Sequence: Synthetic oligonucleotide
  Sense strand starting at position 105 of SEQ ID NO: 1243266
guuugagaauccuugcagg

SEQ ID NO: 1405147 - RNA, 19 nt, Artificial Sequence
  Description of Artificial Sequence: Synthetic oligonucleotide
  Antisense strand to SEQ ID NO: 1405146
ccugcaaggauucucaaac

SEQ ID NO: 1405148 - RNA, 19 nt, Artificial Sequence
  Description of Artificial Sequence: Synthetic oligonucleotide
  Sense strand starting at position 108 of SEQ ID NO: 1243266
ugagaauccuugcagggag

SEQ ID NO: 1405149 - RNA, 19 nt, Artificial Sequence
  Description of Artificial Sequence: Synthetic oligonucleotide
  Antisense strand to SEQ ID NO: 1405148
cucccugcaaggauucuca

SEQ ID NO: 1405150 - RNA, 19 nt, Artificial Sequence
  Description of Artificial Sequence: Synthetic oligonucleotide
  Sense strand starting at position 136 of SEQ ID NO: 1243266
uggagaucggugugggauu

SEQ ID NO: 1405151 - RNA, 19 nt, Artificial Sequence
  Description of Artificial Sequence: Synthetic oligonucleotide
  Antisense strand to SEQ ID NO: 1405150
aaucccacaccgaucucca

SEQ ID NO: 1405152 - RNA, 19 nt, Artificial Sequence
  Description of Artificial Sequence: Synthetic oligonucleotide
  Sense strand starting at position 686 of SEQ ID NO: 1243266
cagauuuggugcugauacu

SEQ ID NO: 1405153 - RNA, 19 nt, Artificial Sequence
  Description of Artificial Sequence: Synthetic oligonucleotide
  Antisense strand to SEQ ID NO: 1405152
aguaucagcaccaaaucug

SEQ ID NO: 1405154 - RNA, 19 nt, Artificial Sequence
  Description of Artificial Sequence: Synthetic oligonucleotide
  Sense strand starting at position 775 of SEQ ID NO: 1243266
cccggauauugaguggagu

SEQ ID NO: 1405155 - RNA, 19 nt, Artificial Sequence
  Description of Artificial Sequence: Synthetic oligonucleotide
  Antisense strand to SEQ ID NO: 1405154
acuccacucaauauccggg

SEQ ID NO: 1405156 - RNA, 19 nt, Artificial Sequence
  Description of Artificial Sequence: Synthetic oligonucleotide
  Sense strand starting at position 827 of SEQ ID NO: 1243266
gaaccaugaugccucgaau

SEQ ID NO: 1405157 - RNA, 19 nt, Artificial Sequence
  Description of Artificial Sequence: Synthetic oligonucleotide
  Antisense strand to SEQ ID NO: 1405156
auucgaggcaucaugguuc

SEQ ID NO: 1405158 - RNA, 19 nt, Artificial Sequence
  Description of Artificial Sequence: Synthetic oligonucleotide
  Sense strand starting at position 860 of SEQ ID NO: 1243266
gggacagcuuggcuccaaa

SEQ ID NO: 1405159 - RNA, 19 nt, Artificial Sequence
  Description of Artificial Sequence: Synthetic oligonucleotide
  Antisense strand to SEQ ID NO: 1405158
uuuggagccaagcuguccc

SEQ ID NO: 1405160 - RNA, 19 nt, Artificial Sequence
  Description of Artificial Sequence: Synthetic oligonucleotide
  Sense strand starting at position 863 of SEQ ID NO: 1243266
acagcuuggcuccaaauua

SEQ ID NO: 1405161 - RNA, 19 nt, Artificial Sequence
  Description of Artificial Sequence: Synthetic oligonucleotide
  Antisense strand to SEQ ID NO: 1405160
uaauuuggagccaagcugu

SEQ ID NO: 1405162 - RNA, 19 nt, Artificial Sequence
  Description of Artificial Sequence: Synthetic oligonucleotide
  Sense strand starting at position 874 of SEQ ID NO: 1243266
ccaaauuauccuugaggac

SEQ ID NO: 1405163 - RNA, 19 nt, Artificial Sequence
  Description of Artificial Sequence: Synthetic oligonucleotide
  Antisense strand to SEQ ID NO: 1405162
guccucaaggauaauuugg

SEQ ID NO: 1405164 - RNA, 19 nt, Artificial Sequence
  Description of Artificial Sequence: Synthetic oligonucleotide
  Sense strand starting at position 966 of SEQ ID NO: 1243266
ggcgaauacucacgucaug

SEQ ID NO: 1405165 - RNA, 19 nt, Artificial Sequence
  Description of Artificial Sequence: Synthetic oligonucleotide
  Antisense strand to SEQ ID NO: 1405164
caugacgugaguauucgcc

SEQ ID NO: 1405166 - RNA, 19 nt, Artificial Sequence
  Description of Artificial Sequence: Synthetic oligonucleotide
  Sense strand starting at position 971 of SEQ ID NO: 1243266
auacucacgucaugaaaca

SEQ ID NO: 1405167 - RNA, 19 nt, Artificial Sequence
  Description of Artificial Sequence: Synthetic oligonucleotide
  Antisense strand to SEQ ID NO: 1405166
uguuucaugacgugaguau

SEQ ID NO: 1405168 - RNA, 19 nt, Artificial Sequence
  Description of Artificial Sequence: Synthetic oligonucleotide
  Sense strand starting at position 1198 of SEQ ID NO: 1243266
ccagguaacucaggacgaa

SEQ ID NO: 1405169 - RNA, 19 nt, Artificial Sequence
  Description of Artificial Sequence: Synthetic oligonucleotide
  Antisense strand to SEQ ID NO: 1405168
uucguccugaguuaccugg

SEQ ID NO: 1405170 - RNA, 19 nt, Artificial Sequence
  Description of Artificial Sequence: Synthetic oligonucleotide
  Sense strand starting at position 1268 of SEQ ID NO: 1243266
gacccaggcuugucuacau

SEQ ID NO: 1405171 - RNA, 19 nt, Artificial Sequence
  Description of Artificial Sequence: Synthetic oligonucleotide
  Antisense strand to SEQ ID NO: 1405170
auguagacaagccuggguc

SEQ ID NO: 1405172 - RNA, 19 nt, Artificial Sequence
  Description of Artificial Sequence: Synthetic oligonucleotide
  Sense strand starting at position 1379 of SEQ ID NO: 1243266
agguucuuccuggguagga

SEQ ID NO: 1405173 - RNA, 19 nt, Artificial Sequence
  Description of Artificial Sequence: Synthetic oligonucleotide
  Antisense strand to SEQ ID NO: 1405172
uccuacccaggaagaaccu

SEQ ID NO: 1405174 - RNA, 19 nt, Artificial Sequence
  Description of Artificial Sequence: Synthetic oligonucleotide
  Sense strand starting at position 1428 of SEQ ID NO: 1243266
ggaggacacuugugacuuc

SEQ ID NO: 1405175 - RNA, 19 nt, Artificial Sequence
  Description of Artificial Sequence: Synthetic oligonucleotide
  Antisense strand to SEQ ID NO: 1405174
gaagucacaaguguccucc

SEQ ID NO: 1405176 - RNA, 19 nt, Artificial Sequence
  Description of Artificial Sequence: Synthetic oligonucleotide
  Sense strand starting at position 1893 of SEQ ID NO: 1243266
cccugagguuaccaagcau

SEQ ID NO: 1405177 - RNA, 19 nt, Artificial Sequence
  Description of Artificial Sequence: Synthetic oligonucleotide
  Antisense strand to SEQ ID NO: 1405176
augcuugguaaccucaggg

SEQ ID NO: 1405178 - RNA, 19 nt, Artificial Sequence
  Description of Artificial Sequence: Synthetic oligonucleotide
  Sense strand starting at position 2013 of SEQ ID NO: 1243266
gcccgugacuccugauggu

SEQ ID NO: 1405179 - RNA, 19 nt, Artificial Sequence
  Description of Artificial Sequence: Synthetic oligonucleotide
  Antisense strand to SEQ ID NO: 1405178
accaucaggagucacgggc

SEQ ID NO: 1405180 - RNA, 19 nt, Artificial Sequence
  Description of Artificial Sequence: Synthetic oligonucleotide
  Sense strand starting at position 2060 of SEQ ID NO: 1243266
ggagcccaucucugggaau

SEQ ID NO: 1405181 - RNA, 19 nt, Artificial Sequence
  Description of Artificial Sequence: Synthetic oligonucleotide
  Antisense strand to SEQ ID NO: 1405180
auucccagagaugggcucc

SEQ ID NO: 1405182 - RNA, 19 nt, Artificial Sequence
  Description of Artificial Sequence: Synthetic oligonucleotide
  Sense strand starting at position 2062 of SEQ ID NO: 1243266
agcccaucucugggaaucu

SEQ ID NO: 1405183 - RNA, 19 nt, Artificial Sequence
  Description of Artificial Sequence: Synthetic oligonucleotide
  Antisense strand to SEQ ID NO: 1405182
agauucccagagaugggcu

SEQ ID NO: 1405184 - RNA, 19 nt, Artificial Sequence
  Description of Artificial Sequence: Synthetic oligonucleotide
  Sense strand starting at position 2071 of SEQ ID NO: 1243266
cugggaaucugagaggauc

SEQ ID NO: 1405185 - RNA, 19 nt, Artificial Sequence
  Description of Artificial Sequence: Synthetic oligonucleotide
  Antisense strand to SEQ ID NO: 1405184
gauccucucagauucccag

SEQ ID NO: 1405186 - RNA, 19 nt, Artificial Sequence
  Description of Artificial Sequence: Synthetic oligonucleotide
  Sense strand starting at position 2264 of SEQ ID NO: 1243266
gacaguguucuguguccuu

SEQ ID NO: 1405187 - RNA, 19 nt, Artificial Sequence
  Description of Artificial Sequence: Synthetic oligonucleotide
  Antisense strand to SEQ ID NO: 1405186
aaggacacagaacacuguc

SEQ ID NO: 1405188 - RNA, 19 nt, Artificial Sequence
  Description of Artificial Sequence: Synthetic oligonucleotide
  Sense strand starting at position 2269 of SEQ ID NO: 1243266
uguucuguguccuugguga

SEQ ID NO: 1405189 - RNA, 19 nt, Artificial Sequence
  Description of Artificial Sequence: Synthetic oligonucleotide
  Antisense strand to SEQ ID NO: 1405188
ucaccaaggacacagaaca

SEQ ID NO: 1405190 - RNA, 19 nt, Artificial Sequence
  Description of Artificial Sequence: Synthetic oligonucleotide
  Sense strand starting at position 2324 of SEQ ID NO: 1243266
gggcaugacucaucggaga

SEQ ID NO: 1405191 - RNA, 19 nt, Artificial Sequence
  Description of Artificial Sequence: Synthetic oligonucleotide
  Antisense strand to SEQ ID NO: 1405190
ucuccgaugagucaugccc

SEQ ID NO: 1405192 - RNA, 19 nt, Artificial Sequence
  Description of Artificial Sequence: Synthetic oligonucleotide
  Sense strand starting at position 2563 of SEQ ID NO: 1243266
cuguguuccagugacaaug

SEQ ID NO: 1405193 - RNA, 19 nt, Artificial Sequence
  Description of Artificial Sequence: Synthetic oligonucleotide
  Antisense strand to SEQ ID NO: 1405192
cauugucacuggaacacag

SEQ ID NO: 1405194 - RNA, 19 nt, Artificial Sequence
  Description of Artificial Sequence: Synthetic oligonucleotide
  Sense strand starting at position 2595 of SEQ ID NO: 1243266
ugucacuuacucuguguga

SEQ ID NO: 1405195 - RNA, 19 nt, Artificial Sequence
  Description of Artificial Sequence: Synthetic oligonucleotide
  Antisense strand to SEQ ID NO: 1405194
ucacacagaguaagugaca

SEQ ID NO: 1405196 - RNA, 19 nt, Artificial Sequence
  Description of Artificial Sequence: Synthetic oligonucleotide
  Sense strand starting at position 2597 of SEQ ID NO: 1243266
ucacuuacucugugugacu

SEQ ID NO: 1405197 - RNA, 19 nt, Artificial Sequence
  Description of Artificial Sequence: Synthetic oligonucleotide
  Antisense strand to SEQ ID NO: 1405196
agucacacagaguaaguga

SEQ ID NO: 1405198 - RNA, 19 nt, Artificial Sequence
  Description of Artificial Sequence: Synthetic oligonucleotide
  Sense strand starting at position 2599 of SEQ ID NO: 1243266
acuuacucugugugacuuu

SEQ ID NO: 1405199 - RNA, 19 nt, Artificial Sequence
  Description of Artificial Sequence: Synthetic oligonucleotide
  Antisense strand to SEQ ID NO: 1405198
aaagucacacagaguaagu

SEQ ID NO: 1405200 - RNA, 19 nt, Artificial Sequence
  Description of Artificial Sequence: Synthetic oligonucleotide
  Sense strand starting at position 2608 of SEQ ID NO: 1243266
gugugacuuugggaaagua

SEQ ID NO: 1405201 - RNA, 19 nt, Artificial Sequence
  Description of Artificial Sequence: Synthetic oligonucleotide
  Antisense strand to SEQ ID NO: 1405200
uacuuucccaaagucacac

SEQ ID NO: 1405202 - RNA, 19 nt, Artificial Sequence
  Description of Artificial Sequence: Synthetic oligonucleotide
  Sense strand starting at position 2638 of SEQ ID NO: 1243266
ugguguguaucaguaagag

SEQ ID NO: 1405203 - RNA, 19 nt, Artificial Sequence
  Description of Artificial Sequence: Synthetic oligonucleotide
  Antisense strand to SEQ ID NO: 1405202
cucuuacugauacacacca

SEQ ID NO: 1405204 - RNA, 19 nt, Artificial Sequence
  Description of Artificial Sequence: Synthetic oligonucleotide
  Sense strand starting at position 2656 of SEQ ID NO: 1243266
gccaguuuaagggacauau

SEQ ID NO: 1405205 - RNA, 19 nt, Artificial Sequence
  Description of Artificial Sequence: Synthetic oligonucleotide
  Antisense strand to SEQ ID NO: 1405204
auaugucccuuaaacuggc

SEQ ID NO: 1405206 - RNA, 19 nt, Artificial Sequence
  Description of Artificial Sequence: Synthetic oligonucleotide
  Sense strand starting at position 2667 of SEQ ID NO: 1243266
ggacauaugacuuggccga

SEQ ID NO: 1405207 - RNA, 19 nt, Artificial Sequence
  Description of Artificial Sequence: Synthetic oligonucleotide
  Antisense strand to SEQ ID NO: 1405206
ucggccaagucauaugucc

SEQ ID NO: 1405208 - RNA, 19 nt, Artificial Sequence
  Description of Artificial Sequence: Synthetic oligonucleotide
  Sense strand starting at position 3051 of SEQ ID NO: 1243266
aagagaguuuaaggaagaa

SEQ ID NO: 1405209 - RNA, 19 nt, Artificial Sequence
  Description of Artificial Sequence: Synthetic oligonucleotide
  Antisense strand to SEQ ID NO: 1405208
uucuuccuuaaacucucuu

SEQ ID NO: 1405210 - RNA, 19 nt, Artificial Sequence
  Description of Artificial Sequence: Synthetic oligonucleotide
  Sense strand starting at position 3550 of SEQ ID NO: 1243266
agccguggccuucaauaga

SEQ ID NO: 1405211 - RNA, 19 nt, Artificial Sequence
  Description of Artificial Sequence: Synthetic oligonucleotide
  Antisense strand to SEQ ID NO: 1405210
ucuauugaaggccacggcu

SEQ ID NO: 1405212 - RNA, 19 nt, Artificial Sequence
  Description of Artificial Sequence: Synthetic oligonucleotide
  Sense strand starting at position 3890 of SEQ ID NO: 1243266
gcgaucuugcugccucagu

SEQ ID NO: 1405213 - RNA, 19 nt, Artificial Sequence
  Description of Artificial Sequence: Synthetic oligonucleotide
  Antisense strand to SEQ ID NO: 1405212
acugaggcagcaagaucgc

SEQ ID NO: 1405214 - RNA, 19 nt, Artificial Sequence
  Description of Artificial Sequence: Synthetic oligonucleotide
  Sense strand starting at position 254 of SEQ ID NO: 1243267
ugccucuucucuguuuaga

SEQ ID NO: 1405215 - RNA, 19 nt, Artificial Sequence
  Description of Artificial Sequence: Synthetic oligonucleotide
  Antisense strand to SEQ ID NO: 1405214
ucuaaacagagaagaggca

SEQ ID NO: 1405216 - RNA, 19 nt, Artificial Sequence
  Description of Artificial Sequence: Synthetic oligonucleotide
  Sense strand starting at position 289 of SEQ ID NO: 1243267
aguacuuaccaguguguua

SEQ ID NO: 1405217 - RNA, 19 nt, Artificial Sequence
  Description of Artificial Sequence: Synthetic oligonucleotide
  Antisense strand to SEQ ID NO: 1405216
uaacacacugguaaguacu

SEQ ID NO: 1405218 - RNA, 19 nt, Artificial Sequence
  Description of Artificial Sequence: Synthetic oligonucleotide
  Sense strand starting at position 303 of SEQ ID NO: 1243267
uguuacaacugcucuggua

SEQ ID NO: 1405219 - RNA, 19 nt, Artificial Sequence
  Description of Artificial Sequence: Synthetic oligonucleotide
  Antisense strand to SEQ ID NO: 1405218
uaccagagcaguuguaaca

SEQ ID NO: 1405220 - RNA, 19 nt, Artificial Sequence
  Description of Artificial Sequence: Synthetic oligonucleotide
  Sense strand starting at position 305 of SEQ ID NO: 1243267
uuacaacugcucugguauu

SEQ ID NO: 1405221 - RNA, 19 nt, Artificial Sequence
  Description of Artificial Sequence: Synthetic oligonucleotide
  Antisense strand to SEQ ID NO: 1405220
aauaccagagcaguuguaa

SEQ ID NO: 1405222 - RNA, 19 nt, Artificial Sequence
  Description of Artificial Sequence: Synthetic oligonucleotide
  Sense strand starting at position 315 of SEQ ID NO: 1243267
ucugguauuuagugcagua

SEQ ID NO: 1405223 - RNA, 19 nt, Artificial Sequence
  Description of Artificial Sequence: Synthetic oligonucleotide
  Antisense strand to SEQ ID NO: 1405222
uacugcacuaaauaccaga

SEQ ID NO: 1405224 - RNA, 19 nt, Artificial Sequence
  Description of Artificial Sequence: Synthetic oligonucleotide
  Sense strand starting at position 411 of SEQ ID NO: 1243267
ggguuuguguaacuacacu

SEQ ID NO: 1405225 - RNA, 19 nt, Artificial Sequence
  Description of Artificial Sequence: Synthetic oligonucleotide
  Antisense strand to SEQ ID NO: 1405224
aguguaguuacacaaaccc

SEQ ID NO: 1405226 - RNA, 19 nt, Artificial Sequence
  Description of Artificial Sequence: Synthetic oligonucleotide
  Sense strand starting at position 430 of SEQ ID NO: 1243267
ccaugauguugacacaaug

SEQ ID NO: 1405227 - RNA, 19 nt, Artificial Sequence
  Description of Artificial Sequence: Synthetic oligonucleotide
  Antisense strand to SEQ ID NO: 1405226
cauugugucaacaucaugg

SEQ ID NO: 1405228 - RNA, 19 nt, Artificial Sequence
  Description of Artificial Sequence: Synthetic oligonucleotide
  Sense strand starting at position 438 of SEQ ID NO: 1243267
uugacacaaugaugaaagu

SEQ ID NO: 1405229 - RNA, 19 nt, Artificial Sequence
  Description of Artificial Sequence: Synthetic oligonucleotide
  Antisense strand to SEQ ID NO: 1405228
acuuucaucauugugucaa

SEQ ID NO: 1405230 - RNA, 19 nt, Artificial Sequence
  Description of Artificial Sequence: Synthetic oligonucleotide
  Sense strand starting at position 486 of SEQ ID NO: 1243267
ccggucauuaagugacaca

SEQ ID NO: 1405231 - RNA, 19 nt, Artificial Sequence
  Description of Artificial Sequence: Synthetic oligonucleotide
  Antisense strand to SEQ ID NO: 1405230
ugugucacuuaaugaccgg

SEQ ID NO: 1405232 - RNA, 19 nt, Artificial Sequence
  Description of Artificial Sequence: Synthetic oligonucleotide
  Sense strand starting at position 487 of SEQ ID NO: 1243267
cggucauuaagugacacau

SEQ ID NO: 1405233 - RNA, 19 nt, Artificial Sequence
  Description of Artificial Sequence: Synthetic oligonucleotide
  Antisense strand to SEQ ID NO: 1405232
augugucacuuaaugaccg

SEQ ID NO: 1405234 - RNA, 19 nt, Artificial Sequence
  Description of Artificial Sequence: Synthetic oligonucleotide
  Sense strand starting at position 499 of SEQ ID NO: 1243267
gacacaugacuguaggcua

SEQ ID NO: 1405235 - RNA, 19 nt, Artificial Sequence
  Description of Artificial Sequence: Synthetic oligonucleotide
  Antisense strand to SEQ ID NO: 1405234
uagccuacagucauguguc

SEQ ID NO: 1405236 - RNA, 19 nt, Artificial Sequence
  Description of Artificial Sequence: Synthetic oligonucleotide
  Sense strand starting at position 504 of SEQ ID NO: 1243267
augacuguaggcuacaaau

SEQ ID NO: 1405237 - RNA, 19 nt, Artificial Sequence
  Description of Artificial Sequence: Synthetic oligonucleotide
  Antisense strand to SEQ ID NO: 1405236
auuuguagccuacagucau

SEQ ID NO: 1405238 - RNA, 19 nt, Artificial Sequence
  Description of Artificial Sequence: Synthetic oligonucleotide
  Sense strand starting at position 506 of SEQ ID NO: 1243267
gacuguaggcuacaaauca

SEQ ID NO: 1405239 - RNA, 19 nt, Artificial Sequence
  Description of Artificial Sequence: Synthetic oligonucleotide
  Antisense strand to SEQ ID NO: 1405238
ugauuuguagccuacaguc

SEQ ID NO: 1405240 - RNA, 19 nt, Artificial Sequence
  Description of Artificial Sequence: Synthetic oligonucleotide
  Sense strand starting at position 513 of SEQ ID NO: 1243267
ggcuacaaaucacugaauu

SEQ ID NO: 1405241 - RNA, 19 nt, Artificial Sequence
  Description of Artificial Sequence: Synthetic oligonucleotide
  Antisense strand to SEQ ID NO: 1405240
aauucagugauuuguagcc

SEQ ID NO: 1405242 - RNA, 19 nt, Artificial Sequence
  Description of Artificial Sequence: Synthetic oligonucleotide
  Sense strand starting at position 514 of SEQ ID NO: 1243267
gcuacaaaucacugaauug

SEQ ID NO: 1405243 - RNA, 19 nt, Artificial Sequence
  Description of Artificial Sequence: Synthetic oligonucleotide
  Antisense strand to SEQ ID NO: 1405242
caauucagugauuuguagc

SEQ ID NO: 1405244 - RNA, 19 nt, Artificial Sequence
  Description of Artificial Sequence: Synthetic oligonucleotide
  Sense strand starting at position 565 of SEQ ID NO: 1243267
ugguuugugaguugccuca

SEQ ID NO: 1405245 - RNA, 19 nt, Artificial Sequence
  Description of Artificial Sequence: Synthetic oligonucleotide
  Antisense strand to SEQ ID NO: 1405244
ugaggcaacucacaaacca

SEQ ID NO: 1405246 - RNA, 19 nt, Artificial Sequence
  Description of Artificial Sequence: Synthetic oligonucleotide
  Sense strand starting at position 567 of SEQ ID NO: 1243267
guuugugaguugccucaau

SEQ ID NO: 1405247 - RNA, 19 nt, Artificial Sequence
  Description of Artificial Sequence: Synthetic oligonucleotide
  Antisense strand to SEQ ID NO: 1405246
auugaggcaacucacaaac

SEQ ID NO: 1405248 - RNA, 19 nt, Artificial Sequence
  Description of Artificial Sequence: Synthetic oligonucleotide
  Sense strand starting at position 1190 of SEQ ID NO: 1243267
gauaguagugccuagcaga

SEQ ID NO: 1405249 - RNA, 19 nt, Artificial Sequence
  Description of Artificial Sequence: Synthetic oligonucleotide
  Antisense strand to SEQ ID NO: 1405248
ucugcuaggcacuacuauc

SEQ ID NO: 1405250 - RNA, 19 nt, Artificial Sequence
  Description of Artificial Sequence: Synthetic oligonucleotide
  Sense strand starting at position 1300 of SEQ ID NO: 1243267
acuguuugcucauccugga

SEQ ID NO: 1405251 - RNA, 19 nt, Artificial Sequence
  Description of Artificial Sequence: Synthetic oligonucleotide
  Antisense strand to SEQ ID NO: 1405250
uccaggaugagcaaacagu

SEQ ID NO: 1405252 - RNA, 19 nt, Artificial Sequence
  Description of Artificial Sequence: Synthetic oligonucleotide
  Sense strand starting at position 1705 of SEQ ID NO: 1243267
acccauuaguuacuugaga

SEQ ID NO: 1405253 - RNA, 19 nt, Artificial Sequence
  Description of Artificial Sequence: Synthetic oligonucleotide
  Antisense strand to SEQ ID NO: 1405252
ucucaaguaacuaaugggu

SEQ ID NO: 1405254 - RNA, 19 nt, Artificial Sequence
  Description of Artificial Sequence: Synthetic oligonucleotide
  Sense strand starting at position 2508 of SEQ ID NO: 1243267
gcaggagacucacucgaga

SEQ ID NO: 1405255 - RNA, 19 nt, Artificial Sequence
  Description of Artificial Sequence: Synthetic oligonucleotide
  Antisense strand to SEQ ID NO: 1405254
ucucgagugagucuccugc

SEQ ID NO: 1405256 - RNA, 19 nt, Artificial Sequence
  Description of Artificial Sequence: Synthetic oligonucleotide
  Sense strand starting at position 2510 of SEQ ID NO: 1243267
aggagacucacucgagacu

SEQ ID NO: 1405257 - RNA, 19 nt, Artificial Sequence
  Description of Artificial Sequence: Synthetic oligonucleotide
  Antisense strand to SEQ ID NO: 1405256
agucucgagugagucuccu

SEQ ID NO: 1405258 - RNA, 19 nt, Artificial Sequence
  Description of Artificial Sequence: Synthetic oligonucleotide
  Sense strand starting at position 2542 of SEQ ID NO: 1243267
ugcaaugagcugcgauaau

SEQ ID NO: 1405259 - RNA, 19 nt, Artificial Sequence
  Description of Artificial Sequence: Synthetic oligonucleotide
  Antisense strand to SEQ ID NO: 1405258
auuaucgcagcucauugca

SEQ ID NO: 1405260 - RNA, 19 nt, Artificial Sequence
  Description of Artificial Sequence: Synthetic oligonucleotide
  Sense strand starting at position 2553 of SEQ ID NO: 1243267
gcgauaaugccagugcacu

SEQ ID NO: 1405261 - RNA, 19 nt, Artificial Sequence
  Description of Artificial Sequence: Synthetic oligonucleotide
  Antisense strand to SEQ ID NO: 1405260
agugcacuggcauuaucgc

SEQ ID NO: 1405262 - RNA, 19 nt, Artificial Sequence
  Description of Artificial Sequence: Synthetic oligonucleotide
  Sense strand starting at position 2561 of SEQ ID NO: 1243267
gccagugcacucuagucua

SEQ ID NO: 1405263 - RNA, 19 nt, Artificial Sequence
  Description of Artificial Sequence: Synthetic oligonucleotide
  Antisense strand to SEQ ID NO: 1405262
uagacuagagugcacuggc

SEQ ID NO: 1405264 - RNA, 19 nt, Artificial Sequence
  Description of Artificial Sequence: Synthetic oligonucleotide
  Sense strand starting at position 2571 of SEQ ID NO: 1243267
ucuagucuaggcgacagau

SEQ ID NO: 1405265 - RNA, 19 nt, Artificial Sequence
  Description of Artificial Sequence: Synthetic oligonucleotide
  Antisense strand to SEQ ID NO: 1405264
aucugucgccuagacuaga

SEQ ID NO: 1405266 - RNA, 19 nt, Artificial Sequence
  Description of Artificial Sequence: Synthetic oligonucleotide
  Sense strand starting at position 2782 of SEQ ID NO: 1243267
gcaacauuguacugaaacu

SEQ ID NO: 1405267 - RNA, 19 nt, Artificial Sequence
  Description of Artificial Sequence: Synthetic oligonucleotide
  Antisense strand to SEQ ID NO: 1405266
aguuucaguacaauguugc

SEQ ID NO: 1405268 - RNA, 19 nt, Artificial Sequence
  Description of Artificial Sequence: Synthetic oligonucleotide
  Sense strand starting at position 2794 of SEQ ID NO: 1243267
ugaaacuucuagccagaau

SEQ ID NO: 1405269 - RNA, 19 nt, Artificial Sequence
  Description of Artificial Sequence: Synthetic oligonucleotide
  Antisense strand to SEQ ID NO: 1405268
auucuggcuagaaguuuca

SEQ ID NO: 1405270 - RNA, 19 nt, Artificial Sequence
  Description of Artificial Sequence: Synthetic oligonucleotide
  Sense strand starting at position 2833 of SEQ ID NO: 1243267
acgugagaaucagaaagga

SEQ ID NO: 1405271 - RNA, 19 nt, Artificial Sequence
  Description of Artificial Sequence: Synthetic oligonucleotide
  Antisense strand to SEQ ID NO: 1405270
uccuuucugauucucacgu

SEQ ID NO: 1405272 - RNA, 19 nt, Artificial Sequence
  Description of Artificial Sequence: Synthetic oligonucleotide
  Sense strand starting at position 2876 of SEQ ID NO: 1243267
gaugacaucuuguuuguag

SEQ ID NO: 1405273 - RNA, 19 nt, Artificial Sequence
  Description of Artificial Sequence: Synthetic oligonucleotide
  Antisense strand to SEQ ID NO: 1405272
cuacaaacaagaugucauc

SEQ ID NO: 1405274 - RNA, 19 nt, Artificial Sequence
  Description of Artificial Sequence: Synthetic oligonucleotide
  Sense strand starting at position 2877 of SEQ ID NO: 1243267
augacaucuuguuuguaga

SEQ ID NO: 1405275 - RNA, 19 nt, Artificial Sequence
  Description of Artificial Sequence: Synthetic oligonucleotide
  Antisense strand to SEQ ID NO: 1405274
ucuacaaacaagaugucau

SEQ ID NO: 1405276 - RNA, 19 nt, Artificial Sequence
  Description of Artificial Sequence: Synthetic oligonucleotide
  Sense strand starting at position 2878 of SEQ ID NO: 1243267
ugacaucuuguuuguagaa

SEQ ID NO: 1405277 - RNA, 19 nt, Artificial Sequence
  Description of Artificial Sequence: Synthetic oligonucleotide
  Antisense strand to SEQ ID NO: 1405276
uucuacaaacaagauguca

SEQ ID NO: 1405278 - RNA, 19 nt, Artificial Sequence
  Description of Artificial Sequence: Synthetic oligonucleotide
  Sense strand starting at position 2879 of SEQ ID NO: 1243267
gacaucuuguuuguagaag

SEQ ID NO: 1405279 - RNA, 19 nt, Artificial Sequence
  Description of Artificial Sequence: Synthetic oligonucleotide
  Antisense strand to SEQ ID NO: 1405278
cuucuacaaacaagauguc

SEQ ID NO: 1405280 - RNA, 19 nt, Artificial Sequence
  Description of Artificial Sequence: Synthetic oligonucleotide
  Sense strand starting at position 2880 of SEQ ID NO: 1243267
acaucuuguuuguagaagu

SEQ ID NO: 1405281 - RNA, 19 nt, Artificial Sequence
  Description of Artificial Sequence: Synthetic oligonucleotide
  Antisense strand to SEQ ID NO: 1405280
acuucuacaaacaagaugu

SEQ ID NO: 1405282 - RNA, 19 nt, Artificial Sequence
  Description of Artificial Sequence: Synthetic oligonucleotide
  Sense strand starting at position 3292 of SEQ ID NO: 1243267
agaaaucagcuguguuucu

SEQ ID NO: 1405283 - RNA, 19 nt, Artificial Sequence
  Description of Artificial Sequence: Synthetic oligonucleotide
  Antisense strand to SEQ ID NO: 1405282
agaaacacagcugauuucu

SEQ ID NO: 1405284 - RNA, 19 nt, Artificial Sequence
  Description of Artificial Sequence: Synthetic oligonucleotide
  Sense strand starting at position 3293 of SEQ ID NO: 1243267
gaaaucagcuguguuucua

SEQ ID NO: 1405285 - RNA, 19 nt, Artificial Sequence
  Description of Artificial Sequence: Synthetic oligonucleotide
  Antisense strand to SEQ ID NO: 1405284
uagaaacacagcugauuuc

SEQ ID NO: 1405286 - RNA, 19 nt, Artificial Sequence
  Description of Artificial Sequence: Synthetic oligonucleotide
  Sense strand starting at position 3803 of SEQ ID NO: 1243267
ucgcucauuccugggugua

SEQ ID NO: 1405287 - RNA, 19 nt, Artificial Sequence
  Description of Artificial Sequence: Synthetic oligonucleotide
  Antisense strand to SEQ ID NO: 1405286
uacacccaggaaugagcga

SEQ ID NO: 1405288 - RNA, 19 nt, Artificial Sequence
  Description of Artificial Sequence: Synthetic oligonucleotide
  Sense strand starting at position 3804 of SEQ ID NO: 1243267
cgcucauuccuggguguag

SEQ ID NO: 1405289 - RNA, 19 nt, Artificial Sequence
  Description of Artificial Sequence: Synthetic oligonucleotide
  Antisense strand to SEQ ID NO: 1405288
cuacacccaggaaugagcg

SEQ ID NO: 1405290 - RNA, 19 nt, Artificial Sequence
  Description of Artificial Sequence: Synthetic oligonucleotide
  Sense strand starting at position 3906 of SEQ ID NO: 1243267
cuccuuguucuggaaauga

SEQ ID NO: 1405291 - RNA, 19 nt, Artificial Sequence
  Description of Artificial Sequence: Synthetic oligonucleotide
  Antisense strand to SEQ ID NO: 1405290
ucauuuccagaacaaggag

SEQ ID NO: 1405292 - RNA, 19 nt, Artificial Sequence
  Description of Artificial Sequence: Synthetic oligonucleotide
  Sense strand starting at position 3921 of SEQ ID NO: 1243267
augaaacuguauucguaaa

SEQ ID NO: 1405293 - RNA, 19 nt, Artificial Sequence
  Description of Artificial Sequence: Synthetic oligonucleotide
  Antisense strand to SEQ ID NO: 1405292
uuuacgaauacaguuucau

SEQ ID NO: 1405294 - RNA, 19 nt, Artificial Sequence
  Description of Artificial Sequence: Synthetic oligonucleotide
  Sense strand starting at position 495 of SEQ ID NO: 1243268
gugacuuuaagcgagguca

SEQ ID NO: 1405295 - RNA, 19 nt, Artificial Sequence
  Description of Artificial Sequence: Synthetic oligonucleotide
  Antisense strand to SEQ ID NO: 1405294
ugaccucgcuuaaagucac

SEQ ID NO: 1405296 - RNA, 19 nt, Artificial Sequence
  Description of Artificial Sequence: Synthetic oligonucleotide
  Sense strand starting at position 497 of SEQ ID NO: 1243268
gacuuuaagcgaggucauu

SEQ ID NO: 1405297 - RNA, 19 nt, Artificial Sequence
  Description of Artificial Sequence: Synthetic oligonucleotide
  Antisense strand to SEQ ID NO: 1405296
aaugaccucgcuuaaaguc

SEQ ID NO: 1405298 - RNA, 19 nt, Artificial Sequence
  Description of Artificial Sequence: Synthetic oligonucleotide
  Sense strand starting at position 556 of SEQ ID NO: 1243268
augaaaggugguuguuaca

SEQ ID NO: 1405299 - RNA, 19 nt, Artificial Sequence
  Description of Artificial Sequence: Synthetic oligonucleotide
  Antisense strand to SEQ ID NO: 1405298
uguaacaaccaccuuucau

SEQ ID NO: 1405300 - RNA, 19 nt, Artificial Sequence
  Description of Artificial Sequence: Synthetic oligonucleotide
  Sense strand starting at position 604 of SEQ ID NO: 1243268
ggcagauucucaguaaaug

SEQ ID NO: 1405301 - RNA, 19 nt, Artificial Sequence
  Description of Artificial Sequence: Synthetic oligonucleotide
  Antisense strand to SEQ ID NO: 1405300
cauuuacugagaaucugcc

SEQ ID NO: 1405302 - RNA, 19 nt, Artificial Sequence
  Description of Artificial Sequence: Synthetic oligonucleotide
  Sense strand starting at position 605 of SEQ ID NO: 1243268
gcagauucucaguaaaugg

SEQ ID NO: 1405303 - RNA, 19 nt, Artificial Sequence
  Description of Artificial Sequence: Synthetic oligonucleotide
  Antisense strand to SEQ ID NO: 1405302
ccauuuacugagaaucugc

SEQ ID NO: 1405304 - RNA, 19 nt, Artificial Sequence
  Description of Artificial Sequence: Synthetic oligonucleotide
  Sense strand starting at position 1008 of SEQ ID NO: 1243268
gcuugaagaccugggaaga

SEQ ID NO: 1405305 - RNA, 19 nt, Artificial Sequence
  Description of Artificial Sequence: Synthetic oligonucleotide
  Antisense strand to SEQ ID NO: 1405304
ucuucccaggucuucaagc

SEQ ID NO: 1405306 - RNA, 19 nt, Artificial Sequence
  Description of Artificial Sequence: Synthetic oligonucleotide
  Sense strand starting at position 1117 of SEQ ID NO: 1243268
cugugacucugauuaccuu

SEQ ID NO: 1405307 - RNA, 19 nt, Artificial Sequence
  Description of Artificial Sequence: Synthetic oligonucleotide
  Antisense strand to SEQ ID NO: 1405306
aagguaaucagagucacag

SEQ ID NO: 1405308 - RNA, 19 nt, Artificial Sequence
  Description of Artificial Sequence: Synthetic oligonucleotide
  Sense strand starting at position 1118 of SEQ ID NO: 1243268
ugugacucugauuaccuua

SEQ ID NO: 1405309 - RNA, 19 nt, Artificial Sequence
  Description of Artificial Sequence: Synthetic oligonucleotide
  Antisense strand to SEQ ID NO: 1405308
uaagguaaucagagucaca

SEQ ID NO: 1405310 - RNA, 19 nt, Artificial Sequence
  Description of Artificial Sequence: Synthetic oligonucleotide
  Sense strand starting at position 1161 of SEQ ID NO: 1243268
uuuauaugaggccgagaca

SEQ ID NO: 1405311 - RNA, 19 nt, Artificial Sequence
  Description of Artificial Sequence: Synthetic oligonucleotide
  Antisense strand to SEQ ID NO: 1405310
ugucucggccucauauaaa

SEQ ID NO: 1405312 - RNA, 19 nt, Artificial Sequence
  Description of Artificial Sequence: Synthetic oligonucleotide
  Sense strand starting at position 1202 of SEQ ID NO: 1243268
ugugcacacucaguaauua

SEQ ID NO: 1405313 - RNA, 19 nt, Artificial Sequence
  Description of Artificial Sequence: Synthetic oligonucleotide
  Antisense strand to SEQ ID NO: 1405312
uaauuacugagugugcaca

SEQ ID NO: 1405314 - RNA, 19 nt, Artificial Sequence
  Description of Artificial Sequence: Synthetic oligonucleotide
  Sense strand starting at position 1203 of SEQ ID NO: 1243268
gugcacacucaguaauuaa

SEQ ID NO: 1405315 - RNA, 19 nt, Artificial Sequence
  Description of Artificial Sequence: Synthetic oligonucleotide
  Antisense strand to SEQ ID NO: 1405314
uuaauuacugagugugcac

SEQ ID NO: 1405316 - RNA, 19 nt, Artificial Sequence
  Description of Artificial Sequence: Synthetic oligonucleotide
  Sense strand starting at position 1348 of SEQ ID NO: 1243268
uguagagagcauuagcuua

SEQ ID NO: 1405317 - RNA, 19 nt, Artificial Sequence
  Description of Artificial Sequence: Synthetic oligonucleotide
  Antisense strand to SEQ ID NO: 1405316
uaagcuaaugcucucuaca

SEQ ID NO: 1405318 - RNA, 19 nt, Artificial Sequence
  Description of Artificial Sequence: Synthetic oligonucleotide
  Sense strand starting at position 1353 of SEQ ID NO: 1243268
agagcauuagcuuaauugu

SEQ ID NO: 1405319 - RNA, 19 nt, Artificial Sequence
  Description of Artificial Sequence: Synthetic oligonucleotide
  Antisense strand to SEQ ID NO: 1405318
acaauuaagcuaaugcucu

SEQ ID NO: 1405320 - RNA, 19 nt, Artificial Sequence
  Description of Artificial Sequence: Synthetic oligonucleotide
  Sense strand starting at position 1400 of SEQ ID NO: 1243268
ggauuagaggccugcauca

SEQ ID NO: 1405321 - RNA, 19 nt, Artificial Sequence
  Description of Artificial Sequence: Synthetic oligonucleotide
  Antisense strand to SEQ ID NO: 1405320
ugaugcaggccucuaaucc

SEQ ID NO: 1405322 - RNA, 19 nt, Artificial Sequence
  Description of Artificial Sequence: Synthetic oligonucleotide
  Sense strand starting at position 1402 of SEQ ID NO: 1243268
auuagaggccugcaucauu

SEQ ID NO: 1405323 - RNA, 19 nt, Artificial Sequence
  Description of Artificial Sequence: Synthetic oligonucleotide
  Antisense strand to SEQ ID NO: 1405322
aaugaugcaggccucuaau

SEQ ID NO: 1405324 - RNA, 19 nt, Artificial Sequence
  Description of Artificial Sequence: Synthetic oligonucleotide
  Sense strand starting at position 1465 of SEQ ID NO: 1243268
ggucuagagacucagucuu

SEQ ID NO: 1405325 - RNA, 19 nt, Artificial Sequence
  Description of Artificial Sequence: Synthetic oligonucleotide
  Antisense strand to SEQ ID NO: 1405324
aagacugagucucuagacc

SEQ ID NO: 1405326 - RNA, 19 nt, Artificial Sequence
  Description of Artificial Sequence: Synthetic oligonucleotide
  Sense strand starting at position 1634 of SEQ ID NO: 1243268
cagaguuugccugacguca

SEQ ID NO: 1405327 - RNA, 19 nt, Artificial Sequence
  Description of Artificial Sequence: Synthetic oligonucleotide
  Antisense strand to SEQ ID NO: 1405326
ugacgucaggcaaacucug

SEQ ID NO: 1405328 - RNA, 19 nt, Artificial Sequence
  Description of Artificial Sequence: Synthetic oligonucleotide
  Sense strand starting at position 1799 of SEQ ID NO: 1243268
cacagaguccuacggaguu

SEQ ID NO: 1405329 - RNA, 19 nt, Artificial Sequence
  Description of Artificial Sequence: Synthetic oligonucleotide
  Antisense strand to SEQ ID NO: 1405328
aacuccguaggacucugug

SEQ ID NO: 1405330 - RNA, 19 nt, Artificial Sequence
  Description of Artificial Sequence: Synthetic oligonucleotide
  Sense strand starting at position 2025 of SEQ ID NO: 1243268
ugugcuccacucugagaga

SEQ ID NO: 1405331 - RNA, 19 nt, Artificial Sequence
  Description of Artificial Sequence: Synthetic oligonucleotide
  Antisense strand to SEQ ID NO: 1405330
ucucucagaguggagcaca

SEQ ID NO: 1405332 - RNA, 19 nt, Artificial Sequence
  Description of Artificial Sequence: Synthetic oligonucleotide
  Sense strand starting at position 2080 of SEQ ID NO: 1243268
ccuccaguuggcuaggauu

SEQ ID NO: 1405333 - RNA, 19 nt, Artificial Sequence
  Description of Artificial Sequence: Synthetic oligonucleotide
  Antisense strand to SEQ ID NO: 1405332
aauccuagccaacuggagg

SEQ ID NO: 1405334 - RNA, 19 nt, Artificial Sequence
  Description of Artificial Sequence: Synthetic oligonucleotide
  Sense strand starting at position 2195 of SEQ ID NO: 1243268
gagccaaauugucuggguu

SEQ ID NO: 1405335 - RNA, 19 nt, Artificial Sequence
  Description of Artificial Sequence: Synthetic oligonucleotide
  Antisense strand to SEQ ID NO: 1405334
aacccagacaauuuggcuc

SEQ ID NO: 1405336 - RNA, 19 nt, Artificial Sequence
  Description of Artificial Sequence: Synthetic oligonucleotide
  Sense strand starting at position 2196 of SEQ ID NO: 1243268
agccaaauugucuggguuu

SEQ ID NO: 1405337 - RNA, 19 nt, Artificial Sequence
  Description of Artificial Sequence: Synthetic oligonucleotide
  Antisense strand to SEQ ID NO: 1405336
aaacccagacaauuuggcu

SEQ ID NO: 1405338 - RNA, 19 nt, Artificial Sequence
  Description of Artificial Sequence: Synthetic oligonucleotide
  Sense strand starting at position 2198 of SEQ ID NO: 1243268
ccaaauugucuggguuuaa

SEQ ID NO: 1405339 - RNA, 19 nt, Artificial Sequence
  Description of Artificial Sequence: Synthetic oligonucleotide
  Antisense strand to SEQ ID NO: 1405338
uuaaacccagacaauuugg

SEQ ID NO: 1405340 - RNA, 19 nt, Artificial Sequence
  Description of Artificial Sequence: Synthetic oligonucleotide
  Sense strand starting at position 2199 of SEQ ID NO: 1243268
caaauugucuggguuuaaa

SEQ ID NO: 1405341 - RNA, 19 nt, Artificial Sequence
  Description of Artificial Sequence: Synthetic oligonucleotide
  Antisense strand to SEQ ID NO: 1405340
uuuaaacccagacaauuug

SEQ ID NO: 1405342 - RNA, 19 nt, Artificial Sequence
  Description of Artificial Sequence: Synthetic oligonucleotide
  Sense strand starting at position 2209 of SEQ ID NO: 1243268
ggguuuaaaucuguuuccu

SEQ ID NO: 1405343 - RNA, 19 nt, Artificial Sequence
  Description of Artificial Sequence: Synthetic oligonucleotide
  Antisense strand to SEQ ID NO: 1405342
aggaaacagauuuaaaccc

SEQ ID NO: 1405344 - RNA, 19 nt, Artificial Sequence
  Description of Artificial Sequence: Synthetic oligonucleotide
  Sense strand starting at position 2272 of SEQ ID NO: 1243268
cugagaaacaguuguugaa

SEQ ID NO: 1405345 - RNA, 19 nt, Artificial Sequence
  Description of Artificial Sequence: Synthetic oligonucleotide
  Antisense strand to SEQ ID NO: 1405344
uucaacaacuguuucucag

SEQ ID NO: 1405346 - RNA, 19 nt, Artificial Sequence
  Description of Artificial Sequence: Synthetic oligonucleotide
  Sense strand starting at position 2274 of SEQ ID NO: 1243268
gagaaacaguuguugaaug

SEQ ID NO: 1405347 - RNA, 19 nt, Artificial Sequence
  Description of Artificial Sequence: Synthetic oligonucleotide
  Antisense strand to SEQ ID NO: 1405346
cauucaacaacuguuucuc

SEQ ID NO: 1405348 - RNA, 19 nt, Artificial Sequence
  Description of Artificial Sequence: Synthetic oligonucleotide
  Sense strand starting at position 2327 of SEQ ID NO: 1243268
gcucacucccagcaugaaa

SEQ ID NO: 1405349 - RNA, 19 nt, Artificial Sequence
  Description of Artificial Sequence: Synthetic oligonucleotide
  Antisense strand to SEQ ID NO: 1405348
uuucaugcugggagugagc

SEQ ID NO: 1405350 - RNA, 19 nt, Artificial Sequence
  Description of Artificial Sequence: Synthetic oligonucleotide
  Sense strand starting at position 2529 of SEQ ID NO: 1243268
cgcugugagccuuuggcaa

SEQ ID NO: 1405351 - RNA, 19 nt, Artificial Sequence
  Description of Artificial Sequence: Synthetic oligonucleotide
  Antisense strand to SEQ ID NO: 1405350
uugccaaaggcucacagcg

SEQ ID NO: 1405352 - RNA, 19 nt, Artificial Sequence
  Description of Artificial Sequence: Synthetic oligonucleotide
  Sense strand starting at position 2740 of SEQ ID NO: 1243268
guggguaagguuuagcaua

SEQ ID NO: 1405353 - RNA, 19 nt, Artificial Sequence
  Description of Artificial Sequence: Synthetic oligonucleotide
  Antisense strand to SEQ ID NO: 1405352
uaugcuaaaccuuacccac

SEQ ID NO: 1405354 - RNA, 19 nt, Artificial Sequence
  Description of Artificial Sequence: Synthetic oligonucleotide
  Sense strand starting at position 2742 of SEQ ID NO: 1243268
ggguaagguuuagcauaua

SEQ ID NO: 1405355 - RNA, 19 nt, Artificial Sequence
  Description of Artificial Sequence: Synthetic oligonucleotide
  Antisense strand to SEQ ID NO: 1405354
uauaugcuaaaccuuaccc

SEQ ID NO: 1405356 - RNA, 19 nt, Artificial Sequence
  Description of Artificial Sequence: Synthetic oligonucleotide
  Sense strand starting at position 3146 of SEQ ID NO: 1243268
ugaucucaggcauacuaau

SEQ ID NO: 1405357 - RNA, 19 nt, Artificial Sequence
  Description of Artificial Sequence: Synthetic oligonucleotide
  Antisense strand to SEQ ID NO: 1405356
auuaguaugccugagauca

SEQ ID NO: 1405358 - RNA, 19 nt, Artificial Sequence
  Description of Artificial Sequence: Synthetic oligonucleotide
  Sense strand starting at position 3237 of SEQ ID NO: 1243268
acgaguuuaacacguuaac

SEQ ID NO: 1405359 - RNA, 19 nt, Artificial Sequence
  Description of Artificial Sequence: Synthetic oligonucleotide
  Antisense strand to SEQ ID NO: 1405358
guuaacguguuaaacucgu

SEQ ID NO: 1405360 - RNA, 19 nt, Artificial Sequence
  Description of Artificial Sequence: Synthetic oligonucleotide
  Sense strand starting at position 3240 of SEQ ID NO: 1243268
aguuuaacacguuaacaca

SEQ ID NO: 1405361 - RNA, 19 nt, Artificial Sequence
  Description of Artificial Sequence: Synthetic oligonucleotide
  Antisense strand to SEQ ID NO: 1405360
uguguuaacguguuaaacu

SEQ ID NO: 1405362 - RNA, 19 nt, Artificial Sequence
  Description of Artificial Sequence: Synthetic oligonucleotide
  Sense strand starting at position 3364 of SEQ ID NO: 1243268
gcagucuucccgccagcuu

SEQ ID NO: 1405363 - RNA, 19 nt, Artificial Sequence
  Description of Artificial Sequence: Synthetic oligonucleotide
  Antisense strand to SEQ ID NO: 1405362
aagcuggcgggaagacugc

SEQ ID NO: 1405364 - RNA, 19 nt, Artificial Sequence
  Description of Artificial Sequence: Synthetic oligonucleotide
  Sense strand starting at position 3392 of SEQ ID NO: 1243268
uugggacuauagguacaua

SEQ ID NO: 1405365 - RNA, 19 nt, Artificial Sequence
  Description of Artificial Sequence: Synthetic oligonucleotide
  Antisense strand to SEQ ID NO: 1405364
uauguaccuauagucccaa

SEQ ID NO: 1405366 - RNA, 19 nt, Artificial Sequence
  Description of Artificial Sequence: Synthetic oligonucleotide
  Sense strand starting at position 3604 of SEQ ID NO: 1243268
guaaguggucagggcauaa

SEQ ID NO: 1405367 - RNA, 19 nt, Artificial Sequence
  Description of Artificial Sequence: Synthetic oligonucleotide
  Antisense strand to SEQ ID NO: 1405366
uuaugcccugaccacuuac

SEQ ID NO: 1405368 - RNA, 19 nt, Artificial Sequence
  Description of Artificial Sequence: Synthetic oligonucleotide
  Sense strand starting at position 3671 of SEQ ID NO: 1243268
ccaauacuggcuuggaaug

SEQ ID NO: 1405369 - RNA, 19 nt, Artificial Sequence
  Description of Artificial Sequence: Synthetic oligonucleotide
  Antisense strand to SEQ ID NO: 1405368
cauuccaagccaguauugg

SEQ ID NO: 1405370 - RNA, 19 nt, Artificial Sequence
  Description of Artificial Sequence: Synthetic oligonucleotide
  Sense strand starting at position 3683 of SEQ ID NO: 1243268
uggaauggucgauaaggca

SEQ ID NO: 1405371 - RNA, 19 nt, Artificial Sequence
  Description of Artificial Sequence: Synthetic oligonucleotide
  Antisense strand to SEQ ID NO: 1405370
ugccuuaucgaccauucca

SEQ ID NO: 1405372 - RNA, 19 nt, Artificial Sequence
  Description of Artificial Sequence: Synthetic oligonucleotide
  Sense strand starting at position 3731 of SEQ ID NO: 1243268
agaacuucccagcaagcau

SEQ ID NO: 1405373 - RNA, 19 nt, Artificial Sequence
  Description of Artificial Sequence: Synthetic oligonucleotide
  Antisense strand to SEQ ID NO: 1405372
augcuugcugggaaguucu

SEQ ID NO: 1405374 - RNA, 19 nt, Artificial Sequence
  Description of Artificial Sequence: Synthetic oligonucleotide
  Sense strand starting at position 362 of SEQ ID NO: 1243269
caguauucuccuggaagga

SEQ ID NO: 1405375 - RNA, 19 nt, Artificial Sequence
  Description of Artificial Sequence: Synthetic oligonucleotide
  Antisense strand to SEQ ID NO: 1405374
uccuuccaggagaauacug

SEQ ID NO: 1405376 - RNA, 19 nt, Artificial Sequence
  Description of Artificial Sequence: Synthetic oligonucleotide
  Sense strand starting at position 468 of SEQ ID NO: 1243269
aaggauuggcccugacuuu

SEQ ID NO: 1405377 - RNA, 19 nt, Artificial Sequence
  Description of Artificial Sequence: Synthetic oligonucleotide
  Antisense strand to SEQ ID NO: 1405376
aaagucagggccaauccuu

SEQ ID NO: 1405378 - RNA, 19 nt, Artificial Sequence
  Description of Artificial Sequence: Synthetic oligonucleotide
  Sense strand starting at position 469 of SEQ ID NO: 1243269
aggauuggcccugacuuua

SEQ ID NO: 1405379 - RNA, 19 nt, Artificial Sequence
  Description of Artificial Sequence: Synthetic oligonucleotide
  Antisense strand to SEQ ID NO: 1405378
uaaagucagggccaauccu

SEQ ID NO: 1405380 - RNA, 19 nt, Artificial Sequence
  Description of Artificial Sequence: Synthetic oligonucleotide
  Sense strand starting at position 640 of SEQ ID NO: 1243269
ccacgugugcagcuaaagu

SEQ ID NO: 1405381 - RNA, 19 nt, Artificial Sequence
  Description of Artificial Sequence: Synthetic oligonucleotide
  Antisense strand to SEQ ID NO: 1405380
acuuuagcugcacacgugg

SEQ ID NO: 1405382 - RNA, 19 nt, Artificial Sequence
  Description of Artificial Sequence: Synthetic oligonucleotide
  Sense strand starting at position 927 of SEQ ID NO: 1243269
agggcacugaccugucuua

SEQ ID NO: 1405383 - RNA, 19 nt, Artificial Sequence
  Description of Artificial Sequence: Synthetic oligonucleotide
  Antisense strand to SEQ ID NO: 1405382
uaagacaggucagugcccu

SEQ ID NO: 1405384 - RNA, 19 nt, Artificial Sequence
  Description of Artificial Sequence: Synthetic oligonucleotide
  Sense strand starting at position 938 of SEQ ID NO: 1243269
cugucuuaucccuagugcu

SEQ ID NO: 1405385 - RNA, 19 nt, Artificial Sequence
  Description of Artificial Sequence: Synthetic oligonucleotide
  Antisense strand to SEQ ID NO: 1405384
agcacuagggauaagacag

SEQ ID NO: 1405386 - RNA, 19 nt, Artificial Sequence
  Description of Artificial Sequence: Synthetic oligonucleotide
  Sense strand starting at position 955 of SEQ ID NO: 1243269
cuugguucugugugguaaa

SEQ ID NO: 1405387 - RNA, 19 nt, Artificial Sequence
  Description of Artificial Sequence: Synthetic oligonucleotide
  Antisense strand to SEQ ID NO: 1405386
uuuaccacacagaaccaag

SEQ ID NO: 1405388 - RNA, 19 nt, Artificial Sequence
  Description of Artificial Sequence: Synthetic oligonucleotide
  Sense strand starting at position 1138 of SEQ ID NO: 1243269
gccuuaacucuguagccau

SEQ ID NO: 1405389 - RNA, 19 nt, Artificial Sequence
  Description of Artificial Sequence: Synthetic oligonucleotide
  Antisense strand to SEQ ID NO: 1405388
auggcuacagaguuaaggc

SEQ ID NO: 1405390 - RNA, 19 nt, Artificial Sequence
  Description of Artificial Sequence: Synthetic oligonucleotide
  Sense strand starting at position 1235 of SEQ ID NO: 1243269
cuaaacucugcuggcuaaa

SEQ ID NO: 1405391 - RNA, 19 nt, Artificial Sequence
  Description of Artificial Sequence: Synthetic oligonucleotide
  Antisense strand to SEQ ID NO: 1405390
uuuagccagcagaguuuag

SEQ ID NO: 1405392 - RNA, 19 nt, Artificial Sequence
  Description of Artificial Sequence: Synthetic oligonucleotide
  Sense strand starting at position 1264 of SEQ ID NO: 1243269
ggcuucuguuaacuguuaa

SEQ ID NO: 1405393 - RNA, 19 nt, Artificial Sequence
  Description of Artificial Sequence: Synthetic oligonucleotide
  Antisense strand to SEQ ID NO: 1405392
uuaacaguuaacagaagcc

SEQ ID NO: 1405394 - RNA, 19 nt, Artificial Sequence
  Description of Artificial Sequence: Synthetic oligonucleotide
  Sense strand starting at position 1701 of SEQ ID NO: 1243269
gaaguagacacucgaguua

SEQ ID NO: 1405395 - RNA, 19 nt, Artificial Sequence
  Description of Artificial Sequence: Synthetic oligonucleotide
  Antisense strand to SEQ ID NO: 1405394
uaacucgagugucuacuuc

SEQ ID NO: 1405396 - RNA, 19 nt, Artificial Sequence
  Description of Artificial Sequence: Synthetic oligonucleotide
  Sense strand starting at position 1863 of SEQ ID NO: 1243269
ugccucuuguccucagaau

SEQ ID NO: 1405397 - RNA, 19 nt, Artificial Sequence
  Description of Artificial Sequence: Synthetic oligonucleotide
  Antisense strand to SEQ ID NO: 1405396
auucugaggacaagaggca

SEQ ID NO: 1405398 - RNA, 19 nt, Artificial Sequence
  Description of Artificial Sequence: Synthetic oligonucleotide
  Sense strand starting at position 1864 of SEQ ID NO: 1243269
gccucuuguccucagaaug

SEQ ID NO: 1405399 - RNA, 19 nt, Artificial Sequence
  Description of Artificial Sequence: Synthetic oligonucleotide
  Antisense strand to SEQ ID NO: 1405398
cauucugaggacaagaggc

SEQ ID NO: 1405400 - RNA, 19 nt, Artificial Sequence
  Description of Artificial Sequence: Synthetic oligonucleotide
  Sense strand starting at position 1875 of SEQ ID NO: 1243269
ucagaaugguccucagagu

SEQ ID NO: 1405401 - RNA, 19 nt, Artificial Sequence
  Description of Artificial Sequence: Synthetic oligonucleotide
  Antisense strand to SEQ ID NO: 1405400
acucugaggaccauucuga

SEQ ID NO: 1405402 - RNA, 19 nt, Artificial Sequence
  Description of Artificial Sequence: Synthetic oligonucleotide
  Sense strand starting at position 1876 of SEQ ID NO: 1243269
cagaaugguccucagaguu

SEQ ID NO: 1405403 - RNA, 19 nt, Artificial Sequence
  Description of Artificial Sequence: Synthetic oligonucleotide
  Antisense strand to SEQ ID NO: 1405402
aacucugaggaccauucug

SEQ ID NO: 1405404 - RNA, 19 nt, Artificial Sequence
  Description of Artificial Sequence: Synthetic oligonucleotide
  Sense strand starting at position 1889 of SEQ ID NO: 1243269
agaguucguccaugaacug

SEQ ID NO: 1405405 - RNA, 19 nt, Artificial Sequence
  Description of Artificial Sequence: Synthetic oligonucleotide
  Antisense strand to SEQ ID NO: 1405404
caguucauggacgaacucu

SEQ ID NO: 1405406 - RNA, 19 nt, Artificial Sequence
  Description of Artificial Sequence: Synthetic oligonucleotide
  Sense strand starting at position 1890 of SEQ ID NO: 1243269
gaguucguccaugaacugu

SEQ ID NO: 1405407 - RNA, 19 nt, Artificial Sequence
  Description of Artificial Sequence: Synthetic oligonucleotide
  Antisense strand to SEQ ID NO: 1405406
acaguucauggacgaacuc

SEQ ID NO: 1405408 - RNA, 19 nt, Artificial Sequence
  Description of Artificial Sequence: Synthetic oligonucleotide
  Sense strand starting at position 1971 of SEQ ID NO: 1243269
cuucuacugccuugggaag

SEQ ID NO: 1405409 - RNA, 19 nt, Artificial Sequence
  Description of Artificial Sequence: Synthetic oligonucleotide
  Antisense strand to SEQ ID NO: 1405408
cuucccaaggcaguagaag

SEQ ID NO: 1405410 - RNA, 19 nt, Artificial Sequence
  Description of Artificial Sequence: Synthetic oligonucleotide
  Sense strand starting at position 2119 of SEQ ID NO: 1243269
gcucucuccuagucugaga

SEQ ID NO: 1405411 - RNA, 19 nt, Artificial Sequence
  Description of Artificial Sequence: Synthetic oligonucleotide
  Antisense strand to SEQ ID NO: 1405410
ucucagacuaggagagagc

SEQ ID NO: 1405412 - RNA, 19 nt, Artificial Sequence
  Description of Artificial Sequence: Synthetic oligonucleotide
  Sense strand starting at position 2218 of SEQ ID NO: 1243269
uccacacaugcuugucaga

SEQ ID NO: 1405413 - RNA, 19 nt, Artificial Sequence
  Description of Artificial Sequence: Synthetic oligonucleotide
  Antisense strand to SEQ ID NO: 1405412
ucugacaagcaugugugga

SEQ ID NO: 1405414 - RNA, 19 nt, Artificial Sequence
  Description of Artificial Sequence: Synthetic oligonucleotide
  Sense strand starting at position 2494 of SEQ ID NO: 1243269
uguuaauuccacggagcca

SEQ ID NO: 1405415 - RNA, 19 nt, Artificial Sequence
  Description of Artificial Sequence: Synthetic oligonucleotide
  Antisense strand to SEQ ID NO: 1405414
uggcuccguggaauuaaca

SEQ ID NO: 1405416 - RNA, 19 nt, Artificial Sequence
  Description of Artificial Sequence: Synthetic oligonucleotide
  Sense strand starting at position 3020 of SEQ ID NO: 1243269
uggcuucugcuacaagaac

SEQ ID NO: 1405417 - RNA, 19 nt, Artificial Sequence
  Description of Artificial Sequence: Synthetic oligonucleotide
  Antisense strand to SEQ ID NO: 1405416
guucuuguagcagaagcca

SEQ ID NO: 1405418 - RNA, 19 nt, Artificial Sequence
  Description of Artificial Sequence: Synthetic oligonucleotide
  Sense strand starting at position 3059 of SEQ ID NO: 1243269
agaagugcgaguugauucu

SEQ ID NO: 1405419 - RNA, 19 nt, Artificial Sequence
  Description of Artificial Sequence: Synthetic oligonucleotide
  Antisense strand to SEQ ID NO: 1405418
agaaucaacucgcacuucu

SEQ ID NO: 1405420 - RNA, 19 nt, Artificial Sequence
  Description of Artificial Sequence: Synthetic oligonucleotide
  Sense strand starting at position 3065 of SEQ ID NO: 1243269
gcgaguugauucuuuaauu

SEQ ID NO: 1405421 - RNA, 19 nt, Artificial Sequence
  Description of Artificial Sequence: Synthetic oligonucleotide
  Antisense strand to SEQ ID NO: 1405420
aauuaaagaaucaacucgc

SEQ ID NO: 1405422 - RNA, 19 nt, Artificial Sequence
  Description of Artificial Sequence: Synthetic oligonucleotide
  Sense strand starting at position 3395 of SEQ ID NO: 1243269
agcauuagccauuauauag

SEQ ID NO: 1405423 - RNA, 19 nt, Artificial Sequence
  Description of Artificial Sequence: Synthetic oligonucleotide
  Antisense strand to SEQ ID NO: 1405422
cuauauaauggcuaaugcu

SEQ ID NO: 1405424 - RNA, 19 nt, Artificial Sequence
  Description of Artificial Sequence: Synthetic oligonucleotide
  Sense strand starting at position 3509 of SEQ ID NO: 1243269
cugagcuuuccaggugaga

SEQ ID NO: 1405425 - RNA, 19 nt, Artificial Sequence
  Description of Artificial Sequence: Synthetic oligonucleotide
  Antisense strand to SEQ ID NO: 1405424
ucucaccuggaaagcucag

SEQ ID NO: 1405426 - RNA, 19 nt, Artificial Sequence
  Description of Artificial Sequence: Synthetic oligonucleotide
  Sense strand starting at position 3537 of SEQ ID NO: 1243269
cccagaauguguuucucau

SEQ ID NO: 1405427 - RNA, 19 nt, Artificial Sequence
  Description of Artificial Sequence: Synthetic oligonucleotide
  Antisense strand to SEQ ID NO: 1405426
augagaaacacauucuggg

SEQ ID NO: 1405428 - RNA, 19 nt, Artificial Sequence
  Description of Artificial Sequence: Synthetic oligonucleotide
  Sense strand starting at position 3558 of SEQ ID NO: 1243269
aguuguucuuugcuuaaua

SEQ ID NO: 1405429 - RNA, 19 nt, Artificial Sequence
  Description of Artificial Sequence: Synthetic oligonucleotide
  Antisense strand to SEQ ID NO: 1405428
uauuaagcaaagaacaacu

SEQ ID NO: 1405430 - RNA, 19 nt, Artificial Sequence
  Description of Artificial Sequence: Synthetic oligonucleotide
  Sense strand starting at position 3569 of SEQ ID NO: 1243269
gcuuaauacccguauccag

SEQ ID NO: 1405431 - RNA, 19 nt, Artificial Sequence
  Description of Artificial Sequence: Synthetic oligonucleotide
  Antisense strand to SEQ ID NO: 1405430
cuggauacggguauuaagc

SEQ ID NO: 1405432 - RNA, 19 nt, Artificial Sequence
  Description of Artificial Sequence: Synthetic oligonucleotide
  Sense strand starting at position 3756 of SEQ ID NO: 1243269
uuaggacucuuugugucuu

SEQ ID NO: 1405433 - RNA, 19 nt, Artificial Sequence
  Description of Artificial Sequence: Synthetic oligonucleotide
  Antisense strand to SEQ ID NO: 1405432
aagacacaaagaguccuaa

SEQ ID NO: 1405434 - RNA, 19 nt, Artificial Sequence
  Description of Artificial Sequence: Synthetic oligonucleotide
  Sense strand starting at position 3777 of SEQ ID NO: 1243269
uuaagaaauucuuccguag

SEQ ID NO: 1405435 - RNA, 19 nt, Artificial Sequence
  Description of Artificial Sequence: Synthetic oligonucleotide
  Antisense strand to SEQ ID NO: 1405434
cuacggaagaauuucuuaa

SEQ ID NO: 1405436 - RNA, 19 nt, Artificial Sequence
  Description of Artificial Sequence: Synthetic oligonucleotide
  Sense strand starting at position 3781 of SEQ ID NO: 1243269
gaaauucuuccguagcuca

SEQ ID NO: 1405437 - RNA, 19 nt, Artificial Sequence
  Description of Artificial Sequence: Synthetic oligonucleotide
  Antisense strand to SEQ ID NO: 1405436
ugagcuacggaagaauuuc

SEQ ID NO: 1405438 - RNA, 19 nt, Artificial Sequence
  Description of Artificial Sequence: Synthetic oligonucleotide
  Sense strand starting at position 3792 of SEQ ID NO: 1243269
guagcucagcaucagagau

SEQ ID NO: 1405439 - RNA, 19 nt, Artificial Sequence
  Description of Artificial Sequence: Synthetic oligonucleotide
  Antisense strand to SEQ ID NO: 1405438
aucucugaugcugagcuac

SEQ ID NO: 1405440 - RNA, 19 nt, Artificial Sequence
  Description of Artificial Sequence: Synthetic oligonucleotide
  Sense strand starting at position 3857 of SEQ ID NO: 1243269
acauguaaguccucaacug

SEQ ID NO: 1405441 - RNA, 19 nt, Artificial Sequence
  Description of Artificial Sequence: Synthetic oligonucleotide
  Antisense strand to SEQ ID NO: 1405440
caguugaggacuuacaugu

SEQ ID NO: 1405442 - RNA, 19 nt, Artificial Sequence
  Description of Artificial Sequence: Synthetic oligonucleotide
  Sense strand starting at position 3864 of SEQ ID NO: 1243269
aguccucaacuguauggau

SEQ ID NO: 1405443 - RNA, 19 nt, Artificial Sequence
  Description of Artificial Sequence: Synthetic oligonucleotide
  Antisense strand to SEQ ID NO: 1405442
auccauacaguugaggacu

SEQ ID NO: 1405444 - RNA, 19 nt, Artificial Sequence
  Description of Artificial Sequence: Synthetic oligonucleotide
  Sense strand starting at position 3897 of SEQ ID NO: 1243269
ugguguggauacuuaguua

SEQ ID NO: 1405445 - RNA, 19 nt, Artificial Sequence
  Description of Artificial Sequence: Synthetic oligonucleotide
  Antisense strand to SEQ ID NO: 1405444
uaacuaaguauccacacca

SEQ ID NO: 1405446 - RNA, 19 nt, Artificial Sequence
  Description of Artificial Sequence: Synthetic oligonucleotide
  Sense strand starting at position 3920 of SEQ ID NO: 1243269
agcaucauuugucacaagu

SEQ ID NO: 1405447 - RNA, 19 nt, Artificial Sequence
  Description of Artificial Sequence: Synthetic oligonucleotide
  Antisense strand to SEQ ID NO: 1405446
acuugugacaaaugaugcu

SEQ ID NO: 1405448 - RNA, 19 nt, Artificial Sequence
  Description of Artificial Sequence: Synthetic oligonucleotide
  Sense strand starting at position 3933 of SEQ ID NO: 1243269
acaagucuccaaugugacu

SEQ ID NO: 1405449 - RNA, 19 nt, Artificial Sequence
  Description of Artificial Sequence: Synthetic oligonucleotide
  Antisense strand to SEQ ID NO: 1405448
agucacauuggagacuugu

SEQ ID NO: 1405450 - RNA, 19 nt, Artificial Sequence
  Description of Artificial Sequence: Synthetic oligonucleotide
  Sense strand starting at position 3944 of SEQ ID NO: 1243269
augugacuccagcacauau

SEQ ID NO: 1405451 - RNA, 19 nt, Artificial Sequence
  Description of Artificial Sequence: Synthetic oligonucleotide
  Antisense strand to SEQ ID NO: 1405450
auaugugcuggagucacau

SEQ ID NO: 1405452 - RNA, 19 nt, Artificial Sequence
  Description of Artificial Sequence: Synthetic oligonucleotide
  Sense strand starting at position 3980 of SEQ ID NO: 1243269
uguugaacuucucuuugua

SEQ ID NO: 1405453 - RNA, 19 nt, Artificial Sequence
  Description of Artificial Sequence: Synthetic oligonucleotide
  Antisense strand to SEQ ID NO: 1405452
uacaaagagaaguucaaca

SEQ ID NO: 1405454 - RNA, 19 nt, Artificial Sequence
  Description of Artificial Sequence: Synthetic oligonucleotide
  Sense strand starting at position 6 of SEQ ID NO: 1243270
auccuuacugucuggcaaa

SEQ ID NO: 1405455 - RNA, 19 nt, Artificial Sequence
  Description of Artificial Sequence: Synthetic oligonucleotide
  Antisense strand to SEQ ID NO: 1405454
uuugccagacaguaaggau

SEQ ID NO: 1405456 - RNA, 19 nt, Artificial Sequence
  Description of Artificial Sequence: Synthetic oligonucleotide
  Sense strand starting at position 9 of SEQ ID NO: 1243270
cuuacugucuggcaaacuu

SEQ ID NO: 1405457 - RNA, 19 nt, Artificial Sequence
  Description of Artificial Sequence: Synthetic oligonucleotide
  Antisense strand to SEQ ID NO: 1405456
aaguuugccagacaguaag

SEQ ID NO: 1405458 - RNA, 19 nt, Artificial Sequence
  Description of Artificial Sequence: Synthetic oligonucleotide
  Sense strand starting at position 163 of SEQ ID NO: 1243270
acaauuguuccggagucca

SEQ ID NO: 1405459 - RNA, 19 nt, Artificial Sequence
  Description of Artificial Sequence: Synthetic oligonucleotide
  Antisense strand to SEQ ID NO: 1405458
uggacuccggaacaauugu

SEQ ID NO: 1405460 - RNA, 19 nt, Artificial Sequence
  Description of Artificial Sequence: Synthetic oligonucleotide
  Sense strand starting at position 189 of SEQ ID NO: 1243270
gucuguuuccaccacacca

SEQ ID NO: 1405461 - RNA, 19 nt, Artificial Sequence
  Description of Artificial Sequence: Synthetic oligonucleotide
  Antisense strand to SEQ ID NO: 1405460
uggugugguggaaacagac

SEQ ID NO: 1405462 - RNA, 19 nt, Artificial Sequence
  Description of Artificial Sequence: Synthetic oligonucleotide
  Sense strand starting at position 253 of SEQ ID NO: 1243270
uggcgucguggacauauau

SEQ ID NO: 1405463 - RNA, 19 nt, Artificial Sequence
  Description of Artificial Sequence: Synthetic oligonucleotide
  Antisense strand to SEQ ID NO: 1405462
auauauguccacgacgcca

SEQ ID NO: 1405464 - RNA, 19 nt, Artificial Sequence
  Description of Artificial Sequence: Synthetic oligonucleotide
  Sense strand starting at position 294 of SEQ ID NO: 1243270
gggcuccugugaugugaau

SEQ ID NO: 1405465 - RNA, 19 nt, Artificial Sequence
  Description of Artificial Sequence: Synthetic oligonucleotide
  Antisense strand to SEQ ID NO: 1405464
auucacaucacaggagccc

SEQ ID NO: 1405466 - RNA, 19 nt, Artificial Sequence
  Description of Artificial Sequence: Synthetic oligonucleotide
  Sense strand starting at position 296 of SEQ ID NO: 1243270
gcuccugugaugugaaugu

SEQ ID NO: 1405467 - RNA, 19 nt, Artificial Sequence
  Description of Artificial Sequence: Synthetic oligonucleotide
  Antisense strand to SEQ ID NO: 1405466
acauucacaucacaggagc

SEQ ID NO: 1405468 - RNA, 19 nt, Artificial Sequence
  Description of Artificial Sequence: Synthetic oligonucleotide
  Sense strand starting at position 300 of SEQ ID NO: 1243270
cugugaugugaaugucuag

SEQ ID NO: 1405469 - RNA, 19 nt, Artificial Sequence
  Description of Artificial Sequence: Synthetic oligonucleotide
  Antisense strand to SEQ ID NO: 1405468
cuagacauucacaucacag

SEQ ID NO: 1405470 - RNA, 19 nt, Artificial Sequence
  Description of Artificial Sequence: Synthetic oligonucleotide
  Sense strand starting at position 303 of SEQ ID NO: 1243270
ugaugugaaugucuaguuu

SEQ ID NO: 1405471 - RNA, 19 nt, Artificial Sequence
  Description of Artificial Sequence: Synthetic oligonucleotide
  Antisense strand to SEQ ID NO: 1405470
aaacuagacauucacauca

SEQ ID NO: 1405472 - RNA, 19 nt, Artificial Sequence
  Description of Artificial Sequence: Synthetic oligonucleotide
  Sense strand starting at position 307 of SEQ ID NO: 1243270
gugaaugucuaguuuccag

SEQ ID NO: 1405473 - RNA, 19 nt, Artificial Sequence
  Description of Artificial Sequence: Synthetic oligonucleotide
  Antisense strand to SEQ ID NO: 1405472
cuggaaacuagacauucac

SEQ ID NO: 1405474 - RNA, 19 nt, Artificial Sequence
  Description of Artificial Sequence: Synthetic oligonucleotide
  Sense strand starting at position 311 of SEQ ID NO: 1243270
augucuaguuuccaggaca

SEQ ID NO: 1405475 - RNA, 19 nt, Artificial Sequence
  Description of Artificial Sequence: Synthetic oligonucleotide
  Antisense strand to SEQ ID NO: 1405474
uguccuggaaacuagacau

SEQ ID NO: 1405476 - RNA, 19 nt, Artificial Sequence
  Description of Artificial Sequence: Synthetic oligonucleotide
  Sense strand starting at position 386 of SEQ ID NO: 1243270
aaagucaucuaggagcaga

SEQ ID NO: 1405477 - RNA, 19 nt, Artificial Sequence
  Description of Artificial Sequence: Synthetic oligonucleotide
  Antisense strand to SEQ ID NO: 1405476
ucugcuccuagaugacuuu

SEQ ID NO: 1405478 - RNA, 19 nt, Artificial Sequence
  Description of Artificial Sequence: Synthetic oligonucleotide
  Sense strand starting at position 575 of SEQ ID NO: 1243270
gucuaaggcuuagagaagu

SEQ ID NO: 1405479 - RNA, 19 nt, Artificial Sequence
  Description of Artificial Sequence: Synthetic oligonucleotide
  Antisense strand to SEQ ID NO: 1405478
acuucucuaagccuuagac

SEQ ID NO: 1405480 - RNA, 19 nt, Artificial Sequence
  Description of Artificial Sequence: Synthetic oligonucleotide
  Sense strand starting at position 598 of SEQ ID NO: 1243270
ggacuuggccaaugacaca

SEQ ID NO: 1405481 - RNA, 19 nt, Artificial Sequence
  Description of Artificial Sequence: Synthetic oligonucleotide
  Antisense strand to SEQ ID NO: 1405480
ugugucauuggccaagucc

SEQ ID NO: 1405482 - RNA, 19 nt, Artificial Sequence
  Description of Artificial Sequence: Synthetic oligonucleotide
  Sense strand starting at position 697 of SEQ ID NO: 1243270
uugguuugguucccucaaa

SEQ ID NO: 1405483 - RNA, 19 nt, Artificial Sequence
  Description of Artificial Sequence: Synthetic oligonucleotide
  Antisense strand to SEQ ID NO: 1405482
uuugagggaaccaaaccaa

SEQ ID NO: 1405484 - RNA, 19 nt, Artificial Sequence
  Description of Artificial Sequence: Synthetic oligonucleotide
  Sense strand starting at position 1091 of SEQ ID NO: 1243270
uugggagucagacguggau

SEQ ID NO: 1405485 - RNA, 19 nt, Artificial Sequence
  Description of Artificial Sequence: Synthetic oligonucleotide
  Antisense strand to SEQ ID NO: 1405484
auccacgucugacucccaa

SEQ ID NO: 1405486 - RNA, 19 nt, Artificial Sequence
  Description of Artificial Sequence: Synthetic oligonucleotide
  Sense strand starting at position 1093 of SEQ ID NO: 1243270
gggagucagacguggaucu

SEQ ID NO: 1405487 - RNA, 19 nt, Artificial Sequence
  Description of Artificial Sequence: Synthetic oligonucleotide
  Antisense strand to SEQ ID NO: 1405486
agauccacgucugacuccc

SEQ ID NO: 1405488 - RNA, 19 nt, Artificial Sequence
  Description of Artificial Sequence: Synthetic oligonucleotide
  Sense strand starting at position 1241 of SEQ ID NO: 1243270
aggccaggcacugguuaaa

SEQ ID NO: 1405489 - RNA, 19 nt, Artificial Sequence
  Description of Artificial Sequence: Synthetic oligonucleotide
  Antisense strand to SEQ ID NO: 1405488
uuuaaccagugccuggccu

SEQ ID NO: 1405490 - RNA, 19 nt, Artificial Sequence
  Description of Artificial Sequence: Synthetic oligonucleotide
  Sense strand starting at position 1749 of SEQ ID NO: 1243270
gauguuggcucagagggaa

SEQ ID NO: 1405491 - RNA, 19 nt, Artificial Sequence
  Description of Artificial Sequence: Synthetic oligonucleotide
  Antisense strand to SEQ ID NO: 1405490
uucccucugagccaacauc

SEQ ID NO: 1405492 - RNA, 19 nt, Artificial Sequence
  Description of Artificial Sequence: Synthetic oligonucleotide
  Sense strand starting at position 2037 of SEQ ID NO: 1243270
auguauguguccgugugua

SEQ ID NO: 1405493 - RNA, 19 nt, Artificial Sequence
  Description of Artificial Sequence: Synthetic oligonucleotide
  Antisense strand to SEQ ID NO: 1405492
uacacacggacacauacau

SEQ ID NO: 1405494 - RNA, 19 nt, Artificial Sequence
  Description of Artificial Sequence: Synthetic oligonucleotide
  Sense strand starting at position 2039 of SEQ ID NO: 1243270
guauguguccguguguaug

SEQ ID NO: 1405495 - RNA, 19 nt, Artificial Sequence
  Description of Artificial Sequence: Synthetic oligonucleotide
  Antisense strand to SEQ ID NO: 1405494
cauacacacggacacauac

SEQ ID NO: 1405496 - RNA, 19 nt, Artificial Sequence
  Description of Artificial Sequence: Synthetic oligonucleotide
  Sense strand starting at position 2147 of SEQ ID NO: 1243270
ccucuuaugugguguggua

SEQ ID NO: 1405497 - RNA, 19 nt, Artificial Sequence
  Description of Artificial Sequence: Synthetic oligonucleotide
  Antisense strand to SEQ ID NO: 1405496
uaccacaccacauaagagg

SEQ ID NO: 1405498 - RNA, 19 nt, Artificial Sequence
  Description of Artificial Sequence: Synthetic oligonucleotide
  Sense strand starting at position 2284 of SEQ ID NO: 1243270
ugugcagucucccuggaau

SEQ ID NO: 1405499 - RNA, 19 nt, Artificial Sequence
  Description of Artificial Sequence: Synthetic oligonucleotide
  Antisense strand to SEQ ID NO: 1405498
auuccagggagacugcaca

SEQ ID NO: 1405500 - RNA, 19 nt, Artificial Sequence
  Description of Artificial Sequence: Synthetic oligonucleotide
  Sense strand starting at position 2332 of SEQ ID NO: 1243270
cagguuaucucaggccagu

SEQ ID NO: 1405501 - RNA, 19 nt, Artificial Sequence
  Description of Artificial Sequence: Synthetic oligonucleotide
  Antisense strand to SEQ ID NO: 1405500
acuggccugagauaaccug

SEQ ID NO: 1405502 - RNA, 19 nt, Artificial Sequence
  Description of Artificial Sequence: Synthetic oligonucleotide
  Sense strand starting at position 2335 of SEQ ID NO: 1243270
guuaucucaggccaguuau

SEQ ID NO: 1405503 - RNA, 19 nt, Artificial Sequence
  Description of Artificial Sequence: Synthetic oligonucleotide
  Antisense strand to SEQ ID NO: 1405502
auaacuggccugagauaac

SEQ ID NO: 1405504 - RNA, 19 nt, Artificial Sequence
  Description of Artificial Sequence: Synthetic oligonucleotide
  Sense strand starting at position 2556 of SEQ ID NO: 1243270
cuaugauguucccaggugu

SEQ ID NO: 1405505 - RNA, 19 nt, Artificial Sequence
  Description of Artificial Sequence: Synthetic oligonucleotide
  Antisense strand to SEQ ID NO: 1405504
acaccugggaacaucauag

SEQ ID NO: 1405506 - RNA, 19 nt, Artificial Sequence
  Description of Artificial Sequence: Synthetic oligonucleotide
  Sense strand starting at position 2614 of SEQ ID NO: 1243270
cugagcucauggugaagua

SEQ ID NO: 1405507 - RNA, 19 nt, Artificial Sequence
  Description of Artificial Sequence: Synthetic oligonucleotide
  Antisense strand to SEQ ID NO: 1405506
uacuucaccaugagcucag

SEQ ID NO: 1405508 - RNA, 19 nt, Artificial Sequence
  Description of Artificial Sequence: Synthetic oligonucleotide
  Sense strand starting at position 2746 of SEQ ID NO: 1243270
ggaauauagcgaggccuca

SEQ ID NO: 1405509 - RNA, 19 nt, Artificial Sequence
  Description of Artificial Sequence: Synthetic oligonucleotide
  Antisense strand to SEQ ID NO: 1405508
ugaggccucgcuauauucc

SEQ ID NO: 1405510 - RNA, 19 nt, Artificial Sequence
  Description of Artificial Sequence: Synthetic oligonucleotide
  Sense strand starting at position 3019 of SEQ ID NO: 1243270
aaaggcuggcauugugaaa

SEQ ID NO: 1405511 - RNA, 19 nt, Artificial Sequence
  Description of Artificial Sequence: Synthetic oligonucleotide
  Antisense strand to SEQ ID NO: 1405510
uuucacaaugccagccuuu

SEQ ID NO: 1405512 - RNA, 19 nt, Artificial Sequence
  Description of Artificial Sequence: Synthetic oligonucleotide
  Sense strand starting at position 3032 of SEQ ID NO: 1243270
gugaaaggguccucgagga

SEQ ID NO: 1405513 - RNA, 19 nt, Artificial Sequence
  Description of Artificial Sequence: Synthetic oligonucleotide
  Antisense strand to SEQ ID NO: 1405512
uccucgaggacccuuucac

SEQ ID NO: 1405514 - RNA, 19 nt, Artificial Sequence
  Description of Artificial Sequence: Synthetic oligonucleotide
  Sense strand starting at position 3036 of SEQ ID NO: 1243270
aaggguccucgaggaauug

SEQ ID NO: 1405515 - RNA, 19 nt, Artificial Sequence
  Description of Artificial Sequence: Synthetic oligonucleotide
  Antisense strand to SEQ ID NO: 1405514
caauuccucgaggacccuu

SEQ ID NO: 1405516 - RNA, 19 nt, Artificial Sequence
  Description of Artificial Sequence: Synthetic oligonucleotide
  Sense strand starting at position 3046 of SEQ ID NO: 1243270
gaggaauugccuuggaaac

SEQ ID NO: 1405517 - RNA, 19 nt, Artificial Sequence
  Description of Artificial Sequence: Synthetic oligonucleotide
  Antisense strand to SEQ ID NO: 1405516
guuuccaaggcaauuccuc

SEQ ID NO: 1405518 - RNA, 19 nt, Artificial Sequence
  Description of Artificial Sequence: Synthetic oligonucleotide
  Sense strand starting at position 3047 of SEQ ID NO: 1243270
aggaauugccuuggaaacu

SEQ ID NO: 1405519 - RNA, 19 nt, Artificial Sequence
  Description of Artificial Sequence: Synthetic oligonucleotide
  Antisense strand to SEQ ID NO: 1405518
aguuuccaaggcaauuccu

SEQ ID NO: 1405520 - RNA, 19 nt, Artificial Sequence
  Description of Artificial Sequence: Synthetic oligonucleotide
  Sense strand starting at position 3048 of SEQ ID NO: 1243270
ggaauugccuuggaaacug

SEQ ID NO: 1405521 - RNA, 19 nt, Artificial Sequence
  Description of Artificial Sequence: Synthetic oligonucleotide
  Antisense strand to SEQ ID NO: 1405520
caguuuccaaggcaauucc

SEQ ID NO: 1405522 - RNA, 19 nt, Artificial Sequence
  Description of Artificial Sequence: Synthetic oligonucleotide
  Sense strand starting at position 3164 of SEQ ID NO: 1243270
gugggagugaggcauguau

SEQ ID NO: 1405523 - RNA, 19 nt, Artificial Sequence
  Description of Artificial Sequence: Synthetic oligonucleotide
  Antisense strand to SEQ ID NO: 1405522
auacaugccucacucccac

SEQ ID NO: 1405524 - RNA, 19 nt, Artificial Sequence
  Description of Artificial Sequence: Synthetic oligonucleotide
  Sense strand starting at position 3173 of SEQ ID NO: 1243270
aggcauguauccuccuuga

SEQ ID NO: 1405525 - RNA, 19 nt, Artificial Sequence
  Description of Artificial Sequence: Synthetic oligonucleotide
  Antisense strand to SEQ ID NO: 1405524
ucaaggaggauacaugccu

SEQ ID NO: 1405526 - RNA, 19 nt, Artificial Sequence
  Description of Artificial Sequence: Synthetic oligonucleotide
  Sense strand starting at position 3587 of SEQ ID NO: 1243270
gugggaggaucauucucaa

SEQ ID NO: 1405527 - RNA, 19 nt, Artificial Sequence
  Description of Artificial Sequence: Synthetic oligonucleotide
  Antisense strand to SEQ ID NO: 1405526
uugagaaugauccucccac

SEQ ID NO: 1405528 - RNA, 19 nt, Artificial Sequence
  Description of Artificial Sequence: Synthetic oligonucleotide
  Sense strand starting at position 3599 of SEQ ID NO: 1243270
uucucaagaucaggaguuu

SEQ ID NO: 1405529 - RNA, 19 nt, Artificial Sequence
  Description of Artificial Sequence: Synthetic oligonucleotide
  Antisense strand to SEQ ID NO: 1405528
aaacuccugaucuugagaa

SEQ ID NO: 1405530 - RNA, 19 nt, Artificial Sequence
  Description of Artificial Sequence: Synthetic oligonucleotide
  Sense strand starting at position 10 of SEQ ID NO: 1243271
gcgagaccucgucucuguu

SEQ ID NO: 1405531 - RNA, 19 nt, Artificial Sequence
  Description of Artificial Sequence: Synthetic oligonucleotide
  Antisense strand to SEQ ID NO: 1405530
aacagagacgaggucucgc

SEQ ID NO: 1405532 - RNA, 19 nt, Artificial Sequence
  Description of Artificial Sequence: Synthetic oligonucleotide
  Sense strand starting at position 17 of SEQ ID NO: 1243271
cucgucucuguuuaaacaa

SEQ ID NO: 1405533 - RNA, 19 nt, Artificial Sequence
  Description of Artificial Sequence: Synthetic oligonucleotide
  Antisense strand to SEQ ID NO: 1405532
uuguuuaaacagagacgag

SEQ ID NO: 1405534 - RNA, 19 nt, Artificial Sequence
  Description of Artificial Sequence: Synthetic oligonucleotide
  Sense strand starting at position 416 of SEQ ID NO: 1243271
ccaggauuaagaggcugua

SEQ ID NO: 1405535 - RNA, 19 nt, Artificial Sequence
  Description of Artificial Sequence: Synthetic oligonucleotide
  Antisense strand to SEQ ID NO: 1405534
uacagccucuuaauccugg

SEQ ID NO: 1405536 - RNA, 19 nt, Artificial Sequence
  Description of Artificial Sequence: Synthetic oligonucleotide
  Sense strand starting at position 419 of SEQ ID NO: 1243271
ggauuaagaggcuguacua

SEQ ID NO: 1405537 - RNA, 19 nt, Artificial Sequence
  Description of Artificial Sequence: Synthetic oligonucleotide
  Antisense strand to SEQ ID NO: 1405536
uaguacagccucuuaaucc

SEQ ID NO: 1405538 - RNA, 19 nt, Artificial Sequence
  Description of Artificial Sequence: Synthetic oligonucleotide
  Sense strand starting at position 456 of SEQ ID NO: 1243271
uggcauuugcugugcucau

SEQ ID NO: 1405539 - RNA, 19 nt, Artificial Sequence
  Description of Artificial Sequence: Synthetic oligonucleotide
  Antisense strand to SEQ ID NO: 1405538
augagcacagcaaaugcca

SEQ ID NO: 1405540 - RNA, 19 nt, Artificial Sequence
  Description of Artificial Sequence: Synthetic oligonucleotide
  Sense strand starting at position 460 of SEQ ID NO: 1243271
auuugcugugcucaucuua

SEQ ID NO: 1405541 - RNA, 19 nt, Artificial Sequence
  Description of Artificial Sequence: Synthetic oligonucleotide
  Antisense strand to SEQ ID NO: 1405540
uaagaugagcacagcaaau

SEQ ID NO: 1405542 - RNA, 19 nt, Artificial Sequence
  Description of Artificial Sequence: Synthetic oligonucleotide
  Sense strand starting at position 475 of SEQ ID NO: 1243271
cuuagauccuagcccugau

SEQ ID NO: 1405543 - RNA, 19 nt, Artificial Sequence
  Description of Artificial Sequence: Synthetic oligonucleotide
  Antisense strand to SEQ ID NO: 1405542
aucagggcuaggaucuaag

SEQ ID NO: 1405544 - RNA, 19 nt, Artificial Sequence
  Description of Artificial Sequence: Synthetic oligonucleotide
  Sense strand starting at position 479 of SEQ ID NO: 1243271
gauccuagcccugauaggu

SEQ ID NO: 1405545 - RNA, 19 nt, Artificial Sequence
  Description of Artificial Sequence: Synthetic oligonucleotide
  Antisense strand to SEQ ID NO: 1405544
accuaucagggcuaggauc

SEQ ID NO: 1405546 - RNA, 19 nt, Artificial Sequence
  Description of Artificial Sequence: Synthetic oligonucleotide
  Sense strand starting at position 580 of SEQ ID NO: 1243271
ggcacagagccagacauau

SEQ ID NO: 1405547 - RNA, 19 nt, Artificial Sequence
  Description of Artificial Sequence: Synthetic oligonucleotide
  Antisense strand to SEQ ID NO: 1405546
auaugucuggcucugugcc

SEQ ID NO: 1405548 - RNA, 19 nt, Artificial Sequence
  Description of Artificial Sequence: Synthetic oligonucleotide
  Sense strand starting at position 640 of SEQ ID NO: 1243271
auaguagcagcauggauau

SEQ ID NO: 1405549 - RNA, 19 nt, Artificial Sequence
  Description of Artificial Sequence: Synthetic oligonucleotide
  Antisense strand to SEQ ID NO: 1405548
auauccaugcugcuacuau

SEQ ID NO: 1405550 - RNA, 19 nt, Artificial Sequence
  Description of Artificial Sequence: Synthetic oligonucleotide
  Sense strand starting at position 659 of SEQ ID NO: 1243271
agaggaguuaaugguuaca

SEQ ID NO: 1405551 - RNA, 19 nt, Artificial Sequence
  Description of Artificial Sequence: Synthetic oligonucleotide
  Antisense strand to SEQ ID NO: 1405550
uguaaccauuaacuccucu

SEQ ID NO: 1405552 - RNA, 19 nt, Artificial Sequence
  Description of Artificial Sequence: Synthetic oligonucleotide
  Sense strand starting at position 661 of SEQ ID NO: 1243271
aggaguuaaugguuacaug

SEQ ID NO: 1405553 - RNA, 19 nt, Artificial Sequence
  Description of Artificial Sequence: Synthetic oligonucleotide
  Antisense strand to SEQ ID NO: 1405552
cauguaaccauuaacuccu

SEQ ID NO: 1405554 - RNA, 19 nt, Artificial Sequence
  Description of Artificial Sequence: Synthetic oligonucleotide
  Sense strand starting at position 737 of SEQ ID NO: 1243271
agauguaaguuuccaacac

SEQ ID NO: 1405555 - RNA, 19 nt, Artificial Sequence
  Description of Artificial Sequence: Synthetic oligonucleotide
  Antisense strand to SEQ ID NO: 1405554
guguuggaaacuuacaucu

SEQ ID NO: 1405556 - RNA, 19 nt, Artificial Sequence
  Description of Artificial Sequence: Synthetic oligonucleotide
  Sense strand starting at position 741 of SEQ ID NO: 1243271
guaaguuuccaacacuggu

SEQ ID NO: 1405557 - RNA, 19 nt, Artificial Sequence
  Description of Artificial Sequence: Synthetic oligonucleotide
  Antisense strand to SEQ ID NO: 1405556
accaguguuggaaacuuac

SEQ ID NO: 1405558 - RNA, 19 nt, Artificial Sequence
  Description of Artificial Sequence: Synthetic oligonucleotide
  Sense strand starting at position 974 of SEQ ID NO: 1243271
gugccucuugucucagcua

SEQ ID NO: 1405559 - RNA, 19 nt, Artificial Sequence
  Description of Artificial Sequence: Synthetic oligonucleotide
  Antisense strand to SEQ ID NO: 1405558
uagcugagacaagaggcac

SEQ ID NO: 1405560 - RNA, 19 nt, Artificial Sequence
  Description of Artificial Sequence: Synthetic oligonucleotide
  Sense strand starting at position 1204 of SEQ ID NO: 1243271
uguugauuggcugguuaaa

SEQ ID NO: 1405561 - RNA, 19 nt, Artificial Sequence
  Description of Artificial Sequence: Synthetic oligonucleotide
  Antisense strand to SEQ ID NO: 1405560
uuuaaccagccaaucaaca

SEQ ID NO: 1405562 - RNA, 19 nt, Artificial Sequence
  Description of Artificial Sequence: Synthetic oligonucleotide
  Sense strand starting at position 1246 of SEQ ID NO: 1243271
cugaaugccuugcuaagaa

SEQ ID NO: 1405563 - RNA, 19 nt, Artificial Sequence
  Description of Artificial Sequence: Synthetic oligonucleotide
  Antisense strand to SEQ ID NO: 1405562
uucuuagcaaggcauucag

SEQ ID NO: 1405564 - RNA, 19 nt, Artificial Sequence
  Description of Artificial Sequence: Synthetic oligonucleotide
  Sense strand starting at position 1269 of SEQ ID NO: 1243271
ggccuuuguccugaaggca

SEQ ID NO: 1405565 - RNA, 19 nt, Artificial Sequence
  Description of Artificial Sequence: Synthetic oligonucleotide
  Antisense strand to SEQ ID NO: 1405564
ugccuucaggacaaaggcc

SEQ ID NO: 1405566 - RNA, 19 nt, Artificial Sequence
  Description of Artificial Sequence: Synthetic oligonucleotide
  Sense strand starting at position 2185 of SEQ ID NO: 1243271
gucuauuugucgcucaaag

SEQ ID NO: 1405567 - RNA, 19 nt, Artificial Sequence
  Description of Artificial Sequence: Synthetic oligonucleotide
  Antisense strand to SEQ ID NO: 1405566
cuuugagcgacaaauagac

SEQ ID NO: 1405568 - RNA, 19 nt, Artificial Sequence
  Description of Artificial Sequence: Synthetic oligonucleotide
  Sense strand starting at position 2187 of SEQ ID NO: 1243271
cuauuugucgcucaaagua

SEQ ID NO: 1405569 - RNA, 19 nt, Artificial Sequence
  Description of Artificial Sequence: Synthetic oligonucleotide
  Antisense strand to SEQ ID NO: 1405568
uacuuugagcgacaaauag

SEQ ID NO: 1405570 - RNA, 19 nt, Artificial Sequence
  Description of Artificial Sequence: Synthetic oligonucleotide
  Sense strand starting at position 2223 of SEQ ID NO: 1243271
gagacgggucggugauaga

SEQ ID NO: 1405571 - RNA, 19 nt, Artificial Sequence
  Description of Artificial Sequence: Synthetic oligonucleotide
  Antisense strand to SEQ ID NO: 1405570
ucuaucaccgacccgucuc

SEQ ID NO: 1405572 - RNA, 19 nt, Artificial Sequence
  Description of Artificial Sequence: Synthetic oligonucleotide
  Sense strand starting at position 2224 of SEQ ID NO: 1243271
agacgggucggugauagaa

SEQ ID NO: 1405573 - RNA, 19 nt, Artificial Sequence
  Description of Artificial Sequence: Synthetic oligonucleotide
  Antisense strand to SEQ ID NO: 1405572
uucuaucaccgacccgucu

SEQ ID NO: 1405574 - RNA, 19 nt, Artificial Sequence
  Description of Artificial Sequence: Synthetic oligonucleotide
  Sense strand starting at position 2245 of SEQ ID NO: 1243271
aggaaggaucgcgggaaau

SEQ ID NO: 1405575 - RNA, 19 nt, Artificial Sequence
  Description of Artificial Sequence: Synthetic oligonucleotide
  Antisense strand to SEQ ID NO: 1405574
auuucccgcgauccuuccu

SEQ ID NO: 1405576 - RNA, 19 nt, Artificial Sequence
  Description of Artificial Sequence: Synthetic oligonucleotide
  Sense strand starting at position 2246 of SEQ ID NO: 1243271
ggaaggaucgcgggaaaua

SEQ ID NO: 1405577 - RNA, 19 nt, Artificial Sequence
  Description of Artificial Sequence: Synthetic oligonucleotide
  Antisense strand to SEQ ID NO: 1405576
uauuucccgcgauccuucc

SEQ ID NO: 1405578 - RNA, 19 nt, Artificial Sequence
  Description of Artificial Sequence: Synthetic oligonucleotide
  Sense strand starting at position 2328 of SEQ ID NO: 1243271
aaugcuuuccaacagaggu

SEQ ID NO: 1405579 - RNA, 19 nt, Artificial Sequence
  Description of Artificial Sequence: Synthetic oligonucleotide
  Antisense strand to SEQ ID NO: 1405578
accucuguuggaaagcauu

SEQ ID NO: 1405580 - RNA, 19 nt, Artificial Sequence
  Description of Artificial Sequence: Synthetic oligonucleotide
  Sense strand starting at position 2447 of SEQ ID NO: 1243271
uguugaauuuggccuccau

SEQ ID NO: 1405581 - RNA, 19 nt, Artificial Sequence
  Description of Artificial Sequence: Synthetic oligonucleotide
  Antisense strand to SEQ ID NO: 1405580
auggaggccaaauucaaca

SEQ ID NO: 1405582 - RNA, 19 nt, Artificial Sequence
  Description of Artificial Sequence: Synthetic oligonucleotide
  Sense strand starting at position 2472 of SEQ ID NO: 1243271
agagaugcaaaggguuaau

SEQ ID NO: 1405583 - RNA, 19 nt, Artificial Sequence
  Description of Artificial Sequence: Synthetic oligonucleotide
  Antisense strand to SEQ ID NO: 1405582
auuaacccuuugcaucucu

SEQ ID NO: 1405584 - RNA, 19 nt, Artificial Sequence
  Description of Artificial Sequence: Synthetic oligonucleotide
  Sense strand starting at position 2482 of SEQ ID NO: 1243271
aggguuaauuuguagauag

SEQ ID NO: 1405585 - RNA, 19 nt, Artificial Sequence
  Description of Artificial Sequence: Synthetic oligonucleotide
  Antisense strand to SEQ ID NO: 1405584
cuaucuacaaauuaacccu

SEQ ID NO: 1405586 - RNA, 19 nt, Artificial Sequence
  Description of Artificial Sequence: Synthetic oligonucleotide
  Sense strand starting at position 2503 of SEQ ID NO: 1243271
gaagucaaucuugggccaa

SEQ ID NO: 1405587 - RNA, 19 nt, Artificial Sequence
  Description of Artificial Sequence: Synthetic oligonucleotide
  Antisense strand to SEQ ID NO: 1405586
uuggcccaagauugacuuc

SEQ ID NO: 1405588 - RNA, 19 nt, Artificial Sequence
  Description of Artificial Sequence: Synthetic oligonucleotide
  Sense strand starting at position 2505 of SEQ ID NO: 1243271
agucaaucuugggccaacu

SEQ ID NO: 1405589 - RNA, 19 nt, Artificial Sequence
  Description of Artificial Sequence: Synthetic oligonucleotide
  Antisense strand to SEQ ID NO: 1405588
aguuggcccaagauugacu

SEQ ID NO: 1405590 - RNA, 19 nt, Artificial Sequence
  Description of Artificial Sequence: Synthetic oligonucleotide
  Sense strand starting at position 2516 of SEQ ID NO: 1243271
ggccaacuucuggacucau

SEQ ID NO: 1405591 - RNA, 19 nt, Artificial Sequence
  Description of Artificial Sequence: Synthetic oligonucleotide
  Antisense strand to SEQ ID NO: 1405590
augaguccagaaguuggcc

SEQ ID NO: 1405592 - RNA, 19 nt, Artificial Sequence
  Description of Artificial Sequence: Synthetic oligonucleotide
  Sense strand starting at position 2535 of SEQ ID NO: 1243271
gguuauuuguuguuguuaa

SEQ ID NO: 1405593 - RNA, 19 nt, Artificial Sequence
  Description of Artificial Sequence: Synthetic oligonucleotide
  Antisense strand to SEQ ID NO: 1405592
uuaacaacaacaaauaacc

SEQ ID NO: 1405594 - RNA, 19 nt, Artificial Sequence
  Description of Artificial Sequence: Synthetic oligonucleotide
  Sense strand starting at position 2749 of SEQ ID NO: 1243271
aucuuuauugaguauguac

SEQ ID NO: 1405595 - RNA, 19 nt, Artificial Sequence
  Description of Artificial Sequence: Synthetic oligonucleotide
  Antisense strand to SEQ ID NO: 1405594
guacauacucaauaaagau

SEQ ID NO: 1405596 - RNA, 19 nt, Artificial Sequence
  Description of Artificial Sequence: Synthetic oligonucleotide
  Sense strand starting at position 2751 of SEQ ID NO: 1243271
cuuuauugaguauguacuu

SEQ ID NO: 1405597 - RNA, 19 nt, Artificial Sequence
  Description of Artificial Sequence: Synthetic oligonucleotide
  Antisense strand to SEQ ID NO: 1405596
aaguacauacucaauaaag

SEQ ID NO: 1405598 - RNA, 19 nt, Artificial Sequence
  Description of Artificial Sequence: Synthetic oligonucleotide
  Sense strand starting at position 2762 of SEQ ID NO: 1243271
auguacuuugcacauggaa

SEQ ID NO: 1405599 - RNA, 19 nt, Artificial Sequence
  Description of Artificial Sequence: Synthetic oligonucleotide
  Antisense strand to SEQ ID NO: 1405598
uuccaugugcaaaguacau

SEQ ID NO: 1405600 - RNA, 19 nt, Artificial Sequence
  Description of Artificial Sequence: Synthetic oligonucleotide
  Sense strand starting at position 2775 of SEQ ID NO: 1243271
auggaacugucuuugauug

SEQ ID NO: 1405601 - RNA, 19 nt, Artificial Sequence
  Description of Artificial Sequence: Synthetic oligonucleotide
  Antisense strand to SEQ ID NO: 1405600
caaucaaagacaguuccau

SEQ ID NO: 1405602 - RNA, 19 nt, Artificial Sequence
  Description of Artificial Sequence: Synthetic oligonucleotide
  Sense strand starting at position 2776 of SEQ ID NO: 1243271
uggaacugucuuugauuga

SEQ ID NO: 1405603 - RNA, 19 nt, Artificial Sequence
  Description of Artificial Sequence: Synthetic oligonucleotide
  Antisense strand to SEQ ID NO: 1405602
ucaaucaaagacaguucca

SEQ ID NO: 1405604 - RNA, 19 nt, Artificial Sequence
  Description of Artificial Sequence: Synthetic oligonucleotide
  Sense strand starting at position 2783 of SEQ ID NO: 1243271
gucuuugauugacuguaua

SEQ ID NO: 1405605 - RNA, 19 nt, Artificial Sequence
  Description of Artificial Sequence: Synthetic oligonucleotide
  Antisense strand to SEQ ID NO: 1405604
uauacagucaaucaaagac

SEQ ID NO: 1405606 - RNA, 19 nt, Artificial Sequence
  Description of Artificial Sequence: Synthetic oligonucleotide
  Sense strand starting at position 3688 of SEQ ID NO: 1243271
guaguaagguuucuuacaa

SEQ ID NO: 1405607 - RNA, 19 nt, Artificial Sequence
  Description of Artificial Sequence: Synthetic oligonucleotide
  Antisense strand to SEQ ID NO: 1405606
uuguaagaaaccuuacuac

SEQ ID NO: 1405608 - RNA, 19 nt, Artificial Sequence
  Description of Artificial Sequence: Synthetic oligonucleotide
  Sense strand starting at position 3689 of SEQ ID NO: 1243271
uaguaagguuucuuacaag

SEQ ID NO: 1405609 - RNA, 19 nt, Artificial Sequence
  Description of Artificial Sequence: Synthetic oligonucleotide
  Antisense strand to SEQ ID NO: 1405608
cuuguaagaaaccuuacua

SEQ ID NO: 1405610 - RNA, 19 nt, Artificial Sequence
  Description of Artificial Sequence: Synthetic oligonucleotide
  Sense strand starting at position 75 of SEQ ID NO: 1243272
cggugaugggugugugaga

SEQ ID NO: 1405611 - RNA, 19 nt, Artificial Sequence
  Description of Artificial Sequence: Synthetic oligonucleotide
  Antisense strand to SEQ ID NO: 1405610
ucucacacacccaucaccg

SEQ ID NO: 1405612 - RNA, 19 nt, Artificial Sequence
  Description of Artificial Sequence: Synthetic oligonucleotide
  Sense strand starting at position 80 of SEQ ID NO: 1243272
augggugugugagaccuaa

SEQ ID NO: 1405613 - RNA, 19 nt, Artificial Sequence
  Description of Artificial Sequence: Synthetic oligonucleotide
  Antisense strand to SEQ ID NO: 1405612
uuaggucucacacacccau

SEQ ID NO: 1405614 - RNA, 19 nt, Artificial Sequence
  Description of Artificial Sequence: Synthetic oligonucleotide
  Sense strand starting at position 136 of SEQ ID NO: 1243272
ggacuugccuguccacuua

SEQ ID NO: 1405615 - RNA, 19 nt, Artificial Sequence
  Description of Artificial Sequence: Synthetic oligonucleotide
  Antisense strand to SEQ ID NO: 1405614
uaaguggacaggcaagucc

SEQ ID NO: 1405616 - RNA, 19 nt, Artificial Sequence
  Description of Artificial Sequence: Synthetic oligonucleotide
  Sense strand starting at position 261 of SEQ ID NO: 1243272
ggcuccagacguugauaua

SEQ ID NO: 1405617 - RNA, 19 nt, Artificial Sequence
  Description of Artificial Sequence: Synthetic oligonucleotide
  Antisense strand to SEQ ID NO: 1405616
uauaucaacgucuggagcc

SEQ ID NO: 1405618 - RNA, 19 nt, Artificial Sequence
  Description of Artificial Sequence: Synthetic oligonucleotide
  Sense strand starting at position 262 of SEQ ID NO: 1243272
gcuccagacguugauauaa

SEQ ID NO: 1405619 - RNA, 19 nt, Artificial Sequence
  Description of Artificial Sequence: Synthetic oligonucleotide
  Antisense strand to SEQ ID NO: 1405618
uuauaucaacgucuggagc

SEQ ID NO: 1405620 - RNA, 19 nt, Artificial Sequence
  Description of Artificial Sequence: Synthetic oligonucleotide
  Sense strand starting at position 264 of SEQ ID NO: 1243272
uccagacguugauauaagu

SEQ ID NO: 1405621 - RNA, 19 nt, Artificial Sequence
  Description of Artificial Sequence: Synthetic oligonucleotide
  Antisense strand to SEQ ID NO: 1405620
acuuauaucaacgucugga

SEQ ID NO: 1405622 - RNA, 19 nt, Artificial Sequence
  Description of Artificial Sequence: Synthetic oligonucleotide
  Sense strand starting at position 316 of SEQ ID NO: 1243272
uccuaaagauccucuguga

SEQ ID NO: 1405623 - RNA, 19 nt, Artificial Sequence
  Description of Artificial Sequence: Synthetic oligonucleotide
  Antisense strand to SEQ ID NO: 1405622
ucacagaggaucuuuagga

SEQ ID NO: 1405624 - RNA, 19 nt, Artificial Sequence
  Description of Artificial Sequence: Synthetic oligonucleotide
  Sense strand starting at position 319 of SEQ ID NO: 1243272
uaaagauccucugugagcu

SEQ ID NO: 1405625 - RNA, 19 nt, Artificial Sequence
  Description of Artificial Sequence: Synthetic oligonucleotide
  Antisense strand to SEQ ID NO: 1405624
agcucacagaggaucuuua

SEQ ID NO: 1405626 - RNA, 19 nt, Artificial Sequence
  Description of Artificial Sequence: Synthetic oligonucleotide
  Sense strand starting at position 320 of SEQ ID NO: 1243272
aaagauccucugugagcuu

SEQ ID NO: 1405627 - RNA, 19 nt, Artificial Sequence
  Description of Artificial Sequence: Synthetic oligonucleotide
  Antisense strand to SEQ ID NO: 1405626
aagcucacagaggaucuuu

SEQ ID NO: 1405628 - RNA, 19 nt, Artificial Sequence
  Description of Artificial Sequence: Synthetic oligonucleotide
  Sense strand starting at position 363 of SEQ ID NO: 1243272
uugguauuggacgguguua

SEQ ID NO: 1405629 - RNA, 19 nt, Artificial Sequence
  Description of Artificial Sequence: Synthetic oligonucleotide
  Antisense strand to SEQ ID NO: 1405628
uaacaccguccaauaccaa

SEQ ID NO: 1405630 - RNA, 19 nt, Artificial Sequence
  Description of Artificial Sequence: Synthetic oligonucleotide
  Sense strand starting at position 365 of SEQ ID NO: 1243272
gguauuggacgguguuaug

SEQ ID NO: 1405631 - RNA, 19 nt, Artificial Sequence
  Description of Artificial Sequence: Synthetic oligonucleotide
  Antisense strand to SEQ ID NO: 1405630
cauaacaccguccaauacc

SEQ ID NO: 1405632 - RNA, 19 nt, Artificial Sequence
  Description of Artificial Sequence: Synthetic oligonucleotide
  Sense strand starting at position 376 of SEQ ID NO: 1243272
guguuaugucgggaccgca

SEQ ID NO: 1405633 - RNA, 19 nt, Artificial Sequence
  Description of Artificial Sequence: Synthetic oligonucleotide
  Antisense strand to SEQ ID NO: 1405632
ugcggucccgacauaacac

SEQ ID NO: 1405634 - RNA, 19 nt, Artificial Sequence
  Description of Artificial Sequence: Synthetic oligonucleotide
  Sense strand starting at position 542 of SEQ ID NO: 1243272
ccgucauguucggcuggaa

SEQ ID NO: 1405635 - RNA, 19 nt, Artificial Sequence
  Description of Artificial Sequence: Synthetic oligonucleotide
  Antisense strand to SEQ ID NO: 1405634
uuccagccgaacaugacgg

SEQ ID NO: 1405636 - RNA, 19 nt, Artificial Sequence
  Description of Artificial Sequence: Synthetic oligonucleotide
  Sense strand starting at position 610 of SEQ ID NO: 1243272
aggagaagcaucugaaguc

SEQ ID NO: 1405637 - RNA, 19 nt, Artificial Sequence
  Description of Artificial Sequence: Synthetic oligonucleotide
  Antisense strand to SEQ ID NO: 1405636
gacuucagaugcuucuccu

SEQ ID NO: 1405638 - RNA, 19 nt, Artificial Sequence
  Description of Artificial Sequence: Synthetic oligonucleotide
  Sense strand starting at position 611 of SEQ ID NO: 1243272
ggagaagcaucugaaguca

SEQ ID NO: 1405639 - RNA, 19 nt, Artificial Sequence
  Description of Artificial Sequence: Synthetic oligonucleotide
  Antisense strand to SEQ ID NO: 1405638
ugacuucagaugcuucucc

SEQ ID NO: 1405640 - RNA, 19 nt, Artificial Sequence
  Description of Artificial Sequence: Synthetic oligonucleotide
  Sense strand starting at position 670 of SEQ ID NO: 1243272
ggcagaguucgaggagaag

SEQ ID NO: 1405641 - RNA, 19 nt, Artificial Sequence
  Description of Artificial Sequence: Synthetic oligonucleotide
  Antisense strand to SEQ ID NO: 1405640
cuucuccucgaacucugcc

SEQ ID NO: 1405642 - RNA, 19 nt, Artificial Sequence
  Description of Artificial Sequence: Synthetic oligonucleotide
  Sense strand starting at position 1143 of SEQ ID NO: 1243272
guagauaacgcguguagcu

SEQ ID NO: 1405643 - RNA, 19 nt, Artificial Sequence
  Description of Artificial Sequence: Synthetic oligonucleotide
  Antisense strand to SEQ ID NO: 1405642
agcuacacgcguuaucuac

SEQ ID NO: 1405644 - RNA, 19 nt, Artificial Sequence
  Description of Artificial Sequence: Synthetic oligonucleotide
  Sense strand starting at position 1174 of SEQ ID NO: 1243272
ccaccauccguguggucau

SEQ ID NO: 1405645 - RNA, 19 nt, Artificial Sequence
  Description of Artificial Sequence: Synthetic oligonucleotide
  Antisense strand to SEQ ID NO: 1405644
augaccacacggauggugg

SEQ ID NO: 1405646 - RNA, 19 nt, Artificial Sequence
  Description of Artificial Sequence: Synthetic oligonucleotide
  Sense strand starting at position 1325 of SEQ ID NO: 1243272
ucgggagucucacuagauu

SEQ ID NO: 1405647 - RNA, 19 nt, Artificial Sequence
  Description of Artificial Sequence: Synthetic oligonucleotide
  Antisense strand to SEQ ID NO: 1405646
aaucuagugagacucccga

SEQ ID NO: 1405648 - RNA, 19 nt, Artificial Sequence
  Description of Artificial Sequence: Synthetic oligonucleotide
  Sense strand starting at position 1348 of SEQ ID NO: 1243272
gggcgaugaaguggaucuu

SEQ ID NO: 1405649 - RNA, 19 nt, Artificial Sequence
  Description of Artificial Sequence: Synthetic oligonucleotide
  Antisense strand to SEQ ID NO: 1405648
aagauccacuucaucgccc

SEQ ID NO: 1405650 - RNA, 19 nt, Artificial Sequence
  Description of Artificial Sequence: Synthetic oligonucleotide
  Sense strand starting at position 1408 of SEQ ID NO: 1243272
gcguaucggcgcccagaau

SEQ ID NO: 1405651 - RNA, 19 nt, Artificial Sequence
  Description of Artificial Sequence: Synthetic oligonucleotide
  Antisense strand to SEQ ID NO: 1405650
auucugggcgccgauacgc

SEQ ID NO: 1405652 - RNA, 19 nt, Artificial Sequence
  Description of Artificial Sequence: Synthetic oligonucleotide
  Sense strand starting at position 1458 of SEQ ID NO: 1243272
gcuucagugccugcucgau

SEQ ID NO: 1405653 - RNA, 19 nt, Artificial Sequence
  Description of Artificial Sequence: Synthetic oligonucleotide
  Antisense strand to SEQ ID NO: 1405652
aucgagcaggcacugaagc

SEQ ID NO: 1405654 - RNA, 19 nt, Artificial Sequence
  Description of Artificial Sequence: Synthetic oligonucleotide
  Sense strand starting at position 1588 of SEQ ID NO: 1243272
acgcguuccaaugaugcau

SEQ ID NO: 1405655 - RNA, 19 nt, Artificial Sequence
  Description of Artificial Sequence: Synthetic oligonucleotide
  Antisense strand to SEQ ID NO: 1405654
augcaucauuggaacgcgu

SEQ ID NO: 1405656 - RNA, 19 nt, Artificial Sequence
  Description of Artificial Sequence: Synthetic oligonucleotide
  Sense strand starting at position 1908 of SEQ ID NO: 1243272
ggaugagucggccagacaa

SEQ ID NO: 1405657 - RNA, 19 nt, Artificial Sequence
  Description of Artificial Sequence: Synthetic oligonucleotide
  Antisense strand to SEQ ID NO: 1405656
uugucuggccgacucaucc

SEQ ID NO: 1405658 - RNA, 19 nt, Artificial Sequence
  Description of Artificial Sequence: Synthetic oligonucleotide
  Sense strand starting at position 2123 of SEQ ID NO: 1243272
uggguacucuguuggauag

SEQ ID NO: 1405659 - RNA, 19 nt, Artificial Sequence
  Description of Artificial Sequence: Synthetic oligonucleotide
  Antisense strand to SEQ ID NO: 1405658
cuauccaacagaguaccca

SEQ ID NO: 1405660 - RNA, 19 nt, Artificial Sequence
  Description of Artificial Sequence: Synthetic oligonucleotide
  Sense strand starting at position 2124 of SEQ ID NO: 1243272
ggguacucuguuggauaga

SEQ ID NO: 1405661 - RNA, 19 nt, Artificial Sequence
  Description of Artificial Sequence: Synthetic oligonucleotide
  Antisense strand to SEQ ID NO: 1405660
ucuauccaacagaguaccc

SEQ ID NO: 1405662 - RNA, 19 nt, Artificial Sequence
  Description of Artificial Sequence: Synthetic oligonucleotide
  Sense strand starting at position 2125 of SEQ ID NO: 1243272
gguacucuguuggauagag

SEQ ID NO: 1405663 - RNA, 19 nt, Artificial Sequence
  Description of Artificial Sequence: Synthetic oligonucleotide
  Antisense strand to SEQ ID NO: 1405662
cucuauccaacagaguacc

SEQ ID NO: 1405664 - RNA, 19 nt, Artificial Sequence
  Description of Artificial Sequence: Synthetic oligonucleotide
  Sense strand starting at position 2391 of SEQ ID NO: 1243272
gaggcucaguccucaguca

SEQ ID NO: 1405665 - RNA, 19 nt, Artificial Sequence
  Description of Artificial Sequence: Synthetic oligonucleotide
  Antisense strand to SEQ ID NO: 1405664
ugacugaggacugagccuc

SEQ ID NO: 1405666 - RNA, 19 nt, Artificial Sequence
  Description of Artificial Sequence: Synthetic oligonucleotide
  Sense strand starting at position 2493 of SEQ ID NO: 1243272
auggccaagccuuguuauu

SEQ ID NO: 1405667 - RNA, 19 nt, Artificial Sequence
  Description of Artificial Sequence: Synthetic oligonucleotide
  Antisense strand to SEQ ID NO: 1405666
aauaacaaggcuuggccau

SEQ ID NO: 1405668 - RNA, 19 nt, Artificial Sequence
  Description of Artificial Sequence: Synthetic oligonucleotide
  Sense strand starting at position 2495 of SEQ ID NO: 1243272
ggccaagccuuguuauuuc

SEQ ID NO: 1405669 - RNA, 19 nt, Artificial Sequence
  Description of Artificial Sequence: Synthetic oligonucleotide
  Antisense strand to SEQ ID NO: 1405668
gaaauaacaaggcuuggcc

SEQ ID NO: 1405670 - RNA, 19 nt, Artificial Sequence
  Description of Artificial Sequence: Synthetic oligonucleotide
  Sense strand starting at position 2670 of SEQ ID NO: 1243272
gagagcgggucuuucuaaa

SEQ ID NO: 1405671 - RNA, 19 nt, Artificial Sequence
  Description of Artificial Sequence: Synthetic oligonucleotide
  Antisense strand to SEQ ID NO: 1405670
uuuagaaagacccgcucuc

SEQ ID NO: 1405672 - RNA, 19 nt, Artificial Sequence
  Description of Artificial Sequence: Synthetic oligonucleotide
  Sense strand starting at position 2689 of SEQ ID NO: 1243272
uuggaaaucuggucacauu

SEQ ID NO: 1405673 - RNA, 19 nt, Artificial Sequence
  Description of Artificial Sequence: Synthetic oligonucleotide
  Antisense strand to SEQ ID NO: 1405672
aaugugaccagauuuccaa

SEQ ID NO: 1405674 - RNA, 19 nt, Artificial Sequence
  Description of Artificial Sequence: Synthetic oligonucleotide
  Sense strand starting at position 2703 of SEQ ID NO: 1243272
acauucuuucucugguuua

SEQ ID NO: 1405675 - RNA, 19 nt, Artificial Sequence
  Description of Artificial Sequence: Synthetic oligonucleotide
  Antisense strand to SEQ ID NO: 1405674
uaaaccagagaaagaaugu

SEQ ID NO: 1405676 - RNA, 19 nt, Artificial Sequence
  Description of Artificial Sequence: Synthetic oligonucleotide
  Sense strand starting at position 2801 of SEQ ID NO: 1243272
gaguauggaucauaccauu

SEQ ID NO: 1405677 - RNA, 19 nt, Artificial Sequence
  Description of Artificial Sequence: Synthetic oligonucleotide
  Antisense strand to SEQ ID NO: 1405676
aaugguaugauccauacuc

SEQ ID NO: 1405678 - RNA, 19 nt, Artificial Sequence
  Description of Artificial Sequence: Synthetic oligonucleotide
  Sense strand starting at position 2900 of SEQ ID NO: 1243272
ugccaaaggguuuaucuua

SEQ ID NO: 1405679 - RNA, 19 nt, Artificial Sequence
  Description of Artificial Sequence: Synthetic oligonucleotide
  Antisense strand to SEQ ID NO: 1405678
uaagauaaacccuuuggca

SEQ ID NO: 1405680 - RNA, 19 nt, Artificial Sequence
  Description of Artificial Sequence: Synthetic oligonucleotide
  Sense strand starting at position 3186 of SEQ ID NO: 1243272
uccaaagugcuaggcuuau

SEQ ID NO: 1405681 - RNA, 19 nt, Artificial Sequence
  Description of Artificial Sequence: Synthetic oligonucleotide
  Antisense strand to SEQ ID NO: 1405680
auaagccuagcacuuugga

SEQ ID NO: 1405682 - RNA, 19 nt, Artificial Sequence
  Description of Artificial Sequence: Synthetic oligonucleotide
  Sense strand starting at position 3195 of SEQ ID NO: 1243272
cuaggcuuauaaccaugaa

SEQ ID NO: 1405683 - RNA, 19 nt, Artificial Sequence
  Description of Artificial Sequence: Synthetic oligonucleotide
  Antisense strand to SEQ ID NO: 1405682
uucaugguuauaagccuag

SEQ ID NO: 1405684 - RNA, 19 nt, Artificial Sequence
  Description of Artificial Sequence: Synthetic oligonucleotide
  Sense strand starting at position 3198 of SEQ ID NO: 1243272
ggcuuauaaccaugaacca

SEQ ID NO: 1405685 - RNA, 19 nt, Artificial Sequence
  Description of Artificial Sequence: Synthetic oligonucleotide
  Antisense strand to SEQ ID NO: 1405684
ugguucaugguuauaagcc

SEQ ID NO: 1405686 - RNA, 19 nt, Artificial Sequence
  Description of Artificial Sequence: Synthetic oligonucleotide
  Sense strand starting at position 3356 of SEQ ID NO: 1243272
cagccugccuaguagauuu

SEQ ID NO: 1405687 - RNA, 19 nt, Artificial Sequence
  Description of Artificial Sequence: Synthetic oligonucleotide
  Antisense strand to SEQ ID NO: 1405686
aaaucuacuaggcaggcug

SEQ ID NO: 1405688 - RNA, 19 nt, Artificial Sequence
  Description of Artificial Sequence: Synthetic oligonucleotide
  Sense strand starting at position 3363 of SEQ ID NO: 1243272
ccuaguagauuugacuaca

SEQ ID NO: 1405689 - RNA, 19 nt, Artificial Sequence
  Description of Artificial Sequence: Synthetic oligonucleotide
  Antisense strand to SEQ ID NO: 1405688
uguagucaaaucuacuagg

SEQ ID NO: 1405690 - RNA, 19 nt, Artificial Sequence
  Description of Artificial Sequence: Synthetic oligonucleotide
  Sense strand starting at position 209 of SEQ ID NO: 1243273
cuuaacaagugcuugaaua

SEQ ID NO: 1405691 - RNA, 19 nt, Artificial Sequence
  Description of Artificial Sequence: Synthetic oligonucleotide
  Antisense strand to SEQ ID NO: 1405690
uauucaagcacuuguuaag

SEQ ID NO: 1405692 - RNA, 19 nt, Artificial Sequence
  Description of Artificial Sequence: Synthetic oligonucleotide
  Sense strand starting at position 210 of SEQ ID NO: 1243273
uuaacaagugcuugaauag

SEQ ID NO: 1405693 - RNA, 19 nt, Artificial Sequence
  Description of Artificial Sequence: Synthetic oligonucleotide
  Antisense strand to SEQ ID NO: 1405692
cuauucaagcacuuguuaa

SEQ ID NO: 1405694 - RNA, 19 nt, Artificial Sequence
  Description of Artificial Sequence: Synthetic oligonucleotide
  Sense strand starting at position 248 of SEQ ID NO: 1243273
ccuaguaucccaugggaga

SEQ ID NO: 1405695 - RNA, 19 nt, Artificial Sequence
  Description of Artificial Sequence: Synthetic oligonucleotide
  Antisense strand to SEQ ID NO: 1405694
ucucccaugggauacuagg

SEQ ID NO: 1405696 - RNA, 19 nt, Artificial Sequence
  Description of Artificial Sequence: Synthetic oligonucleotide
  Sense strand starting at position 249 of SEQ ID NO: 1243273
cuaguaucccaugggagaa

SEQ ID NO: 1405697 - RNA, 19 nt, Artificial Sequence
  Description of Artificial Sequence: Synthetic oligonucleotide
  Antisense strand to SEQ ID NO: 1405696
uucucccaugggauacuag

SEQ ID NO: 1405698 - RNA, 19 nt, Artificial Sequence
  Description of Artificial Sequence: Synthetic oligonucleotide
  Sense strand starting at position 324 of SEQ ID NO: 1243273
uccggauccagcugaauua

SEQ ID NO: 1405699 - RNA, 19 nt, Artificial Sequence
  Description of Artificial Sequence: Synthetic oligonucleotide
  Antisense strand to SEQ ID NO: 1405698
uaauucagcuggauccgga

SEQ ID NO: 1405700 - RNA, 19 nt, Artificial Sequence
  Description of Artificial Sequence: Synthetic oligonucleotide
  Sense strand starting at position 406 of SEQ ID NO: 1243273
ugaacugggucuuuacauu

SEQ ID NO: 1405701 - RNA, 19 nt, Artificial Sequence
  Description of Artificial Sequence: Synthetic oligonucleotide
  Antisense strand to SEQ ID NO: 1405700
aauguaaagacccaguuca

SEQ ID NO: 1405702 - RNA, 19 nt, Artificial Sequence
  Description of Artificial Sequence: Synthetic oligonucleotide
  Sense strand starting at position 469 of SEQ ID NO: 1243273
acaggucuagcaggaugaa

SEQ ID NO: 1405703 - RNA, 19 nt, Artificial Sequence
  Description of Artificial Sequence: Synthetic oligonucleotide
  Antisense strand to SEQ ID NO: 1405702
uucauccugcuagaccugu

SEQ ID NO: 1405704 - RNA, 19 nt, Artificial Sequence
  Description of Artificial Sequence: Synthetic oligonucleotide
  Sense strand starting at position 550 of SEQ ID NO: 1243273
uugagauguuuccuuaccu

SEQ ID NO: 1405705 - RNA, 19 nt, Artificial Sequence
  Description of Artificial Sequence: Synthetic oligonucleotide
  Antisense strand to SEQ ID NO: 1405704
agguaaggaaacaucucaa

SEQ ID NO: 1405706 - RNA, 19 nt, Artificial Sequence
  Description of Artificial Sequence: Synthetic oligonucleotide
  Sense strand starting at position 551 of SEQ ID NO: 1243273
ugagauguuuccuuaccuu

SEQ ID NO: 1405707 - RNA, 19 nt, Artificial Sequence
  Description of Artificial Sequence: Synthetic oligonucleotide
  Antisense strand to SEQ ID NO: 1405706
aagguaaggaaacaucuca

SEQ ID NO: 1405708 - RNA, 19 nt, Artificial Sequence
  Description of Artificial Sequence: Synthetic oligonucleotide
  Sense strand starting at position 820 of SEQ ID NO: 1243273
gacggagucuaaucagauu

SEQ ID NO: 1405709 - RNA, 19 nt, Artificial Sequence
  Description of Artificial Sequence: Synthetic oligonucleotide
  Antisense strand to SEQ ID NO: 1405708
aaucugauuagacuccguc

SEQ ID NO: 1405710 - RNA, 19 nt, Artificial Sequence
  Description of Artificial Sequence: Synthetic oligonucleotide
  Sense strand starting at position 896 of SEQ ID NO: 1243273
ugcugagcaucauccagau

SEQ ID NO: 1405711 - RNA, 19 nt, Artificial Sequence
  Description of Artificial Sequence: Synthetic oligonucleotide
  Antisense strand to SEQ ID NO: 1405710
aucuggaugaugcucagca

SEQ ID NO: 1405712 - RNA, 19 nt, Artificial Sequence
  Description of Artificial Sequence: Synthetic oligonucleotide
  Sense strand starting at position 1068 of SEQ ID NO: 1243273
uugguuaaacgaggauaaa

SEQ ID NO: 1405713 - RNA, 19 nt, Artificial Sequence
  Description of Artificial Sequence: Synthetic oligonucleotide
  Antisense strand to SEQ ID NO: 1405712
uuuauccucguuuaaccaa

SEQ ID NO: 1405714 - RNA, 19 nt, Artificial Sequence
  Description of Artificial Sequence: Synthetic oligonucleotide
  Sense strand starting at position 1173 of SEQ ID NO: 1243273
aaccaauucggucaaacga

SEQ ID NO: 1405715 - RNA, 19 nt, Artificial Sequence
  Description of Artificial Sequence: Synthetic oligonucleotide
  Antisense strand to SEQ ID NO: 1405714
ucguuugaccgaauugguu

SEQ ID NO: 1405716 - RNA, 19 nt, Artificial Sequence
  Description of Artificial Sequence: Synthetic oligonucleotide
  Sense strand starting at position 1651 of SEQ ID NO: 1243273
uggacucgugaacaaguaa

SEQ ID NO: 1405717 - RNA, 19 nt, Artificial Sequence
  Description of Artificial Sequence: Synthetic oligonucleotide
  Antisense strand to SEQ ID NO: 1405716
uuacuuguucacgagucca

SEQ ID NO: 1405718 - RNA, 19 nt, Artificial Sequence
  Description of Artificial Sequence: Synthetic oligonucleotide
  Sense strand starting at position 1778 of SEQ ID NO: 1243273
gcucgcucaccgguugaaa

SEQ ID NO: 1405719 - RNA, 19 nt, Artificial Sequence
  Description of Artificial Sequence: Synthetic oligonucleotide
  Antisense strand to SEQ ID NO: 1405718
uuucaaccggugagcgagc

SEQ ID NO: 1405720 - RNA, 19 nt, Artificial Sequence
  Description of Artificial Sequence: Synthetic oligonucleotide
  Sense strand starting at position 2041 of SEQ ID NO: 1243273
cgucauuugugggcggaga

SEQ ID NO: 1405721 - RNA, 19 nt, Artificial Sequence
  Description of Artificial Sequence: Synthetic oligonucleotide
  Antisense strand to SEQ ID NO: 1405720
ucuccgcccacaaaugacg

SEQ ID NO: 1405722 - RNA, 19 nt, Artificial Sequence
  Description of Artificial Sequence: Synthetic oligonucleotide
  Sense strand starting at position 2042 of SEQ ID NO: 1243273
gucauuugugggcggagaa

SEQ ID NO: 1405723 - RNA, 19 nt, Artificial Sequence
  Description of Artificial Sequence: Synthetic oligonucleotide
  Antisense strand to SEQ ID NO: 1405722
uucuccgcccacaaaugac

SEQ ID NO: 1405724 - RNA, 19 nt, Artificial Sequence
  Description of Artificial Sequence: Synthetic oligonucleotide
  Sense strand starting at position 2404 of SEQ ID NO: 1243273
ccuuuaucuuuacugugga

SEQ ID NO: 1405725 - RNA, 19 nt, Artificial Sequence
  Description of Artificial Sequence: Synthetic oligonucleotide
  Antisense strand to SEQ ID NO: 1405724
uccacaguaaagauaaagg

SEQ ID NO: 1405726 - RNA, 19 nt, Artificial Sequence
  Description of Artificial Sequence: Synthetic oligonucleotide
  Sense strand starting at position 2455 of SEQ ID NO: 1243273
uccaccugucguuauauua

SEQ ID NO: 1405727 - RNA, 19 nt, Artificial Sequence
  Description of Artificial Sequence: Synthetic oligonucleotide
  Antisense strand to SEQ ID NO: 1405726
uaauauaacgacaggugga

SEQ ID NO: 1405728 - RNA, 19 nt, Artificial Sequence
  Description of Artificial Sequence: Synthetic oligonucleotide
  Sense strand starting at position 2467 of SEQ ID NO: 1243273
uauauuacugcguaacuag

SEQ ID NO: 1405729 - RNA, 19 nt, Artificial Sequence
  Description of Artificial Sequence: Synthetic oligonucleotide
  Antisense strand to SEQ ID NO: 1405728
cuaguuacgcaguaauaua

SEQ ID NO: 1405730 - RNA, 19 nt, Artificial Sequence
  Description of Artificial Sequence: Synthetic oligonucleotide
  Sense strand starting at position 2477 of SEQ ID NO: 1243273
cguaacuagggcuagaaga

SEQ ID NO: 1405731 - RNA, 19 nt, Artificial Sequence
  Description of Artificial Sequence: Synthetic oligonucleotide
  Antisense strand to SEQ ID NO: 1405730
ucuucuagcccuaguuacg

SEQ ID NO: 1405732 - RNA, 19 nt, Artificial Sequence
  Description of Artificial Sequence: Synthetic oligonucleotide
  Sense strand starting at position 2487 of SEQ ID NO: 1243273
gcuagaagaacgcaauugu

SEQ ID NO: 1405733 - RNA, 19 nt, Artificial Sequence
  Description of Artificial Sequence: Synthetic oligonucleotide
  Antisense strand to SEQ ID NO: 1405732
acaauugcguucuucuagc

SEQ ID NO: 1405734 - RNA, 19 nt, Artificial Sequence
  Description of Artificial Sequence: Synthetic oligonucleotide
  Sense strand starting at position 2498 of SEQ ID NO: 1243273
gcaauugugccguugcuuu

SEQ ID NO: 1405735 - RNA, 19 nt, Artificial Sequence
  Description of Artificial Sequence: Synthetic oligonucleotide
  Antisense strand to SEQ ID NO: 1405734
aaagcaacggcacaauugc

SEQ ID NO: 1405736 - RNA, 19 nt, Artificial Sequence
  Description of Artificial Sequence: Synthetic oligonucleotide
  Sense strand starting at position 2626 of SEQ ID NO: 1243273
agcuuauuugcaggaggca

SEQ ID NO: 1405737 - RNA, 19 nt, Artificial Sequence
  Description of Artificial Sequence: Synthetic oligonucleotide
  Antisense strand to SEQ ID NO: 1405736
ugccuccugcaaauaagcu

SEQ ID NO: 1405738 - RNA, 19 nt, Artificial Sequence
  Description of Artificial Sequence: Synthetic oligonucleotide
  Sense strand starting at position 2828 of SEQ ID NO: 1243273
uggacuuccugaucuccaa

SEQ ID NO: 1405739 - RNA, 19 nt, Artificial Sequence
  Description of Artificial Sequence: Synthetic oligonucleotide
  Antisense strand to SEQ ID NO: 1405738
uuggagaucaggaagucca

SEQ ID NO: 1405740 - RNA, 19 nt, Artificial Sequence
  Description of Artificial Sequence: Synthetic oligonucleotide
  Sense strand starting at position 2951 of SEQ ID NO: 1243273
gaguuugaauuugucugca

SEQ ID NO: 1405741 - RNA, 19 nt, Artificial Sequence
  Description of Artificial Sequence: Synthetic oligonucleotide
  Antisense strand to SEQ ID NO: 1405740
ugcagacaaauucaaacuc

SEQ ID NO: 1405742 - RNA, 19 nt, Artificial Sequence
  Description of Artificial Sequence: Synthetic oligonucleotide
  Sense strand starting at position 2953 of SEQ ID NO: 1243273
guuugaauuugucugcaug

SEQ ID NO: 1405743 - RNA, 19 nt, Artificial Sequence
  Description of Artificial Sequence: Synthetic oligonucleotide
  Antisense strand to SEQ ID NO: 1405742
caugcagacaaauucaaac

SEQ ID NO: 1405744 - RNA, 19 nt, Artificial Sequence
  Description of Artificial Sequence: Synthetic oligonucleotide
  Sense strand starting at position 2954 of SEQ ID NO: 1243273
uuugaauuugucugcaugu

SEQ ID NO: 1405745 - RNA, 19 nt, Artificial Sequence
  Description of Artificial Sequence: Synthetic oligonucleotide
  Antisense strand to SEQ ID NO: 1405744
acaugcagacaaauucaaa

SEQ ID NO: 1405746 - RNA, 19 nt, Artificial Sequence
  Description of Artificial Sequence: Synthetic oligonucleotide
  Sense strand starting at position 2971 of SEQ ID NO: 1243273
gugaauuuaucuuugucuu

SEQ ID NO: 1405747 - RNA, 19 nt, Artificial Sequence
  Description of Artificial Sequence: Synthetic oligonucleotide
  Antisense strand to SEQ ID NO: 1405746
aagacaaagauaaauucac

SEQ ID NO: 1405748 - RNA, 19 nt, Artificial Sequence
  Description of Artificial Sequence: Synthetic oligonucleotide
  Sense strand starting at position 3021 of SEQ ID NO: 1243273
ucugcuagaucugcaagga

SEQ ID NO: 1405749 - RNA, 19 nt, Artificial Sequence
  Description of Artificial Sequence: Synthetic oligonucleotide
  Antisense strand to SEQ ID NO: 1405748
uccuugcagaucuagcaga

SEQ ID NO: 1405750 - RNA, 19 nt, Artificial Sequence
  Description of Artificial Sequence: Synthetic oligonucleotide
  Sense strand starting at position 3025 of SEQ ID NO: 1243273
cuagaucugcaaggaagua

SEQ ID NO: 1405751 - RNA, 19 nt, Artificial Sequence
  Description of Artificial Sequence: Synthetic oligonucleotide
  Antisense strand to SEQ ID NO: 1405750
uacuuccuugcagaucuag

SEQ ID NO: 1405752 - RNA, 19 nt, Artificial Sequence
  Description of Artificial Sequence: Synthetic oligonucleotide
  Sense strand starting at position 3045 of SEQ ID NO: 1243273
auggcaggauaugcuuaau

SEQ ID NO: 1405753 - RNA, 19 nt, Artificial Sequence
  Description of Artificial Sequence: Synthetic oligonucleotide
  Antisense strand to SEQ ID NO: 1405752
auuaagcauauccugccau

SEQ ID NO: 1405754 - RNA, 19 nt, Artificial Sequence
  Description of Artificial Sequence: Synthetic oligonucleotide
  Sense strand starting at position 3308 of SEQ ID NO: 1243273
ugaaucuauugagugccua

SEQ ID NO: 1405755 - RNA, 19 nt, Artificial Sequence
  Description of Artificial Sequence: Synthetic oligonucleotide
  Antisense strand to SEQ ID NO: 1405754
uaggcacucaauagauuca

SEQ ID NO: 1405756 - RNA, 19 nt, Artificial Sequence
  Description of Artificial Sequence: Synthetic oligonucleotide
  Sense strand starting at position 3309 of SEQ ID NO: 1243273
gaaucuauugagugccuau

SEQ ID NO: 1405757 - RNA, 19 nt, Artificial Sequence
  Description of Artificial Sequence: Synthetic oligonucleotide
  Antisense strand to SEQ ID NO: 1405756
auaggcacucaauagauuc

SEQ ID NO: 1405758 - RNA, 19 nt, Artificial Sequence
  Description of Artificial Sequence: Synthetic oligonucleotide
  Sense strand starting at position 3312 of SEQ ID NO: 1243273
ucuauugagugccuauaau

SEQ ID NO: 1405759 - RNA, 19 nt, Artificial Sequence
  Description of Artificial Sequence: Synthetic oligonucleotide
  Antisense strand to SEQ ID NO: 1405758
auuauaggcacucaauaga

SEQ ID NO: 1405760 - RNA, 19 nt, Artificial Sequence
  Description of Artificial Sequence: Synthetic oligonucleotide
  Sense strand starting at position 3461 of SEQ ID NO: 1243273
cugaaauucugagcuucua

SEQ ID NO: 1405761 - RNA, 19 nt, Artificial Sequence
  Description of Artificial Sequence: Synthetic oligonucleotide
  Antisense strand to SEQ ID NO: 1405760
uagaagcucagaauuucag

SEQ ID NO: 1405762 - RNA, 19 nt, Artificial Sequence
  Description of Artificial Sequence: Synthetic oligonucleotide
  Sense strand starting at position 3508 of SEQ ID NO: 1243273
guuaacaaggcuuguaaca

SEQ ID NO: 1405763 - RNA, 19 nt, Artificial Sequence
  Description of Artificial Sequence: Synthetic oligonucleotide
  Antisense strand to SEQ ID NO: 1405762
uguuacaagccuuguuaac

SEQ ID NO: 1405764 - RNA, 19 nt, Artificial Sequence
  Description of Artificial Sequence: Synthetic oligonucleotide
  Sense strand starting at position 3638 of SEQ ID NO: 1243273
uguguuucugcuuuaguuu

SEQ ID NO: 1405765 - RNA, 19 nt, Artificial Sequence
  Description of Artificial Sequence: Synthetic oligonucleotide
  Antisense strand to SEQ ID NO: 1405764
aaacuaaagcagaaacaca

SEQ ID NO: 1405766 - RNA, 19 nt, Artificial Sequence
  Description of Artificial Sequence: Synthetic oligonucleotide
  Sense strand starting at position 3676 of SEQ ID NO: 1243273
uugugaauaguuuguagaa

SEQ ID NO: 1405767 - RNA, 19 nt, Artificial Sequence
  Description of Artificial Sequence: Synthetic oligonucleotide
  Antisense strand to SEQ ID NO: 1405766
uucuacaaacuauucacaa

SEQ ID NO: 1405768 - RNA, 19 nt, Artificial Sequence
  Description of Artificial Sequence: Synthetic oligonucleotide
  Sense strand starting at position 3677 of SEQ ID NO: 1243273
ugugaauaguuuguagaau

SEQ ID NO: 1405769 - RNA, 19 nt, Artificial Sequence
  Description of Artificial Sequence: Synthetic oligonucleotide
  Antisense strand to SEQ ID NO: 1405768
auucuacaaacuauucaca

SEQ ID NO: 1405770 - RNA, 19 nt, Artificial Sequence
  Description of Artificial Sequence: Synthetic oligonucleotide
  Sense strand starting at position 69 of SEQ ID NO: 1243274
gguggaggcguuugggaaa

SEQ ID NO: 1405771 - RNA, 19 nt, Artificial Sequence
  Description of Artificial Sequence: Synthetic oligonucleotide
  Antisense strand to SEQ ID NO: 1405770
uuucccaaacgccuccacc

SEQ ID NO: 1405772 - RNA, 19 nt, Artificial Sequence
  Description of Artificial Sequence: Synthetic oligonucleotide
  Sense strand starting at position 408 of SEQ ID NO: 1243274
cagggagucucugcaaauu

SEQ ID NO: 1405773 - RNA, 19 nt, Artificial Sequence
  Description of Artificial Sequence: Synthetic oligonucleotide
  Antisense strand to SEQ ID NO: 1405772
aauuugcagagacucccug

SEQ ID NO: 1405774 - RNA, 19 nt, Artificial Sequence
  Description of Artificial Sequence: Synthetic oligonucleotide
  Sense strand starting at position 459 of SEQ ID NO: 1243274
cacauuucuggcggucaca

SEQ ID NO: 1405775 - RNA, 19 nt, Artificial Sequence
  Description of Artificial Sequence: Synthetic oligonucleotide
  Antisense strand to SEQ ID NO: 1405774
ugugaccgccagaaaugug

SEQ ID NO: 1405776 - RNA, 19 nt, Artificial Sequence
  Description of Artificial Sequence: Synthetic oligonucleotide
  Sense strand starting at position 499 of SEQ ID NO: 1243274
gcucaaaucagguguggac

SEQ ID NO: 1405777 - RNA, 19 nt, Artificial Sequence
  Description of Artificial Sequence: Synthetic oligonucleotide
  Antisense strand to SEQ ID NO: 1405776
guccacaccugauuugagc

SEQ ID NO: 1405778 - RNA, 19 nt, Artificial Sequence
  Description of Artificial Sequence: Synthetic oligonucleotide
  Sense strand starting at position 679 of SEQ ID NO: 1243274
uuagaaagccucugugaug

SEQ ID NO: 1405779 - RNA, 19 nt, Artificial Sequence
  Description of Artificial Sequence: Synthetic oligonucleotide
  Antisense strand to SEQ ID NO: 1405778
caucacagaggcuuucuaa

SEQ ID NO: 1405780 - RNA, 19 nt, Artificial Sequence
  Description of Artificial Sequence: Synthetic oligonucleotide
  Sense strand starting at position 680 of SEQ ID NO: 1243274
uagaaagccucugugauga

SEQ ID NO: 1405781 - RNA, 19 nt, Artificial Sequence
  Description of Artificial Sequence: Synthetic oligonucleotide
  Antisense strand to SEQ ID NO: 1405780
ucaucacagaggcuuucua

SEQ ID NO: 1405782 - RNA, 19 nt, Artificial Sequence
  Description of Artificial Sequence: Synthetic oligonucleotide
  Sense strand starting at position 1431 of SEQ ID NO: 1243274
cguuguaggacacguugua

SEQ ID NO: 1405783 - RNA, 19 nt, Artificial Sequence
  Description of Artificial Sequence: Synthetic oligonucleotide
  Antisense strand to SEQ ID NO: 1405782
uacaacguguccuacaacg

SEQ ID NO: 1405784 - RNA, 19 nt, Artificial Sequence
  Description of Artificial Sequence: Synthetic oligonucleotide
  Sense strand starting at position 1489 of SEQ ID NO: 1243274
cuggaaucuccggaacugu

SEQ ID NO: 1405785 - RNA, 19 nt, Artificial Sequence
  Description of Artificial Sequence: Synthetic oligonucleotide
  Antisense strand to SEQ ID NO: 1405784
acaguuccggagauuccag

SEQ ID NO: 1405786 - RNA, 19 nt, Artificial Sequence
  Description of Artificial Sequence: Synthetic oligonucleotide
  Sense strand starting at position 1652 of SEQ ID NO: 1243274
cugcgaugccgugagaugu

SEQ ID NO: 1405787 - RNA, 19 nt, Artificial Sequence
  Description of Artificial Sequence: Synthetic oligonucleotide
  Antisense strand to SEQ ID NO: 1405786
acaucucacggcaucgcag

SEQ ID NO: 1405788 - RNA, 19 nt, Artificial Sequence
  Description of Artificial Sequence: Synthetic oligonucleotide
  Sense strand starting at position 1783 of SEQ ID NO: 1243274
gucacuuucccucgugauu

SEQ ID NO: 1405789 - RNA, 19 nt, Artificial Sequence
  Description of Artificial Sequence: Synthetic oligonucleotide
  Antisense strand to SEQ ID NO: 1405788
aaucacgagggaaagugac

SEQ ID NO: 1405790 - RNA, 19 nt, Artificial Sequence
  Description of Artificial Sequence: Synthetic oligonucleotide
  Sense strand starting at position 1835 of SEQ ID NO: 1243274
uggccucaugagugcuuua

SEQ ID NO: 1405791 - RNA, 19 nt, Artificial Sequence
  Description of Artificial Sequence: Synthetic oligonucleotide
  Antisense strand to SEQ ID NO: 1405790
uaaagcacucaugaggcca

SEQ ID NO: 1405792 - RNA, 19 nt, Artificial Sequence
  Description of Artificial Sequence: Synthetic oligonucleotide
  Sense strand starting at position 1838 of SEQ ID NO: 1243274
ccucaugagugcuuuacga

SEQ ID NO: 1405793 - RNA, 19 nt, Artificial Sequence
  Description of Artificial Sequence: Synthetic oligonucleotide
  Antisense strand to SEQ ID NO: 1405792
ucguaaagcacucaugagg

SEQ ID NO: 1405794 - RNA, 19 nt, Artificial Sequence
  Description of Artificial Sequence: Synthetic oligonucleotide
  Sense strand starting at position 2093 of SEQ ID NO: 1243274
aggcuuguguccuguguga

SEQ ID NO: 1405795 - RNA, 19 nt, Artificial Sequence
  Description of Artificial Sequence: Synthetic oligonucleotide
  Antisense strand to SEQ ID NO: 1405794
ucacacaggacacaagccu

SEQ ID NO: 1405796 - RNA, 19 nt, Artificial Sequence
  Description of Artificial Sequence: Synthetic oligonucleotide
  Sense strand starting at position 2095 of SEQ ID NO: 1243274
gcuuguguccugugugagu

SEQ ID NO: 1405797 - RNA, 19 nt, Artificial Sequence
  Description of Artificial Sequence: Synthetic oligonucleotide
  Antisense strand to SEQ ID NO: 1405796
acucacacaggacacaagc

SEQ ID NO: 1405798 - RNA, 19 nt, Artificial Sequence
  Description of Artificial Sequence: Synthetic oligonucleotide
  Sense strand starting at position 2127 of SEQ ID NO: 1243274
gcucuucccugguguccaa

SEQ ID NO: 1405799 - RNA, 19 nt, Artificial Sequence
  Description of Artificial Sequence: Synthetic oligonucleotide
  Antisense strand to SEQ ID NO: 1405798
uuggacaccagggaagagc

SEQ ID NO: 1405800 - RNA, 19 nt, Artificial Sequence
  Description of Artificial Sequence: Synthetic oligonucleotide
  Sense strand starting at position 2201 of SEQ ID NO: 1243274
ccgccaagcccugauguuu

SEQ ID NO: 1405801 - RNA, 19 nt, Artificial Sequence
  Description of Artificial Sequence: Synthetic oligonucleotide
  Antisense strand to SEQ ID NO: 1405800
aaacaucagggcuuggcgg

SEQ ID NO: 1405802 - RNA, 19 nt, Artificial Sequence
  Description of Artificial Sequence: Synthetic oligonucleotide
  Sense strand starting at position 2207 of SEQ ID NO: 1243274
agcccugauguuuaccaau

SEQ ID NO: 1405803 - RNA, 19 nt, Artificial Sequence
  Description of Artificial Sequence: Synthetic oligonucleotide
  Antisense strand to SEQ ID NO: 1405802
auugguaaacaucagggcu

SEQ ID NO: 1405804 - RNA, 19 nt, Artificial Sequence
  Description of Artificial Sequence: Synthetic oligonucleotide
  Sense strand starting at position 2356 of SEQ ID NO: 1243274
ggcggcuuccugcgaugaa

SEQ ID NO: 1405805 - RNA, 19 nt, Artificial Sequence
  Description of Artificial Sequence: Synthetic oligonucleotide
  Antisense strand to SEQ ID NO: 1405804
uucaucgcaggaagccgcc

SEQ ID NO: 1405806 - RNA, 19 nt, Artificial Sequence
  Description of Artificial Sequence: Synthetic oligonucleotide
  Sense strand starting at position 2357 of SEQ ID NO: 1243274
gcggcuuccugcgaugaag

SEQ ID NO: 1405807 - RNA, 19 nt, Artificial Sequence
  Description of Artificial Sequence: Synthetic oligonucleotide
  Antisense strand to SEQ ID NO: 1405806
cuucaucgcaggaagccgc

SEQ ID NO: 1405808 - RNA, 19 nt, Artificial Sequence
  Description of Artificial Sequence: Synthetic oligonucleotide
  Sense strand starting at position 2382 of SEQ ID NO: 1243274
guagauauauaggcacaaa

SEQ ID NO: 1405809 - RNA, 19 nt, Artificial Sequence
  Description of Artificial Sequence: Synthetic oligonucleotide
  Antisense strand to SEQ ID NO: 1405808
uuugugccuauauaucuac

SEQ ID NO: 1405810 - RNA, 19 nt, Artificial Sequence
  Description of Artificial Sequence: Synthetic oligonucleotide
  Sense strand starting at position 2419 of SEQ ID NO: 1243274
ggucuuccuccacgagcaa

SEQ ID NO: 1405811 - RNA, 19 nt, Artificial Sequence
  Description of Artificial Sequence: Synthetic oligonucleotide
  Antisense strand to SEQ ID NO: 1405810
uugcucguggaggaagacc

SEQ ID NO: 1405812 - RNA, 19 nt, Artificial Sequence
  Description of Artificial Sequence: Synthetic oligonucleotide
  Sense strand starting at position 2622 of SEQ ID NO: 1243274
gccagugggcucugagacu

SEQ ID NO: 1405813 - RNA, 19 nt, Artificial Sequence
  Description of Artificial Sequence: Synthetic oligonucleotide
  Antisense strand to SEQ ID NO: 1405812
agucucagagcccacuggc

SEQ ID NO: 1405814 - RNA, 19 nt, Artificial Sequence
  Description of Artificial Sequence: Synthetic oligonucleotide
  Sense strand starting at position 2642 of SEQ ID NO: 1243274
gcagguuccuaaggagaca

SEQ ID NO: 1405815 - RNA, 19 nt, Artificial Sequence
  Description of Artificial Sequence: Synthetic oligonucleotide
  Antisense strand to SEQ ID NO: 1405814
ugucuccuuaggaaccugc

SEQ ID NO: 1405816 - RNA, 19 nt, Artificial Sequence
  Description of Artificial Sequence: Synthetic oligonucleotide
  Sense strand starting at position 2674 of SEQ ID NO: 1243274
ugcaaacaguuucuuugaa

SEQ ID NO: 1405817 - RNA, 19 nt, Artificial Sequence
  Description of Artificial Sequence: Synthetic oligonucleotide
  Antisense strand to SEQ ID NO: 1405816
uucaaagaaacuguuugca

SEQ ID NO: 1405818 - RNA, 19 nt, Artificial Sequence
  Description of Artificial Sequence: Synthetic oligonucleotide
  Sense strand starting at position 2675 of SEQ ID NO: 1243274
gcaaacaguuucuuugaag

SEQ ID NO: 1405819 - RNA, 19 nt, Artificial Sequence
  Description of Artificial Sequence: Synthetic oligonucleotide
  Antisense strand to SEQ ID NO: 1405818
cuucaaagaaacuguuugc

SEQ ID NO: 1405820 - RNA, 19 nt, Artificial Sequence
  Description of Artificial Sequence: Synthetic oligonucleotide
  Sense strand starting at position 2755 of SEQ ID NO: 1243274
acuugugcucccgagaagu

SEQ ID NO: 1405821 - RNA, 19 nt, Artificial Sequence
  Description of Artificial Sequence: Synthetic oligonucleotide
  Antisense strand to SEQ ID NO: 1405820
acuucucgggagcacaagu

SEQ ID NO: 1405822 - RNA, 19 nt, Artificial Sequence
  Description of Artificial Sequence: Synthetic oligonucleotide
  Sense strand starting at position 2763 of SEQ ID NO: 1243274
ucccgagaagucgaagcaa

SEQ ID NO: 1405823 - RNA, 19 nt, Artificial Sequence
  Description of Artificial Sequence: Synthetic oligonucleotide
  Antisense strand to SEQ ID NO: 1405822
uugcuucgacuucucggga

SEQ ID NO: 1405824 - RNA, 19 nt, Artificial Sequence
  Description of Artificial Sequence: Synthetic oligonucleotide
  Sense strand starting at position 2885 of SEQ ID NO: 1243274
ucaguaaagcaauggaaau

SEQ ID NO: 1405825 - RNA, 19 nt, Artificial Sequence
  Description of Artificial Sequence: Synthetic oligonucleotide
  Antisense strand to SEQ ID NO: 1405824
auuuccauugcuuuacuga

SEQ ID NO: 1405826 - RNA, 19 nt, Artificial Sequence
  Description of Artificial Sequence: Synthetic oligonucleotide
  Sense strand starting at position 3070 of SEQ ID NO: 1243274
ggauuacaggcgugcuuua

SEQ ID NO: 1405827 - RNA, 19 nt, Artificial Sequence
  Description of Artificial Sequence: Synthetic oligonucleotide
  Antisense strand to SEQ ID NO: 1405826
uaaagcacgccuguaaucc

SEQ ID NO: 1405828 - RNA, 19 nt, Artificial Sequence
  Description of Artificial Sequence: Synthetic oligonucleotide
  Sense strand starting at position 3477 of SEQ ID NO: 1243274
cgcuguagccucccgaaau

SEQ ID NO: 1405829 - RNA, 19 nt, Artificial Sequence
  Description of Artificial Sequence: Synthetic oligonucleotide
  Antisense strand to SEQ ID NO: 1405828
auuucgggaggcuacagcg

SEQ ID NO: 1405830 - RNA, 19 nt, Artificial Sequence
  Description of Artificial Sequence: Synthetic oligonucleotide
  Sense strand starting at position 3478 of SEQ ID NO: 1243274
gcuguagccucccgaaaug

SEQ ID NO: 1405831 - RNA, 19 nt, Artificial Sequence
  Description of Artificial Sequence: Synthetic oligonucleotide
  Antisense strand to SEQ ID NO: 1405830
cauuucgggaggcuacagc

SEQ ID NO: 1405832 - RNA, 19 nt, Artificial Sequence
  Description of Artificial Sequence: Synthetic oligonucleotide
  Sense strand starting at position 3599 of SEQ ID NO: 1243274
uguguacuggcuugaauga

SEQ ID NO: 1405833 - RNA, 19 nt, Artificial Sequence
  Description of Artificial Sequence: Synthetic oligonucleotide
  Antisense strand to SEQ ID NO: 1405832
ucauucaagccaguacaca

SEQ ID NO: 1405834 - RNA, 19 nt, Artificial Sequence
  Description of Artificial Sequence: Synthetic oligonucleotide
  Sense strand starting at position 3674 of SEQ ID NO: 1243274
ugcggaugucaugaaggau

SEQ ID NO: 1405835 - RNA, 19 nt, Artificial Sequence
  Description of Artificial Sequence: Synthetic oligonucleotide
  Antisense strand to SEQ ID NO: 1405834
auccuucaugacauccgca

SEQ ID NO: 1405836 - RNA, 19 nt, Artificial Sequence
  Description of Artificial Sequence: Synthetic oligonucleotide
  Sense strand starting at position 3775 of SEQ ID NO: 1243274
ggacacggccugugaagau

SEQ ID NO: 1405837 - RNA, 19 nt, Artificial Sequence
  Description of Artificial Sequence: Synthetic oligonucleotide
  Antisense strand to SEQ ID NO: 1405836
aucuucacaggccgugucc

SEQ ID NO: 1405838 - RNA, 19 nt, Artificial Sequence
  Description of Artificial Sequence: Synthetic oligonucleotide
  Sense strand starting at position 3924 of SEQ ID NO: 1243274
ccagaacugugauaggacu

SEQ ID NO: 1405839 - RNA, 19 nt, Artificial Sequence
  Description of Artificial Sequence: Synthetic oligonucleotide
  Antisense strand to SEQ ID NO: 1405838
aguccuaucacaguucugg

SEQ ID NO: 1405840 - RNA, 19 nt, Artificial Sequence
  Description of Artificial Sequence: Synthetic oligonucleotide
  Sense strand starting at position 3937 of SEQ ID NO: 1243274
aggacucauuucuguuguu

SEQ ID NO: 1405841 - RNA, 19 nt, Artificial Sequence
  Description of Artificial Sequence: Synthetic oligonucleotide
  Antisense strand to SEQ ID NO: 1405840
aacaacagaaaugaguccu

SEQ ID NO: 1405842 - RNA, 19 nt, Artificial Sequence
  Description of Artificial Sequence: Synthetic oligonucleotide
  Sense strand starting at position 3938 of SEQ ID NO: 1243274
ggacucauuucuguuguuu

SEQ ID NO: 1405843 - RNA, 19 nt, Artificial Sequence
  Description of Artificial Sequence: Synthetic oligonucleotide
  Antisense strand to SEQ ID NO: 1405842
aaacaacagaaaugagucc

SEQ ID NO: 1405844 - RNA, 19 nt, Artificial Sequence
  Description of Artificial Sequence: Synthetic oligonucleotide
  Sense strand starting at position 3962 of SEQ ID NO: 1243274
cgcccagcucaugggaaua

SEQ ID NO: 1405845 - RNA, 19 nt, Artificial Sequence
  Description of Artificial Sequence: Synthetic oligonucleotide
  Antisense strand to SEQ ID NO: 1405844
uauucccaugagcugggcg

SEQ ID NO: 1405846 - RNA, 19 nt, Artificial Sequence
  Description of Artificial Sequence: Synthetic oligonucleotide
  Sense strand starting at position 229 of SEQ ID NO: 1243275
agccuuuaagccuguuaag

SEQ ID NO: 1405847 - RNA, 19 nt, Artificial Sequence
  Description of Artificial Sequence: Synthetic oligonucleotide
  Antisense strand to SEQ ID NO: 1405846
cuuaacaggcuuaaaggcu

SEQ ID NO: 1405848 - RNA, 19 nt, Artificial Sequence
  Description of Artificial Sequence: Synthetic oligonucleotide
  Sense strand starting at position 259 of SEQ ID NO: 1243275
gaaggagcccucgagcaau

SEQ ID NO: 1405849 - RNA, 19 nt, Artificial Sequence
  Description of Artificial Sequence: Synthetic oligonucleotide
  Antisense strand to SEQ ID NO: 1405848
auugcucgagggcuccuuc

SEQ ID NO: 1405850 - RNA, 19 nt, Artificial Sequence
  Description of Artificial Sequence: Synthetic oligonucleotide
  Sense strand starting at position 281 of SEQ ID NO: 1243275
gugacuugugcucuucugu

SEQ ID NO: 1405851 - RNA, 19 nt, Artificial Sequence
  Description of Artificial Sequence: Synthetic oligonucleotide
  Antisense strand to SEQ ID NO: 1405850
acagaagagcacaagucac

SEQ ID NO: 1405852 - RNA, 19 nt, Artificial Sequence
  Description of Artificial Sequence: Synthetic oligonucleotide
  Sense strand starting at position 295 of SEQ ID NO: 1243275
ucuguccuauguuuagaua

SEQ ID NO: 1405853 - RNA, 19 nt, Artificial Sequence
  Description of Artificial Sequence: Synthetic oligonucleotide
  Antisense strand to SEQ ID NO: 1405852
uaucuaaacauaggacaga

SEQ ID NO: 1405854 - RNA, 19 nt, Artificial Sequence
  Description of Artificial Sequence: Synthetic oligonucleotide
  Sense strand starting at position 296 of SEQ ID NO: 1243275
cuguccuauguuuagauaa

SEQ ID NO: 1405855 - RNA, 19 nt, Artificial Sequence
  Description of Artificial Sequence: Synthetic oligonucleotide
  Antisense strand to SEQ ID NO: 1405854
uuaucuaaacauaggacag

SEQ ID NO: 1405856 - RNA, 19 nt, Artificial Sequence
  Description of Artificial Sequence: Synthetic oligonucleotide
  Sense strand starting at position 306 of SEQ ID NO: 1243275
uuuagauaaugcucuaaug

SEQ ID NO: 1405857 - RNA, 19 nt, Artificial Sequence
  Description of Artificial Sequence: Synthetic oligonucleotide
  Antisense strand to SEQ ID NO: 1405856
cauuagagcauuaucuaaa

SEQ ID NO: 1405858 - RNA, 19 nt, Artificial Sequence
  Description of Artificial Sequence: Synthetic oligonucleotide
  Sense strand starting at position 308 of SEQ ID NO: 1243275
uagauaaugcucuaaugug

SEQ ID NO: 1405859 - RNA, 19 nt, Artificial Sequence
  Description of Artificial Sequence: Synthetic oligonucleotide
  Antisense strand to SEQ ID NO: 1405858
cacauuagagcauuaucua

SEQ ID NO: 1405860 - RNA, 19 nt, Artificial Sequence
  Description of Artificial Sequence: Synthetic oligonucleotide
  Sense strand starting at position 395 of SEQ ID NO: 1243275
ugaagacuaguguguuucu

SEQ ID NO: 1405861 - RNA, 19 nt, Artificial Sequence
  Description of Artificial Sequence: Synthetic oligonucleotide
  Antisense strand to SEQ ID NO: 1405860
agaaacacacuagucuuca

SEQ ID NO: 1405862 - RNA, 19 nt, Artificial Sequence
  Description of Artificial Sequence: Synthetic oligonucleotide
  Sense strand starting at position 396 of SEQ ID NO: 1243275
gaagacuaguguguuucua

SEQ ID NO: 1405863 - RNA, 19 nt, Artificial Sequence
  Description of Artificial Sequence: Synthetic oligonucleotide
  Antisense strand to SEQ ID NO: 1405862
uagaaacacacuagucuuc

SEQ ID NO: 1405864 - RNA, 19 nt, Artificial Sequence
  Description of Artificial Sequence: Synthetic oligonucleotide
  Sense strand starting at position 398 of SEQ ID NO: 1243275
agacuaguguguuucuaaa

SEQ ID NO: 1405865 - RNA, 19 nt, Artificial Sequence
  Description of Artificial Sequence: Synthetic oligonucleotide
  Antisense strand to SEQ ID NO: 1405864
uuuagaaacacacuagucu

SEQ ID NO: 1405866 - RNA, 19 nt, Artificial Sequence
  Description of Artificial Sequence: Synthetic oligonucleotide
  Sense strand starting at position 400 of SEQ ID NO: 1243275
acuaguguguuucuaaaug

SEQ ID NO: 1405867 - RNA, 19 nt, Artificial Sequence
  Description of Artificial Sequence: Synthetic oligonucleotide
  Antisense strand to SEQ ID NO: 1405866
cauuuagaaacacacuagu

SEQ ID NO: 1405868 - RNA, 19 nt, Artificial Sequence
  Description of Artificial Sequence: Synthetic oligonucleotide
  Sense strand starting at position 411 of SEQ ID NO: 1243275
ucuaaauggcuuggacaga

SEQ ID NO: 1405869 - RNA, 19 nt, Artificial Sequence
  Description of Artificial Sequence: Synthetic oligonucleotide
  Antisense strand to SEQ ID NO: 1405868
ucuguccaagccauuuaga

SEQ ID NO: 1405870 - RNA, 19 nt, Artificial Sequence
  Description of Artificial Sequence: Synthetic oligonucleotide
  Sense strand starting at position 439 of SEQ ID NO: 1243275
caguuugcgcccuuuggua

SEQ ID NO: 1405871 - RNA, 19 nt, Artificial Sequence
  Description of Artificial Sequence: Synthetic oligonucleotide
  Antisense strand to SEQ ID NO: 1405870
uaccaaagggcgcaaacug

SEQ ID NO: 1405872 - RNA, 19 nt, Artificial Sequence
  Description of Artificial Sequence: Synthetic oligonucleotide
  Sense strand starting at position 488 of SEQ ID NO: 1243275
acaggcuguuaucuauaau

SEQ ID NO: 1405873 - RNA, 19 nt, Artificial Sequence
  Description of Artificial Sequence: Synthetic oligonucleotide
  Antisense strand to SEQ ID NO: 1405872
auuauagauaacagccugu

SEQ ID NO: 1405874 - RNA, 19 nt, Artificial Sequence
  Description of Artificial Sequence: Synthetic oligonucleotide
  Sense strand starting at position 491 of SEQ ID NO: 1243275
ggcuguuaucuauaauggu

SEQ ID NO: 1405875 - RNA, 19 nt, Artificial Sequence
  Description of Artificial Sequence: Synthetic oligonucleotide
  Antisense strand to SEQ ID NO: 1405874
accauuauagauaacagcc

SEQ ID NO: 1405876 - RNA, 19 nt, Artificial Sequence
  Description of Artificial Sequence: Synthetic oligonucleotide
  Sense strand starting at position 561 of SEQ ID NO: 1243275
agggauauuccauggcgau

SEQ ID NO: 1405877 - RNA, 19 nt, Artificial Sequence
  Description of Artificial Sequence: Synthetic oligonucleotide
  Antisense strand to SEQ ID NO: 1405876
aucgccauggaauaucccu

SEQ ID NO: 1405878 - RNA, 19 nt, Artificial Sequence
  Description of Artificial Sequence: Synthetic oligonucleotide
  Sense strand starting at position 562 of SEQ ID NO: 1243275
gggauauuccauggcgaua

SEQ ID NO: 1405879 - RNA, 19 nt, Artificial Sequence
  Description of Artificial Sequence: Synthetic oligonucleotide
  Antisense strand to SEQ ID NO: 1405878
uaucgccauggaauauccc

SEQ ID NO: 1405880 - RNA, 19 nt, Artificial Sequence
  Description of Artificial Sequence: Synthetic oligonucleotide
  Sense strand starting at position 659 of SEQ ID NO: 1243275
auagcugagcucugcacau

SEQ ID NO: 1405881 - RNA, 19 nt, Artificial Sequence
  Description of Artificial Sequence: Synthetic oligonucleotide
  Antisense strand to SEQ ID NO: 1405880
augugcagagcucagcuau

SEQ ID NO: 1405882 - RNA, 19 nt, Artificial Sequence
  Description of Artificial Sequence: Synthetic oligonucleotide
  Sense strand starting at position 784 of SEQ ID NO: 1243275
accggaguguugcugggaa

SEQ ID NO: 1405883 - RNA, 19 nt, Artificial Sequence
  Description of Artificial Sequence: Synthetic oligonucleotide
  Antisense strand to SEQ ID NO: 1405882
uucccagcaacacuccggu

SEQ ID NO: 1405884 - RNA, 19 nt, Artificial Sequence
  Description of Artificial Sequence: Synthetic oligonucleotide
  Sense strand starting at position 787 of SEQ ID NO: 1243275
ggaguguugcugggaagga

SEQ ID NO: 1405885 - RNA, 19 nt, Artificial Sequence
  Description of Artificial Sequence: Synthetic oligonucleotide
  Antisense strand to SEQ ID NO: 1405884
uccuucccagcaacacucc

SEQ ID NO: 1405886 - RNA, 19 nt, Artificial Sequence
  Description of Artificial Sequence: Synthetic oligonucleotide
  Sense strand starting at position 865 of SEQ ID NO: 1243275
ggagcaaguccuugcaggu

SEQ ID NO: 1405887 - RNA, 19 nt, Artificial Sequence
  Description of Artificial Sequence: Synthetic oligonucleotide
  Antisense strand to SEQ ID NO: 1405886
accugcaaggacuugcucc

SEQ ID NO: 1405888 - RNA, 19 nt, Artificial Sequence
  Description of Artificial Sequence: Synthetic oligonucleotide
  Sense strand starting at position 1209 of SEQ ID NO: 1243275
ggguaauauugucucccuu

SEQ ID NO: 1405889 - RNA, 19 nt, Artificial Sequence
  Description of Artificial Sequence: Synthetic oligonucleotide
  Antisense strand to SEQ ID NO: 1405888
aagggagacaauauuaccc

SEQ ID NO: 1405890 - RNA, 19 nt, Artificial Sequence
  Description of Artificial Sequence: Synthetic oligonucleotide
  Sense strand starting at position 1517 of SEQ ID NO: 1243275
ccuccuuuccgguagagca

SEQ ID NO: 1405891 - RNA, 19 nt, Artificial Sequence
  Description of Artificial Sequence: Synthetic oligonucleotide
  Antisense strand to SEQ ID NO: 1405890
ugcucuaccggaaaggagg

SEQ ID NO: 1405892 - RNA, 19 nt, Artificial Sequence
  Description of Artificial Sequence: Synthetic oligonucleotide
  Sense strand starting at position 2671 of SEQ ID NO: 1243275
gccauacaguucuuuguuu

SEQ ID NO: 1405893 - RNA, 19 nt, Artificial Sequence
  Description of Artificial Sequence: Synthetic oligonucleotide
  Antisense strand to SEQ ID NO: 1405892
aaacaaagaacuguauggc

SEQ ID NO: 1405894 - RNA, 19 nt, Artificial Sequence
  Description of Artificial Sequence: Synthetic oligonucleotide
  Sense strand starting at position 2676 of SEQ ID NO: 1243275
acaguucuuuguuugaauc

SEQ ID NO: 1405895 - RNA, 19 nt, Artificial Sequence
  Description of Artificial Sequence: Synthetic oligonucleotide
  Antisense strand to SEQ ID NO: 1405894
gauucaaacaaagaacugu

SEQ ID NO: 1405896 - RNA, 19 nt, Artificial Sequence
  Description of Artificial Sequence: Synthetic oligonucleotide
  Sense strand starting at position 2739 of SEQ ID NO: 1243275
cccucucaucuggguugua

SEQ ID NO: 1405897 - RNA, 19 nt, Artificial Sequence
  Description of Artificial Sequence: Synthetic oligonucleotide
  Antisense strand to SEQ ID NO: 1405896
uacaacccagaugagaggg

SEQ ID NO: 1405898 - RNA, 19 nt, Artificial Sequence
  Description of Artificial Sequence: Synthetic oligonucleotide
  Sense strand starting at position 2740 of SEQ ID NO: 1243275
ccucucaucuggguuguaa

SEQ ID NO: 1405899 - RNA, 19 nt, Artificial Sequence
  Description of Artificial Sequence: Synthetic oligonucleotide
  Antisense strand to SEQ ID NO: 1405898
uuacaacccagaugagagg

SEQ ID NO: 1405900 - RNA, 19 nt, Artificial Sequence
  Description of Artificial Sequence: Synthetic oligonucleotide
  Sense strand starting at position 2742 of SEQ ID NO: 1243275
ucucaucuggguuguaaca

SEQ ID NO: 1405901 - RNA, 19 nt, Artificial Sequence
  Description of Artificial Sequence: Synthetic oligonucleotide
  Antisense strand to SEQ ID NO: 1405900
uguuacaacccagaugaga

SEQ ID NO: 1405902 - RNA, 19 nt, Artificial Sequence
  Description of Artificial Sequence: Synthetic oligonucleotide
  Sense strand starting at position 2767 of SEQ ID NO: 1243275
guuccuuguagucauacga

SEQ ID NO: 1405903 - RNA, 19 nt, Artificial Sequence
  Description of Artificial Sequence: Synthetic oligonucleotide
  Antisense strand to SEQ ID NO: 1405902
ucguaugacuacaaggaac

SEQ ID NO: 1405904 - RNA, 19 nt, Artificial Sequence
  Description of Artificial Sequence: Synthetic oligonucleotide
  Sense strand starting at position 2777 of SEQ ID NO: 1243275
gucauacgacccugacaua

SEQ ID NO: 1405905 - RNA, 19 nt, Artificial Sequence
  Description of Artificial Sequence: Synthetic oligonucleotide
  Antisense strand to SEQ ID NO: 1405904
uaugucagggucguaugac

SEQ ID NO: 1405906 - RNA, 19 nt, Artificial Sequence
  Description of Artificial Sequence: Synthetic oligonucleotide
  Sense strand starting at position 2801 of SEQ ID NO: 1243275
cguuuauaugcuuauugga

SEQ ID NO: 1405907 - RNA, 19 nt, Artificial Sequence
  Description of Artificial Sequence: Synthetic oligonucleotide
  Antisense strand to SEQ ID NO: 1405906
uccaauaagcauauaaacg

SEQ ID NO: 1405908 - RNA, 19 nt, Artificial Sequence
  Description of Artificial Sequence: Synthetic oligonucleotide
  Sense strand starting at position 2838 of SEQ ID NO: 1243275
augugaggccuaugagcau

SEQ ID NO: 1405909 - RNA, 19 nt, Artificial Sequence
  Description of Artificial Sequence: Synthetic oligonucleotide
  Antisense strand to SEQ ID NO: 1405908
augcucauaggccucacau

SEQ ID NO: 1405910 - RNA, 19 nt, Artificial Sequence
  Description of Artificial Sequence: Synthetic oligonucleotide
  Sense strand starting at position 2869 of SEQ ID NO: 1243275
cugucuuauucuuugcuga

SEQ ID NO: 1405911 - RNA, 19 nt, Artificial Sequence
  Description of Artificial Sequence: Synthetic oligonucleotide
  Antisense strand to SEQ ID NO: 1405910
ucagcaaagaauaagacag

SEQ ID NO: 1405912 - RNA, 19 nt, Artificial Sequence
  Description of Artificial Sequence: Synthetic oligonucleotide
  Sense strand starting at position 2870 of SEQ ID NO: 1243275
ugucuuauucuuugcugaa

SEQ ID NO: 1405913 - RNA, 19 nt, Artificial Sequence
  Description of Artificial Sequence: Synthetic oligonucleotide
  Antisense strand to SEQ ID NO: 1405912
uucagcaaagaauaagaca

SEQ ID NO: 1405914 - RNA, 19 nt, Artificial Sequence
  Description of Artificial Sequence: Synthetic oligonucleotide
  Sense strand starting at position 2871 of SEQ ID NO: 1243275
gucuuauucuuugcugaau

SEQ ID NO: 1405915 - RNA, 19 nt, Artificial Sequence
  Description of Artificial Sequence: Synthetic oligonucleotide
  Antisense strand to SEQ ID NO: 1405914
auucagcaaagaauaagac

SEQ ID NO: 1405916 - RNA, 19 nt, Artificial Sequence
  Description of Artificial Sequence: Synthetic oligonucleotide
  Sense strand starting at position 3091 of SEQ ID NO: 1243275
uuaggugcugaguaaagau

SEQ ID NO: 1405917 - RNA, 19 nt, Artificial Sequence
  Description of Artificial Sequence: Synthetic oligonucleotide
  Antisense strand to SEQ ID NO: 1405916
aucuuuacucagcaccuaa

SEQ ID NO: 1405918 - RNA, 19 nt, Artificial Sequence
  Description of Artificial Sequence: Synthetic oligonucleotide
  Sense strand starting at position 3124 of SEQ ID NO: 1243275
aaugaaugaggcugugaug

SEQ ID NO: 1405919 - RNA, 19 nt, Artificial Sequence
  Description of Artificial Sequence: Synthetic oligonucleotide
  Antisense strand to SEQ ID NO: 1405918
caucacagccucauucauu

SEQ ID NO: 1405920 - RNA, 19 nt, Artificial Sequence
  Description of Artificial Sequence: Synthetic oligonucleotide
  Sense strand starting at position 3196 of SEQ ID NO: 1243275
ucacgcaugucaucucagu

SEQ ID NO: 1405921 - RNA, 19 nt, Artificial Sequence
  Description of Artificial Sequence: Synthetic oligonucleotide
  Antisense strand to SEQ ID NO: 1405920
acugagaugacaugcguga

SEQ ID NO: 1405922 - RNA, 19 nt, Artificial Sequence
  Description of Artificial Sequence: Synthetic oligonucleotide
  Sense strand starting at position 3774 of SEQ ID NO: 1243275
gagggauuguggcucacug

SEQ ID NO: 1405923 - RNA, 19 nt, Artificial Sequence
  Description of Artificial Sequence: Synthetic oligonucleotide
  Antisense strand to SEQ ID NO: 1405922
cagugagccacaaucccuc

SEQ ID NO: 1405924 - RNA, 19 nt, Artificial Sequence
  Description of Artificial Sequence: Synthetic oligonucleotide
  Sense strand starting at position 3902 of SEQ ID NO: 1243275
uggguuucccuauguuguu

SEQ ID NO: 1405925 - RNA, 19 nt, Artificial Sequence
  Description of Artificial Sequence: Synthetic oligonucleotide
  Antisense strand to SEQ ID NO: 1405924
aacaacauagggaaaccca

SEQ ID NO: 1405926 - RNA, 19 nt, Artificial Sequence
  Description of Artificial Sequence: Synthetic oligonucleotide
  Sense strand starting at position 112 of SEQ ID NO: 1243276
gggaggucgcugcagugau

SEQ ID NO: 1405927 - RNA, 19 nt, Artificial Sequence
  Description of Artificial Sequence: Synthetic oligonucleotide
  Antisense strand to SEQ ID NO: 1405926
aucacugcagcgaccuccc

SEQ ID NO: 1405928 - RNA, 19 nt, Artificial Sequence
  Description of Artificial Sequence: Synthetic oligonucleotide
  Sense strand starting at position 113 of SEQ ID NO: 1243276
ggaggucgcugcagugauu

SEQ ID NO: 1405929 - RNA, 19 nt, Artificial Sequence
  Description of Artificial Sequence: Synthetic oligonucleotide
  Antisense strand to SEQ ID NO: 1405928
aaucacugcagcgaccucc

SEQ ID NO: 1405930 - RNA, 19 nt, Artificial Sequence
  Description of Artificial Sequence: Synthetic oligonucleotide
  Sense strand starting at position 120 of SEQ ID NO: 1243276
gcugcagugauuuggauuc

SEQ ID NO: 1405931 - RNA, 19 nt, Artificial Sequence
  Description of Artificial Sequence: Synthetic oligonucleotide
  Antisense strand to SEQ ID NO: 1405930
gaauccaaaucacugcagc

SEQ ID NO: 1405932 - RNA, 19 nt, Artificial Sequence
  Description of Artificial Sequence: Synthetic oligonucleotide
  Sense strand starting at position 130 of SEQ ID NO: 1243276
uuuggauucugagucucua

SEQ ID NO: 1405933 - RNA, 19 nt, Artificial Sequence
  Description of Artificial Sequence: Synthetic oligonucleotide
  Antisense strand to SEQ ID NO: 1405932
uagagacucagaauccaaa

SEQ ID NO: 1405934 - RNA, 19 nt, Artificial Sequence
  Description of Artificial Sequence: Synthetic oligonucleotide
  Sense strand starting at position 134 of SEQ ID NO: 1243276
gauucugagucucuagaga

SEQ ID NO: 1405935 - RNA, 19 nt, Artificial Sequence
  Description of Artificial Sequence: Synthetic oligonucleotide
  Antisense strand to SEQ ID NO: 1405934
ucucuagagacucagaauc

SEQ ID NO: 1405936 - RNA, 19 nt, Artificial Sequence
  Description of Artificial Sequence: Synthetic oligonucleotide
  Sense strand starting at position 302 of SEQ ID NO: 1243276
ggccuuagucccuagagga

SEQ ID NO: 1405937 - RNA, 19 nt, Artificial Sequence
  Description of Artificial Sequence: Synthetic oligonucleotide
  Antisense strand to SEQ ID NO: 1405936
uccucuagggacuaaggcc

SEQ ID NO: 1405938 - RNA, 19 nt, Artificial Sequence
  Description of Artificial Sequence: Synthetic oligonucleotide
  Sense strand starting at position 639 of SEQ ID NO: 1243276
gggaucugcacuuaugugu

SEQ ID NO: 1405939 - RNA, 19 nt, Artificial Sequence
  Description of Artificial Sequence: Synthetic oligonucleotide
  Antisense strand to SEQ ID NO: 1405938
acacauaagugcagauccc

SEQ ID NO: 1405940 - RNA, 19 nt, Artificial Sequence
  Description of Artificial Sequence: Synthetic oligonucleotide
  Sense strand starting at position 821 of SEQ ID NO: 1243276
cgugucauccguguggcaa

SEQ ID NO: 1405941 - RNA, 19 nt, Artificial Sequence
  Description of Artificial Sequence: Synthetic oligonucleotide
  Antisense strand to SEQ ID NO: 1405940
uugccacacggaugacacg

SEQ ID NO: 1405942 - RNA, 19 nt, Artificial Sequence
  Description of Artificial Sequence: Synthetic oligonucleotide
  Sense strand starting at position 884 of SEQ ID NO: 1243276
ccaguaaagucugccauga

SEQ ID NO: 1405943 - RNA, 19 nt, Artificial Sequence
  Description of Artificial Sequence: Synthetic oligonucleotide
  Antisense strand to SEQ ID NO: 1405942
ucauggcagacuuuacugg

SEQ ID NO: 1405944 - RNA, 19 nt, Artificial Sequence
  Description of Artificial Sequence: Synthetic oligonucleotide
  Sense strand starting at position 886 of SEQ ID NO: 1243276
aguaaagucugccaugaau

SEQ ID NO: 1405945 - RNA, 19 nt, Artificial Sequence
  Description of Artificial Sequence: Synthetic oligonucleotide
  Antisense strand to SEQ ID NO: 1405944
auucauggcagacuuuacu

SEQ ID NO: 1405946 - RNA, 19 nt, Artificial Sequence
  Description of Artificial Sequence: Synthetic oligonucleotide
  Sense strand starting at position 906 of SEQ ID NO: 1243276
uuuauugggcaguggaaga

SEQ ID NO: 1405947 - RNA, 19 nt, Artificial Sequence
  Description of Artificial Sequence: Synthetic oligonucleotide
  Antisense strand to SEQ ID NO: 1405946
ucuuccacugcccaauaaa

SEQ ID NO: 1405948 - RNA, 19 nt, Artificial Sequence
  Description of Artificial Sequence: Synthetic oligonucleotide
  Sense strand starting at position 1101 of SEQ ID NO: 1243276
ccguccuuucguugguauu

SEQ ID NO: 1405949 - RNA, 19 nt, Artificial Sequence
  Description of Artificial Sequence: Synthetic oligonucleotide
  Antisense strand to SEQ ID NO: 1405948
aauaccaacgaaaggacgg

SEQ ID NO: 1405950 - RNA, 19 nt, Artificial Sequence
  Description of Artificial Sequence: Synthetic oligonucleotide
  Sense strand starting at position 1240 of SEQ ID NO: 1243276
ccagcacaccugugcuuaa

SEQ ID NO: 1405951 - RNA, 19 nt, Artificial Sequence
  Description of Artificial Sequence: Synthetic oligonucleotide
  Antisense strand to SEQ ID NO: 1405950
uuaagcacaggugugcugg

SEQ ID NO: 1405952 - RNA, 19 nt, Artificial Sequence
  Description of Artificial Sequence: Synthetic oligonucleotide
  Sense strand starting at position 1402 of SEQ ID NO: 1243276
gcccgucuuuaucugcgaa

SEQ ID NO: 1405953 - RNA, 19 nt, Artificial Sequence
  Description of Artificial Sequence: Synthetic oligonucleotide
  Antisense strand to SEQ ID NO: 1405952
uucgcagauaaagacgggc

SEQ ID NO: 1405954 - RNA, 19 nt, Artificial Sequence
  Description of Artificial Sequence: Synthetic oligonucleotide
  Sense strand starting at position 1404 of SEQ ID NO: 1243276
ccgucuuuaucugcgaaga

SEQ ID NO: 1405955 - RNA, 19 nt, Artificial Sequence
  Description of Artificial Sequence: Synthetic oligonucleotide
  Antisense strand to SEQ ID NO: 1405954
ucuucgcagauaaagacgg

SEQ ID NO: 1405956 - RNA, 19 nt, Artificial Sequence
  Description of Artificial Sequence: Synthetic oligonucleotide
  Sense strand starting at position 1405 of SEQ ID NO: 1243276
cgucuuuaucugcgaagaa

SEQ ID NO: 1405957 - RNA, 19 nt, Artificial Sequence
  Description of Artificial Sequence: Synthetic oligonucleotide
  Antisense strand to SEQ ID NO: 1405956
uucuucgcagauaaagacg

SEQ ID NO: 1405958 - RNA, 19 nt, Artificial Sequence
  Description of Artificial Sequence: Synthetic oligonucleotide
  Sense strand starting at position 1406 of SEQ ID NO: 1243276
gucuuuaucugcgaagaaa

SEQ ID NO: 1405959 - RNA, 19 nt, Artificial Sequence
  Description of Artificial Sequence: Synthetic oligonucleotide
  Antisense strand to SEQ ID NO: 1405958
uuucuucgcagauaaagac

SEQ ID NO: 1405960 - RNA, 19 nt, Artificial Sequence
  Description of Artificial Sequence: Synthetic oligonucleotide
  Sense strand starting at position 1645 of SEQ ID NO: 1243276
ggguugggucccgagauca

SEQ ID NO: 1405961 - RNA, 19 nt, Artificial Sequence
  Description of Artificial Sequence: Synthetic oligonucleotide
  Antisense strand to SEQ ID NO: 1405960
ugaucucgggacccaaccc

SEQ ID NO: 1405962 - RNA, 19 nt, Artificial Sequence
  Description of Artificial Sequence: Synthetic oligonucleotide
  Sense strand starting at position 1762 of SEQ ID NO: 1243276
cguaguccucguaguagga

SEQ ID NO: 1405963 - RNA, 19 nt, Artificial Sequence
  Description of Artificial Sequence: Synthetic oligonucleotide
  Antisense strand to SEQ ID NO: 1405962
uccuacuacgaggacuacg

SEQ ID NO: 1405964 - RNA, 19 nt, Artificial Sequence
  Description of Artificial Sequence: Synthetic oligonucleotide
  Sense strand starting at position 1793 of SEQ ID NO: 1243276
gucggugagguccacgaua

SEQ ID NO: 1405965 - RNA, 19 nt, Artificial Sequence
  Description of Artificial Sequence: Synthetic oligonucleotide
  Antisense strand to SEQ ID NO: 1405964
uaucguggaccucaccgac

SEQ ID NO: 1405966 - RNA, 19 nt, Artificial Sequence
  Description of Artificial Sequence: Synthetic oligonucleotide
  Sense strand starting at position 1795 of SEQ ID NO: 1243276
cggugagguccacgauauc

SEQ ID NO: 1405967 - RNA, 19 nt, Artificial Sequence
  Description of Artificial Sequence: Synthetic oligonucleotide
  Antisense strand to SEQ ID NO: 1405966
gauaucguggaccucaccg

SEQ ID NO: 1405968 - RNA, 19 nt, Artificial Sequence
  Description of Artificial Sequence: Synthetic oligonucleotide
  Sense strand starting at position 2214 of SEQ ID NO: 1243276
guugcaagucauugaggca

SEQ ID NO: 1405969 - RNA, 19 nt, Artificial Sequence
  Description of Artificial Sequence: Synthetic oligonucleotide
  Antisense strand to SEQ ID NO: 1405968
ugccucaaugacuugcaac

SEQ ID NO: 1405970 - RNA, 19 nt, Artificial Sequence
  Description of Artificial Sequence: Synthetic oligonucleotide
  Sense strand starting at position 2358 of SEQ ID NO: 1243276
aggaguucgaguugugauu

SEQ ID NO: 1405971 - RNA, 19 nt, Artificial Sequence
  Description of Artificial Sequence: Synthetic oligonucleotide
  Antisense strand to SEQ ID NO: 1405970
aaucacaacucgaacuccu

SEQ ID NO: 1405972 - RNA, 19 nt, Artificial Sequence
  Description of Artificial Sequence: Synthetic oligonucleotide
  Sense strand starting at position 2438 of SEQ ID NO: 1243276
auggcuuuggcaggaguau

SEQ ID NO: 1405973 - RNA, 19 nt, Artificial Sequence
  Description of Artificial Sequence: Synthetic oligonucleotide
  Antisense strand to SEQ ID NO: 1405972
auacuccugccaaagccau

SEQ ID NO: 1405974 - RNA, 19 nt, Artificial Sequence
  Description of Artificial Sequence: Synthetic oligonucleotide
  Sense strand starting at position 2439 of SEQ ID NO: 1243276
uggcuuuggcaggaguauu

SEQ ID NO: 1405975 - RNA, 19 nt, Artificial Sequence
  Description of Artificial Sequence: Synthetic oligonucleotide
  Antisense strand to SEQ ID NO: 1405974
aauacuccugccaaagcca

SEQ ID NO: 1405976 - RNA, 19 nt, Artificial Sequence
  Description of Artificial Sequence: Synthetic oligonucleotide
  Sense strand starting at position 2489 of SEQ ID NO: 1243276
ugaggucuuggguaagauc

SEQ ID NO: 1405977 - RNA, 19 nt, Artificial Sequence
  Description of Artificial Sequence: Synthetic oligonucleotide
  Antisense strand to SEQ ID NO: 1405976
gaucuuacccaagaccuca

SEQ ID NO: 1405978 - RNA, 19 nt, Artificial Sequence
  Description of Artificial Sequence: Synthetic oligonucleotide
  Sense strand starting at position 3024 of SEQ ID NO: 1243276
gaggucuguugugugccaa

SEQ ID NO: 1405979 - RNA, 19 nt, Artificial Sequence
  Description of Artificial Sequence: Synthetic oligonucleotide
  Antisense strand to SEQ ID NO: 1405978
uuggcacacaacagaccuc

SEQ ID NO: 1405980 - RNA, 19 nt, Artificial Sequence
  Description of Artificial Sequence: Synthetic oligonucleotide
  Sense strand starting at position 3088 of SEQ ID NO: 1243276
guuugucauccucgcaaag

SEQ ID NO: 1405981 - RNA, 19 nt, Artificial Sequence
  Description of Artificial Sequence: Synthetic oligonucleotide
  Antisense strand to SEQ ID NO: 1405980
cuuugcgaggaugacaaac

SEQ ID NO: 1405982 - RNA, 19 nt, Artificial Sequence
  Description of Artificial Sequence: Synthetic oligonucleotide
  Sense strand starting at position 3098 of SEQ ID NO: 1243276
cucgcaaagaccugugcua

SEQ ID NO: 1405983 - RNA, 19 nt, Artificial Sequence
  Description of Artificial Sequence: Synthetic oligonucleotide
  Antisense strand to SEQ ID NO: 1405982
uagcacaggucuuugcgag

SEQ ID NO: 1405984 - RNA, 19 nt, Artificial Sequence
  Description of Artificial Sequence: Synthetic oligonucleotide
  Sense strand starting at position 3100 of SEQ ID NO: 1243276
cgcaaagaccugugcuaug

SEQ ID NO: 1405985 - RNA, 19 nt, Artificial Sequence
  Description of Artificial Sequence: Synthetic oligonucleotide
  Antisense strand to SEQ ID NO: 1405984
cauagcacaggucuuugcg

SEQ ID NO: 1405986 - RNA, 19 nt, Artificial Sequence
  Description of Artificial Sequence: Synthetic oligonucleotide
  Sense strand starting at position 3282 of SEQ ID NO: 1243276
gcaauauagugagauuguc

SEQ ID NO: 1405987 - RNA, 19 nt, Artificial Sequence
  Description of Artificial Sequence: Synthetic oligonucleotide
  Antisense strand to SEQ ID NO: 1405986
gacaaucucacuauauugc

SEQ ID NO: 1405988 - RNA, 19 nt, Artificial Sequence
  Description of Artificial Sequence: Synthetic oligonucleotide
  Sense strand starting at position 3288 of SEQ ID NO: 1243276
uagugagauugucucuaca

SEQ ID NO: 1405989 - RNA, 19 nt, Artificial Sequence
  Description of Artificial Sequence: Synthetic oligonucleotide
  Antisense strand to SEQ ID NO: 1405988
uguagagacaaucucacua

SEQ ID NO: 1405990 - RNA, 19 nt, Artificial Sequence
  Description of Artificial Sequence: Synthetic oligonucleotide
  Sense strand starting at position 3290 of SEQ ID NO: 1243276
gugagauugucucuacaaa

SEQ ID NO: 1405991 - RNA, 19 nt, Artificial Sequence
  Description of Artificial Sequence: Synthetic oligonucleotide
  Antisense strand to SEQ ID NO: 1405990
uuuguagagacaaucucac

SEQ ID NO: 1405992 - RNA, 19 nt, Artificial Sequence
  Description of Artificial Sequence: Synthetic oligonucleotide
  Sense strand starting at position 3690 of SEQ ID NO: 1243276
gucaauuaagccugggaag

SEQ ID NO: 1405993 - RNA, 19 nt, Artificial Sequence
  Description of Artificial Sequence: Synthetic oligonucleotide
  Antisense strand to SEQ ID NO: 1405992
cuucccaggcuuaauugac

SEQ ID NO: 1405994 - RNA, 19 nt, Artificial Sequence
  Description of Artificial Sequence: Synthetic oligonucleotide
  Sense strand starting at position 3692 of SEQ ID NO: 1243276
caauuaagccugggaaguu

SEQ ID NO: 1405995 - RNA, 19 nt, Artificial Sequence
  Description of Artificial Sequence: Synthetic oligonucleotide
  Antisense strand to SEQ ID NO: 1405994
aacuucccaggcuuaauug

SEQ ID NO: 1405996 - RNA, 19 nt, Artificial Sequence
  Description of Artificial Sequence: Synthetic oligonucleotide
  Sense strand starting at position 3704 of SEQ ID NO: 1243276
ggaaguugaagcuguaguu

SEQ ID NO: 1405997 - RNA, 19 nt, Artificial Sequence
  Description of Artificial Sequence: Synthetic oligonucleotide
  Antisense strand to SEQ ID NO: 1405996
aacuacagcuucaacuucc

SEQ ID NO: 1405998 - RNA, 19 nt, Artificial Sequence
  Description of Artificial Sequence: Synthetic oligonucleotide
  Sense strand starting at position 3713 of SEQ ID NO: 1243276
agcuguaguuaacugugau

SEQ ID NO: 1405999 - RNA, 19 nt, Artificial Sequence
  Description of Artificial Sequence: Synthetic oligonucleotide
  Antisense strand to SEQ ID NO: 1405998
aucacaguuaacuacagcu

SEQ ID NO: 1406000 - RNA, 19 nt, Artificial Sequence
  Description of Artificial Sequence: Synthetic oligonucleotide
  Sense strand starting at position 3716 of SEQ ID NO: 1243276
uguaguuaacugugaucau

SEQ ID NO: 1406001 - RNA, 19 nt, Artificial Sequence
  Description of Artificial Sequence: Synthetic oligonucleotide
  Antisense strand to SEQ ID NO: 1406000
augaucacaguuaacuaca

SEQ ID NO: 1406002 - RNA, 19 nt, Artificial Sequence
  Description of Artificial Sequence: Synthetic oligonucleotide
  Sense strand starting at position 3717 of SEQ ID NO: 1243276
guaguuaacugugaucaug

SEQ ID NO: 1406003 - RNA, 19 nt, Artificial Sequence
  Description of Artificial Sequence: Synthetic oligonucleotide
  Antisense strand to SEQ ID NO: 1406002
caugaucacaguuaacuac

SEQ ID NO: 1406004 - RNA, 19 nt, Artificial Sequence
  Description of Artificial Sequence: Synthetic oligonucleotide
  Sense strand starting at position 3875 of SEQ ID NO: 1243276
gaggcauguaaguggguuu

SEQ ID NO: 1406005 - RNA, 19 nt, Artificial Sequence
  Description of Artificial Sequence: Synthetic oligonucleotide
  Antisense strand to SEQ ID NO: 1406004
aaacccacuuacaugccuc

SEQ ID NO: 1406006 - RNA, 19 nt, Artificial Sequence
  Description of Artificial Sequence: Synthetic oligonucleotide
  Sense strand starting at position 468 of SEQ ID NO: 1243277
agggaacuauuauugucau

SEQ ID NO: 1406007 - RNA, 19 nt, Artificial Sequence
  Description of Artificial Sequence: Synthetic oligonucleotide
  Antisense strand to SEQ ID NO: 1406006
augacaauaauaguucccu

SEQ ID NO: 1406008 - RNA, 19 nt, Artificial Sequence
  Description of Artificial Sequence: Synthetic oligonucleotide
  Sense strand starting at position 469 of SEQ ID NO: 1243277
gggaacuauuauugucauu

SEQ ID NO: 1406009 - RNA, 19 nt, Artificial Sequence
  Description of Artificial Sequence: Synthetic oligonucleotide
  Antisense strand to SEQ ID NO: 1406008
aaugacaauaauaguuccc

SEQ ID NO: 1406010 - RNA, 19 nt, Artificial Sequence
  Description of Artificial Sequence: Synthetic oligonucleotide
  Sense strand starting at position 558 of SEQ ID NO: 1243277
ggagccuucugagcguaga

SEQ ID NO: 1406011 - RNA, 19 nt, Artificial Sequence
  Description of Artificial Sequence: Synthetic oligonucleotide
  Antisense strand to SEQ ID NO: 1406010
ucuacgcucagaaggcucc

SEQ ID NO: 1406012 - RNA, 19 nt, Artificial Sequence
  Description of Artificial Sequence: Synthetic oligonucleotide
  Sense strand starting at position 588 of SEQ ID NO: 1243277
uggguuugugcugguggaa

SEQ ID NO: 1406013 - RNA, 19 nt, Artificial Sequence
  Description of Artificial Sequence: Synthetic oligonucleotide
  Antisense strand to SEQ ID NO: 1406012
uuccaccagcacaaaccca

SEQ ID NO: 1406014 - RNA, 19 nt, Artificial Sequence
  Description of Artificial Sequence: Synthetic oligonucleotide
  Sense strand starting at position 751 of SEQ ID NO: 1243277
aaugcucugggcugaaaca

SEQ ID NO: 1406015 - RNA, 19 nt, Artificial Sequence
  Description of Artificial Sequence: Synthetic oligonucleotide
  Antisense strand to SEQ ID NO: 1406014
uguuucagcccagagcauu

SEQ ID NO: 1406016 - RNA, 19 nt, Artificial Sequence
  Description of Artificial Sequence: Synthetic oligonucleotide
  Sense strand starting at position 773 of SEQ ID NO: 1243277
ccuugaagcguuggaaugu

SEQ ID NO: 1406017 - RNA, 19 nt, Artificial Sequence
  Description of Artificial Sequence: Synthetic oligonucleotide
  Antisense strand to SEQ ID NO: 1406016
acauuccaacgcuucaagg

SEQ ID NO: 1406018 - RNA, 19 nt, Artificial Sequence
  Description of Artificial Sequence: Synthetic oligonucleotide
  Sense strand starting at position 782 of SEQ ID NO: 1243277
guuggaaugugaccagaca

SEQ ID NO: 1406019 - RNA, 19 nt, Artificial Sequence
  Description of Artificial Sequence: Synthetic oligonucleotide
  Antisense strand to SEQ ID NO: 1406018
ugucuggucacauuccaac

SEQ ID NO: 1406020 - RNA, 19 nt, Artificial Sequence
  Description of Artificial Sequence: Synthetic oligonucleotide
  Sense strand starting at position 1161 of SEQ ID NO: 1243277
agauuaucuuaguaguuag

SEQ ID NO: 1406021 - RNA, 19 nt, Artificial Sequence
  Description of Artificial Sequence: Synthetic oligonucleotide
  Antisense strand to SEQ ID NO: 1406020
cuaacuacuaagauaaucu

SEQ ID NO: 1406022 - RNA, 19 nt, Artificial Sequence
  Description of Artificial Sequence: Synthetic oligonucleotide
  Sense strand starting at position 1164 of SEQ ID NO: 1243277
uuaucuuaguaguuagaca

SEQ ID NO: 1406023 - RNA, 19 nt, Artificial Sequence
  Description of Artificial Sequence: Synthetic oligonucleotide
  Antisense strand to SEQ ID NO: 1406022
ugucuaacuacuaagauaa

SEQ ID NO: 1406024 - RNA, 19 nt, Artificial Sequence
  Description of Artificial Sequence: Synthetic oligonucleotide
  Sense strand starting at position 1178 of SEQ ID NO: 1243277
agacauaugcuuugagcuu

SEQ ID NO: 1406025 - RNA, 19 nt, Artificial Sequence
  Description of Artificial Sequence: Synthetic oligonucleotide
  Antisense strand to SEQ ID NO: 1406024
aagcucaaagcauaugucu

SEQ ID NO: 1406026 - RNA, 19 nt, Artificial Sequence
  Description of Artificial Sequence: Synthetic oligonucleotide
  Sense strand starting at position 1179 of SEQ ID NO: 1243277
gacauaugcuuugagcuua

SEQ ID NO: 1406027 - RNA, 19 nt, Artificial Sequence
  Description of Artificial Sequence: Synthetic oligonucleotide
  Antisense strand to SEQ ID NO: 1406026
uaagcucaaagcauauguc

SEQ ID NO: 1406028 - RNA, 19 nt, Artificial Sequence
  Description of Artificial Sequence: Synthetic oligonucleotide
  Sense strand starting at position 1184 of SEQ ID NO: 1243277
augcuuugagcuuaaagga

SEQ ID NO: 1406029 - RNA, 19 nt, Artificial Sequence
  Description of Artificial Sequence: Synthetic oligonucleotide
  Antisense strand to SEQ ID NO: 1406028
uccuuuaagcucaaagcau

SEQ ID NO: 1406030 - RNA, 19 nt, Artificial Sequence
  Description of Artificial Sequence: Synthetic oligonucleotide
  Sense strand starting at position 2218 of SEQ ID NO: 1243277
gguccaaggcugugaaugu

SEQ ID NO: 1406031 - RNA, 19 nt, Artificial Sequence
  Description of Artificial Sequence: Synthetic oligonucleotide
  Antisense strand to SEQ ID NO: 1406030
acauucacagccuuggacc

SEQ ID NO: 1406032 - RNA, 19 nt, Artificial Sequence
  Description of Artificial Sequence: Synthetic oligonucleotide
  Sense strand starting at position 2219 of SEQ ID NO: 1243277
guccaaggcugugaaugua

SEQ ID NO: 1406033 - RNA, 19 nt, Artificial Sequence
  Description of Artificial Sequence: Synthetic oligonucleotide
  Antisense strand to SEQ ID NO: 1406032
uacauucacagccuuggac

SEQ ID NO: 1406034 - RNA, 19 nt, Artificial Sequence
  Description of Artificial Sequence: Synthetic oligonucleotide
  Sense strand starting at position 2273 of SEQ ID NO: 1243277
uggauggugugcugggaaa

SEQ ID NO: 1406035 - RNA, 19 nt, Artificial Sequence
  Description of Artificial Sequence: Synthetic oligonucleotide
  Antisense strand to SEQ ID NO: 1406034
uuucccagcacaccaucca

SEQ ID NO: 1406036 - RNA, 19 nt, Artificial Sequence
  Description of Artificial Sequence: Synthetic oligonucleotide
  Sense strand starting at position 3193 of SEQ ID NO: 1243277
gaaauuagcuaaguacagu

SEQ ID NO: 1406037 - RNA, 19 nt, Artificial Sequence
  Description of Artificial Sequence: Synthetic oligonucleotide
  Antisense strand to SEQ ID NO: 1406036
acuguacuuagcuaauuuc

SEQ ID NO: 1406038 - RNA, 19 nt, Artificial Sequence
  Description of Artificial Sequence: Synthetic oligonucleotide
  Sense strand starting at position 3369 of SEQ ID NO: 1243277
ggguccaacugagaaucaa

SEQ ID NO: 1406039 - RNA, 19 nt, Artificial Sequence
  Description of Artificial Sequence: Synthetic oligonucleotide
  Antisense strand to SEQ ID NO: 1406038
uugauucucaguuggaccc

SEQ ID NO: 1406040 - RNA, 19 nt, Artificial Sequence
  Description of Artificial Sequence: Synthetic oligonucleotide
  Sense strand starting at position 3544 of SEQ ID NO: 1243277
caggcaaguuccuguccaa

SEQ ID NO: 1406041 - RNA, 19 nt, Artificial Sequence
  Description of Artificial Sequence: Synthetic oligonucleotide
  Antisense strand to SEQ ID NO: 1406040
uuggacaggaacuugccug

SEQ ID NO: 1406042 - RNA, 19 nt, Artificial Sequence
  Description of Artificial Sequence: Synthetic oligonucleotide
  Sense strand starting at position 3547 of SEQ ID NO: 1243277
gcaaguuccuguccaagaa

SEQ ID NO: 1406043 - RNA, 19 nt, Artificial Sequence
  Description of Artificial Sequence: Synthetic oligonucleotide
  Antisense strand to SEQ ID NO: 1406042
uucuuggacaggaacuugc

SEQ ID NO: 1406044 - RNA, 19 nt, Artificial Sequence
  Description of Artificial Sequence: Synthetic oligonucleotide
  Sense strand starting at position 3939 of SEQ ID NO: 1243277
gggacugcuagucgcuaaa

SEQ ID NO: 1406045 - RNA, 19 nt, Artificial Sequence
  Description of Artificial Sequence: Synthetic oligonucleotide
  Antisense strand to SEQ ID NO: 1406044
uuuagcgacuagcaguccc

SEQ ID NO: 1406046 - RNA, 19 nt, Artificial Sequence
  Description of Artificial Sequence: Synthetic oligonucleotide
  Sense strand starting at position 3941 of SEQ ID NO: 1243277
gacugcuagucgcuaaauu

SEQ ID NO: 1406047 - RNA, 19 nt, Artificial Sequence
  Description of Artificial Sequence: Synthetic oligonucleotide
  Antisense strand to SEQ ID NO: 1406046
aauuuagcgacuagcaguc

SEQ ID NO: 1406048 - RNA, 19 nt, Artificial Sequence
  Description of Artificial Sequence: Synthetic oligonucleotide
  Sense strand starting at position 3942 of SEQ ID NO: 1243277
acugcuagucgcuaaauuc

SEQ ID NO: 1406049 - RNA, 19 nt, Artificial Sequence
  Description of Artificial Sequence: Synthetic oligonucleotide
  Antisense strand to SEQ ID NO: 1406048
gaauuuagcgacuagcagu

SEQ ID NO: 1406050 - RNA, 19 nt, Artificial Sequence
  Description of Artificial Sequence: Synthetic oligonucleotide
  Sense strand starting at position 240 of SEQ ID NO: 1243278
agucaauggacugguacuu

SEQ ID NO: 1406051 - RNA, 19 nt, Artificial Sequence
  Description of Artificial Sequence: Synthetic oligonucleotide
  Antisense strand to SEQ ID NO: 1406050
aaguaccaguccauugacu

SEQ ID NO: 1406052 - RNA, 19 nt, Artificial Sequence
  Description of Artificial Sequence: Synthetic oligonucleotide
  Sense strand starting at position 249 of SEQ ID NO: 1243278
acugguacuucugacagau

SEQ ID NO: 1406053 - RNA, 19 nt, Artificial Sequence
  Description of Artificial Sequence: Synthetic oligonucleotide
  Antisense strand to SEQ ID NO: 1406052
aucugucagaaguaccagu

SEQ ID NO: 1406054 - RNA, 19 nt, Artificial Sequence
  Description of Artificial Sequence: Synthetic oligonucleotide
  Sense strand starting at position 314 of SEQ ID NO: 1243278
aaagcaugauguuucuaag

SEQ ID NO: 1406055 - RNA, 19 nt, Artificial Sequence
  Description of Artificial Sequence: Synthetic oligonucleotide
  Antisense strand to SEQ ID NO: 1406054
cuuagaaacaucaugcuuu

SEQ ID NO: 1406056 - RNA, 19 nt, Artificial Sequence
  Description of Artificial Sequence: Synthetic oligonucleotide
  Sense strand starting at position 317 of SEQ ID NO: 1243278
gcaugauguuucuaagaac

SEQ ID NO: 1406057 - RNA, 19 nt, Artificial Sequence
  Description of Artificial Sequence: Synthetic oligonucleotide
  Antisense strand to SEQ ID NO: 1406056
guucuuagaaacaucaugc

SEQ ID NO: 1406058 - RNA, 19 nt, Artificial Sequence
  Description of Artificial Sequence: Synthetic oligonucleotide
  Sense strand starting at position 320 of SEQ ID NO: 1243278
ugauguuucuaagaacaaa

SEQ ID NO: 1406059 - RNA, 19 nt, Artificial Sequence
  Description of Artificial Sequence: Synthetic oligonucleotide
  Antisense strand to SEQ ID NO: 1406058
uuuguucuuagaaacauca

SEQ ID NO: 1406060 - RNA, 19 nt, Artificial Sequence
  Description of Artificial Sequence: Synthetic oligonucleotide
  Sense strand starting at position 441 of SEQ ID NO: 1243278
cuguuagaccuguagcuga

SEQ ID NO: 1406061 - RNA, 19 nt, Artificial Sequence
  Description of Artificial Sequence: Synthetic oligonucleotide
  Antisense strand to SEQ ID NO: 1406060
ucagcuacaggucuaacag

SEQ ID NO: 1406062 - RNA, 19 nt, Artificial Sequence
  Description of Artificial Sequence: Synthetic oligonucleotide
  Sense strand starting at position 547 of SEQ ID NO: 1243278
agaauucuccacggacaca

SEQ ID NO: 1406063 - RNA, 19 nt, Artificial Sequence
  Description of Artificial Sequence: Synthetic oligonucleotide
  Antisense strand to SEQ ID NO: 1406062
uguguccguggagaauucu

SEQ ID NO: 1406064 - RNA, 19 nt, Artificial Sequence
  Description of Artificial Sequence: Synthetic oligonucleotide
  Sense strand starting at position 573 of SEQ ID NO: 1243278
ugaggcagauucuacacaa

SEQ ID NO: 1406065 - RNA, 19 nt, Artificial Sequence
  Description of Artificial Sequence: Synthetic oligonucleotide
  Antisense strand to SEQ ID NO: 1406064
uuguguagaaucugccuca

SEQ ID NO: 1406066 - RNA, 19 nt, Artificial Sequence
  Description of Artificial Sequence: Synthetic oligonucleotide
  Sense strand starting at position 1460 of SEQ ID NO: 1243278
agccaucaagucuaugcua

SEQ ID NO: 1406067 - RNA, 19 nt, Artificial Sequence
  Description of Artificial Sequence: Synthetic oligonucleotide
  Antisense strand to SEQ ID NO: 1406066
uagcauagacuugauggcu

SEQ ID NO: 1406068 - RNA, 19 nt, Artificial Sequence
  Description of Artificial Sequence: Synthetic oligonucleotide
  Sense strand starting at position 1551 of SEQ ID NO: 1243278
aaacgucgcuauguugaaa

SEQ ID NO: 1406069 - RNA, 19 nt, Artificial Sequence
  Description of Artificial Sequence: Synthetic oligonucleotide
  Antisense strand to SEQ ID NO: 1406068
uuucaacauagcgacguuu

SEQ ID NO: 1406070 - RNA, 19 nt, Artificial Sequence
  Description of Artificial Sequence: Synthetic oligonucleotide
  Sense strand starting at position 1986 of SEQ ID NO: 1243278
ccagacacgcucuaauaaa

SEQ ID NO: 1406071 - RNA, 19 nt, Artificial Sequence
  Description of Artificial Sequence: Synthetic oligonucleotide
  Antisense strand to SEQ ID NO: 1406070
uuuauuagagcgugucugg

SEQ ID NO: 1406072 - RNA, 19 nt, Artificial Sequence
  Description of Artificial Sequence: Synthetic oligonucleotide
  Sense strand starting at position 2035 of SEQ ID NO: 1243278
ggcaaaguucaggaagugu

SEQ ID NO: 1406073 - RNA, 19 nt, Artificial Sequence
  Description of Artificial Sequence: Synthetic oligonucleotide
  Antisense strand to SEQ ID NO: 1406072
acacuuccugaacuuugcc

SEQ ID NO: 1406074 - RNA, 19 nt, Artificial Sequence
  Description of Artificial Sequence: Synthetic oligonucleotide
  Sense strand starting at position 2049 of SEQ ID NO: 1243278
aguguccuugcugguuuaa

SEQ ID NO: 1406075 - RNA, 19 nt, Artificial Sequence
  Description of Artificial Sequence: Synthetic oligonucleotide
  Antisense strand to SEQ ID NO: 1406074
uuaaaccagcaaggacacu

SEQ ID NO: 1406076 - RNA, 19 nt, Artificial Sequence
  Description of Artificial Sequence: Synthetic oligonucleotide
  Sense strand starting at position 2113 of SEQ ID NO: 1243278
uuggcuuccuaagcugaua

SEQ ID NO: 1406077 - RNA, 19 nt, Artificial Sequence
  Description of Artificial Sequence: Synthetic oligonucleotide
  Antisense strand to SEQ ID NO: 1406076
uaucagcuuaggaagccaa

SEQ ID NO: 1406078 - RNA, 19 nt, Artificial Sequence
  Description of Artificial Sequence: Synthetic oligonucleotide
  Sense strand starting at position 2126 of SEQ ID NO: 1243278
cugauaaugguuugcacaa

SEQ ID NO: 1406079 - RNA, 19 nt, Artificial Sequence
  Description of Artificial Sequence: Synthetic oligonucleotide
  Antisense strand to SEQ ID NO: 1406078
uugugcaaaccauuaucag

SEQ ID NO: 1406080 - RNA, 19 nt, Artificial Sequence
  Description of Artificial Sequence: Synthetic oligonucleotide
  Sense strand starting at position 2127 of SEQ ID NO: 1243278
ugauaaugguuugcacaaa

SEQ ID NO: 1406081 - RNA, 19 nt, Artificial Sequence
  Description of Artificial Sequence: Synthetic oligonucleotide
  Antisense strand to SEQ ID NO: 1406080
uuugugcaaaccauuauca

SEQ ID NO: 1406082 - RNA, 19 nt, Artificial Sequence
  Description of Artificial Sequence: Synthetic oligonucleotide
  Sense strand starting at position 2173 of SEQ ID NO: 1243278
ggcagcucuuugcuccaga

SEQ ID NO: 1406083 - RNA, 19 nt, Artificial Sequence
  Description of Artificial Sequence: Synthetic oligonucleotide
  Antisense strand to SEQ ID NO: 1406082
ucuggagcaaagagcugcc

SEQ ID NO: 1406084 - RNA, 19 nt, Artificial Sequence
  Description of Artificial Sequence: Synthetic oligonucleotide
  Sense strand starting at position 2176 of SEQ ID NO: 1243278
agcucuuugcuccagacau

SEQ ID NO: 1406085 - RNA, 19 nt, Artificial Sequence
  Description of Artificial Sequence: Synthetic oligonucleotide
  Antisense strand to SEQ ID NO: 1406084
augucuggagcaaagagcu

SEQ ID NO: 1406086 - RNA, 19 nt, Artificial Sequence
  Description of Artificial Sequence: Synthetic oligonucleotide
  Sense strand starting at position 2186 of SEQ ID NO: 1243278
uccagacaucgccaguagu

SEQ ID NO: 1406087 - RNA, 19 nt, Artificial Sequence
  Description of Artificial Sequence: Synthetic oligonucleotide
  Antisense strand to SEQ ID NO: 1406086
acuacuggcgaugucugga

SEQ ID NO: 1406088 - RNA, 19 nt, Artificial Sequence
  Description of Artificial Sequence: Synthetic oligonucleotide
  Sense strand starting at position 2237 of SEQ ID NO: 1243278
cccgacgauucugugagau

SEQ ID NO: 1406089 - RNA, 19 nt, Artificial Sequence
  Description of Artificial Sequence: Synthetic oligonucleotide
  Antisense strand to SEQ ID NO: 1406088
aucucacagaaucgucggg

SEQ ID NO: 1406090 - RNA, 19 nt, Artificial Sequence
  Description of Artificial Sequence: Synthetic oligonucleotide
  Sense strand starting at position 2333 of SEQ ID NO: 1243278
ugcucagauccucagacau

SEQ ID NO: 1406091 - RNA, 19 nt, Artificial Sequence
  Description of Artificial Sequence: Synthetic oligonucleotide
  Antisense strand to SEQ ID NO: 1406090
augucugaggaucugagca

SEQ ID NO: 1406092 - RNA, 19 nt, Artificial Sequence
  Description of Artificial Sequence: Synthetic oligonucleotide
  Sense strand starting at position 2423 of SEQ ID NO: 1243278
gcagcaacuuucccguuau

SEQ ID NO: 1406093 - RNA, 19 nt, Artificial Sequence
  Description of Artificial Sequence: Synthetic oligonucleotide
  Antisense strand to SEQ ID NO: 1406092
auaacgggaaaguugcugc

SEQ ID NO: 1406094 - RNA, 19 nt, Artificial Sequence
  Description of Artificial Sequence: Synthetic oligonucleotide
  Sense strand starting at position 2494 of SEQ ID NO: 1243278
cuagcucggccaugacuaa

SEQ ID NO: 1406095 - RNA, 19 nt, Artificial Sequence
  Description of Artificial Sequence: Synthetic oligonucleotide
  Antisense strand to SEQ ID NO: 1406094
uuagucauggccgagcuag

SEQ ID NO: 1406096 - RNA, 19 nt, Artificial Sequence
  Description of Artificial Sequence: Synthetic oligonucleotide
  Sense strand starting at position 2567 of SEQ ID NO: 1243278
agaaaugggucugacugga

SEQ ID NO: 1406097 - RNA, 19 nt, Artificial Sequence
  Description of Artificial Sequence: Synthetic oligonucleotide
  Antisense strand to SEQ ID NO: 1406096
uccagucagacccauuucu

SEQ ID NO: 1406098 - RNA, 19 nt, Artificial Sequence
  Description of Artificial Sequence: Synthetic oligonucleotide
  Sense strand starting at position 2795 of SEQ ID NO: 1243278
gaacuccacuuuguggaaa

SEQ ID NO: 1406099 - RNA, 19 nt, Artificial Sequence
  Description of Artificial Sequence: Synthetic oligonucleotide
  Antisense strand to SEQ ID NO: 1406098
uuuccacaaaguggaguuc

SEQ ID NO: 1406100 - RNA, 19 nt, Artificial Sequence
  Description of Artificial Sequence: Synthetic oligonucleotide
  Sense strand starting at position 2851 of SEQ ID NO: 1243278
aggagagguaacugcguau

SEQ ID NO: 1406101 - RNA, 19 nt, Artificial Sequence
  Description of Artificial Sequence: Synthetic oligonucleotide
  Antisense strand to SEQ ID NO: 1406100
auacgcaguuaccucuccu

SEQ ID NO: 1406102 - RNA, 19 nt, Artificial Sequence
  Description of Artificial Sequence: Synthetic oligonucleotide
  Sense strand starting at position 2854 of SEQ ID NO: 1243278
agagguaacugcguauuca

SEQ ID NO: 1406103 - RNA, 19 nt, Artificial Sequence
  Description of Artificial Sequence: Synthetic oligonucleotide
  Antisense strand to SEQ ID NO: 1406102
ugaauacgcaguuaccucu

SEQ ID NO: 1406104 - RNA, 19 nt, Artificial Sequence
  Description of Artificial Sequence: Synthetic oligonucleotide
  Sense strand starting at position 2862 of SEQ ID NO: 1243278
cugcguauucacuaaggga

SEQ ID NO: 1406105 - RNA, 19 nt, Artificial Sequence
  Description of Artificial Sequence: Synthetic oligonucleotide
  Antisense strand to SEQ ID NO: 1406104
ucccuuagugaauacgcag

SEQ ID NO: 1406106 - RNA, 19 nt, Artificial Sequence
  Description of Artificial Sequence: Synthetic oligonucleotide
  Sense strand starting at position 3006 of SEQ ID NO: 1243278
cugaaucgacucugugaca

SEQ ID NO: 1406107 - RNA, 19 nt, Artificial Sequence
  Description of Artificial Sequence: Synthetic oligonucleotide
  Antisense strand to SEQ ID NO: 1406106
ugucacagagucgauucag

SEQ ID NO: 1406108 - RNA, 19 nt, Artificial Sequence
  Description of Artificial Sequence: Synthetic oligonucleotide
  Sense strand starting at position 3009 of SEQ ID NO: 1243278
aaucgacucugugacacua

SEQ ID NO: 1406109 - RNA, 19 nt, Artificial Sequence
  Description of Artificial Sequence: Synthetic oligonucleotide
  Antisense strand to SEQ ID NO: 1406108
uagugucacagagucgauu

SEQ ID NO: 1406110 - RNA, 19 nt, Artificial Sequence
  Description of Artificial Sequence: Synthetic oligonucleotide
  Sense strand starting at position 3011 of SEQ ID NO: 1243278
ucgacucugugacacuaua

SEQ ID NO: 1406111 - RNA, 19 nt, Artificial Sequence
  Description of Artificial Sequence: Synthetic oligonucleotide
  Antisense strand to SEQ ID NO: 1406110
uauagugucacagagucga

SEQ ID NO: 1406112 - RNA, 19 nt, Artificial Sequence
  Description of Artificial Sequence: Synthetic oligonucleotide
  Sense strand starting at position 3084 of SEQ ID NO: 1243278
acggacuuuggcuaauacu

SEQ ID NO: 1406113 - RNA, 19 nt, Artificial Sequence
  Description of Artificial Sequence: Synthetic oligonucleotide
  Antisense strand to SEQ ID NO: 1406112
aguauuagccaaaguccgu

SEQ ID NO: 1406114 - RNA, 19 nt, Artificial Sequence
  Description of Artificial Sequence: Synthetic oligonucleotide
  Sense strand starting at position 3343 of SEQ ID NO: 1243278
agccaagaucgagacugua

SEQ ID NO: 1406115 - RNA, 19 nt, Artificial Sequence
  Description of Artificial Sequence: Synthetic oligonucleotide
  Antisense strand to SEQ ID NO: 1406114
uacagucucgaucuuggcu

SEQ ID NO: 1406116 - RNA, 19 nt, Artificial Sequence
  Description of Artificial Sequence: Synthetic oligonucleotide
  Sense strand starting at position 3435 of SEQ ID NO: 1243278
cccggaaugcucuacacua

SEQ ID NO: 1406117 - RNA, 19 nt, Artificial Sequence
  Description of Artificial Sequence: Synthetic oligonucleotide
  Antisense strand to SEQ ID NO: 1406116
uaguguagagcauuccggg

SEQ ID NO: 1406118 - RNA, 19 nt, Artificial Sequence
  Description of Artificial Sequence: Synthetic oligonucleotide
  Sense strand starting at position 3437 of SEQ ID NO: 1243278
cggaaugcucuacacuaug

SEQ ID NO: 1406119 - RNA, 19 nt, Artificial Sequence
  Description of Artificial Sequence: Synthetic oligonucleotide
  Antisense strand to SEQ ID NO: 1406118
cauaguguagagcauuccg

SEQ ID NO: 1406120 - RNA, 19 nt, Artificial Sequence
  Description of Artificial Sequence: Synthetic oligonucleotide
  Sense strand starting at position 3567 of SEQ ID NO: 1243278
aaggauuagcucugacaug

SEQ ID NO: 1406121 - RNA, 19 nt, Artificial Sequence
  Description of Artificial Sequence: Synthetic oligonucleotide
  Antisense strand to SEQ ID NO: 1406120
caugucagagcuaauccuu

SEQ ID NO: 1406122 - RNA, 19 nt, Artificial Sequence
  Description of Artificial Sequence: Synthetic oligonucleotide
  Sense strand starting at position 3568 of SEQ ID NO: 1243278
aggauuagcucugacaugu

SEQ ID NO: 1406123 - RNA, 19 nt, Artificial Sequence
  Description of Artificial Sequence: Synthetic oligonucleotide
  Antisense strand to SEQ ID NO: 1406122
acaugucagagcuaauccu

SEQ ID NO: 1406124 - RNA, 19 nt, Artificial Sequence
  Description of Artificial Sequence: Synthetic oligonucleotide
  Sense strand starting at position 3674 of SEQ ID NO: 1243278
gccuuuggugccucgagua

SEQ ID NO: 1406125 - RNA, 19 nt, Artificial Sequence
  Description of Artificial Sequence: Synthetic oligonucleotide
  Antisense strand to SEQ ID NO: 1406124
uacucgaggcaccaaaggc

SEQ ID NO: 1406126 - RNA, 19 nt, Artificial Sequence
  Description of Artificial Sequence: Synthetic oligonucleotide
  Sense strand starting at position 3763 of SEQ ID NO: 1243278
accaguuuauccucucagu

SEQ ID NO: 1406127 - RNA, 19 nt, Artificial Sequence
  Description of Artificial Sequence: Synthetic oligonucleotide
  Antisense strand to SEQ ID NO: 1406126
acugagaggauaaacuggu

SEQ ID NO: 1406128 - RNA, 19 nt, Artificial Sequence
  Description of Artificial Sequence: Synthetic oligonucleotide
  Sense strand starting at position 3883 of SEQ ID NO: 1243278
ccaggaguucccuggcucu

SEQ ID NO: 1406129 - RNA, 19 nt, Artificial Sequence
  Description of Artificial Sequence: Synthetic oligonucleotide
  Antisense strand to SEQ ID NO: 1406128
agagccagggaacuccugg

SEQ ID NO: 1406130 - RNA, 19 nt, Artificial Sequence
  Description of Artificial Sequence: Synthetic oligonucleotide
  Sense strand starting at position 20 of SEQ ID NO: 1243279
gggauuuccugcuaaguaa

SEQ ID NO: 1406131 - RNA, 19 nt, Artificial Sequence
  Description of Artificial Sequence: Synthetic oligonucleotide
  Antisense strand to SEQ ID NO: 1406130
uuacuuagcaggaaauccc

SEQ ID NO: 1406132 - RNA, 19 nt, Artificial Sequence
  Description of Artificial Sequence: Synthetic oligonucleotide
  Sense strand starting at position 52 of SEQ ID NO: 1243279
gagcacugguauuauuuga

SEQ ID NO: 1406133 - RNA, 19 nt, Artificial Sequence
  Description of Artificial Sequence: Synthetic oligonucleotide
  Antisense strand to SEQ ID NO: 1406132
ucaaauaauaccagugcuc

SEQ ID NO: 1406134 - RNA, 19 nt, Artificial Sequence
  Description of Artificial Sequence: Synthetic oligonucleotide
  Sense strand starting at position 66 of SEQ ID NO: 1243279
uuugauguccaccggguua

SEQ ID NO: 1406135 - RNA, 19 nt, Artificial Sequence
  Description of Artificial Sequence: Synthetic oligonucleotide
  Antisense strand to SEQ ID NO: 1406134
uaacccgguggacaucaaa

SEQ ID NO: 1406136 - RNA, 19 nt, Artificial Sequence
  Description of Artificial Sequence: Synthetic oligonucleotide
  Sense strand starting at position 68 of SEQ ID NO: 1243279
ugauguccaccggguuauu

SEQ ID NO: 1406137 - RNA, 19 nt, Artificial Sequence
  Description of Artificial Sequence: Synthetic oligonucleotide
  Antisense strand to SEQ ID NO: 1406136
aauaacccgguggacauca

SEQ ID NO: 1406138 - RNA, 19 nt, Artificial Sequence
  Description of Artificial Sequence: Synthetic oligonucleotide
  Sense strand starting at position 255 of SEQ ID NO: 1243279
ucaccucuccuacgagagu

SEQ ID NO: 1406139 - RNA, 19 nt, Artificial Sequence
  Description of Artificial Sequence: Synthetic oligonucleotide
  Antisense strand to SEQ ID NO: 1406138
acucucguaggagagguga

SEQ ID NO: 1406140 - RNA, 19 nt, Artificial Sequence
  Description of Artificial Sequence: Synthetic oligonucleotide
  Sense strand starting at position 289 of SEQ ID NO: 1243279
ggaguucugcuagacuucu

SEQ ID NO: 1406141 - RNA, 19 nt, Artificial Sequence
  Description of Artificial Sequence: Synthetic oligonucleotide
  Antisense strand to SEQ ID NO: 1406140
agaagucuagcagaacucc

SEQ ID NO: 1406142 - RNA, 19 nt, Artificial Sequence
  Description of Artificial Sequence: Synthetic oligonucleotide
  Sense strand starting at position 451 of SEQ ID NO: 1243279
acaguaaaguaauuguacu

SEQ ID NO: 1406143 - RNA, 19 nt, Artificial Sequence
  Description of Artificial Sequence: Synthetic oligonucleotide
  Antisense strand to SEQ ID NO: 1406142
aguacaauuacuuuacugu

SEQ ID NO: 1406144 - RNA, 19 nt, Artificial Sequence
  Description of Artificial Sequence: Synthetic oligonucleotide
  Sense strand starting at position 476 of SEQ ID NO: 1243279
aggugucuaucaguaggau

SEQ ID NO: 1406145 - RNA, 19 nt, Artificial Sequence
  Description of Artificial Sequence: Synthetic oligonucleotide
  Antisense strand to SEQ ID NO: 1406144
auccuacugauagacaccu

SEQ ID NO: 1406146 - RNA, 19 nt, Artificial Sequence
  Description of Artificial Sequence: Synthetic oligonucleotide
  Sense strand starting at position 477 of SEQ ID NO: 1243279
ggugucuaucaguaggauc

SEQ ID NO: 1406147 - RNA, 19 nt, Artificial Sequence
  Description of Artificial Sequence: Synthetic oligonucleotide
  Antisense strand to SEQ ID NO: 1406146
gauccuacugauagacacc

SEQ ID NO: 1406148 - RNA, 19 nt, Artificial Sequence
  Description of Artificial Sequence: Synthetic oligonucleotide
  Sense strand starting at position 524 of SEQ ID NO: 1243279
cggcuagaacuugggugaa

SEQ ID NO: 1406149 - RNA, 19 nt, Artificial Sequence
  Description of Artificial Sequence: Synthetic oligonucleotide
  Antisense strand to SEQ ID NO: 1406148
uucacccaaguucuagccg

SEQ ID NO: 1406150 - RNA, 19 nt, Artificial Sequence
  Description of Artificial Sequence: Synthetic oligonucleotide
  Sense strand starting at position 526 of SEQ ID NO: 1243279
gcuagaacuugggugaauu

SEQ ID NO: 1406151 - RNA, 19 nt, Artificial Sequence
  Description of Artificial Sequence: Synthetic oligonucleotide
  Antisense strand to SEQ ID NO: 1406150
aauucacccaaguucuagc

SEQ ID NO: 1406152 - RNA, 19 nt, Artificial Sequence
  Description of Artificial Sequence: Synthetic oligonucleotide
  Sense strand starting at position 527 of SEQ ID NO: 1243279
cuagaacuugggugaauuc

SEQ ID NO: 1406153 - RNA, 19 nt, Artificial Sequence
  Description of Artificial Sequence: Synthetic oligonucleotide
  Antisense strand to SEQ ID NO: 1406152
gaauucacccaaguucuag

SEQ ID NO: 1406154 - RNA, 19 nt, Artificial Sequence
  Description of Artificial Sequence: Synthetic oligonucleotide
  Sense strand starting at position 538 of SEQ ID NO: 1243279
gugaauucagccgagcagu

SEQ ID NO: 1406155 - RNA, 19 nt, Artificial Sequence
  Description of Artificial Sequence: Synthetic oligonucleotide
  Antisense strand to SEQ ID NO: 1406154
acugcucggcugaauucac

SEQ ID NO: 1406156 - RNA, 19 nt, Artificial Sequence
  Description of Artificial Sequence: Synthetic oligonucleotide
  Sense strand starting at position 669 of SEQ ID NO: 1243279
ggagcugaccucgguaaga

SEQ ID NO: 1406157 - RNA, 19 nt, Artificial Sequence
  Description of Artificial Sequence: Synthetic oligonucleotide
  Antisense strand to SEQ ID NO: 1406156
ucuuaccgaggucagcucc

SEQ ID NO: 1406158 - RNA, 19 nt, Artificial Sequence
  Description of Artificial Sequence: Synthetic oligonucleotide
  Sense strand starting at position 671 of SEQ ID NO: 1243279
agcugaccucgguaagauc

SEQ ID NO: 1406159 - RNA, 19 nt, Artificial Sequence
  Description of Artificial Sequence: Synthetic oligonucleotide
  Antisense strand to SEQ ID NO: 1406158
gaucuuaccgaggucagcu

SEQ ID NO: 1406160 - RNA, 19 nt, Artificial Sequence
  Description of Artificial Sequence: Synthetic oligonucleotide
  Sense strand starting at position 761 of SEQ ID NO: 1243279
gagggacuccagcgcaauu

SEQ ID NO: 1406161 - RNA, 19 nt, Artificial Sequence
  Description of Artificial Sequence: Synthetic oligonucleotide
  Antisense strand to SEQ ID NO: 1406160
aauugcgcuggagucccuc

SEQ ID NO: 1406162 - RNA, 19 nt, Artificial Sequence
  Description of Artificial Sequence: Synthetic oligonucleotide
  Sense strand starting at position 783 of SEQ ID NO: 1243279
ccagaaauccagggccgaa

SEQ ID NO: 1406163 - RNA, 19 nt, Artificial Sequence
  Description of Artificial Sequence: Synthetic oligonucleotide
  Antisense strand to SEQ ID NO: 1406162
uucggcccuggauuucugg

SEQ ID NO: 1406164 - RNA, 19 nt, Artificial Sequence
  Description of Artificial Sequence: Synthetic oligonucleotide
  Sense strand starting at position 801 of SEQ ID NO: 1243279
aguggugaauaagcagaaa

SEQ ID NO: 1406165 - RNA, 19 nt, Artificial Sequence
  Description of Artificial Sequence: Synthetic oligonucleotide
  Antisense strand to SEQ ID NO: 1406164
uuucugcuuauucaccacu

SEQ ID NO: 1406166 - RNA, 19 nt, Artificial Sequence
  Description of Artificial Sequence: Synthetic oligonucleotide
  Sense strand starting at position 2373 of SEQ ID NO: 1243279
cgcauggugcggucgagua

SEQ ID NO: 1406167 - RNA, 19 nt, Artificial Sequence
  Description of Artificial Sequence: Synthetic oligonucleotide
  Antisense strand to SEQ ID NO: 1406166
uacucgaccgcaccaugcg

SEQ ID NO: 1406168 - RNA, 19 nt, Artificial Sequence
  Description of Artificial Sequence: Synthetic oligonucleotide
  Sense strand starting at position 2375 of SEQ ID NO: 1243279
cauggugcggucgaguaaa

SEQ ID NO: 1406169 - RNA, 19 nt, Artificial Sequence
  Description of Artificial Sequence: Synthetic oligonucleotide
  Antisense strand to SEQ ID NO: 1406168
uuuacucgaccgcaccaug

SEQ ID NO: 1406170 - RNA, 19 nt, Artificial Sequence
  Description of Artificial Sequence: Synthetic oligonucleotide
  Sense strand starting at position 2457 of SEQ ID NO: 1243279
ggguaaagcguucucacgu

SEQ ID NO: 1406171 - RNA, 19 nt, Artificial Sequence
  Description of Artificial Sequence: Synthetic oligonucleotide
  Antisense strand to SEQ ID NO: 1406170
acgugagaacgcuuuaccc

SEQ ID NO: 1406172 - RNA, 19 nt, Artificial Sequence
  Description of Artificial Sequence: Synthetic oligonucleotide
  Sense strand starting at position 2465 of SEQ ID NO: 1243279
cguucucacguugaugaga

SEQ ID NO: 1406173 - RNA, 19 nt, Artificial Sequence
  Description of Artificial Sequence: Synthetic oligonucleotide
  Antisense strand to SEQ ID NO: 1406172
ucucaucaacgugagaacg

SEQ ID NO: 1406174 - RNA, 19 nt, Artificial Sequence
  Description of Artificial Sequence: Synthetic oligonucleotide
  Sense strand starting at position 2694 of SEQ ID NO: 1243279
cccuuaagccugugaccaa

SEQ ID NO: 1406175 - RNA, 19 nt, Artificial Sequence
  Description of Artificial Sequence: Synthetic oligonucleotide
  Antisense strand to SEQ ID NO: 1406174
uuggucacaggcuuaaggg

SEQ ID NO: 1406176 - RNA, 19 nt, Artificial Sequence
  Description of Artificial Sequence: Synthetic oligonucleotide
  Sense strand starting at position 2707 of SEQ ID NO: 1243279
gaccaagaucuccgggacu

SEQ ID NO: 1406177 - RNA, 19 nt, Artificial Sequence
  Description of Artificial Sequence: Synthetic oligonucleotide
  Antisense strand to SEQ ID NO: 1406176
agucccggagaucuugguc

SEQ ID NO: 1406178 - RNA, 19 nt, Artificial Sequence
  Description of Artificial Sequence: Synthetic oligonucleotide
  Sense strand starting at position 3039 of SEQ ID NO: 1243279
cauaauuuguaucagggaa

SEQ ID NO: 1406179 - RNA, 19 nt, Artificial Sequence
  Description of Artificial Sequence: Synthetic oligonucleotide
  Antisense strand to SEQ ID NO: 1406178
uucccugauacaaauuaug

SEQ ID NO: 1406180 - RNA, 19 nt, Artificial Sequence
  Description of Artificial Sequence: Synthetic oligonucleotide
  Sense strand starting at position 3099 of SEQ ID NO: 1243279
agauaugguuucguaagca

SEQ ID NO: 1406181 - RNA, 19 nt, Artificial Sequence
  Description of Artificial Sequence: Synthetic oligonucleotide
  Antisense strand to SEQ ID NO: 1406180
ugcuuacgaaaccauaucu

SEQ ID NO: 1406182 - RNA, 19 nt, Artificial Sequence
  Description of Artificial Sequence: Synthetic oligonucleotide
  Sense strand starting at position 3173 of SEQ ID NO: 1243279
cagcguguuaauuaaguga

SEQ ID NO: 1406183 - RNA, 19 nt, Artificial Sequence
  Description of Artificial Sequence: Synthetic oligonucleotide
  Antisense strand to SEQ ID NO: 1406182
ucacuuaauuaacacgcug

SEQ ID NO: 1406184 - RNA, 19 nt, Artificial Sequence
  Description of Artificial Sequence: Synthetic oligonucleotide
  Sense strand starting at position 3177 of SEQ ID NO: 1243279
guguuaauuaagugaguca

SEQ ID NO: 1406185 - RNA, 19 nt, Artificial Sequence
  Description of Artificial Sequence: Synthetic oligonucleotide
  Antisense strand to SEQ ID NO: 1406184
ugacucacuuaauuaacac

SEQ ID NO: 1406186 - RNA, 19 nt, Artificial Sequence
  Description of Artificial Sequence: Synthetic oligonucleotide
  Sense strand starting at position 3180 of SEQ ID NO: 1243279
uuaauuaagugagucaucu

SEQ ID NO: 1406187 - RNA, 19 nt, Artificial Sequence
  Description of Artificial Sequence: Synthetic oligonucleotide
  Antisense strand to SEQ ID NO: 1406186
agaugacucacuuaauuaa

SEQ ID NO: 1406188 - RNA, 19 nt, Artificial Sequence
  Description of Artificial Sequence: Synthetic oligonucleotide
  Sense strand starting at position 3191 of SEQ ID NO: 1243279
agucaucuuccguggcaga

SEQ ID NO: 1406189 - RNA, 19 nt, Artificial Sequence
  Description of Artificial Sequence: Synthetic oligonucleotide
  Antisense strand to SEQ ID NO: 1406188
ucugccacggaagaugacu

SEQ ID NO: 1406190 - RNA, 19 nt, Artificial Sequence
  Description of Artificial Sequence: Synthetic oligonucleotide
  Sense strand starting at position 3204 of SEQ ID NO: 1243279
ggcagaaucccaggguaca

SEQ ID NO: 1406191 - RNA, 19 nt, Artificial Sequence
  Description of Artificial Sequence: Synthetic oligonucleotide
  Antisense strand to SEQ ID NO: 1406190
uguacccugggauucugcc

SEQ ID NO: 1406192 - RNA, 19 nt, Artificial Sequence
  Description of Artificial Sequence: Synthetic oligonucleotide
  Sense strand starting at position 3205 of SEQ ID NO: 1243279
gcagaaucccaggguacau

SEQ ID NO: 1406193 - RNA, 19 nt, Artificial Sequence
  Description of Artificial Sequence: Synthetic oligonucleotide
  Antisense strand to SEQ ID NO: 1406192
auguacccugggauucugc

SEQ ID NO: 1406194 - RNA, 19 nt, Artificial Sequence
  Description of Artificial Sequence: Synthetic oligonucleotide
  Sense strand starting at position 3238 of SEQ ID NO: 1243279
cgaggcuggcauuaggaaa

SEQ ID NO: 1406195 - RNA, 19 nt, Artificial Sequence
  Description of Artificial Sequence: Synthetic oligonucleotide
  Antisense strand to SEQ ID NO: 1406194
uuuccuaaugccagccucg

SEQ ID NO: 1406196 - RNA, 19 nt, Artificial Sequence
  Description of Artificial Sequence: Synthetic oligonucleotide
  Sense strand starting at position 3312 of SEQ ID NO: 1243279
guacguguucaugaggaag

SEQ ID NO: 1406197 - RNA, 19 nt, Artificial Sequence
  Description of Artificial Sequence: Synthetic oligonucleotide
  Antisense strand to SEQ ID NO: 1406196
cuuccucaugaacacguac

SEQ ID NO: 1406198 - RNA, 19 nt, Artificial Sequence
  Description of Artificial Sequence: Synthetic oligonucleotide
  Sense strand starting at position 3315 of SEQ ID NO: 1243279
cguguucaugaggaagaua

SEQ ID NO: 1406199 - RNA, 19 nt, Artificial Sequence
  Description of Artificial Sequence: Synthetic oligonucleotide
  Antisense strand to SEQ ID NO: 1406198
uaucuuccucaugaacacg

SEQ ID NO: 1406200 - RNA, 19 nt, Artificial Sequence
  Description of Artificial Sequence: Synthetic oligonucleotide
  Sense strand starting at position 3390 of SEQ ID NO: 1243279
augccuucggccggauaaa

SEQ ID NO: 1406201 - RNA, 19 nt, Artificial Sequence
  Description of Artificial Sequence: Synthetic oligonucleotide
  Antisense strand to SEQ ID NO: 1406200
uuuauccggccgaaggcau

SEQ ID NO: 1406202 - RNA, 19 nt, Artificial Sequence
  Description of Artificial Sequence: Synthetic oligonucleotide
  Sense strand starting at position 3422 of SEQ ID NO: 1243279
gugauagugaugugucaac

SEQ ID NO: 1406203 - RNA, 19 nt, Artificial Sequence
  Description of Artificial Sequence: Synthetic oligonucleotide
  Antisense strand to SEQ ID NO: 1406202
guugacacaucacuaucac

SEQ ID NO: 1406204 - RNA, 19 nt, Artificial Sequence
  Description of Artificial Sequence: Synthetic oligonucleotide
  Sense strand starting at position 3433 of SEQ ID NO: 1243279
gugucaaccuuucuaaaua

SEQ ID NO: 1406205 - RNA, 19 nt, Artificial Sequence
  Description of Artificial Sequence: Synthetic oligonucleotide
  Antisense strand to SEQ ID NO: 1406204
uauuuagaaagguugacac

SEQ ID NO: 1406206 - RNA, 19 nt, Artificial Sequence
  Description of Artificial Sequence: Synthetic oligonucleotide
  Sense strand starting at position 3599 of SEQ ID NO: 1243279
gcugguguccuccauggaa

SEQ ID NO: 1406207 - RNA, 19 nt, Artificial Sequence
  Description of Artificial Sequence: Synthetic oligonucleotide
  Antisense strand to SEQ ID NO: 1406206
uuccauggaggacaccagc

SEQ ID NO: 1406208 - RNA, 19 nt, Artificial Sequence
  Description of Artificial Sequence: Synthetic oligonucleotide
  Sense strand starting at position 3655 of SEQ ID NO: 1243279
guuagaggcuguucaugaa

SEQ ID NO: 1406209 - RNA, 19 nt, Artificial Sequence
  Description of Artificial Sequence: Synthetic oligonucleotide
  Antisense strand to SEQ ID NO: 1406208
uucaugaacagccucuaac

SEQ ID NO: 1406210 - RNA, 19 nt, Artificial Sequence
  Description of Artificial Sequence: Synthetic oligonucleotide
  Sense strand starting at position 122 of SEQ ID NO: 1243280
aagauuugcugaggacaag

SEQ ID NO: 1406211 - RNA, 19 nt, Artificial Sequence
  Description of Artificial Sequence: Synthetic oligonucleotide
  Antisense strand to SEQ ID NO: 1406210
cuuguccucagcaaaucuu

SEQ ID NO: 1406212 - RNA, 19 nt, Artificial Sequence
  Description of Artificial Sequence: Synthetic oligonucleotide
  Sense strand starting at position 144 of SEQ ID NO: 1243280
gcaccucagcacgaggaau

SEQ ID NO: 1406213 - RNA, 19 nt, Artificial Sequence
  Description of Artificial Sequence: Synthetic oligonucleotide
  Antisense strand to SEQ ID NO: 1406212
auuccucgugcugaggugc

SEQ ID NO: 1406214 - RNA, 19 nt, Artificial Sequence
  Description of Artificial Sequence: Synthetic oligonucleotide
  Sense strand starting at position 388 of SEQ ID NO: 1243280
aggauauggucccucggua

SEQ ID NO: 1406215 - RNA, 19 nt, Artificial Sequence
  Description of Artificial Sequence: Synthetic oligonucleotide
  Antisense strand to SEQ ID NO: 1406214
uaccgagggaccauauccu

SEQ ID NO: 1406216 - RNA, 19 nt, Artificial Sequence
  Description of Artificial Sequence: Synthetic oligonucleotide
  Sense strand starting at position 859 of SEQ ID NO: 1243280
agcguaugccucugaaagg

SEQ ID NO: 1406217 - RNA, 19 nt, Artificial Sequence
  Description of Artificial Sequence: Synthetic oligonucleotide
  Antisense strand to SEQ ID NO: 1406216
ccuuucagaggcauacgcu

SEQ ID NO: 1406218 - RNA, 19 nt, Artificial Sequence
  Description of Artificial Sequence: Synthetic oligonucleotide
  Sense strand starting at position 1019 of SEQ ID NO: 1243280
cuggguaccuccuaagaga

SEQ ID NO: 1406219 - RNA, 19 nt, Artificial Sequence
  Description of Artificial Sequence: Synthetic oligonucleotide
  Antisense strand to SEQ ID NO: 1406218
ucucuuaggagguacccag

SEQ ID NO: 1406220 - RNA, 19 nt, Artificial Sequence
  Description of Artificial Sequence: Synthetic oligonucleotide
  Sense strand starting at position 1022 of SEQ ID NO: 1243280
gguaccuccuaagagacuu

SEQ ID NO: 1406221 - RNA, 19 nt, Artificial Sequence
  Description of Artificial Sequence: Synthetic oligonucleotide
  Antisense strand to SEQ ID NO: 1406220
aagucucuuaggagguacc

SEQ ID NO: 1406222 - RNA, 19 nt, Artificial Sequence
  Description of Artificial Sequence: Synthetic oligonucleotide
  Sense strand starting at position 1090 of SEQ ID NO: 1243280
ccagcaaggcucgaggaau

SEQ ID NO: 1406223 - RNA, 19 nt, Artificial Sequence
  Description of Artificial Sequence: Synthetic oligonucleotide
  Antisense strand to SEQ ID NO: 1406222
auuccucgagccuugcugg

SEQ ID NO: 1406224 - RNA, 19 nt, Artificial Sequence
  Description of Artificial Sequence: Synthetic oligonucleotide
  Sense strand starting at position 1205 of SEQ ID NO: 1243280
cgaaaccugugcuaccaaa

SEQ ID NO: 1406225 - RNA, 19 nt, Artificial Sequence
  Description of Artificial Sequence: Synthetic oligonucleotide
  Antisense strand to SEQ ID NO: 1406224
uuugguagcacagguuucg

SEQ ID NO: 1406226 - RNA, 19 nt, Artificial Sequence
  Description of Artificial Sequence: Synthetic oligonucleotide
  Sense strand starting at position 2953 of SEQ ID NO: 1243280
ugguguuucuuugggagcu

SEQ ID NO: 1406227 - RNA, 19 nt, Artificial Sequence
  Description of Artificial Sequence: Synthetic oligonucleotide
  Antisense strand to SEQ ID NO: 1406226
agcucccaaagaaacacca

SEQ ID NO: 1406228 - RNA, 19 nt, Artificial Sequence
  Description of Artificial Sequence: Synthetic oligonucleotide
  Sense strand starting at position 3091 of SEQ ID NO: 1243280
gggucagaggccugagaaa

SEQ ID NO: 1406229 - RNA, 19 nt, Artificial Sequence
  Description of Artificial Sequence: Synthetic oligonucleotide
  Antisense strand to SEQ ID NO: 1406228
uuucucaggccucugaccc

SEQ ID NO: 1406230 - RNA, 19 nt, Artificial Sequence
  Description of Artificial Sequence: Synthetic oligonucleotide
  Sense strand starting at position 3134 of SEQ ID NO: 1243280
cagagugauuccucgagag

SEQ ID NO: 1406231 - RNA, 19 nt, Artificial Sequence
  Description of Artificial Sequence: Synthetic oligonucleotide
  Antisense strand to SEQ ID NO: 1406230
cucucgaggaaucacucug

SEQ ID NO: 1406232 - RNA, 19 nt, Artificial Sequence
  Description of Artificial Sequence: Synthetic oligonucleotide
  Sense strand starting at position 3222 of SEQ ID NO: 1243280
aaaguuauccugcaaggug

SEQ ID NO: 1406233 - RNA, 19 nt, Artificial Sequence
  Description of Artificial Sequence: Synthetic oligonucleotide
  Antisense strand to SEQ ID NO: 1406232
caccuugcaggauaacuuu

SEQ ID NO: 1406234 - RNA, 19 nt, Artificial Sequence
  Description of Artificial Sequence: Synthetic oligonucleotide
  Sense strand starting at position 3330 of SEQ ID NO: 1243280
aggauuuguuccugugauc

SEQ ID NO: 1406235 - RNA, 19 nt, Artificial Sequence
  Description of Artificial Sequence: Synthetic oligonucleotide
  Antisense strand to SEQ ID NO: 1406234
gaucacaggaacaaauccu

SEQ ID NO: 1406236 - RNA, 19 nt, Artificial Sequence
  Description of Artificial Sequence: Synthetic oligonucleotide
  Sense strand starting at position 3379 of SEQ ID NO: 1243280
ggcagaaaucccuguagac

SEQ ID NO: 1406237 - RNA, 19 nt, Artificial Sequence
  Description of Artificial Sequence: Synthetic oligonucleotide
  Antisense strand to SEQ ID NO: 1406236
gucuacagggauuucugcc

SEQ ID NO: 1406238 - RNA, 19 nt, Artificial Sequence
  Description of Artificial Sequence: Synthetic oligonucleotide
  Sense strand starting at position 3739 of SEQ ID NO: 1243280
ggaggaguugggugcaagu

SEQ ID NO: 1406239 - RNA, 19 nt, Artificial Sequence
  Description of Artificial Sequence: Synthetic oligonucleotide
  Antisense strand to SEQ ID NO: 1406238
acuugcacccaacuccucc

SEQ ID NO: 1406240 - RNA, 19 nt, Artificial Sequence
  Description of Artificial Sequence: Synthetic oligonucleotide
  Sense strand starting at position 3926 of SEQ ID NO: 1243280
gucucugguuucucuugaa

SEQ ID NO: 1406241 - RNA, 19 nt, Artificial Sequence
  Description of Artificial Sequence: Synthetic oligonucleotide
  Antisense strand to SEQ ID NO: 1406240
uucaagagaaaccagagac

SEQ ID NO: 1406242 - RNA, 19 nt, Artificial Sequence
  Description of Artificial Sequence: Synthetic oligonucleotide
  Sense strand starting at position 808 of SEQ ID NO: 1243281
aggcguuccugggaacguu

SEQ ID NO: 1406243 - RNA, 19 nt, Artificial Sequence
  Description of Artificial Sequence: Synthetic oligonucleotide
  Antisense strand to SEQ ID NO: 1406242
aacguucccaggaacgccu

SEQ ID NO: 1406244 - RNA, 19 nt, Artificial Sequence
  Description of Artificial Sequence: Synthetic oligonucleotide
  Sense strand starting at position 916 of SEQ ID NO: 1243281
gggccuuaccguuacugua

SEQ ID NO: 1406245 - RNA, 19 nt, Artificial Sequence
  Description of Artificial Sequence: Synthetic oligonucleotide
  Antisense strand to SEQ ID NO: 1406244
uacaguaacgguaaggccc

SEQ ID NO: 1406246 - RNA, 19 nt, Artificial Sequence
  Description of Artificial Sequence: Synthetic oligonucleotide
  Sense strand starting at position 2110 of SEQ ID NO: 1243281
accagugagucugcaaagu

SEQ ID NO: 1406247 - RNA, 19 nt, Artificial Sequence
  Description of Artificial Sequence: Synthetic oligonucleotide
  Antisense strand to SEQ ID NO: 1406246
acuuugcagacucacuggu

SEQ ID NO: 1406248 - RNA, 19 nt, Artificial Sequence
  Description of Artificial Sequence: Synthetic oligonucleotide
  Sense strand starting at position 2120 of SEQ ID NO: 1243281
cugcaaagucgcugagguu

SEQ ID NO: 1406249 - RNA, 19 nt, Artificial Sequence
  Description of Artificial Sequence: Synthetic oligonucleotide
  Antisense strand to SEQ ID NO: 1406248
aaccucagcgacuuugcag

SEQ ID NO: 1406250 - RNA, 19 nt, Artificial Sequence
  Description of Artificial Sequence: Synthetic oligonucleotide
  Sense strand starting at position 2471 of SEQ ID NO: 1243281
ugccucucucggugaaguu

SEQ ID NO: 1406251 - RNA, 19 nt, Artificial Sequence
  Description of Artificial Sequence: Synthetic oligonucleotide
  Antisense strand to SEQ ID NO: 1406250
aacuucaccgagagaggca

SEQ ID NO: 1406252 - RNA, 19 nt, Artificial Sequence
  Description of Artificial Sequence: Synthetic oligonucleotide
  Sense strand starting at position 2472 of SEQ ID NO: 1243281
gccucucucggugaaguua

SEQ ID NO: 1406253 - RNA, 19 nt, Artificial Sequence
  Description of Artificial Sequence: Synthetic oligonucleotide
  Antisense strand to SEQ ID NO: 1406252
uaacuucaccgagagaggc

SEQ ID NO: 1406254 - RNA, 19 nt, Artificial Sequence
  Description of Artificial Sequence: Synthetic oligonucleotide
  Sense strand starting at position 2483 of SEQ ID NO: 1243281
ugaaguuacucacucggaa

SEQ ID NO: 1406255 - RNA, 19 nt, Artificial Sequence
  Description of Artificial Sequence: Synthetic oligonucleotide
  Antisense strand to SEQ ID NO: 1406254
uuccgagugaguaacuuca

SEQ ID NO: 1406256 - RNA, 19 nt, Artificial Sequence
  Description of Artificial Sequence: Synthetic oligonucleotide
  Sense strand starting at position 2501 of SEQ ID NO: 1243281
acgggugagcuuugugaua

SEQ ID NO: 1406257 - RNA, 19 nt, Artificial Sequence
  Description of Artificial Sequence: Synthetic oligonucleotide
  Antisense strand to SEQ ID NO: 1406256
uaucacaaagcucacccgu

SEQ ID NO: 1406258 - RNA, 19 nt, Artificial Sequence
  Description of Artificial Sequence: Synthetic oligonucleotide
  Sense strand starting at position 2503 of SEQ ID NO: 1243281
gggugagcuuugugauacg

SEQ ID NO: 1406259 - RNA, 19 nt, Artificial Sequence
  Description of Artificial Sequence: Synthetic oligonucleotide
  Antisense strand to SEQ ID NO: 1406258
cguaucacaaagcucaccc

SEQ ID NO: 1406260 - RNA, 19 nt, Artificial Sequence
  Description of Artificial Sequence: Synthetic oligonucleotide
  Sense strand starting at position 2514 of SEQ ID NO: 1243281
gugauacgugcucugcguu

SEQ ID NO: 1406261 - RNA, 19 nt, Artificial Sequence
  Description of Artificial Sequence: Synthetic oligonucleotide
  Antisense strand to SEQ ID NO: 1406260
aacgcagagcacguaucac

SEQ ID NO: 1406262 - RNA, 19 nt, Artificial Sequence
  Description of Artificial Sequence: Synthetic oligonucleotide
  Sense strand starting at position 2519 of SEQ ID NO: 1243281
acgugcucugcguucagua

SEQ ID NO: 1406263 - RNA, 19 nt, Artificial Sequence
  Description of Artificial Sequence: Synthetic oligonucleotide
  Antisense strand to SEQ ID NO: 1406262
uacugaacgcagagcacgu

SEQ ID NO: 1406264 - RNA, 19 nt, Artificial Sequence
  Description of Artificial Sequence: Synthetic oligonucleotide
  Sense strand starting at position 2528 of SEQ ID NO: 1243281
gcguucaguagcgcuguua

SEQ ID NO: 1406265 - RNA, 19 nt, Artificial Sequence
  Description of Artificial Sequence: Synthetic oligonucleotide
  Antisense strand to SEQ ID NO: 1406264
uaacagcgcuacugaacgc

SEQ ID NO: 1406266 - RNA, 19 nt, Artificial Sequence
  Description of Artificial Sequence: Synthetic oligonucleotide
  Sense strand starting at position 2532 of SEQ ID NO: 1243281
ucaguagcgcuguuacagu

SEQ ID NO: 1406267 - RNA, 19 nt, Artificial Sequence
  Description of Artificial Sequence: Synthetic oligonucleotide
  Antisense strand to SEQ ID NO: 1406266
acuguaacagcgcuacuga

SEQ ID NO: 1406268 - RNA, 19 nt, Artificial Sequence
  Description of Artificial Sequence: Synthetic oligonucleotide
  Sense strand starting at position 2537 of SEQ ID NO: 1243281
agcgcuguuacagucguaa

SEQ ID NO: 1406269 - RNA, 19 nt, Artificial Sequence
  Description of Artificial Sequence: Synthetic oligonucleotide
  Antisense strand to SEQ ID NO: 1406268
uuacgacuguaacagcgcu

SEQ ID NO: 1406270 - RNA, 19 nt, Artificial Sequence
  Description of Artificial Sequence: Synthetic oligonucleotide
  Sense strand starting at position 2539 of SEQ ID NO: 1243281
cgcuguuacagucguaagu

SEQ ID NO: 1406271 - RNA, 19 nt, Artificial Sequence
  Description of Artificial Sequence: Synthetic oligonucleotide
  Antisense strand to SEQ ID NO: 1406270
acuuacgacuguaacagcg

SEQ ID NO: 1406272 - RNA, 19 nt, Artificial Sequence
  Description of Artificial Sequence: Synthetic oligonucleotide
  Sense strand starting at position 2540 of SEQ ID NO: 1243281
gcuguuacagucguaagua

SEQ ID NO: 1406273 - RNA, 19 nt, Artificial Sequence
  Description of Artificial Sequence: Synthetic oligonucleotide
  Antisense strand to SEQ ID NO: 1406272
uacuuacgacuguaacagc

SEQ ID NO: 1406274 - RNA, 19 nt, Artificial Sequence
  Description of Artificial Sequence: Synthetic oligonucleotide
  Sense strand starting at position 2541 of SEQ ID NO: 1243281
cuguuacagucguaaguaa

SEQ ID NO: 1406275 - RNA, 19 nt, Artificial Sequence
  Description of Artificial Sequence: Synthetic oligonucleotide
  Antisense strand to SEQ ID NO: 1406274
uuacuuacgacuguaacag

SEQ ID NO: 1406276 - RNA, 19 nt, Artificial Sequence
  Description of Artificial Sequence: Synthetic oligonucleotide
  Sense strand starting at position 2776 of SEQ ID NO: 1243281
gaagacauggccugacuaa

SEQ ID NO: 1406277 - RNA, 19 nt, Artificial Sequence
  Description of Artificial Sequence: Synthetic oligonucleotide
  Antisense strand to SEQ ID NO: 1406276
uuagucaggccaugucuuc

SEQ ID NO: 1406278 - RNA, 19 nt, Artificial Sequence
  Description of Artificial Sequence: Synthetic oligonucleotide
  Sense strand starting at position 3019 of SEQ ID NO: 1243281
aggcauuaacccggaaaca

SEQ ID NO: 1406279 - RNA, 19 nt, Artificial Sequence
  Description of Artificial Sequence: Synthetic oligonucleotide
  Antisense strand to SEQ ID NO: 1406278
uguuuccggguuaaugccu

SEQ ID NO: 1406280 - RNA, 19 nt, Artificial Sequence
  Description of Artificial Sequence: Synthetic oligonucleotide
  Sense strand starting at position 3072 of SEQ ID NO: 1243281
aggucauugugcccagacu

SEQ ID NO: 1406281 - RNA, 19 nt, Artificial Sequence
  Description of Artificial Sequence: Synthetic oligonucleotide
  Antisense strand to SEQ ID NO: 1406280
agucugggcacaaugaccu

SEQ ID NO: 1406282 - RNA, 19 nt, Artificial Sequence
  Description of Artificial Sequence: Synthetic oligonucleotide
  Sense strand starting at position 3140 of SEQ ID NO: 1243281
gcaccaaagaugugauguu

SEQ ID NO: 1406283 - RNA, 19 nt, Artificial Sequence
  Description of Artificial Sequence: Synthetic oligonucleotide
  Antisense strand to SEQ ID NO: 1406282
aacaucacaucuuuggugc

SEQ ID NO: 1406284 - RNA, 19 nt, Artificial Sequence
  Description of Artificial Sequence: Synthetic oligonucleotide
  Sense strand starting at position 3141 of SEQ ID NO: 1243281
caccaaagaugugauguuu

SEQ ID NO: 1406285 - RNA, 19 nt, Artificial Sequence
  Description of Artificial Sequence: Synthetic oligonucleotide
  Antisense strand to SEQ ID NO: 1406284
aaacaucacaucuuuggug

SEQ ID NO: 1406286 - RNA, 19 nt, Artificial Sequence
  Description of Artificial Sequence: Synthetic oligonucleotide
  Sense strand starting at position 3153 of SEQ ID NO: 1243281
gauguuuccuccucgguuu

SEQ ID NO: 1406287 - RNA, 19 nt, Artificial Sequence
  Description of Artificial Sequence: Synthetic oligonucleotide
  Antisense strand to SEQ ID NO: 1406286
aaaccgaggaggaaacauc

SEQ ID NO: 1406288 - RNA, 19 nt, Artificial Sequence
  Description of Artificial Sequence: Synthetic oligonucleotide
  Sense strand starting at position 3215 of SEQ ID NO: 1243281
gucuccuccuuuccugaga

SEQ ID NO: 1406289 - RNA, 19 nt, Artificial Sequence
  Description of Artificial Sequence: Synthetic oligonucleotide
  Antisense strand to SEQ ID NO: 1406288
ucucaggaaaggaggagac

SEQ ID NO: 1406290 - RNA, 19 nt, Artificial Sequence
  Description of Artificial Sequence: Synthetic oligonucleotide
  Sense strand starting at position 3340 of SEQ ID NO: 1243281
uggccaacaucgugauaac

SEQ ID NO: 1406291 - RNA, 19 nt, Artificial Sequence
  Description of Artificial Sequence: Synthetic oligonucleotide
  Antisense strand to SEQ ID NO: 1406290
guuaucacgauguuggcca

SEQ ID NO: 1406292 - RNA, 19 nt, Artificial Sequence
  Description of Artificial Sequence: Synthetic oligonucleotide
  Sense strand starting at position 3809 of SEQ ID NO: 1243281
gugagauccuuggaaagcu

SEQ ID NO: 1406293 - RNA, 19 nt, Artificial Sequence
  Description of Artificial Sequence: Synthetic oligonucleotide
  Antisense strand to SEQ ID NO: 1406292
agcuuuccaaggaucucac

SEQ ID NO: 1406294 - RNA, 19 nt, Artificial Sequence
  Description of Artificial Sequence: Synthetic oligonucleotide
  Sense strand starting at position 1120 of SEQ ID NO: 1243282
aggcguuccugggaacguu

SEQ ID NO: 1406295 - RNA, 19 nt, Artificial Sequence
  Description of Artificial Sequence: Synthetic oligonucleotide
  Antisense strand to SEQ ID NO: 1406294
aacguucccaggaacgccu

SEQ ID NO: 1406296 - RNA, 19 nt, Artificial Sequence
  Description of Artificial Sequence: Synthetic oligonucleotide
  Sense strand starting at position 1228 of SEQ ID NO: 1243282
gggccuuaccguuacugua

SEQ ID NO: 1406297 - RNA, 19 nt, Artificial Sequence
  Description of Artificial Sequence: Synthetic oligonucleotide
  Antisense strand to SEQ ID NO: 1406296
uacaguaacgguaaggccc

SEQ ID NO: 1406298 - RNA, 19 nt, Artificial Sequence
  Description of Artificial Sequence: Synthetic oligonucleotide
  Sense strand starting at position 2422 of SEQ ID NO: 1243282
accagugagucugcaaagu

SEQ ID NO: 1406299 - RNA, 19 nt, Artificial Sequence
  Description of Artificial Sequence: Synthetic oligonucleotide
  Antisense strand to SEQ ID NO: 1406298
acuuugcagacucacuggu

SEQ ID NO: 1406300 - RNA, 19 nt, Artificial Sequence
  Description of Artificial Sequence: Synthetic oligonucleotide
  Sense strand starting at position 2432 of SEQ ID NO: 1243282
cugcaaagucgcugagguu

SEQ ID NO: 1406301 - RNA, 19 nt, Artificial Sequence
  Description of Artificial Sequence: Synthetic oligonucleotide
  Antisense strand to SEQ ID NO: 1406300
aaccucagcgacuuugcag

SEQ ID NO: 1406302 - RNA, 19 nt, Artificial Sequence
  Description of Artificial Sequence: Synthetic oligonucleotide
  Sense strand starting at position 2783 of SEQ ID NO: 1243282
ugccucucucggugaaguu

SEQ ID NO: 1406303 - RNA, 19 nt, Artificial Sequence
  Description of Artificial Sequence: Synthetic oligonucleotide
  Antisense strand to SEQ ID NO: 1406302
aacuucaccgagagaggca

SEQ ID NO: 1406304 - RNA, 19 nt, Artificial Sequence
  Description of Artificial Sequence: Synthetic oligonucleotide
  Sense strand starting at position 2784 of SEQ ID NO: 1243282
gccucucucggugaaguua

SEQ ID NO: 1406305 - RNA, 19 nt, Artificial Sequence
  Description of Artificial Sequence: Synthetic oligonucleotide
  Antisense strand to SEQ ID NO: 1406304
uaacuucaccgagagaggc

SEQ ID NO: 1406306 - RNA, 19 nt, Artificial Sequence
  Description of Artificial Sequence: Synthetic oligonucleotide
  Sense strand starting at position 2795 of SEQ ID NO: 1243282
ugaaguuacucacucggaa

SEQ ID NO: 1406307 - RNA, 19 nt, Artificial Sequence
  Description of Artificial Sequence: Synthetic oligonucleotide
  Antisense strand to SEQ ID NO: 1406306
uuccgagugaguaacuuca

SEQ ID NO: 1406308 - RNA, 19 nt, Artificial Sequence
  Description of Artificial Sequence: Synthetic oligonucleotide
  Sense strand starting at position 2813 of SEQ ID NO: 1243282
acgggugagcuuugugaua

SEQ ID NO: 1406309 - RNA, 19 nt, Artificial Sequence
  Description of Artificial Sequence: Synthetic oligonucleotide
  Antisense strand to SEQ ID NO: 1406308
uaucacaaagcucacccgu

SEQ ID NO: 1406310 - RNA, 19 nt, Artificial Sequence
  Description of Artificial Sequence: Synthetic oligonucleotide
  Sense strand starting at position 2815 of SEQ ID NO: 1243282
gggugagcuuugugauacg

SEQ ID NO: 1406311 - RNA, 19 nt, Artificial Sequence
  Description of Artificial Sequence: Synthetic oligonucleotide
  Antisense strand to SEQ ID NO: 1406310
cguaucacaaagcucaccc

SEQ ID NO: 1406312 - RNA, 19 nt, Artificial Sequence
  Description of Artificial Sequence: Synthetic oligonucleotide
  Sense strand starting at position 2826 of SEQ ID NO: 1243282
gugauacgugcucugcguu

SEQ ID NO: 1406313 - RNA, 19 nt, Artificial Sequence
  Description of Artificial Sequence: Synthetic oligonucleotide
  Antisense strand to SEQ ID NO: 1406312
aacgcagagcacguaucac

SEQ ID NO: 1406314 - RNA, 19 nt, Artificial Sequence
  Description of Artificial Sequence: Synthetic oligonucleotide
  Sense strand starting at position 2831 of SEQ ID NO: 1243282
acgugcucugcguucagua

SEQ ID NO: 1406315 - RNA, 19 nt, Artificial Sequence
  Description of Artificial Sequence: Synthetic oligonucleotide
  Antisense strand to SEQ ID NO: 1406314
uacugaacgcagagcacgu

SEQ ID NO: 1406316 - RNA, 19 nt, Artificial Sequence
  Description of Artificial Sequence: Synthetic oligonucleotide
  Sense strand starting at position 2840 of SEQ ID NO: 1243282
gcguucaguagcgcuguua

SEQ ID NO: 1406317 - RNA, 19 nt, Artificial Sequence
  Description of Artificial Sequence: Synthetic oligonucleotide
  Antisense strand to SEQ ID NO: 1406316
uaacagcgcuacugaacgc

SEQ ID NO: 1406318 - RNA, 19 nt, Artificial Sequence
  Description of Artificial Sequence: Synthetic oligonucleotide
  Sense strand starting at position 2844 of SEQ ID NO: 1243282
ucaguagcgcuguuacagu

SEQ ID NO: 1406319 - RNA, 19 nt, Artificial Sequence
  Description of Artificial Sequence: Synthetic oligonucleotide
  Antisense strand to SEQ ID NO: 1406318
acuguaacagcgcuacuga

SEQ ID NO: 1406320 - RNA, 19 nt, Artificial Sequence
  Description of Artificial Sequence: Synthetic oligonucleotide
  Sense strand starting at position 2849 of SEQ ID NO: 1243282
agcgcuguuacagucguaa

SEQ ID NO: 1406321 - RNA, 19 nt, Artificial Sequence
  Description of Artificial Sequence: Synthetic oligonucleotide
  Antisense strand to SEQ ID NO: 1406320
uuacgacuguaacagcgcu

SEQ ID NO: 1406322 - RNA, 19 nt, Artificial Sequence
  Description of Artificial Sequence: Synthetic oligonucleotide
  Sense strand starting at position 2851 of SEQ ID NO: 1243282
cgcuguuacagucguaagu

SEQ ID NO: 1406323 - RNA, 19 nt, Artificial Sequence
  Description of Artificial Sequence: Synthetic oligonucleotide
  Antisense strand to SEQ ID NO: 1406322
acuuacgacuguaacagcg

SEQ ID NO: 1406324 - RNA, 19 nt, Artificial Sequence
  Description of Artificial Sequence: Synthetic oligonucleotide
  Sense strand starting at position 2852 of SEQ ID NO: 1243282
gcuguuacagucguaagua

SEQ ID NO: 1406325 - RNA, 19 nt, Artificial Sequence
  Description of Artificial Sequence: Synthetic oligonucleotide
  Antisense strand to SEQ ID NO: 1406324
uacuuacgacuguaacagc

SEQ ID NO: 1406326 - RNA, 19 nt, Artificial Sequence
  Description of Artificial Sequence: Synthetic oligonucleotide
  Sense strand starting at position 2853 of SEQ ID NO: 1243282
cuguuacagucguaaguaa

SEQ ID NO: 1406327 - RNA, 19 nt, Artificial Sequence
  Description of Artificial Sequence: Synthetic oligonucleotide
  Antisense strand to SEQ ID NO: 1406326
uuacuuacgacuguaacag

SEQ ID NO: 1406328 - RNA, 19 nt, Artificial Sequence
  Description of Artificial Sequence: Synthetic oligonucleotide
  Sense strand starting at position 3088 of SEQ ID NO: 1243282
gaagacauggccugacuaa

SEQ ID NO: 1406329 - RNA, 19 nt, Artificial Sequence
  Description of Artificial Sequence: Synthetic oligonucleotide
  Antisense strand to SEQ ID NO: 1406328
uuagucaggccaugucuuc

SEQ ID NO: 1406330 - RNA, 19 nt, Artificial Sequence
  Description of Artificial Sequence: Synthetic oligonucleotide
  Sense strand starting at position 3331 of SEQ ID NO: 1243282
aggcauuaacccggaaaca

SEQ ID NO: 1406331 - RNA, 19 nt, Artificial Sequence
  Description of Artificial Sequence: Synthetic oligonucleotide
  Antisense strand to SEQ ID NO: 1406330
uguuuccggguuaaugccu

SEQ ID NO: 1406332 - RNA, 19 nt, Artificial Sequence
  Description of Artificial Sequence: Synthetic oligonucleotide
  Sense strand starting at position 3384 of SEQ ID NO: 1243282
aggucauugugcccagacu

SEQ ID NO: 1406333 - RNA, 19 nt, Artificial Sequence
  Description of Artificial Sequence: Synthetic oligonucleotide
  Antisense strand to SEQ ID NO: 1406332
agucugggcacaaugaccu

SEQ ID NO: 1406334 - RNA, 19 nt, Artificial Sequence
  Description of Artificial Sequence: Synthetic oligonucleotide
  Sense strand starting at position 3452 of SEQ ID NO: 1243282
gcaccaaagaugugauguu

SEQ ID NO: 1406335 - RNA, 19 nt, Artificial Sequence
  Description of Artificial Sequence: Synthetic oligonucleotide
  Antisense strand to SEQ ID NO: 1406334
aacaucacaucuuuggugc

SEQ ID NO: 1406336 - RNA, 19 nt, Artificial Sequence
  Description of Artificial Sequence: Synthetic oligonucleotide
  Sense strand starting at position 3453 of SEQ ID NO: 1243282
caccaaagaugugauguuu

SEQ ID NO: 1406337 - RNA, 19 nt, Artificial Sequence
  Description of Artificial Sequence: Synthetic oligonucleotide
  Antisense strand to SEQ ID NO: 1406336
aaacaucacaucuuuggug

SEQ ID NO: 1406338 - RNA, 19 nt, Artificial Sequence
  Description of Artificial Sequence: Synthetic oligonucleotide
  Sense strand starting at position 3465 of SEQ ID NO: 1243282
gauguuuccuccucgguuu

SEQ ID NO: 1406339 - RNA, 19 nt, Artificial Sequence
  Description of Artificial Sequence: Synthetic oligonucleotide
  Antisense strand to SEQ ID NO: 1406338
aaaccgaggaggaaacauc

SEQ ID NO: 1406340 - RNA, 19 nt, Artificial Sequence
  Description of Artificial Sequence: Synthetic oligonucleotide
  Sense strand starting at position 3527 of SEQ ID NO: 1243282
gucuccuccuuuccugaga

SEQ ID NO: 1406341 - RNA, 19 nt, Artificial Sequence
  Description of Artificial Sequence: Synthetic oligonucleotide
  Antisense strand to SEQ ID NO: 1406340
ucucaggaaaggaggagac

SEQ ID NO: 1406342 - RNA, 19 nt, Artificial Sequence
  Description of Artificial Sequence: Synthetic oligonucleotide
  Sense strand starting at position 3652 of SEQ ID NO: 1243282
uggccaacaucgugauaac

SEQ ID NO: 1406343 - RNA, 19 nt, Artificial Sequence
  Description of Artificial Sequence: Synthetic oligonucleotide
  Antisense strand to SEQ ID NO: 1406342
guuaucacgauguuggcca

SEQ ID NO: 1406344 - RNA, 19 nt, Artificial Sequence
  Description of Artificial Sequence: Synthetic oligonucleotide
  Sense strand starting at position 130 of SEQ ID NO: 1243283
ccaccuaucuaguguauuu

SEQ ID NO: 1406345 - RNA, 19 nt, Artificial Sequence
  Description of Artificial Sequence: Synthetic oligonucleotide
  Antisense strand to SEQ ID NO: 1406344
aaauacacuagauaggugg

SEQ ID NO: 1406346 - RNA, 19 nt, Artificial Sequence
  Description of Artificial Sequence: Synthetic oligonucleotide
  Sense strand starting at position 1528 of SEQ ID NO: 1243283
aggcguuccugggaacguu

SEQ ID NO: 1406347 - RNA, 19 nt, Artificial Sequence
  Description of Artificial Sequence: Synthetic oligonucleotide
  Antisense strand to SEQ ID NO: 1406346
aacguucccaggaacgccu

SEQ ID NO: 1406348 - RNA, 19 nt, Artificial Sequence
  Description of Artificial Sequence: Synthetic oligonucleotide
  Sense strand starting at position 1636 of SEQ ID NO: 1243283
gggccuuaccguuacugua

SEQ ID NO: 1406349 - RNA, 19 nt, Artificial Sequence
  Description of Artificial Sequence: Synthetic oligonucleotide
  Antisense strand to SEQ ID NO: 1406348
uacaguaacgguaaggccc

SEQ ID NO: 1406350 - RNA, 19 nt, Artificial Sequence
  Description of Artificial Sequence: Synthetic oligonucleotide
  Sense strand starting at position 2830 of SEQ ID NO: 1243283
accagugagucugcaaagu

SEQ ID NO: 1406351 - RNA, 19 nt, Artificial Sequence
  Description of Artificial Sequence: Synthetic oligonucleotide
  Antisense strand to SEQ ID NO: 1406350
acuuugcagacucacuggu

SEQ ID NO: 1406352 - RNA, 19 nt, Artificial Sequence
  Description of Artificial Sequence: Synthetic oligonucleotide
  Sense strand starting at position 2840 of SEQ ID NO: 1243283
cugcaaagucgcugagguu

SEQ ID NO: 1406353 - RNA, 19 nt, Artificial Sequence
  Description of Artificial Sequence: Synthetic oligonucleotide
  Antisense strand to SEQ ID NO: 1406352
aaccucagcgacuuugcag

SEQ ID NO: 1406354 - RNA, 19 nt, Artificial Sequence
  Description of Artificial Sequence: Synthetic oligonucleotide
  Sense strand starting at position 3191 of SEQ ID NO: 1243283
ugccucucucggugaaguu

SEQ ID NO: 1406355 - RNA, 19 nt, Artificial Sequence
  Description of Artificial Sequence: Synthetic oligonucleotide
  Antisense strand to SEQ ID NO: 1406354
aacuucaccgagagaggca

SEQ ID NO: 1406356 - RNA, 19 nt, Artificial Sequence
  Description of Artificial Sequence: Synthetic oligonucleotide
  Sense strand starting at position 3192 of SEQ ID NO: 1243283
gccucucucggugaaguua

SEQ ID NO: 1406357 - RNA, 19 nt, Artificial Sequence
  Description of Artificial Sequence: Synthetic oligonucleotide
  Antisense strand to SEQ ID NO: 1406356
uaacuucaccgagagaggc

SEQ ID NO: 1406358 - RNA, 19 nt, Artificial Sequence
  Description of Artificial Sequence: Synthetic oligonucleotide
  Sense strand starting at position 3203 of SEQ ID NO: 1243283
ugaaguuacucacucggaa

SEQ ID NO: 1406359 - RNA, 19 nt, Artificial Sequence
  Description of Artificial Sequence: Synthetic oligonucleotide
  Antisense strand to SEQ ID NO: 1406358
uuccgagugaguaacuuca

SEQ ID NO: 1406360 - RNA, 19 nt, Artificial Sequence
  Description of Artificial Sequence: Synthetic oligonucleotide
  Sense strand starting at position 3221 of SEQ ID NO: 1243283
acgggugagcuuugugaua

SEQ ID NO: 1406361 - RNA, 19 nt, Artificial Sequence
  Description of Artificial Sequence: Synthetic oligonucleotide
  Antisense strand to SEQ ID NO: 1406360
uaucacaaagcucacccgu

SEQ ID NO: 1406362 - RNA, 19 nt, Artificial Sequence
  Description of Artificial Sequence: Synthetic oligonucleotide
  Sense strand starting at position 3223 of SEQ ID NO: 1243283
gggugagcuuugugauacg

SEQ ID NO: 1406363 - RNA, 19 nt, Artificial Sequence
  Description of Artificial Sequence: Synthetic oligonucleotide
  Antisense strand to SEQ ID NO: 1406362
cguaucacaaagcucaccc

SEQ ID NO: 1406364 - RNA, 19 nt, Artificial Sequence
  Description of Artificial Sequence: Synthetic oligonucleotide
  Sense strand starting at position 3234 of SEQ ID NO: 1243283
gugauacgugcucugcguu

SEQ ID NO: 1406365 - RNA, 19 nt, Artificial Sequence
  Description of Artificial Sequence: Synthetic oligonucleotide
  Antisense strand to SEQ ID NO: 1406364
aacgcagagcacguaucac

SEQ ID NO: 1406366 - RNA, 19 nt, Artificial Sequence
  Description of Artificial Sequence: Synthetic oligonucleotide
  Sense strand starting at position 3239 of SEQ ID NO: 1243283
acgugcucugcguucagua

SEQ ID NO: 1406367 - RNA, 19 nt, Artificial Sequence
  Description of Artificial Sequence: Synthetic oligonucleotide
  Antisense strand to SEQ ID NO: 1406366
uacugaacgcagagcacgu

SEQ ID NO: 1406368 - RNA, 19 nt, Artificial Sequence
  Description of Artificial Sequence: Synthetic oligonucleotide
  Sense strand starting at position 3248 of SEQ ID NO: 1243283
gcguucaguagcgcuguua

SEQ ID NO: 1406369 - RNA, 19 nt, Artificial Sequence
  Description of Artificial Sequence: Synthetic oligonucleotide
  Antisense strand to SEQ ID NO: 1406368
uaacagcgcuacugaacgc

SEQ ID NO: 1406370 - RNA, 19 nt, Artificial Sequence
  Description of Artificial Sequence: Synthetic oligonucleotide
  Sense strand starting at position 3252 of SEQ ID NO: 1243283
ucaguagcgcuguuacagu

SEQ ID NO: 1406371 - RNA, 19 nt, Artificial Sequence
  Description of Artificial Sequence: Synthetic oligonucleotide
  Antisense strand to SEQ ID NO: 1406370
acuguaacagcgcuacuga

SEQ ID NO: 1406372 - RNA, 19 nt, Artificial Sequence
  Description of Artificial Sequence: Synthetic oligonucleotide
  Sense strand starting at position 3257 of SEQ ID NO: 1243283
agcgcuguuacagucguaa

SEQ ID NO: 1406373 - RNA, 19 nt, Artificial Sequence
  Description of Artificial Sequence: Synthetic oligonucleotide
  Antisense strand to SEQ ID NO: 1406372
uuacgacuguaacagcgcu

SEQ ID NO: 1406374 - RNA, 19 nt, Artificial Sequence
  Description of Artificial Sequence: Synthetic oligonucleotide
  Sense strand starting at position 3259 of SEQ ID NO: 1243283
cgcuguuacagucguaagu

SEQ ID NO: 1406375 - RNA, 19 nt, Artificial Sequence
  Description of Artificial Sequence: Synthetic oligonucleotide
  Antisense strand to SEQ ID NO: 1406374
acuuacgacuguaacagcg

SEQ ID NO: 1406376 - RNA, 19 nt, Artificial Sequence
  Description of Artificial Sequence: Synthetic oligonucleotide
  Sense strand starting at position 3260 of SEQ ID NO: 1243283
gcuguuacagucguaagua

SEQ ID NO: 1406377 - RNA, 19 nt, Artificial Sequence
  Description of Artificial Sequence: Synthetic oligonucleotide
  Antisense strand to SEQ ID NO: 1406376
uacuuacgacuguaacagc

SEQ ID NO: 1406378 - RNA, 19 nt, Artificial Sequence
  Description of Artificial Sequence: Synthetic oligonucleotide
  Sense strand starting at position 3261 of SEQ ID NO: 1243283
cuguuacagucguaaguaa

SEQ ID NO: 1406379 - RNA, 19 nt, Artificial Sequence
  Description of Artificial Sequence: Synthetic oligonucleotide
  Antisense strand to SEQ ID NO: 1406378
uuacuuacgacuguaacag

SEQ ID NO: 1406380 - RNA, 19 nt, Artificial Sequence
  Description of Artificial Sequence: Synthetic oligonucleotide
  Sense strand starting at position 3496 of SEQ ID NO: 1243283
gaagacauggccugacuaa

SEQ ID NO: 1406381 - RNA, 19 nt, Artificial Sequence
  Description of Artificial Sequence: Synthetic oligonucleotide
  Antisense strand to SEQ ID NO: 1406380
uuagucaggccaugucuuc

SEQ ID NO: 1406382 - RNA, 19 nt, Artificial Sequence
  Description of Artificial Sequence: Synthetic oligonucleotide
  Sense strand starting at position 3739 of SEQ ID NO: 1243283
aggcauuaacccggaaaca

SEQ ID NO: 1406383 - RNA, 19 nt, Artificial Sequence
  Description of Artificial Sequence: Synthetic oligonucleotide
  Antisense strand to SEQ ID NO: 1406382
uguuuccggguuaaugccu

SEQ ID NO: 1406384 - RNA, 19 nt, Artificial Sequence
  Description of Artificial Sequence: Synthetic oligonucleotide
  Sense strand starting at position 3792 of SEQ ID NO: 1243283
aggucauugugcccagacu

SEQ ID NO: 1406385 - RNA, 19 nt, Artificial Sequence
  Description of Artificial Sequence: Synthetic oligonucleotide
  Antisense strand to SEQ ID NO: 1406384
agucugggcacaaugaccu

SEQ ID NO: 1406386 - RNA, 19 nt, Artificial Sequence
  Description of Artificial Sequence: Synthetic oligonucleotide
  Sense strand starting at position 3860 of SEQ ID NO: 1243283
gcaccaaagaugugauguu

SEQ ID NO: 1406387 - RNA, 19 nt, Artificial Sequence
  Description of Artificial Sequence: Synthetic oligonucleotide
  Antisense strand to SEQ ID NO: 1406386
aacaucacaucuuuggugc

SEQ ID NO: 1406388 - RNA, 19 nt, Artificial Sequence
  Description of Artificial Sequence: Synthetic oligonucleotide
  Sense strand starting at position 3861 of SEQ ID NO: 1243283
caccaaagaugugauguuu

SEQ ID NO: 1406389 - RNA, 19 nt, Artificial Sequence
  Description of Artificial Sequence: Synthetic oligonucleotide
  Antisense strand to SEQ ID NO: 1406388
aaacaucacaucuuuggug

SEQ ID NO: 1406390 - RNA, 19 nt, Artificial Sequence
  Description of Artificial Sequence: Synthetic oligonucleotide
  Sense strand starting at position 3873 of SEQ ID NO: 1243283
gauguuuccuccucgguuu

SEQ ID NO: 1406391 - RNA, 19 nt, Artificial Sequence
  Description of Artificial Sequence: Synthetic oligonucleotide
  Antisense strand to SEQ ID NO: 1406390
aaaccgaggaggaaacauc

SEQ ID NO: 1406392 - RNA, 19 nt, Artificial Sequence
  Description of Artificial Sequence: Synthetic oligonucleotide
  Sense strand starting at position 3935 of SEQ ID NO: 1243283
gucuccuccuuuccugaga

SEQ ID NO: 1406393 - RNA, 19 nt, Artificial Sequence
  Description of Artificial Sequence: Synthetic oligonucleotide
  Antisense strand to SEQ ID NO: 1406392
ucucaggaaaggaggagac

SEQ ID NO: 1406394 - RNA, 19 nt, Artificial Sequence
  Description of Artificial Sequence: Synthetic oligonucleotide
  Sense strand starting at position 16 of SEQ ID NO: 1243284
gagguaaguucgccagcgu

SEQ ID NO: 1406395 - RNA, 19 nt, Artificial Sequence
  Description of Artificial Sequence: Synthetic oligonucleotide
  Antisense strand to SEQ ID NO: 1406394
acgcuggcgaacuuaccuc

SEQ ID NO: 1406396 - RNA, 19 nt, Artificial Sequence
  Description of Artificial Sequence: Synthetic oligonucleotide
  Sense strand starting at position 17 of SEQ ID NO: 1243284
agguaaguucgccagcgua

SEQ ID NO: 1406397 - RNA, 19 nt, Artificial Sequence
  Description of Artificial Sequence: Synthetic oligonucleotide
  Antisense strand to SEQ ID NO: 1406396
uacgcuggcgaacuuaccu

SEQ ID NO: 1406398 - RNA, 19 nt, Artificial Sequence
  Description of Artificial Sequence: Synthetic oligonucleotide
  Sense strand starting at position 19 of SEQ ID NO: 1243284
guaaguucgccagcguaga

SEQ ID NO: 1406399 - RNA, 19 nt, Artificial Sequence
  Description of Artificial Sequence: Synthetic oligonucleotide
  Antisense strand to SEQ ID NO: 1406398
ucuacgcuggcgaacuuac

SEQ ID NO: 1406400 - RNA, 19 nt, Artificial Sequence
  Description of Artificial Sequence: Synthetic oligonucleotide
  Sense strand starting at position 20 of SEQ ID NO: 1243284
uaaguucgccagcguagau

SEQ ID NO: 1406401 - RNA, 19 nt, Artificial Sequence
  Description of Artificial Sequence: Synthetic oligonucleotide
  Antisense strand to SEQ ID NO: 1406400
aucuacgcuggcgaacuua

SEQ ID NO: 1406402 - RNA, 19 nt, Artificial Sequence
  Description of Artificial Sequence: Synthetic oligonucleotide
  Sense strand starting at position 226 of SEQ ID NO: 1243284
ccaccuaucuaguguauuu

SEQ ID NO: 1406403 - RNA, 19 nt, Artificial Sequence
  Description of Artificial Sequence: Synthetic oligonucleotide
  Antisense strand to SEQ ID NO: 1406402
aaauacacuagauaggugg

SEQ ID NO: 1406404 - RNA, 19 nt, Artificial Sequence
  Description of Artificial Sequence: Synthetic oligonucleotide
  Sense strand starting at position 1624 of SEQ ID NO: 1243284
aggcguuccugggaacguu

SEQ ID NO: 1406405 - RNA, 19 nt, Artificial Sequence
  Description of Artificial Sequence: Synthetic oligonucleotide
  Antisense strand to SEQ ID NO: 1406404
aacguucccaggaacgccu

SEQ ID NO: 1406406 - RNA, 19 nt, Artificial Sequence
  Description of Artificial Sequence: Synthetic oligonucleotide
  Sense strand starting at position 1732 of SEQ ID NO: 1243284
gggccuuaccguuacugua

SEQ ID NO: 1406407 - RNA, 19 nt, Artificial Sequence
  Description of Artificial Sequence: Synthetic oligonucleotide
  Antisense strand to SEQ ID NO: 1406406
uacaguaacgguaaggccc

SEQ ID NO: 1406408 - RNA, 19 nt, Artificial Sequence
  Description of Artificial Sequence: Synthetic oligonucleotide
  Sense strand starting at position 2926 of SEQ ID NO: 1243284
accagugagucugcaaagu

SEQ ID NO: 1406409 - RNA, 19 nt, Artificial Sequence
  Description of Artificial Sequence: Synthetic oligonucleotide
  Antisense strand to SEQ ID NO: 1406408
acuuugcagacucacuggu

SEQ ID NO: 1406410 - RNA, 19 nt, Artificial Sequence
  Description of Artificial Sequence: Synthetic oligonucleotide
  Sense strand starting at position 2936 of SEQ ID NO: 1243284
cugcaaagucgcugagguu

SEQ ID NO: 1406411 - RNA, 19 nt, Artificial Sequence
  Description of Artificial Sequence: Synthetic oligonucleotide
  Antisense strand to SEQ ID NO: 1406410
aaccucagcgacuuugcag

SEQ ID NO: 1406412 - RNA, 19 nt, Artificial Sequence
  Description of Artificial Sequence: Synthetic oligonucleotide
  Sense strand starting at position 3287 of SEQ ID NO: 1243284
ugccucucucggugaaguu

SEQ ID NO: 1406413 - RNA, 19 nt, Artificial Sequence
  Description of Artificial Sequence: Synthetic oligonucleotide
  Antisense strand to SEQ ID NO: 1406412
aacuucaccgagagaggca

SEQ ID NO: 1406414 - RNA, 19 nt, Artificial Sequence
  Description of Artificial Sequence: Synthetic oligonucleotide
  Sense strand starting at position 3288 of SEQ ID NO: 1243284
gccucucucggugaaguua

SEQ ID NO: 1406415 - RNA, 19 nt, Artificial Sequence
  Description of Artificial Sequence: Synthetic oligonucleotide
  Antisense strand to SEQ ID NO: 1406414
uaacuucaccgagagaggc

SEQ ID NO: 1406416 - RNA, 19 nt, Artificial Sequence
  Description of Artificial Sequence: Synthetic oligonucleotide
  Sense strand starting at position 3299 of SEQ ID NO: 1243284
ugaaguuacucacucggaa

SEQ ID NO: 1406417 - RNA, 19 nt, Artificial Sequence
  Description of Artificial Sequence: Synthetic oligonucleotide
  Antisense strand to SEQ ID NO: 1406416
uuccgagugaguaacuuca

SEQ ID NO: 1406418 - RNA, 19 nt, Artificial Sequence
  Description of Artificial Sequence: Synthetic oligonucleotide
  Sense strand starting at position 3317 of SEQ ID NO: 1243284
acgggugagcuuugugaua

SEQ ID NO: 1406419 - RNA, 19 nt, Artificial Sequence
  Description of Artificial Sequence: Synthetic oligonucleotide
  Antisense strand to SEQ ID NO: 1406418
uaucacaaagcucacccgu

SEQ ID NO: 1406420 - RNA, 19 nt, Artificial Sequence
  Description of Artificial Sequence: Synthetic oligonucleotide
  Sense strand starting at position 3319 of SEQ ID NO: 1243284
gggugagcuuugugauacg

SEQ ID NO: 1406421 - RNA, 19 nt, Artificial Sequence
  Description of Artificial Sequence: Synthetic oligonucleotide
  Antisense strand to SEQ ID NO: 1406420
cguaucacaaagcucaccc

SEQ ID NO: 1406422 - RNA, 19 nt, Artificial Sequence
  Description of Artificial Sequence: Synthetic oligonucleotide
  Sense strand starting at position 3330 of SEQ ID NO: 1243284
gugauacgugcucugcguu

SEQ ID NO: 1406423 - RNA, 19 nt, Artificial Sequence
  Description of Artificial Sequence: Synthetic oligonucleotide
  Antisense strand to SEQ ID NO: 1406422
aacgcagagcacguaucac

SEQ ID NO: 1406424 - RNA, 19 nt, Artificial Sequence
  Description of Artificial Sequence: Synthetic oligonucleotide
  Sense strand starting at position 3335 of SEQ ID NO: 1243284
acgugcucugcguucagua

SEQ ID NO: 1406425 - RNA, 19 nt, Artificial Sequence
  Description of Artificial Sequence: Synthetic oligonucleotide
  Antisense strand to SEQ ID NO: 1406424
uacugaacgcagagcacgu

SEQ ID NO: 1406426 - RNA, 19 nt, Artificial Sequence
  Description of Artificial Sequence: Synthetic oligonucleotide
  Sense strand starting at position 3344 of SEQ ID NO: 1243284
gcguucaguagcgcuguua

SEQ ID NO: 1406427 - RNA, 19 nt, Artificial Sequence
  Description of Artificial Sequence: Synthetic oligonucleotide
  Antisense strand to SEQ ID NO: 1406426
uaacagcgcuacugaacgc

SEQ ID NO: 1406428 - RNA, 19 nt, Artificial Sequence
  Description of Artificial Sequence: Synthetic oligonucleotide
  Sense strand starting at position 3348 of SEQ ID NO: 1243284
ucaguagcgcuguuacagu

SEQ ID NO: 1406429 - RNA, 19 nt, Artificial Sequence
  Description of Artificial Sequence: Synthetic oligonucleotide
  Antisense strand to SEQ ID NO: 1406428
acuguaacagcgcuacuga

SEQ ID NO: 1406430 - RNA, 19 nt, Artificial Sequence
  Description of Artificial Sequence: Synthetic oligonucleotide
  Sense strand starting at position 3353 of SEQ ID NO: 1243284
agcgcuguuacagucguaa

SEQ ID NO: 1406431 - RNA, 19 nt, Artificial Sequence
  Description of Artificial Sequence: Synthetic oligonucleotide
  Antisense strand to SEQ ID NO: 1406430
uuacgacuguaacagcgcu

SEQ ID NO: 1406432 - RNA, 19 nt, Artificial Sequence
  Description of Artificial Sequence: Synthetic oligonucleotide
  Sense strand starting at position 3355 of SEQ ID NO: 1243284
cgcuguuacagucguaagu

SEQ ID NO: 1406433 - RNA, 19 nt, Artificial Sequence
  Description of Artificial Sequence: Synthetic oligonucleotide
  Antisense strand to SEQ ID NO: 1406432
acuuacgacuguaacagcg

SEQ ID NO: 1406434 - RNA, 19 nt, Artificial Sequence
  Description of Artificial Sequence: Synthetic oligonucleotide
  Sense strand starting at position 3356 of SEQ ID NO: 1243284
gcuguuacagucguaagua

SEQ ID NO: 1406435 - RNA, 19 nt, Artificial Sequence
  Description of Artificial Sequence: Synthetic oligonucleotide
  Antisense strand to SEQ ID NO: 1406434
uacuuacgacuguaacagc

SEQ ID NO: 1406436 - RNA, 19 nt, Artificial Sequence
  Description of Artificial Sequence: Synthetic oligonucleotide
  Sense strand starting at position 3357 of SEQ ID NO: 1243284
cuguuacagucguaaguaa

SEQ ID NO: 1406437 - RNA, 19 nt, Artificial Sequence
  Description of Artificial Sequence: Synthetic oligonucleotide
  Antisense strand to SEQ ID NO: 1406436
uuacuuacgacuguaacag

SEQ ID NO: 1406438 - RNA, 19 nt, Artificial Sequence
  Description of Artificial Sequence: Synthetic oligonucleotide
  Sense strand starting at position 3592 of SEQ ID NO: 1243284
gaagacauggccugacuaa

SEQ ID NO: 1406439 - RNA, 19 nt, Artificial Sequence
  Description of Artificial Sequence: Synthetic oligonucleotide
  Antisense strand to SEQ ID NO: 1406438
uuagucaggccaugucuuc

SEQ ID NO: 1406440 - RNA, 19 nt, Artificial Sequence
  Description of Artificial Sequence: Synthetic oligonucleotide
  Sense strand starting at position 3835 of SEQ ID NO: 1243284
aggcauuaacccggaaaca

SEQ ID NO: 1406441 - RNA, 19 nt, Artificial Sequence
  Description of Artificial Sequence: Synthetic oligonucleotide
  Antisense strand to SEQ ID NO: 1406440
uguuuccggguuaaugccu

SEQ ID NO: 1406442 - RNA, 19 nt, Artificial Sequence
  Description of Artificial Sequence: Synthetic oligonucleotide
  Sense strand starting at position 3888 of SEQ ID NO: 1243284
aggucauugugcccagacu

SEQ ID NO: 1406443 - RNA, 19 nt, Artificial Sequence
  Description of Artificial Sequence: Synthetic oligonucleotide
  Antisense strand to SEQ ID NO: 1406442
agucugggcacaaugaccu

SEQ ID NO: 1406444 - RNA, 19 nt, Artificial Sequence
  Description of Artificial Sequence: Synthetic oligonucleotide
  Sense strand starting at position 3956 of SEQ ID NO: 1243284
gcaccaaagaugugauguu

SEQ ID NO: 1406445 - RNA, 19 nt, Artificial Sequence
  Description of Artificial Sequence: Synthetic oligonucleotide
  Antisense strand to SEQ ID NO: 1406444
aacaucacaucuuuggugc

SEQ ID NO: 1406446 - RNA, 19 nt, Artificial Sequence
  Description of Artificial Sequence: Synthetic oligonucleotide
  Sense strand starting at position 3957 of SEQ ID NO: 1243284
caccaaagaugugauguuu

SEQ ID NO: 1406447 - RNA, 19 nt, Artificial Sequence
  Description of Artificial Sequence: Synthetic oligonucleotide
  Antisense strand to SEQ ID NO: 1406446
aaacaucacaucuuuggug

SEQ ID NO: 1406448 - RNA, 19 nt, Artificial Sequence
  Description of Artificial Sequence: Synthetic oligonucleotide
  Sense strand starting at position 3969 of SEQ ID NO: 1243284
gauguuuccuccucgguuu

SEQ ID NO: 1406449 - RNA, 19 nt, Artificial Sequence
  Description of Artificial Sequence: Synthetic oligonucleotide
  Antisense strand to SEQ ID NO: 1406448
aaaccgaggaggaaacauc

SEQ ID NO: 1406450 - RNA, 19 nt, Artificial Sequence
  Description of Artificial Sequence: Synthetic oligonucleotide
  Sense strand starting at position 195 of SEQ ID NO: 1243285
gugaaacucuuauugacuc

SEQ ID NO: 1406451 - RNA, 19 nt, Artificial Sequence
  Description of Artificial Sequence: Synthetic oligonucleotide
  Antisense strand to SEQ ID NO: 1406450
gagucaauaagaguuucac

SEQ ID NO: 1406452 - RNA, 19 nt, Artificial Sequence
  Description of Artificial Sequence: Synthetic oligonucleotide
  Sense strand starting at position 239 of SEQ ID NO: 1243285
uguuauuauuuaggacaca

SEQ ID NO: 1406453 - RNA, 19 nt, Artificial Sequence
  Description of Artificial Sequence: Synthetic oligonucleotide
  Antisense strand to SEQ ID NO: 1406452
uguguccuaaauaauaaca

SEQ ID NO: 1406454 - RNA, 19 nt, Artificial Sequence
  Description of Artificial Sequence: Synthetic oligonucleotide
  Sense strand starting at position 362 of SEQ ID NO: 1243285
caguaaguuguacaaggau

SEQ ID NO: 1406455 - RNA, 19 nt, Artificial Sequence
  Description of Artificial Sequence: Synthetic oligonucleotide
  Antisense strand to SEQ ID NO: 1406454
auccuuguacaacuuacug

SEQ ID NO: 1406456 - RNA, 19 nt, Artificial Sequence
  Description of Artificial Sequence: Synthetic oligonucleotide
  Sense strand starting at position 374 of SEQ ID NO: 1243285
caaggaugugucuacauug

SEQ ID NO: 1406457 - RNA, 19 nt, Artificial Sequence
  Description of Artificial Sequence: Synthetic oligonucleotide
  Antisense strand to SEQ ID NO: 1406456
caauguagacacauccuug

SEQ ID NO: 1406458 - RNA, 19 nt, Artificial Sequence
  Description of Artificial Sequence: Synthetic oligonucleotide
  Sense strand starting at position 408 of SEQ ID NO: 1243285
ccugaaaugugggaaauac

SEQ ID NO: 1406459 - RNA, 19 nt, Artificial Sequence
  Description of Artificial Sequence: Synthetic oligonucleotide
  Antisense strand to SEQ ID NO: 1406458
guauuucccacauuucagg

SEQ ID NO: 1406460 - RNA, 19 nt, Artificial Sequence
  Description of Artificial Sequence: Synthetic oligonucleotide
  Sense strand starting at position 455 of SEQ ID NO: 1243285
agcuguuagaaagggaaau

SEQ ID NO: 1406461 - RNA, 19 nt, Artificial Sequence
  Description of Artificial Sequence: Synthetic oligonucleotide
  Antisense strand to SEQ ID NO: 1406460
auuucccuuucuaacagcu

SEQ ID NO: 1406462 - RNA, 19 nt, Artificial Sequence
  Description of Artificial Sequence: Synthetic oligonucleotide
  Sense strand starting at position 475 of SEQ ID NO: 1243285
gcauguugggaagggaauu

SEQ ID NO: 1406463 - RNA, 19 nt, Artificial Sequence
  Description of Artificial Sequence: Synthetic oligonucleotide
  Antisense strand to SEQ ID NO: 1406462
aauucccuucccaacaugc

SEQ ID NO: 1406464 - RNA, 19 nt, Artificial Sequence
  Description of Artificial Sequence: Synthetic oligonucleotide
  Sense strand starting at position 495 of SEQ ID NO: 1243285
uaggaaguuuacucuggaa

SEQ ID NO: 1406465 - RNA, 19 nt, Artificial Sequence
  Description of Artificial Sequence: Synthetic oligonucleotide
  Antisense strand to SEQ ID NO: 1406464
uuccagaguaaacuuccua

SEQ ID NO: 1406466 - RNA, 19 nt, Artificial Sequence
  Description of Artificial Sequence: Synthetic oligonucleotide
  Sense strand starting at position 497 of SEQ ID NO: 1243285
ggaaguuuacucuggaagc

SEQ ID NO: 1406467 - RNA, 19 nt, Artificial Sequence
  Description of Artificial Sequence: Synthetic oligonucleotide
  Antisense strand to SEQ ID NO: 1406466
gcuuccagaguaaacuucc

SEQ ID NO: 1406468 - RNA, 19 nt, Artificial Sequence
  Description of Artificial Sequence: Synthetic oligonucleotide
  Sense strand starting at position 499 of SEQ ID NO: 1243285
aaguuuacucuggaagcca

SEQ ID NO: 1406469 - RNA, 19 nt, Artificial Sequence
  Description of Artificial Sequence: Synthetic oligonucleotide
  Antisense strand to SEQ ID NO: 1406468
uggcuuccagaguaaacuu

SEQ ID NO: 1406470 - RNA, 19 nt, Artificial Sequence
  Description of Artificial Sequence: Synthetic oligonucleotide
  Sense strand starting at position 805 of SEQ ID NO: 1243285
gcauuagacucacagagac

SEQ ID NO: 1406471 - RNA, 19 nt, Artificial Sequence
  Description of Artificial Sequence: Synthetic oligonucleotide
  Antisense strand to SEQ ID NO: 1406470
gucucugugagucuaaugc

SEQ ID NO: 1406472 - RNA, 19 nt, Artificial Sequence
  Description of Artificial Sequence: Synthetic oligonucleotide
  Sense strand starting at position 884 of SEQ ID NO: 1243285
cugagaaguuucucgccca

SEQ ID NO: 1406473 - RNA, 19 nt, Artificial Sequence
  Description of Artificial Sequence: Synthetic oligonucleotide
  Antisense strand to SEQ ID NO: 1406472
ugggcgagaaacuucucag

SEQ ID NO: 1406474 - RNA, 19 nt, Artificial Sequence
  Description of Artificial Sequence: Synthetic oligonucleotide
  Sense strand starting at position 887 of SEQ ID NO: 1243285
agaaguuucucgcccaucu

SEQ ID NO: 1406475 - RNA, 19 nt, Artificial Sequence
  Description of Artificial Sequence: Synthetic oligonucleotide
  Antisense strand to SEQ ID NO: 1406474
agaugggcgagaaacuucu

SEQ ID NO: 1406476 - RNA, 19 nt, Artificial Sequence
  Description of Artificial Sequence: Synthetic oligonucleotide
  Sense strand starting at position 911 of SEQ ID NO: 1243285
guugaucaaucaucaguga

SEQ ID NO: 1406477 - RNA, 19 nt, Artificial Sequence
  Description of Artificial Sequence: Synthetic oligonucleotide
  Antisense strand to SEQ ID NO: 1406476
ucacugaugauugaucaac

SEQ ID NO: 1406478 - RNA, 19 nt, Artificial Sequence
  Description of Artificial Sequence: Synthetic oligonucleotide
  Sense strand starting at position 971 of SEQ ID NO: 1243285
gggagcuaaacuuagcuau

SEQ ID NO: 1406479 - RNA, 19 nt, Artificial Sequence
  Description of Artificial Sequence: Synthetic oligonucleotide
  Antisense strand to SEQ ID NO: 1406478
auagcuaaguuuagcuccc

SEQ ID NO: 1406480 - RNA, 19 nt, Artificial Sequence
  Description of Artificial Sequence: Synthetic oligonucleotide
  Sense strand starting at position 1017 of SEQ ID NO: 1243285
gagggccucuaugcaaauu

SEQ ID NO: 1406481 - RNA, 19 nt, Artificial Sequence
  Description of Artificial Sequence: Synthetic oligonucleotide
  Antisense strand to SEQ ID NO: 1406480
aauuugcauagaggcccuc

SEQ ID NO: 1406482 - RNA, 19 nt, Artificial Sequence
  Description of Artificial Sequence: Synthetic oligonucleotide
  Sense strand starting at position 2097 of SEQ ID NO: 1243285
cgagccucggccgaagauu

SEQ ID NO: 1406483 - RNA, 19 nt, Artificial Sequence
  Description of Artificial Sequence: Synthetic oligonucleotide
  Antisense strand to SEQ ID NO: 1406482
aaucuucggccgaggcucg

SEQ ID NO: 1406484 - RNA, 19 nt, Artificial Sequence
  Description of Artificial Sequence: Synthetic oligonucleotide
  Sense strand starting at position 2380 of SEQ ID NO: 1243285
gcuugcguuaccgcgaauu

SEQ ID NO: 1406485 - RNA, 19 nt, Artificial Sequence
  Description of Artificial Sequence: Synthetic oligonucleotide
  Antisense strand to SEQ ID NO: 1406484
aauucgcgguaacgcaagc

SEQ ID NO: 1406486 - RNA, 19 nt, Artificial Sequence
  Description of Artificial Sequence: Synthetic oligonucleotide
  Sense strand starting at position 2383 of SEQ ID NO: 1243285
ugcguuaccgcgaauugug

SEQ ID NO: 1406487 - RNA, 19 nt, Artificial Sequence
  Description of Artificial Sequence: Synthetic oligonucleotide
  Antisense strand to SEQ ID NO: 1406486
cacaauucgcgguaacgca

SEQ ID NO: 1406488 - RNA, 19 nt, Artificial Sequence
  Description of Artificial Sequence: Synthetic oligonucleotide
  Sense strand starting at position 2494 of SEQ ID NO: 1243285
guaguuagucggagucuga

SEQ ID NO: 1406489 - RNA, 19 nt, Artificial Sequence
  Description of Artificial Sequence: Synthetic oligonucleotide
  Antisense strand to SEQ ID NO: 1406488
ucagacuccgacuaacuac

SEQ ID NO: 1406490 - RNA, 19 nt, Artificial Sequence
  Description of Artificial Sequence: Synthetic oligonucleotide
  Sense strand starting at position 2633 of SEQ ID NO: 1243285
gcucuuuaucugugaccuc

SEQ ID NO: 1406491 - RNA, 19 nt, Artificial Sequence
  Description of Artificial Sequence: Synthetic oligonucleotide
  Antisense strand to SEQ ID NO: 1406490
gaggucacagauaaagagc

SEQ ID NO: 1406492 - RNA, 19 nt, Artificial Sequence
  Description of Artificial Sequence: Synthetic oligonucleotide
  Sense strand starting at position 2747 of SEQ ID NO: 1243285
ccuggaaguccuugauucu

SEQ ID NO: 1406493 - RNA, 19 nt, Artificial Sequence
  Description of Artificial Sequence: Synthetic oligonucleotide
  Antisense strand to SEQ ID NO: 1406492
agaaucaaggacuuccagg

SEQ ID NO: 1406494 - RNA, 19 nt, Artificial Sequence
  Description of Artificial Sequence: Synthetic oligonucleotide
  Sense strand starting at position 2748 of SEQ ID NO: 1243285
cuggaaguccuugauucua

SEQ ID NO: 1406495 - RNA, 19 nt, Artificial Sequence
  Description of Artificial Sequence: Synthetic oligonucleotide
  Antisense strand to SEQ ID NO: 1406494
uagaaucaaggacuuccag

SEQ ID NO: 1406496 - RNA, 19 nt, Artificial Sequence
  Description of Artificial Sequence: Synthetic oligonucleotide
  Sense strand starting at position 2798 of SEQ ID NO: 1243285
uuccaaugugcugacuauu

SEQ ID NO: 1406497 - RNA, 19 nt, Artificial Sequence
  Description of Artificial Sequence: Synthetic oligonucleotide
  Antisense strand to SEQ ID NO: 1406496
aauagucagcacauuggaa

SEQ ID NO: 1406498 - RNA, 19 nt, Artificial Sequence
  Description of Artificial Sequence: Synthetic oligonucleotide
  Sense strand starting at position 2918 of SEQ ID NO: 1243285
auuaauucuccguaaagca

SEQ ID NO: 1406499 - RNA, 19 nt, Artificial Sequence
  Description of Artificial Sequence: Synthetic oligonucleotide
  Antisense strand to SEQ ID NO: 1406498
ugcuuuacggagaauuaau

SEQ ID NO: 1406500 - RNA, 19 nt, Artificial Sequence
  Description of Artificial Sequence: Synthetic oligonucleotide
  Sense strand starting at position 3155 of SEQ ID NO: 1243285
gcacgaguauguucauuga

SEQ ID NO: 1406501 - RNA, 19 nt, Artificial Sequence
  Description of Artificial Sequence: Synthetic oligonucleotide
  Antisense strand to SEQ ID NO: 1406500
ucaaugaacauacucgugc

SEQ ID NO: 1406502 - RNA, 19 nt, Artificial Sequence
  Description of Artificial Sequence: Synthetic oligonucleotide
  Sense strand starting at position 3158 of SEQ ID NO: 1243285
cgaguauguucauugaagc

SEQ ID NO: 1406503 - RNA, 19 nt, Artificial Sequence
  Description of Artificial Sequence: Synthetic oligonucleotide
  Antisense strand to SEQ ID NO: 1406502
gcuucaaugaacauacucg

SEQ ID NO: 1406504 - RNA, 19 nt, Artificial Sequence
  Description of Artificial Sequence: Synthetic oligonucleotide
  Sense strand starting at position 3372 of SEQ ID NO: 1243285
acaugcauguucucacuua

SEQ ID NO: 1406505 - RNA, 19 nt, Artificial Sequence
  Description of Artificial Sequence: Synthetic oligonucleotide
  Antisense strand to SEQ ID NO: 1406504
uaagugagaacaugcaugu

SEQ ID NO: 1406506 - RNA, 19 nt, Artificial Sequence
  Description of Artificial Sequence: Synthetic oligonucleotide
  Sense strand starting at position 3533 of SEQ ID NO: 1243285
uggguuaaugggugcggua

SEQ ID NO: 1406507 - RNA, 19 nt, Artificial Sequence
  Description of Artificial Sequence: Synthetic oligonucleotide
  Antisense strand to SEQ ID NO: 1406506
uaccgcacccauuaaccca

SEQ ID NO: 1406508 - RNA, 19 nt, Artificial Sequence
  Description of Artificial Sequence: Synthetic oligonucleotide
  Sense strand starting at position 3535 of SEQ ID NO: 1243285
gguuaaugggugcgguaaa

SEQ ID NO: 1406509 - RNA, 19 nt, Artificial Sequence
  Description of Artificial Sequence: Synthetic oligonucleotide
  Antisense strand to SEQ ID NO: 1406508
uuuaccgcacccauuaacc

SEQ ID NO: 1406510 - RNA, 19 nt, Artificial Sequence
  Description of Artificial Sequence: Synthetic oligonucleotide
  Sense strand starting at position 3548 of SEQ ID NO: 1243285
gguaaacuaccauggcaga

SEQ ID NO: 1406511 - RNA, 19 nt, Artificial Sequence
  Description of Artificial Sequence: Synthetic oligonucleotide
  Antisense strand to SEQ ID NO: 1406510
ucugccaugguaguuuacc

SEQ ID NO: 1406512 - RNA, 19 nt, Artificial Sequence
  Description of Artificial Sequence: Synthetic oligonucleotide
  Sense strand starting at position 3549 of SEQ ID NO: 1243285
guaaacuaccauggcagau

SEQ ID NO: 1406513 - RNA, 19 nt, Artificial Sequence
  Description of Artificial Sequence: Synthetic oligonucleotide
  Antisense strand to SEQ ID NO: 1406512
aucugccaugguaguuuac

SEQ ID NO: 1406514 - RNA, 19 nt, Artificial Sequence
  Description of Artificial Sequence: Synthetic oligonucleotide
  Sense strand starting at position 3565 of SEQ ID NO: 1243285
gauguuucccuguguaaca

SEQ ID NO: 1406515 - RNA, 19 nt, Artificial Sequence
  Description of Artificial Sequence: Synthetic oligonucleotide
  Antisense strand to SEQ ID NO: 1406514
uguuacacagggaaacauc

SEQ ID NO: 1406516 - RNA, 19 nt, Artificial Sequence
  Description of Artificial Sequence: Synthetic oligonucleotide
  Sense strand starting at position 3566 of SEQ ID NO: 1243285
auguuucccuguguaacaa

SEQ ID NO: 1406517 - RNA, 19 nt, Artificial Sequence
  Description of Artificial Sequence: Synthetic oligonucleotide
  Antisense strand to SEQ ID NO: 1406516
uuguuacacagggaaacau

SEQ ID NO: 1406518 - RNA, 19 nt, Artificial Sequence
  Description of Artificial Sequence: Synthetic oligonucleotide
  Sense strand starting at position 3567 of SEQ ID NO: 1243285
uguuucccuguguaacaaa

SEQ ID NO: 1406519 - RNA, 19 nt, Artificial Sequence
  Description of Artificial Sequence: Synthetic oligonucleotide
  Antisense strand to SEQ ID NO: 1406518
uuuguuacacagggaaaca

SEQ ID NO: 1406520 - RNA, 19 nt, Artificial Sequence
  Description of Artificial Sequence: Synthetic oligonucleotide
  Sense strand starting at position 3671 of SEQ ID NO: 1243285
guggcaauaugugcaugaa

SEQ ID NO: 1406521 - RNA, 19 nt, Artificial Sequence
  Description of Artificial Sequence: Synthetic oligonucleotide
  Antisense strand to SEQ ID NO: 1406520
uucaugcacauauugccac

SEQ ID NO: 1406522 - RNA, 19 nt, Artificial Sequence
  Description of Artificial Sequence: Synthetic oligonucleotide
  Sense strand starting at position 3708 of SEQ ID NO: 1243285
agcuauuuauucgggaaau

SEQ ID NO: 1406523 - RNA, 19 nt, Artificial Sequence
  Description of Artificial Sequence: Synthetic oligonucleotide
  Antisense strand to SEQ ID NO: 1406522
auuucccgaauaaauagcu

SEQ ID NO: 1406524 - RNA, 19 nt, Artificial Sequence
  Description of Artificial Sequence: Synthetic oligonucleotide
  Sense strand starting at position 3709 of SEQ ID NO: 1243285
gcuauuuauucgggaaaua

SEQ ID NO: 1406525 - RNA, 19 nt, Artificial Sequence
  Description of Artificial Sequence: Synthetic oligonucleotide
  Antisense strand to SEQ ID NO: 1406524
uauuucccgaauaaauagc

SEQ ID NO: 1406526 - RNA, 19 nt, Artificial Sequence
  Description of Artificial Sequence: Synthetic oligonucleotide
  Sense strand starting at position 3963 of SEQ ID NO: 1243285
agcugaggucucggcucaa

SEQ ID NO: 1406527 - RNA, 19 nt, Artificial Sequence
  Description of Artificial Sequence: Synthetic oligonucleotide
  Antisense strand to SEQ ID NO: 1406526
uugagccgagaccucagcu

SEQ ID NO: 1406528 - RNA, 19 nt, Artificial Sequence
  Description of Artificial Sequence: Synthetic oligonucleotide
  Sense strand starting at position 3967 of SEQ ID NO: 1243285
gaggucucggcucaaaugu

SEQ ID NO: 1406529 - RNA, 19 nt, Artificial Sequence
  Description of Artificial Sequence: Synthetic oligonucleotide
  Antisense strand to SEQ ID NO: 1406528
acauuugagccgagaccuc

SEQ ID NO: 1406530 - RNA, 19 nt, Artificial Sequence
  Description of Artificial Sequence: Synthetic oligonucleotide
  Sense strand starting at position 3 of SEQ ID NO: 1243286
ggucuucugaagugauagg

SEQ ID NO: 1406531 - RNA, 19 nt, Artificial Sequence
  Description of Artificial Sequence: Synthetic oligonucleotide
  Antisense strand to SEQ ID NO: 1406530
ccuaucacuucagaagacc

SEQ ID NO: 1406532 - RNA, 19 nt, Artificial Sequence
  Description of Artificial Sequence: Synthetic oligonucleotide
  Sense strand starting at position 4 of SEQ ID NO: 1243286
gucuucugaagugauagga

SEQ ID NO: 1406533 - RNA, 19 nt, Artificial Sequence
  Description of Artificial Sequence: Synthetic oligonucleotide
  Antisense strand to SEQ ID NO: 1406532
uccuaucacuucagaagac

SEQ ID NO: 1406534 - RNA, 19 nt, Artificial Sequence
  Description of Artificial Sequence: Synthetic oligonucleotide
  Sense strand starting at position 8 of SEQ ID NO: 1243286
ucugaagugauaggauuac

SEQ ID NO: 1406535 - RNA, 19 nt, Artificial Sequence
  Description of Artificial Sequence: Synthetic oligonucleotide
  Antisense strand to SEQ ID NO: 1406534
guaauccuaucacuucaga

SEQ ID NO: 1406536 - RNA, 19 nt, Artificial Sequence
  Description of Artificial Sequence: Synthetic oligonucleotide
  Sense strand starting at position 20 of SEQ ID NO: 1243286
ggauuacagguaugccagu

SEQ ID NO: 1406537 - RNA, 19 nt, Artificial Sequence
  Description of Artificial Sequence: Synthetic oligonucleotide
  Antisense strand to SEQ ID NO: 1406536
acuggcauaccuguaaucc

SEQ ID NO: 1406538 - RNA, 19 nt, Artificial Sequence
  Description of Artificial Sequence: Synthetic oligonucleotide
  Sense strand starting at position 174 of SEQ ID NO: 1243286
gcuccuaaugcugacuuua

SEQ ID NO: 1406539 - RNA, 19 nt, Artificial Sequence
  Description of Artificial Sequence: Synthetic oligonucleotide
  Antisense strand to SEQ ID NO: 1406538
uaaagucagcauuaggagc

SEQ ID NO: 1406540 - RNA, 19 nt, Artificial Sequence
  Description of Artificial Sequence: Synthetic oligonucleotide
  Sense strand starting at position 209 of SEQ ID NO: 1243286
aguugauccaacuaguagu

SEQ ID NO: 1406541 - RNA, 19 nt, Artificial Sequence
  Description of Artificial Sequence: Synthetic oligonucleotide
  Antisense strand to SEQ ID NO: 1406540
acuacuaguuggaucaacu

SEQ ID NO: 1406542 - RNA, 19 nt, Artificial Sequence
  Description of Artificial Sequence: Synthetic oligonucleotide
  Sense strand starting at position 250 of SEQ ID NO: 1243286
acaaguuuaugagcagcaa

SEQ ID NO: 1406543 - RNA, 19 nt, Artificial Sequence
  Description of Artificial Sequence: Synthetic oligonucleotide
  Antisense strand to SEQ ID NO: 1406542
uugcugcucauaaacuugu

SEQ ID NO: 1406544 - RNA, 19 nt, Artificial Sequence
  Description of Artificial Sequence: Synthetic oligonucleotide
  Sense strand starting at position 262 of SEQ ID NO: 1243286
gcagcaaggucaccugauu

SEQ ID NO: 1406545 - RNA, 19 nt, Artificial Sequence
  Description of Artificial Sequence: Synthetic oligonucleotide
  Antisense strand to SEQ ID NO: 1406544
aaucaggugaccuugcugc

SEQ ID NO: 1406546 - RNA, 19 nt, Artificial Sequence
  Description of Artificial Sequence: Synthetic oligonucleotide
  Sense strand starting at position 267 of SEQ ID NO: 1243286
aaggucaccugauucugau

SEQ ID NO: 1406547 - RNA, 19 nt, Artificial Sequence
  Description of Artificial Sequence: Synthetic oligonucleotide
  Antisense strand to SEQ ID NO: 1406546
aucagaaucaggugaccuu

SEQ ID NO: 1406548 - RNA, 19 nt, Artificial Sequence
  Description of Artificial Sequence: Synthetic oligonucleotide
  Sense strand starting at position 273 of SEQ ID NO: 1243286
accugauucugaucaugug

SEQ ID NO: 1406549 - RNA, 19 nt, Artificial Sequence
  Description of Artificial Sequence: Synthetic oligonucleotide
  Antisense strand to SEQ ID NO: 1406548
cacaugaucagaaucaggu

SEQ ID NO: 1406550 - RNA, 19 nt, Artificial Sequence
  Description of Artificial Sequence: Synthetic oligonucleotide
  Sense strand starting at position 292 of SEQ ID NO: 1243286
uaugcuguuuacccugaga

SEQ ID NO: 1406551 - RNA, 19 nt, Artificial Sequence
  Description of Artificial Sequence: Synthetic oligonucleotide
  Antisense strand to SEQ ID NO: 1406550
ucucaggguaaacagcaua

SEQ ID NO: 1406552 - RNA, 19 nt, Artificial Sequence
  Description of Artificial Sequence: Synthetic oligonucleotide
  Sense strand starting at position 294 of SEQ ID NO: 1243286
ugcuguuuacccugagaug

SEQ ID NO: 1406553 - RNA, 19 nt, Artificial Sequence
  Description of Artificial Sequence: Synthetic oligonucleotide
  Antisense strand to SEQ ID NO: 1406552
caucucaggguaaacagca

SEQ ID NO: 1406554 - RNA, 19 nt, Artificial Sequence
  Description of Artificial Sequence: Synthetic oligonucleotide
  Sense strand starting at position 295 of SEQ ID NO: 1243286
gcuguuuacccugagauga

SEQ ID NO: 1406555 - RNA, 19 nt, Artificial Sequence
  Description of Artificial Sequence: Synthetic oligonucleotide
  Antisense strand to SEQ ID NO: 1406554
ucaucucaggguaaacagc

SEQ ID NO: 1406556 - RNA, 19 nt, Artificial Sequence
  Description of Artificial Sequence: Synthetic oligonucleotide
  Sense strand starting at position 337 of SEQ ID NO: 1243286
ucaugaaugcugcaaagac

SEQ ID NO: 1406557 - RNA, 19 nt, Artificial Sequence
  Description of Artificial Sequence: Synthetic oligonucleotide
  Antisense strand to SEQ ID NO: 1406556
gucuuugcagcauucauga

SEQ ID NO: 1406558 - RNA, 19 nt, Artificial Sequence
  Description of Artificial Sequence: Synthetic oligonucleotide
  Sense strand starting at position 509 of SEQ ID NO: 1243286
guaaacuuguuacuuguuu

SEQ ID NO: 1406559 - RNA, 19 nt, Artificial Sequence
  Description of Artificial Sequence: Synthetic oligonucleotide
  Antisense strand to SEQ ID NO: 1406558
aaacaaguaacaaguuuac

SEQ ID NO: 1406560 - RNA, 19 nt, Artificial Sequence
  Description of Artificial Sequence: Synthetic oligonucleotide
  Sense strand starting at position 729 of SEQ ID NO: 1243286
ggaucagcuccaugaucag

SEQ ID NO: 1406561 - RNA, 19 nt, Artificial Sequence
  Description of Artificial Sequence: Synthetic oligonucleotide
  Antisense strand to SEQ ID NO: 1406560
cugaucauggagcugaucc

SEQ ID NO: 1406562 - RNA, 19 nt, Artificial Sequence
  Description of Artificial Sequence: Synthetic oligonucleotide
  Sense strand starting at position 859 of SEQ ID NO: 1243286
ggccgcaucuuugugauuu

SEQ ID NO: 1406563 - RNA, 19 nt, Artificial Sequence
  Description of Artificial Sequence: Synthetic oligonucleotide
  Antisense strand to SEQ ID NO: 1406562
aaaucacaaagaugcggcc

SEQ ID NO: 1406564 - RNA, 19 nt, Artificial Sequence
  Description of Artificial Sequence: Synthetic oligonucleotide
  Sense strand starting at position 897 of SEQ ID NO: 1243286
gagggcaaguaagaaauuu

SEQ ID NO: 1406565 - RNA, 19 nt, Artificial Sequence
  Description of Artificial Sequence: Synthetic oligonucleotide
  Antisense strand to SEQ ID NO: 1406564
aaauuucuuacuugcccuc

SEQ ID NO: 1406566 - RNA, 19 nt, Artificial Sequence
  Description of Artificial Sequence: Synthetic oligonucleotide
  Sense strand starting at position 1080 of SEQ ID NO: 1243286
agcaguccugccugagaca

SEQ ID NO: 1406567 - RNA, 19 nt, Artificial Sequence
  Description of Artificial Sequence: Synthetic oligonucleotide
  Antisense strand to SEQ ID NO: 1406566
ugucucaggcaggacugcu

SEQ ID NO: 1406568 - RNA, 19 nt, Artificial Sequence
  Description of Artificial Sequence: Synthetic oligonucleotide
  Sense strand starting at position 1154 of SEQ ID NO: 1243286
cuggcagccucucuagaau

SEQ ID NO: 1406569 - RNA, 19 nt, Artificial Sequence
  Description of Artificial Sequence: Synthetic oligonucleotide
  Antisense strand to SEQ ID NO: 1406568
auucuagagaggcugccag

SEQ ID NO: 1406570 - RNA, 19 nt, Artificial Sequence
  Description of Artificial Sequence: Synthetic oligonucleotide
  Sense strand starting at position 1303 of SEQ ID NO: 1243286
gcuaaugguagguauguga

SEQ ID NO: 1406571 - RNA, 19 nt, Artificial Sequence
  Description of Artificial Sequence: Synthetic oligonucleotide
  Antisense strand to SEQ ID NO: 1406570
ucacauaccuaccauuagc

SEQ ID NO: 1406572 - RNA, 19 nt, Artificial Sequence
  Description of Artificial Sequence: Synthetic oligonucleotide
  Sense strand starting at position 1332 of SEQ ID NO: 1243286
cuucuaagcaguggcgaaa

SEQ ID NO: 1406573 - RNA, 19 nt, Artificial Sequence
  Description of Artificial Sequence: Synthetic oligonucleotide
  Antisense strand to SEQ ID NO: 1406572
uuucgccacugcuuagaag

SEQ ID NO: 1406574 - RNA, 19 nt, Artificial Sequence
  Description of Artificial Sequence: Synthetic oligonucleotide
  Sense strand starting at position 1664 of SEQ ID NO: 1243286
cggagguugcccugggaga

SEQ ID NO: 1406575 - RNA, 19 nt, Artificial Sequence
  Description of Artificial Sequence: Synthetic oligonucleotide
  Antisense strand to SEQ ID NO: 1406574
ucucccagggcaaccuccg

SEQ ID NO: 1406576 - RNA, 19 nt, Artificial Sequence
  Description of Artificial Sequence: Synthetic oligonucleotide
  Sense strand starting at position 1666 of SEQ ID NO: 1243286
gagguugcccugggagaga

SEQ ID NO: 1406577 - RNA, 19 nt, Artificial Sequence
  Description of Artificial Sequence: Synthetic oligonucleotide
  Antisense strand to SEQ ID NO: 1406576
ucucucccagggcaaccuc

SEQ ID NO: 1406578 - RNA, 19 nt, Artificial Sequence
  Description of Artificial Sequence: Synthetic oligonucleotide
  Sense strand starting at position 1682 of SEQ ID NO: 1243286
agaccaauguaguuguauu

SEQ ID NO: 1406579 - RNA, 19 nt, Artificial Sequence
  Description of Artificial Sequence: Synthetic oligonucleotide
  Antisense strand to SEQ ID NO: 1406578
aauacaacuacauuggucu

SEQ ID NO: 1406580 - RNA, 19 nt, Artificial Sequence
  Description of Artificial Sequence: Synthetic oligonucleotide
  Sense strand starting at position 1885 of SEQ ID NO: 1243286
cuuggagggagcuacuauu

SEQ ID NO: 1406581 - RNA, 19 nt, Artificial Sequence
  Description of Artificial Sequence: Synthetic oligonucleotide
  Antisense strand to SEQ ID NO: 1406580
aauaguagcucccuccaag

SEQ ID NO: 1406582 - RNA, 19 nt, Artificial Sequence
  Description of Artificial Sequence: Synthetic oligonucleotide
  Sense strand starting at position 2096 of SEQ ID NO: 1243286
agagaauucugggagaugu

SEQ ID NO: 1406583 - RNA, 19 nt, Artificial Sequence
  Description of Artificial Sequence: Synthetic oligonucleotide
  Antisense strand to SEQ ID NO: 1406582
acaucucccagaauucucu

SEQ ID NO: 1406584 - RNA, 19 nt, Artificial Sequence
  Description of Artificial Sequence: Synthetic oligonucleotide
  Sense strand starting at position 2100 of SEQ ID NO: 1243286
aauucugggagauguagua

SEQ ID NO: 1406585 - RNA, 19 nt, Artificial Sequence
  Description of Artificial Sequence: Synthetic oligonucleotide
  Antisense strand to SEQ ID NO: 1406584
uacuacaucucccagaauu

SEQ ID NO: 1406586 - RNA, 19 nt, Artificial Sequence
  Description of Artificial Sequence: Synthetic oligonucleotide
  Sense strand starting at position 2107 of SEQ ID NO: 1243286
ggagauguaguauaaccgu

SEQ ID NO: 1406587 - RNA, 19 nt, Artificial Sequence
  Description of Artificial Sequence: Synthetic oligonucleotide
  Antisense strand to SEQ ID NO: 1406586
acgguuauacuacaucucc

SEQ ID NO: 1406588 - RNA, 19 nt, Artificial Sequence
  Description of Artificial Sequence: Synthetic oligonucleotide
  Sense strand starting at position 2734 of SEQ ID NO: 1243286
guaggcgcacuuuaucauu

SEQ ID NO: 1406589 - RNA, 19 nt, Artificial Sequence
  Description of Artificial Sequence: Synthetic oligonucleotide
  Antisense strand to SEQ ID NO: 1406588
aaugauaaagugcgccuac

SEQ ID NO: 1406590 - RNA, 19 nt, Artificial Sequence
  Description of Artificial Sequence: Synthetic oligonucleotide
  Sense strand starting at position 2740 of SEQ ID NO: 1243286
gcacuuuaucauuacuagu

SEQ ID NO: 1406591 - RNA, 19 nt, Artificial Sequence
  Description of Artificial Sequence: Synthetic oligonucleotide
  Antisense strand to SEQ ID NO: 1406590
acuaguaaugauaaagugc

SEQ ID NO: 1406592 - RNA, 19 nt, Artificial Sequence
  Description of Artificial Sequence: Synthetic oligonucleotide
  Sense strand starting at position 2767 of SEQ ID NO: 1243286
gcuuguauugaauguacua

SEQ ID NO: 1406593 - RNA, 19 nt, Artificial Sequence
  Description of Artificial Sequence: Synthetic oligonucleotide
  Antisense strand to SEQ ID NO: 1406592
uaguacauucaauacaagc

SEQ ID NO: 1406594 - RNA, 19 nt, Artificial Sequence
  Description of Artificial Sequence: Synthetic oligonucleotide
  Sense strand starting at position 3086 of SEQ ID NO: 1243286
cucucaaacugggauuaca

SEQ ID NO: 1406595 - RNA, 19 nt, Artificial Sequence
  Description of Artificial Sequence: Synthetic oligonucleotide
  Antisense strand to SEQ ID NO: 1406594
uguaaucccaguuugagag

SEQ ID NO: 1406596 - RNA, 19 nt, Artificial Sequence
  Description of Artificial Sequence: Synthetic oligonucleotide
  Sense strand starting at position 3165 of SEQ ID NO: 1243286
guaguaauauuaccauuga

SEQ ID NO: 1406597 - RNA, 19 nt, Artificial Sequence
  Description of Artificial Sequence: Synthetic oligonucleotide
  Antisense strand to SEQ ID NO: 1406596
ucaaugguaauauuacuac

SEQ ID NO: 1406598 - RNA, 19 nt, Artificial Sequence
  Description of Artificial Sequence: Synthetic oligonucleotide
  Sense strand starting at position 3212 of SEQ ID NO: 1243286
gagagaucauccucugggu

SEQ ID NO: 1406599 - RNA, 19 nt, Artificial Sequence
  Description of Artificial Sequence: Synthetic oligonucleotide
  Antisense strand to SEQ ID NO: 1406598
acccagaggaugaucucuc

SEQ ID NO: 1406600 - RNA, 19 nt, Artificial Sequence
  Description of Artificial Sequence: Synthetic oligonucleotide
  Sense strand starting at position 3239 of SEQ ID NO: 1243286
ccuguacucagguguauag

SEQ ID NO: 1406601 - RNA, 19 nt, Artificial Sequence
  Description of Artificial Sequence: Synthetic oligonucleotide
  Antisense strand to SEQ ID NO: 1406600
cuauacaccugaguacagg

SEQ ID NO: 1406602 - RNA, 19 nt, Artificial Sequence
  Description of Artificial Sequence: Synthetic oligonucleotide
  Sense strand starting at position 3400 of SEQ ID NO: 1243286
ucucaaacaugggaaugau

SEQ ID NO: 1406603 - RNA, 19 nt, Artificial Sequence
  Description of Artificial Sequence: Synthetic oligonucleotide
  Antisense strand to SEQ ID NO: 1406602
aucauucccauguuugaga

SEQ ID NO: 1406604 - RNA, 19 nt, Artificial Sequence
  Description of Artificial Sequence: Synthetic oligonucleotide
  Sense strand starting at position 3429 of SEQ ID NO: 1243286
ccacaaacauuguugggaa

SEQ ID NO: 1406605 - RNA, 19 nt, Artificial Sequence
  Description of Artificial Sequence: Synthetic oligonucleotide
  Antisense strand to SEQ ID NO: 1406604
uucccaacaauguuugugg

SEQ ID NO: 1406606 - RNA, 19 nt, Artificial Sequence
  Description of Artificial Sequence: Synthetic oligonucleotide
  Sense strand starting at position 3478 of SEQ ID NO: 1243286
acagcucuuguauguaaua

SEQ ID NO: 1406607 - RNA, 19 nt, Artificial Sequence
  Description of Artificial Sequence: Synthetic oligonucleotide
  Antisense strand to SEQ ID NO: 1406606
uauuacauacaagagcugu

SEQ ID NO: 1406608 - RNA, 19 nt, Artificial Sequence
  Description of Artificial Sequence: Synthetic oligonucleotide
  Sense strand starting at position 3498 of SEQ ID NO: 1243286
gcacccaguaaguguugaa

SEQ ID NO: 1406609 - RNA, 19 nt, Artificial Sequence
  Description of Artificial Sequence: Synthetic oligonucleotide
  Antisense strand to SEQ ID NO: 1406608
uucaacacuuacugggugc

SEQ ID NO: 1406610 - RNA, 19 nt, Artificial Sequence
  Description of Artificial Sequence: Synthetic oligonucleotide
  Sense strand starting at position 106 of SEQ ID NO: 1243287
uuaagaguaaugugaugaa

SEQ ID NO: 1406611 - RNA, 19 nt, Artificial Sequence
  Description of Artificial Sequence: Synthetic oligonucleotide
  Antisense strand to SEQ ID NO: 1406610
uucaucacauuacucuuaa

SEQ ID NO: 1406612 - RNA, 19 nt, Artificial Sequence
  Description of Artificial Sequence: Synthetic oligonucleotide
  Sense strand starting at position 139 of SEQ ID NO: 1243287
acuuaauugccguauuacu

SEQ ID NO: 1406613 - RNA, 19 nt, Artificial Sequence
  Description of Artificial Sequence: Synthetic oligonucleotide
  Antisense strand to SEQ ID NO: 1406612
aguaauacggcaauuaagu

SEQ ID NO: 1406614 - RNA, 19 nt, Artificial Sequence
  Description of Artificial Sequence: Synthetic oligonucleotide
  Sense strand starting at position 148 of SEQ ID NO: 1243287
ccguauuacuaauucugga

SEQ ID NO: 1406615 - RNA, 19 nt, Artificial Sequence
  Description of Artificial Sequence: Synthetic oligonucleotide
  Antisense strand to SEQ ID NO: 1406614
uccagaauuaguaauacgg

SEQ ID NO: 1406616 - RNA, 19 nt, Artificial Sequence
  Description of Artificial Sequence: Synthetic oligonucleotide
  Sense strand starting at position 348 of SEQ ID NO: 1243287
uccacaauguuguuagguu

SEQ ID NO: 1406617 - RNA, 19 nt, Artificial Sequence
  Description of Artificial Sequence: Synthetic oligonucleotide
  Antisense strand to SEQ ID NO: 1406616
aaccuaacaacauugugga

SEQ ID NO: 1406618 - RNA, 19 nt, Artificial Sequence
  Description of Artificial Sequence: Synthetic oligonucleotide
  Sense strand starting at position 352 of SEQ ID NO: 1243287
caauguuguuagguuagaa

SEQ ID NO: 1406619 - RNA, 19 nt, Artificial Sequence
  Description of Artificial Sequence: Synthetic oligonucleotide
  Antisense strand to SEQ ID NO: 1406618
uucuaaccuaacaacauug

SEQ ID NO: 1406620 - RNA, 19 nt, Artificial Sequence
  Description of Artificial Sequence: Synthetic oligonucleotide
  Sense strand starting at position 645 of SEQ ID NO: 1243287
gcaaaccuuggcuaucaau

SEQ ID NO: 1406621 - RNA, 19 nt, Artificial Sequence
  Description of Artificial Sequence: Synthetic oligonucleotide
  Antisense strand to SEQ ID NO: 1406620
auugauagccaagguuugc

SEQ ID NO: 1406622 - RNA, 19 nt, Artificial Sequence
  Description of Artificial Sequence: Synthetic oligonucleotide
  Sense strand starting at position 651 of SEQ ID NO: 1243287
cuuggcuaucaaugaaagu

SEQ ID NO: 1406623 - RNA, 19 nt, Artificial Sequence
  Description of Artificial Sequence: Synthetic oligonucleotide
  Antisense strand to SEQ ID NO: 1406622
acuuucauugauagccaag

SEQ ID NO: 1406624 - RNA, 19 nt, Artificial Sequence
  Description of Artificial Sequence: Synthetic oligonucleotide
  Sense strand starting at position 2024 of SEQ ID NO: 1243287
gggucucuuaagcagggau

SEQ ID NO: 1406625 - RNA, 19 nt, Artificial Sequence
  Description of Artificial Sequence: Synthetic oligonucleotide
  Antisense strand to SEQ ID NO: 1406624
aucccugcuuaagagaccc

SEQ ID NO: 1406626 - RNA, 19 nt, Artificial Sequence
  Description of Artificial Sequence: Synthetic oligonucleotide
  Sense strand starting at position 2382 of SEQ ID NO: 1243287
uuaagugagcauuaugguu

SEQ ID NO: 1406627 - RNA, 19 nt, Artificial Sequence
  Description of Artificial Sequence: Synthetic oligonucleotide
  Antisense strand to SEQ ID NO: 1406626
aaccauaaugcucacuuaa

SEQ ID NO: 1406628 - RNA, 19 nt, Artificial Sequence
  Description of Artificial Sequence: Synthetic oligonucleotide
  Sense strand starting at position 2669 of SEQ ID NO: 1243287
gggucuccuuggcuguaaa

SEQ ID NO: 1406629 - RNA, 19 nt, Artificial Sequence
  Description of Artificial Sequence: Synthetic oligonucleotide
  Antisense strand to SEQ ID NO: 1406628
uuuacagccaaggagaccc

SEQ ID NO: 1406630 - RNA, 19 nt, Artificial Sequence
  Description of Artificial Sequence: Synthetic oligonucleotide
  Sense strand starting at position 2706 of SEQ ID NO: 1243287
cuugguuuacuuggauuaa

SEQ ID NO: 1406631 - RNA, 19 nt, Artificial Sequence
  Description of Artificial Sequence: Synthetic oligonucleotide
  Antisense strand to SEQ ID NO: 1406630
uuaauccaaguaaaccaag

SEQ ID NO: 1406632 - RNA, 19 nt, Artificial Sequence
  Description of Artificial Sequence: Synthetic oligonucleotide
  Sense strand starting at position 2796 of SEQ ID NO: 1243287
auagcuguagcucaauaaa

SEQ ID NO: 1406633 - RNA, 19 nt, Artificial Sequence
  Description of Artificial Sequence: Synthetic oligonucleotide
  Antisense strand to SEQ ID NO: 1406632
uuuauugagcuacagcuau

SEQ ID NO: 1406634 - RNA, 19 nt, Artificial Sequence
  Description of Artificial Sequence: Synthetic oligonucleotide
  Sense strand starting at position 2799 of SEQ ID NO: 1243287
gcuguagcucaauaaaugu

SEQ ID NO: 1406635 - RNA, 19 nt, Artificial Sequence
  Description of Artificial Sequence: Synthetic oligonucleotide
  Antisense strand to SEQ ID NO: 1406634
acauuuauugagcuacagc

SEQ ID NO: 1406636 - RNA, 19 nt, Artificial Sequence
  Description of Artificial Sequence: Synthetic oligonucleotide
  Sense strand starting at position 2837 of SEQ ID NO: 1243287
cuacguggucaacaugaca

SEQ ID NO: 1406637 - RNA, 19 nt, Artificial Sequence
  Description of Artificial Sequence: Synthetic oligonucleotide
  Antisense strand to SEQ ID NO: 1406636
ugucauguugaccacguag

SEQ ID NO: 1406638 - RNA, 19 nt, Artificial Sequence
  Description of Artificial Sequence: Synthetic oligonucleotide
  Sense strand starting at position 2840 of SEQ ID NO: 1243287
cguggucaacaugacauua

SEQ ID NO: 1406639 - RNA, 19 nt, Artificial Sequence
  Description of Artificial Sequence: Synthetic oligonucleotide
  Antisense strand to SEQ ID NO: 1406638
uaaugucauguugaccacg

SEQ ID NO: 1406640 - RNA, 19 nt, Artificial Sequence
  Description of Artificial Sequence: Synthetic oligonucleotide
  Sense strand starting at position 2851 of SEQ ID NO: 1243287
ugacauuauuuccgauuua

SEQ ID NO: 1406641 - RNA, 19 nt, Artificial Sequence
  Description of Artificial Sequence: Synthetic oligonucleotide
  Antisense strand to SEQ ID NO: 1406640
uaaaucggaaauaauguca

SEQ ID NO: 1406642 - RNA, 19 nt, Artificial Sequence
  Description of Artificial Sequence: Synthetic oligonucleotide
  Sense strand starting at position 2865 of SEQ ID NO: 1243287
auuuauagaugauggaacu

SEQ ID NO: 1406643 - RNA, 19 nt, Artificial Sequence
  Description of Artificial Sequence: Synthetic oligonucleotide
  Antisense strand to SEQ ID NO: 1406642
aguuccaucaucuauaaau

SEQ ID NO: 1406644 - RNA, 19 nt, Artificial Sequence
  Description of Artificial Sequence: Synthetic oligonucleotide
  Sense strand starting at position 2891 of SEQ ID NO: 1243287
gcaaucauguacuuucuga

SEQ ID NO: 1406645 - RNA, 19 nt, Artificial Sequence
  Description of Artificial Sequence: Synthetic oligonucleotide
  Antisense strand to SEQ ID NO: 1406644
ucagaaaguacaugauugc

SEQ ID NO: 1406646 - RNA, 19 nt, Artificial Sequence
  Description of Artificial Sequence: Synthetic oligonucleotide
  Sense strand starting at position 2992 of SEQ ID NO: 1243287
cccucaguagauuggaauu

SEQ ID NO: 1406647 - RNA, 19 nt, Artificial Sequence
  Description of Artificial Sequence: Synthetic oligonucleotide
  Antisense strand to SEQ ID NO: 1406646
aauuccaaucuacugaggg

SEQ ID NO: 1406648 - RNA, 19 nt, Artificial Sequence
  Description of Artificial Sequence: Synthetic oligonucleotide
  Sense strand starting at position 3082 of SEQ ID NO: 1243287
aaacgauaguuauuaucgu

SEQ ID NO: 1406649 - RNA, 19 nt, Artificial Sequence
  Description of Artificial Sequence: Synthetic oligonucleotide
  Antisense strand to SEQ ID NO: 1406648
acgauaauaacuaucguuu

SEQ ID NO: 1406650 - RNA, 19 nt, Artificial Sequence
  Description of Artificial Sequence: Synthetic oligonucleotide
  Sense strand starting at position 3090 of SEQ ID NO: 1243287
guuauuaucguuuacaauc

SEQ ID NO: 1406651 - RNA, 19 nt, Artificial Sequence
  Description of Artificial Sequence: Synthetic oligonucleotide
  Antisense strand to SEQ ID NO: 1406650
gauuguaaacgauaauaac

SEQ ID NO: 1406652 - RNA, 19 nt, Artificial Sequence
  Description of Artificial Sequence: Synthetic oligonucleotide
  Sense strand starting at position 3137 of SEQ ID NO: 1243287
aggcuaggcucagugaauu

SEQ ID NO: 1406653 - RNA, 19 nt, Artificial Sequence
  Description of Artificial Sequence: Synthetic oligonucleotide
  Antisense strand to SEQ ID NO: 1406652
aauucacugagccuagccu

SEQ ID NO: 1406654 - RNA, 19 nt, Artificial Sequence
  Description of Artificial Sequence: Synthetic oligonucleotide
  Sense strand starting at position 3173 of SEQ ID NO: 1243287
gauccuauagccgagaagu

SEQ ID NO: 1406655 - RNA, 19 nt, Artificial Sequence
  Description of Artificial Sequence: Synthetic oligonucleotide
  Antisense strand to SEQ ID NO: 1406654
acuucucggcuauaggauc

SEQ ID NO: 1406656 - RNA, 19 nt, Artificial Sequence
  Description of Artificial Sequence: Synthetic oligonucleotide
  Sense strand starting at position 3194 of SEQ ID NO: 1243287
cagaguuucccagggacuu

SEQ ID NO: 1406657 - RNA, 19 nt, Artificial Sequence
  Description of Artificial Sequence: Synthetic oligonucleotide
  Antisense strand to SEQ ID NO: 1406656
aagucccugggaaacucug

SEQ ID NO: 1406658 - RNA, 19 nt, Artificial Sequence
  Description of Artificial Sequence: Synthetic oligonucleotide
  Sense strand starting at position 3301 of SEQ ID NO: 1243287
aaauaagauggcgaucuuu

SEQ ID NO: 1406659 - RNA, 19 nt, Artificial Sequence
  Description of Artificial Sequence: Synthetic oligonucleotide
  Antisense strand to SEQ ID NO: 1406658
aaagaucgccaucuuauuu

SEQ ID NO: 1406660 - RNA, 19 nt, Artificial Sequence
  Description of Artificial Sequence: Synthetic oligonucleotide
  Sense strand starting at position 3344 of SEQ ID NO: 1243287
cuagcacuugcagauaguu

SEQ ID NO: 1406661 - RNA, 19 nt, Artificial Sequence
  Description of Artificial Sequence: Synthetic oligonucleotide
  Antisense strand to SEQ ID NO: 1406660
aacuaucugcaagugcuag

SEQ ID NO: 1406662 - RNA, 19 nt, Artificial Sequence
  Description of Artificial Sequence: Synthetic oligonucleotide
  Sense strand starting at position 3350 of SEQ ID NO: 1243287
cuugcagauaguugacagu

SEQ ID NO: 1406663 - RNA, 19 nt, Artificial Sequence
  Description of Artificial Sequence: Synthetic oligonucleotide
  Antisense strand to SEQ ID NO: 1406662
acugucaacuaucugcaag

SEQ ID NO: 1406664 - RNA, 19 nt, Artificial Sequence
  Description of Artificial Sequence: Synthetic oligonucleotide
  Sense strand starting at position 3359 of SEQ ID NO: 1243287
aguugacaguuacacauuu

SEQ ID NO: 1406665 - RNA, 19 nt, Artificial Sequence
  Description of Artificial Sequence: Synthetic oligonucleotide
  Antisense strand to SEQ ID NO: 1406664
aaauguguaacugucaacu

SEQ ID NO: 1406666 - RNA, 19 nt, Artificial Sequence
  Description of Artificial Sequence: Synthetic oligonucleotide
  Sense strand starting at position 3406 of SEQ ID NO: 1243287
ccuaccuucggcugacaau

SEQ ID NO: 1406667 - RNA, 19 nt, Artificial Sequence
  Description of Artificial Sequence: Synthetic oligonucleotide
  Antisense strand to SEQ ID NO: 1406666
auugucagccgaagguagg

SEQ ID NO: 1406668 - RNA, 19 nt, Artificial Sequence
  Description of Artificial Sequence: Synthetic oligonucleotide
  Sense strand starting at position 3407 of SEQ ID NO: 1243287
cuaccuucggcugacaaua

SEQ ID NO: 1406669 - RNA, 19 nt, Artificial Sequence
  Description of Artificial Sequence: Synthetic oligonucleotide
  Antisense strand to SEQ ID NO: 1406668
uauugucagccgaagguag

SEQ ID NO: 1406670 - RNA, 19 nt, Artificial Sequence
  Description of Artificial Sequence: Synthetic oligonucleotide
  Sense strand starting at position 3496 of SEQ ID NO: 1243287
cgugcugaauaacuggaua

SEQ ID NO: 1406671 - RNA, 19 nt, Artificial Sequence
  Description of Artificial Sequence: Synthetic oligonucleotide
  Antisense strand to SEQ ID NO: 1406670
uauccaguuauucagcacg

SEQ ID NO: 1406672 - RNA, 19 nt, Artificial Sequence
  Description of Artificial Sequence: Synthetic oligonucleotide
  Sense strand starting at position 3520 of SEQ ID NO: 1243287
uuacgugauccauagagau

SEQ ID NO: 1406673 - RNA, 19 nt, Artificial Sequence
  Description of Artificial Sequence: Synthetic oligonucleotide
  Antisense strand to SEQ ID NO: 1406672
aucucuauggaucacguaa

SEQ ID NO: 1406674 - RNA, 19 nt, Artificial Sequence
  Description of Artificial Sequence: Synthetic oligonucleotide
  Sense strand starting at position 3522 of SEQ ID NO: 1243287
acgugauccauagagaugu

SEQ ID NO: 1406675 - RNA, 19 nt, Artificial Sequence
  Description of Artificial Sequence: Synthetic oligonucleotide
  Antisense strand to SEQ ID NO: 1406674
acaucucuauggaucacgu

SEQ ID NO: 1406676 - RNA, 19 nt, Artificial Sequence
  Description of Artificial Sequence: Synthetic oligonucleotide
  Sense strand starting at position 3526 of SEQ ID NO: 1243287
gauccauagagaugucgug

SEQ ID NO: 1406677 - RNA, 19 nt, Artificial Sequence
  Description of Artificial Sequence: Synthetic oligonucleotide
  Antisense strand to SEQ ID NO: 1406676
cacgacaucucuauggauc

SEQ ID NO: 1406678 - RNA, 19 nt, Artificial Sequence
  Description of Artificial Sequence: Synthetic oligonucleotide
  Sense strand starting at position 3532 of SEQ ID NO: 1243287
uagagaugucguggcaaua

SEQ ID NO: 1406679 - RNA, 19 nt, Artificial Sequence
  Description of Artificial Sequence: Synthetic oligonucleotide
  Antisense strand to SEQ ID NO: 1406678
uauugccacgacaucucua

SEQ ID NO: 1406680 - RNA, 19 nt, Artificial Sequence
  Description of Artificial Sequence: Synthetic oligonucleotide
  Sense strand starting at position 3721 of SEQ ID NO: 1243287
aaagccucugugugaauga

SEQ ID NO: 1406681 - RNA, 19 nt, Artificial Sequence
  Description of Artificial Sequence: Synthetic oligonucleotide
  Antisense strand to SEQ ID NO: 1406680
ucauucacacagaggcuuu

SEQ ID NO: 1406682 - RNA, 19 nt, Artificial Sequence
  Description of Artificial Sequence: Synthetic oligonucleotide
  Sense strand starting at position 3746 of SEQ ID NO: 1243287
gagggcuaucucuagugaa

SEQ ID NO: 1406683 - RNA, 19 nt, Artificial Sequence
  Description of Artificial Sequence: Synthetic oligonucleotide
  Antisense strand to SEQ ID NO: 1406682
uucacuagagauagcccuc

SEQ ID NO: 1406684 - RNA, 19 nt, Artificial Sequence
  Description of Artificial Sequence: Synthetic oligonucleotide
  Sense strand starting at position 3784 of SEQ ID NO: 1243287
auugcaagccgucauggaa

SEQ ID NO: 1406685 - RNA, 19 nt, Artificial Sequence
  Description of Artificial Sequence: Synthetic oligonucleotide
  Antisense strand to SEQ ID NO: 1406684
uuccaugacggcuugcaau

SEQ ID NO: 1406686 - RNA, 19 nt, Artificial Sequence
  Description of Artificial Sequence: Synthetic oligonucleotide
  Sense strand starting at position 3973 of SEQ ID NO: 1243287
gaaagaauguugucuauug

SEQ ID NO: 1406687 - RNA, 19 nt, Artificial Sequence
  Description of Artificial Sequence: Synthetic oligonucleotide
  Antisense strand to SEQ ID NO: 1406686
caauagacaacauucuuuc

SEQ ID NO: 1406688 - RNA, 19 nt, Artificial Sequence
  Description of Artificial Sequence: Synthetic oligonucleotide
  Sense strand starting at position 3975 of SEQ ID NO: 1243287
aagaauguugucuauuggu

SEQ ID NO: 1406689 - RNA, 19 nt, Artificial Sequence
  Description of Artificial Sequence: Synthetic oligonucleotide
  Antisense strand to SEQ ID NO: 1406688
accaauagacaacauucuu

SEQ ID NO: 1406690 - RNA, 19 nt, Artificial Sequence
  Description of Artificial Sequence: Synthetic oligonucleotide
  Sense strand starting at position 385 of SEQ ID NO: 1243288
gcuuccauagcuggacaau

SEQ ID NO: 1406691 - RNA, 19 nt, Artificial Sequence
  Description of Artificial Sequence: Synthetic oligonucleotide
  Antisense strand to SEQ ID NO: 1406690
auuguccagcuauggaagc

SEQ ID NO: 1406692 - RNA, 19 nt, Artificial Sequence
  Description of Artificial Sequence: Synthetic oligonucleotide
  Sense strand starting at position 386 of SEQ ID NO: 1243288
cuuccauagcuggacaauu

SEQ ID NO: 1406693 - RNA, 19 nt, Artificial Sequence
  Description of Artificial Sequence: Synthetic oligonucleotide
  Antisense strand to SEQ ID NO: 1406692
aauuguccagcuauggaag

SEQ ID NO: 1406694 - RNA, 19 nt, Artificial Sequence
  Description of Artificial Sequence: Synthetic oligonucleotide
  Sense strand starting at position 394 of SEQ ID NO: 1243288
gcuggacaauugguugauu

SEQ ID NO: 1406695 - RNA, 19 nt, Artificial Sequence
  Description of Artificial Sequence: Synthetic oligonucleotide
  Antisense strand to SEQ ID NO: 1406694
aaucaaccaauuguccagc

SEQ ID NO: 1406696 - RNA, 19 nt, Artificial Sequence
  Description of Artificial Sequence: Synthetic oligonucleotide
  Sense strand starting at position 406 of SEQ ID NO: 1243288
guugauuggagcugacaag

SEQ ID NO: 1406697 - RNA, 19 nt, Artificial Sequence
  Description of Artificial Sequence: Synthetic oligonucleotide
  Antisense strand to SEQ ID NO: 1406696
cuugucagcuccaaucaac

SEQ ID NO: 1406698 - RNA, 19 nt, Artificial Sequence
  Description of Artificial Sequence: Synthetic oligonucleotide
  Sense strand starting at position 488 of SEQ ID NO: 1243288
gggugaagguucucuaagg

SEQ ID NO: 1406699 - RNA, 19 nt, Artificial Sequence
  Description of Artificial Sequence: Synthetic oligonucleotide
  Antisense strand to SEQ ID NO: 1406698
ccuuagagaaccuucaccc

SEQ ID NO: 1406700 - RNA, 19 nt, Artificial Sequence
  Description of Artificial Sequence: Synthetic oligonucleotide
  Sense strand starting at position 623 of SEQ ID NO: 1243288
cggcgcuuucuccacauaa

SEQ ID NO: 1406701 - RNA, 19 nt, Artificial Sequence
  Description of Artificial Sequence: Synthetic oligonucleotide
  Antisense strand to SEQ ID NO: 1406700
uuauguggagaaagcgccg

SEQ ID NO: 1406702 - RNA, 19 nt, Artificial Sequence
  Description of Artificial Sequence: Synthetic oligonucleotide
  Sense strand starting at position 625 of SEQ ID NO: 1243288
gcgcuuucuccacauaagu

SEQ ID NO: 1406703 - RNA, 19 nt, Artificial Sequence
  Description of Artificial Sequence: Synthetic oligonucleotide
  Antisense strand to SEQ ID NO: 1406702
acuuauguggagaaagcgc

SEQ ID NO: 1406704 - RNA, 19 nt, Artificial Sequence
  Description of Artificial Sequence: Synthetic oligonucleotide
  Sense strand starting at position 1058 of SEQ ID NO: 1243288
agcgcuucccuccaugaga

SEQ ID NO: 1406705 - RNA, 19 nt, Artificial Sequence
  Description of Artificial Sequence: Synthetic oligonucleotide
  Antisense strand to SEQ ID NO: 1406704
ucucauggagggaagcgcu

SEQ ID NO: 1406706 - RNA, 19 nt, Artificial Sequence
  Description of Artificial Sequence: Synthetic oligonucleotide
  Sense strand starting at position 2326 of SEQ ID NO: 1243288
ugggcucacucauugagca

SEQ ID NO: 1406707 - RNA, 19 nt, Artificial Sequence
  Description of Artificial Sequence: Synthetic oligonucleotide
  Antisense strand to SEQ ID NO: 1406706
ugcucaaugagugagccca

SEQ ID NO: 1406708 - RNA, 19 nt, Artificial Sequence
  Description of Artificial Sequence: Synthetic oligonucleotide
  Sense strand starting at position 2431 of SEQ ID NO: 1243288
uucuucucugaggaaguuu

SEQ ID NO: 1406709 - RNA, 19 nt, Artificial Sequence
  Description of Artificial Sequence: Synthetic oligonucleotide
  Antisense strand to SEQ ID NO: 1406708
aaacuuccucagagaagaa

SEQ ID NO: 1406710 - RNA, 19 nt, Artificial Sequence
  Description of Artificial Sequence: Synthetic oligonucleotide
  Sense strand starting at position 2482 of SEQ ID NO: 1243288
gagaucgagcccuauccaa

SEQ ID NO: 1406711 - RNA, 19 nt, Artificial Sequence
  Description of Artificial Sequence: Synthetic oligonucleotide
  Antisense strand to SEQ ID NO: 1406710
uuggauagggcucgaucuc

SEQ ID NO: 1406712 - RNA, 19 nt, Artificial Sequence
  Description of Artificial Sequence: Synthetic oligonucleotide
  Sense strand starting at position 2781 of SEQ ID NO: 1243288
gaaguagauacuggagguu

SEQ ID NO: 1406713 - RNA, 19 nt, Artificial Sequence
  Description of Artificial Sequence: Synthetic oligonucleotide
  Antisense strand to SEQ ID NO: 1406712
aaccuccaguaucuacuuc

SEQ ID NO: 1406714 - RNA, 19 nt, Artificial Sequence
  Description of Artificial Sequence: Synthetic oligonucleotide
  Sense strand starting at position 2784 of SEQ ID NO: 1243288
guagauacuggagguuuau

SEQ ID NO: 1406715 - RNA, 19 nt, Artificial Sequence
  Description of Artificial Sequence: Synthetic oligonucleotide
  Antisense strand to SEQ ID NO: 1406714
auaaaccuccaguaucuac

SEQ ID NO: 1406716 - RNA, 19 nt, Artificial Sequence
  Description of Artificial Sequence: Synthetic oligonucleotide
  Sense strand starting at position 3025 of SEQ ID NO: 1243288
gucugagguucagugaguu

SEQ ID NO: 1406717 - RNA, 19 nt, Artificial Sequence
  Description of Artificial Sequence: Synthetic oligonucleotide
  Antisense strand to SEQ ID NO: 1406716
aacucacugaaccucagac

SEQ ID NO: 1406718 - RNA, 19 nt, Artificial Sequence
  Description of Artificial Sequence: Synthetic oligonucleotide
  Sense strand starting at position 3029 of SEQ ID NO: 1243288
gagguucagugaguuguaa

SEQ ID NO: 1406719 - RNA, 19 nt, Artificial Sequence
  Description of Artificial Sequence: Synthetic oligonucleotide
  Antisense strand to SEQ ID NO: 1406718
uuacaacucacugaaccuc

SEQ ID NO: 1406720 - RNA, 19 nt, Artificial Sequence
  Description of Artificial Sequence: Synthetic oligonucleotide
  Sense strand starting at position 3041 of SEQ ID NO: 1243288
guuguaauuuguucaaggu

SEQ ID NO: 1406721 - RNA, 19 nt, Artificial Sequence
  Description of Artificial Sequence: Synthetic oligonucleotide
  Antisense strand to SEQ ID NO: 1406720
accuugaacaaauuacaac

SEQ ID NO: 1406722 - RNA, 19 nt, Artificial Sequence
  Description of Artificial Sequence: Synthetic oligonucleotide
  Sense strand starting at position 3167 of SEQ ID NO: 1243288
ccuugagcacuugaucuga

SEQ ID NO: 1406723 - RNA, 19 nt, Artificial Sequence
  Description of Artificial Sequence: Synthetic oligonucleotide
  Antisense strand to SEQ ID NO: 1406722
ucagaucaagugcucaagg

SEQ ID NO: 1406724 - RNA, 19 nt, Artificial Sequence
  Description of Artificial Sequence: Synthetic oligonucleotide
  Sense strand starting at position 3239 of SEQ ID NO: 1243288
uggauccucuuauaagaaa

SEQ ID NO: 1406725 - RNA, 19 nt, Artificial Sequence
  Description of Artificial Sequence: Synthetic oligonucleotide
  Antisense strand to SEQ ID NO: 1406724
uuucuuauaagaggaucca

SEQ ID NO: 1406726 - RNA, 19 nt, Artificial Sequence
  Description of Artificial Sequence: Synthetic oligonucleotide
  Sense strand starting at position 3289 of SEQ ID NO: 1243288
ugaugugcauuccuuugua

SEQ ID NO: 1406727 - RNA, 19 nt, Artificial Sequence
  Description of Artificial Sequence: Synthetic oligonucleotide
  Antisense strand to SEQ ID NO: 1406726
uacaaaggaaugcacauca

SEQ ID NO: 1406728 - RNA, 19 nt, Artificial Sequence
  Description of Artificial Sequence: Synthetic oligonucleotide
  Sense strand starting at position 3307 of SEQ ID NO: 1243288
acuagauguacguguauuu

SEQ ID NO: 1406729 - RNA, 19 nt, Artificial Sequence
  Description of Artificial Sequence: Synthetic oligonucleotide
  Antisense strand to SEQ ID NO: 1406728
aaauacacguacaucuagu

SEQ ID NO: 1406730 - RNA, 19 nt, Artificial Sequence
  Description of Artificial Sequence: Synthetic oligonucleotide
  Sense strand starting at position 3415 of SEQ ID NO: 1243288
gggaacuucugccuauaac

SEQ ID NO: 1406731 - RNA, 19 nt, Artificial Sequence
  Description of Artificial Sequence: Synthetic oligonucleotide
  Antisense strand to SEQ ID NO: 1406730
guuauaggcagaaguuccc

SEQ ID NO: 1406732 - RNA, 19 nt, Artificial Sequence
  Description of Artificial Sequence: Synthetic oligonucleotide
  Sense strand starting at position 3416 of SEQ ID NO: 1243288
ggaacuucugccuauaacu

SEQ ID NO: 1406733 - RNA, 19 nt, Artificial Sequence
  Description of Artificial Sequence: Synthetic oligonucleotide
  Antisense strand to SEQ ID NO: 1406732
aguuauaggcagaaguucc

SEQ ID NO: 1406734 - RNA, 19 nt, Artificial Sequence
  Description of Artificial Sequence: Synthetic oligonucleotide
  Sense strand starting at position 3551 of SEQ ID NO: 1243288
accauauguuuccuuagga

SEQ ID NO: 1406735 - RNA, 19 nt, Artificial Sequence
  Description of Artificial Sequence: Synthetic oligonucleotide
  Antisense strand to SEQ ID NO: 1406734
uccuaaggaaacauauggu

SEQ ID NO: 1406736 - RNA, 19 nt, Artificial Sequence
  Description of Artificial Sequence: Synthetic oligonucleotide
  Sense strand starting at position 3552 of SEQ ID NO: 1243288
ccauauguuuccuuaggau

SEQ ID NO: 1406737 - RNA, 19 nt, Artificial Sequence
  Description of Artificial Sequence: Synthetic oligonucleotide
  Antisense strand to SEQ ID NO: 1406736
auccuaaggaaacauaugg

SEQ ID NO: 1406738 - RNA, 19 nt, Artificial Sequence
  Description of Artificial Sequence: Synthetic oligonucleotide
  Sense strand starting at position 3561 of SEQ ID NO: 1243288
uccuuaggauucucuuuga

SEQ ID NO: 1406739 - RNA, 19 nt, Artificial Sequence
  Description of Artificial Sequence: Synthetic oligonucleotide
  Antisense strand to SEQ ID NO: 1406738
ucaaagagaauccuaagga

SEQ ID NO: 1406740 - RNA, 19 nt, Artificial Sequence
  Description of Artificial Sequence: Synthetic oligonucleotide
  Sense strand starting at position 3564 of SEQ ID NO: 1243288
uuaggauucucuuugauaa

SEQ ID NO: 1406741 - RNA, 19 nt, Artificial Sequence
  Description of Artificial Sequence: Synthetic oligonucleotide
  Antisense strand to SEQ ID NO: 1406740
uuaucaaagagaauccuaa

SEQ ID NO: 1406742 - RNA, 19 nt, Artificial Sequence
  Description of Artificial Sequence: Synthetic oligonucleotide
  Sense strand starting at position 3653 of SEQ ID NO: 1243288
accauaaaucuggguuggu

SEQ ID NO: 1406743 - RNA, 19 nt, Artificial Sequence
  Description of Artificial Sequence: Synthetic oligonucleotide
  Antisense strand to SEQ ID NO: 1406742
accaacccagauuuauggu

SEQ ID NO: 1406744 - RNA, 19 nt, Artificial Sequence
  Description of Artificial Sequence: Synthetic oligonucleotide
  Sense strand starting at position 3654 of SEQ ID NO: 1243288
ccauaaaucuggguuggua

SEQ ID NO: 1406745 - RNA, 19 nt, Artificial Sequence
  Description of Artificial Sequence: Synthetic oligonucleotide
  Antisense strand to SEQ ID NO: 1406744
uaccaacccagauuuaugg

SEQ ID NO: 1406746 - RNA, 19 nt, Artificial Sequence
  Description of Artificial Sequence: Synthetic oligonucleotide
  Sense strand starting at position 3657 of SEQ ID NO: 1243288
uaaaucuggguugguaaca

SEQ ID NO: 1406747 - RNA, 19 nt, Artificial Sequence
  Description of Artificial Sequence: Synthetic oligonucleotide
  Antisense strand to SEQ ID NO: 1406746
uguuaccaacccagauuua

SEQ ID NO: 1406748 - RNA, 19 nt, Artificial Sequence
  Description of Artificial Sequence: Synthetic oligonucleotide
  Sense strand starting at position 3658 of SEQ ID NO: 1243288
aaaucuggguugguaacau

SEQ ID NO: 1406749 - RNA, 19 nt, Artificial Sequence
  Description of Artificial Sequence: Synthetic oligonucleotide
  Antisense strand to SEQ ID NO: 1406748
auguuaccaacccagauuu

SEQ ID NO: 1406750 - RNA, 19 nt, Artificial Sequence
  Description of Artificial Sequence: Synthetic oligonucleotide
  Sense strand starting at position 3751 of SEQ ID NO: 1243288
ggagaugagauggguugua

SEQ ID NO: 1406751 - RNA, 19 nt, Artificial Sequence
  Description of Artificial Sequence: Synthetic oligonucleotide
  Antisense strand to SEQ ID NO: 1406750
uacaacccaucucaucucc

SEQ ID NO: 1406752 - RNA, 19 nt, Artificial Sequence
  Description of Artificial Sequence: Synthetic oligonucleotide
  Sense strand starting at position 3815 of SEQ ID NO: 1243288
agaaauaaauggcaguuaa

SEQ ID NO: 1406753 - RNA, 19 nt, Artificial Sequence
  Description of Artificial Sequence: Synthetic oligonucleotide
  Antisense strand to SEQ ID NO: 1406752
uuaacugccauuuauuucu

SEQ ID NO: 1406754 - RNA, 19 nt, Artificial Sequence
  Description of Artificial Sequence: Synthetic oligonucleotide
  Sense strand starting at position 3823 of SEQ ID NO: 1243288
auggcaguuaacgggaaau

SEQ ID NO: 1406755 - RNA, 19 nt, Artificial Sequence
  Description of Artificial Sequence: Synthetic oligonucleotide
  Antisense strand to SEQ ID NO: 1406754
auuucccguuaacugccau

SEQ ID NO: 1406756 - RNA, 19 nt, Artificial Sequence
  Description of Artificial Sequence: Synthetic oligonucleotide
  Sense strand starting at position 3825 of SEQ ID NO: 1243288
ggcaguuaacgggaaauuc

SEQ ID NO: 1406757 - RNA, 19 nt, Artificial Sequence
  Description of Artificial Sequence: Synthetic oligonucleotide
  Antisense strand to SEQ ID NO: 1406756
gaauuucccguuaacugcc

SEQ ID NO: 1406758 - RNA, 19 nt, Artificial Sequence
  Description of Artificial Sequence: Synthetic oligonucleotide
  Sense strand starting at position 3833 of SEQ ID NO: 1243288
acgggaaauucuguuggaa

SEQ ID NO: 1406759 - RNA, 19 nt, Artificial Sequence
  Description of Artificial Sequence: Synthetic oligonucleotide
  Antisense strand to SEQ ID NO: 1406758
uuccaacagaauuucccgu

SEQ ID NO: 1406760 - RNA, 19 nt, Artificial Sequence
  Description of Artificial Sequence: Synthetic oligonucleotide
  Sense strand starting at position 3836 of SEQ ID NO: 1243288
ggaaauucuguuggaauau

SEQ ID NO: 1406761 - RNA, 19 nt, Artificial Sequence
  Description of Artificial Sequence: Synthetic oligonucleotide
  Antisense strand to SEQ ID NO: 1406760
auauuccaacagaauuucc

SEQ ID NO: 1406762 - RNA, 19 nt, Artificial Sequence
  Description of Artificial Sequence: Synthetic oligonucleotide
  Sense strand starting at position 3877 of SEQ ID NO: 1243288
acaggaauuguuugucuau

SEQ ID NO: 1406763 - RNA, 19 nt, Artificial Sequence
  Description of Artificial Sequence: Synthetic oligonucleotide
  Antisense strand to SEQ ID NO: 1406762
auagacaaacaauuccugu

SEQ ID NO: 1406764 - RNA, 19 nt, Artificial Sequence
  Description of Artificial Sequence: Synthetic oligonucleotide
  Sense strand starting at position 3878 of SEQ ID NO: 1243288
caggaauuguuugucuauu

SEQ ID NO: 1406765 - RNA, 19 nt, Artificial Sequence
  Description of Artificial Sequence: Synthetic oligonucleotide
  Antisense strand to SEQ ID NO: 1406764
aauagacaaacaauuccug

SEQ ID NO: 1406766 - RNA, 19 nt, Artificial Sequence
  Description of Artificial Sequence: Synthetic oligonucleotide
  Sense strand starting at position 3879 of SEQ ID NO: 1243288
aggaauuguuugucuauuc

SEQ ID NO: 1406767 - RNA, 19 nt, Artificial Sequence
  Description of Artificial Sequence: Synthetic oligonucleotide
  Antisense strand to SEQ ID NO: 1406766
gaauagacaaacaauuccu

SEQ ID NO: 1406768 - RNA, 19 nt, Artificial Sequence
  Description of Artificial Sequence: Synthetic oligonucleotide
  Sense strand starting at position 3880 of SEQ ID NO: 1243288
ggaauuguuugucuauucu

SEQ ID NO: 1406769 - RNA, 19 nt, Artificial Sequence
  Description of Artificial Sequence: Synthetic oligonucleotide
  Antisense strand to SEQ ID NO: 1406768
agaauagacaaacaauucc

SEQ ID NO: 1406770 - RNA, 19 nt, Artificial Sequence
  Description of Artificial Sequence: Synthetic oligonucleotide
  Sense strand starting at position 96 of SEQ ID NO: 1243289
ugaugacauuaggcacuaa

SEQ ID NO: 1406771 - RNA, 19 nt, Artificial Sequence
  Description of Artificial Sequence: Synthetic oligonucleotide
  Antisense strand to SEQ ID NO: 1406770
uuagugccuaaugucauca

SEQ ID NO: 1406772 - RNA, 19 nt, Artificial Sequence
  Description of Artificial Sequence: Synthetic oligonucleotide
  Sense strand starting at position 106 of SEQ ID NO: 1243289
aggcacuaauuugacgaaa

SEQ ID NO: 1406773 - RNA, 19 nt, Artificial Sequence
  Description of Artificial Sequence: Synthetic oligonucleotide
  Antisense strand to SEQ ID NO: 1406772
uuucgucaaauuagugccu

SEQ ID NO: 1406774 - RNA, 19 nt, Artificial Sequence
  Description of Artificial Sequence: Synthetic oligonucleotide
  Sense strand starting at position 131 of SEQ ID NO: 1243289
ggauguuugaccgaagcuc

SEQ ID NO: 1406775 - RNA, 19 nt, Artificial Sequence
  Description of Artificial Sequence: Synthetic oligonucleotide
  Antisense strand to SEQ ID NO: 1406774
gagcuucggucaaacaucc

SEQ ID NO: 1406776 - RNA, 19 nt, Artificial Sequence
  Description of Artificial Sequence: Synthetic oligonucleotide
  Sense strand starting at position 188 of SEQ ID NO: 1243289
gagggcugucucgauuaga

SEQ ID NO: 1406777 - RNA, 19 nt, Artificial Sequence
  Description of Artificial Sequence: Synthetic oligonucleotide
  Antisense strand to SEQ ID NO: 1406776
ucuaaucgagacagcccuc

SEQ ID NO: 1406778 - RNA, 19 nt, Artificial Sequence
  Description of Artificial Sequence: Synthetic oligonucleotide
  Sense strand starting at position 191 of SEQ ID NO: 1243289
ggcugucucgauuagagag

SEQ ID NO: 1406779 - RNA, 19 nt, Artificial Sequence
  Description of Artificial Sequence: Synthetic oligonucleotide
  Antisense strand to SEQ ID NO: 1406778
cucucuaaucgagacagcc

SEQ ID NO: 1406780 - RNA, 19 nt, Artificial Sequence
  Description of Artificial Sequence: Synthetic oligonucleotide
  Sense strand starting at position 266 of SEQ ID NO: 1243289
ugacauaacugguuccaug

SEQ ID NO: 1406781 - RNA, 19 nt, Artificial Sequence
  Description of Artificial Sequence: Synthetic oligonucleotide
  Antisense strand to SEQ ID NO: 1406780
cauggaaccaguuauguca

SEQ ID NO: 1406782 - RNA, 19 nt, Artificial Sequence
  Description of Artificial Sequence: Synthetic oligonucleotide
  Sense strand starting at position 282 of SEQ ID NO: 1243289
augauauaauugguugcau

SEQ ID NO: 1406783 - RNA, 19 nt, Artificial Sequence
  Description of Artificial Sequence: Synthetic oligonucleotide
  Antisense strand to SEQ ID NO: 1406782
augcaaccaauuauaucau

SEQ ID NO: 1406784 - RNA, 19 nt, Artificial Sequence
  Description of Artificial Sequence: Synthetic oligonucleotide
  Sense strand starting at position 283 of SEQ ID NO: 1243289
ugauauaauugguugcauc

SEQ ID NO: 1406785 - RNA, 19 nt, Artificial Sequence
  Description of Artificial Sequence: Synthetic oligonucleotide
  Antisense strand to SEQ ID NO: 1406784
gaugcaaccaauuauauca

SEQ ID NO: 1406786 - RNA, 19 nt, Artificial Sequence
  Description of Artificial Sequence: Synthetic oligonucleotide
  Sense strand starting at position 284 of SEQ ID NO: 1243289
gauauaauugguugcaucu

SEQ ID NO: 1406787 - RNA, 19 nt, Artificial Sequence
  Description of Artificial Sequence: Synthetic oligonucleotide
  Antisense strand to SEQ ID NO: 1406786
agaugcaaccaauuauauc

SEQ ID NO: 1406788 - RNA, 19 nt, Artificial Sequence
  Description of Artificial Sequence: Synthetic oligonucleotide
  Sense strand starting at position 860 of SEQ ID NO: 1243289
ggccuauagacguauacug

SEQ ID NO: 1406789 - RNA, 19 nt, Artificial Sequence
  Description of Artificial Sequence: Synthetic oligonucleotide
  Antisense strand to SEQ ID NO: 1406788
caguauacgucuauaggcc

SEQ ID NO: 1406790 - RNA, 19 nt, Artificial Sequence
  Description of Artificial Sequence: Synthetic oligonucleotide
  Sense strand starting at position 868 of SEQ ID NO: 1243289
gacguauacuguccaauau

SEQ ID NO: 1406791 - RNA, 19 nt, Artificial Sequence
  Description of Artificial Sequence: Synthetic oligonucleotide
  Antisense strand to SEQ ID NO: 1406790
auauuggacaguauacguc

SEQ ID NO: 1406792 - RNA, 19 nt, Artificial Sequence
  Description of Artificial Sequence: Synthetic oligonucleotide
  Sense strand starting at position 869 of SEQ ID NO: 1243289
acguauacuguccaauaug

SEQ ID NO: 1406793 - RNA, 19 nt, Artificial Sequence
  Description of Artificial Sequence: Synthetic oligonucleotide
  Antisense strand to SEQ ID NO: 1406792
cauauuggacaguauacgu

SEQ ID NO: 1406794 - RNA, 19 nt, Artificial Sequence
  Description of Artificial Sequence: Synthetic oligonucleotide
  Sense strand starting at position 986 of SEQ ID NO: 1243289
acggcucauggcuacuaua

SEQ ID NO: 1406795 - RNA, 19 nt, Artificial Sequence
  Description of Artificial Sequence: Synthetic oligonucleotide
  Antisense strand to SEQ ID NO: 1406794
uauaguagccaugagccgu

SEQ ID NO: 1406796 - RNA, 19 nt, Artificial Sequence
  Description of Artificial Sequence: Synthetic oligonucleotide
  Sense strand starting at position 1208 of SEQ ID NO: 1243289
agcugacauguagauuguu

SEQ ID NO: 1406797 - RNA, 19 nt, Artificial Sequence
  Description of Artificial Sequence: Synthetic oligonucleotide
  Antisense strand to SEQ ID NO: 1406796
aacaaucuacaugucagcu

SEQ ID NO: 1406798 - RNA, 19 nt, Artificial Sequence
  Description of Artificial Sequence: Synthetic oligonucleotide
  Sense strand starting at position 1213 of SEQ ID NO: 1243289
acauguagauuguuuguaa

SEQ ID NO: 1406799 - RNA, 19 nt, Artificial Sequence
  Description of Artificial Sequence: Synthetic oligonucleotide
  Antisense strand to SEQ ID NO: 1406798
uuacaaacaaucuacaugu

SEQ ID NO: 1406800 - RNA, 19 nt, Artificial Sequence
  Description of Artificial Sequence: Synthetic oligonucleotide
  Sense strand starting at position 1214 of SEQ ID NO: 1243289
cauguagauuguuuguaac

SEQ ID NO: 1406801 - RNA, 19 nt, Artificial Sequence
  Description of Artificial Sequence: Synthetic oligonucleotide
  Antisense strand to SEQ ID NO: 1406800
guuacaaacaaucuacaug

SEQ ID NO: 1406802 - RNA, 19 nt, Artificial Sequence
  Description of Artificial Sequence: Synthetic oligonucleotide
  Sense strand starting at position 1216 of SEQ ID NO: 1243289
uguagauuguuuguaacaa

SEQ ID NO: 1406803 - RNA, 19 nt, Artificial Sequence
  Description of Artificial Sequence: Synthetic oligonucleotide
  Antisense strand to SEQ ID NO: 1406802
uuguuacaaacaaucuaca

SEQ ID NO: 1406804 - RNA, 19 nt, Artificial Sequence
  Description of Artificial Sequence: Synthetic oligonucleotide
  Sense strand starting at position 1237 of SEQ ID NO: 1243289
aguaaauuaucauuagcug

SEQ ID NO: 1406805 - RNA, 19 nt, Artificial Sequence
  Description of Artificial Sequence: Synthetic oligonucleotide
  Antisense strand to SEQ ID NO: 1406804
cagcuaaugauaauuuacu

SEQ ID NO: 1406806 - RNA, 19 nt, Artificial Sequence
  Description of Artificial Sequence: Synthetic oligonucleotide
  Sense strand starting at position 1338 of SEQ ID NO: 1243289
agguaauuggguuguugau

SEQ ID NO: 1406807 - RNA, 19 nt, Artificial Sequence
  Description of Artificial Sequence: Synthetic oligonucleotide
  Antisense strand to SEQ ID NO: 1406806
aucaacaacccaauuaccu

SEQ ID NO: 1406808 - RNA, 19 nt, Artificial Sequence
  Description of Artificial Sequence: Synthetic oligonucleotide
  Sense strand starting at position 1340 of SEQ ID NO: 1243289
guaauuggguuguugauau

SEQ ID NO: 1406809 - RNA, 19 nt, Artificial Sequence
  Description of Artificial Sequence: Synthetic oligonucleotide
  Antisense strand to SEQ ID NO: 1406808
auaucaacaacccaauuac

SEQ ID NO: 1406810 - RNA, 19 nt, Artificial Sequence
  Description of Artificial Sequence: Synthetic oligonucleotide
  Sense strand starting at position 1344 of SEQ ID NO: 1243289
uuggguuguugauauuuaa

SEQ ID NO: 1406811 - RNA, 19 nt, Artificial Sequence
  Description of Artificial Sequence: Synthetic oligonucleotide
  Antisense strand to SEQ ID NO: 1406810
uuaaauaucaacaacccaa

SEQ ID NO: 1406812 - RNA, 19 nt, Artificial Sequence
  Description of Artificial Sequence: Synthetic oligonucleotide
  Sense strand starting at position 1430 of SEQ ID NO: 1243289
auuuguuaugccuguguag

SEQ ID NO: 1406813 - RNA, 19 nt, Artificial Sequence
  Description of Artificial Sequence: Synthetic oligonucleotide
  Antisense strand to SEQ ID NO: 1406812
cuacacaggcauaacaaau

SEQ ID NO: 1406814 - RNA, 19 nt, Artificial Sequence
  Description of Artificial Sequence: Synthetic oligonucleotide
  Sense strand starting at position 1458 of SEQ ID NO: 1243289
guuagaaauguccagcccu

SEQ ID NO: 1406815 - RNA, 19 nt, Artificial Sequence
  Description of Artificial Sequence: Synthetic oligonucleotide
  Antisense strand to SEQ ID NO: 1406814
agggcuggacauuucuaac

SEQ ID NO: 1406816 - RNA, 19 nt, Artificial Sequence
  Description of Artificial Sequence: Synthetic oligonucleotide
  Sense strand starting at position 1535 of SEQ ID NO: 1243289
guagacaugcuccaugaau

SEQ ID NO: 1406817 - RNA, 19 nt, Artificial Sequence
  Description of Artificial Sequence: Synthetic oligonucleotide
  Antisense strand to SEQ ID NO: 1406816
auucauggagcaugucuac

SEQ ID NO: 1406818 - RNA, 19 nt, Artificial Sequence
  Description of Artificial Sequence: Synthetic oligonucleotide
  Sense strand starting at position 1537 of SEQ ID NO: 1243289
agacaugcuccaugaauuc

SEQ ID NO: 1406819 - RNA, 19 nt, Artificial Sequence
  Description of Artificial Sequence: Synthetic oligonucleotide
  Antisense strand to SEQ ID NO: 1406818
gaauucauggagcaugucu

SEQ ID NO: 1406820 - RNA, 19 nt, Artificial Sequence
  Description of Artificial Sequence: Synthetic oligonucleotide
  Sense strand starting at position 1617 of SEQ ID NO: 1243289
ggcaaucucaguuacagag

SEQ ID NO: 1406821 - RNA, 19 nt, Artificial Sequence
  Description of Artificial Sequence: Synthetic oligonucleotide
  Antisense strand to SEQ ID NO: 1406820
cucuguaacugagauugcc

SEQ ID NO: 1406822 - RNA, 19 nt, Artificial Sequence
  Description of Artificial Sequence: Synthetic oligonucleotide
  Sense strand starting at position 1649 of SEQ ID NO: 1243289
ucauuugccuucccagagu

SEQ ID NO: 1406823 - RNA, 19 nt, Artificial Sequence
  Description of Artificial Sequence: Synthetic oligonucleotide
  Antisense strand to SEQ ID NO: 1406822
acucugggaaggcaaauga

SEQ ID NO: 1406824 - RNA, 19 nt, Artificial Sequence
  Description of Artificial Sequence: Synthetic oligonucleotide
  Sense strand starting at position 1705 of SEQ ID NO: 1243289
aguccaauucuugguaauu

SEQ ID NO: 1406825 - RNA, 19 nt, Artificial Sequence
  Description of Artificial Sequence: Synthetic oligonucleotide
  Antisense strand to SEQ ID NO: 1406824
aauuaccaagaauuggacu

SEQ ID NO: 1406826 - RNA, 19 nt, Artificial Sequence
  Description of Artificial Sequence: Synthetic oligonucleotide
  Sense strand starting at position 1732 of SEQ ID NO: 1243289
ggaaauuaaugggaaauca

SEQ ID NO: 1406827 - RNA, 19 nt, Artificial Sequence
  Description of Artificial Sequence: Synthetic oligonucleotide
  Antisense strand to SEQ ID NO: 1406826
ugauuucccauuaauuucc

SEQ ID NO: 1406828 - RNA, 19 nt, Artificial Sequence
  Description of Artificial Sequence: Synthetic oligonucleotide
  Sense strand starting at position 1789 of SEQ ID NO: 1243289
gugauuaccuggucucuga

SEQ ID NO: 1406829 - RNA, 19 nt, Artificial Sequence
  Description of Artificial Sequence: Synthetic oligonucleotide
  Antisense strand to SEQ ID NO: 1406828
ucagagaccagguaaucac

SEQ ID NO: 1406830 - RNA, 19 nt, Artificial Sequence
  Description of Artificial Sequence: Synthetic oligonucleotide
  Sense strand starting at position 3444 of SEQ ID NO: 1243289
ugcauugcugcauaaauaa

SEQ ID NO: 1406831 - RNA, 19 nt, Artificial Sequence
  Description of Artificial Sequence: Synthetic oligonucleotide
  Antisense strand to SEQ ID NO: 1406830
uuauuuaugcagcaaugca

SEQ ID NO: 1406832 - RNA, 19 nt, Artificial Sequence
  Description of Artificial Sequence: Synthetic oligonucleotide
  Sense strand starting at position 3469 of SEQ ID NO: 1243289
uggauagcucacuguuuga

SEQ ID NO: 1406833 - RNA, 19 nt, Artificial Sequence
  Description of Artificial Sequence: Synthetic oligonucleotide
  Antisense strand to SEQ ID NO: 1406832
ucaaacagugagcuaucca

SEQ ID NO: 1406834 - RNA, 19 nt, Artificial Sequence
  Description of Artificial Sequence: Synthetic oligonucleotide
  Sense strand starting at position 3476 of SEQ ID NO: 1243289
cucacuguuugagcacaau

SEQ ID NO: 1406835 - RNA, 19 nt, Artificial Sequence
  Description of Artificial Sequence: Synthetic oligonucleotide
  Antisense strand to SEQ ID NO: 1406834
auugugcucaaacagugag

SEQ ID NO: 1406836 - RNA, 19 nt, Artificial Sequence
  Description of Artificial Sequence: Synthetic oligonucleotide
  Sense strand starting at position 3479 of SEQ ID NO: 1243289
acuguuugagcacaaucga

SEQ ID NO: 1406837 - RNA, 19 nt, Artificial Sequence
  Description of Artificial Sequence: Synthetic oligonucleotide
  Antisense strand to SEQ ID NO: 1406836
ucgauugugcucaaacagu

SEQ ID NO: 1406838 - RNA, 19 nt, Artificial Sequence
  Description of Artificial Sequence: Synthetic oligonucleotide
  Sense strand starting at position 3701 of SEQ ID NO: 1243289
ggaagacuguuccucagga

SEQ ID NO: 1406839 - RNA, 19 nt, Artificial Sequence
  Description of Artificial Sequence: Synthetic oligonucleotide
  Antisense strand to SEQ ID NO: 1406838
uccugaggaacagucuucc

SEQ ID NO: 1406840 - RNA, 19 nt, Artificial Sequence
  Description of Artificial Sequence: Synthetic oligonucleotide
  Sense strand starting at position 3702 of SEQ ID NO: 1243289
gaagacuguuccucaggaa

SEQ ID NO: 1406841 - RNA, 19 nt, Artificial Sequence
  Description of Artificial Sequence: Synthetic oligonucleotide
  Antisense strand to SEQ ID NO: 1406840
uuccugaggaacagucuuc

SEQ ID NO: 1406842 - RNA, 19 nt, Artificial Sequence
  Description of Artificial Sequence: Synthetic oligonucleotide
  Sense strand starting at position 3769 of SEQ ID NO: 1243289
agagcauacuuagcaggaa

SEQ ID NO: 1406843 - RNA, 19 nt, Artificial Sequence
  Description of Artificial Sequence: Synthetic oligonucleotide
  Antisense strand to SEQ ID NO: 1406842
uuccugcuaaguaugcucu

SEQ ID NO: 1406844 - RNA, 19 nt, Artificial Sequence
  Description of Artificial Sequence: Synthetic oligonucleotide
  Sense strand starting at position 3781 of SEQ ID NO: 1243289
gcaggaauuuacuggaaug

SEQ ID NO: 1406845 - RNA, 19 nt, Artificial Sequence
  Description of Artificial Sequence: Synthetic oligonucleotide
  Antisense strand to SEQ ID NO: 1406844
cauuccaguaaauuccugc

SEQ ID NO: 1406846 - RNA, 19 nt, Artificial Sequence
  Description of Artificial Sequence: Synthetic oligonucleotide
  Sense strand starting at position 3981 of SEQ ID NO: 1243289
acucucagucuugguacaa

SEQ ID NO: 1406847 - RNA, 19 nt, Artificial Sequence
  Description of Artificial Sequence: Synthetic oligonucleotide
  Antisense strand to SEQ ID NO: 1406846
uuguaccaagacugagagu

SEQ ID NO: 1406848 - RNA, 19 nt, Artificial Sequence
  Description of Artificial Sequence: Synthetic oligonucleotide
  Sense strand starting at position 3982 of SEQ ID NO: 1243289
cucucagucuugguacaau

SEQ ID NO: 1406849 - RNA, 19 nt, Artificial Sequence
  Description of Artificial Sequence: Synthetic oligonucleotide
  Antisense strand to SEQ ID NO: 1406848
auuguaccaagacugagag

SEQ ID NO: 1406850 - RNA, 19 nt, Artificial Sequence
  Description of Artificial Sequence: Synthetic oligonucleotide
  Sense strand starting at position 21 of SEQ ID NO: 1243290
ggguaauacguccagagug

SEQ ID NO: 1406851 - RNA, 19 nt, Artificial Sequence
  Description of Artificial Sequence: Synthetic oligonucleotide
  Antisense strand to SEQ ID NO: 1406850
cacucuggacguauuaccc

SEQ ID NO: 1406852 - RNA, 19 nt, Artificial Sequence
  Description of Artificial Sequence: Synthetic oligonucleotide
  Sense strand starting at position 45 of SEQ ID NO: 1243290
ucguaaugacagcaacauu

SEQ ID NO: 1406853 - RNA, 19 nt, Artificial Sequence
  Description of Artificial Sequence: Synthetic oligonucleotide
  Antisense strand to SEQ ID NO: 1406852
aauguugcugucauuacga

SEQ ID NO: 1406854 - RNA, 19 nt, Artificial Sequence
  Description of Artificial Sequence: Synthetic oligonucleotide
  Sense strand starting at position 96 of SEQ ID NO: 1243290
agcucuggaguccauuaaa

SEQ ID NO: 1406855 - RNA, 19 nt, Artificial Sequence
  Description of Artificial Sequence: Synthetic oligonucleotide
  Antisense strand to SEQ ID NO: 1406854
uuuaauggacuccagagcu

SEQ ID NO: 1406856 - RNA, 19 nt, Artificial Sequence
  Description of Artificial Sequence: Synthetic oligonucleotide
  Sense strand starting at position 99 of SEQ ID NO: 1243290
ucuggaguccauuaaaccu

SEQ ID NO: 1406857 - RNA, 19 nt, Artificial Sequence
  Description of Artificial Sequence: Synthetic oligonucleotide
  Antisense strand to SEQ ID NO: 1406856
agguuuaauggacuccaga

SEQ ID NO: 1406858 - RNA, 19 nt, Artificial Sequence
  Description of Artificial Sequence: Synthetic oligonucleotide
  Sense strand starting at position 161 of SEQ ID NO: 1243290
accggcacuuaaucuauaa

SEQ ID NO: 1406859 - RNA, 19 nt, Artificial Sequence
  Description of Artificial Sequence: Synthetic oligonucleotide
  Antisense strand to SEQ ID NO: 1406858
uuauagauuaagugccggu

SEQ ID NO: 1406860 - RNA, 19 nt, Artificial Sequence
  Description of Artificial Sequence: Synthetic oligonucleotide
  Sense strand starting at position 236 of SEQ ID NO: 1243290
ggccacgauuugccuguaa

SEQ ID NO: 1406861 - RNA, 19 nt, Artificial Sequence
  Description of Artificial Sequence: Synthetic oligonucleotide
  Antisense strand to SEQ ID NO: 1406860
uuacaggcaaaucguggcc

SEQ ID NO: 1406862 - RNA, 19 nt, Artificial Sequence
  Description of Artificial Sequence: Synthetic oligonucleotide
  Sense strand starting at position 238 of SEQ ID NO: 1243290
ccacgauuugccuguaauu

SEQ ID NO: 1406863 - RNA, 19 nt, Artificial Sequence
  Description of Artificial Sequence: Synthetic oligonucleotide
  Antisense strand to SEQ ID NO: 1406862
aauuacaggcaaaucgugg

SEQ ID NO: 1406864 - RNA, 19 nt, Artificial Sequence
  Description of Artificial Sequence: Synthetic oligonucleotide
  Sense strand starting at position 253 of SEQ ID NO: 1243290
aauuauuuaucagaugggu

SEQ ID NO: 1406865 - RNA, 19 nt, Artificial Sequence
  Description of Artificial Sequence: Synthetic oligonucleotide
  Antisense strand to SEQ ID NO: 1406864
acccaucugauaaauaauu

SEQ ID NO: 1406866 - RNA, 19 nt, Artificial Sequence
  Description of Artificial Sequence: Synthetic oligonucleotide
  Sense strand starting at position 401 of SEQ ID NO: 1243290
cuguguauaccagggaaga

SEQ ID NO: 1406867 - RNA, 19 nt, Artificial Sequence
  Description of Artificial Sequence: Synthetic oligonucleotide
  Antisense strand to SEQ ID NO: 1406866
ucuucccugguauacacag

SEQ ID NO: 1406868 - RNA, 19 nt, Artificial Sequence
  Description of Artificial Sequence: Synthetic oligonucleotide
  Sense strand starting at position 440 of SEQ ID NO: 1243290
aaaggaccguucuccagau

SEQ ID NO: 1406869 - RNA, 19 nt, Artificial Sequence
  Description of Artificial Sequence: Synthetic oligonucleotide
  Antisense strand to SEQ ID NO: 1406868
aucuggagaacgguccuuu

SEQ ID NO: 1406870 - RNA, 19 nt, Artificial Sequence
  Description of Artificial Sequence: Synthetic oligonucleotide
  Sense strand starting at position 442 of SEQ ID NO: 1243290
aggaccguucuccagauga

SEQ ID NO: 1406871 - RNA, 19 nt, Artificial Sequence
  Description of Artificial Sequence: Synthetic oligonucleotide
  Antisense strand to SEQ ID NO: 1406870
ucaucuggagaacgguccu

SEQ ID NO: 1406872 - RNA, 19 nt, Artificial Sequence
  Description of Artificial Sequence: Synthetic oligonucleotide
  Sense strand starting at position 642 of SEQ ID NO: 1243290
ccagaaugguucccagaaa

SEQ ID NO: 1406873 - RNA, 19 nt, Artificial Sequence
  Description of Artificial Sequence: Synthetic oligonucleotide
  Antisense strand to SEQ ID NO: 1406872
uuucugggaaccauucugg

SEQ ID NO: 1406874 - RNA, 19 nt, Artificial Sequence
  Description of Artificial Sequence: Synthetic oligonucleotide
  Sense strand starting at position 740 of SEQ ID NO: 1243290
ggugaaaggacguaccuaa

SEQ ID NO: 1406875 - RNA, 19 nt, Artificial Sequence
  Description of Artificial Sequence: Synthetic oligonucleotide
  Antisense strand to SEQ ID NO: 1406874
uuagguacguccuuucacc

SEQ ID NO: 1406876 - RNA, 19 nt, Artificial Sequence
  Description of Artificial Sequence: Synthetic oligonucleotide
  Sense strand starting at position 800 of SEQ ID NO: 1243290
uuuauugcaaagggaugau

SEQ ID NO: 1406877 - RNA, 19 nt, Artificial Sequence
  Description of Artificial Sequence: Synthetic oligonucleotide
  Antisense strand to SEQ ID NO: 1406876
aucaucccuuugcaauaaa

SEQ ID NO: 1406878 - RNA, 19 nt, Artificial Sequence
  Description of Artificial Sequence: Synthetic oligonucleotide
  Sense strand starting at position 803 of SEQ ID NO: 1243290
auugcaaagggaugauuau

SEQ ID NO: 1406879 - RNA, 19 nt, Artificial Sequence
  Description of Artificial Sequence: Synthetic oligonucleotide
  Antisense strand to SEQ ID NO: 1406878
auaaucaucccuuugcaau

SEQ ID NO: 1406880 - RNA, 19 nt, Artificial Sequence
  Description of Artificial Sequence: Synthetic oligonucleotide
  Sense strand starting at position 1115 of SEQ ID NO: 1243290
cuagaauaaucucugagcu

SEQ ID NO: 1406881 - RNA, 19 nt, Artificial Sequence
  Description of Artificial Sequence: Synthetic oligonucleotide
  Antisense strand to SEQ ID NO: 1406880
agcucagagauuauucuag

SEQ ID NO: 1406882 - RNA, 19 nt, Artificial Sequence
  Description of Artificial Sequence: Synthetic oligonucleotide
  Sense strand starting at position 1197 of SEQ ID NO: 1243290
gggagagccuucucugaaa

SEQ ID NO: 1406883 - RNA, 19 nt, Artificial Sequence
  Description of Artificial Sequence: Synthetic oligonucleotide
  Antisense strand to SEQ ID NO: 1406882
uuucagagaaggcucuccc

SEQ ID NO: 1406884 - RNA, 19 nt, Artificial Sequence
  Description of Artificial Sequence: Synthetic oligonucleotide
  Sense strand starting at position 1297 of SEQ ID NO: 1243290
gagucaccucaugauaagu

SEQ ID NO: 1406885 - RNA, 19 nt, Artificial Sequence
  Description of Artificial Sequence: Synthetic oligonucleotide
  Antisense strand to SEQ ID NO: 1406884
acuuaucaugaggugacuc

SEQ ID NO: 1406886 - RNA, 19 nt, Artificial Sequence
  Description of Artificial Sequence: Synthetic oligonucleotide
  Sense strand starting at position 1326 of SEQ ID NO: 1243290
caugaucugcucugggaga

SEQ ID NO: 1406887 - RNA, 19 nt, Artificial Sequence
  Description of Artificial Sequence: Synthetic oligonucleotide
  Antisense strand to SEQ ID NO: 1406886
ucucccagagcagaucaug

SEQ ID NO: 1406888 - RNA, 19 nt, Artificial Sequence
  Description of Artificial Sequence: Synthetic oligonucleotide
  Sense strand starting at position 1328 of SEQ ID NO: 1243290
ugaucugcucugggagacu

SEQ ID NO: 1406889 - RNA, 19 nt, Artificial Sequence
  Description of Artificial Sequence: Synthetic oligonucleotide
  Antisense strand to SEQ ID NO: 1406888
agucucccagagcagauca

SEQ ID NO: 1406890 - RNA, 19 nt, Artificial Sequence
  Description of Artificial Sequence: Synthetic oligonucleotide
  Sense strand starting at position 1341 of SEQ ID NO: 1243290
gagacugagucccucagaa

SEQ ID NO: 1406891 - RNA, 19 nt, Artificial Sequence
  Description of Artificial Sequence: Synthetic oligonucleotide
  Antisense strand to SEQ ID NO: 1406890
uucugagggacucagucuc

SEQ ID NO: 1406892 - RNA, 19 nt, Artificial Sequence
  Description of Artificial Sequence: Synthetic oligonucleotide
  Sense strand starting at position 1392 of SEQ ID NO: 1243290
ggucaaccuccugaagcua

SEQ ID NO: 1406893 - RNA, 19 nt, Artificial Sequence
  Description of Artificial Sequence: Synthetic oligonucleotide
  Antisense strand to SEQ ID NO: 1406892
uagcuucaggagguugacc

SEQ ID NO: 1406894 - RNA, 19 nt, Artificial Sequence
  Description of Artificial Sequence: Synthetic oligonucleotide
  Sense strand starting at position 1481 of SEQ ID NO: 1243290
augagagaugucgauagcu

SEQ ID NO: 1406895 - RNA, 19 nt, Artificial Sequence
  Description of Artificial Sequence: Synthetic oligonucleotide
  Antisense strand to SEQ ID NO: 1406894
agcuaucgacaucucucau

SEQ ID NO: 1406896 - RNA, 19 nt, Artificial Sequence
  Description of Artificial Sequence: Synthetic oligonucleotide
  Sense strand starting at position 1483 of SEQ ID NO: 1243290
gagagaugucgauagcuag

SEQ ID NO: 1406897 - RNA, 19 nt, Artificial Sequence
  Description of Artificial Sequence: Synthetic oligonucleotide
  Antisense strand to SEQ ID NO: 1406896
cuagcuaucgacaucucuc

SEQ ID NO: 1406898 - RNA, 19 nt, Artificial Sequence
  Description of Artificial Sequence: Synthetic oligonucleotide
  Sense strand starting at position 1497 of SEQ ID NO: 1243290
gcuagauuagggugaucca

SEQ ID NO: 1406899 - RNA, 19 nt, Artificial Sequence
  Description of Artificial Sequence: Synthetic oligonucleotide
  Antisense strand to SEQ ID NO: 1406898
uggaucacccuaaucuagc

SEQ ID NO: 1406900 - RNA, 19 nt, Artificial Sequence
  Description of Artificial Sequence: Synthetic oligonucleotide
  Sense strand starting at position 1500 of SEQ ID NO: 1243290
agauuagggugauccaucu

SEQ ID NO: 1406901 - RNA, 19 nt, Artificial Sequence
  Description of Artificial Sequence: Synthetic oligonucleotide
  Antisense strand to SEQ ID NO: 1406900
agauggaucacccuaaucu

SEQ ID NO: 1406902 - RNA, 19 nt, Artificial Sequence
  Description of Artificial Sequence: Synthetic oligonucleotide
  Sense strand starting at position 1615 of SEQ ID NO: 1243290
cugagcacucuggaguuaa

SEQ ID NO: 1406903 - RNA, 19 nt, Artificial Sequence
  Description of Artificial Sequence: Synthetic oligonucleotide
  Antisense strand to SEQ ID NO: 1406902
uuaacuccagagugcucag

SEQ ID NO: 1406904 - RNA, 19 nt, Artificial Sequence
  Description of Artificial Sequence: Synthetic oligonucleotide
  Sense strand starting at position 1644 of SEQ ID NO: 1243290
ggcagaggccuugaauuac

SEQ ID NO: 1406905 - RNA, 19 nt, Artificial Sequence
  Description of Artificial Sequence: Synthetic oligonucleotide
  Antisense strand to SEQ ID NO: 1406904
guaauucaaggccucugcc

SEQ ID NO: 1406906 - RNA, 19 nt, Artificial Sequence
  Description of Artificial Sequence: Synthetic oligonucleotide
  Sense strand starting at position 1650 of SEQ ID NO: 1243290
ggccuugaauuaccugaau

SEQ ID NO: 1406907 - RNA, 19 nt, Artificial Sequence
  Description of Artificial Sequence: Synthetic oligonucleotide
  Antisense strand to SEQ ID NO: 1406906
auucagguaauucaaggcc

SEQ ID NO: 1406908 - RNA, 19 nt, Artificial Sequence
  Description of Artificial Sequence: Synthetic oligonucleotide
  Sense strand starting at position 2051 of SEQ ID NO: 1243290
uaauuuaguucucagagag

SEQ ID NO: 1406909 - RNA, 19 nt, Artificial Sequence
  Description of Artificial Sequence: Synthetic oligonucleotide
  Antisense strand to SEQ ID NO: 1406908
cucucugagaacuaaauua

SEQ ID NO: 1406910 - RNA, 19 nt, Artificial Sequence
  Description of Artificial Sequence: Synthetic oligonucleotide
  Sense strand starting at position 2223 of SEQ ID NO: 1243290
gugauuaucgccuccgagu

SEQ ID NO: 1406911 - RNA, 19 nt, Artificial Sequence
  Description of Artificial Sequence: Synthetic oligonucleotide
  Antisense strand to SEQ ID NO: 1406910
acucggaggcgauaaucac

SEQ ID NO: 1406912 - RNA, 19 nt, Artificial Sequence
  Description of Artificial Sequence: Synthetic oligonucleotide
  Sense strand starting at position 2248 of SEQ ID NO: 1243290
ucaaauccagcagguuaau

SEQ ID NO: 1406913 - RNA, 19 nt, Artificial Sequence
  Description of Artificial Sequence: Synthetic oligonucleotide
  Antisense strand to SEQ ID NO: 1406912
auuaaccugcuggauuuga

SEQ ID NO: 1406914 - RNA, 19 nt, Artificial Sequence
  Description of Artificial Sequence: Synthetic oligonucleotide
  Sense strand starting at position 2274 of SEQ ID NO: 1243290
acguuuggcacugauagaa

SEQ ID NO: 1406915 - RNA, 19 nt, Artificial Sequence
  Description of Artificial Sequence: Synthetic oligonucleotide
  Antisense strand to SEQ ID NO: 1406914
uucuaucagugccaaacgu

SEQ ID NO: 1406916 - RNA, 19 nt, Artificial Sequence
  Description of Artificial Sequence: Synthetic oligonucleotide
  Sense strand starting at position 2475 of SEQ ID NO: 1243290
cucugaagucaguacuauu

SEQ ID NO: 1406917 - RNA, 19 nt, Artificial Sequence
  Description of Artificial Sequence: Synthetic oligonucleotide
  Antisense strand to SEQ ID NO: 1406916
aauaguacugacuucagag

SEQ ID NO: 1406918 - RNA, 19 nt, Artificial Sequence
  Description of Artificial Sequence: Synthetic oligonucleotide
  Sense strand starting at position 2523 of SEQ ID NO: 1243290
ggcugauacuaguuaaaug

SEQ ID NO: 1406919 - RNA, 19 nt, Artificial Sequence
  Description of Artificial Sequence: Synthetic oligonucleotide
  Antisense strand to SEQ ID NO: 1406918
cauuuaacuaguaucagcc

SEQ ID NO: 1406920 - RNA, 19 nt, Artificial Sequence
  Description of Artificial Sequence: Synthetic oligonucleotide
  Sense strand starting at position 2962 of SEQ ID NO: 1243290
gaauuauacugacuugggu

SEQ ID NO: 1406921 - RNA, 19 nt, Artificial Sequence
  Description of Artificial Sequence: Synthetic oligonucleotide
  Antisense strand to SEQ ID NO: 1406920
acccaagucaguauaauuc

SEQ ID NO: 1406922 - RNA, 19 nt, Artificial Sequence
  Description of Artificial Sequence: Synthetic oligonucleotide
  Sense strand starting at position 3177 of SEQ ID NO: 1243290
uuuccugaugauugguaca

SEQ ID NO: 1406923 - RNA, 19 nt, Artificial Sequence
  Description of Artificial Sequence: Synthetic oligonucleotide
  Antisense strand to SEQ ID NO: 1406922
uguaccaaucaucaggaaa

SEQ ID NO: 1406924 - RNA, 19 nt, Artificial Sequence
  Description of Artificial Sequence: Synthetic oligonucleotide
  Sense strand starting at position 3179 of SEQ ID NO: 1243290
uccugaugauugguacaga

SEQ ID NO: 1406925 - RNA, 19 nt, Artificial Sequence
  Description of Artificial Sequence: Synthetic oligonucleotide
  Antisense strand to SEQ ID NO: 1406924
ucuguaccaaucaucagga

SEQ ID NO: 1406926 - RNA, 19 nt, Artificial Sequence
  Description of Artificial Sequence: Synthetic oligonucleotide
  Sense strand starting at position 3687 of SEQ ID NO: 1243290
ugacaagguuucucuguaa

SEQ ID NO: 1406927 - RNA, 19 nt, Artificial Sequence
  Description of Artificial Sequence: Synthetic oligonucleotide
  Antisense strand to SEQ ID NO: 1406926
uuacagagaaaccuuguca

SEQ ID NO: 1406928 - RNA, 19 nt, Artificial Sequence
  Description of Artificial Sequence: Synthetic oligonucleotide
  Sense strand starting at position 3691 of SEQ ID NO: 1243290
aagguuucucuguaauuga

SEQ ID NO: 1406929 - RNA, 19 nt, Artificial Sequence
  Description of Artificial Sequence: Synthetic oligonucleotide
  Antisense strand to SEQ ID NO: 1406928
ucaauuacagagaaaccuu

SEQ ID NO: 1406930 - RNA, 19 nt, Artificial Sequence
  Description of Artificial Sequence: Synthetic oligonucleotide
  Sense strand starting at position 22 of SEQ ID NO: 1243291
acuaaagucucaguaauca

SEQ ID NO: 1406931 - RNA, 19 nt, Artificial Sequence
  Description of Artificial Sequence: Synthetic oligonucleotide
  Antisense strand to SEQ ID NO: 1406930
ugauuacugagacuuuagu

SEQ ID NO: 1406932 - RNA, 19 nt, Artificial Sequence
  Description of Artificial Sequence: Synthetic oligonucleotide
  Sense strand starting at position 86 of SEQ ID NO: 1243291
cagcuauuacgugauacuu

SEQ ID NO: 1406933 - RNA, 19 nt, Artificial Sequence
  Description of Artificial Sequence: Synthetic oligonucleotide
  Antisense strand to SEQ ID NO: 1406932
aaguaucacguaauagcug

SEQ ID NO: 1406934 - RNA, 19 nt, Artificial Sequence
  Description of Artificial Sequence: Synthetic oligonucleotide
  Sense strand starting at position 96 of SEQ ID NO: 1243291
gugauacuugcucauguau

SEQ ID NO: 1406935 - RNA, 19 nt, Artificial Sequence
  Description of Artificial Sequence: Synthetic oligonucleotide
  Antisense strand to SEQ ID NO: 1406934
auacaugagcaaguaucac

SEQ ID NO: 1406936 - RNA, 19 nt, Artificial Sequence
  Description of Artificial Sequence: Synthetic oligonucleotide
  Sense strand starting at position 105 of SEQ ID NO: 1243291
gcucauguaucacuagacu

SEQ ID NO: 1406937 - RNA, 19 nt, Artificial Sequence
  Description of Artificial Sequence: Synthetic oligonucleotide
  Antisense strand to SEQ ID NO: 1406936
agucuagugauacaugagc

SEQ ID NO: 1406938 - RNA, 19 nt, Artificial Sequence
  Description of Artificial Sequence: Synthetic oligonucleotide
  Sense strand starting at position 131 of SEQ ID NO: 1243291
acuuaacugcuaugaguug

SEQ ID NO: 1406939 - RNA, 19 nt, Artificial Sequence
  Description of Artificial Sequence: Synthetic oligonucleotide
  Antisense strand to SEQ ID NO: 1406938
caacucauagcaguuaagu

SEQ ID NO: 1406940 - RNA, 19 nt, Artificial Sequence
  Description of Artificial Sequence: Synthetic oligonucleotide
  Sense strand starting at position 137 of SEQ ID NO: 1243291
cugcuaugaguugaaauac

SEQ ID NO: 1406941 - RNA, 19 nt, Artificial Sequence
  Description of Artificial Sequence: Synthetic oligonucleotide
  Antisense strand to SEQ ID NO: 1406940
guauuucaacucauagcag

SEQ ID NO: 1406942 - RNA, 19 nt, Artificial Sequence
  Description of Artificial Sequence: Synthetic oligonucleotide
  Sense strand starting at position 160 of SEQ ID NO: 1243291
aauaaauggcgauaaugcu

SEQ ID NO: 1406943 - RNA, 19 nt, Artificial Sequence
  Description of Artificial Sequence: Synthetic oligonucleotide
  Antisense strand to SEQ ID NO: 1406942
agcauuaucgccauuuauu

SEQ ID NO: 1406944 - RNA, 19 nt, Artificial Sequence
  Description of Artificial Sequence: Synthetic oligonucleotide
  Sense strand starting at position 169 of SEQ ID NO: 1243291
cgauaaugcuuguucuauc

SEQ ID NO: 1406945 - RNA, 19 nt, Artificial Sequence
  Description of Artificial Sequence: Synthetic oligonucleotide
  Antisense strand to SEQ ID NO: 1406944
gauagaacaagcauuaucg

SEQ ID NO: 1406946 - RNA, 19 nt, Artificial Sequence
  Description of Artificial Sequence: Synthetic oligonucleotide
  Sense strand starting at position 177 of SEQ ID NO: 1243291
cuuguucuaucugauuuac

SEQ ID NO: 1406947 - RNA, 19 nt, Artificial Sequence
  Description of Artificial Sequence: Synthetic oligonucleotide
  Antisense strand to SEQ ID NO: 1406946
guaaaucagauagaacaag

SEQ ID NO: 1406948 - RNA, 19 nt, Artificial Sequence
  Description of Artificial Sequence: Synthetic oligonucleotide
  Sense strand starting at position 183 of SEQ ID NO: 1243291
cuaucugauuuacaggauu

SEQ ID NO: 1406949 - RNA, 19 nt, Artificial Sequence
  Description of Artificial Sequence: Synthetic oligonucleotide
  Antisense strand to SEQ ID NO: 1406948
aauccuguaaaucagauag

SEQ ID NO: 1406950 - RNA, 19 nt, Artificial Sequence
  Description of Artificial Sequence: Synthetic oligonucleotide
  Sense strand starting at position 216 of SEQ ID NO: 1243291
auaagagcuuguuuggaag

SEQ ID NO: 1406951 - RNA, 19 nt, Artificial Sequence
  Description of Artificial Sequence: Synthetic oligonucleotide
  Antisense strand to SEQ ID NO: 1406950
cuuccaaacaagcucuuau

SEQ ID NO: 1406952 - RNA, 19 nt, Artificial Sequence
  Description of Artificial Sequence: Synthetic oligonucleotide
  Sense strand starting at position 296 of SEQ ID NO: 1243291
aguccuucucuuugccaga

SEQ ID NO: 1406953 - RNA, 19 nt, Artificial Sequence
  Description of Artificial Sequence: Synthetic oligonucleotide
  Antisense strand to SEQ ID NO: 1406952
ucuggcaaagagaaggacu

SEQ ID NO: 1406954 - RNA, 19 nt, Artificial Sequence
  Description of Artificial Sequence: Synthetic oligonucleotide
  Sense strand starting at position 331 of SEQ ID NO: 1243291
agagaugaauaggaacaua

SEQ ID NO: 1406955 - RNA, 19 nt, Artificial Sequence
  Description of Artificial Sequence: Synthetic oligonucleotide
  Antisense strand to SEQ ID NO: 1406954
uauguuccuauucaucucu

SEQ ID NO: 1406956 - RNA, 19 nt, Artificial Sequence
  Description of Artificial Sequence: Synthetic oligonucleotide
  Sense strand starting at position 347 of SEQ ID NO: 1243291
auagcuuacucagccagau

SEQ ID NO: 1406957 - RNA, 19 nt, Artificial Sequence
  Description of Artificial Sequence: Synthetic oligonucleotide
  Antisense strand to SEQ ID NO: 1406956
aucuggcugaguaagcuau

SEQ ID NO: 1406958 - RNA, 19 nt, Artificial Sequence
  Description of Artificial Sequence: Synthetic oligonucleotide
  Sense strand starting at position 405 of SEQ ID NO: 1243291
uguccauaugggugcuuua

SEQ ID NO: 1406959 - RNA, 19 nt, Artificial Sequence
  Description of Artificial Sequence: Synthetic oligonucleotide
  Antisense strand to SEQ ID NO: 1406958
uaaagcacccauauggaca

SEQ ID NO: 1406960 - RNA, 19 nt, Artificial Sequence
  Description of Artificial Sequence: Synthetic oligonucleotide
  Sense strand starting at position 408 of SEQ ID NO: 1243291
ccauaugggugcuuuaugu

SEQ ID NO: 1406961 - RNA, 19 nt, Artificial Sequence
  Description of Artificial Sequence: Synthetic oligonucleotide
  Antisense strand to SEQ ID NO: 1406960
acauaaagcacccauaugg

SEQ ID NO: 1406962 - RNA, 19 nt, Artificial Sequence
  Description of Artificial Sequence: Synthetic oligonucleotide
  Sense strand starting at position 718 of SEQ ID NO: 1243291
gaccuauuugcccgacucu

SEQ ID NO: 1406963 - RNA, 19 nt, Artificial Sequence
  Description of Artificial Sequence: Synthetic oligonucleotide
  Antisense strand to SEQ ID NO: 1406962
agagucgggcaaauagguc

SEQ ID NO: 1406964 - RNA, 19 nt, Artificial Sequence
  Description of Artificial Sequence: Synthetic oligonucleotide
  Sense strand starting at position 727 of SEQ ID NO: 1243291
gcccgacucuuucuacaaa

SEQ ID NO: 1406965 - RNA, 19 nt, Artificial Sequence
  Description of Artificial Sequence: Synthetic oligonucleotide
  Antisense strand to SEQ ID NO: 1406964
uuuguagaaagagucgggc

SEQ ID NO: 1406966 - RNA, 19 nt, Artificial Sequence
  Description of Artificial Sequence: Synthetic oligonucleotide
  Sense strand starting at position 769 of SEQ ID NO: 1243291
aucaaauggccucagguuu

SEQ ID NO: 1406967 - RNA, 19 nt, Artificial Sequence
  Description of Artificial Sequence: Synthetic oligonucleotide
  Antisense strand to SEQ ID NO: 1406966
aaaccugaggccauuugau

SEQ ID NO: 1406968 - RNA, 19 nt, Artificial Sequence
  Description of Artificial Sequence: Synthetic oligonucleotide
  Sense strand starting at position 966 of SEQ ID NO: 1243291
acaggaguccugugcaaug

SEQ ID NO: 1406969 - RNA, 19 nt, Artificial Sequence
  Description of Artificial Sequence: Synthetic oligonucleotide
  Antisense strand to SEQ ID NO: 1406968
cauugcacaggacuccugu

SEQ ID NO: 1406970 - RNA, 19 nt, Artificial Sequence
  Description of Artificial Sequence: Synthetic oligonucleotide
  Sense strand starting at position 1096 of SEQ ID NO: 1243291
ggaaaugaguauuaauuug

SEQ ID NO: 1406971 - RNA, 19 nt, Artificial Sequence
  Description of Artificial Sequence: Synthetic oligonucleotide
  Antisense strand to SEQ ID NO: 1406970
caaauuaauacucauuucc

SEQ ID NO: 1406972 - RNA, 19 nt, Artificial Sequence
  Description of Artificial Sequence: Synthetic oligonucleotide
  Sense strand starting at position 1250 of SEQ ID NO: 1243291
cgguuaaucgcggugcaaa

SEQ ID NO: 1406973 - RNA, 19 nt, Artificial Sequence
  Description of Artificial Sequence: Synthetic oligonucleotide
  Antisense strand to SEQ ID NO: 1406972
uuugcaccgcgauuaaccg

SEQ ID NO: 1406974 - RNA, 19 nt, Artificial Sequence
  Description of Artificial Sequence: Synthetic oligonucleotide
  Sense strand starting at position 1252 of SEQ ID NO: 1243291
guuaaucgcggugcaaaua

SEQ ID NO: 1406975 - RNA, 19 nt, Artificial Sequence
  Description of Artificial Sequence: Synthetic oligonucleotide
  Antisense strand to SEQ ID NO: 1406974
uauuugcaccgcgauuaac

SEQ ID NO: 1406976 - RNA, 19 nt, Artificial Sequence
  Description of Artificial Sequence: Synthetic oligonucleotide
  Sense strand starting at position 1299 of SEQ ID NO: 1243291
ggucuugacaacgacacua

SEQ ID NO: 1406977 - RNA, 19 nt, Artificial Sequence
  Description of Artificial Sequence: Synthetic oligonucleotide
  Antisense strand to SEQ ID NO: 1406976
uagugucguugucaagacc

SEQ ID NO: 1406978 - RNA, 19 nt, Artificial Sequence
  Description of Artificial Sequence: Synthetic oligonucleotide
  Sense strand starting at position 1487 of SEQ ID NO: 1243291
ggcuaagagccucggaaua

SEQ ID NO: 1406979 - RNA, 19 nt, Artificial Sequence
  Description of Artificial Sequence: Synthetic oligonucleotide
  Antisense strand to SEQ ID NO: 1406978
uauuccgaggcucuuagcc

SEQ ID NO: 1406980 - RNA, 19 nt, Artificial Sequence
  Description of Artificial Sequence: Synthetic oligonucleotide
  Sense strand starting at position 2228 of SEQ ID NO: 1243291
ugugaagguuucguaucca

SEQ ID NO: 1406981 - RNA, 19 nt, Artificial Sequence
  Description of Artificial Sequence: Synthetic oligonucleotide
  Antisense strand to SEQ ID NO: 1406980
uggauacgaaaccuucaca

SEQ ID NO: 1406982 - RNA, 19 nt, Artificial Sequence
  Description of Artificial Sequence: Synthetic oligonucleotide
  Sense strand starting at position 2268 of SEQ ID NO: 1243291
uuccucaucgccuggauau

SEQ ID NO: 1406983 - RNA, 19 nt, Artificial Sequence
  Description of Artificial Sequence: Synthetic oligonucleotide
  Antisense strand to SEQ ID NO: 1406982
auauccaggcgaugaggaa

SEQ ID NO: 1406984 - RNA, 19 nt, Artificial Sequence
  Description of Artificial Sequence: Synthetic oligonucleotide
  Sense strand starting at position 2269 of SEQ ID NO: 1243291
uccucaucgccuggauauc

SEQ ID NO: 1406985 - RNA, 19 nt, Artificial Sequence
  Description of Artificial Sequence: Synthetic oligonucleotide
  Antisense strand to SEQ ID NO: 1406984
gauauccaggcgaugagga

SEQ ID NO: 1406986 - RNA, 19 nt, Artificial Sequence
  Description of Artificial Sequence: Synthetic oligonucleotide
  Sense strand starting at position 2382 of SEQ ID NO: 1243291
gugcaagggaucugaccua

SEQ ID NO: 1406987 - RNA, 19 nt, Artificial Sequence
  Description of Artificial Sequence: Synthetic oligonucleotide
  Antisense strand to SEQ ID NO: 1406986
uaggucagaucccuugcac

SEQ ID NO: 1406988 - RNA, 19 nt, Artificial Sequence
  Description of Artificial Sequence: Synthetic oligonucleotide
  Sense strand starting at position 2436 of SEQ ID NO: 1243291
guucauuccugggcgaaga

SEQ ID NO: 1406989 - RNA, 19 nt, Artificial Sequence
  Description of Artificial Sequence: Synthetic oligonucleotide
  Antisense strand to SEQ ID NO: 1406988
ucuucgcccaggaaugaac

SEQ ID NO: 1406990 - RNA, 19 nt, Artificial Sequence
  Description of Artificial Sequence: Synthetic oligonucleotide
  Sense strand starting at position 2507 of SEQ ID NO: 1243291
uuguaacaguccuuuccaa

SEQ ID NO: 1406991 - RNA, 19 nt, Artificial Sequence
  Description of Artificial Sequence: Synthetic oligonucleotide
  Antisense strand to SEQ ID NO: 1406990
uuggaaaggacuguuacaa

SEQ ID NO: 1406992 - RNA, 19 nt, Artificial Sequence
  Description of Artificial Sequence: Synthetic oligonucleotide
  Sense strand starting at position 2552 of SEQ ID NO: 1243291
ucagucugccuuuguagaa

SEQ ID NO: 1406993 - RNA, 19 nt, Artificial Sequence
  Description of Artificial Sequence: Synthetic oligonucleotide
  Antisense strand to SEQ ID NO: 1406992
uucuacaaaggcagacuga

SEQ ID NO: 1406994 - RNA, 19 nt, Artificial Sequence
  Description of Artificial Sequence: Synthetic oligonucleotide
  Sense strand starting at position 2626 of SEQ ID NO: 1243291
gcuauaagauuccugaccu

SEQ ID NO: 1406995 - RNA, 19 nt, Artificial Sequence
  Description of Artificial Sequence: Synthetic oligonucleotide
  Antisense strand to SEQ ID NO: 1406994
aggucaggaaucuuauagc

SEQ ID NO: 1406996 - RNA, 19 nt, Artificial Sequence
  Description of Artificial Sequence: Synthetic oligonucleotide
  Sense strand starting at position 3376 of SEQ ID NO: 1243291
ugaggagcaaucugaggau

SEQ ID NO: 1406997 - RNA, 19 nt, Artificial Sequence
  Description of Artificial Sequence: Synthetic oligonucleotide
  Antisense strand to SEQ ID NO: 1406996
auccucagauugcuccuca

SEQ ID NO: 1406998 - RNA, 19 nt, Artificial Sequence
  Description of Artificial Sequence: Synthetic oligonucleotide
  Sense strand starting at position 3383 of SEQ ID NO: 1243291
caaucugaggauugagcaa

SEQ ID NO: 1406999 - RNA, 19 nt, Artificial Sequence
  Description of Artificial Sequence: Synthetic oligonucleotide
  Antisense strand to SEQ ID NO: 1406998
uugcucaauccucagauug

SEQ ID NO: 1407000 - RNA, 19 nt, Artificial Sequence
  Description of Artificial Sequence: Synthetic oligonucleotide
  Sense strand starting at position 3497 of SEQ ID NO: 1243291
gggcuuauggaagguauaa

SEQ ID NO: 1407001 - RNA, 19 nt, Artificial Sequence
  Description of Artificial Sequence: Synthetic oligonucleotide
  Antisense strand to SEQ ID NO: 1407000
uuauaccuuccauaagccc

SEQ ID NO: 1407002 - RNA, 19 nt, Artificial Sequence
  Description of Artificial Sequence: Synthetic oligonucleotide
  Sense strand starting at position 3607 of SEQ ID NO: 1243291
auggaacccucuuaagaaa

SEQ ID NO: 1407003 - RNA, 19 nt, Artificial Sequence
  Description of Artificial Sequence: Synthetic oligonucleotide
  Antisense strand to SEQ ID NO: 1407002
uuucuuaagaggguuccau

SEQ ID NO: 1407004 - RNA, 19 nt, Artificial Sequence
  Description of Artificial Sequence: Synthetic oligonucleotide
  Sense strand starting at position 3659 of SEQ ID NO: 1243291
uuuggaguuggcuaaguga

SEQ ID NO: 1407005 - RNA, 19 nt, Artificial Sequence
  Description of Artificial Sequence: Synthetic oligonucleotide
  Antisense strand to SEQ ID NO: 1407004
ucacuuagccaacuccaaa

SEQ ID NO: 1407006 - RNA, 19 nt, Artificial Sequence
  Description of Artificial Sequence: Synthetic oligonucleotide
  Sense strand starting at position 3662 of SEQ ID NO: 1243291
ggaguuggcuaagugauga

SEQ ID NO: 1407007 - RNA, 19 nt, Artificial Sequence
  Description of Artificial Sequence: Synthetic oligonucleotide
  Antisense strand to SEQ ID NO: 1407006
ucaucacuuagccaacucc

SEQ ID NO: 1407008 - RNA, 19 nt, Artificial Sequence
  Description of Artificial Sequence: Synthetic oligonucleotide
  Sense strand starting at position 3678 of SEQ ID NO: 1243291
ugagucucaaggugacuau

SEQ ID NO: 1407009 - RNA, 19 nt, Artificial Sequence
  Description of Artificial Sequence: Synthetic oligonucleotide
  Antisense strand to SEQ ID NO: 1407008
auagucaccuugagacuca

SEQ ID NO: 1407010 - RNA, 19 nt, Artificial Sequence
  Description of Artificial Sequence: Synthetic oligonucleotide
  Sense strand starting at position 28 of SEQ ID NO: 1243292
agcugaagcuuccuaacca

SEQ ID NO: 1407011 - RNA, 19 nt, Artificial Sequence
  Description of Artificial Sequence: Synthetic oligonucleotide
  Antisense strand to SEQ ID NO: 1407010
ugguuaggaagcuucagcu

SEQ ID NO: 1407012 - RNA, 19 nt, Artificial Sequence
  Description of Artificial Sequence: Synthetic oligonucleotide
  Sense strand starting at position 99 of SEQ ID NO: 1243292
aaaccuugaggaugucaca

SEQ ID NO: 1407013 - RNA, 19 nt, Artificial Sequence
  Description of Artificial Sequence: Synthetic oligonucleotide
  Antisense strand to SEQ ID NO: 1407012
ugugacauccucaagguuu

SEQ ID NO: 1407014 - RNA, 19 nt, Artificial Sequence
  Description of Artificial Sequence: Synthetic oligonucleotide
  Sense strand starting at position 164 of SEQ ID NO: 1243292
accucagacuugucaucuu

SEQ ID NO: 1407015 - RNA, 19 nt, Artificial Sequence
  Description of Artificial Sequence: Synthetic oligonucleotide
  Antisense strand to SEQ ID NO: 1407014
aagaugacaagucugaggu

SEQ ID NO: 1407016 - RNA, 19 nt, Artificial Sequence
  Description of Artificial Sequence: Synthetic oligonucleotide
  Sense strand starting at position 167 of SEQ ID NO: 1243292
ucagacuugucaucuuugu

SEQ ID NO: 1407017 - RNA, 19 nt, Artificial Sequence
  Description of Artificial Sequence: Synthetic oligonucleotide
  Antisense strand to SEQ ID NO: 1407016
acaaagaugacaagucuga

SEQ ID NO: 1407018 - RNA, 19 nt, Artificial Sequence
  Description of Artificial Sequence: Synthetic oligonucleotide
  Sense strand starting at position 171 of SEQ ID NO: 1243292
acuugucaucuuuguuacu

SEQ ID NO: 1407019 - RNA, 19 nt, Artificial Sequence
  Description of Artificial Sequence: Synthetic oligonucleotide
  Antisense strand to SEQ ID NO: 1407018
aguaacaaagaugacaagu

SEQ ID NO: 1407020 - RNA, 19 nt, Artificial Sequence
  Description of Artificial Sequence: Synthetic oligonucleotide
  Sense strand starting at position 304 of SEQ ID NO: 1243292
gccugugaucccuggacac

SEQ ID NO: 1407021 - RNA, 19 nt, Artificial Sequence
  Description of Artificial Sequence: Synthetic oligonucleotide
  Antisense strand to SEQ ID NO: 1407020
guguccagggaucacaggc

SEQ ID NO: 1407022 - RNA, 19 nt, Artificial Sequence
  Description of Artificial Sequence: Synthetic oligonucleotide
  Sense strand starting at position 1419 of SEQ ID NO: 1243292
ucaacuuguucuccuguaa

SEQ ID NO: 1407023 - RNA, 19 nt, Artificial Sequence
  Description of Artificial Sequence: Synthetic oligonucleotide
  Antisense strand to SEQ ID NO: 1407022
uuacaggagaacaaguuga

SEQ ID NO: 1407024 - RNA, 19 nt, Artificial Sequence
  Description of Artificial Sequence: Synthetic oligonucleotide
  Sense strand starting at position 1462 of SEQ ID NO: 1243292
uccacaguuuccgugauga

SEQ ID NO: 1407025 - RNA, 19 nt, Artificial Sequence
  Description of Artificial Sequence: Synthetic oligonucleotide
  Antisense strand to SEQ ID NO: 1407024
ucaucacggaaacugugga

SEQ ID NO: 1407026 - RNA, 19 nt, Artificial Sequence
  Description of Artificial Sequence: Synthetic oligonucleotide
  Sense strand starting at position 1464 of SEQ ID NO: 1243292
cacaguuuccgugaugaaa

SEQ ID NO: 1407027 - RNA, 19 nt, Artificial Sequence
  Description of Artificial Sequence: Synthetic oligonucleotide
  Antisense strand to SEQ ID NO: 1407026
uuucaucacggaaacugug

SEQ ID NO: 1407028 - RNA, 19 nt, Artificial Sequence
  Description of Artificial Sequence: Synthetic oligonucleotide
  Sense strand starting at position 1467 of SEQ ID NO: 1243292
aguuuccgugaugaaauua

SEQ ID NO: 1407029 - RNA, 19 nt, Artificial Sequence
  Description of Artificial Sequence: Synthetic oligonucleotide
  Antisense strand to SEQ ID NO: 1407028
uaauuucaucacggaaacu

SEQ ID NO: 1407030 - RNA, 19 nt, Artificial Sequence
  Description of Artificial Sequence: Synthetic oligonucleotide
  Sense strand starting at position 1847 of SEQ ID NO: 1243292
gagguuuaucccgaagcua

SEQ ID NO: 1407031 - RNA, 19 nt, Artificial Sequence
  Description of Artificial Sequence: Synthetic oligonucleotide
  Antisense strand to SEQ ID NO: 1407030
uagcuucgggauaaaccuc

SEQ ID NO: 1407032 - RNA, 19 nt, Artificial Sequence
  Description of Artificial Sequence: Synthetic oligonucleotide
  Sense strand starting at position 2182 of SEQ ID NO: 1243292
cuacaauuggcaggaaucu

SEQ ID NO: 1407033 - RNA, 19 nt, Artificial Sequence
  Description of Artificial Sequence: Synthetic oligonucleotide
  Antisense strand to SEQ ID NO: 1407032
agauuccugccaauuguag

SEQ ID NO: 1407034 - RNA, 19 nt, Artificial Sequence
  Description of Artificial Sequence: Synthetic oligonucleotide
  Sense strand starting at position 2296 of SEQ ID NO: 1243292
gaacuuucuggcgggagaa

SEQ ID NO: 1407035 - RNA, 19 nt, Artificial Sequence
  Description of Artificial Sequence: Synthetic oligonucleotide
  Antisense strand to SEQ ID NO: 1407034
uucucccgccagaaaguuc

SEQ ID NO: 1407036 - RNA, 19 nt, Artificial Sequence
  Description of Artificial Sequence: Synthetic oligonucleotide
  Sense strand starting at position 2297 of SEQ ID NO: 1243292
aacuuucuggcgggagaaa

SEQ ID NO: 1407037 - RNA, 19 nt, Artificial Sequence
  Description of Artificial Sequence: Synthetic oligonucleotide
  Antisense strand to SEQ ID NO: 1407036
uuucucccgccagaaaguu

SEQ ID NO: 1407038 - RNA, 19 nt, Artificial Sequence
  Description of Artificial Sequence: Synthetic oligonucleotide
  Sense strand starting at position 2306 of SEQ ID NO: 1243292
gcgggagaaaguuauauga

SEQ ID NO: 1407039 - RNA, 19 nt, Artificial Sequence
  Description of Artificial Sequence: Synthetic oligonucleotide
  Antisense strand to SEQ ID NO: 1407038
ucauauaacuuucucccgc

SEQ ID NO: 1407040 - RNA, 19 nt, Artificial Sequence
  Description of Artificial Sequence: Synthetic oligonucleotide
  Sense strand starting at position 2308 of SEQ ID NO: 1243292
gggagaaaguuauaugauu

SEQ ID NO: 1407041 - RNA, 19 nt, Artificial Sequence
  Description of Artificial Sequence: Synthetic oligonucleotide
  Antisense strand to SEQ ID NO: 1407040
aaucauauaacuuucuccc

SEQ ID NO: 1407042 - RNA, 19 nt, Artificial Sequence
  Description of Artificial Sequence: Synthetic oligonucleotide
  Sense strand starting at position 2320 of SEQ ID NO: 1243292
uaugauuucucgguccauu

SEQ ID NO: 1407043 - RNA, 19 nt, Artificial Sequence
  Description of Artificial Sequence: Synthetic oligonucleotide
  Antisense strand to SEQ ID NO: 1407042
aauggaccgagaaaucaua

SEQ ID NO: 1407044 - RNA, 19 nt, Artificial Sequence
  Description of Artificial Sequence: Synthetic oligonucleotide
  Sense strand starting at position 2382 of SEQ ID NO: 1243292
ucccuaacgcuuuagugaa

SEQ ID NO: 1407045 - RNA, 19 nt, Artificial Sequence
  Description of Artificial Sequence: Synthetic oligonucleotide
  Antisense strand to SEQ ID NO: 1407044
uucacuaaagcguuaggga

SEQ ID NO: 1407046 - RNA, 19 nt, Artificial Sequence
  Description of Artificial Sequence: Synthetic oligonucleotide
  Sense strand starting at position 2389 of SEQ ID NO: 1243292
cgcuuuagugaaggaguua

SEQ ID NO: 1407047 - RNA, 19 nt, Artificial Sequence
  Description of Artificial Sequence: Synthetic oligonucleotide
  Antisense strand to SEQ ID NO: 1407046
uaacuccuucacuaaagcg

SEQ ID NO: 1407048 - RNA, 19 nt, Artificial Sequence
  Description of Artificial Sequence: Synthetic oligonucleotide
  Sense strand starting at position 2390 of SEQ ID NO: 1243292
gcuuuagugaaggaguuau

SEQ ID NO: 1407049 - RNA, 19 nt, Artificial Sequence
  Description of Artificial Sequence: Synthetic oligonucleotide
  Antisense strand to SEQ ID NO: 1407048
auaacuccuucacuaaagc

SEQ ID NO: 1407050 - RNA, 19 nt, Artificial Sequence
  Description of Artificial Sequence: Synthetic oligonucleotide
  Sense strand starting at position 2394 of SEQ ID NO: 1243292
uagugaaggaguuaucugu

SEQ ID NO: 1407051 - RNA, 19 nt, Artificial Sequence
  Description of Artificial Sequence: Synthetic oligonucleotide
  Antisense strand to SEQ ID NO: 1407050
acagauaacuccuucacua

SEQ ID NO: 1407052 - RNA, 19 nt, Artificial Sequence
  Description of Artificial Sequence: Synthetic oligonucleotide
  Sense strand starting at position 2400 of SEQ ID NO: 1243292
aggaguuaucuguauccaa

SEQ ID NO: 1407053 - RNA, 19 nt, Artificial Sequence
  Description of Artificial Sequence: Synthetic oligonucleotide
  Antisense strand to SEQ ID NO: 1407052
uuggauacagauaacuccu

SEQ ID NO: 1407054 - RNA, 19 nt, Artificial Sequence
  Description of Artificial Sequence: Synthetic oligonucleotide
  Sense strand starting at position 2421 of SEQ ID NO: 1243292
gauagcagcuaaucgaaua

SEQ ID NO: 1407055 - RNA, 19 nt, Artificial Sequence
  Description of Artificial Sequence: Synthetic oligonucleotide
  Antisense strand to SEQ ID NO: 1407054
uauucgauuagcugcuauc

SEQ ID NO: 1407056 - RNA, 19 nt, Artificial Sequence
  Description of Artificial Sequence: Synthetic oligonucleotide
  Sense strand starting at position 2502 of SEQ ID NO: 1243292
ucauauguauccucucaug

SEQ ID NO: 1407057 - RNA, 19 nt, Artificial Sequence
  Description of Artificial Sequence: Synthetic oligonucleotide
  Antisense strand to SEQ ID NO: 1407056
caugagaggauacauauga

SEQ ID NO: 1407058 - RNA, 19 nt, Artificial Sequence
  Description of Artificial Sequence: Synthetic oligonucleotide
  Sense strand starting at position 2522 of SEQ ID NO: 1243292
gguugaagagcucacgcaa

SEQ ID NO: 1407059 - RNA, 19 nt, Artificial Sequence
  Description of Artificial Sequence: Synthetic oligonucleotide
  Antisense strand to SEQ ID NO: 1407058
uugcgugagcucuucaacc

SEQ ID NO: 1407060 - RNA, 19 nt, Artificial Sequence
  Description of Artificial Sequence: Synthetic oligonucleotide
  Sense strand starting at position 2578 of SEQ ID NO: 1243292
cugcaagggaucugagcua

SEQ ID NO: 1407061 - RNA, 19 nt, Artificial Sequence
  Description of Artificial Sequence: Synthetic oligonucleotide
  Antisense strand to SEQ ID NO: 1407060
uagcucagaucccuugcag

SEQ ID NO: 1407062 - RNA, 19 nt, Artificial Sequence
  Description of Artificial Sequence: Synthetic oligonucleotide
  Sense strand starting at position 2603 of SEQ ID NO: 1243292
agucucaaaucacuuguua

SEQ ID NO: 1407063 - RNA, 19 nt, Artificial Sequence
  Description of Artificial Sequence: Synthetic oligonucleotide
  Antisense strand to SEQ ID NO: 1407062
uaacaagugauuugagacu

SEQ ID NO: 1407064 - RNA, 19 nt, Artificial Sequence
  Description of Artificial Sequence: Synthetic oligonucleotide
  Sense strand starting at position 2827 of SEQ ID NO: 1243292
ugaaauacggagugaauug

SEQ ID NO: 1407065 - RNA, 19 nt, Artificial Sequence
  Description of Artificial Sequence: Synthetic oligonucleotide
  Antisense strand to SEQ ID NO: 1407064
caauucacuccguauuuca

SEQ ID NO: 1407066 - RNA, 19 nt, Artificial Sequence
  Description of Artificial Sequence: Synthetic oligonucleotide
  Sense strand starting at position 2837 of SEQ ID NO: 1243292
agugaauugugguccuauu

SEQ ID NO: 1407067 - RNA, 19 nt, Artificial Sequence
  Description of Artificial Sequence: Synthetic oligonucleotide
  Antisense strand to SEQ ID NO: 1407066
aauaggaccacaauucacu

SEQ ID NO: 1407068 - RNA, 19 nt, Artificial Sequence
  Description of Artificial Sequence: Synthetic oligonucleotide
  Sense strand starting at position 2916 of SEQ ID NO: 1243292
gaaucaagaucgucuccuu

SEQ ID NO: 1407069 - RNA, 19 nt, Artificial Sequence
  Description of Artificial Sequence: Synthetic oligonucleotide
  Antisense strand to SEQ ID NO: 1407068
aaggagacgaucuugauuc

SEQ ID NO: 1407070 - RNA, 19 nt, Artificial Sequence
  Description of Artificial Sequence: Synthetic oligonucleotide
  Sense strand starting at position 2987 of SEQ ID NO: 1243292
uucugacagauauggugaa

SEQ ID NO: 1407071 - RNA, 19 nt, Artificial Sequence
  Description of Artificial Sequence: Synthetic oligonucleotide
  Antisense strand to SEQ ID NO: 1407070
uucaccauaucugucagaa

SEQ ID NO: 1407072 - RNA, 19 nt, Artificial Sequence
  Description of Artificial Sequence: Synthetic oligonucleotide
  Sense strand starting at position 3019 of SEQ ID NO: 1243292
cuaaauugggcucaaguuu

SEQ ID NO: 1407073 - RNA, 19 nt, Artificial Sequence
  Description of Artificial Sequence: Synthetic oligonucleotide
  Antisense strand to SEQ ID NO: 1407072
aaacuugagcccaauuuag

SEQ ID NO: 1407074 - RNA, 19 nt, Artificial Sequence
  Description of Artificial Sequence: Synthetic oligonucleotide
  Sense strand starting at position 3180 of SEQ ID NO: 1243292
aggcauuauuaacuaggga

SEQ ID NO: 1407075 - RNA, 19 nt, Artificial Sequence
  Description of Artificial Sequence: Synthetic oligonucleotide
  Antisense strand to SEQ ID NO: 1407074
ucccuaguuaauaaugccu

SEQ ID NO: 1407076 - RNA, 19 nt, Artificial Sequence
  Description of Artificial Sequence: Synthetic oligonucleotide
  Sense strand starting at position 3234 of SEQ ID NO: 1243292
gggugcacgcuucagaaua

SEQ ID NO: 1407077 - RNA, 19 nt, Artificial Sequence
  Description of Artificial Sequence: Synthetic oligonucleotide
  Antisense strand to SEQ ID NO: 1407076
uauucugaagcgugcaccc

SEQ ID NO: 1407078 - RNA, 19 nt, Artificial Sequence
  Description of Artificial Sequence: Synthetic oligonucleotide
  Sense strand starting at position 3269 of SEQ ID NO: 1243292
gcaguaauuucagcgagua

SEQ ID NO: 1407079 - RNA, 19 nt, Artificial Sequence
  Description of Artificial Sequence: Synthetic oligonucleotide
  Antisense strand to SEQ ID NO: 1407078
uacucgcugaaauuacugc

SEQ ID NO: 1407080 - RNA, 19 nt, Artificial Sequence
  Description of Artificial Sequence: Synthetic oligonucleotide
  Sense strand starting at position 3646 of SEQ ID NO: 1243292
gcagacgucaagugagaaa

SEQ ID NO: 1407081 - RNA, 19 nt, Artificial Sequence
  Description of Artificial Sequence: Synthetic oligonucleotide
  Antisense strand to SEQ ID NO: 1407080
uuucucacuugacgucugc

SEQ ID NO: 1407082 - RNA, 19 nt, Artificial Sequence
  Description of Artificial Sequence: Synthetic oligonucleotide
  Sense strand starting at position 3739 of SEQ ID NO: 1243292
guguguuuggucuaucaag

SEQ ID NO: 1407083 - RNA, 19 nt, Artificial Sequence
  Description of Artificial Sequence: Synthetic oligonucleotide
  Antisense strand to SEQ ID NO: 1407082
cuugauagaccaaacacac

SEQ ID NO: 1407084 - RNA, 19 nt, Artificial Sequence
  Description of Artificial Sequence: Synthetic oligonucleotide
  Sense strand starting at position 3864 of SEQ ID NO: 1243292
uuuaguaacuguguugaag

SEQ ID NO: 1407085 - RNA, 19 nt, Artificial Sequence
  Description of Artificial Sequence: Synthetic oligonucleotide
  Antisense strand to SEQ ID NO: 1407084
cuucaacacaguuacuaaa

SEQ ID NO: 1407086 - RNA, 19 nt, Artificial Sequence
  Description of Artificial Sequence: Synthetic oligonucleotide
  Sense strand starting at position 3881 of SEQ ID NO: 1243292
agaacauucguguacgcuu

SEQ ID NO: 1407087 - RNA, 19 nt, Artificial Sequence
  Description of Artificial Sequence: Synthetic oligonucleotide
  Antisense strand to SEQ ID NO: 1407086
aagcguacacgaauguucu

SEQ ID NO: 1407088 - RNA, 19 nt, Artificial Sequence
  Description of Artificial Sequence: Synthetic oligonucleotide
  Sense strand starting at position 3945 of SEQ ID NO: 1243292
guaguauuccauuggaaag

SEQ ID NO: 1407089 - RNA, 19 nt, Artificial Sequence
  Description of Artificial Sequence: Synthetic oligonucleotide
  Antisense strand to SEQ ID NO: 1407088
cuuuccaauggaauacuac

SEQ ID NO: 1407090 - RNA, 19 nt, Artificial Sequence
  Description of Artificial Sequence: Synthetic oligonucleotide
  Sense strand starting at position 135 of SEQ ID NO: 1243293
uguucuucuuggccaggua

SEQ ID NO: 1407091 - RNA, 19 nt, Artificial Sequence
  Description of Artificial Sequence: Synthetic oligonucleotide
  Antisense strand to SEQ ID NO: 1407090
uaccuggccaagaagaaca

SEQ ID NO: 1407092 - RNA, 19 nt, Artificial Sequence
  Description of Artificial Sequence: Synthetic oligonucleotide
  Sense strand starting at position 138 of SEQ ID NO: 1243293
ucuucuuggccagguagau

SEQ ID NO: 1407093 - RNA, 19 nt, Artificial Sequence
  Description of Artificial Sequence: Synthetic oligonucleotide
  Antisense strand to SEQ ID NO: 1407092
aucuaccuggccaagaaga

SEQ ID NO: 1407094 - RNA, 19 nt, Artificial Sequence
  Description of Artificial Sequence: Synthetic oligonucleotide
  Sense strand starting at position 296 of SEQ ID NO: 1243293
caggguacuuguccagaag

SEQ ID NO: 1407095 - RNA, 19 nt, Artificial Sequence
  Description of Artificial Sequence: Synthetic oligonucleotide
  Antisense strand to SEQ ID NO: 1407094
cuucuggacaaguacccug

SEQ ID NO: 1407096 - RNA, 19 nt, Artificial Sequence
  Description of Artificial Sequence: Synthetic oligonucleotide
  Sense strand starting at position 297 of SEQ ID NO: 1243293
aggguacuuguccagaagu

SEQ ID NO: 1407097 - RNA, 19 nt, Artificial Sequence
  Description of Artificial Sequence: Synthetic oligonucleotide
  Antisense strand to SEQ ID NO: 1407096
acuucuggacaaguacccu

SEQ ID NO: 1407098 - RNA, 19 nt, Artificial Sequence
  Description of Artificial Sequence: Synthetic oligonucleotide
  Sense strand starting at position 299 of SEQ ID NO: 1243293
gguacuuguccagaaguac

SEQ ID NO: 1407099 - RNA, 19 nt, Artificial Sequence
  Description of Artificial Sequence: Synthetic oligonucleotide
  Antisense strand to SEQ ID NO: 1407098
guacuucuggacaaguacc

SEQ ID NO: 1407100 - RNA, 19 nt, Artificial Sequence
  Description of Artificial Sequence: Synthetic oligonucleotide
  Sense strand starting at position 421 of SEQ ID NO: 1243293
gcaggaggugucugaggau

SEQ ID NO: 1407101 - RNA, 19 nt, Artificial Sequence
  Description of Artificial Sequence: Synthetic oligonucleotide
  Antisense strand to SEQ ID NO: 1407100
auccucagacaccuccugc

SEQ ID NO: 1407102 - RNA, 19 nt, Artificial Sequence
  Description of Artificial Sequence: Synthetic oligonucleotide
  Sense strand starting at position 479 of SEQ ID NO: 1243293
uggccagucucuccaacua

SEQ ID NO: 1407103 - RNA, 19 nt, Artificial Sequence
  Description of Artificial Sequence: Synthetic oligonucleotide
  Antisense strand to SEQ ID NO: 1407102
uaguuggagagacuggcca

SEQ ID NO: 1407104 - RNA, 19 nt, Artificial Sequence
  Description of Artificial Sequence: Synthetic oligonucleotide
  Sense strand starting at position 503 of SEQ ID NO: 1243293
gaggucaacucgcuccuua

SEQ ID NO: 1407105 - RNA, 19 nt, Artificial Sequence
  Description of Artificial Sequence: Synthetic oligonucleotide
  Antisense strand to SEQ ID NO: 1407104
uaaggagcgaguugaccuc

SEQ ID NO: 1407106 - RNA, 19 nt, Artificial Sequence
  Description of Artificial Sequence: Synthetic oligonucleotide
  Sense strand starting at position 596 of SEQ ID NO: 1243293
ugcacaagucuuggaugua

SEQ ID NO: 1407107 - RNA, 19 nt, Artificial Sequence
  Description of Artificial Sequence: Synthetic oligonucleotide
  Antisense strand to SEQ ID NO: 1407106
uacauccaagacuugugca

SEQ ID NO: 1407108 - RNA, 19 nt, Artificial Sequence
  Description of Artificial Sequence: Synthetic oligonucleotide
  Sense strand starting at position 597 of SEQ ID NO: 1243293
gcacaagucuuggauguag

SEQ ID NO: 1407109 - RNA, 19 nt, Artificial Sequence
  Description of Artificial Sequence: Synthetic oligonucleotide
  Antisense strand to SEQ ID NO: 1407108
cuacauccaagacuugugc

SEQ ID NO: 1407110 - RNA, 19 nt, Artificial Sequence
  Description of Artificial Sequence: Synthetic oligonucleotide
  Sense strand starting at position 757 of SEQ ID NO: 1243293
ggcagaauccucugcacau

SEQ ID NO: 1407111 - RNA, 19 nt, Artificial Sequence
  Description of Artificial Sequence: Synthetic oligonucleotide
  Antisense strand to SEQ ID NO: 1407110
augugcagaggauucugcc

SEQ ID NO: 1407112 - RNA, 19 nt, Artificial Sequence
  Description of Artificial Sequence: Synthetic oligonucleotide
  Sense strand starting at position 758 of SEQ ID NO: 1243293
gcagaauccucugcacaua

SEQ ID NO: 1407113 - RNA, 19 nt, Artificial Sequence
  Description of Artificial Sequence: Synthetic oligonucleotide
  Antisense strand to SEQ ID NO: 1407112
uaugugcagaggauucugc

SEQ ID NO: 1407114 - RNA, 19 nt, Artificial Sequence
  Description of Artificial Sequence: Synthetic oligonucleotide
  Sense strand starting at position 1251 of SEQ ID NO: 1243293
ggcucugagaacugccaga

SEQ ID NO: 1407115 - RNA, 19 nt, Artificial Sequence
  Description of Artificial Sequence: Synthetic oligonucleotide
  Antisense strand to SEQ ID NO: 1407114
ucuggcaguucucagagcc

SEQ ID NO: 1407116 - RNA, 19 nt, Artificial Sequence
  Description of Artificial Sequence: Synthetic oligonucleotide
  Sense strand starting at position 1352 of SEQ ID NO: 1243293
cgcagaacuucugggccaa

SEQ ID NO: 1407117 - RNA, 19 nt, Artificial Sequence
  Description of Artificial Sequence: Synthetic oligonucleotide
  Antisense strand to SEQ ID NO: 1407116
uuggcccagaaguucugcg

SEQ ID NO: 1407118 - RNA, 19 nt, Artificial Sequence
  Description of Artificial Sequence: Synthetic oligonucleotide
  Sense strand starting at position 2542 of SEQ ID NO: 1243293
ggccuuguguccugcgaug

SEQ ID NO: 1407119 - RNA, 19 nt, Artificial Sequence
  Description of Artificial Sequence: Synthetic oligonucleotide
  Antisense strand to SEQ ID NO: 1407118
caucgcaggacacaaggcc

SEQ ID NO: 1407120 - RNA, 19 nt, Artificial Sequence
  Description of Artificial Sequence: Synthetic oligonucleotide
  Sense strand starting at position 2553 of SEQ ID NO: 1243293
cugcgaugcuuguggccaa

SEQ ID NO: 1407121 - RNA, 19 nt, Artificial Sequence
  Description of Artificial Sequence: Synthetic oligonucleotide
  Antisense strand to SEQ ID NO: 1407120
uuggccacaagcaucgcag

SEQ ID NO: 1407122 - RNA, 19 nt, Artificial Sequence
  Description of Artificial Sequence: Synthetic oligonucleotide
  Sense strand starting at position 2557 of SEQ ID NO: 1243293
gaugcuuguggccaagacu

SEQ ID NO: 1407123 - RNA, 19 nt, Artificial Sequence
  Description of Artificial Sequence: Synthetic oligonucleotide
  Antisense strand to SEQ ID NO: 1407122
agucuuggccacaagcauc

SEQ ID NO: 1407124 - RNA, 19 nt, Artificial Sequence
  Description of Artificial Sequence: Synthetic oligonucleotide
  Sense strand starting at position 2577 of SEQ ID NO: 1243293
cauacauugcugugacggu

SEQ ID NO: 1407125 - RNA, 19 nt, Artificial Sequence
  Description of Artificial Sequence: Synthetic oligonucleotide
  Antisense strand to SEQ ID NO: 1407124
accgucacagcaauguaug

SEQ ID NO: 1407126 - RNA, 19 nt, Artificial Sequence
  Description of Artificial Sequence: Synthetic oligonucleotide
  Sense strand starting at position 2619 of SEQ ID NO: 1243293
gagagauugggucagcuuu

SEQ ID NO: 1407127 - RNA, 19 nt, Artificial Sequence
  Description of Artificial Sequence: Synthetic oligonucleotide
  Antisense strand to SEQ ID NO: 1407126
aaagcugacccaaucucuc

SEQ ID NO: 1407128 - RNA, 19 nt, Artificial Sequence
  Description of Artificial Sequence: Synthetic oligonucleotide
  Sense strand starting at position 3578 of SEQ ID NO: 1243293
aaacuaagucgaggucuca

SEQ ID NO: 1407129 - RNA, 19 nt, Artificial Sequence
  Description of Artificial Sequence: Synthetic oligonucleotide
  Antisense strand to SEQ ID NO: 1407128
ugagaccucgacuuaguuu

SEQ ID NO: 1407130 - RNA, 19 nt, Artificial Sequence
  Description of Artificial Sequence: Synthetic oligonucleotide
  Sense strand starting at position 233 of SEQ ID NO: 1243294
gggcaucucaguugaagaa

SEQ ID NO: 1407131 - RNA, 19 nt, Artificial Sequence
  Description of Artificial Sequence: Synthetic oligonucleotide
  Antisense strand to SEQ ID NO: 1407130
uucuucaacugagaugccc

SEQ ID NO: 1407132 - RNA, 19 nt, Artificial Sequence
  Description of Artificial Sequence: Synthetic oligonucleotide
  Sense strand starting at position 448 of SEQ ID NO: 1243294
gccugauggucccugaaag

SEQ ID NO: 1407133 - RNA, 19 nt, Artificial Sequence
  Description of Artificial Sequence: Synthetic oligonucleotide
  Antisense strand to SEQ ID NO: 1407132
cuuucagggaccaucaggc

SEQ ID NO: 1407134 - RNA, 19 nt, Artificial Sequence
  Description of Artificial Sequence: Synthetic oligonucleotide
  Sense strand starting at position 600 of SEQ ID NO: 1243294
agugaaagcuacuuggaag

SEQ ID NO: 1407135 - RNA, 19 nt, Artificial Sequence
  Description of Artificial Sequence: Synthetic oligonucleotide
  Antisense strand to SEQ ID NO: 1407134
cuuccaaguagcuuucacu

SEQ ID NO: 1407136 - RNA, 19 nt, Artificial Sequence
  Description of Artificial Sequence: Synthetic oligonucleotide
  Sense strand starting at position 875 of SEQ ID NO: 1243294
ggcaucuagcugggucaaa

SEQ ID NO: 1407137 - RNA, 19 nt, Artificial Sequence
  Description of Artificial Sequence: Synthetic oligonucleotide
  Antisense strand to SEQ ID NO: 1407136
uuugacccagcuagaugcc

SEQ ID NO: 1407138 - RNA, 19 nt, Artificial Sequence
  Description of Artificial Sequence: Synthetic oligonucleotide
  Sense strand starting at position 1257 of SEQ ID NO: 1243294
agagucugucuucgggagu

SEQ ID NO: 1407139 - RNA, 19 nt, Artificial Sequence
  Description of Artificial Sequence: Synthetic oligonucleotide
  Antisense strand to SEQ ID NO: 1407138
acucccgaagacagacucu

SEQ ID NO: 1407140 - RNA, 19 nt, Artificial Sequence
  Description of Artificial Sequence: Synthetic oligonucleotide
  Sense strand starting at position 1427 of SEQ ID NO: 1243294
gcuggaguuucagcucgga

SEQ ID NO: 1407141 - RNA, 19 nt, Artificial Sequence
  Description of Artificial Sequence: Synthetic oligonucleotide
  Antisense strand to SEQ ID NO: 1407140
uccgagcugaaacuccagc

SEQ ID NO: 1407142 - RNA, 19 nt, Artificial Sequence
  Description of Artificial Sequence: Synthetic oligonucleotide
  Sense strand starting at position 1430 of SEQ ID NO: 1243294
ggaguuucagcucggagac

SEQ ID NO: 1407143 - RNA, 19 nt, Artificial Sequence
  Description of Artificial Sequence: Synthetic oligonucleotide
  Antisense strand to SEQ ID NO: 1407142
gucuccgagcugaaacucc

SEQ ID NO: 1407144 - RNA, 19 nt, Artificial Sequence
  Description of Artificial Sequence: Synthetic oligonucleotide
  Sense strand starting at position 2284 of SEQ ID NO: 1243294
ccugauuugugcugagaag

SEQ ID NO: 1407145 - RNA, 19 nt, Artificial Sequence
  Description of Artificial Sequence: Synthetic oligonucleotide
  Antisense strand to SEQ ID NO: 1407144
cuucucagcacaaaucagg

SEQ ID NO: 1407146 - RNA, 19 nt, Artificial Sequence
  Description of Artificial Sequence: Synthetic oligonucleotide
  Sense strand starting at position 2397 of SEQ ID NO: 1243294
ugacaaguccuguauccca

SEQ ID NO: 1407147 - RNA, 19 nt, Artificial Sequence
  Description of Artificial Sequence: Synthetic oligonucleotide
  Antisense strand to SEQ ID NO: 1407146
ugggauacaggacuuguca

SEQ ID NO: 1407148 - RNA, 19 nt, Artificial Sequence
  Description of Artificial Sequence: Synthetic oligonucleotide
  Sense strand starting at position 2518 of SEQ ID NO: 1243294
gcguucauucgccugcaca

SEQ ID NO: 1407149 - RNA, 19 nt, Artificial Sequence
  Description of Artificial Sequence: Synthetic oligonucleotide
  Antisense strand to SEQ ID NO: 1407148
ugugcaggcgaaugaacgc

SEQ ID NO: 1407150 - RNA, 19 nt, Artificial Sequence
  Description of Artificial Sequence: Synthetic oligonucleotide
  Sense strand starting at position 2779 of SEQ ID NO: 1243294
ggcucuucucacugucuca

SEQ ID NO: 1407151 - RNA, 19 nt, Artificial Sequence
  Description of Artificial Sequence: Synthetic oligonucleotide
  Antisense strand to SEQ ID NO: 1407150
ugagacagugagaagagcc

SEQ ID NO: 1407152 - RNA, 19 nt, Artificial Sequence
  Description of Artificial Sequence: Synthetic oligonucleotide
  Sense strand starting at position 2822 of SEQ ID NO: 1243294
ggcucauaucccugcacaa

SEQ ID NO: 1407153 - RNA, 19 nt, Artificial Sequence
  Description of Artificial Sequence: Synthetic oligonucleotide
  Antisense strand to SEQ ID NO: 1407152
uugugcagggauaugagcc

SEQ ID NO: 1407154 - RNA, 19 nt, Artificial Sequence
  Description of Artificial Sequence: Synthetic oligonucleotide
  Sense strand starting at position 2888 of SEQ ID NO: 1243294
gugagaguuucccagcauu

SEQ ID NO: 1407155 - RNA, 19 nt, Artificial Sequence
  Description of Artificial Sequence: Synthetic oligonucleotide
  Antisense strand to SEQ ID NO: 1407154
aaugcugggaaacucucac

SEQ ID NO: 1407156 - RNA, 19 nt, Artificial Sequence
  Description of Artificial Sequence: Synthetic oligonucleotide
  Sense strand starting at position 3011 of SEQ ID NO: 1243294
aaggcuuccucuggauaga

SEQ ID NO: 1407157 - RNA, 19 nt, Artificial Sequence
  Description of Artificial Sequence: Synthetic oligonucleotide
  Antisense strand to SEQ ID NO: 1407156
ucuauccagaggaagccuu

SEQ ID NO: 1407158 - RNA, 19 nt, Artificial Sequence
  Description of Artificial Sequence: Synthetic oligonucleotide
  Sense strand starting at position 3230 of SEQ ID NO: 1243294
gcuccuuggcuagacagaa

SEQ ID NO: 1407159 - RNA, 19 nt, Artificial Sequence
  Description of Artificial Sequence: Synthetic oligonucleotide
  Antisense strand to SEQ ID NO: 1407158
uucugucuagccaaggagc

SEQ ID NO: 1407160 - RNA, 19 nt, Artificial Sequence
  Description of Artificial Sequence: Synthetic oligonucleotide
  Sense strand starting at position 3276 of SEQ ID NO: 1243294
gguacacuuaccgguagau

SEQ ID NO: 1407161 - RNA, 19 nt, Artificial Sequence
  Description of Artificial Sequence: Synthetic oligonucleotide
  Antisense strand to SEQ ID NO: 1407160
aucuaccgguaaguguacc

SEQ ID NO: 1407162 - RNA, 19 nt, Artificial Sequence
  Description of Artificial Sequence: Synthetic oligonucleotide
  Sense strand starting at position 3319 of SEQ ID NO: 1243294
ugcccauauccuuguccau

SEQ ID NO: 1407163 - RNA, 19 nt, Artificial Sequence
  Description of Artificial Sequence: Synthetic oligonucleotide
  Antisense strand to SEQ ID NO: 1407162
auggacaaggauaugggca

SEQ ID NO: 1407164 - RNA, 19 nt, Artificial Sequence
  Description of Artificial Sequence: Synthetic oligonucleotide
  Sense strand starting at position 3363 of SEQ ID NO: 1243294
cauaaugggugcucucuga

SEQ ID NO: 1407165 - RNA, 19 nt, Artificial Sequence
  Description of Artificial Sequence: Synthetic oligonucleotide
  Antisense strand to SEQ ID NO: 1407164
ucagagagcacccauuaug

SEQ ID NO: 1407166 - RNA, 19 nt, Artificial Sequence
  Description of Artificial Sequence: Synthetic oligonucleotide
  Sense strand starting at position 3517 of SEQ ID NO: 1243294
aacacucagugcuccgaua

SEQ ID NO: 1407167 - RNA, 19 nt, Artificial Sequence
  Description of Artificial Sequence: Synthetic oligonucleotide
  Antisense strand to SEQ ID NO: 1407166
uaucggagcacugaguguu

SEQ ID NO: 1407168 - RNA, 19 nt, Artificial Sequence
  Description of Artificial Sequence: Synthetic oligonucleotide
  Sense strand starting at position 3674 of SEQ ID NO: 1243294
ugguguccucucuggaaag

SEQ ID NO: 1407169 - RNA, 19 nt, Artificial Sequence
  Description of Artificial Sequence: Synthetic oligonucleotide
  Antisense strand to SEQ ID NO: 1407168
cuuuccagagaggacacca

SEQ ID NO: 1407170 - RNA, 19 nt, Artificial Sequence
  Description of Artificial Sequence: Synthetic oligonucleotide
  Sense strand starting at position 3676 of SEQ ID NO: 1243294
guguccucucuggaaagcu

SEQ ID NO: 1407171 - RNA, 19 nt, Artificial Sequence
  Description of Artificial Sequence: Synthetic oligonucleotide
  Antisense strand to SEQ ID NO: 1407170
agcuuuccagagaggacac

SEQ ID NO: 1407172 - RNA, 19 nt, Artificial Sequence
  Description of Artificial Sequence: Synthetic oligonucleotide
  Sense strand starting at position 3758 of SEQ ID NO: 1243294
ugcaguggacucugucaga

SEQ ID NO: 1407173 - RNA, 19 nt, Artificial Sequence
  Description of Artificial Sequence: Synthetic oligonucleotide
  Antisense strand to SEQ ID NO: 1407172
ucugacagaguccacugca

SEQ ID NO: 1407174 - RNA, 19 nt, Artificial Sequence
  Description of Artificial Sequence: Synthetic oligonucleotide
  Sense strand starting at position 3930 of SEQ ID NO: 1243294
agagccuguguccaggaau

SEQ ID NO: 1407175 - RNA, 19 nt, Artificial Sequence
  Description of Artificial Sequence: Synthetic oligonucleotide
  Antisense strand to SEQ ID NO: 1407174
auuccuggacacaggcucu

SEQ ID NO: 1407176 - RNA, 19 nt, Artificial Sequence
  Description of Artificial Sequence: Synthetic oligonucleotide
  Sense strand starting at position 482 of SEQ ID NO: 1243295
gcggcuaagccuuucugau

SEQ ID NO: 1407177 - RNA, 19 nt, Artificial Sequence
  Description of Artificial Sequence: Synthetic oligonucleotide
  Antisense strand to SEQ ID NO: 1407176
aucagaaaggcuuagccgc

SEQ ID NO: 1407178 - RNA, 19 nt, Artificial Sequence
  Description of Artificial Sequence: Synthetic oligonucleotide
  Sense strand starting at position 484 of SEQ ID NO: 1243295
ggcuaagccuuucugaugu

SEQ ID NO: 1407179 - RNA, 19 nt, Artificial Sequence
  Description of Artificial Sequence: Synthetic oligonucleotide
  Antisense strand to SEQ ID NO: 1407178
acaucagaaaggcuuagcc

SEQ ID NO: 1407180 - RNA, 19 nt, Artificial Sequence
  Description of Artificial Sequence: Synthetic oligonucleotide
  Sense strand starting at position 486 of SEQ ID NO: 1243295
cuaagccuuucugauguaa

SEQ ID NO: 1407181 - RNA, 19 nt, Artificial Sequence
  Description of Artificial Sequence: Synthetic oligonucleotide
  Antisense strand to SEQ ID NO: 1407180
uuacaucagaaaggcuuag

SEQ ID NO: 1407182 - RNA, 19 nt, Artificial Sequence
  Description of Artificial Sequence: Synthetic oligonucleotide
  Sense strand starting at position 488 of SEQ ID NO: 1243295
aagccuuucugauguaaug

SEQ ID NO: 1407183 - RNA, 19 nt, Artificial Sequence
  Description of Artificial Sequence: Synthetic oligonucleotide
  Antisense strand to SEQ ID NO: 1407182
cauuacaucagaaaggcuu

SEQ ID NO: 1407184 - RNA, 19 nt, Artificial Sequence
  Description of Artificial Sequence: Synthetic oligonucleotide
  Sense strand starting at position 707 of SEQ ID NO: 1243295
gaguguuaggcuggucaug

SEQ ID NO: 1407185 - RNA, 19 nt, Artificial Sequence
  Description of Artificial Sequence: Synthetic oligonucleotide
  Antisense strand to SEQ ID NO: 1407184
caugaccagccuaacacuc

SEQ ID NO: 1407186 - RNA, 19 nt, Artificial Sequence
  Description of Artificial Sequence: Synthetic oligonucleotide
  Sense strand starting at position 2271 of SEQ ID NO: 1243295
ggcucaggccugugaggau

SEQ ID NO: 1407187 - RNA, 19 nt, Artificial Sequence
  Description of Artificial Sequence: Synthetic oligonucleotide
  Antisense strand to SEQ ID NO: 1407186
auccucacaggccugagcc

SEQ ID NO: 1407188 - RNA, 19 nt, Artificial Sequence
  Description of Artificial Sequence: Synthetic oligonucleotide
  Sense strand starting at position 2743 of SEQ ID NO: 1243295
acagauaagacacguguga

SEQ ID NO: 1407189 - RNA, 19 nt, Artificial Sequence
  Description of Artificial Sequence: Synthetic oligonucleotide
  Antisense strand to SEQ ID NO: 1407188
ucacacgugucuuaucugu

SEQ ID NO: 1407190 - RNA, 19 nt, Artificial Sequence
  Description of Artificial Sequence: Synthetic oligonucleotide
  Sense strand starting at position 2745 of SEQ ID NO: 1243295
agauaagacacgugugacu

SEQ ID NO: 1407191 - RNA, 19 nt, Artificial Sequence
  Description of Artificial Sequence: Synthetic oligonucleotide
  Antisense strand to SEQ ID NO: 1407190
agucacacgugucuuaucu

SEQ ID NO: 1407192 - RNA, 19 nt, Artificial Sequence
  Description of Artificial Sequence: Synthetic oligonucleotide
  Sense strand starting at position 2747 of SEQ ID NO: 1243295
auaagacacgugugacuau

SEQ ID NO: 1407193 - RNA, 19 nt, Artificial Sequence
  Description of Artificial Sequence: Synthetic oligonucleotide
  Antisense strand to SEQ ID NO: 1407192
auagucacacgugucuuau

SEQ ID NO: 1407194 - RNA, 19 nt, Artificial Sequence
  Description of Artificial Sequence: Synthetic oligonucleotide
  Sense strand starting at position 2790 of SEQ ID NO: 1243295
gagggcuucuccuaggguu

SEQ ID NO: 1407195 - RNA, 19 nt, Artificial Sequence
  Description of Artificial Sequence: Synthetic oligonucleotide
  Antisense strand to SEQ ID NO: 1407194
aacccuaggagaagcccuc

SEQ ID NO: 1407196 - RNA, 19 nt, Artificial Sequence
  Description of Artificial Sequence: Synthetic oligonucleotide
  Sense strand starting at position 2809 of SEQ ID NO: 1243295
gcaguagucccagaagaca

SEQ ID NO: 1407197 - RNA, 19 nt, Artificial Sequence
  Description of Artificial Sequence: Synthetic oligonucleotide
  Antisense strand to SEQ ID NO: 1407196
ugucuucugggacuacugc

SEQ ID NO: 1407198 - RNA, 19 nt, Artificial Sequence
  Description of Artificial Sequence: Synthetic oligonucleotide
  Sense strand starting at position 2988 of SEQ ID NO: 1243295
cugauacuuguccggguga

SEQ ID NO: 1407199 - RNA, 19 nt, Artificial Sequence
  Description of Artificial Sequence: Synthetic oligonucleotide
  Antisense strand to SEQ ID NO: 1407198
ucacccggacaaguaucag

SEQ ID NO: 1407200 - RNA, 19 nt, Artificial Sequence
  Description of Artificial Sequence: Synthetic oligonucleotide
  Sense strand starting at position 522 of SEQ ID NO: 1243296
ccacguuugccugagggaa

SEQ ID NO: 1407201 - RNA, 19 nt, Artificial Sequence
  Description of Artificial Sequence: Synthetic oligonucleotide
  Antisense strand to SEQ ID NO: 1407200
uucccucaggcaaacgugg

SEQ ID NO: 1407202 - RNA, 19 nt, Artificial Sequence
  Description of Artificial Sequence: Synthetic oligonucleotide
  Sense strand starting at position 524 of SEQ ID NO: 1243296
acguuugccugagggaaca

SEQ ID NO: 1407203 - RNA, 19 nt, Artificial Sequence
  Description of Artificial Sequence: Synthetic oligonucleotide
  Antisense strand to SEQ ID NO: 1407202
uguucccucaggcaaacgu

SEQ ID NO: 1407204 - RNA, 19 nt, Artificial Sequence
  Description of Artificial Sequence: Synthetic oligonucleotide
  Sense strand starting at position 812 of SEQ ID NO: 1243296
gcauaacuguggucagcaa

SEQ ID NO: 1407205 - RNA, 19 nt, Artificial Sequence
  Description of Artificial Sequence: Synthetic oligonucleotide
  Antisense strand to SEQ ID NO: 1407204
uugcugaccacaguuaugc

SEQ ID NO: 1407206 - RNA, 19 nt, Artificial Sequence
  Description of Artificial Sequence: Synthetic oligonucleotide
  Sense strand starting at position 1177 of SEQ ID NO: 1243296
uccuguuaucccuggagca

SEQ ID NO: 1407207 - RNA, 19 nt, Artificial Sequence
  Description of Artificial Sequence: Synthetic oligonucleotide
  Antisense strand to SEQ ID NO: 1407206
ugcuccagggauaacagga

SEQ ID NO: 1407208 - RNA, 19 nt, Artificial Sequence
  Description of Artificial Sequence: Synthetic oligonucleotide
  Sense strand starting at position 1269 of SEQ ID NO: 1243296
acagaauuaucagggccaa

SEQ ID NO: 1407209 - RNA, 19 nt, Artificial Sequence
  Description of Artificial Sequence: Synthetic oligonucleotide
  Antisense strand to SEQ ID NO: 1407208
uuggcccugauaauucugu

SEQ ID NO: 1407210 - RNA, 19 nt, Artificial Sequence
  Description of Artificial Sequence: Synthetic oligonucleotide
  Sense strand starting at position 1270 of SEQ ID NO: 1243296
cagaauuaucagggccaag

SEQ ID NO: 1407211 - RNA, 19 nt, Artificial Sequence
  Description of Artificial Sequence: Synthetic oligonucleotide
  Antisense strand to SEQ ID NO: 1407210
cuuggcccugauaauucug

SEQ ID NO: 1407212 - RNA, 19 nt, Artificial Sequence
  Description of Artificial Sequence: Synthetic oligonucleotide
  Sense strand starting at position 2236 of SEQ ID NO: 1243296
gcaacaaugcagcaauaau

SEQ ID NO: 1407213 - RNA, 19 nt, Artificial Sequence
  Description of Artificial Sequence: Synthetic oligonucleotide
  Antisense strand to SEQ ID NO: 1407212
auuauugcugcauuguugc

SEQ ID NO: 1407214 - RNA, 19 nt, Artificial Sequence
  Description of Artificial Sequence: Synthetic oligonucleotide
  Sense strand starting at position 91 of SEQ ID NO: 1243297
aacugaggcccagggauau

SEQ ID NO: 1407215 - RNA, 19 nt, Artificial Sequence
  Description of Artificial Sequence: Synthetic oligonucleotide
  Antisense strand to SEQ ID NO: 1407214
auaucccugggccucaguu

SEQ ID NO: 1407216 - RNA, 19 nt, Artificial Sequence
  Description of Artificial Sequence: Synthetic oligonucleotide
  Sense strand starting at position 798 of SEQ ID NO: 1243297
ucgaauuugccaggccuca

SEQ ID NO: 1407217 - RNA, 19 nt, Artificial Sequence
  Description of Artificial Sequence: Synthetic oligonucleotide
  Antisense strand to SEQ ID NO: 1407216
ugaggccuggcaaauucga

SEQ ID NO: 1407218 - RNA, 19 nt, Artificial Sequence
  Description of Artificial Sequence: Synthetic oligonucleotide
  Sense strand starting at position 1418 of SEQ ID NO: 1243297
gucugauauccugggcaga

SEQ ID NO: 1407219 - RNA, 19 nt, Artificial Sequence
  Description of Artificial Sequence: Synthetic oligonucleotide
  Antisense strand to SEQ ID NO: 1407218
ucugcccaggauaucagac

SEQ ID NO: 1407220 - RNA, 19 nt, Artificial Sequence
  Description of Artificial Sequence: Synthetic oligonucleotide
  Sense strand starting at position 1419 of SEQ ID NO: 1243297
ucugauauccugggcagag

SEQ ID NO: 1407221 - RNA, 19 nt, Artificial Sequence
  Description of Artificial Sequence: Synthetic oligonucleotide
  Antisense strand to SEQ ID NO: 1407220
cucugcccaggauaucaga

SEQ ID NO: 1407222 - RNA, 19 nt, Artificial Sequence
  Description of Artificial Sequence: Synthetic oligonucleotide
  Sense strand starting at position 1578 of SEQ ID NO: 1243297
ggugaucucgccuguggaa

SEQ ID NO: 1407223 - RNA, 19 nt, Artificial Sequence
  Description of Artificial Sequence: Synthetic oligonucleotide
  Antisense strand to SEQ ID NO: 1407222
uuccacaggcgagaucacc

SEQ ID NO: 1407224 - RNA, 19 nt, Artificial Sequence
  Description of Artificial Sequence: Synthetic oligonucleotide
  Sense strand starting at position 2139 of SEQ ID NO: 1243297
gagcuucuccgccagggua

SEQ ID NO: 1407225 - RNA, 19 nt, Artificial Sequence
  Description of Artificial Sequence: Synthetic oligonucleotide
  Antisense strand to SEQ ID NO: 1407224
uacccuggcggagaagcuc

SEQ ID NO: 1407226 - RNA, 19 nt, Artificial Sequence
  Description of Artificial Sequence: Synthetic oligonucleotide
  Sense strand starting at position 2436 of SEQ ID NO: 1243297
ccgugacccuguuagggau

SEQ ID NO: 1407227 - RNA, 19 nt, Artificial Sequence
  Description of Artificial Sequence: Synthetic oligonucleotide
  Antisense strand to SEQ ID NO: 1407226
aucccuaacagggucacgg

SEQ ID NO: 1407228 - RNA, 19 nt, Artificial Sequence
  Description of Artificial Sequence: Synthetic oligonucleotide
  Sense strand starting at position 2759 of SEQ ID NO: 1243297
aaagccagguccugucuaa

SEQ ID NO: 1407229 - RNA, 19 nt, Artificial Sequence
  Description of Artificial Sequence: Synthetic oligonucleotide
  Antisense strand to SEQ ID NO: 1407228
uuagacaggaccuggcuuu

SEQ ID NO: 1407230 - RNA, 19 nt, Artificial Sequence
  Description of Artificial Sequence: Synthetic oligonucleotide
  Sense strand starting at position 2928 of SEQ ID NO: 1243297
cggagugagucguccaggu

SEQ ID NO: 1407231 - RNA, 19 nt, Artificial Sequence
  Description of Artificial Sequence: Synthetic oligonucleotide
  Antisense strand to SEQ ID NO: 1407230
accuggacgacucacuccg

SEQ ID NO: 1407232 - RNA, 19 nt, Artificial Sequence
  Description of Artificial Sequence: Synthetic oligonucleotide
  Sense strand starting at position 2930 of SEQ ID NO: 1243297
gagugagucguccagguac

SEQ ID NO: 1407233 - RNA, 19 nt, Artificial Sequence
  Description of Artificial Sequence: Synthetic oligonucleotide
  Antisense strand to SEQ ID NO: 1407232
guaccuggacgacucacuc

SEQ ID NO: 1407234 - RNA, 19 nt, Artificial Sequence
  Description of Artificial Sequence: Synthetic oligonucleotide
  Sense strand starting at position 2932 of SEQ ID NO: 1243297
gugagucguccagguacau

SEQ ID NO: 1407235 - RNA, 19 nt, Artificial Sequence
  Description of Artificial Sequence: Synthetic oligonucleotide
  Antisense strand to SEQ ID NO: 1407234
auguaccuggacgacucac

SEQ ID NO: 1407236 - RNA, 19 nt, Artificial Sequence
  Description of Artificial Sequence: Synthetic oligonucleotide
  Sense strand starting at position 3103 of SEQ ID NO: 1243297
ggaccuagauucuggaaag

SEQ ID NO: 1407237 - RNA, 19 nt, Artificial Sequence
  Description of Artificial Sequence: Synthetic oligonucleotide
  Antisense strand to SEQ ID NO: 1407236
cuuuccagaaucuaggucc

SEQ ID NO: 1407238 - RNA, 19 nt, Artificial Sequence
  Description of Artificial Sequence: Synthetic oligonucleotide
  Sense strand starting at position 3104 of SEQ ID NO: 1243297
gaccuagauucuggaaagu

SEQ ID NO: 1407239 - RNA, 19 nt, Artificial Sequence
  Description of Artificial Sequence: Synthetic oligonucleotide
  Antisense strand to SEQ ID NO: 1407238
acuuuccagaaucuagguc

SEQ ID NO: 1407240 - RNA, 19 nt, Artificial Sequence
  Description of Artificial Sequence: Synthetic oligonucleotide
  Sense strand starting at position 3169 of SEQ ID NO: 1243297
ccacuuaagcgguaaggaa

SEQ ID NO: 1407241 - RNA, 19 nt, Artificial Sequence
  Description of Artificial Sequence: Synthetic oligonucleotide
  Antisense strand to SEQ ID NO: 1407240
uuccuuaccgcuuaagugg

SEQ ID NO: 1407242 - RNA, 19 nt, Artificial Sequence
  Description of Artificial Sequence: Synthetic oligonucleotide
  Sense strand starting at position 3250 of SEQ ID NO: 1243297
ggaggagucagcugcagaa

SEQ ID NO: 1407243 - RNA, 19 nt, Artificial Sequence
  Description of Artificial Sequence: Synthetic oligonucleotide
  Antisense strand to SEQ ID NO: 1407242
uucugcagcugacuccucc

SEQ ID NO: 1407244 - RNA, 19 nt, Artificial Sequence
  Description of Artificial Sequence: Synthetic oligonucleotide
  Sense strand starting at position 3252 of SEQ ID NO: 1243297
aggagucagcugcagaaga

SEQ ID NO: 1407245 - RNA, 19 nt, Artificial Sequence
  Description of Artificial Sequence: Synthetic oligonucleotide
  Antisense strand to SEQ ID NO: 1407244
ucuucugcagcugacuccu

SEQ ID NO: 1407246 - RNA, 19 nt, Artificial Sequence
  Description of Artificial Sequence: Synthetic oligonucleotide
  Sense strand starting at position 3308 of SEQ ID NO: 1243297
gagacauacuugguuuguu

SEQ ID NO: 1407247 - RNA, 19 nt, Artificial Sequence
  Description of Artificial Sequence: Synthetic oligonucleotide
  Antisense strand to SEQ ID NO: 1407246
aacaaaccaaguaugucuc

SEQ ID NO: 1407248 - RNA, 19 nt, Artificial Sequence
  Description of Artificial Sequence: Synthetic oligonucleotide
  Sense strand starting at position 3309 of SEQ ID NO: 1243297
agacauacuugguuuguuu

SEQ ID NO: 1407249 - RNA, 19 nt, Artificial Sequence
  Description of Artificial Sequence: Synthetic oligonucleotide
  Antisense strand to SEQ ID NO: 1407248
aaacaaaccaaguaugucu

SEQ ID NO: 1407250 - RNA, 19 nt, Artificial Sequence
  Description of Artificial Sequence: Synthetic oligonucleotide
  Sense strand starting at position 3472 of SEQ ID NO: 1243297
ccaugccugggcuaauuau

SEQ ID NO: 1407251 - RNA, 19 nt, Artificial Sequence
  Description of Artificial Sequence: Synthetic oligonucleotide
  Antisense strand to SEQ ID NO: 1407250
auaauuagcccaggcaugg

SEQ ID NO: 1407252 - RNA, 19 nt, Artificial Sequence
  Description of Artificial Sequence: Synthetic oligonucleotide
  Sense strand starting at position 115 of SEQ ID NO: 1243298
uuaggaaugaagugaucuu

SEQ ID NO: 1407253 - RNA, 19 nt, Artificial Sequence
  Description of Artificial Sequence: Synthetic oligonucleotide
  Antisense strand to SEQ ID NO: 1407252
aagaucacuucauuccuaa

SEQ ID NO: 1407254 - RNA, 19 nt, Artificial Sequence
  Description of Artificial Sequence: Synthetic oligonucleotide
  Sense strand starting at position 122 of SEQ ID NO: 1243298
ugaagugaucuuggccuga

SEQ ID NO: 1407255 - RNA, 19 nt, Artificial Sequence
  Description of Artificial Sequence: Synthetic oligonucleotide
  Antisense strand to SEQ ID NO: 1407254
ucaggccaagaucacuuca

SEQ ID NO: 1407256 - RNA, 19 nt, Artificial Sequence
  Description of Artificial Sequence: Synthetic oligonucleotide
  Sense strand starting at position 124 of SEQ ID NO: 1243298
aagugaucuuggccugauu

SEQ ID NO: 1407257 - RNA, 19 nt, Artificial Sequence
  Description of Artificial Sequence: Synthetic oligonucleotide
  Antisense strand to SEQ ID NO: 1407256
aaucaggccaagaucacuu

SEQ ID NO: 1407258 - RNA, 19 nt, Artificial Sequence
  Description of Artificial Sequence: Synthetic oligonucleotide
  Sense strand starting at position 126 of SEQ ID NO: 1243298
gugaucuuggccugauuuc

SEQ ID NO: 1407259 - RNA, 19 nt, Artificial Sequence
  Description of Artificial Sequence: Synthetic oligonucleotide
  Antisense strand to SEQ ID NO: 1407258
gaaaucaggccaagaucac

SEQ ID NO: 1407260 - RNA, 19 nt, Artificial Sequence
  Description of Artificial Sequence: Synthetic oligonucleotide
  Sense strand starting at position 184 of SEQ ID NO: 1243298
cucagagcuccucagcuua

SEQ ID NO: 1407261 - RNA, 19 nt, Artificial Sequence
  Description of Artificial Sequence: Synthetic oligonucleotide
  Antisense strand to SEQ ID NO: 1407260
uaagcugaggagcucugag

SEQ ID NO: 1407262 - RNA, 19 nt, Artificial Sequence
  Description of Artificial Sequence: Synthetic oligonucleotide
  Sense strand starting at position 186 of SEQ ID NO: 1243298
cagagcuccucagcuuaga

SEQ ID NO: 1407263 - RNA, 19 nt, Artificial Sequence
  Description of Artificial Sequence: Synthetic oligonucleotide
  Antisense strand to SEQ ID NO: 1407262
ucuaagcugaggagcucug

SEQ ID NO: 1407264 - RNA, 19 nt, Artificial Sequence
  Description of Artificial Sequence: Synthetic oligonucleotide
  Sense strand starting at position 449 of SEQ ID NO: 1243298
gagcacuuaugugucagga

SEQ ID NO: 1407265 - RNA, 19 nt, Artificial Sequence
  Description of Artificial Sequence: Synthetic oligonucleotide
  Antisense strand to SEQ ID NO: 1407264
uccugacacauaagugcuc

SEQ ID NO: 1407266 - RNA, 19 nt, Artificial Sequence
  Description of Artificial Sequence: Synthetic oligonucleotide
  Sense strand starting at position 471 of SEQ ID NO: 1243298
gggccagaugcugaggaua

SEQ ID NO: 1407267 - RNA, 19 nt, Artificial Sequence
  Description of Artificial Sequence: Synthetic oligonucleotide
  Antisense strand to SEQ ID NO: 1407266
uauccucagcaucuggccc

SEQ ID NO: 1407268 - RNA, 19 nt, Artificial Sequence
  Description of Artificial Sequence: Synthetic oligonucleotide
  Sense strand starting at position 488 of SEQ ID NO: 1243298
uacaguugucaggaccaca

SEQ ID NO: 1407269 - RNA, 19 nt, Artificial Sequence
  Description of Artificial Sequence: Synthetic oligonucleotide
  Antisense strand to SEQ ID NO: 1407268
ugugguccugacaacugua

SEQ ID NO: 1407270 - RNA, 19 nt, Artificial Sequence
  Description of Artificial Sequence: Synthetic oligonucleotide
  Sense strand starting at position 844 of SEQ ID NO: 1243298
gagacugaugcuggcucaa

SEQ ID NO: 1407271 - RNA, 19 nt, Artificial Sequence
  Description of Artificial Sequence: Synthetic oligonucleotide
  Antisense strand to SEQ ID NO: 1407270
uugagccagcaucagucuc

SEQ ID NO: 1407272 - RNA, 19 nt, Artificial Sequence
  Description of Artificial Sequence: Synthetic oligonucleotide
  Sense strand starting at position 846 of SEQ ID NO: 1243298
gacugaugcuggcucaagu

SEQ ID NO: 1407273 - RNA, 19 nt, Artificial Sequence
  Description of Artificial Sequence: Synthetic oligonucleotide
  Antisense strand to SEQ ID NO: 1407272
acuugagccagcaucaguc

SEQ ID NO: 1407274 - RNA, 19 nt, Artificial Sequence
  Description of Artificial Sequence: Synthetic oligonucleotide
  Sense strand starting at position 863 of SEQ ID NO: 1243298
guuugagcaucagugguuu

SEQ ID NO: 1407275 - RNA, 19 nt, Artificial Sequence
  Description of Artificial Sequence: Synthetic oligonucleotide
  Antisense strand to SEQ ID NO: 1407274
aaaccacugaugcucaaac

SEQ ID NO: 1407276 - RNA, 19 nt, Artificial Sequence
  Description of Artificial Sequence: Synthetic oligonucleotide
  Sense strand starting at position 865 of SEQ ID NO: 1243298
uugagcaucagugguuuaa

SEQ ID NO: 1407277 - RNA, 19 nt, Artificial Sequence
  Description of Artificial Sequence: Synthetic oligonucleotide
  Antisense strand to SEQ ID NO: 1407276
uuaaaccacugaugcucaa

SEQ ID NO: 1407278 - RNA, 19 nt, Artificial Sequence
  Description of Artificial Sequence: Synthetic oligonucleotide
  Sense strand starting at position 867 of SEQ ID NO: 1243298
gagcaucagugguuuaaga

SEQ ID NO: 1407279 - RNA, 19 nt, Artificial Sequence
  Description of Artificial Sequence: Synthetic oligonucleotide
  Antisense strand to SEQ ID NO: 1407278
ucuuaaaccacugaugcuc

SEQ ID NO: 1407280 - RNA, 19 nt, Artificial Sequence
  Description of Artificial Sequence: Synthetic oligonucleotide
  Sense strand starting at position 869 of SEQ ID NO: 1243298
gcaucagugguuuaagaga

SEQ ID NO: 1407281 - RNA, 19 nt, Artificial Sequence
  Description of Artificial Sequence: Synthetic oligonucleotide
  Antisense strand to SEQ ID NO: 1407280
ucucuuaaaccacugaugc

SEQ ID NO: 1407282 - RNA, 19 nt, Artificial Sequence
  Description of Artificial Sequence: Synthetic oligonucleotide
  Sense strand starting at position 1207 of SEQ ID NO: 1243298
ggcaaacaugagugagcua

SEQ ID NO: 1407283 - RNA, 19 nt, Artificial Sequence
  Description of Artificial Sequence: Synthetic oligonucleotide
  Antisense strand to SEQ ID NO: 1407282
uagcucacucauguuugcc

SEQ ID NO: 1407284 - RNA, 19 nt, Artificial Sequence
  Description of Artificial Sequence: Synthetic oligonucleotide
  Sense strand starting at position 1337 of SEQ ID NO: 1243298
agaaguuucccaggacagu

SEQ ID NO: 1407285 - RNA, 19 nt, Artificial Sequence
  Description of Artificial Sequence: Synthetic oligonucleotide
  Antisense strand to SEQ ID NO: 1407284
acuguccugggaaacuucu

SEQ ID NO: 1407286 - RNA, 19 nt, Artificial Sequence
  Description of Artificial Sequence: Synthetic oligonucleotide
  Sense strand starting at position 1444 of SEQ ID NO: 1243298
gugggagagucccaggaau

SEQ ID NO: 1407287 - RNA, 19 nt, Artificial Sequence
  Description of Artificial Sequence: Synthetic oligonucleotide
  Antisense strand to SEQ ID NO: 1407286
auuccugggacucucccac

SEQ ID NO: 1407288 - RNA, 19 nt, Artificial Sequence
  Description of Artificial Sequence: Synthetic oligonucleotide
  Sense strand starting at position 1446 of SEQ ID NO: 1243298
gggagagucccaggaaucu

SEQ ID NO: 1407289 - RNA, 19 nt, Artificial Sequence
  Description of Artificial Sequence: Synthetic oligonucleotide
  Antisense strand to SEQ ID NO: 1407288
agauuccugggacucuccc

SEQ ID NO: 1407290 - RNA, 19 nt, Artificial Sequence
  Description of Artificial Sequence: Synthetic oligonucleotide
  Sense strand starting at position 1483 of SEQ ID NO: 1243298
gcaggugaugcuuaucauc

SEQ ID NO: 1407291 - RNA, 19 nt, Artificial Sequence
  Description of Artificial Sequence: Synthetic oligonucleotide
  Antisense strand to SEQ ID NO: 1407290
gaugauaagcaucaccugc

SEQ ID NO: 1407292 - RNA, 19 nt, Artificial Sequence
  Description of Artificial Sequence: Synthetic oligonucleotide
  Sense strand starting at position 1485 of SEQ ID NO: 1243298
aggugaugcuuaucaucag

SEQ ID NO: 1407293 - RNA, 19 nt, Artificial Sequence
  Description of Artificial Sequence: Synthetic oligonucleotide
  Antisense strand to SEQ ID NO: 1407292
cugaugauaagcaucaccu

SEQ ID NO: 1407294 - RNA, 19 nt, Artificial Sequence
  Description of Artificial Sequence: Synthetic oligonucleotide
  Sense strand starting at position 1488 of SEQ ID NO: 1243298
ugaugcuuaucaucagauc

SEQ ID NO: 1407295 - RNA, 19 nt, Artificial Sequence
  Description of Artificial Sequence: Synthetic oligonucleotide
  Antisense strand to SEQ ID NO: 1407294
gaucugaugauaagcauca

SEQ ID NO: 1407296 - RNA, 19 nt, Artificial Sequence
  Description of Artificial Sequence: Synthetic oligonucleotide
  Sense strand starting at position 1679 of SEQ ID NO: 1243298
cgggcauuaccugggacua

SEQ ID NO: 1407297 - RNA, 19 nt, Artificial Sequence
  Description of Artificial Sequence: Synthetic oligonucleotide
  Antisense strand to SEQ ID NO: 1407296
uagucccagguaaugcccg

SEQ ID NO: 1407298 - RNA, 19 nt, Artificial Sequence
  Description of Artificial Sequence: Synthetic oligonucleotide
  Sense strand starting at position 2089 of SEQ ID NO: 1243298
gccaauggucgacgucaga

SEQ ID NO: 1407299 - RNA, 19 nt, Artificial Sequence
  Description of Artificial Sequence: Synthetic oligonucleotide
  Antisense strand to SEQ ID NO: 1407298
ucugacgucgaccauuggc

SEQ ID NO: 1407300 - RNA, 19 nt, Artificial Sequence
  Description of Artificial Sequence: Synthetic oligonucleotide
  Sense strand starting at position 2151 of SEQ ID NO: 1243298
gugcgcaugcguagauaaa

SEQ ID NO: 1407301 - RNA, 19 nt, Artificial Sequence
  Description of Artificial Sequence: Synthetic oligonucleotide
  Antisense strand to SEQ ID NO: 1407300
uuuaucuacgcaugcgcac

SEQ ID NO: 1407302 - RNA, 19 nt, Artificial Sequence
  Description of Artificial Sequence: Synthetic oligonucleotide
  Sense strand starting at position 2182 of SEQ ID NO: 1243298
cccucaaguuaggaaugaa

SEQ ID NO: 1407303 - RNA, 19 nt, Artificial Sequence
  Description of Artificial Sequence: Synthetic oligonucleotide
  Antisense strand to SEQ ID NO: 1407302
uucauuccuaacuugaggg

SEQ ID NO: 1407304 - RNA, 19 nt, Artificial Sequence
  Description of Artificial Sequence: Synthetic oligonucleotide
  Sense strand starting at position 2291 of SEQ ID NO: 1243298
gcagaucaccuacagagua

SEQ ID NO: 1407305 - RNA, 19 nt, Artificial Sequence
  Description of Artificial Sequence: Synthetic oligonucleotide
  Antisense strand to SEQ ID NO: 1407304
uacucuguaggugaucugc

SEQ ID NO: 1407306 - RNA, 19 nt, Artificial Sequence
  Description of Artificial Sequence: Synthetic oligonucleotide
  Sense strand starting at position 2298 of SEQ ID NO: 1243298
accuacagaguaugauuau

SEQ ID NO: 1407307 - RNA, 19 nt, Artificial Sequence
  Description of Artificial Sequence: Synthetic oligonucleotide
  Antisense strand to SEQ ID NO: 1407306
auaaucauacucuguaggu

SEQ ID NO: 1407308 - RNA, 19 nt, Artificial Sequence
  Description of Artificial Sequence: Synthetic oligonucleotide
  Sense strand starting at position 2361 of SEQ ID NO: 1243298
gaauuaagaguccguguuu

SEQ ID NO: 1407309 - RNA, 19 nt, Artificial Sequence
  Description of Artificial Sequence: Synthetic oligonucleotide
  Antisense strand to SEQ ID NO: 1407308
aaacacggacucuuaauuc

SEQ ID NO: 1407310 - RNA, 19 nt, Artificial Sequence
  Description of Artificial Sequence: Synthetic oligonucleotide
  Sense strand starting at position 2362 of SEQ ID NO: 1243298
aauuaagaguccguguuua

SEQ ID NO: 1407311 - RNA, 19 nt, Artificial Sequence
  Description of Artificial Sequence: Synthetic oligonucleotide
  Antisense strand to SEQ ID NO: 1407310
uaaacacggacucuuaauu

SEQ ID NO: 1407312 - RNA, 19 nt, Artificial Sequence
  Description of Artificial Sequence: Synthetic oligonucleotide
  Sense strand starting at position 2374 of SEQ ID NO: 1243298
guguuuauugggagugagc

SEQ ID NO: 1407313 - RNA, 19 nt, Artificial Sequence
  Description of Artificial Sequence: Synthetic oligonucleotide
  Antisense strand to SEQ ID NO: 1407312
gcucacucccaauaaacac

SEQ ID NO: 1407314 - RNA, 19 nt, Artificial Sequence
  Description of Artificial Sequence: Synthetic oligonucleotide
  Sense strand starting at position 2376 of SEQ ID NO: 1243298
guuuauugggagugagcaa

SEQ ID NO: 1407315 - RNA, 19 nt, Artificial Sequence
  Description of Artificial Sequence: Synthetic oligonucleotide
  Antisense strand to SEQ ID NO: 1407314
uugcucacucccaauaaac

SEQ ID NO: 1407316 - RNA, 19 nt, Artificial Sequence
  Description of Artificial Sequence: Synthetic oligonucleotide
  Sense strand starting at position 2394 of SEQ ID NO: 1243298
agaauccagucaggagaua

SEQ ID NO: 1407317 - RNA, 19 nt, Artificial Sequence
  Description of Artificial Sequence: Synthetic oligonucleotide
  Antisense strand to SEQ ID NO: 1407316
uaucuccugacuggauucu

SEQ ID NO: 1407318 - RNA, 19 nt, Artificial Sequence
  Description of Artificial Sequence: Synthetic oligonucleotide
  Sense strand starting at position 3045 of SEQ ID NO: 1243298
ccucuugaaugacugcaua

SEQ ID NO: 1407319 - RNA, 19 nt, Artificial Sequence
  Description of Artificial Sequence: Synthetic oligonucleotide
  Antisense strand to SEQ ID NO: 1407318
uaugcagucauucaagagg

SEQ ID NO: 1407320 - RNA, 19 nt, Artificial Sequence
  Description of Artificial Sequence: Synthetic oligonucleotide
  Sense strand starting at position 3067 of SEQ ID NO: 1243298
cucgauuugucuuaucaca

SEQ ID NO: 1407321 - RNA, 19 nt, Artificial Sequence
  Description of Artificial Sequence: Synthetic oligonucleotide
  Antisense strand to SEQ ID NO: 1407320
ugugauaagacaaaucgag

SEQ ID NO: 1407322 - RNA, 19 nt, Artificial Sequence
  Description of Artificial Sequence: Synthetic oligonucleotide
  Sense strand starting at position 3556 of SEQ ID NO: 1243298
aagucaaggucaguucuua

SEQ ID NO: 1407323 - RNA, 19 nt, Artificial Sequence
  Description of Artificial Sequence: Synthetic oligonucleotide
  Antisense strand to SEQ ID NO: 1407322
uaagaacugaccuugacuu

SEQ ID NO: 1407324 - RNA, 19 nt, Artificial Sequence
  Description of Artificial Sequence: Synthetic oligonucleotide
  Sense strand starting at position 3560 of SEQ ID NO: 1243298
caaggucaguucuuaagag

SEQ ID NO: 1407325 - RNA, 19 nt, Artificial Sequence
  Description of Artificial Sequence: Synthetic oligonucleotide
  Antisense strand to SEQ ID NO: 1407324
cucuuaagaacugaccuug

SEQ ID NO: 1407326 - RNA, 19 nt, Artificial Sequence
  Description of Artificial Sequence: Synthetic oligonucleotide
  Sense strand starting at position 3576 of SEQ ID NO: 1243298
gagaaacuuugaguuccca

SEQ ID NO: 1407327 - RNA, 19 nt, Artificial Sequence
  Description of Artificial Sequence: Synthetic oligonucleotide
  Antisense strand to SEQ ID NO: 1407326
ugggaacucaaaguuucuc

SEQ ID NO: 1407328 - RNA, 19 nt, Artificial Sequence
  Description of Artificial Sequence: Synthetic oligonucleotide
  Sense strand starting at position 3980 of SEQ ID NO: 1243298
uuguaagaacuuuguagga

SEQ ID NO: 1407329 - RNA, 19 nt, Artificial Sequence
  Description of Artificial Sequence: Synthetic oligonucleotide
  Antisense strand to SEQ ID NO: 1407328
uccuacaaaguucuuacaa

SEQ ID NO: 1407330 - RNA, 19 nt, Artificial Sequence
  Description of Artificial Sequence: Synthetic oligonucleotide
  Sense strand starting at position 3982 of SEQ ID NO: 1243298
guaagaacuuuguaggaag

SEQ ID NO: 1407331 - RNA, 19 nt, Artificial Sequence
  Description of Artificial Sequence: Synthetic oligonucleotide
  Antisense strand to SEQ ID NO: 1407330
cuuccuacaaaguucuuac

SEQ ID NO: 1407332 - RNA, 19 nt, Artificial Sequence
  Description of Artificial Sequence: Synthetic oligonucleotide
  Sense strand starting at position 452 of SEQ ID NO: 1243299
aggagaacgugugaagaaa

SEQ ID NO: 1407333 - RNA, 19 nt, Artificial Sequence
  Description of Artificial Sequence: Synthetic oligonucleotide
  Antisense strand to SEQ ID NO: 1407332
uuucuucacacguucuccu

SEQ ID NO: 1407334 - RNA, 19 nt, Artificial Sequence
  Description of Artificial Sequence: Synthetic oligonucleotide
  Sense strand starting at position 505 of SEQ ID NO: 1243299
gcuuuccauucgccaggaa

SEQ ID NO: 1407335 - RNA, 19 nt, Artificial Sequence
  Description of Artificial Sequence: Synthetic oligonucleotide
  Antisense strand to SEQ ID NO: 1407334
uuccuggcgaauggaaagc

SEQ ID NO: 1407336 - RNA, 19 nt, Artificial Sequence
  Description of Artificial Sequence: Synthetic oligonucleotide
  Sense strand starting at position 551 of SEQ ID NO: 1243299
uucugacucuggugaguug

SEQ ID NO: 1407337 - RNA, 19 nt, Artificial Sequence
  Description of Artificial Sequence: Synthetic oligonucleotide
  Antisense strand to SEQ ID NO: 1407336
caacucaccagagucagaa

SEQ ID NO: 1407338 - RNA, 19 nt, Artificial Sequence
  Description of Artificial Sequence: Synthetic oligonucleotide
  Sense strand starting at position 592 of SEQ ID NO: 1243299
ugccuagacgugggaagaa

SEQ ID NO: 1407339 - RNA, 19 nt, Artificial Sequence
  Description of Artificial Sequence: Synthetic oligonucleotide
  Antisense strand to SEQ ID NO: 1407338
uucuucccacgucuaggca

SEQ ID NO: 1407340 - RNA, 19 nt, Artificial Sequence
  Description of Artificial Sequence: Synthetic oligonucleotide
  Sense strand starting at position 679 of SEQ ID NO: 1243299
ucuggugagugguauggau

SEQ ID NO: 1407341 - RNA, 19 nt, Artificial Sequence
  Description of Artificial Sequence: Synthetic oligonucleotide
  Antisense strand to SEQ ID NO: 1407340
auccauaccacucaccaga

SEQ ID NO: 1407342 - RNA, 19 nt, Artificial Sequence
  Description of Artificial Sequence: Synthetic oligonucleotide
  Sense strand starting at position 942 of SEQ ID NO: 1243299
ugcacuuguuucucucuga

SEQ ID NO: 1407343 - RNA, 19 nt, Artificial Sequence
  Description of Artificial Sequence: Synthetic oligonucleotide
  Antisense strand to SEQ ID NO: 1407342
ucagagagaaacaagugca

SEQ ID NO: 1407344 - RNA, 19 nt, Artificial Sequence
  Description of Artificial Sequence: Synthetic oligonucleotide
  Sense strand starting at position 943 of SEQ ID NO: 1243299
gcacuuguuucucucugaa

SEQ ID NO: 1407345 - RNA, 19 nt, Artificial Sequence
  Description of Artificial Sequence: Synthetic oligonucleotide
  Antisense strand to SEQ ID NO: 1407344
uucagagagaaacaagugc

SEQ ID NO: 1407346 - RNA, 19 nt, Artificial Sequence
  Description of Artificial Sequence: Synthetic oligonucleotide
  Sense strand starting at position 947 of SEQ ID NO: 1243299
uuguuucucucugaagaug

SEQ ID NO: 1407347 - RNA, 19 nt, Artificial Sequence
  Description of Artificial Sequence: Synthetic oligonucleotide
  Antisense strand to SEQ ID NO: 1407346
caucuucagagagaaacaa

SEQ ID NO: 1407348 - RNA, 19 nt, Artificial Sequence
  Description of Artificial Sequence: Synthetic oligonucleotide
  Sense strand starting at position 1250 of SEQ ID NO: 1243299
gaggcauuagggcauauua

SEQ ID NO: 1407349 - RNA, 19 nt, Artificial Sequence
  Description of Artificial Sequence: Synthetic oligonucleotide
  Antisense strand to SEQ ID NO: 1407348
uaauaugcccuaaugccuc

SEQ ID NO: 1407350 - RNA, 19 nt, Artificial Sequence
  Description of Artificial Sequence: Synthetic oligonucleotide
  Sense strand starting at position 1252 of SEQ ID NO: 1243299
ggcauuagggcauauuaca

SEQ ID NO: 1407351 - RNA, 19 nt, Artificial Sequence
  Description of Artificial Sequence: Synthetic oligonucleotide
  Antisense strand to SEQ ID NO: 1407350
uguaauaugcccuaaugcc

SEQ ID NO: 1407352 - RNA, 19 nt, Artificial Sequence
  Description of Artificial Sequence: Synthetic oligonucleotide
  Sense strand starting at position 1784 of SEQ ID NO: 1243299
cuacuaaucucuggcugga

SEQ ID NO: 1407353 - RNA, 19 nt, Artificial Sequence
  Description of Artificial Sequence: Synthetic oligonucleotide
  Antisense strand to SEQ ID NO: 1407352
uccagccagagauuaguag

SEQ ID NO: 1407354 - RNA, 19 nt, Artificial Sequence
  Description of Artificial Sequence: Synthetic oligonucleotide
  Sense strand starting at position 1786 of SEQ ID NO: 1243299
acuaaucucuggcuggaga

SEQ ID NO: 1407355 - RNA, 19 nt, Artificial Sequence
  Description of Artificial Sequence: Synthetic oligonucleotide
  Antisense strand to SEQ ID NO: 1407354
ucuccagccagagauuagu

SEQ ID NO: 1407356 - RNA, 19 nt, Artificial Sequence
  Description of Artificial Sequence: Synthetic oligonucleotide
  Sense strand starting at position 1808 of SEQ ID NO: 1243299
gggccuuagccuggaauua

SEQ ID NO: 1407357 - RNA, 19 nt, Artificial Sequence
  Description of Artificial Sequence: Synthetic oligonucleotide
  Antisense strand to SEQ ID NO: 1407356
uaauuccaggcuaaggccc

SEQ ID NO: 1407358 - RNA, 19 nt, Artificial Sequence
  Description of Artificial Sequence: Synthetic oligonucleotide
  Sense strand starting at position 1843 of SEQ ID NO: 1243299
uccagaagguuuccuugua

SEQ ID NO: 1407359 - RNA, 19 nt, Artificial Sequence
  Description of Artificial Sequence: Synthetic oligonucleotide
  Antisense strand to SEQ ID NO: 1407358
uacaaggaaaccuucugga

SEQ ID NO: 1407360 - RNA, 19 nt, Artificial Sequence
  Description of Artificial Sequence: Synthetic oligonucleotide
  Sense strand starting at position 1910 of SEQ ID NO: 1243299
ggucgaucccuggacaacu

SEQ ID NO: 1407361 - RNA, 19 nt, Artificial Sequence
  Description of Artificial Sequence: Synthetic oligonucleotide
  Antisense strand to SEQ ID NO: 1407360
aguuguccagggaucgacc

SEQ ID NO: 1407362 - RNA, 19 nt, Artificial Sequence
  Description of Artificial Sequence: Synthetic oligonucleotide
  Sense strand starting at position 1928 of SEQ ID NO: 1243299
ugggcagguuucuggaguu

SEQ ID NO: 1407363 - RNA, 19 nt, Artificial Sequence
  Description of Artificial Sequence: Synthetic oligonucleotide
  Antisense strand to SEQ ID NO: 1407362
aacuccagaaaccugccca

SEQ ID NO: 1407364 - RNA, 19 nt, Artificial Sequence
  Description of Artificial Sequence: Synthetic oligonucleotide
  Sense strand starting at position 2059 of SEQ ID NO: 1243299
gugggcugacaucacaaua

SEQ ID NO: 1407365 - RNA, 19 nt, Artificial Sequence
  Description of Artificial Sequence: Synthetic oligonucleotide
  Antisense strand to SEQ ID NO: 1407364
uauugugaugucagcccac

SEQ ID NO: 1407366 - RNA, 19 nt, Artificial Sequence
  Description of Artificial Sequence: Synthetic oligonucleotide
  Sense strand starting at position 2626 of SEQ ID NO: 1243299
ugaccugagauaggucuau

SEQ ID NO: 1407367 - RNA, 19 nt, Artificial Sequence
  Description of Artificial Sequence: Synthetic oligonucleotide
  Antisense strand to SEQ ID NO: 1407366
auagaccuaucucagguca

SEQ ID NO: 1407368 - RNA, 19 nt, Artificial Sequence
  Description of Artificial Sequence: Synthetic oligonucleotide
  Sense strand starting at position 2735 of SEQ ID NO: 1243299
gggcuucagugggaucaca

SEQ ID NO: 1407369 - RNA, 19 nt, Artificial Sequence
  Description of Artificial Sequence: Synthetic oligonucleotide
  Antisense strand to SEQ ID NO: 1407368
ugugaucccacugaagccc

SEQ ID NO: 1407370 - RNA, 19 nt, Artificial Sequence
  Description of Artificial Sequence: Synthetic oligonucleotide
  Sense strand starting at position 2855 of SEQ ID NO: 1243299
aucugauacucaggugcua

SEQ ID NO: 1407371 - RNA, 19 nt, Artificial Sequence
  Description of Artificial Sequence: Synthetic oligonucleotide
  Antisense strand to SEQ ID NO: 1407370
uagcaccugaguaucagau

SEQ ID NO: 1407372 - RNA, 19 nt, Artificial Sequence
  Description of Artificial Sequence: Synthetic oligonucleotide
  Sense strand starting at position 2996 of SEQ ID NO: 1243299
aggccuaguuggucaaauc

SEQ ID NO: 1407373 - RNA, 19 nt, Artificial Sequence
  Description of Artificial Sequence: Synthetic oligonucleotide
  Antisense strand to SEQ ID NO: 1407372
gauuugaccaacuaggccu

SEQ ID NO: 1407374 - RNA, 19 nt, Artificial Sequence
  Description of Artificial Sequence: Synthetic oligonucleotide
  Sense strand starting at position 3048 of SEQ ID NO: 1243299
acuggaagccucugagcuu

SEQ ID NO: 1407375 - RNA, 19 nt, Artificial Sequence
  Description of Artificial Sequence: Synthetic oligonucleotide
  Antisense strand to SEQ ID NO: 1407374
aagcucagaggcuuccagu

SEQ ID NO: 1407376 - RNA, 19 nt, Artificial Sequence
  Description of Artificial Sequence: Synthetic oligonucleotide
  Sense strand starting at position 3159 of SEQ ID NO: 1243299
ccacaagacuguucguagu

SEQ ID NO: 1407377 - RNA, 19 nt, Artificial Sequence
  Description of Artificial Sequence: Synthetic oligonucleotide
  Antisense strand to SEQ ID NO: 1407376
acuacgaacagucuugugg

SEQ ID NO: 1407378 - RNA, 19 nt, Artificial Sequence
  Description of Artificial Sequence: Synthetic oligonucleotide
  Sense strand starting at position 3161 of SEQ ID NO: 1243299
acaagacuguucguagucu

SEQ ID NO: 1407379 - RNA, 19 nt, Artificial Sequence
  Description of Artificial Sequence: Synthetic oligonucleotide
  Antisense strand to SEQ ID NO: 1407378
agacuacgaacagucuugu

SEQ ID NO: 1407380 - RNA, 19 nt, Artificial Sequence
  Description of Artificial Sequence: Synthetic oligonucleotide
  Sense strand starting at position 3269 of SEQ ID NO: 1243299
gaggcaucucgcuaggguu

SEQ ID NO: 1407381 - RNA, 19 nt, Artificial Sequence
  Description of Artificial Sequence: Synthetic oligonucleotide
  Antisense strand to SEQ ID NO: 1407380
aacccuagcgagaugccuc

SEQ ID NO: 1407382 - RNA, 19 nt, Artificial Sequence
  Description of Artificial Sequence: Synthetic oligonucleotide
  Sense strand starting at position 3355 of SEQ ID NO: 1243299
acccgcaugcagugaguua

SEQ ID NO: 1407383 - RNA, 19 nt, Artificial Sequence
  Description of Artificial Sequence: Synthetic oligonucleotide
  Antisense strand to SEQ ID NO: 1407382
uaacucacugcaugcgggu

SEQ ID NO: 1407384 - RNA, 19 nt, Artificial Sequence
  Description of Artificial Sequence: Synthetic oligonucleotide
  Sense strand starting at position 3461 of SEQ ID NO: 1243299
accaguguccugcggagaa

SEQ ID NO: 1407385 - RNA, 19 nt, Artificial Sequence
  Description of Artificial Sequence: Synthetic oligonucleotide
  Antisense strand to SEQ ID NO: 1407384
uucuccgcaggacacuggu

SEQ ID NO: 1407386 - RNA, 19 nt, Artificial Sequence
  Description of Artificial Sequence: Synthetic oligonucleotide
  Sense strand starting at position 3465 of SEQ ID NO: 1243299
guguccugcggagaaagaa

SEQ ID NO: 1407387 - RNA, 19 nt, Artificial Sequence
  Description of Artificial Sequence: Synthetic oligonucleotide
  Antisense strand to SEQ ID NO: 1407386
uucuuucuccgcaggacac

SEQ ID NO: 1407388 - RNA, 19 nt, Artificial Sequence
  Description of Artificial Sequence: Synthetic oligonucleotide
  Sense strand starting at position 3938 of SEQ ID NO: 1243299
ccaaucacagguugucuua

SEQ ID NO: 1407389 - RNA, 19 nt, Artificial Sequence
  Description of Artificial Sequence: Synthetic oligonucleotide
  Antisense strand to SEQ ID NO: 1407388
uaagacaaccugugauugg

SEQ ID NO: 1407390 - RNA, 19 nt, Artificial Sequence
  Description of Artificial Sequence: Synthetic oligonucleotide
  Sense strand starting at position 235 of SEQ ID NO: 1243300
gccucacagcgcucaguaa

SEQ ID NO: 1407391 - RNA, 19 nt, Artificial Sequence
  Description of Artificial Sequence: Synthetic oligonucleotide
  Antisense strand to SEQ ID NO: 1407390
uuacugagcgcugugaggc

SEQ ID NO: 1407392 - RNA, 19 nt, Artificial Sequence
  Description of Artificial Sequence: Synthetic oligonucleotide
  Sense strand starting at position 244 of SEQ ID NO: 1243300
cgcucaguaacagaugaga

SEQ ID NO: 1407393 - RNA, 19 nt, Artificial Sequence
  Description of Artificial Sequence: Synthetic oligonucleotide
  Antisense strand to SEQ ID NO: 1407392
ucucaucuguuacugagcg

SEQ ID NO: 1407394 - RNA, 19 nt, Artificial Sequence
  Description of Artificial Sequence: Synthetic oligonucleotide
  Sense strand starting at position 635 of SEQ ID NO: 1243300
aaaugucacggcuaaguga

SEQ ID NO: 1407395 - RNA, 19 nt, Artificial Sequence
  Description of Artificial Sequence: Synthetic oligonucleotide
  Antisense strand to SEQ ID NO: 1407394
ucacuuagccgugacauuu

SEQ ID NO: 1407396 - RNA, 19 nt, Artificial Sequence
  Description of Artificial Sequence: Synthetic oligonucleotide
  Sense strand starting at position 994 of SEQ ID NO: 1243300
gcucaagagcuguauuauu

SEQ ID NO: 1407397 - RNA, 19 nt, Artificial Sequence
  Description of Artificial Sequence: Synthetic oligonucleotide
  Antisense strand to SEQ ID NO: 1407396
aauaauacagcucuugagc

SEQ ID NO: 1407398 - RNA, 19 nt, Artificial Sequence
  Description of Artificial Sequence: Synthetic oligonucleotide
  Sense strand starting at position 1025 of SEQ ID NO: 1243300
gggagcagacacugaucua

SEQ ID NO: 1407399 - RNA, 19 nt, Artificial Sequence
  Description of Artificial Sequence: Synthetic oligonucleotide
  Antisense strand to SEQ ID NO: 1407398
uagaucagugucugcuccc

SEQ ID NO: 1407400 - RNA, 19 nt, Artificial Sequence
  Description of Artificial Sequence: Synthetic oligonucleotide
  Sense strand starting at position 1062 of SEQ ID NO: 1243300
cuggcagcuccagaauacu

SEQ ID NO: 1407401 - RNA, 19 nt, Artificial Sequence
  Description of Artificial Sequence: Synthetic oligonucleotide
  Antisense strand to SEQ ID NO: 1407400
aguauucuggagcugccag

SEQ ID NO: 1407402 - RNA, 19 nt, Artificial Sequence
  Description of Artificial Sequence: Synthetic oligonucleotide
  Sense strand starting at position 1114 of SEQ ID NO: 1243300
uccaguuucuguuccugaa

SEQ ID NO: 1407403 - RNA, 19 nt, Artificial Sequence
  Description of Artificial Sequence: Synthetic oligonucleotide
  Antisense strand to SEQ ID NO: 1407402
uucaggaacagaaacugga

SEQ ID NO: 1407404 - RNA, 19 nt, Artificial Sequence
  Description of Artificial Sequence: Synthetic oligonucleotide
  Sense strand starting at position 1226 of SEQ ID NO: 1243300
uacucagugaucgguguga

SEQ ID NO: 1407405 - RNA, 19 nt, Artificial Sequence
  Description of Artificial Sequence: Synthetic oligonucleotide
  Antisense strand to SEQ ID NO: 1407404
ucacaccgaucacugagua

SEQ ID NO: 1407406 - RNA, 19 nt, Artificial Sequence
  Description of Artificial Sequence: Synthetic oligonucleotide
  Sense strand starting at position 1228 of SEQ ID NO: 1243300
cucagugaucggugugacu

SEQ ID NO: 1407407 - RNA, 19 nt, Artificial Sequence
  Description of Artificial Sequence: Synthetic oligonucleotide
  Antisense strand to SEQ ID NO: 1407406
agucacaccgaucacugag

SEQ ID NO: 1407408 - RNA, 19 nt, Artificial Sequence
  Description of Artificial Sequence: Synthetic oligonucleotide
  Sense strand starting at position 1230 of SEQ ID NO: 1243300
cagugaucggugugacuca

SEQ ID NO: 1407409 - RNA, 19 nt, Artificial Sequence
  Description of Artificial Sequence: Synthetic oligonucleotide
  Antisense strand to SEQ ID NO: 1407408
ugagucacaccgaucacug

SEQ ID NO: 1407410 - RNA, 19 nt, Artificial Sequence
  Description of Artificial Sequence: Synthetic oligonucleotide
  Sense strand starting at position 1314 of SEQ ID NO: 1243300
uccuuuccucuguagucaa

SEQ ID NO: 1407411 - RNA, 19 nt, Artificial Sequence
  Description of Artificial Sequence: Synthetic oligonucleotide
  Antisense strand to SEQ ID NO: 1407410
uugacuacagaggaaagga

SEQ ID NO: 1407412 - RNA, 19 nt, Artificial Sequence
  Description of Artificial Sequence: Synthetic oligonucleotide
  Sense strand starting at position 1813 of SEQ ID NO: 1243300
gauagaccuccaggcagau

SEQ ID NO: 1407413 - RNA, 19 nt, Artificial Sequence
  Description of Artificial Sequence: Synthetic oligonucleotide
  Antisense strand to SEQ ID NO: 1407412
aucugccuggaggucuauc

SEQ ID NO: 1407414 - RNA, 19 nt, Artificial Sequence
  Description of Artificial Sequence: Synthetic oligonucleotide
  Sense strand starting at position 2440 of SEQ ID NO: 1243300
ugcuguccuuauucggaga

SEQ ID NO: 1407415 - RNA, 19 nt, Artificial Sequence
  Description of Artificial Sequence: Synthetic oligonucleotide
  Antisense strand to SEQ ID NO: 1407414
ucuccgaauaaggacagca

SEQ ID NO: 1407416 - RNA, 19 nt, Artificial Sequence
  Description of Artificial Sequence: Synthetic oligonucleotide
  Sense strand starting at position 2489 of SEQ ID NO: 1243300
ccgugucagccuugggaga

SEQ ID NO: 1407417 - RNA, 19 nt, Artificial Sequence
  Description of Artificial Sequence: Synthetic oligonucleotide
  Antisense strand to SEQ ID NO: 1407416
ucucccaaggcugacacgg

SEQ ID NO: 1407418 - RNA, 19 nt, Artificial Sequence
  Description of Artificial Sequence: Synthetic oligonucleotide
  Sense strand starting at position 2580 of SEQ ID NO: 1243300
ucuugaaguuuggacagaa

SEQ ID NO: 1407419 - RNA, 19 nt, Artificial Sequence
  Description of Artificial Sequence: Synthetic oligonucleotide
  Antisense strand to SEQ ID NO: 1407418
uucuguccaaacuucaaga

SEQ ID NO: 1407420 - RNA, 19 nt, Artificial Sequence
  Description of Artificial Sequence: Synthetic oligonucleotide
  Sense strand starting at position 2836 of SEQ ID NO: 1243300
cugagacccuggcaaacau

SEQ ID NO: 1407421 - RNA, 19 nt, Artificial Sequence
  Description of Artificial Sequence: Synthetic oligonucleotide
  Antisense strand to SEQ ID NO: 1407420
auguuugccagggucucag

SEQ ID NO: 1407422 - RNA, 19 nt, Artificial Sequence
  Description of Artificial Sequence: Synthetic oligonucleotide
  Sense strand starting at position 2885 of SEQ ID NO: 1243300
uugugaugcuuuguuaauu

SEQ ID NO: 1407423 - RNA, 19 nt, Artificial Sequence
  Description of Artificial Sequence: Synthetic oligonucleotide
  Antisense strand to SEQ ID NO: 1407422
aauuaacaaagcaucacaa

SEQ ID NO: 1407424 - RNA, 19 nt, Artificial Sequence
  Description of Artificial Sequence: Synthetic oligonucleotide
  Sense strand starting at position 2886 of SEQ ID NO: 1243300
ugugaugcuuuguuaauuc

SEQ ID NO: 1407425 - RNA, 19 nt, Artificial Sequence
  Description of Artificial Sequence: Synthetic oligonucleotide
  Antisense strand to SEQ ID NO: 1407424
gaauuaacaaagcaucaca

SEQ ID NO: 1407426 - RNA, 19 nt, Artificial Sequence
  Description of Artificial Sequence: Synthetic oligonucleotide
  Sense strand starting at position 2986 of SEQ ID NO: 1243300
uugguuuccugcuugggaa

SEQ ID NO: 1407427 - RNA, 19 nt, Artificial Sequence
  Description of Artificial Sequence: Synthetic oligonucleotide
  Antisense strand to SEQ ID NO: 1407426
uucccaagcaggaaaccaa

SEQ ID NO: 1407428 - RNA, 19 nt, Artificial Sequence
  Description of Artificial Sequence: Synthetic oligonucleotide
  Sense strand starting at position 2987 of SEQ ID NO: 1243300
ugguuuccugcuugggaaa

SEQ ID NO: 1407429 - RNA, 19 nt, Artificial Sequence
  Description of Artificial Sequence: Synthetic oligonucleotide
  Antisense strand to SEQ ID NO: 1407428
uuucccaagcaggaaacca

SEQ ID NO: 1407430 - RNA, 19 nt, Artificial Sequence
  Description of Artificial Sequence: Synthetic oligonucleotide
  Sense strand starting at position 2998 of SEQ ID NO: 1243300
uugggaaaguuucccauga

SEQ ID NO: 1407431 - RNA, 19 nt, Artificial Sequence
  Description of Artificial Sequence: Synthetic oligonucleotide
  Antisense strand to SEQ ID NO: 1407430
ucaugggaaacuuucccaa

SEQ ID NO: 1407432 - RNA, 19 nt, Artificial Sequence
  Description of Artificial Sequence: Synthetic oligonucleotide
  Sense strand starting at position 3002 of SEQ ID NO: 1243300
gaaaguuucccaugagcua

SEQ ID NO: 1407433 - RNA, 19 nt, Artificial Sequence
  Description of Artificial Sequence: Synthetic oligonucleotide
  Antisense strand to SEQ ID NO: 1407432
uagcucaugggaaacuuuc

SEQ ID NO: 1407434 - RNA, 19 nt, Artificial Sequence
  Description of Artificial Sequence: Synthetic oligonucleotide
  Sense strand starting at position 3038 of SEQ ID NO: 1243300
gagguuucugauggaacuu

SEQ ID NO: 1407435 - RNA, 19 nt, Artificial Sequence
  Description of Artificial Sequence: Synthetic oligonucleotide
  Antisense strand to SEQ ID NO: 1407434
aaguuccaucagaaaccuc

SEQ ID NO: 1407436 - RNA, 19 nt, Artificial Sequence
  Description of Artificial Sequence: Synthetic oligonucleotide
  Sense strand starting at position 3082 of SEQ ID NO: 1243300
uggugucuagacugggaua

SEQ ID NO: 1407437 - RNA, 19 nt, Artificial Sequence
  Description of Artificial Sequence: Synthetic oligonucleotide
  Antisense strand to SEQ ID NO: 1407436
uaucccagucuagacacca

SEQ ID NO: 1407438 - RNA, 19 nt, Artificial Sequence
  Description of Artificial Sequence: Synthetic oligonucleotide
  Sense strand starting at position 3083 of SEQ ID NO: 1243300
ggugucuagacugggauaa

SEQ ID NO: 1407439 - RNA, 19 nt, Artificial Sequence
  Description of Artificial Sequence: Synthetic oligonucleotide
  Antisense strand to SEQ ID NO: 1407438
uuaucccagucuagacacc

SEQ ID NO: 1407440 - RNA, 19 nt, Artificial Sequence
  Description of Artificial Sequence: Synthetic oligonucleotide
  Sense strand starting at position 3095 of SEQ ID NO: 1243300
gggauaagcuguaggagga

SEQ ID NO: 1407441 - RNA, 19 nt, Artificial Sequence
  Description of Artificial Sequence: Synthetic oligonucleotide
  Antisense strand to SEQ ID NO: 1407440
uccuccuacagcuuauccc

SEQ ID NO: 1407442 - RNA, 19 nt, Artificial Sequence
  Description of Artificial Sequence: Synthetic oligonucleotide
  Sense strand starting at position 3175 of SEQ ID NO: 1243300
gcagauggucugggugaaa

SEQ ID NO: 1407443 - RNA, 19 nt, Artificial Sequence
  Description of Artificial Sequence: Synthetic oligonucleotide
  Antisense strand to SEQ ID NO: 1407442
uuucacccagaccaucugc

SEQ ID NO: 1407444 - RNA, 19 nt, Artificial Sequence
  Description of Artificial Sequence: Synthetic oligonucleotide
  Sense strand starting at position 3178 of SEQ ID NO: 1243300
gauggucugggugaaaguu

SEQ ID NO: 1407445 - RNA, 19 nt, Artificial Sequence
  Description of Artificial Sequence: Synthetic oligonucleotide
  Antisense strand to SEQ ID NO: 1407444
aacuuucacccagaccauc

SEQ ID NO: 1407446 - RNA, 19 nt, Artificial Sequence
  Description of Artificial Sequence: Synthetic oligonucleotide
  Sense strand starting at position 3197 of SEQ ID NO: 1243300
uuuaaucucgugugagaug

SEQ ID NO: 1407447 - RNA, 19 nt, Artificial Sequence
  Description of Artificial Sequence: Synthetic oligonucleotide
  Antisense strand to SEQ ID NO: 1407446
caucucacacgagauuaaa

SEQ ID NO: 1407448 - RNA, 19 nt, Artificial Sequence
  Description of Artificial Sequence: Synthetic oligonucleotide
  Sense strand starting at position 3204 of SEQ ID NO: 1243300
ucgugugagaugcuuguuu

SEQ ID NO: 1407449 - RNA, 19 nt, Artificial Sequence
  Description of Artificial Sequence: Synthetic oligonucleotide
  Antisense strand to SEQ ID NO: 1407448
aaacaagcaucucacacga

SEQ ID NO: 1407450 - RNA, 19 nt, Artificial Sequence
  Description of Artificial Sequence: Synthetic oligonucleotide
  Sense strand starting at position 3206 of SEQ ID NO: 1243300
gugugagaugcuuguuuca

SEQ ID NO: 1407451 - RNA, 19 nt, Artificial Sequence
  Description of Artificial Sequence: Synthetic oligonucleotide
  Antisense strand to SEQ ID NO: 1407450
ugaaacaagcaucucacac

SEQ ID NO: 1407452 - RNA, 19 nt, Artificial Sequence
  Description of Artificial Sequence: Synthetic oligonucleotide
  Sense strand starting at position 3222 of SEQ ID NO: 1243300
ucaucuguggcaggauaga

SEQ ID NO: 1407453 - RNA, 19 nt, Artificial Sequence
  Description of Artificial Sequence: Synthetic oligonucleotide
  Antisense strand to SEQ ID NO: 1407452
ucuauccugccacagauga

SEQ ID NO: 1407454 - RNA, 19 nt, Artificial Sequence
  Description of Artificial Sequence: Synthetic oligonucleotide
  Sense strand starting at position 3244 of SEQ ID NO: 1243300
uuggaagaccucuagcuuu

SEQ ID NO: 1407455 - RNA, 19 nt, Artificial Sequence
  Description of Artificial Sequence: Synthetic oligonucleotide
  Antisense strand to SEQ ID NO: 1407454
aaagcuagaggucuuccaa

SEQ ID NO: 1407456 - RNA, 19 nt, Artificial Sequence
  Description of Artificial Sequence: Synthetic oligonucleotide
  Sense strand starting at position 3270 of SEQ ID NO: 1243300
gcgcuugucaugucuuucu

SEQ ID NO: 1407457 - RNA, 19 nt, Artificial Sequence
  Description of Artificial Sequence: Synthetic oligonucleotide
  Antisense strand to SEQ ID NO: 1407456
agaaagacaugacaagcgc

SEQ ID NO: 1407458 - RNA, 19 nt, Artificial Sequence
  Description of Artificial Sequence: Synthetic oligonucleotide
  Sense strand starting at position 3279 of SEQ ID NO: 1243300
augucuuucuuggcuugua

SEQ ID NO: 1407459 - RNA, 19 nt, Artificial Sequence
  Description of Artificial Sequence: Synthetic oligonucleotide
  Antisense strand to SEQ ID NO: 1407458
uacaagccaagaaagacau

SEQ ID NO: 1407460 - RNA, 19 nt, Artificial Sequence
  Description of Artificial Sequence: Synthetic oligonucleotide
  Sense strand starting at position 3288 of SEQ ID NO: 1243300
uuggcuuguagccauugua

SEQ ID NO: 1407461 - RNA, 19 nt, Artificial Sequence
  Description of Artificial Sequence: Synthetic oligonucleotide
  Antisense strand to SEQ ID NO: 1407460
uacaauggcuacaagccaa

SEQ ID NO: 1407462 - RNA, 19 nt, Artificial Sequence
  Description of Artificial Sequence: Synthetic oligonucleotide
  Sense strand starting at position 3313 of SEQ ID NO: 1243300
aguuguuuccacuagacuc

SEQ ID NO: 1407463 - RNA, 19 nt, Artificial Sequence
  Description of Artificial Sequence: Synthetic oligonucleotide
  Antisense strand to SEQ ID NO: 1407462
gagucuaguggaaacaacu

SEQ ID NO: 1407464 - RNA, 19 nt, Artificial Sequence
  Description of Artificial Sequence: Synthetic oligonucleotide
  Sense strand starting at position 3315 of SEQ ID NO: 1243300
uuguuuccacuagacucau

SEQ ID NO: 1407465 - RNA, 19 nt, Artificial Sequence
  Description of Artificial Sequence: Synthetic oligonucleotide
  Antisense strand to SEQ ID NO: 1407464
augagucuaguggaaacaa

SEQ ID NO: 1407466 - RNA, 19 nt, Artificial Sequence
  Description of Artificial Sequence: Synthetic oligonucleotide
  Sense strand starting at position 3753 of SEQ ID NO: 1243300
aucugaaauugccaagaac

SEQ ID NO: 1407467 - RNA, 19 nt, Artificial Sequence
  Description of Artificial Sequence: Synthetic oligonucleotide
  Antisense strand to SEQ ID NO: 1407466
guucuuggcaauuucagau

SEQ ID NO: 1407468 - RNA, 19 nt, Artificial Sequence
  Description of Artificial Sequence: Synthetic oligonucleotide
  Sense strand starting at position 3783 of SEQ ID NO: 1243300
ggcagaauucacugaggag

SEQ ID NO: 1407469 - RNA, 19 nt, Artificial Sequence
  Description of Artificial Sequence: Synthetic oligonucleotide
  Antisense strand to SEQ ID NO: 1407468
cuccucagugaauucugcc

SEQ ID NO: 1407470 - RNA, 19 nt, Artificial Sequence
  Description of Artificial Sequence: Synthetic oligonucleotide
  Sense strand starting at position 44 of SEQ ID NO: 1243301
gcggcagagccgucacuau

SEQ ID NO: 1407471 - RNA, 19 nt, Artificial Sequence
  Description of Artificial Sequence: Synthetic oligonucleotide
  Antisense strand to SEQ ID NO: 1407470
auagugacggcucugccgc

SEQ ID NO: 1407472 - RNA, 19 nt, Artificial Sequence
  Description of Artificial Sequence: Synthetic oligonucleotide
  Sense strand starting at position 229 of SEQ ID NO: 1243301
cucaaacaaucgugggaaa

SEQ ID NO: 1407473 - RNA, 19 nt, Artificial Sequence
  Description of Artificial Sequence: Synthetic oligonucleotide
  Antisense strand to SEQ ID NO: 1407472
uuucccacgauuguuugag

SEQ ID NO: 1407474 - RNA, 19 nt, Artificial Sequence
  Description of Artificial Sequence: Synthetic oligonucleotide
  Sense strand starting at position 232 of SEQ ID NO: 1243301
aaacaaucgugggaaagga

SEQ ID NO: 1407475 - RNA, 19 nt, Artificial Sequence
  Description of Artificial Sequence: Synthetic oligonucleotide
  Antisense strand to SEQ ID NO: 1407474
uccuuucccacgauuguuu

SEQ ID NO: 1407476 - RNA, 19 nt, Artificial Sequence
  Description of Artificial Sequence: Synthetic oligonucleotide
  Sense strand starting at position 871 of SEQ ID NO: 1243301
gaguccucuuugcugucaa

SEQ ID NO: 1407477 - RNA, 19 nt, Artificial Sequence
  Description of Artificial Sequence: Synthetic oligonucleotide
  Antisense strand to SEQ ID NO: 1407476
uugacagcaaagaggacuc

SEQ ID NO: 1407478 - RNA, 19 nt, Artificial Sequence
  Description of Artificial Sequence: Synthetic oligonucleotide
  Sense strand starting at position 875 of SEQ ID NO: 1243301
ccucuuugcugucaagaga

SEQ ID NO: 1407479 - RNA, 19 nt, Artificial Sequence
  Description of Artificial Sequence: Synthetic oligonucleotide
  Antisense strand to SEQ ID NO: 1407478
ucucuugacagcaaagagg

SEQ ID NO: 1407480 - RNA, 19 nt, Artificial Sequence
  Description of Artificial Sequence: Synthetic oligonucleotide
  Sense strand starting at position 917 of SEQ ID NO: 1243301
cccuuucugcaaggaggaa

SEQ ID NO: 1407481 - RNA, 19 nt, Artificial Sequence
  Description of Artificial Sequence: Synthetic oligonucleotide
  Antisense strand to SEQ ID NO: 1407480
uuccuccuugcagaaaggg

SEQ ID NO: 1407482 - RNA, 19 nt, Artificial Sequence
  Description of Artificial Sequence: Synthetic oligonucleotide
  Sense strand starting at position 1054 of SEQ ID NO: 1243301
acaugaaacuucgugugag

SEQ ID NO: 1407483 - RNA, 19 nt, Artificial Sequence
  Description of Artificial Sequence: Synthetic oligonucleotide
  Antisense strand to SEQ ID NO: 1407482
cucacacgaaguuucaugu

SEQ ID NO: 1407484 - RNA, 19 nt, Artificial Sequence
  Description of Artificial Sequence: Synthetic oligonucleotide
  Sense strand starting at position 1057 of SEQ ID NO: 1243301
ugaaacuucgugugagaga

SEQ ID NO: 1407485 - RNA, 19 nt, Artificial Sequence
  Description of Artificial Sequence: Synthetic oligonucleotide
  Antisense strand to SEQ ID NO: 1407484
ucucucacacgaaguuuca

SEQ ID NO: 1407486 - RNA, 19 nt, Artificial Sequence
  Description of Artificial Sequence: Synthetic oligonucleotide
  Sense strand starting at position 1058 of SEQ ID NO: 1243301
gaaacuucgugugagagaa

SEQ ID NO: 1407487 - RNA, 19 nt, Artificial Sequence
  Description of Artificial Sequence: Synthetic oligonucleotide
  Antisense strand to SEQ ID NO: 1407486
uucucucacacgaaguuuc

SEQ ID NO: 1407488 - RNA, 19 nt, Artificial Sequence
  Description of Artificial Sequence: Synthetic oligonucleotide
  Sense strand starting at position 1350 of SEQ ID NO: 1243301
ucaggugcccgucgguaaa

SEQ ID NO: 1407489 - RNA, 19 nt, Artificial Sequence
  Description of Artificial Sequence: Synthetic oligonucleotide
  Antisense strand to SEQ ID NO: 1407488
uuuaccgacgggcaccuga

SEQ ID NO: 1407490 - RNA, 19 nt, Artificial Sequence
  Description of Artificial Sequence: Synthetic oligonucleotide
  Sense strand starting at position 1407 of SEQ ID NO: 1243301
gggcguucggccgggaaga

SEQ ID NO: 1407491 - RNA, 19 nt, Artificial Sequence
  Description of Artificial Sequence: Synthetic oligonucleotide
  Antisense strand to SEQ ID NO: 1407490
ucuucccggccgaacgccc

SEQ ID NO: 1407492 - RNA, 19 nt, Artificial Sequence
  Description of Artificial Sequence: Synthetic oligonucleotide
  Sense strand starting at position 1610 of SEQ ID NO: 1243301
ggaagaaucuucuagaauu

SEQ ID NO: 1407493 - RNA, 19 nt, Artificial Sequence
  Description of Artificial Sequence: Synthetic oligonucleotide
  Antisense strand to SEQ ID NO: 1407492
aauucuagaagauucuucc

SEQ ID NO: 1407494 - RNA, 19 nt, Artificial Sequence
  Description of Artificial Sequence: Synthetic oligonucleotide
  Sense strand starting at position 1618 of SEQ ID NO: 1243301
cuucuagaauugcaucgau

SEQ ID NO: 1407495 - RNA, 19 nt, Artificial Sequence
  Description of Artificial Sequence: Synthetic oligonucleotide
  Antisense strand to SEQ ID NO: 1407494
aucgaugcaauucuagaag

SEQ ID NO: 1407496 - RNA, 19 nt, Artificial Sequence
  Description of Artificial Sequence: Synthetic oligonucleotide
  Sense strand starting at position 1621 of SEQ ID NO: 1243301
cuagaauugcaucgauugu

SEQ ID NO: 1407497 - RNA, 19 nt, Artificial Sequence
  Description of Artificial Sequence: Synthetic oligonucleotide
  Antisense strand to SEQ ID NO: 1407496
acaaucgaugcaauucuag

SEQ ID NO: 1407498 - RNA, 19 nt, Artificial Sequence
  Description of Artificial Sequence: Synthetic oligonucleotide
  Sense strand starting at position 1627 of SEQ ID NO: 1243301
uugcaucgauuguugcaua

SEQ ID NO: 1407499 - RNA, 19 nt, Artificial Sequence
  Description of Artificial Sequence: Synthetic oligonucleotide
  Antisense strand to SEQ ID NO: 1407498
uaugcaacaaucgaugcaa

SEQ ID NO: 1407500 - RNA, 19 nt, Artificial Sequence
  Description of Artificial Sequence: Synthetic oligonucleotide
  Sense strand starting at position 1635 of SEQ ID NO: 1243301
auuguugcauaauugcaaa

SEQ ID NO: 1407501 - RNA, 19 nt, Artificial Sequence
  Description of Artificial Sequence: Synthetic oligonucleotide
  Antisense strand to SEQ ID NO: 1407500
uuugcaauuaugcaacaau

SEQ ID NO: 1407502 - RNA, 19 nt, Artificial Sequence
  Description of Artificial Sequence: Synthetic oligonucleotide
  Sense strand starting at position 1674 of SEQ ID NO: 1243301
ggugcaccuccugagugaa

SEQ ID NO: 1407503 - RNA, 19 nt, Artificial Sequence
  Description of Artificial Sequence: Synthetic oligonucleotide
  Antisense strand to SEQ ID NO: 1407502
uucacucaggaggugcacc

SEQ ID NO: 1407504 - RNA, 19 nt, Artificial Sequence
  Description of Artificial Sequence: Synthetic oligonucleotide
  Sense strand starting at position 1936 of SEQ ID NO: 1243301
gugcucuaucggccuaguu

SEQ ID NO: 1407505 - RNA, 19 nt, Artificial Sequence
  Description of Artificial Sequence: Synthetic oligonucleotide
  Antisense strand to SEQ ID NO: 1407504
aacuaggccgauagagcac

SEQ ID NO: 1407506 - RNA, 19 nt, Artificial Sequence
  Description of Artificial Sequence: Synthetic oligonucleotide
  Sense strand starting at position 1937 of SEQ ID NO: 1243301
ugcucuaucggccuaguuu

SEQ ID NO: 1407507 - RNA, 19 nt, Artificial Sequence
  Description of Artificial Sequence: Synthetic oligonucleotide
  Antisense strand to SEQ ID NO: 1407506
aaacuaggccgauagagca

SEQ ID NO: 1407508 - RNA, 19 nt, Artificial Sequence
  Description of Artificial Sequence: Synthetic oligonucleotide
  Sense strand starting at position 1966 of SEQ ID NO: 1243301
ccagccugguguucagaga

SEQ ID NO: 1407509 - RNA, 19 nt, Artificial Sequence
  Description of Artificial Sequence: Synthetic oligonucleotide
  Antisense strand to SEQ ID NO: 1407508
ucucugaacaccaggcugg

SEQ ID NO: 1407510 - RNA, 19 nt, Artificial Sequence
  Description of Artificial Sequence: Synthetic oligonucleotide
  Sense strand starting at position 2349 of SEQ ID NO: 1243301
acaggcuucugguuacaga

SEQ ID NO: 1407511 - RNA, 19 nt, Artificial Sequence
  Description of Artificial Sequence: Synthetic oligonucleotide
  Antisense strand to SEQ ID NO: 1407510
ucuguaaccagaagccugu

SEQ ID NO: 1407512 - RNA, 19 nt, Artificial Sequence
  Description of Artificial Sequence: Synthetic oligonucleotide
  Sense strand starting at position 2471 of SEQ ID NO: 1243301
gggauacucuugccaugag

SEQ ID NO: 1407513 - RNA, 19 nt, Artificial Sequence
  Description of Artificial Sequence: Synthetic oligonucleotide
  Antisense strand to SEQ ID NO: 1407512
cucauggcaagaguauccc

SEQ ID NO: 1407514 - RNA, 19 nt, Artificial Sequence
  Description of Artificial Sequence: Synthetic oligonucleotide
  Sense strand starting at position 2472 of SEQ ID NO: 1243301
ggauacucuugccaugaga

SEQ ID NO: 1407515 - RNA, 19 nt, Artificial Sequence
  Description of Artificial Sequence: Synthetic oligonucleotide
  Antisense strand to SEQ ID NO: 1407514
ucucauggcaagaguaucc

SEQ ID NO: 1407516 - RNA, 19 nt, Artificial Sequence
  Description of Artificial Sequence: Synthetic oligonucleotide
  Sense strand starting at position 2474 of SEQ ID NO: 1243301
auacucuugccaugagaga

SEQ ID NO: 1407517 - RNA, 19 nt, Artificial Sequence
  Description of Artificial Sequence: Synthetic oligonucleotide
  Antisense strand to SEQ ID NO: 1407516
ucucucauggcaagaguau

SEQ ID NO: 1407518 - RNA, 19 nt, Artificial Sequence
  Description of Artificial Sequence: Synthetic oligonucleotide
  Sense strand starting at position 2475 of SEQ ID NO: 1243301
uacucuugccaugagagau

SEQ ID NO: 1407519 - RNA, 19 nt, Artificial Sequence
  Description of Artificial Sequence: Synthetic oligonucleotide
  Antisense strand to SEQ ID NO: 1407518
aucucucauggcaagagua

SEQ ID NO: 1407520 - RNA, 19 nt, Artificial Sequence
  Description of Artificial Sequence: Synthetic oligonucleotide
  Sense strand starting at position 2588 of SEQ ID NO: 1243301
uuaaacuuucuguggucau

SEQ ID NO: 1407521 - RNA, 19 nt, Artificial Sequence
  Description of Artificial Sequence: Synthetic oligonucleotide
  Antisense strand to SEQ ID NO: 1407520
augaccacagaaaguuuaa

SEQ ID NO: 1407522 - RNA, 19 nt, Artificial Sequence
  Description of Artificial Sequence: Synthetic oligonucleotide
  Sense strand starting at position 2598 of SEQ ID NO: 1243301
uguggucauuugcaugcau

SEQ ID NO: 1407523 - RNA, 19 nt, Artificial Sequence
  Description of Artificial Sequence: Synthetic oligonucleotide
  Antisense strand to SEQ ID NO: 1407522
augcaugcaaaugaccaca

SEQ ID NO: 1407524 - RNA, 19 nt, Artificial Sequence
  Description of Artificial Sequence: Synthetic oligonucleotide
  Sense strand starting at position 2714 of SEQ ID NO: 1243301
aggcaaaggcugugugaaa

SEQ ID NO: 1407525 - RNA, 19 nt, Artificial Sequence
  Description of Artificial Sequence: Synthetic oligonucleotide
  Antisense strand to SEQ ID NO: 1407524
uuucacacagccuuugccu

SEQ ID NO: 1407526 - RNA, 19 nt, Artificial Sequence
  Description of Artificial Sequence: Synthetic oligonucleotide
  Sense strand starting at position 2758 of SEQ ID NO: 1243301
cuaggauggucgucauucu

SEQ ID NO: 1407527 - RNA, 19 nt, Artificial Sequence
  Description of Artificial Sequence: Synthetic oligonucleotide
  Antisense strand to SEQ ID NO: 1407526
agaaugacgaccauccuag

SEQ ID NO: 1407528 - RNA, 19 nt, Artificial Sequence
  Description of Artificial Sequence: Synthetic oligonucleotide
  Sense strand starting at position 2759 of SEQ ID NO: 1243301
uaggauggucgucauucua

SEQ ID NO: 1407529 - RNA, 19 nt, Artificial Sequence
  Description of Artificial Sequence: Synthetic oligonucleotide
  Antisense strand to SEQ ID NO: 1407528
uagaaugacgaccauccua

SEQ ID NO: 1407530 - RNA, 19 nt, Artificial Sequence
  Description of Artificial Sequence: Synthetic oligonucleotide
  Sense strand starting at position 2767 of SEQ ID NO: 1243301
ucgucauucuaccaagaaa

SEQ ID NO: 1407531 - RNA, 19 nt, Artificial Sequence
  Description of Artificial Sequence: Synthetic oligonucleotide
  Antisense strand to SEQ ID NO: 1407530
uuucuugguagaaugacga

SEQ ID NO: 1407532 - RNA, 19 nt, Artificial Sequence
  Description of Artificial Sequence: Synthetic oligonucleotide
  Sense strand starting at position 2842 of SEQ ID NO: 1243301
cauucuguguuauggaaac

SEQ ID NO: 1407533 - RNA, 19 nt, Artificial Sequence
  Description of Artificial Sequence: Synthetic oligonucleotide
  Antisense strand to SEQ ID NO: 1407532
guuuccauaacacagaaug

SEQ ID NO: 1407534 - RNA, 19 nt, Artificial Sequence
  Description of Artificial Sequence: Synthetic oligonucleotide
  Sense strand starting at position 3010 of SEQ ID NO: 1243301
gccucacagcgcucaguaa

SEQ ID NO: 1407535 - RNA, 19 nt, Artificial Sequence
  Description of Artificial Sequence: Synthetic oligonucleotide
  Antisense strand to SEQ ID NO: 1407534
uuacugagcgcugugaggc

SEQ ID NO: 1407536 - RNA, 19 nt, Artificial Sequence
  Description of Artificial Sequence: Synthetic oligonucleotide
  Sense strand starting at position 3019 of SEQ ID NO: 1243301
cgcucaguaacagaugaga

SEQ ID NO: 1407537 - RNA, 19 nt, Artificial Sequence
  Description of Artificial Sequence: Synthetic oligonucleotide
  Antisense strand to SEQ ID NO: 1407536
ucucaucuguuacugagcg

SEQ ID NO: 1407538 - RNA, 19 nt, Artificial Sequence
  Description of Artificial Sequence: Synthetic oligonucleotide
  Sense strand starting at position 3410 of SEQ ID NO: 1243301
aaaugucacggcuaaguga

SEQ ID NO: 1407539 - RNA, 19 nt, Artificial Sequence
  Description of Artificial Sequence: Synthetic oligonucleotide
  Antisense strand to SEQ ID NO: 1407538
ucacuuagccgugacauuu

SEQ ID NO: 1407540 - RNA, 19 nt, Artificial Sequence
  Description of Artificial Sequence: Synthetic oligonucleotide
  Sense strand starting at position 3503 of SEQ ID NO: 1243301
gccugugcugccugacaca

SEQ ID NO: 1407541 - RNA, 19 nt, Artificial Sequence
  Description of Artificial Sequence: Synthetic oligonucleotide
  Antisense strand to SEQ ID NO: 1407540
ugugucaggcagcacaggc

SEQ ID NO: 1407542 - RNA, 19 nt, Artificial Sequence
  Description of Artificial Sequence: Synthetic oligonucleotide
  Sense strand starting at position 3769 of SEQ ID NO: 1243301
gcucaagagcuguauuauu

SEQ ID NO: 1407543 - RNA, 19 nt, Artificial Sequence
  Description of Artificial Sequence: Synthetic oligonucleotide
  Antisense strand to SEQ ID NO: 1407542
aauaauacagcucuugagc

SEQ ID NO: 1407544 - RNA, 19 nt, Artificial Sequence
  Description of Artificial Sequence: Synthetic oligonucleotide
  Sense strand starting at position 3800 of SEQ ID NO: 1243301
gggagcagacacugaucua

SEQ ID NO: 1407545 - RNA, 19 nt, Artificial Sequence
  Description of Artificial Sequence: Synthetic oligonucleotide
  Antisense strand to SEQ ID NO: 1407544
uagaucagugucugcuccc

SEQ ID NO: 1407546 - RNA, 19 nt, Artificial Sequence
  Description of Artificial Sequence: Synthetic oligonucleotide
  Sense strand starting at position 3837 of SEQ ID NO: 1243301
cuggcagcuccagaauacu

SEQ ID NO: 1407547 - RNA, 19 nt, Artificial Sequence
  Description of Artificial Sequence: Synthetic oligonucleotide
  Antisense strand to SEQ ID NO: 1407546
aguauucuggagcugccag

SEQ ID NO: 1407548 - RNA, 19 nt, Artificial Sequence
  Description of Artificial Sequence: Synthetic oligonucleotide
  Sense strand starting at position 3889 of SEQ ID NO: 1243301
uccaguuucuguuccugaa

SEQ ID NO: 1407549 - RNA, 19 nt, Artificial Sequence
  Description of Artificial Sequence: Synthetic oligonucleotide
  Antisense strand to SEQ ID NO: 1407548
uucaggaacagaaacugga

SEQ ID NO: 1407550 - RNA, 19 nt, Artificial Sequence
  Description of Artificial Sequence: Synthetic oligonucleotide
  Sense strand starting at position 206 of SEQ ID NO: 1243302
gccucacagcgcucaguaa

SEQ ID NO: 1407551 - RNA, 19 nt, Artificial Sequence
  Description of Artificial Sequence: Synthetic oligonucleotide
  Antisense strand to SEQ ID NO: 1407550
uuacugagcgcugugaggc

SEQ ID NO: 1407552 - RNA, 19 nt, Artificial Sequence
  Description of Artificial Sequence: Synthetic oligonucleotide
  Sense strand starting at position 215 of SEQ ID NO: 1243302
cgcucaguaacagaugaga

SEQ ID NO: 1407553 - RNA, 19 nt, Artificial Sequence
  Description of Artificial Sequence: Synthetic oligonucleotide
  Antisense strand to SEQ ID NO: 1407552
ucucaucuguuacugagcg

SEQ ID NO: 1407554 - RNA, 19 nt, Artificial Sequence
  Description of Artificial Sequence: Synthetic oligonucleotide
  Sense strand starting at position 606 of SEQ ID NO: 1243302
aaaugucacggcuaaguga

SEQ ID NO: 1407555 - RNA, 19 nt, Artificial Sequence
  Description of Artificial Sequence: Synthetic oligonucleotide
  Antisense strand to SEQ ID NO: 1407554
ucacuuagccgugacauuu

SEQ ID NO: 1407556 - RNA, 19 nt, Artificial Sequence
  Description of Artificial Sequence: Synthetic oligonucleotide
  Sense strand starting at position 965 of SEQ ID NO: 1243302
gcucaagagcuguauuauu

SEQ ID NO: 1407557 - RNA, 19 nt, Artificial Sequence
  Description of Artificial Sequence: Synthetic oligonucleotide
  Antisense strand to SEQ ID NO: 1407556
aauaauacagcucuugagc

SEQ ID NO: 1407558 - RNA, 19 nt, Artificial Sequence
  Description of Artificial Sequence: Synthetic oligonucleotide
  Sense strand starting at position 996 of SEQ ID NO: 1243302
gggagcagacacugaucua

SEQ ID NO: 1407559 - RNA, 19 nt, Artificial Sequence
  Description of Artificial Sequence: Synthetic oligonucleotide
  Antisense strand to SEQ ID NO: 1407558
uagaucagugucugcuccc

SEQ ID NO: 1407560 - RNA, 19 nt, Artificial Sequence
  Description of Artificial Sequence: Synthetic oligonucleotide
  Sense strand starting at position 1033 of SEQ ID NO: 1243302
cuggcagcuccagaauacu

SEQ ID NO: 1407561 - RNA, 19 nt, Artificial Sequence
  Description of Artificial Sequence: Synthetic oligonucleotide
  Antisense strand to SEQ ID NO: 1407560
aguauucuggagcugccag

SEQ ID NO: 1407562 - RNA, 19 nt, Artificial Sequence
  Description of Artificial Sequence: Synthetic oligonucleotide
  Sense strand starting at position 1085 of SEQ ID NO: 1243302
uccaguuucuguuccugaa

SEQ ID NO: 1407563 - RNA, 19 nt, Artificial Sequence
  Description of Artificial Sequence: Synthetic oligonucleotide
  Antisense strand to SEQ ID NO: 1407562
uucaggaacagaaacugga

SEQ ID NO: 1407564 - RNA, 19 nt, Artificial Sequence
  Description of Artificial Sequence: Synthetic oligonucleotide
  Sense strand starting at position 1197 of SEQ ID NO: 1243302
uacucagugaucgguguga

SEQ ID NO: 1407565 - RNA, 19 nt, Artificial Sequence
  Description of Artificial Sequence: Synthetic oligonucleotide
  Antisense strand to SEQ ID NO: 1407564
ucacaccgaucacugagua

SEQ ID NO: 1407566 - RNA, 19 nt, Artificial Sequence
  Description of Artificial Sequence: Synthetic oligonucleotide
  Sense strand starting at position 1199 of SEQ ID NO: 1243302
cucagugaucggugugacu

SEQ ID NO: 1407567 - RNA, 19 nt, Artificial Sequence
  Description of Artificial Sequence: Synthetic oligonucleotide
  Antisense strand to SEQ ID NO: 1407566
agucacaccgaucacugag

SEQ ID NO: 1407568 - RNA, 19 nt, Artificial Sequence
  Description of Artificial Sequence: Synthetic oligonucleotide
  Sense strand starting at position 1201 of SEQ ID NO: 1243302
cagugaucggugugacuca

SEQ ID NO: 1407569 - RNA, 19 nt, Artificial Sequence
  Description of Artificial Sequence: Synthetic oligonucleotide
  Antisense strand to SEQ ID NO: 1407568
ugagucacaccgaucacug

SEQ ID NO: 1407570 - RNA, 19 nt, Artificial Sequence
  Description of Artificial Sequence: Synthetic oligonucleotide
  Sense strand starting at position 1285 of SEQ ID NO: 1243302
uccuuuccucuguagucaa

SEQ ID NO: 1407571 - RNA, 19 nt, Artificial Sequence
  Description of Artificial Sequence: Synthetic oligonucleotide
  Antisense strand to SEQ ID NO: 1407570
uugacuacagaggaaagga

SEQ ID NO: 1407572 - RNA, 19 nt, Artificial Sequence
  Description of Artificial Sequence: Synthetic oligonucleotide
  Sense strand starting at position 1784 of SEQ ID NO: 1243302
gauagaccuccaggcagau

SEQ ID NO: 1407573 - RNA, 19 nt, Artificial Sequence
  Description of Artificial Sequence: Synthetic oligonucleotide
  Antisense strand to SEQ ID NO: 1407572
aucugccuggaggucuauc

SEQ ID NO: 1407574 - RNA, 19 nt, Artificial Sequence
  Description of Artificial Sequence: Synthetic oligonucleotide
  Sense strand starting at position 2411 of SEQ ID NO: 1243302
ugcuguccuuauucggaga

SEQ ID NO: 1407575 - RNA, 19 nt, Artificial Sequence
  Description of Artificial Sequence: Synthetic oligonucleotide
  Antisense strand to SEQ ID NO: 1407574
ucuccgaauaaggacagca

SEQ ID NO: 1407576 - RNA, 19 nt, Artificial Sequence
  Description of Artificial Sequence: Synthetic oligonucleotide
  Sense strand starting at position 2460 of SEQ ID NO: 1243302
ccgugucagccuugggaga

SEQ ID NO: 1407577 - RNA, 19 nt, Artificial Sequence
  Description of Artificial Sequence: Synthetic oligonucleotide
  Antisense strand to SEQ ID NO: 1407576
ucucccaaggcugacacgg

SEQ ID NO: 1407578 - RNA, 19 nt, Artificial Sequence
  Description of Artificial Sequence: Synthetic oligonucleotide
  Sense strand starting at position 2551 of SEQ ID NO: 1243302
ucuugaaguuuggacagaa

SEQ ID NO: 1407579 - RNA, 19 nt, Artificial Sequence
  Description of Artificial Sequence: Synthetic oligonucleotide
  Antisense strand to SEQ ID NO: 1407578
uucuguccaaacuucaaga

SEQ ID NO: 1407580 - RNA, 19 nt, Artificial Sequence
  Description of Artificial Sequence: Synthetic oligonucleotide
  Sense strand starting at position 2807 of SEQ ID NO: 1243302
cugagacccuggcaaacau

SEQ ID NO: 1407581 - RNA, 19 nt, Artificial Sequence
  Description of Artificial Sequence: Synthetic oligonucleotide
  Antisense strand to SEQ ID NO: 1407580
auguuugccagggucucag

SEQ ID NO: 1407582 - RNA, 19 nt, Artificial Sequence
  Description of Artificial Sequence: Synthetic oligonucleotide
  Sense strand starting at position 2856 of SEQ ID NO: 1243302
uugugaugcuuuguuaauu

SEQ ID NO: 1407583 - RNA, 19 nt, Artificial Sequence
  Description of Artificial Sequence: Synthetic oligonucleotide
  Antisense strand to SEQ ID NO: 1407582
aauuaacaaagcaucacaa

SEQ ID NO: 1407584 - RNA, 19 nt, Artificial Sequence
  Description of Artificial Sequence: Synthetic oligonucleotide
  Sense strand starting at position 2857 of SEQ ID NO: 1243302
ugugaugcuuuguuaauuc

SEQ ID NO: 1407585 - RNA, 19 nt, Artificial Sequence
  Description of Artificial Sequence: Synthetic oligonucleotide
  Antisense strand to SEQ ID NO: 1407584
gaauuaacaaagcaucaca

SEQ ID NO: 1407586 - RNA, 19 nt, Artificial Sequence
  Description of Artificial Sequence: Synthetic oligonucleotide
  Sense strand starting at position 2957 of SEQ ID NO: 1243302
uugguuuccugcuugggaa

SEQ ID NO: 1407587 - RNA, 19 nt, Artificial Sequence
  Description of Artificial Sequence: Synthetic oligonucleotide
  Antisense strand to SEQ ID NO: 1407586
uucccaagcaggaaaccaa

SEQ ID NO: 1407588 - RNA, 19 nt, Artificial Sequence
  Description of Artificial Sequence: Synthetic oligonucleotide
  Sense strand starting at position 2958 of SEQ ID NO: 1243302
ugguuuccugcuugggaaa

SEQ ID NO: 1407589 - RNA, 19 nt, Artificial Sequence
  Description of Artificial Sequence: Synthetic oligonucleotide
  Antisense strand to SEQ ID NO: 1407588
uuucccaagcaggaaacca

SEQ ID NO: 1407590 - RNA, 19 nt, Artificial Sequence
  Description of Artificial Sequence: Synthetic oligonucleotide
  Sense strand starting at position 2969 of SEQ ID NO: 1243302
uugggaaaguuucccauga

SEQ ID NO: 1407591 - RNA, 19 nt, Artificial Sequence
  Description of Artificial Sequence: Synthetic oligonucleotide
  Antisense strand to SEQ ID NO: 1407590
ucaugggaaacuuucccaa

SEQ ID NO: 1407592 - RNA, 19 nt, Artificial Sequence
  Description of Artificial Sequence: Synthetic oligonucleotide
  Sense strand starting at position 2973 of SEQ ID NO: 1243302
gaaaguuucccaugagcua

SEQ ID NO: 1407593 - RNA, 19 nt, Artificial Sequence
  Description of Artificial Sequence: Synthetic oligonucleotide
  Antisense strand to SEQ ID NO: 1407592
uagcucaugggaaacuuuc

SEQ ID NO: 1407594 - RNA, 19 nt, Artificial Sequence
  Description of Artificial Sequence: Synthetic oligonucleotide
  Sense strand starting at position 3009 of SEQ ID NO: 1243302
gagguuucugauggaacuu

SEQ ID NO: 1407595 - RNA, 19 nt, Artificial Sequence
  Description of Artificial Sequence: Synthetic oligonucleotide
  Antisense strand to SEQ ID NO: 1407594
aaguuccaucagaaaccuc

SEQ ID NO: 1407596 - RNA, 19 nt, Artificial Sequence
  Description of Artificial Sequence: Synthetic oligonucleotide
  Sense strand starting at position 3053 of SEQ ID NO: 1243302
uggugucuagacugggaua

SEQ ID NO: 1407597 - RNA, 19 nt, Artificial Sequence
  Description of Artificial Sequence: Synthetic oligonucleotide
  Antisense strand to SEQ ID NO: 1407596
uaucccagucuagacacca

SEQ ID NO: 1407598 - RNA, 19 nt, Artificial Sequence
  Description of Artificial Sequence: Synthetic oligonucleotide
  Sense strand starting at position 3054 of SEQ ID NO: 1243302
ggugucuagacugggauaa

SEQ ID NO: 1407599 - RNA, 19 nt, Artificial Sequence
  Description of Artificial Sequence: Synthetic oligonucleotide
  Antisense strand to SEQ ID NO: 1407598
uuaucccagucuagacacc

SEQ ID NO: 1407600 - RNA, 19 nt, Artificial Sequence
  Description of Artificial Sequence: Synthetic oligonucleotide
  Sense strand starting at position 3066 of SEQ ID NO: 1243302
gggauaagcuguaggagga

SEQ ID NO: 1407601 - RNA, 19 nt, Artificial Sequence
  Description of Artificial Sequence: Synthetic oligonucleotide
  Antisense strand to SEQ ID NO: 1407600
uccuccuacagcuuauccc

SEQ ID NO: 1407602 - RNA, 19 nt, Artificial Sequence
  Description of Artificial Sequence: Synthetic oligonucleotide
  Sense strand starting at position 3146 of SEQ ID NO: 1243302
gcagauggucugggugaaa

SEQ ID NO: 1407603 - RNA, 19 nt, Artificial Sequence
  Description of Artificial Sequence: Synthetic oligonucleotide
  Antisense strand to SEQ ID NO: 1407602
uuucacccagaccaucugc

SEQ ID NO: 1407604 - RNA, 19 nt, Artificial Sequence
  Description of Artificial Sequence: Synthetic oligonucleotide
  Sense strand starting at position 3149 of SEQ ID NO: 1243302
gauggucugggugaaaguu

SEQ ID NO: 1407605 - RNA, 19 nt, Artificial Sequence
  Description of Artificial Sequence: Synthetic oligonucleotide
  Antisense strand to SEQ ID NO: 1407604
aacuuucacccagaccauc

SEQ ID NO: 1407606 - RNA, 19 nt, Artificial Sequence
  Description of Artificial Sequence: Synthetic oligonucleotide
  Sense strand starting at position 3168 of SEQ ID NO: 1243302
uuuaaucucgugugagaug

SEQ ID NO: 1407607 - RNA, 19 nt, Artificial Sequence
  Description of Artificial Sequence: Synthetic oligonucleotide
  Antisense strand to SEQ ID NO: 1407606
caucucacacgagauuaaa

SEQ ID NO: 1407608 - RNA, 19 nt, Artificial Sequence
  Description of Artificial Sequence: Synthetic oligonucleotide
  Sense strand starting at position 3175 of SEQ ID NO: 1243302
ucgugugagaugcuuguuu

SEQ ID NO: 1407609 - RNA, 19 nt, Artificial Sequence
  Description of Artificial Sequence: Synthetic oligonucleotide
  Antisense strand to SEQ ID NO: 1407608
aaacaagcaucucacacga

SEQ ID NO: 1407610 - RNA, 19 nt, Artificial Sequence
  Description of Artificial Sequence: Synthetic oligonucleotide
  Sense strand starting at position 3177 of SEQ ID NO: 1243302
gugugagaugcuuguuuca

SEQ ID NO: 1407611 - RNA, 19 nt, Artificial Sequence
  Description of Artificial Sequence: Synthetic oligonucleotide
  Antisense strand to SEQ ID NO: 1407610
ugaaacaagcaucucacac

SEQ ID NO: 1407612 - RNA, 19 nt, Artificial Sequence
  Description of Artificial Sequence: Synthetic oligonucleotide
  Sense strand starting at position 3193 of SEQ ID NO: 1243302
ucaucuguggcaggauaga

SEQ ID NO: 1407613 - RNA, 19 nt, Artificial Sequence
  Description of Artificial Sequence: Synthetic oligonucleotide
  Antisense strand to SEQ ID NO: 1407612
ucuauccugccacagauga

SEQ ID NO: 1407614 - RNA, 19 nt, Artificial Sequence
  Description of Artificial Sequence: Synthetic oligonucleotide
  Sense strand starting at position 3215 of SEQ ID NO: 1243302
uuggaagaccucuagcuuu

SEQ ID NO: 1407615 - RNA, 19 nt, Artificial Sequence
  Description of Artificial Sequence: Synthetic oligonucleotide
  Antisense strand to SEQ ID NO: 1407614
aaagcuagaggucuuccaa

SEQ ID NO: 1407616 - RNA, 19 nt, Artificial Sequence
  Description of Artificial Sequence: Synthetic oligonucleotide
  Sense strand starting at position 3241 of SEQ ID NO: 1243302
gcgcuugucaugucuuucu

SEQ ID NO: 1407617 - RNA, 19 nt, Artificial Sequence
  Description of Artificial Sequence: Synthetic oligonucleotide
  Antisense strand to SEQ ID NO: 1407616
agaaagacaugacaagcgc

SEQ ID NO: 1407618 - RNA, 19 nt, Artificial Sequence
  Description of Artificial Sequence: Synthetic oligonucleotide
  Sense strand starting at position 3250 of SEQ ID NO: 1243302
augucuuucuuggcuugua

SEQ ID NO: 1407619 - RNA, 19 nt, Artificial Sequence
  Description of Artificial Sequence: Synthetic oligonucleotide
  Antisense strand to SEQ ID NO: 1407618
uacaagccaagaaagacau

SEQ ID NO: 1407620 - RNA, 19 nt, Artificial Sequence
  Description of Artificial Sequence: Synthetic oligonucleotide
  Sense strand starting at position 3259 of SEQ ID NO: 1243302
uuggcuuguagccauugua

SEQ ID NO: 1407621 - RNA, 19 nt, Artificial Sequence
  Description of Artificial Sequence: Synthetic oligonucleotide
  Antisense strand to SEQ ID NO: 1407620
uacaauggcuacaagccaa

SEQ ID NO: 1407622 - RNA, 19 nt, Artificial Sequence
  Description of Artificial Sequence: Synthetic oligonucleotide
  Sense strand starting at position 3284 of SEQ ID NO: 1243302
aguuguuuccacuagacuc

SEQ ID NO: 1407623 - RNA, 19 nt, Artificial Sequence
  Description of Artificial Sequence: Synthetic oligonucleotide
  Antisense strand to SEQ ID NO: 1407622
gagucuaguggaaacaacu

SEQ ID NO: 1407624 - RNA, 19 nt, Artificial Sequence
  Description of Artificial Sequence: Synthetic oligonucleotide
  Sense strand starting at position 3286 of SEQ ID NO: 1243302
uuguuuccacuagacucau

SEQ ID NO: 1407625 - RNA, 19 nt, Artificial Sequence
  Description of Artificial Sequence: Synthetic oligonucleotide
  Antisense strand to SEQ ID NO: 1407624
augagucuaguggaaacaa

SEQ ID NO: 1407626 - RNA, 19 nt, Artificial Sequence
  Description of Artificial Sequence: Synthetic oligonucleotide
  Sense strand starting at position 3724 of SEQ ID NO: 1243302
aucugaaauugccaagaac

SEQ ID NO: 1407627 - RNA, 19 nt, Artificial Sequence
  Description of Artificial Sequence: Synthetic oligonucleotide
  Antisense strand to SEQ ID NO: 1407626
guucuuggcaauuucagau

SEQ ID NO: 1407628 - RNA, 19 nt, Artificial Sequence
  Description of Artificial Sequence: Synthetic oligonucleotide
  Sense strand starting at position 3754 of SEQ ID NO: 1243302
ggcagaauucacugaggag

SEQ ID NO: 1407629 - RNA, 19 nt, Artificial Sequence
  Description of Artificial Sequence: Synthetic oligonucleotide
  Antisense strand to SEQ ID NO: 1407628
cuccucagugaauucugcc

SEQ ID NO: 1407630 - RNA, 19 nt, Artificial Sequence
  Description of Artificial Sequence: Synthetic oligonucleotide
  Sense strand starting at position 221 of SEQ ID NO: 1243303
uuaugaaucccuuagugcu

SEQ ID NO: 1407631 - RNA, 19 nt, Artificial Sequence
  Description of Artificial Sequence: Synthetic oligonucleotide
  Antisense strand to SEQ ID NO: 1407630
agcacuaagggauucauaa

SEQ ID NO: 1407632 - RNA, 19 nt, Artificial Sequence
  Description of Artificial Sequence: Synthetic oligonucleotide
  Sense strand starting at position 231 of SEQ ID NO: 1243303
cuuagugcuuuccaacaug

SEQ ID NO: 1407633 - RNA, 19 nt, Artificial Sequence
  Description of Artificial Sequence: Synthetic oligonucleotide
  Antisense strand to SEQ ID NO: 1407632
cauguuggaaagcacuaag

SEQ ID NO: 1407634 - RNA, 19 nt, Artificial Sequence
  Description of Artificial Sequence: Synthetic oligonucleotide
  Sense strand starting at position 234 of SEQ ID NO: 1243303
agugcuuuccaacaugaua

SEQ ID NO: 1407635 - RNA, 19 nt, Artificial Sequence
  Description of Artificial Sequence: Synthetic oligonucleotide
  Antisense strand to SEQ ID NO: 1407634
uaucauguuggaaagcacu

SEQ ID NO: 1407636 - RNA, 19 nt, Artificial Sequence
  Description of Artificial Sequence: Synthetic oligonucleotide
  Sense strand starting at position 277 of SEQ ID NO: 1243303
gggauuggcagcugaauca

SEQ ID NO: 1407637 - RNA, 19 nt, Artificial Sequence
  Description of Artificial Sequence: Synthetic oligonucleotide
  Antisense strand to SEQ ID NO: 1407636
ugauucagcugccaauccc

SEQ ID NO: 1407638 - RNA, 19 nt, Artificial Sequence
  Description of Artificial Sequence: Synthetic oligonucleotide
  Sense strand starting at position 290 of SEQ ID NO: 1243303
gaaucaaggccuggucuuu

SEQ ID NO: 1407639 - RNA, 19 nt, Artificial Sequence
  Description of Artificial Sequence: Synthetic oligonucleotide
  Antisense strand to SEQ ID NO: 1407638
aaagaccaggccuugauuc

SEQ ID NO: 1407640 - RNA, 19 nt, Artificial Sequence
  Description of Artificial Sequence: Synthetic oligonucleotide
  Sense strand starting at position 579 of SEQ ID NO: 1243303
ucugcaaugcaugggagau

SEQ ID NO: 1407641 - RNA, 19 nt, Artificial Sequence
  Description of Artificial Sequence: Synthetic oligonucleotide
  Antisense strand to SEQ ID NO: 1407640
aucucccaugcauugcaga

SEQ ID NO: 1407642 - RNA, 19 nt, Artificial Sequence
  Description of Artificial Sequence: Synthetic oligonucleotide
  Sense strand starting at position 652 of SEQ ID NO: 1243303
cagcgaaagugucuuuguu

SEQ ID NO: 1407643 - RNA, 19 nt, Artificial Sequence
  Description of Artificial Sequence: Synthetic oligonucleotide
  Antisense strand to SEQ ID NO: 1407642
aacaaagacacuuucgcug

SEQ ID NO: 1407644 - RNA, 19 nt, Artificial Sequence
  Description of Artificial Sequence: Synthetic oligonucleotide
  Sense strand starting at position 654 of SEQ ID NO: 1243303
gcgaaagugucuuuguugu

SEQ ID NO: 1407645 - RNA, 19 nt, Artificial Sequence
  Description of Artificial Sequence: Synthetic oligonucleotide
  Antisense strand to SEQ ID NO: 1407644
acaacaaagacacuuucgc

SEQ ID NO: 1407646 - RNA, 19 nt, Artificial Sequence
  Description of Artificial Sequence: Synthetic oligonucleotide
  Sense strand starting at position 656 of SEQ ID NO: 1243303
gaaagugucuuuguuguga

SEQ ID NO: 1407647 - RNA, 19 nt, Artificial Sequence
  Description of Artificial Sequence: Synthetic oligonucleotide
  Antisense strand to SEQ ID NO: 1407646
ucacaacaaagacacuuuc

SEQ ID NO: 1407648 - RNA, 19 nt, Artificial Sequence
  Description of Artificial Sequence: Synthetic oligonucleotide
  Sense strand starting at position 660 of SEQ ID NO: 1243303
gugucuuuguugugaggag

SEQ ID NO: 1407649 - RNA, 19 nt, Artificial Sequence
  Description of Artificial Sequence: Synthetic oligonucleotide
  Antisense strand to SEQ ID NO: 1407648
cuccucacaacaaagacac

SEQ ID NO: 1407650 - RNA, 19 nt, Artificial Sequence
  Description of Artificial Sequence: Synthetic oligonucleotide
  Sense strand starting at position 702 of SEQ ID NO: 1243303
ccuuguaaauccuuagucu

SEQ ID NO: 1407651 - RNA, 19 nt, Artificial Sequence
  Description of Artificial Sequence: Synthetic oligonucleotide
  Antisense strand to SEQ ID NO: 1407650
agacuaaggauuuacaagg

SEQ ID NO: 1407652 - RNA, 19 nt, Artificial Sequence
  Description of Artificial Sequence: Synthetic oligonucleotide
  Sense strand starting at position 703 of SEQ ID NO: 1243303
cuuguaaauccuuagucuu

SEQ ID NO: 1407653 - RNA, 19 nt, Artificial Sequence
  Description of Artificial Sequence: Synthetic oligonucleotide
  Antisense strand to SEQ ID NO: 1407652
aagacuaaggauuuacaag

SEQ ID NO: 1407654 - RNA, 19 nt, Artificial Sequence
  Description of Artificial Sequence: Synthetic oligonucleotide
  Sense strand starting at position 706 of SEQ ID NO: 1243303
guaaauccuuagucuuuga

SEQ ID NO: 1407655 - RNA, 19 nt, Artificial Sequence
  Description of Artificial Sequence: Synthetic oligonucleotide
  Antisense strand to SEQ ID NO: 1407654
ucaaagacuaaggauuuac

SEQ ID NO: 1407656 - RNA, 19 nt, Artificial Sequence
  Description of Artificial Sequence: Synthetic oligonucleotide
  Sense strand starting at position 710 of SEQ ID NO: 1243303
auccuuagucuuugacaag

SEQ ID NO: 1407657 - RNA, 19 nt, Artificial Sequence
  Description of Artificial Sequence: Synthetic oligonucleotide
  Antisense strand to SEQ ID NO: 1407656
cuugucaaagacuaaggau

SEQ ID NO: 1407658 - RNA, 19 nt, Artificial Sequence
  Description of Artificial Sequence: Synthetic oligonucleotide
  Sense strand starting at position 711 of SEQ ID NO: 1243303
uccuuagucuuugacaagu

SEQ ID NO: 1407659 - RNA, 19 nt, Artificial Sequence
  Description of Artificial Sequence: Synthetic oligonucleotide
  Antisense strand to SEQ ID NO: 1407658
acuugucaaagacuaagga

SEQ ID NO: 1407660 - RNA, 19 nt, Artificial Sequence
  Description of Artificial Sequence: Synthetic oligonucleotide
  Sense strand starting at position 713 of SEQ ID NO: 1243303
cuuagucuuugacaaguca

SEQ ID NO: 1407661 - RNA, 19 nt, Artificial Sequence
  Description of Artificial Sequence: Synthetic oligonucleotide
  Antisense strand to SEQ ID NO: 1407660
ugacuugucaaagacuaag

SEQ ID NO: 1407662 - RNA, 19 nt, Artificial Sequence
  Description of Artificial Sequence: Synthetic oligonucleotide
  Sense strand starting at position 776 of SEQ ID NO: 1243303
ggcgucguguucugagcuu

SEQ ID NO: 1407663 - RNA, 19 nt, Artificial Sequence
  Description of Artificial Sequence: Synthetic oligonucleotide
  Antisense strand to SEQ ID NO: 1407662
aagcucagaacacgacgcc

SEQ ID NO: 1407664 - RNA, 19 nt, Artificial Sequence
  Description of Artificial Sequence: Synthetic oligonucleotide
  Sense strand starting at position 780 of SEQ ID NO: 1243303
ucguguucugagcuucuuu

SEQ ID NO: 1407665 - RNA, 19 nt, Artificial Sequence
  Description of Artificial Sequence: Synthetic oligonucleotide
  Antisense strand to SEQ ID NO: 1407664
aaagaagcucagaacacga

SEQ ID NO: 1407666 - RNA, 19 nt, Artificial Sequence
  Description of Artificial Sequence: Synthetic oligonucleotide
  Sense strand starting at position 825 of SEQ ID NO: 1243303
cgcggaccuugcuaaacuu

SEQ ID NO: 1407667 - RNA, 19 nt, Artificial Sequence
  Description of Artificial Sequence: Synthetic oligonucleotide
  Antisense strand to SEQ ID NO: 1407666
aaguuuagcaagguccgcg

SEQ ID NO: 1407668 - RNA, 19 nt, Artificial Sequence
  Description of Artificial Sequence: Synthetic oligonucleotide
  Sense strand starting at position 845 of SEQ ID NO: 1243303
gggaaguggguguaagauu

SEQ ID NO: 1407669 - RNA, 19 nt, Artificial Sequence
  Description of Artificial Sequence: Synthetic oligonucleotide
  Antisense strand to SEQ ID NO: 1407668
aaucuuacacccacuuccc

SEQ ID NO: 1407670 - RNA, 19 nt, Artificial Sequence
  Description of Artificial Sequence: Synthetic oligonucleotide
  Sense strand starting at position 854 of SEQ ID NO: 1243303
guguaagauuccgcacagu

SEQ ID NO: 1407671 - RNA, 19 nt, Artificial Sequence
  Description of Artificial Sequence: Synthetic oligonucleotide
  Antisense strand to SEQ ID NO: 1407670
acugugcggaaucuuacac

SEQ ID NO: 1407672 - RNA, 19 nt, Artificial Sequence
  Description of Artificial Sequence: Synthetic oligonucleotide
  Sense strand starting at position 898 of SEQ ID NO: 1243303
cugggaaguucugaggguu

SEQ ID NO: 1407673 - RNA, 19 nt, Artificial Sequence
  Description of Artificial Sequence: Synthetic oligonucleotide
  Antisense strand to SEQ ID NO: 1407672
aacccucagaacuucccag

SEQ ID NO: 1407674 - RNA, 19 nt, Artificial Sequence
  Description of Artificial Sequence: Synthetic oligonucleotide
  Sense strand starting at position 901 of SEQ ID NO: 1243303
ggaaguucugaggguuaag

SEQ ID NO: 1407675 - RNA, 19 nt, Artificial Sequence
  Description of Artificial Sequence: Synthetic oligonucleotide
  Antisense strand to SEQ ID NO: 1407674
cuuaacccucagaacuucc

SEQ ID NO: 1407676 - RNA, 19 nt, Artificial Sequence
  Description of Artificial Sequence: Synthetic oligonucleotide
  Sense strand starting at position 2085 of SEQ ID NO: 1243303
cuggucugcucgugaauau

SEQ ID NO: 1407677 - RNA, 19 nt, Artificial Sequence
  Description of Artificial Sequence: Synthetic oligonucleotide
  Antisense strand to SEQ ID NO: 1407676
auauucacgagcagaccag

SEQ ID NO: 1407678 - RNA, 19 nt, Artificial Sequence
  Description of Artificial Sequence: Synthetic oligonucleotide
  Sense strand starting at position 2086 of SEQ ID NO: 1243303
uggucugcucgugaauauu

SEQ ID NO: 1407679 - RNA, 19 nt, Artificial Sequence
  Description of Artificial Sequence: Synthetic oligonucleotide
  Antisense strand to SEQ ID NO: 1407678
aauauucacgagcagacca

SEQ ID NO: 1407680 - RNA, 19 nt, Artificial Sequence
  Description of Artificial Sequence: Synthetic oligonucleotide
  Sense strand starting at position 2136 of SEQ ID NO: 1243303
ucauuaugcuuacuaacgu

SEQ ID NO: 1407681 - RNA, 19 nt, Artificial Sequence
  Description of Artificial Sequence: Synthetic oligonucleotide
  Antisense strand to SEQ ID NO: 1407680
acguuaguaagcauaauga

SEQ ID NO: 1407682 - RNA, 19 nt, Artificial Sequence
  Description of Artificial Sequence: Synthetic oligonucleotide
  Sense strand starting at position 2210 of SEQ ID NO: 1243303
ugguuacugugcucgcgua

SEQ ID NO: 1407683 - RNA, 19 nt, Artificial Sequence
  Description of Artificial Sequence: Synthetic oligonucleotide
  Antisense strand to SEQ ID NO: 1407682
uacgcgagcacaguaacca

SEQ ID NO: 1407684 - RNA, 19 nt, Artificial Sequence
  Description of Artificial Sequence: Synthetic oligonucleotide
  Sense strand starting at position 2212 of SEQ ID NO: 1243303
guuacugugcucgcguaga

SEQ ID NO: 1407685 - RNA, 19 nt, Artificial Sequence
  Description of Artificial Sequence: Synthetic oligonucleotide
  Antisense strand to SEQ ID NO: 1407684
ucuacgcgagcacaguaac

SEQ ID NO: 1407686 - RNA, 19 nt, Artificial Sequence
  Description of Artificial Sequence: Synthetic oligonucleotide
  Sense strand starting at position 2269 of SEQ ID NO: 1243303
ucuccuuaguccuugagau

SEQ ID NO: 1407687 - RNA, 19 nt, Artificial Sequence
  Description of Artificial Sequence: Synthetic oligonucleotide
  Antisense strand to SEQ ID NO: 1407686
aucucaaggacuaaggaga

SEQ ID NO: 1407688 - RNA, 19 nt, Artificial Sequence
  Description of Artificial Sequence: Synthetic oligonucleotide
  Sense strand starting at position 2270 of SEQ ID NO: 1243303
cuccuuaguccuugagaug

SEQ ID NO: 1407689 - RNA, 19 nt, Artificial Sequence
  Description of Artificial Sequence: Synthetic oligonucleotide
  Antisense strand to SEQ ID NO: 1407688
caucucaaggacuaaggag

SEQ ID NO: 1407690 - RNA, 19 nt, Artificial Sequence
  Description of Artificial Sequence: Synthetic oligonucleotide
  Sense strand starting at position 2271 of SEQ ID NO: 1243303
uccuuaguccuugagauga

SEQ ID NO: 1407691 - RNA, 19 nt, Artificial Sequence
  Description of Artificial Sequence: Synthetic oligonucleotide
  Antisense strand to SEQ ID NO: 1407690
ucaucucaaggacuaagga

SEQ ID NO: 1407692 - RNA, 19 nt, Artificial Sequence
  Description of Artificial Sequence: Synthetic oligonucleotide
  Sense strand starting at position 2273 of SEQ ID NO: 1243303
cuuaguccuugagaugaga

SEQ ID NO: 1407693 - RNA, 19 nt, Artificial Sequence
  Description of Artificial Sequence: Synthetic oligonucleotide
  Antisense strand to SEQ ID NO: 1407692
ucucaucucaaggacuaag

SEQ ID NO: 1407694 - RNA, 19 nt, Artificial Sequence
  Description of Artificial Sequence: Synthetic oligonucleotide
  Sense strand starting at position 124 of SEQ ID NO: 1243304
gacagacccucaugaggau

SEQ ID NO: 1407695 - RNA, 19 nt, Artificial Sequence
  Description of Artificial Sequence: Synthetic oligonucleotide
  Antisense strand to SEQ ID NO: 1407694
auccucaugagggucuguc

SEQ ID NO: 1407696 - RNA, 19 nt, Artificial Sequence
  Description of Artificial Sequence: Synthetic oligonucleotide
  Sense strand starting at position 222 of SEQ ID NO: 1243304
ccuauagugcacuauuauc

SEQ ID NO: 1407697 - RNA, 19 nt, Artificial Sequence
  Description of Artificial Sequence: Synthetic oligonucleotide
  Antisense strand to SEQ ID NO: 1407696
gauaauagugcacuauagg

SEQ ID NO: 1407698 - RNA, 19 nt, Artificial Sequence
  Description of Artificial Sequence: Synthetic oligonucleotide
  Sense strand starting at position 245 of SEQ ID NO: 1243304
uccugaaagugagacaaau

SEQ ID NO: 1407699 - RNA, 19 nt, Artificial Sequence
  Description of Artificial Sequence: Synthetic oligonucleotide
  Antisense strand to SEQ ID NO: 1407698
auuugucucacuuucagga

SEQ ID NO: 1407700 - RNA, 19 nt, Artificial Sequence
  Description of Artificial Sequence: Synthetic oligonucleotide
  Sense strand starting at position 298 of SEQ ID NO: 1243304
uacagaguugcguaucaca

SEQ ID NO: 1407701 - RNA, 19 nt, Artificial Sequence
  Description of Artificial Sequence: Synthetic oligonucleotide
  Antisense strand to SEQ ID NO: 1407700
ugugauacgcaacucugua

SEQ ID NO: 1407702 - RNA, 19 nt, Artificial Sequence
  Description of Artificial Sequence: Synthetic oligonucleotide
  Sense strand starting at position 321 of SEQ ID NO: 1243304
cagggaagcuuccuguacu

SEQ ID NO: 1407703 - RNA, 19 nt, Artificial Sequence
  Description of Artificial Sequence: Synthetic oligonucleotide
  Antisense strand to SEQ ID NO: 1407702
aguacaggaagcuucccug

SEQ ID NO: 1407704 - RNA, 19 nt, Artificial Sequence
  Description of Artificial Sequence: Synthetic oligonucleotide
  Sense strand starting at position 324 of SEQ ID NO: 1243304
ggaagcuuccuguacuuua

SEQ ID NO: 1407705 - RNA, 19 nt, Artificial Sequence
  Description of Artificial Sequence: Synthetic oligonucleotide
  Antisense strand to SEQ ID NO: 1407704
uaaaguacaggaagcuucc

SEQ ID NO: 1407706 - RNA, 19 nt, Artificial Sequence
  Description of Artificial Sequence: Synthetic oligonucleotide
  Sense strand starting at position 403 of SEQ ID NO: 1243304
ccaguacuuucugcuuacu

SEQ ID NO: 1407707 - RNA, 19 nt, Artificial Sequence
  Description of Artificial Sequence: Synthetic oligonucleotide
  Antisense strand to SEQ ID NO: 1407706
aguaagcagaaaguacugg

SEQ ID NO: 1407708 - RNA, 19 nt, Artificial Sequence
  Description of Artificial Sequence: Synthetic oligonucleotide
  Sense strand starting at position 405 of SEQ ID NO: 1243304
aguacuuucugcuuacuau

SEQ ID NO: 1407709 - RNA, 19 nt, Artificial Sequence
  Description of Artificial Sequence: Synthetic oligonucleotide
  Antisense strand to SEQ ID NO: 1407708
auaguaagcagaaaguacu

SEQ ID NO: 1407710 - RNA, 19 nt, Artificial Sequence
  Description of Artificial Sequence: Synthetic oligonucleotide
  Sense strand starting at position 411 of SEQ ID NO: 1243304
uucugcuuacuauguuuau

SEQ ID NO: 1407711 - RNA, 19 nt, Artificial Sequence
  Description of Artificial Sequence: Synthetic oligonucleotide
  Antisense strand to SEQ ID NO: 1407710
auaaacauaguaagcagaa

SEQ ID NO: 1407712 - RNA, 19 nt, Artificial Sequence
  Description of Artificial Sequence: Synthetic oligonucleotide
  Sense strand starting at position 412 of SEQ ID NO: 1243304
ucugcuuacuauguuuaua

SEQ ID NO: 1407713 - RNA, 19 nt, Artificial Sequence
  Description of Artificial Sequence: Synthetic oligonucleotide
  Antisense strand to SEQ ID NO: 1407712
uauaaacauaguaagcaga

SEQ ID NO: 1407714 - RNA, 19 nt, Artificial Sequence
  Description of Artificial Sequence: Synthetic oligonucleotide
  Sense strand starting at position 457 of SEQ ID NO: 1243304
acucauuucuaggaagcgu

SEQ ID NO: 1407715 - RNA, 19 nt, Artificial Sequence
  Description of Artificial Sequence: Synthetic oligonucleotide
  Antisense strand to SEQ ID NO: 1407714
acgcuuccuagaaaugagu

SEQ ID NO: 1407716 - RNA, 19 nt, Artificial Sequence
  Description of Artificial Sequence: Synthetic oligonucleotide
  Sense strand starting at position 468 of SEQ ID NO: 1243304
ggaagcgucaaauacauau

SEQ ID NO: 1407717 - RNA, 19 nt, Artificial Sequence
  Description of Artificial Sequence: Synthetic oligonucleotide
  Antisense strand to SEQ ID NO: 1407716
auauguauuugacgcuucc

SEQ ID NO: 1407718 - RNA, 19 nt, Artificial Sequence
  Description of Artificial Sequence: Synthetic oligonucleotide
  Sense strand starting at position 548 of SEQ ID NO: 1243304
aaaccaaguuagucagagu

SEQ ID NO: 1407719 - RNA, 19 nt, Artificial Sequence
  Description of Artificial Sequence: Synthetic oligonucleotide
  Antisense strand to SEQ ID NO: 1407718
acucugacuaacuugguuu

SEQ ID NO: 1407720 - RNA, 19 nt, Artificial Sequence
  Description of Artificial Sequence: Synthetic oligonucleotide
  Sense strand starting at position 563 of SEQ ID NO: 1243304
gagucuaaagccuguguuu

SEQ ID NO: 1407721 - RNA, 19 nt, Artificial Sequence
  Description of Artificial Sequence: Synthetic oligonucleotide
  Antisense strand to SEQ ID NO: 1407720
aaacacaggcuuuagacuc

SEQ ID NO: 1407722 - RNA, 19 nt, Artificial Sequence
  Description of Artificial Sequence: Synthetic oligonucleotide
  Sense strand starting at position 610 of SEQ ID NO: 1243304
ugaaauccauuucgugaga

SEQ ID NO: 1407723 - RNA, 19 nt, Artificial Sequence
  Description of Artificial Sequence: Synthetic oligonucleotide
  Antisense strand to SEQ ID NO: 1407722
ucucacgaaauggauuuca

SEQ ID NO: 1407724 - RNA, 19 nt, Artificial Sequence
  Description of Artificial Sequence: Synthetic oligonucleotide
  Sense strand starting at position 612 of SEQ ID NO: 1243304
aaauccauuucgugagaag

SEQ ID NO: 1407725 - RNA, 19 nt, Artificial Sequence
  Description of Artificial Sequence: Synthetic oligonucleotide
  Antisense strand to SEQ ID NO: 1407724
cuucucacgaaauggauuu

SEQ ID NO: 1407726 - RNA, 19 nt, Artificial Sequence
  Description of Artificial Sequence: Synthetic oligonucleotide
  Sense strand starting at position 615 of SEQ ID NO: 1243304
uccauuucgugagaaguag

SEQ ID NO: 1407727 - RNA, 19 nt, Artificial Sequence
  Description of Artificial Sequence: Synthetic oligonucleotide
  Antisense strand to SEQ ID NO: 1407726
cuacuucucacgaaaugga

SEQ ID NO: 1407728 - RNA, 19 nt, Artificial Sequence
  Description of Artificial Sequence: Synthetic oligonucleotide
  Sense strand starting at position 619 of SEQ ID NO: 1243304
uuucgugagaaguaguaag

SEQ ID NO: 1407729 - RNA, 19 nt, Artificial Sequence
  Description of Artificial Sequence: Synthetic oligonucleotide
  Antisense strand to SEQ ID NO: 1407728
cuuacuacuucucacgaaa

SEQ ID NO: 1407730 - RNA, 19 nt, Artificial Sequence
  Description of Artificial Sequence: Synthetic oligonucleotide
  Sense strand starting at position 629 of SEQ ID NO: 1243304
aguaguaagauaggcaauu

SEQ ID NO: 1407731 - RNA, 19 nt, Artificial Sequence
  Description of Artificial Sequence: Synthetic oligonucleotide
  Antisense strand to SEQ ID NO: 1407730
aauugccuaucuuacuacu

SEQ ID NO: 1407732 - RNA, 19 nt, Artificial Sequence
  Description of Artificial Sequence: Synthetic oligonucleotide
  Sense strand starting at position 898 of SEQ ID NO: 1243304
uuaugaaucccuuagugcu

SEQ ID NO: 1407733 - RNA, 19 nt, Artificial Sequence
  Description of Artificial Sequence: Synthetic oligonucleotide
  Antisense strand to SEQ ID NO: 1407732
agcacuaagggauucauaa

SEQ ID NO: 1407734 - RNA, 19 nt, Artificial Sequence
  Description of Artificial Sequence: Synthetic oligonucleotide
  Sense strand starting at position 911 of SEQ ID NO: 1243304
agugcuuuccaacaugaua

SEQ ID NO: 1407735 - RNA, 19 nt, Artificial Sequence
  Description of Artificial Sequence: Synthetic oligonucleotide
  Antisense strand to SEQ ID NO: 1407734
uaucauguuggaaagcacu

SEQ ID NO: 1407736 - RNA, 19 nt, Artificial Sequence
  Description of Artificial Sequence: Synthetic oligonucleotide
  Sense strand starting at position 954 of SEQ ID NO: 1243304
gggauuggcagcugaauca

SEQ ID NO: 1407737 - RNA, 19 nt, Artificial Sequence
  Description of Artificial Sequence: Synthetic oligonucleotide
  Antisense strand to SEQ ID NO: 1407736
ugauucagcugccaauccc

SEQ ID NO: 1407738 - RNA, 19 nt, Artificial Sequence
  Description of Artificial Sequence: Synthetic oligonucleotide
  Sense strand starting at position 967 of SEQ ID NO: 1243304
gaaucaaggccuggucuuu

SEQ ID NO: 1407739 - RNA, 19 nt, Artificial Sequence
  Description of Artificial Sequence: Synthetic oligonucleotide
  Antisense strand to SEQ ID NO: 1407738
aaagaccaggccuugauuc

SEQ ID NO: 1407740 - RNA, 19 nt, Artificial Sequence
  Description of Artificial Sequence: Synthetic oligonucleotide
  Sense strand starting at position 1256 of SEQ ID NO: 1243304
ucugcaaugcaugggagau

SEQ ID NO: 1407741 - RNA, 19 nt, Artificial Sequence
  Description of Artificial Sequence: Synthetic oligonucleotide
  Antisense strand to SEQ ID NO: 1407740
aucucccaugcauugcaga

SEQ ID NO: 1407742 - RNA, 19 nt, Artificial Sequence
  Description of Artificial Sequence: Synthetic oligonucleotide
  Sense strand starting at position 1333 of SEQ ID NO: 1243304
gaaagugucuuuguuguga

SEQ ID NO: 1407743 - RNA, 19 nt, Artificial Sequence
  Description of Artificial Sequence: Synthetic oligonucleotide
  Antisense strand to SEQ ID NO: 1407742
ucacaacaaagacacuuuc

SEQ ID NO: 1407744 - RNA, 19 nt, Artificial Sequence
  Description of Artificial Sequence: Synthetic oligonucleotide
  Sense strand starting at position 1379 of SEQ ID NO: 1243304
ccuuguaaauccuuagucu

SEQ ID NO: 1407745 - RNA, 19 nt, Artificial Sequence
  Description of Artificial Sequence: Synthetic oligonucleotide
  Antisense strand to SEQ ID NO: 1407744
agacuaaggauuuacaagg

SEQ ID NO: 1407746 - RNA, 19 nt, Artificial Sequence
  Description of Artificial Sequence: Synthetic oligonucleotide
  Sense strand starting at position 1380 of SEQ ID NO: 1243304
cuuguaaauccuuagucuu

SEQ ID NO: 1407747 - RNA, 19 nt, Artificial Sequence
  Description of Artificial Sequence: Synthetic oligonucleotide
  Antisense strand to SEQ ID NO: 1407746
aagacuaaggauuuacaag

SEQ ID NO: 1407748 - RNA, 19 nt, Artificial Sequence
  Description of Artificial Sequence: Synthetic oligonucleotide
  Sense strand starting at position 1383 of SEQ ID NO: 1243304
guaaauccuuagucuuuga

SEQ ID NO: 1407749 - RNA, 19 nt, Artificial Sequence
  Description of Artificial Sequence: Synthetic oligonucleotide
  Antisense strand to SEQ ID NO: 1407748
ucaaagacuaaggauuuac

SEQ ID NO: 1407750 - RNA, 19 nt, Artificial Sequence
  Description of Artificial Sequence: Synthetic oligonucleotide
  Sense strand starting at position 1387 of SEQ ID NO: 1243304
auccuuagucuuugacaag

SEQ ID NO: 1407751 - RNA, 19 nt, Artificial Sequence
  Description of Artificial Sequence: Synthetic oligonucleotide
  Antisense strand to SEQ ID NO: 1407750
cuugucaaagacuaaggau

SEQ ID NO: 1407752 - RNA, 19 nt, Artificial Sequence
  Description of Artificial Sequence: Synthetic oligonucleotide
  Sense strand starting at position 1457 of SEQ ID NO: 1243304
ucguguucugagcuucuuu

SEQ ID NO: 1407753 - RNA, 19 nt, Artificial Sequence
  Description of Artificial Sequence: Synthetic oligonucleotide
  Antisense strand to SEQ ID NO: 1407752
aaagaagcucagaacacga

SEQ ID NO: 1407754 - RNA, 19 nt, Artificial Sequence
  Description of Artificial Sequence: Synthetic oligonucleotide
  Sense strand starting at position 1522 of SEQ ID NO: 1243304
gggaaguggguguaagauu

SEQ ID NO: 1407755 - RNA, 19 nt, Artificial Sequence
  Description of Artificial Sequence: Synthetic oligonucleotide
  Antisense strand to SEQ ID NO: 1407754
aaucuuacacccacuuccc

SEQ ID NO: 1407756 - RNA, 19 nt, Artificial Sequence
  Description of Artificial Sequence: Synthetic oligonucleotide
  Sense strand starting at position 1531 of SEQ ID NO: 1243304
guguaagauuccgcacagu

SEQ ID NO: 1407757 - RNA, 19 nt, Artificial Sequence
  Description of Artificial Sequence: Synthetic oligonucleotide
  Antisense strand to SEQ ID NO: 1407756
acugugcggaaucuuacac

SEQ ID NO: 1407758 - RNA, 19 nt, Artificial Sequence
  Description of Artificial Sequence: Synthetic oligonucleotide
  Sense strand starting at position 1578 of SEQ ID NO: 1243304
ggaaguucugaggguuaag

SEQ ID NO: 1407759 - RNA, 19 nt, Artificial Sequence
  Description of Artificial Sequence: Synthetic oligonucleotide
  Antisense strand to SEQ ID NO: 1407758
cuuaacccucagaacuucc

SEQ ID NO: 1407760 - RNA, 19 nt, Artificial Sequence
  Description of Artificial Sequence: Synthetic oligonucleotide
  Sense strand starting at position 2763 of SEQ ID NO: 1243304
uggucugcucgugaauauu

SEQ ID NO: 1407761 - RNA, 19 nt, Artificial Sequence
  Description of Artificial Sequence: Synthetic oligonucleotide
  Antisense strand to SEQ ID NO: 1407760
aauauucacgagcagacca

SEQ ID NO: 1407762 - RNA, 19 nt, Artificial Sequence
  Description of Artificial Sequence: Synthetic oligonucleotide
  Sense strand starting at position 2813 of SEQ ID NO: 1243304
ucauuaugcuuacuaacgu

SEQ ID NO: 1407763 - RNA, 19 nt, Artificial Sequence
  Description of Artificial Sequence: Synthetic oligonucleotide
  Antisense strand to SEQ ID NO: 1407762
acguuaguaagcauaauga

SEQ ID NO: 1407764 - RNA, 19 nt, Artificial Sequence
  Description of Artificial Sequence: Synthetic oligonucleotide
  Sense strand starting at position 2889 of SEQ ID NO: 1243304
guuacugugcucgcguaga

SEQ ID NO: 1407765 - RNA, 19 nt, Artificial Sequence
  Description of Artificial Sequence: Synthetic oligonucleotide
  Antisense strand to SEQ ID NO: 1407764
ucuacgcgagcacaguaac

SEQ ID NO: 1407766 - RNA, 19 nt, Artificial Sequence
  Description of Artificial Sequence: Synthetic oligonucleotide
  Sense strand starting at position 2946 of SEQ ID NO: 1243304
ucuccuuaguccuugagau

SEQ ID NO: 1407767 - RNA, 19 nt, Artificial Sequence
  Description of Artificial Sequence: Synthetic oligonucleotide
  Antisense strand to SEQ ID NO: 1407766
aucucaaggacuaaggaga

SEQ ID NO: 1407768 - RNA, 19 nt, Artificial Sequence
  Description of Artificial Sequence: Synthetic oligonucleotide
  Sense strand starting at position 2947 of SEQ ID NO: 1243304
cuccuuaguccuugagaug

SEQ ID NO: 1407769 - RNA, 19 nt, Artificial Sequence
  Description of Artificial Sequence: Synthetic oligonucleotide
  Antisense strand to SEQ ID NO: 1407768
caucucaaggacuaaggag

SEQ ID NO: 1407770 - RNA, 19 nt, Artificial Sequence
  Description of Artificial Sequence: Synthetic oligonucleotide
  Sense strand starting at position 2948 of SEQ ID NO: 1243304
uccuuaguccuugagauga

SEQ ID NO: 1407771 - RNA, 19 nt, Artificial Sequence
  Description of Artificial Sequence: Synthetic oligonucleotide
  Antisense strand to SEQ ID NO: 1407770
ucaucucaaggacuaagga

SEQ ID NO: 1407772 - RNA, 19 nt, Artificial Sequence
  Description of Artificial Sequence: Synthetic oligonucleotide
  Sense strand starting at position 2950 of SEQ ID NO: 1243304
cuuaguccuugagaugaga

SEQ ID NO: 1407773 - RNA, 19 nt, Artificial Sequence
  Description of Artificial Sequence: Synthetic oligonucleotide
  Antisense strand to SEQ ID NO: 1407772
ucucaucucaaggacuaag

SEQ ID NO: 1407774 - RNA, 19 nt, Artificial Sequence
  Description of Artificial Sequence: Synthetic oligonucleotide
  Sense strand starting at position 79 of SEQ ID NO: 1243305
auugauggguggcuagaua

SEQ ID NO: 1407775 - RNA, 19 nt, Artificial Sequence
  Description of Artificial Sequence: Synthetic oligonucleotide
  Antisense strand to SEQ ID NO: 1407774
uaucuagccacccaucaau

SEQ ID NO: 1407776 - RNA, 19 nt, Artificial Sequence
  Description of Artificial Sequence: Synthetic oligonucleotide
  Sense strand starting at position 107 of SEQ ID NO: 1243305
gcaaauauagcagaaacgu

SEQ ID NO: 1407777 - RNA, 19 nt, Artificial Sequence
  Description of Artificial Sequence: Synthetic oligonucleotide
  Antisense strand to SEQ ID NO: 1407776
acguuucugcuauauuugc

SEQ ID NO: 1407778 - RNA, 19 nt, Artificial Sequence
  Description of Artificial Sequence: Synthetic oligonucleotide
  Sense strand starting at position 116 of SEQ ID NO: 1243305
gcagaaacguaacuuauag

SEQ ID NO: 1407779 - RNA, 19 nt, Artificial Sequence
  Description of Artificial Sequence: Synthetic oligonucleotide
  Antisense strand to SEQ ID NO: 1407778
cuauaaguuacguuucugc

SEQ ID NO: 1407780 - RNA, 19 nt, Artificial Sequence
  Description of Artificial Sequence: Synthetic oligonucleotide
  Sense strand starting at position 447 of SEQ ID NO: 1243305
uuaaguggucuuuauguga

SEQ ID NO: 1407781 - RNA, 19 nt, Artificial Sequence
  Description of Artificial Sequence: Synthetic oligonucleotide
  Antisense strand to SEQ ID NO: 1407780
ucacauaaagaccacuuaa

SEQ ID NO: 1407782 - RNA, 19 nt, Artificial Sequence
  Description of Artificial Sequence: Synthetic oligonucleotide
  Sense strand starting at position 455 of SEQ ID NO: 1243305
ucuuuaugugaguauuaac

SEQ ID NO: 1407783 - RNA, 19 nt, Artificial Sequence
  Description of Artificial Sequence: Synthetic oligonucleotide
  Antisense strand to SEQ ID NO: 1407782
guuaauacucacauaaaga

SEQ ID NO: 1407784 - RNA, 19 nt, Artificial Sequence
  Description of Artificial Sequence: Synthetic oligonucleotide
  Sense strand starting at position 542 of SEQ ID NO: 1243305
auugaaauugcgugagaga

SEQ ID NO: 1407785 - RNA, 19 nt, Artificial Sequence
  Description of Artificial Sequence: Synthetic oligonucleotide
  Antisense strand to SEQ ID NO: 1407784
ucucucacgcaauuucaau

SEQ ID NO: 1407786 - RNA, 19 nt, Artificial Sequence
  Description of Artificial Sequence: Synthetic oligonucleotide
  Sense strand starting at position 543 of SEQ ID NO: 1243305
uugaaauugcgugagagac

SEQ ID NO: 1407787 - RNA, 19 nt, Artificial Sequence
  Description of Artificial Sequence: Synthetic oligonucleotide
  Antisense strand to SEQ ID NO: 1407786
gucucucacgcaauuucaa

SEQ ID NO: 1407788 - RNA, 19 nt, Artificial Sequence
  Description of Artificial Sequence: Synthetic oligonucleotide
  Sense strand starting at position 569 of SEQ ID NO: 1243305
cauguaagaguuuagcaaa

SEQ ID NO: 1407789 - RNA, 19 nt, Artificial Sequence
  Description of Artificial Sequence: Synthetic oligonucleotide
  Antisense strand to SEQ ID NO: 1407788
uuugcuaaacucuuacaug

SEQ ID NO: 1407790 - RNA, 19 nt, Artificial Sequence
  Description of Artificial Sequence: Synthetic oligonucleotide
  Sense strand starting at position 596 of SEQ ID NO: 1243305
acugcagaaugugcucaaa

SEQ ID NO: 1407791 - RNA, 19 nt, Artificial Sequence
  Description of Artificial Sequence: Synthetic oligonucleotide
  Antisense strand to SEQ ID NO: 1407790
uuugagcacauucugcagu

SEQ ID NO: 1407792 - RNA, 19 nt, Artificial Sequence
  Description of Artificial Sequence: Synthetic oligonucleotide
  Sense strand starting at position 598 of SEQ ID NO: 1243305
ugcagaaugugcucaaaua

SEQ ID NO: 1407793 - RNA, 19 nt, Artificial Sequence
  Description of Artificial Sequence: Synthetic oligonucleotide
  Antisense strand to SEQ ID NO: 1407792
uauuugagcacauucugca

SEQ ID NO: 1407794 - RNA, 19 nt, Artificial Sequence
  Description of Artificial Sequence: Synthetic oligonucleotide
  Sense strand starting at position 599 of SEQ ID NO: 1243305
gcagaaugugcucaaauaa

SEQ ID NO: 1407795 - RNA, 19 nt, Artificial Sequence
  Description of Artificial Sequence: Synthetic oligonucleotide
  Antisense strand to SEQ ID NO: 1407794
uuauuugagcacauucugc

SEQ ID NO: 1407796 - RNA, 19 nt, Artificial Sequence
  Description of Artificial Sequence: Synthetic oligonucleotide
  Sense strand starting at position 719 of SEQ ID NO: 1243305
aggaguuguuaagugaaga

SEQ ID NO: 1407797 - RNA, 19 nt, Artificial Sequence
  Description of Artificial Sequence: Synthetic oligonucleotide
  Antisense strand to SEQ ID NO: 1407796
ucuucacuuaacaacuccu

SEQ ID NO: 1407798 - RNA, 19 nt, Artificial Sequence
  Description of Artificial Sequence: Synthetic oligonucleotide
  Sense strand starting at position 720 of SEQ ID NO: 1243305
ggaguuguuaagugaagau

SEQ ID NO: 1407799 - RNA, 19 nt, Artificial Sequence
  Description of Artificial Sequence: Synthetic oligonucleotide
  Antisense strand to SEQ ID NO: 1407798
aucuucacuuaacaacucc

SEQ ID NO: 1407800 - RNA, 19 nt, Artificial Sequence
  Description of Artificial Sequence: Synthetic oligonucleotide
  Sense strand starting at position 724 of SEQ ID NO: 1243305
uuguuaagugaagaucuca

SEQ ID NO: 1407801 - RNA, 19 nt, Artificial Sequence
  Description of Artificial Sequence: Synthetic oligonucleotide
  Antisense strand to SEQ ID NO: 1407800
ugagaucuucacuuaacaa

SEQ ID NO: 1407802 - RNA, 19 nt, Artificial Sequence
  Description of Artificial Sequence: Synthetic oligonucleotide
  Sense strand starting at position 745 of SEQ ID NO: 1243305
aauggagucucagcuacuu

SEQ ID NO: 1407803 - RNA, 19 nt, Artificial Sequence
  Description of Artificial Sequence: Synthetic oligonucleotide
  Antisense strand to SEQ ID NO: 1407802
aaguagcugagacuccauu

SEQ ID NO: 1407804 - RNA, 19 nt, Artificial Sequence
  Description of Artificial Sequence: Synthetic oligonucleotide
  Sense strand starting at position 981 of SEQ ID NO: 1243305
gcuuuagaacaguaagguu

SEQ ID NO: 1407805 - RNA, 19 nt, Artificial Sequence
  Description of Artificial Sequence: Synthetic oligonucleotide
  Antisense strand to SEQ ID NO: 1407804
aaccuuacuguucuaaagc

SEQ ID NO: 1407806 - RNA, 19 nt, Artificial Sequence
  Description of Artificial Sequence: Synthetic oligonucleotide
  Sense strand starting at position 990 of SEQ ID NO: 1243305
caguaagguucugcagaca

SEQ ID NO: 1407807 - RNA, 19 nt, Artificial Sequence
  Description of Artificial Sequence: Synthetic oligonucleotide
  Antisense strand to SEQ ID NO: 1407806
ugucugcagaaccuuacug

SEQ ID NO: 1407808 - RNA, 19 nt, Artificial Sequence
  Description of Artificial Sequence: Synthetic oligonucleotide
  Sense strand starting at position 1042 of SEQ ID NO: 1243305
cucggacaaucagugagua

SEQ ID NO: 1407809 - RNA, 19 nt, Artificial Sequence
  Description of Artificial Sequence: Synthetic oligonucleotide
  Antisense strand to SEQ ID NO: 1407808
uacucacugauuguccgag

SEQ ID NO: 1407810 - RNA, 19 nt, Artificial Sequence
  Description of Artificial Sequence: Synthetic oligonucleotide
  Sense strand starting at position 1043 of SEQ ID NO: 1243305
ucggacaaucagugaguau

SEQ ID NO: 1407811 - RNA, 19 nt, Artificial Sequence
  Description of Artificial Sequence: Synthetic oligonucleotide
  Antisense strand to SEQ ID NO: 1407810
auacucacugauuguccga

SEQ ID NO: 1407812 - RNA, 19 nt, Artificial Sequence
  Description of Artificial Sequence: Synthetic oligonucleotide
  Sense strand starting at position 1044 of SEQ ID NO: 1243305
cggacaaucagugaguauc

SEQ ID NO: 1407813 - RNA, 19 nt, Artificial Sequence
  Description of Artificial Sequence: Synthetic oligonucleotide
  Antisense strand to SEQ ID NO: 1407812
gauacucacugauuguccg

SEQ ID NO: 1407814 - RNA, 19 nt, Artificial Sequence
  Description of Artificial Sequence: Synthetic oligonucleotide
  Sense strand starting at position 1046 of SEQ ID NO: 1243305
gacaaucagugaguaucau

SEQ ID NO: 1407815 - RNA, 19 nt, Artificial Sequence
  Description of Artificial Sequence: Synthetic oligonucleotide
  Antisense strand to SEQ ID NO: 1407814
augauacucacugauuguc

SEQ ID NO: 1407816 - RNA, 19 nt, Artificial Sequence
  Description of Artificial Sequence: Synthetic oligonucleotide
  Sense strand starting at position 1047 of SEQ ID NO: 1243305
acaaucagugaguaucauu

SEQ ID NO: 1407817 - RNA, 19 nt, Artificial Sequence
  Description of Artificial Sequence: Synthetic oligonucleotide
  Antisense strand to SEQ ID NO: 1407816
aaugauacucacugauugu

SEQ ID NO: 1407818 - RNA, 19 nt, Artificial Sequence
  Description of Artificial Sequence: Synthetic oligonucleotide
  Sense strand starting at position 1199 of SEQ ID NO: 1243305
uauaguuacccagggcauu

SEQ ID NO: 1407819 - RNA, 19 nt, Artificial Sequence
  Description of Artificial Sequence: Synthetic oligonucleotide
  Antisense strand to SEQ ID NO: 1407818
aaugcccuggguaacuaua

SEQ ID NO: 1407820 - RNA, 19 nt, Artificial Sequence
  Description of Artificial Sequence: Synthetic oligonucleotide
  Sense strand starting at position 1200 of SEQ ID NO: 1243305
auaguuacccagggcauua

SEQ ID NO: 1407821 - RNA, 19 nt, Artificial Sequence
  Description of Artificial Sequence: Synthetic oligonucleotide
  Antisense strand to SEQ ID NO: 1407820
uaaugcccuggguaacuau

SEQ ID NO: 1407822 - RNA, 19 nt, Artificial Sequence
  Description of Artificial Sequence: Synthetic oligonucleotide
  Sense strand starting at position 1240 of SEQ ID NO: 1243305
aggagcaagaguuguaucu

SEQ ID NO: 1407823 - RNA, 19 nt, Artificial Sequence
  Description of Artificial Sequence: Synthetic oligonucleotide
  Antisense strand to SEQ ID NO: 1407822
agauacaacucuugcuccu

SEQ ID NO: 1407824 - RNA, 19 nt, Artificial Sequence
  Description of Artificial Sequence: Synthetic oligonucleotide
  Sense strand starting at position 1408 of SEQ ID NO: 1243305
accugaaauuccuuaguag

SEQ ID NO: 1407825 - RNA, 19 nt, Artificial Sequence
  Description of Artificial Sequence: Synthetic oligonucleotide
  Antisense strand to SEQ ID NO: 1407824
cuacuaaggaauuucaggu

SEQ ID NO: 1407826 - RNA, 19 nt, Artificial Sequence
  Description of Artificial Sequence: Synthetic oligonucleotide
  Sense strand starting at position 1409 of SEQ ID NO: 1243305
ccugaaauuccuuaguagc

SEQ ID NO: 1407827 - RNA, 19 nt, Artificial Sequence
  Description of Artificial Sequence: Synthetic oligonucleotide
  Antisense strand to SEQ ID NO: 1407826
gcuacuaaggaauuucagg

SEQ ID NO: 1407828 - RNA, 19 nt, Artificial Sequence
  Description of Artificial Sequence: Synthetic oligonucleotide
  Sense strand starting at position 1411 of SEQ ID NO: 1243305
ugaaauuccuuaguagcca

SEQ ID NO: 1407829 - RNA, 19 nt, Artificial Sequence
  Description of Artificial Sequence: Synthetic oligonucleotide
  Antisense strand to SEQ ID NO: 1407828
uggcuacuaaggaauuuca

SEQ ID NO: 1407830 - RNA, 19 nt, Artificial Sequence
  Description of Artificial Sequence: Synthetic oligonucleotide
  Sense strand starting at position 1690 of SEQ ID NO: 1243305
gaacuaagaucugcccgaa

SEQ ID NO: 1407831 - RNA, 19 nt, Artificial Sequence
  Description of Artificial Sequence: Synthetic oligonucleotide
  Antisense strand to SEQ ID NO: 1407830
uucgggcagaucuuaguuc

SEQ ID NO: 1407832 - RNA, 19 nt, Artificial Sequence
  Description of Artificial Sequence: Synthetic oligonucleotide
  Sense strand starting at position 1694 of SEQ ID NO: 1243305
uaagaucugcccgaaugua

SEQ ID NO: 1407833 - RNA, 19 nt, Artificial Sequence
  Description of Artificial Sequence: Synthetic oligonucleotide
  Antisense strand to SEQ ID NO: 1407832
uacauucgggcagaucuua

SEQ ID NO: 1407834 - RNA, 19 nt, Artificial Sequence
  Description of Artificial Sequence: Synthetic oligonucleotide
  Sense strand starting at position 1703 of SEQ ID NO: 1243305
cccgaauguacuuggugaa

SEQ ID NO: 1407835 - RNA, 19 nt, Artificial Sequence
  Description of Artificial Sequence: Synthetic oligonucleotide
  Antisense strand to SEQ ID NO: 1407834
uucaccaaguacauucggg

SEQ ID NO: 1407836 - RNA, 19 nt, Artificial Sequence
  Description of Artificial Sequence: Synthetic oligonucleotide
  Sense strand starting at position 1704 of SEQ ID NO: 1243305
ccgaauguacuuggugaaa

SEQ ID NO: 1407837 - RNA, 19 nt, Artificial Sequence
  Description of Artificial Sequence: Synthetic oligonucleotide
  Antisense strand to SEQ ID NO: 1407836
uuucaccaaguacauucgg

SEQ ID NO: 1407838 - RNA, 19 nt, Artificial Sequence
  Description of Artificial Sequence: Synthetic oligonucleotide
  Sense strand starting at position 1930 of SEQ ID NO: 1243305
guuaaaucucgaggagagg

SEQ ID NO: 1407839 - RNA, 19 nt, Artificial Sequence
  Description of Artificial Sequence: Synthetic oligonucleotide
  Antisense strand to SEQ ID NO: 1407838
ccucuccucgagauuuaac

SEQ ID NO: 1407840 - RNA, 19 nt, Artificial Sequence
  Description of Artificial Sequence: Synthetic oligonucleotide
  Sense strand starting at position 2156 of SEQ ID NO: 1243305
ccgauaauugcacacggga

SEQ ID NO: 1407841 - RNA, 19 nt, Artificial Sequence
  Description of Artificial Sequence: Synthetic oligonucleotide
  Antisense strand to SEQ ID NO: 1407840
ucccgugugcaauuaucgg

SEQ ID NO: 1407842 - RNA, 19 nt, Artificial Sequence
  Description of Artificial Sequence: Synthetic oligonucleotide
  Sense strand starting at position 2158 of SEQ ID NO: 1243305
gauaauugcacacgggagu

SEQ ID NO: 1407843 - RNA, 19 nt, Artificial Sequence
  Description of Artificial Sequence: Synthetic oligonucleotide
  Antisense strand to SEQ ID NO: 1407842
acucccgugugcaauuauc

SEQ ID NO: 1407844 - RNA, 19 nt, Artificial Sequence
  Description of Artificial Sequence: Synthetic oligonucleotide
  Sense strand starting at position 2192 of SEQ ID NO: 1243305
ggaguacacguuugaauua

SEQ ID NO: 1407845 - RNA, 19 nt, Artificial Sequence
  Description of Artificial Sequence: Synthetic oligonucleotide
  Antisense strand to SEQ ID NO: 1407844
uaauucaaacguguacucc

SEQ ID NO: 1407846 - RNA, 19 nt, Artificial Sequence
  Description of Artificial Sequence: Synthetic oligonucleotide
  Sense strand starting at position 2203 of SEQ ID NO: 1243305
uugaauuaaugacuccgaa

SEQ ID NO: 1407847 - RNA, 19 nt, Artificial Sequence
  Description of Artificial Sequence: Synthetic oligonucleotide
  Antisense strand to SEQ ID NO: 1407846
uucggagucauuaauucaa

SEQ ID NO: 1407848 - RNA, 19 nt, Artificial Sequence
  Description of Artificial Sequence: Synthetic oligonucleotide
  Sense strand starting at position 2770 of SEQ ID NO: 1243305
gccgcucugacgucagagu

SEQ ID NO: 1407849 - RNA, 19 nt, Artificial Sequence
  Description of Artificial Sequence: Synthetic oligonucleotide
  Antisense strand to SEQ ID NO: 1407848
acucugacgucagagcggc

SEQ ID NO: 1407850 - RNA, 19 nt, Artificial Sequence
  Description of Artificial Sequence: Synthetic oligonucleotide
  Sense strand starting at position 2861 of SEQ ID NO: 1243305
ggaagcguuaaagagucaa

SEQ ID NO: 1407851 - RNA, 19 nt, Artificial Sequence
  Description of Artificial Sequence: Synthetic oligonucleotide
  Antisense strand to SEQ ID NO: 1407850
uugacucuuuaacgcuucc

SEQ ID NO: 1407852 - RNA, 19 nt, Artificial Sequence
  Description of Artificial Sequence: Synthetic oligonucleotide
  Sense strand starting at position 2865 of SEQ ID NO: 1243305
gcguuaaagagucaaggca

SEQ ID NO: 1407853 - RNA, 19 nt, Artificial Sequence
  Description of Artificial Sequence: Synthetic oligonucleotide
  Antisense strand to SEQ ID NO: 1407852
ugccuugacucuuuaacgc

SEQ ID NO: 1407854 - RNA, 19 nt, Artificial Sequence
  Description of Artificial Sequence: Synthetic oligonucleotide
  Sense strand starting at position 25 of SEQ ID NO: 1243306
uggguuugauuugagguuu

SEQ ID NO: 1407855 - RNA, 19 nt, Artificial Sequence
  Description of Artificial Sequence: Synthetic oligonucleotide
  Antisense strand to SEQ ID NO: 1407854
aaaccucaaaucaaaccca

SEQ ID NO: 1407856 - RNA, 19 nt, Artificial Sequence
  Description of Artificial Sequence: Synthetic oligonucleotide
  Sense strand starting at position 124 of SEQ ID NO: 1243306
uauaguuacccagggcauu

SEQ ID NO: 1407857 - RNA, 19 nt, Artificial Sequence
  Description of Artificial Sequence: Synthetic oligonucleotide
  Antisense strand to SEQ ID NO: 1407856
aaugcccuggguaacuaua

SEQ ID NO: 1407858 - RNA, 19 nt, Artificial Sequence
  Description of Artificial Sequence: Synthetic oligonucleotide
  Sense strand starting at position 125 of SEQ ID NO: 1243306
auaguuacccagggcauua

SEQ ID NO: 1407859 - RNA, 19 nt, Artificial Sequence
  Description of Artificial Sequence: Synthetic oligonucleotide
  Antisense strand to SEQ ID NO: 1407858
uaaugcccuggguaacuau

SEQ ID NO: 1407860 - RNA, 19 nt, Artificial Sequence
  Description of Artificial Sequence: Synthetic oligonucleotide
  Sense strand starting at position 155 of SEQ ID NO: 1243306
gauaaauguuaggagcaag

SEQ ID NO: 1407861 - RNA, 19 nt, Artificial Sequence
  Description of Artificial Sequence: Synthetic oligonucleotide
  Antisense strand to SEQ ID NO: 1407860
cuugcuccuaacauuuauc

SEQ ID NO: 1407862 - RNA, 19 nt, Artificial Sequence
  Description of Artificial Sequence: Synthetic oligonucleotide
  Sense strand starting at position 165 of SEQ ID NO: 1243306
aggagcaagaguuguaucu

SEQ ID NO: 1407863 - RNA, 19 nt, Artificial Sequence
  Description of Artificial Sequence: Synthetic oligonucleotide
  Antisense strand to SEQ ID NO: 1407862
agauacaacucuugcuccu

SEQ ID NO: 1407864 - RNA, 19 nt, Artificial Sequence
  Description of Artificial Sequence: Synthetic oligonucleotide
  Sense strand starting at position 333 of SEQ ID NO: 1243306
accugaaauuccuuaguag

SEQ ID NO: 1407865 - RNA, 19 nt, Artificial Sequence
  Description of Artificial Sequence: Synthetic oligonucleotide
  Antisense strand to SEQ ID NO: 1407864
cuacuaaggaauuucaggu

SEQ ID NO: 1407866 - RNA, 19 nt, Artificial Sequence
  Description of Artificial Sequence: Synthetic oligonucleotide
  Sense strand starting at position 334 of SEQ ID NO: 1243306
ccugaaauuccuuaguagc

SEQ ID NO: 1407867 - RNA, 19 nt, Artificial Sequence
  Description of Artificial Sequence: Synthetic oligonucleotide
  Antisense strand to SEQ ID NO: 1407866
gcuacuaaggaauuucagg

SEQ ID NO: 1407868 - RNA, 19 nt, Artificial Sequence
  Description of Artificial Sequence: Synthetic oligonucleotide
  Sense strand starting at position 336 of SEQ ID NO: 1243306
ugaaauuccuuaguagcca

SEQ ID NO: 1407869 - RNA, 19 nt, Artificial Sequence
  Description of Artificial Sequence: Synthetic oligonucleotide
  Antisense strand to SEQ ID NO: 1407868
uggcuacuaaggaauuuca

SEQ ID NO: 1407870 - RNA, 19 nt, Artificial Sequence
  Description of Artificial Sequence: Synthetic oligonucleotide
  Sense strand starting at position 495 of SEQ ID NO: 1243306
cagucuugauuagcuguau

SEQ ID NO: 1407871 - RNA, 19 nt, Artificial Sequence
  Description of Artificial Sequence: Synthetic oligonucleotide
  Antisense strand to SEQ ID NO: 1407870
auacagcuaaucaagacug

SEQ ID NO: 1407872 - RNA, 19 nt, Artificial Sequence
  Description of Artificial Sequence: Synthetic oligonucleotide
  Sense strand starting at position 496 of SEQ ID NO: 1243306
agucuugauuagcuguauu

SEQ ID NO: 1407873 - RNA, 19 nt, Artificial Sequence
  Description of Artificial Sequence: Synthetic oligonucleotide
  Antisense strand to SEQ ID NO: 1407872
aauacagcuaaucaagacu

SEQ ID NO: 1407874 - RNA, 19 nt, Artificial Sequence
  Description of Artificial Sequence: Synthetic oligonucleotide
  Sense strand starting at position 615 of SEQ ID NO: 1243306
gaacuaagaucugcccgaa

SEQ ID NO: 1407875 - RNA, 19 nt, Artificial Sequence
  Description of Artificial Sequence: Synthetic oligonucleotide
  Antisense strand to SEQ ID NO: 1407874
uucgggcagaucuuaguuc

SEQ ID NO: 1407876 - RNA, 19 nt, Artificial Sequence
  Description of Artificial Sequence: Synthetic oligonucleotide
  Sense strand starting at position 618 of SEQ ID NO: 1243306
cuaagaucugcccgaaugu

SEQ ID NO: 1407877 - RNA, 19 nt, Artificial Sequence
  Description of Artificial Sequence: Synthetic oligonucleotide
  Antisense strand to SEQ ID NO: 1407876
acauucgggcagaucuuag

SEQ ID NO: 1407878 - RNA, 19 nt, Artificial Sequence
  Description of Artificial Sequence: Synthetic oligonucleotide
  Sense strand starting at position 619 of SEQ ID NO: 1243306
uaagaucugcccgaaugua

SEQ ID NO: 1407879 - RNA, 19 nt, Artificial Sequence
  Description of Artificial Sequence: Synthetic oligonucleotide
  Antisense strand to SEQ ID NO: 1407878
uacauucgggcagaucuua

SEQ ID NO: 1407880 - RNA, 19 nt, Artificial Sequence
  Description of Artificial Sequence: Synthetic oligonucleotide
  Sense strand starting at position 627 of SEQ ID NO: 1243306
gcccgaauguacuugguga

SEQ ID NO: 1407881 - RNA, 19 nt, Artificial Sequence
  Description of Artificial Sequence: Synthetic oligonucleotide
  Antisense strand to SEQ ID NO: 1407880
ucaccaaguacauucgggc

SEQ ID NO: 1407882 - RNA, 19 nt, Artificial Sequence
  Description of Artificial Sequence: Synthetic oligonucleotide
  Sense strand starting at position 628 of SEQ ID NO: 1243306
cccgaauguacuuggugaa

SEQ ID NO: 1407883 - RNA, 19 nt, Artificial Sequence
  Description of Artificial Sequence: Synthetic oligonucleotide
  Antisense strand to SEQ ID NO: 1407882
uucaccaaguacauucggg

SEQ ID NO: 1407884 - RNA, 19 nt, Artificial Sequence
  Description of Artificial Sequence: Synthetic oligonucleotide
  Sense strand starting at position 629 of SEQ ID NO: 1243306
ccgaauguacuuggugaaa

SEQ ID NO: 1407885 - RNA, 19 nt, Artificial Sequence
  Description of Artificial Sequence: Synthetic oligonucleotide
  Antisense strand to SEQ ID NO: 1407884
uuucaccaaguacauucgg

SEQ ID NO: 1407886 - RNA, 19 nt, Artificial Sequence
  Description of Artificial Sequence: Synthetic oligonucleotide
  Sense strand starting at position 722 of SEQ ID NO: 1243306
ggucgagugcuagaaagca

SEQ ID NO: 1407887 - RNA, 19 nt, Artificial Sequence
  Description of Artificial Sequence: Synthetic oligonucleotide
  Antisense strand to SEQ ID NO: 1407886
ugcuuucuagcacucgacc

SEQ ID NO: 1407888 - RNA, 19 nt, Artificial Sequence
  Description of Artificial Sequence: Synthetic oligonucleotide
  Sense strand starting at position 855 of SEQ ID NO: 1243306
guuaaaucucgaggagagg

SEQ ID NO: 1407889 - RNA, 19 nt, Artificial Sequence
  Description of Artificial Sequence: Synthetic oligonucleotide
  Antisense strand to SEQ ID NO: 1407888
ccucuccucgagauuuaac

SEQ ID NO: 1407890 - RNA, 19 nt, Artificial Sequence
  Description of Artificial Sequence: Synthetic oligonucleotide
  Sense strand starting at position 873 of SEQ ID NO: 1243306
ggcguuucggcacaaaucu

SEQ ID NO: 1407891 - RNA, 19 nt, Artificial Sequence
  Description of Artificial Sequence: Synthetic oligonucleotide
  Antisense strand to SEQ ID NO: 1407890
agauuugugccgaaacgcc

SEQ ID NO: 1407892 - RNA, 19 nt, Artificial Sequence
  Description of Artificial Sequence: Synthetic oligonucleotide
  Sense strand starting at position 1081 of SEQ ID NO: 1243306
ccgauaauugcacacggga

SEQ ID NO: 1407893 - RNA, 19 nt, Artificial Sequence
  Description of Artificial Sequence: Synthetic oligonucleotide
  Antisense strand to SEQ ID NO: 1407892
ucccgugugcaauuaucgg

SEQ ID NO: 1407894 - RNA, 19 nt, Artificial Sequence
  Description of Artificial Sequence: Synthetic oligonucleotide
  Sense strand starting at position 1083 of SEQ ID NO: 1243306
gauaauugcacacgggagu

SEQ ID NO: 1407895 - RNA, 19 nt, Artificial Sequence
  Description of Artificial Sequence: Synthetic oligonucleotide
  Antisense strand to SEQ ID NO: 1407894
acucccgugugcaauuauc

SEQ ID NO: 1407896 - RNA, 19 nt, Artificial Sequence
  Description of Artificial Sequence: Synthetic oligonucleotide
  Sense strand starting at position 1117 of SEQ ID NO: 1243306
ggaguacacguuugaauua

SEQ ID NO: 1407897 - RNA, 19 nt, Artificial Sequence
  Description of Artificial Sequence: Synthetic oligonucleotide
  Antisense strand to SEQ ID NO: 1407896
uaauucaaacguguacucc

SEQ ID NO: 1407898 - RNA, 19 nt, Artificial Sequence
  Description of Artificial Sequence: Synthetic oligonucleotide
  Sense strand starting at position 1128 of SEQ ID NO: 1243306
uugaauuaaugacuccgaa

SEQ ID NO: 1407899 - RNA, 19 nt, Artificial Sequence
  Description of Artificial Sequence: Synthetic oligonucleotide
  Antisense strand to SEQ ID NO: 1407898
uucggagucauuaauucaa

SEQ ID NO: 1407900 - RNA, 19 nt, Artificial Sequence
  Description of Artificial Sequence: Synthetic oligonucleotide
  Sense strand starting at position 1695 of SEQ ID NO: 1243306
gccgcucugacgucagagu

SEQ ID NO: 1407901 - RNA, 19 nt, Artificial Sequence
  Description of Artificial Sequence: Synthetic oligonucleotide
  Antisense strand to SEQ ID NO: 1407900
acucugacgucagagcggc

SEQ ID NO: 1407902 - RNA, 19 nt, Artificial Sequence
  Description of Artificial Sequence: Synthetic oligonucleotide
  Sense strand starting at position 1786 of SEQ ID NO: 1243306
ggaagcguuaaagagucaa

SEQ ID NO: 1407903 - RNA, 19 nt, Artificial Sequence
  Description of Artificial Sequence: Synthetic oligonucleotide
  Antisense strand to SEQ ID NO: 1407902
uugacucuuuaacgcuucc

SEQ ID NO: 1407904 - RNA, 19 nt, Artificial Sequence
  Description of Artificial Sequence: Synthetic oligonucleotide
  Sense strand starting at position 1790 of SEQ ID NO: 1243306
gcguuaaagagucaaggca

SEQ ID NO: 1407905 - RNA, 19 nt, Artificial Sequence
  Description of Artificial Sequence: Synthetic oligonucleotide
  Antisense strand to SEQ ID NO: 1407904
ugccuugacucuuuaacgc

SEQ ID NO: 1407906 - RNA, 19 nt, Artificial Sequence
  Description of Artificial Sequence: Synthetic oligonucleotide
  Sense strand starting at position 1852 of SEQ ID NO: 1243306
cgguaaagucccugggacu

SEQ ID NO: 1407907 - RNA, 19 nt, Artificial Sequence
  Description of Artificial Sequence: Synthetic oligonucleotide
  Antisense strand to SEQ ID NO: 1407906
agucccagggacuuuaccg

SEQ ID NO: 1407908 - RNA, 19 nt, Artificial Sequence
  Description of Artificial Sequence: Synthetic oligonucleotide
  Sense strand starting at position 3064 of SEQ ID NO: 1243306
agucguugcccugugguua

SEQ ID NO: 1407909 - RNA, 19 nt, Artificial Sequence
  Description of Artificial Sequence: Synthetic oligonucleotide
  Antisense strand to SEQ ID NO: 1407908
uaaccacagggcaacgacu

SEQ ID NO: 1407910 - RNA, 19 nt, Artificial Sequence
  Description of Artificial Sequence: Synthetic oligonucleotide
  Sense strand starting at position 3078 of SEQ ID NO: 1243306
gguuauuuguggagggauu

SEQ ID NO: 1407911 - RNA, 19 nt, Artificial Sequence
  Description of Artificial Sequence: Synthetic oligonucleotide
  Antisense strand to SEQ ID NO: 1407910
aaucccuccacaaauaacc

SEQ ID NO: 1407912 - RNA, 19 nt, Artificial Sequence
  Description of Artificial Sequence: Synthetic oligonucleotide
  Sense strand starting at position 3113 of SEQ ID NO: 1243306
ucagacuuugucugaacag

SEQ ID NO: 1407913 - RNA, 19 nt, Artificial Sequence
  Description of Artificial Sequence: Synthetic oligonucleotide
  Antisense strand to SEQ ID NO: 1407912
cuguucagacaaagucuga

SEQ ID NO: 1407914 - RNA, 19 nt, Artificial Sequence
  Description of Artificial Sequence: Synthetic oligonucleotide
  Sense strand starting at position 3193 of SEQ ID NO: 1243306
ccagcaugacuuggagacu

SEQ ID NO: 1407915 - RNA, 19 nt, Artificial Sequence
  Description of Artificial Sequence: Synthetic oligonucleotide
  Antisense strand to SEQ ID NO: 1407914
agucuccaagucaugcugg

SEQ ID NO: 1407916 - RNA, 19 nt, Artificial Sequence
  Description of Artificial Sequence: Synthetic oligonucleotide
  Sense strand starting at position 3542 of SEQ ID NO: 1243306
uuggguacccguuggauuu

SEQ ID NO: 1407917 - RNA, 19 nt, Artificial Sequence
  Description of Artificial Sequence: Synthetic oligonucleotide
  Antisense strand to SEQ ID NO: 1407916
aaauccaacggguacccaa

SEQ ID NO: 1407918 - RNA, 19 nt, Artificial Sequence
  Description of Artificial Sequence: Synthetic oligonucleotide
  Sense strand starting at position 3569 of SEQ ID NO: 1243306
ugacauguaaagugaguua

SEQ ID NO: 1407919 - RNA, 19 nt, Artificial Sequence
  Description of Artificial Sequence: Synthetic oligonucleotide
  Antisense strand to SEQ ID NO: 1407918
uaacucacuuuacauguca

SEQ ID NO: 1407920 - RNA, 19 nt, Artificial Sequence
  Description of Artificial Sequence: Synthetic oligonucleotide
  Sense strand starting at position 3582 of SEQ ID NO: 1243306
gaguuagagucucugcauu

SEQ ID NO: 1407921 - RNA, 19 nt, Artificial Sequence
  Description of Artificial Sequence: Synthetic oligonucleotide
  Antisense strand to SEQ ID NO: 1407920
aaugcagagacucuaacuc

SEQ ID NO: 1407922 - RNA, 19 nt, Artificial Sequence
  Description of Artificial Sequence: Synthetic oligonucleotide
  Sense strand starting at position 3584 of SEQ ID NO: 1243306
guuagagucucugcauuac

SEQ ID NO: 1407923 - RNA, 19 nt, Artificial Sequence
  Description of Artificial Sequence: Synthetic oligonucleotide
  Antisense strand to SEQ ID NO: 1407922
guaaugcagagacucuaac

SEQ ID NO: 1407924 - RNA, 19 nt, Artificial Sequence
  Description of Artificial Sequence: Synthetic oligonucleotide
  Sense strand starting at position 3725 of SEQ ID NO: 1243306
ggcggaauucucugaggug

SEQ ID NO: 1407925 - RNA, 19 nt, Artificial Sequence
  Description of Artificial Sequence: Synthetic oligonucleotide
  Antisense strand to SEQ ID NO: 1407924
caccucagagaauuccgcc

SEQ ID NO: 1407926 - RNA, 19 nt, Artificial Sequence
  Description of Artificial Sequence: Synthetic oligonucleotide
  Sense strand starting at position 3756 of SEQ ID NO: 1243306
aguggucagaggugcuaaa

SEQ ID NO: 1407927 - RNA, 19 nt, Artificial Sequence
  Description of Artificial Sequence: Synthetic oligonucleotide
  Antisense strand to SEQ ID NO: 1407926
uuuagcaccucugaccacu

SEQ ID NO: 1407928 - RNA, 19 nt, Artificial Sequence
  Description of Artificial Sequence: Synthetic oligonucleotide
  Sense strand starting at position 3907 of SEQ ID NO: 1243306
uuuaaugcucugcaguaau

SEQ ID NO: 1407929 - RNA, 19 nt, Artificial Sequence
  Description of Artificial Sequence: Synthetic oligonucleotide
  Antisense strand to SEQ ID NO: 1407928
auuacugcagagcauuaaa

SEQ ID NO: 1407930 - RNA, 19 nt, Artificial Sequence
  Description of Artificial Sequence: Synthetic oligonucleotide
  Sense strand starting at position 3925 of SEQ ID NO: 1243306
ugucauuuggccugcgaau

SEQ ID NO: 1407931 - RNA, 19 nt, Artificial Sequence
  Description of Artificial Sequence: Synthetic oligonucleotide
  Antisense strand to SEQ ID NO: 1407930
auucgcaggccaaaugaca

SEQ ID NO: 1407932 - RNA, 19 nt, Artificial Sequence
  Description of Artificial Sequence: Synthetic oligonucleotide
  Sense strand starting at position 3927 of SEQ ID NO: 1243306
ucauuuggccugcgaauaa

SEQ ID NO: 1407933 - RNA, 19 nt, Artificial Sequence
  Description of Artificial Sequence: Synthetic oligonucleotide
  Antisense strand to SEQ ID NO: 1407932
uuauucgcaggccaaauga

SEQ ID NO: 1407934 - RNA, 19 nt, Artificial Sequence
  Description of Artificial Sequence: Synthetic oligonucleotide
  Sense strand starting at position 20 of SEQ ID NO: 1243307
cauguaagaguuuagcaaa

SEQ ID NO: 1407935 - RNA, 19 nt, Artificial Sequence
  Description of Artificial Sequence: Synthetic oligonucleotide
  Antisense strand to SEQ ID NO: 1407934
uuugcuaaacucuuacaug

SEQ ID NO: 1407936 - RNA, 19 nt, Artificial Sequence
  Description of Artificial Sequence: Synthetic oligonucleotide
  Sense strand starting at position 47 of SEQ ID NO: 1243307
acugcagaaugugcucaaa

SEQ ID NO: 1407937 - RNA, 19 nt, Artificial Sequence
  Description of Artificial Sequence: Synthetic oligonucleotide
  Antisense strand to SEQ ID NO: 1407936
uuugagcacauucugcagu

SEQ ID NO: 1407938 - RNA, 19 nt, Artificial Sequence
  Description of Artificial Sequence: Synthetic oligonucleotide
  Sense strand starting at position 49 of SEQ ID NO: 1243307
ugcagaaugugcucaaaua

SEQ ID NO: 1407939 - RNA, 19 nt, Artificial Sequence
  Description of Artificial Sequence: Synthetic oligonucleotide
  Antisense strand to SEQ ID NO: 1407938
uauuugagcacauucugca

SEQ ID NO: 1407940 - RNA, 19 nt, Artificial Sequence
  Description of Artificial Sequence: Synthetic oligonucleotide
  Sense strand starting at position 50 of SEQ ID NO: 1243307
gcagaaugugcucaaauaa

SEQ ID NO: 1407941 - RNA, 19 nt, Artificial Sequence
  Description of Artificial Sequence: Synthetic oligonucleotide
  Antisense strand to SEQ ID NO: 1407940
uuauuugagcacauucugc

SEQ ID NO: 1407942 - RNA, 19 nt, Artificial Sequence
  Description of Artificial Sequence: Synthetic oligonucleotide
  Sense strand starting at position 146 of SEQ ID NO: 1243307
cuaguaaggcucugcacaa

SEQ ID NO: 1407943 - RNA, 19 nt, Artificial Sequence
  Description of Artificial Sequence: Synthetic oligonucleotide
  Antisense strand to SEQ ID NO: 1407942
uugugcagagccuuacuag

SEQ ID NO: 1407944 - RNA, 19 nt, Artificial Sequence
  Description of Artificial Sequence: Synthetic oligonucleotide
  Sense strand starting at position 170 of SEQ ID NO: 1243307
aggaguuguuaagugaaga

SEQ ID NO: 1407945 - RNA, 19 nt, Artificial Sequence
  Description of Artificial Sequence: Synthetic oligonucleotide
  Antisense strand to SEQ ID NO: 1407944
ucuucacuuaacaacuccu

SEQ ID NO: 1407946 - RNA, 19 nt, Artificial Sequence
  Description of Artificial Sequence: Synthetic oligonucleotide
  Sense strand starting at position 171 of SEQ ID NO: 1243307
ggaguuguuaagugaagau

SEQ ID NO: 1407947 - RNA, 19 nt, Artificial Sequence
  Description of Artificial Sequence: Synthetic oligonucleotide
  Antisense strand to SEQ ID NO: 1407946
aucuucacuuaacaacucc

SEQ ID NO: 1407948 - RNA, 19 nt, Artificial Sequence
  Description of Artificial Sequence: Synthetic oligonucleotide
  Sense strand starting at position 175 of SEQ ID NO: 1243307
uuguuaagugaagaucuca

SEQ ID NO: 1407949 - RNA, 19 nt, Artificial Sequence
  Description of Artificial Sequence: Synthetic oligonucleotide
  Antisense strand to SEQ ID NO: 1407948
ugagaucuucacuuaacaa

SEQ ID NO: 1407950 - RNA, 19 nt, Artificial Sequence
  Description of Artificial Sequence: Synthetic oligonucleotide
  Sense strand starting at position 196 of SEQ ID NO: 1243307
aauggagucucagcuacuu

SEQ ID NO: 1407951 - RNA, 19 nt, Artificial Sequence
  Description of Artificial Sequence: Synthetic oligonucleotide
  Antisense strand to SEQ ID NO: 1407950
aaguagcugagacuccauu

SEQ ID NO: 1407952 - RNA, 19 nt, Artificial Sequence
  Description of Artificial Sequence: Synthetic oligonucleotide
  Sense strand starting at position 432 of SEQ ID NO: 1243307
gcuuuagaacaguaagguu

SEQ ID NO: 1407953 - RNA, 19 nt, Artificial Sequence
  Description of Artificial Sequence: Synthetic oligonucleotide
  Antisense strand to SEQ ID NO: 1407952
aaccuuacuguucuaaagc

SEQ ID NO: 1407954 - RNA, 19 nt, Artificial Sequence
  Description of Artificial Sequence: Synthetic oligonucleotide
  Sense strand starting at position 441 of SEQ ID NO: 1243307
caguaagguucugcagaca

SEQ ID NO: 1407955 - RNA, 19 nt, Artificial Sequence
  Description of Artificial Sequence: Synthetic oligonucleotide
  Antisense strand to SEQ ID NO: 1407954
ugucugcagaaccuuacug

SEQ ID NO: 1407956 - RNA, 19 nt, Artificial Sequence
  Description of Artificial Sequence: Synthetic oligonucleotide
  Sense strand starting at position 493 of SEQ ID NO: 1243307
cucggacaaucagugagua

SEQ ID NO: 1407957 - RNA, 19 nt, Artificial Sequence
  Description of Artificial Sequence: Synthetic oligonucleotide
  Antisense strand to SEQ ID NO: 1407956
uacucacugauuguccgag

SEQ ID NO: 1407958 - RNA, 19 nt, Artificial Sequence
  Description of Artificial Sequence: Synthetic oligonucleotide
  Sense strand starting at position 494 of SEQ ID NO: 1243307
ucggacaaucagugaguau

SEQ ID NO: 1407959 - RNA, 19 nt, Artificial Sequence
  Description of Artificial Sequence: Synthetic oligonucleotide
  Antisense strand to SEQ ID NO: 1407958
auacucacugauuguccga

SEQ ID NO: 1407960 - RNA, 19 nt, Artificial Sequence
  Description of Artificial Sequence: Synthetic oligonucleotide
  Sense strand starting at position 495 of SEQ ID NO: 1243307
cggacaaucagugaguauc

SEQ ID NO: 1407961 - RNA, 19 nt, Artificial Sequence
  Description of Artificial Sequence: Synthetic oligonucleotide
  Antisense strand to SEQ ID NO: 1407960
gauacucacugauuguccg

SEQ ID NO: 1407962 - RNA, 19 nt, Artificial Sequence
  Description of Artificial Sequence: Synthetic oligonucleotide
  Sense strand starting at position 497 of SEQ ID NO: 1243307
gacaaucagugaguaucau

SEQ ID NO: 1407963 - RNA, 19 nt, Artificial Sequence
  Description of Artificial Sequence: Synthetic oligonucleotide
  Antisense strand to SEQ ID NO: 1407962
augauacucacugauuguc

SEQ ID NO: 1407964 - RNA, 19 nt, Artificial Sequence
  Description of Artificial Sequence: Synthetic oligonucleotide
  Sense strand starting at position 498 of SEQ ID NO: 1243307
acaaucagugaguaucauu

SEQ ID NO: 1407965 - RNA, 19 nt, Artificial Sequence
  Description of Artificial Sequence: Synthetic oligonucleotide
  Antisense strand to SEQ ID NO: 1407964
aaugauacucacugauugu

SEQ ID NO: 1407966 - RNA, 19 nt, Artificial Sequence
  Description of Artificial Sequence: Synthetic oligonucleotide
  Sense strand starting at position 650 of SEQ ID NO: 1243307
uauaguuacccagggcauu

SEQ ID NO: 1407967 - RNA, 19 nt, Artificial Sequence
  Description of Artificial Sequence: Synthetic oligonucleotide
  Antisense strand to SEQ ID NO: 1407966
aaugcccuggguaacuaua

SEQ ID NO: 1407968 - RNA, 19 nt, Artificial Sequence
  Description of Artificial Sequence: Synthetic oligonucleotide
  Sense strand starting at position 651 of SEQ ID NO: 1243307
auaguuacccagggcauua

SEQ ID NO: 1407969 - RNA, 19 nt, Artificial Sequence
  Description of Artificial Sequence: Synthetic oligonucleotide
  Antisense strand to SEQ ID NO: 1407968
uaaugcccuggguaacuau

SEQ ID NO: 1407970 - RNA, 19 nt, Artificial Sequence
  Description of Artificial Sequence: Synthetic oligonucleotide
  Sense strand starting at position 691 of SEQ ID NO: 1243307
aggagcaagaguuguaucu

SEQ ID NO: 1407971 - RNA, 19 nt, Artificial Sequence
  Description of Artificial Sequence: Synthetic oligonucleotide
  Antisense strand to SEQ ID NO: 1407970
agauacaacucuugcuccu

SEQ ID NO: 1407972 - RNA, 19 nt, Artificial Sequence
  Description of Artificial Sequence: Synthetic oligonucleotide
  Sense strand starting at position 859 of SEQ ID NO: 1243307
accugaaauuccuuaguag

SEQ ID NO: 1407973 - RNA, 19 nt, Artificial Sequence
  Description of Artificial Sequence: Synthetic oligonucleotide
  Antisense strand to SEQ ID NO: 1407972
cuacuaaggaauuucaggu

SEQ ID NO: 1407974 - RNA, 19 nt, Artificial Sequence
  Description of Artificial Sequence: Synthetic oligonucleotide
  Sense strand starting at position 860 of SEQ ID NO: 1243307
ccugaaauuccuuaguagc

SEQ ID NO: 1407975 - RNA, 19 nt, Artificial Sequence
  Description of Artificial Sequence: Synthetic oligonucleotide
  Antisense strand to SEQ ID NO: 1407974
gcuacuaaggaauuucagg

SEQ ID NO: 1407976 - RNA, 19 nt, Artificial Sequence
  Description of Artificial Sequence: Synthetic oligonucleotide
  Sense strand starting at position 862 of SEQ ID NO: 1243307
ugaaauuccuuaguagcca

SEQ ID NO: 1407977 - RNA, 19 nt, Artificial Sequence
  Description of Artificial Sequence: Synthetic oligonucleotide
  Antisense strand to SEQ ID NO: 1407976
uggcuacuaaggaauuuca

SEQ ID NO: 1407978 - RNA, 19 nt, Artificial Sequence
  Description of Artificial Sequence: Synthetic oligonucleotide
  Sense strand starting at position 1141 of SEQ ID NO: 1243307
gaacuaagaucugcccgaa

SEQ ID NO: 1407979 - RNA, 19 nt, Artificial Sequence
  Description of Artificial Sequence: Synthetic oligonucleotide
  Antisense strand to SEQ ID NO: 1407978
uucgggcagaucuuaguuc

SEQ ID NO: 1407980 - RNA, 19 nt, Artificial Sequence
  Description of Artificial Sequence: Synthetic oligonucleotide
  Sense strand starting at position 1145 of SEQ ID NO: 1243307
uaagaucugcccgaaugua

SEQ ID NO: 1407981 - RNA, 19 nt, Artificial Sequence
  Description of Artificial Sequence: Synthetic oligonucleotide
  Antisense strand to SEQ ID NO: 1407980
uacauucgggcagaucuua

SEQ ID NO: 1407982 - RNA, 19 nt, Artificial Sequence
  Description of Artificial Sequence: Synthetic oligonucleotide
  Sense strand starting at position 1154 of SEQ ID NO: 1243307
cccgaauguacuuggugaa

SEQ ID NO: 1407983 - RNA, 19 nt, Artificial Sequence
  Description of Artificial Sequence: Synthetic oligonucleotide
  Antisense strand to SEQ ID NO: 1407982
uucaccaaguacauucggg

SEQ ID NO: 1407984 - RNA, 19 nt, Artificial Sequence
  Description of Artificial Sequence: Synthetic oligonucleotide
  Sense strand starting at position 1155 of SEQ ID NO: 1243307
ccgaauguacuuggugaaa

SEQ ID NO: 1407985 - RNA, 19 nt, Artificial Sequence
  Description of Artificial Sequence: Synthetic oligonucleotide
  Antisense strand to SEQ ID NO: 1407984
uuucaccaaguacauucgg

SEQ ID NO: 1407986 - RNA, 19 nt, Artificial Sequence
  Description of Artificial Sequence: Synthetic oligonucleotide
  Sense strand starting at position 1248 of SEQ ID NO: 1243307
ggucgagugcuagaaagca

SEQ ID NO: 1407987 - RNA, 19 nt, Artificial Sequence
  Description of Artificial Sequence: Synthetic oligonucleotide
  Antisense strand to SEQ ID NO: 1407986
ugcuuucuagcacucgacc

SEQ ID NO: 1407988 - RNA, 19 nt, Artificial Sequence
  Description of Artificial Sequence: Synthetic oligonucleotide
  Sense strand starting at position 1381 of SEQ ID NO: 1243307
guuaaaucucgaggagagg

SEQ ID NO: 1407989 - RNA, 19 nt, Artificial Sequence
  Description of Artificial Sequence: Synthetic oligonucleotide
  Antisense strand to SEQ ID NO: 1407988
ccucuccucgagauuuaac

SEQ ID NO: 1407990 - RNA, 19 nt, Artificial Sequence
  Description of Artificial Sequence: Synthetic oligonucleotide
  Sense strand starting at position 1607 of SEQ ID NO: 1243307
ccgauaauugcacacggga

SEQ ID NO: 1407991 - RNA, 19 nt, Artificial Sequence
  Description of Artificial Sequence: Synthetic oligonucleotide
  Antisense strand to SEQ ID NO: 1407990
ucccgugugcaauuaucgg

SEQ ID NO: 1407992 - RNA, 19 nt, Artificial Sequence
  Description of Artificial Sequence: Synthetic oligonucleotide
  Sense strand starting at position 1609 of SEQ ID NO: 1243307
gauaauugcacacgggagu

SEQ ID NO: 1407993 - RNA, 19 nt, Artificial Sequence
  Description of Artificial Sequence: Synthetic oligonucleotide
  Antisense strand to SEQ ID NO: 1407992
acucccgugugcaauuauc

SEQ ID NO: 1407994 - RNA, 19 nt, Artificial Sequence
  Description of Artificial Sequence: Synthetic oligonucleotide
  Sense strand starting at position 1643 of SEQ ID NO: 1243307
ggaguacacguuugaauua

SEQ ID NO: 1407995 - RNA, 19 nt, Artificial Sequence
  Description of Artificial Sequence: Synthetic oligonucleotide
  Antisense strand to SEQ ID NO: 1407994
uaauucaaacguguacucc

SEQ ID NO: 1407996 - RNA, 19 nt, Artificial Sequence
  Description of Artificial Sequence: Synthetic oligonucleotide
  Sense strand starting at position 1654 of SEQ ID NO: 1243307
uugaauuaaugacuccgaa

SEQ ID NO: 1407997 - RNA, 19 nt, Artificial Sequence
  Description of Artificial Sequence: Synthetic oligonucleotide
  Antisense strand to SEQ ID NO: 1407996
uucggagucauuaauucaa

SEQ ID NO: 1407998 - RNA, 19 nt, Artificial Sequence
  Description of Artificial Sequence: Synthetic oligonucleotide
  Sense strand starting at position 2221 of SEQ ID NO: 1243307
gccgcucugacgucagagu

SEQ ID NO: 1407999 - RNA, 19 nt, Artificial Sequence
  Description of Artificial Sequence: Synthetic oligonucleotide
  Antisense strand to SEQ ID NO: 1407998
acucugacgucagagcggc

SEQ ID NO: 1408000 - RNA, 19 nt, Artificial Sequence
  Description of Artificial Sequence: Synthetic oligonucleotide
  Sense strand starting at position 2312 of SEQ ID NO: 1243307
ggaagcguuaaagagucaa

SEQ ID NO: 1408001 - RNA, 19 nt, Artificial Sequence
  Description of Artificial Sequence: Synthetic oligonucleotide
  Antisense strand to SEQ ID NO: 1408000
uugacucuuuaacgcuucc

SEQ ID NO: 1408002 - RNA, 19 nt, Artificial Sequence
  Description of Artificial Sequence: Synthetic oligonucleotide
  Sense strand starting at position 2316 of SEQ ID NO: 1243307
gcguuaaagagucaaggca

SEQ ID NO: 1408003 - RNA, 19 nt, Artificial Sequence
  Description of Artificial Sequence: Synthetic oligonucleotide
  Antisense strand to SEQ ID NO: 1408002
ugccuugacucuuuaacgc

SEQ ID NO: 1408004 - RNA, 19 nt, Artificial Sequence
  Description of Artificial Sequence: Synthetic oligonucleotide
  Sense strand starting at position 2378 of SEQ ID NO: 1243307
cgguaaagucccugggacu

SEQ ID NO: 1408005 - RNA, 19 nt, Artificial Sequence
  Description of Artificial Sequence: Synthetic oligonucleotide
  Antisense strand to SEQ ID NO: 1408004
agucccagggacuuuaccg

SEQ ID NO: 1408006 - RNA, 19 nt, Artificial Sequence
  Description of Artificial Sequence: Synthetic oligonucleotide
  Sense strand starting at position 3590 of SEQ ID NO: 1243307
agucguugcccugugguua

SEQ ID NO: 1408007 - RNA, 19 nt, Artificial Sequence
  Description of Artificial Sequence: Synthetic oligonucleotide
  Antisense strand to SEQ ID NO: 1408006
uaaccacagggcaacgacu

SEQ ID NO: 1408008 - RNA, 19 nt, Artificial Sequence
  Description of Artificial Sequence: Synthetic oligonucleotide
  Sense strand starting at position 3604 of SEQ ID NO: 1243307
gguuauuuguggagggauu

SEQ ID NO: 1408009 - RNA, 19 nt, Artificial Sequence
  Description of Artificial Sequence: Synthetic oligonucleotide
  Antisense strand to SEQ ID NO: 1408008
aaucccuccacaaauaacc

SEQ ID NO: 1408010 - RNA, 19 nt, Artificial Sequence
  Description of Artificial Sequence: Synthetic oligonucleotide
  Sense strand starting at position 3639 of SEQ ID NO: 1243307
ucagacuuugucugaacag

SEQ ID NO: 1408011 - RNA, 19 nt, Artificial Sequence
  Description of Artificial Sequence: Synthetic oligonucleotide
  Antisense strand to SEQ ID NO: 1408010
cuguucagacaaagucuga

SEQ ID NO: 1408012 - RNA, 19 nt, Artificial Sequence
  Description of Artificial Sequence: Synthetic oligonucleotide
  Sense strand starting at position 3719 of SEQ ID NO: 1243307
ccagcaugacuuggagacu

SEQ ID NO: 1408013 - RNA, 19 nt, Artificial Sequence
  Description of Artificial Sequence: Synthetic oligonucleotide
  Antisense strand to SEQ ID NO: 1408012
agucuccaagucaugcugg

SEQ ID NO: 1408014 - RNA, 19 nt, Artificial Sequence
  Description of Artificial Sequence: Synthetic oligonucleotide
  Sense strand starting at position 162 of SEQ ID NO: 1243308
gugugaggguugcugucau

SEQ ID NO: 1408015 - RNA, 19 nt, Artificial Sequence
  Description of Artificial Sequence: Synthetic oligonucleotide
  Antisense strand to SEQ ID NO: 1408014
augacagcaacccucacac

SEQ ID NO: 1408016 - RNA, 19 nt, Artificial Sequence
  Description of Artificial Sequence: Synthetic oligonucleotide
  Sense strand starting at position 361 of SEQ ID NO: 1243308
ccuggucugugcuguaaca

SEQ ID NO: 1408017 - RNA, 19 nt, Artificial Sequence
  Description of Artificial Sequence: Synthetic oligonucleotide
  Antisense strand to SEQ ID NO: 1408016
uguuacagcacagaccagg

SEQ ID NO: 1408018 - RNA, 19 nt, Artificial Sequence
  Description of Artificial Sequence: Synthetic oligonucleotide
  Sense strand starting at position 363 of SEQ ID NO: 1243308
uggucugugcuguaacaug

SEQ ID NO: 1408019 - RNA, 19 nt, Artificial Sequence
  Description of Artificial Sequence: Synthetic oligonucleotide
  Antisense strand to SEQ ID NO: 1408018
cauguuacagcacagacca

SEQ ID NO: 1408020 - RNA, 19 nt, Artificial Sequence
  Description of Artificial Sequence: Synthetic oligonucleotide
  Sense strand starting at position 373 of SEQ ID NO: 1243308
uguaacauguggcgucaga

SEQ ID NO: 1408021 - RNA, 19 nt, Artificial Sequence
  Description of Artificial Sequence: Synthetic oligonucleotide
  Antisense strand to SEQ ID NO: 1408020
ucugacgccacauguuaca

SEQ ID NO: 1408022 - RNA, 19 nt, Artificial Sequence
  Description of Artificial Sequence: Synthetic oligonucleotide
  Sense strand starting at position 566 of SEQ ID NO: 1243308
ggaugaaguucucuugcuu

SEQ ID NO: 1408023 - RNA, 19 nt, Artificial Sequence
  Description of Artificial Sequence: Synthetic oligonucleotide
  Antisense strand to SEQ ID NO: 1408022
aagcaagagaacuucaucc

SEQ ID NO: 1408024 - RNA, 19 nt, Artificial Sequence
  Description of Artificial Sequence: Synthetic oligonucleotide
  Sense strand starting at position 813 of SEQ ID NO: 1243308
gagcccgaucucugcuuau

SEQ ID NO: 1408025 - RNA, 19 nt, Artificial Sequence
  Description of Artificial Sequence: Synthetic oligonucleotide
  Antisense strand to SEQ ID NO: 1408024
auaagcagagaucgggcuc

SEQ ID NO: 1408026 - RNA, 19 nt, Artificial Sequence
  Description of Artificial Sequence: Synthetic oligonucleotide
  Sense strand starting at position 817 of SEQ ID NO: 1243308
ccgaucucugcuuauacca

SEQ ID NO: 1408027 - RNA, 19 nt, Artificial Sequence
  Description of Artificial Sequence: Synthetic oligonucleotide
  Antisense strand to SEQ ID NO: 1408026
ugguauaagcagagaucgg

SEQ ID NO: 1408028 - RNA, 19 nt, Artificial Sequence
  Description of Artificial Sequence: Synthetic oligonucleotide
  Sense strand starting at position 939 of SEQ ID NO: 1243308
ggaacaaggcaguaguuau

SEQ ID NO: 1408029 - RNA, 19 nt, Artificial Sequence
  Description of Artificial Sequence: Synthetic oligonucleotide
  Antisense strand to SEQ ID NO: 1408028
auaacuacugccuuguucc

SEQ ID NO: 1408030 - RNA, 19 nt, Artificial Sequence
  Description of Artificial Sequence: Synthetic oligonucleotide
  Sense strand starting at position 943 of SEQ ID NO: 1243308
caaggcaguaguuauggua

SEQ ID NO: 1408031 - RNA, 19 nt, Artificial Sequence
  Description of Artificial Sequence: Synthetic oligonucleotide
  Antisense strand to SEQ ID NO: 1408030
uaccauaacuacugccuug

SEQ ID NO: 1408032 - RNA, 19 nt, Artificial Sequence
  Description of Artificial Sequence: Synthetic oligonucleotide
  Sense strand starting at position 994 of SEQ ID NO: 1243308
ccgguuacuucugugagcu

SEQ ID NO: 1408033 - RNA, 19 nt, Artificial Sequence
  Description of Artificial Sequence: Synthetic oligonucleotide
  Antisense strand to SEQ ID NO: 1408032
agcucacagaaguaaccgg

SEQ ID NO: 1408034 - RNA, 19 nt, Artificial Sequence
  Description of Artificial Sequence: Synthetic oligonucleotide
  Sense strand starting at position 995 of SEQ ID NO: 1243308
cgguuacuucugugagcug

SEQ ID NO: 1408035 - RNA, 19 nt, Artificial Sequence
  Description of Artificial Sequence: Synthetic oligonucleotide
  Antisense strand to SEQ ID NO: 1408034
cagcucacagaaguaaccg

SEQ ID NO: 1408036 - RNA, 19 nt, Artificial Sequence
  Description of Artificial Sequence: Synthetic oligonucleotide
  Sense strand starting at position 1006 of SEQ ID NO: 1243308
gugagcugccuggcucauu

SEQ ID NO: 1408037 - RNA, 19 nt, Artificial Sequence
  Description of Artificial Sequence: Synthetic oligonucleotide
  Antisense strand to SEQ ID NO: 1408036
aaugagccaggcagcucac

SEQ ID NO: 1408038 - RNA, 19 nt, Artificial Sequence
  Description of Artificial Sequence: Synthetic oligonucleotide
  Sense strand starting at position 1254 of SEQ ID NO: 1243308
gcacacagguacuuauaua

SEQ ID NO: 1408039 - RNA, 19 nt, Artificial Sequence
  Description of Artificial Sequence: Synthetic oligonucleotide
  Antisense strand to SEQ ID NO: 1408038
uauauaaguaccugugugc

SEQ ID NO: 1408040 - RNA, 19 nt, Artificial Sequence
  Description of Artificial Sequence: Synthetic oligonucleotide
  Sense strand starting at position 1423 of SEQ ID NO: 1243308
ggucguuaccuugaggaug

SEQ ID NO: 1408041 - RNA, 19 nt, Artificial Sequence
  Description of Artificial Sequence: Synthetic oligonucleotide
  Antisense strand to SEQ ID NO: 1408040
cauccucaagguaacgacc

SEQ ID NO: 1408042 - RNA, 19 nt, Artificial Sequence
  Description of Artificial Sequence: Synthetic oligonucleotide
  Sense strand starting at position 2248 of SEQ ID NO: 1243308
acagcuguguuaccaagaa

SEQ ID NO: 1408043 - RNA, 19 nt, Artificial Sequence
  Description of Artificial Sequence: Synthetic oligonucleotide
  Antisense strand to SEQ ID NO: 1408042
uucuugguaacacagcugu

SEQ ID NO: 1408044 - RNA, 19 nt, Artificial Sequence
  Description of Artificial Sequence: Synthetic oligonucleotide
  Sense strand starting at position 2252 of SEQ ID NO: 1243308
cuguguuaccaagaagugu

SEQ ID NO: 1408045 - RNA, 19 nt, Artificial Sequence
  Description of Artificial Sequence: Synthetic oligonucleotide
  Antisense strand to SEQ ID NO: 1408044
acacuucuugguaacacag

SEQ ID NO: 1408046 - RNA, 19 nt, Artificial Sequence
  Description of Artificial Sequence: Synthetic oligonucleotide
  Sense strand starting at position 2775 of SEQ ID NO: 1243308
aguuucuaaucucugaaag

SEQ ID NO: 1408047 - RNA, 19 nt, Artificial Sequence
  Description of Artificial Sequence: Synthetic oligonucleotide
  Antisense strand to SEQ ID NO: 1408046
cuuucagagauuagaaacu

SEQ ID NO: 1408048 - RNA, 19 nt, Artificial Sequence
  Description of Artificial Sequence: Synthetic oligonucleotide
  Sense strand starting at position 2776 of SEQ ID NO: 1243308
guuucuaaucucugaaagg

SEQ ID NO: 1408049 - RNA, 19 nt, Artificial Sequence
  Description of Artificial Sequence: Synthetic oligonucleotide
  Antisense strand to SEQ ID NO: 1408048
ccuuucagagauuagaaac

SEQ ID NO: 1408050 - RNA, 19 nt, Artificial Sequence
  Description of Artificial Sequence: Synthetic oligonucleotide
  Sense strand starting at position 2873 of SEQ ID NO: 1243308
uggccuuccuucugcaaau

SEQ ID NO: 1408051 - RNA, 19 nt, Artificial Sequence
  Description of Artificial Sequence: Synthetic oligonucleotide
  Antisense strand to SEQ ID NO: 1408050
auuugcagaaggaaggcca

SEQ ID NO: 1408052 - RNA, 19 nt, Artificial Sequence
  Description of Artificial Sequence: Synthetic oligonucleotide
  Sense strand starting at position 2874 of SEQ ID NO: 1243308
ggccuuccuucugcaaauu

SEQ ID NO: 1408053 - RNA, 19 nt, Artificial Sequence
  Description of Artificial Sequence: Synthetic oligonucleotide
  Antisense strand to SEQ ID NO: 1408052
aauuugcagaaggaaggcc

SEQ ID NO: 1408054 - RNA, 19 nt, Artificial Sequence
  Description of Artificial Sequence: Synthetic oligonucleotide
  Sense strand starting at position 2932 of SEQ ID NO: 1243308
acugacaucccuuggguaa

SEQ ID NO: 1408055 - RNA, 19 nt, Artificial Sequence
  Description of Artificial Sequence: Synthetic oligonucleotide
  Antisense strand to SEQ ID NO: 1408054
uuacccaagggaugucagu

SEQ ID NO: 1408056 - RNA, 19 nt, Artificial Sequence
  Description of Artificial Sequence: Synthetic oligonucleotide
  Sense strand starting at position 2934 of SEQ ID NO: 1243308
ugacaucccuuggguaacu

SEQ ID NO: 1408057 - RNA, 19 nt, Artificial Sequence
  Description of Artificial Sequence: Synthetic oligonucleotide
  Antisense strand to SEQ ID NO: 1408056
aguuacccaagggauguca

SEQ ID NO: 1408058 - RNA, 19 nt, Artificial Sequence
  Description of Artificial Sequence: Synthetic oligonucleotide
  Sense strand starting at position 3116 of SEQ ID NO: 1243308
ccaugaugcuggcuggagu

SEQ ID NO: 1408059 - RNA, 19 nt, Artificial Sequence
  Description of Artificial Sequence: Synthetic oligonucleotide
  Antisense strand to SEQ ID NO: 1408058
acuccagccagcaucaugg

SEQ ID NO: 1408060 - RNA, 19 nt, Artificial Sequence
  Description of Artificial Sequence: Synthetic oligonucleotide
  Sense strand starting at position 3138 of SEQ ID NO: 1243308
gacacucguuuccguauca

SEQ ID NO: 1408061 - RNA, 19 nt, Artificial Sequence
  Description of Artificial Sequence: Synthetic oligonucleotide
  Antisense strand to SEQ ID NO: 1408060
ugauacggaaacgaguguc

SEQ ID NO: 1408062 - RNA, 19 nt, Artificial Sequence
  Description of Artificial Sequence: Synthetic oligonucleotide
  Sense strand starting at position 3139 of SEQ ID NO: 1243308
acacucguuuccguaucaa

SEQ ID NO: 1408063 - RNA, 19 nt, Artificial Sequence
  Description of Artificial Sequence: Synthetic oligonucleotide
  Antisense strand to SEQ ID NO: 1408062
uugauacggaaacgagugu

SEQ ID NO: 1408064 - RNA, 19 nt, Artificial Sequence
  Description of Artificial Sequence: Synthetic oligonucleotide
  Sense strand starting at position 3167 of SEQ ID NO: 1243308
cuaagaaaugcucaucguu

SEQ ID NO: 1408065 - RNA, 19 nt, Artificial Sequence
  Description of Artificial Sequence: Synthetic oligonucleotide
  Antisense strand to SEQ ID NO: 1408064
aacgaugagcauuucuuag

SEQ ID NO: 1408066 - RNA, 19 nt, Artificial Sequence
  Description of Artificial Sequence: Synthetic oligonucleotide
  Sense strand starting at position 3363 of SEQ ID NO: 1243308
ugaagagucuguggccuaa

SEQ ID NO: 1408067 - RNA, 19 nt, Artificial Sequence
  Description of Artificial Sequence: Synthetic oligonucleotide
  Antisense strand to SEQ ID NO: 1408066
uuaggccacagacucuuca

SEQ ID NO: 1408068 - RNA, 19 nt, Artificial Sequence
  Description of Artificial Sequence: Synthetic oligonucleotide
  Sense strand starting at position 3686 of SEQ ID NO: 1243308
gacgcuuagacgugaacau

SEQ ID NO: 1408069 - RNA, 19 nt, Artificial Sequence
  Description of Artificial Sequence: Synthetic oligonucleotide
  Antisense strand to SEQ ID NO: 1408068
auguucacgucuaagcguc

SEQ ID NO: 1408070 - RNA, 19 nt, Artificial Sequence
  Description of Artificial Sequence: Synthetic oligonucleotide
  Sense strand starting at position 3785 of SEQ ID NO: 1243308
ggccucuccuuguagggaa

SEQ ID NO: 1408071 - RNA, 19 nt, Artificial Sequence
  Description of Artificial Sequence: Synthetic oligonucleotide
  Antisense strand to SEQ ID NO: 1408070
uucccuacaaggagaggcc

SEQ ID NO: 1408072 - RNA, 19 nt, Artificial Sequence
  Description of Artificial Sequence: Synthetic oligonucleotide
  Sense strand starting at position 3916 of SEQ ID NO: 1243308
aagacaagcucggaagaaa

SEQ ID NO: 1408073 - RNA, 19 nt, Artificial Sequence
  Description of Artificial Sequence: Synthetic oligonucleotide
  Antisense strand to SEQ ID NO: 1408072
uuucuuccgagcuugucuu

SEQ ID NO: 1408074 - RNA, 19 nt, Artificial Sequence
  Description of Artificial Sequence: Synthetic oligonucleotide
  Sense strand starting at position 187 of SEQ ID NO: 1243309
cagaguuaaggucacuuua

SEQ ID NO: 1408075 - RNA, 19 nt, Artificial Sequence
  Description of Artificial Sequence: Synthetic oligonucleotide
  Antisense strand to SEQ ID NO: 1408074
uaaagugaccuuaacucug

SEQ ID NO: 1408076 - RNA, 19 nt, Artificial Sequence
  Description of Artificial Sequence: Synthetic oligonucleotide
  Sense strand starting at position 189 of SEQ ID NO: 1243309
gaguuaaggucacuuuaaa

SEQ ID NO: 1408077 - RNA, 19 nt, Artificial Sequence
  Description of Artificial Sequence: Synthetic oligonucleotide
  Antisense strand to SEQ ID NO: 1408076
uuuaaagugaccuuaacuc

SEQ ID NO: 1408078 - RNA, 19 nt, Artificial Sequence
  Description of Artificial Sequence: Synthetic oligonucleotide
  Sense strand starting at position 288 of SEQ ID NO: 1243309
cuguuauaggaaugaagug

SEQ ID NO: 1408079 - RNA, 19 nt, Artificial Sequence
  Description of Artificial Sequence: Synthetic oligonucleotide
  Antisense strand to SEQ ID NO: 1408078
cacuucauuccuauaacag

SEQ ID NO: 1408080 - RNA, 19 nt, Artificial Sequence
  Description of Artificial Sequence: Synthetic oligonucleotide
  Sense strand starting at position 293 of SEQ ID NO: 1243309
auaggaaugaagugucuca

SEQ ID NO: 1408081 - RNA, 19 nt, Artificial Sequence
  Description of Artificial Sequence: Synthetic oligonucleotide
  Antisense strand to SEQ ID NO: 1408080
ugagacacuucauuccuau

SEQ ID NO: 1408082 - RNA, 19 nt, Artificial Sequence
  Description of Artificial Sequence: Synthetic oligonucleotide
  Sense strand starting at position 398 of SEQ ID NO: 1243309
gguaguugaaaguauuaau

SEQ ID NO: 1408083 - RNA, 19 nt, Artificial Sequence
  Description of Artificial Sequence: Synthetic oligonucleotide
  Antisense strand to SEQ ID NO: 1408082
auuaauacuuucaacuacc

SEQ ID NO: 1408084 - RNA, 19 nt, Artificial Sequence
  Description of Artificial Sequence: Synthetic oligonucleotide
  Sense strand starting at position 508 of SEQ ID NO: 1243309
ucuuacagugcuuaggaga

SEQ ID NO: 1408085 - RNA, 19 nt, Artificial Sequence
  Description of Artificial Sequence: Synthetic oligonucleotide
  Antisense strand to SEQ ID NO: 1408084
ucuccuaagcacuguaaga

SEQ ID NO: 1408086 - RNA, 19 nt, Artificial Sequence
  Description of Artificial Sequence: Synthetic oligonucleotide
  Sense strand starting at position 766 of SEQ ID NO: 1243309
cugaccauccuauguuaga

SEQ ID NO: 1408087 - RNA, 19 nt, Artificial Sequence
  Description of Artificial Sequence: Synthetic oligonucleotide
  Antisense strand to SEQ ID NO: 1408086
ucuaacauaggauggucag

SEQ ID NO: 1408088 - RNA, 19 nt, Artificial Sequence
  Description of Artificial Sequence: Synthetic oligonucleotide
  Sense strand starting at position 767 of SEQ ID NO: 1243309
ugaccauccuauguuagag

SEQ ID NO: 1408089 - RNA, 19 nt, Artificial Sequence
  Description of Artificial Sequence: Synthetic oligonucleotide
  Antisense strand to SEQ ID NO: 1408088
cucuaacauaggaugguca

SEQ ID NO: 1408090 - RNA, 19 nt, Artificial Sequence
  Description of Artificial Sequence: Synthetic oligonucleotide
  Sense strand starting at position 1007 of SEQ ID NO: 1243309
auuguuugucuccacuaaa

SEQ ID NO: 1408091 - RNA, 19 nt, Artificial Sequence
  Description of Artificial Sequence: Synthetic oligonucleotide
  Antisense strand to SEQ ID NO: 1408090
uuuaguggagacaaacaau

SEQ ID NO: 1408092 - RNA, 19 nt, Artificial Sequence
  Description of Artificial Sequence: Synthetic oligonucleotide
  Sense strand starting at position 1038 of SEQ ID NO: 1243309
ucuugagacggguauuagu

SEQ ID NO: 1408093 - RNA, 19 nt, Artificial Sequence
  Description of Artificial Sequence: Synthetic oligonucleotide
  Antisense strand to SEQ ID NO: 1408092
acuaauacccgucucaaga

SEQ ID NO: 1408094 - RNA, 19 nt, Artificial Sequence
  Description of Artificial Sequence: Synthetic oligonucleotide
  Sense strand starting at position 1603 of SEQ ID NO: 1243309
acuccuaauccagggcaaa

SEQ ID NO: 1408095 - RNA, 19 nt, Artificial Sequence
  Description of Artificial Sequence: Synthetic oligonucleotide
  Antisense strand to SEQ ID NO: 1408094
uuugcccuggauuaggagu

SEQ ID NO: 1408096 - RNA, 19 nt, Artificial Sequence
  Description of Artificial Sequence: Synthetic oligonucleotide
  Sense strand starting at position 1604 of SEQ ID NO: 1243309
cuccuaauccagggcaaau

SEQ ID NO: 1408097 - RNA, 19 nt, Artificial Sequence
  Description of Artificial Sequence: Synthetic oligonucleotide
  Antisense strand to SEQ ID NO: 1408096
auuugcccuggauuaggag

SEQ ID NO: 1408098 - RNA, 19 nt, Artificial Sequence
  Description of Artificial Sequence: Synthetic oligonucleotide
  Sense strand starting at position 1632 of SEQ ID NO: 1243309
guguuagggaccuacaacu

SEQ ID NO: 1408099 - RNA, 19 nt, Artificial Sequence
  Description of Artificial Sequence: Synthetic oligonucleotide
  Antisense strand to SEQ ID NO: 1408098
aguuguaggucccuaacac

SEQ ID NO: 1408100 - RNA, 19 nt, Artificial Sequence
  Description of Artificial Sequence: Synthetic oligonucleotide
  Sense strand starting at position 1658 of SEQ ID NO: 1243309
ucuggauagagauggcaau

SEQ ID NO: 1408101 - RNA, 19 nt, Artificial Sequence
  Description of Artificial Sequence: Synthetic oligonucleotide
  Antisense strand to SEQ ID NO: 1408100
auugccaucucuauccaga

SEQ ID NO: 1408102 - RNA, 19 nt, Artificial Sequence
  Description of Artificial Sequence: Synthetic oligonucleotide
  Sense strand starting at position 1659 of SEQ ID NO: 1243309
cuggauagagauggcaauu

SEQ ID NO: 1408103 - RNA, 19 nt, Artificial Sequence
  Description of Artificial Sequence: Synthetic oligonucleotide
  Antisense strand to SEQ ID NO: 1408102
aauugccaucucuauccag

SEQ ID NO: 1408104 - RNA, 19 nt, Artificial Sequence
  Description of Artificial Sequence: Synthetic oligonucleotide
  Sense strand starting at position 2456 of SEQ ID NO: 1243309
ggaugcgcgguguuaaacu

SEQ ID NO: 1408105 - RNA, 19 nt, Artificial Sequence
  Description of Artificial Sequence: Synthetic oligonucleotide
  Antisense strand to SEQ ID NO: 1408104
aguuuaacaccgcgcaucc

SEQ ID NO: 1408106 - RNA, 19 nt, Artificial Sequence
  Description of Artificial Sequence: Synthetic oligonucleotide
  Sense strand starting at position 2486 of SEQ ID NO: 1243309
gggccuugucagcaaggga

SEQ ID NO: 1408107 - RNA, 19 nt, Artificial Sequence
  Description of Artificial Sequence: Synthetic oligonucleotide
  Antisense strand to SEQ ID NO: 1408106
ucccuugcugacaaggccc

SEQ ID NO: 1408108 - RNA, 19 nt, Artificial Sequence
  Description of Artificial Sequence: Synthetic oligonucleotide
  Sense strand starting at position 2631 of SEQ ID NO: 1243309
ugguuaaauuugucgccau

SEQ ID NO: 1408109 - RNA, 19 nt, Artificial Sequence
  Description of Artificial Sequence: Synthetic oligonucleotide
  Antisense strand to SEQ ID NO: 1408108
auggcgacaaauuuaacca

SEQ ID NO: 1408110 - RNA, 19 nt, Artificial Sequence
  Description of Artificial Sequence: Synthetic oligonucleotide
  Sense strand starting at position 2672 of SEQ ID NO: 1243309
uucucagaugacugugauc

SEQ ID NO: 1408111 - RNA, 19 nt, Artificial Sequence
  Description of Artificial Sequence: Synthetic oligonucleotide
  Antisense strand to SEQ ID NO: 1408110
gaucacagucaucugagaa

SEQ ID NO: 1408112 - RNA, 19 nt, Artificial Sequence
  Description of Artificial Sequence: Synthetic oligonucleotide
  Sense strand starting at position 2674 of SEQ ID NO: 1243309
cucagaugacugugaucau

SEQ ID NO: 1408113 - RNA, 19 nt, Artificial Sequence
  Description of Artificial Sequence: Synthetic oligonucleotide
  Antisense strand to SEQ ID NO: 1408112
augaucacagucaucugag

SEQ ID NO: 1408114 - RNA, 19 nt, Artificial Sequence
  Description of Artificial Sequence: Synthetic oligonucleotide
  Sense strand starting at position 2709 of SEQ ID NO: 1243309
cauaauggucucugaggac

SEQ ID NO: 1408115 - RNA, 19 nt, Artificial Sequence
  Description of Artificial Sequence: Synthetic oligonucleotide
  Antisense strand to SEQ ID NO: 1408114
guccucagagaccauuaug

SEQ ID NO: 1408116 - RNA, 19 nt, Artificial Sequence
  Description of Artificial Sequence: Synthetic oligonucleotide
  Sense strand starting at position 2716 of SEQ ID NO: 1243309
gucucugaggacugagauc

SEQ ID NO: 1408117 - RNA, 19 nt, Artificial Sequence
  Description of Artificial Sequence: Synthetic oligonucleotide
  Antisense strand to SEQ ID NO: 1408116
gaucucaguccucagagac

SEQ ID NO: 1408118 - RNA, 19 nt, Artificial Sequence
  Description of Artificial Sequence: Synthetic oligonucleotide
  Sense strand starting at position 2722 of SEQ ID NO: 1243309
gaggacugagaucggcuua

SEQ ID NO: 1408119 - RNA, 19 nt, Artificial Sequence
  Description of Artificial Sequence: Synthetic oligonucleotide
  Antisense strand to SEQ ID NO: 1408118
uaagccgaucucaguccuc

SEQ ID NO: 1408120 - RNA, 19 nt, Artificial Sequence
  Description of Artificial Sequence: Synthetic oligonucleotide
  Sense strand starting at position 2727 of SEQ ID NO: 1243309
cugagaucggcuuagauga

SEQ ID NO: 1408121 - RNA, 19 nt, Artificial Sequence
  Description of Artificial Sequence: Synthetic oligonucleotide
  Antisense strand to SEQ ID NO: 1408120
ucaucuaagccgaucucag

SEQ ID NO: 1408122 - RNA, 19 nt, Artificial Sequence
  Description of Artificial Sequence: Synthetic oligonucleotide
  Sense strand starting at position 2732 of SEQ ID NO: 1243309
aucggcuuagaugaaauau

SEQ ID NO: 1408123 - RNA, 19 nt, Artificial Sequence
  Description of Artificial Sequence: Synthetic oligonucleotide
  Antisense strand to SEQ ID NO: 1408122
auauuucaucuaagccgau

SEQ ID NO: 1408124 - RNA, 19 nt, Artificial Sequence
  Description of Artificial Sequence: Synthetic oligonucleotide
  Sense strand starting at position 2740 of SEQ ID NO: 1243309
agaugaaauaucugugcag

SEQ ID NO: 1408125 - RNA, 19 nt, Artificial Sequence
  Description of Artificial Sequence: Synthetic oligonucleotide
  Antisense strand to SEQ ID NO: 1408124
cugcacagauauuucaucu

SEQ ID NO: 1408126 - RNA, 19 nt, Artificial Sequence
  Description of Artificial Sequence: Synthetic oligonucleotide
  Sense strand starting at position 2744 of SEQ ID NO: 1243309
gaaauaucugugcagucag

SEQ ID NO: 1408127 - RNA, 19 nt, Artificial Sequence
  Description of Artificial Sequence: Synthetic oligonucleotide
  Antisense strand to SEQ ID NO: 1408126
cugacugcacagauauuuc

SEQ ID NO: 1408128 - RNA, 19 nt, Artificial Sequence
  Description of Artificial Sequence: Synthetic oligonucleotide
  Sense strand starting at position 2767 of SEQ ID NO: 1243309
guuucuuuggaacaauugu

SEQ ID NO: 1408129 - RNA, 19 nt, Artificial Sequence
  Description of Artificial Sequence: Synthetic oligonucleotide
  Antisense strand to SEQ ID NO: 1408128
acaauuguuccaaagaaac

SEQ ID NO: 1408130 - RNA, 19 nt, Artificial Sequence
  Description of Artificial Sequence: Synthetic oligonucleotide
  Sense strand starting at position 2956 of SEQ ID NO: 1243309
cuguauuaagugcauaaua

SEQ ID NO: 1408131 - RNA, 19 nt, Artificial Sequence
  Description of Artificial Sequence: Synthetic oligonucleotide
  Antisense strand to SEQ ID NO: 1408130
uauuaugcacuuaauacag

SEQ ID NO: 1408132 - RNA, 19 nt, Artificial Sequence
  Description of Artificial Sequence: Synthetic oligonucleotide
  Sense strand starting at position 3019 of SEQ ID NO: 1243309
uauuauacagauggaguau

SEQ ID NO: 1408133 - RNA, 19 nt, Artificial Sequence
  Description of Artificial Sequence: Synthetic oligonucleotide
  Antisense strand to SEQ ID NO: 1408132
auacuccaucuguauaaua

SEQ ID NO: 1408134 - RNA, 19 nt, Artificial Sequence
  Description of Artificial Sequence: Synthetic oligonucleotide
  Sense strand starting at position 3123 of SEQ ID NO: 1243309
uguugauuugucuacguau

SEQ ID NO: 1408135 - RNA, 19 nt, Artificial Sequence
  Description of Artificial Sequence: Synthetic oligonucleotide
  Antisense strand to SEQ ID NO: 1408134
auacguagacaaaucaaca

SEQ ID NO: 1408136 - RNA, 19 nt, Artificial Sequence
  Description of Artificial Sequence: Synthetic oligonucleotide
  Sense strand starting at position 3125 of SEQ ID NO: 1243309
uugauuugucuacguauau

SEQ ID NO: 1408137 - RNA, 19 nt, Artificial Sequence
  Description of Artificial Sequence: Synthetic oligonucleotide
  Antisense strand to SEQ ID NO: 1408136
auauacguagacaaaucaa

SEQ ID NO: 1408138 - RNA, 19 nt, Artificial Sequence
  Description of Artificial Sequence: Synthetic oligonucleotide
  Sense strand starting at position 3126 of SEQ ID NO: 1243309
ugauuugucuacguauauu

SEQ ID NO: 1408139 - RNA, 19 nt, Artificial Sequence
  Description of Artificial Sequence: Synthetic oligonucleotide
  Antisense strand to SEQ ID NO: 1408138
aauauacguagacaaauca

SEQ ID NO: 1408140 - RNA, 19 nt, Artificial Sequence
  Description of Artificial Sequence: Synthetic oligonucleotide
  Sense strand starting at position 3219 of SEQ ID NO: 1243309
guuggaauagccuauugau

SEQ ID NO: 1408141 - RNA, 19 nt, Artificial Sequence
  Description of Artificial Sequence: Synthetic oligonucleotide
  Antisense strand to SEQ ID NO: 1408140
aucaauaggcuauuccaac

SEQ ID NO: 1408142 - RNA, 19 nt, Artificial Sequence
  Description of Artificial Sequence: Synthetic oligonucleotide
  Sense strand starting at position 3324 of SEQ ID NO: 1243309
agaguaagaucuucgugaa

SEQ ID NO: 1408143 - RNA, 19 nt, Artificial Sequence
  Description of Artificial Sequence: Synthetic oligonucleotide
  Antisense strand to SEQ ID NO: 1408142
uucacgaagaucuuacucu

SEQ ID NO: 1408144 - RNA, 19 nt, Artificial Sequence
  Description of Artificial Sequence: Synthetic oligonucleotide
  Sense strand starting at position 3464 of SEQ ID NO: 1243309
cugcaugaucuggacccua

SEQ ID NO: 1408145 - RNA, 19 nt, Artificial Sequence
  Description of Artificial Sequence: Synthetic oligonucleotide
  Antisense strand to SEQ ID NO: 1408144
uaggguccagaucaugcag

SEQ ID NO: 1408146 - RNA, 19 nt, Artificial Sequence
  Description of Artificial Sequence: Synthetic oligonucleotide
  Sense strand starting at position 3594 of SEQ ID NO: 1243309
acaugucauuugcugccua

SEQ ID NO: 1408147 - RNA, 19 nt, Artificial Sequence
  Description of Artificial Sequence: Synthetic oligonucleotide
  Antisense strand to SEQ ID NO: 1408146
uaggcagcaaaugacaugu

SEQ ID NO: 1408148 - RNA, 19 nt, Artificial Sequence
  Description of Artificial Sequence: Synthetic oligonucleotide
  Sense strand starting at position 3636 of SEQ ID NO: 1243309
agugaauaacaguguuaaa

SEQ ID NO: 1408149 - RNA, 19 nt, Artificial Sequence
  Description of Artificial Sequence: Synthetic oligonucleotide
  Antisense strand to SEQ ID NO: 1408148
uuuaacacuguuauucacu

SEQ ID NO: 1408150 - RNA, 19 nt, Artificial Sequence
  Description of Artificial Sequence: Synthetic oligonucleotide
  Sense strand starting at position 3750 of SEQ ID NO: 1243309
cuauauugaccugaguuau

SEQ ID NO: 1408151 - RNA, 19 nt, Artificial Sequence
  Description of Artificial Sequence: Synthetic oligonucleotide
  Antisense strand to SEQ ID NO: 1408150
auaacucaggucaauauag

SEQ ID NO: 1408152 - RNA, 19 nt, Artificial Sequence
  Description of Artificial Sequence: Synthetic oligonucleotide
  Sense strand starting at position 3810 of SEQ ID NO: 1243309
cugcauaugauguggauaa

SEQ ID NO: 1408153 - RNA, 19 nt, Artificial Sequence
  Description of Artificial Sequence: Synthetic oligonucleotide
  Antisense strand to SEQ ID NO: 1408152
uuauccacaucauaugcag

SEQ ID NO: 1408154 - RNA, 19 nt, Artificial Sequence
  Description of Artificial Sequence: Synthetic oligonucleotide
  Sense strand starting at position 87 of SEQ ID NO: 1243310
uggcuucaugguugcaaga

SEQ ID NO: 1408155 - RNA, 19 nt, Artificial Sequence
  Description of Artificial Sequence: Synthetic oligonucleotide
  Antisense strand to SEQ ID NO: 1408154
ucuugcaaccaugaagcca

SEQ ID NO: 1408156 - RNA, 19 nt, Artificial Sequence
  Description of Artificial Sequence: Synthetic oligonucleotide
  Sense strand starting at position 230 of SEQ ID NO: 1243310
ucgucugaagccuggauuu

SEQ ID NO: 1408157 - RNA, 19 nt, Artificial Sequence
  Description of Artificial Sequence: Synthetic oligonucleotide
  Antisense strand to SEQ ID NO: 1408156
aaauccaggcuucagacga

SEQ ID NO: 1408158 - RNA, 19 nt, Artificial Sequence
  Description of Artificial Sequence: Synthetic oligonucleotide
  Sense strand starting at position 323 of SEQ ID NO: 1243310
ccuguuggugaaugagaag

SEQ ID NO: 1408159 - RNA, 19 nt, Artificial Sequence
  Description of Artificial Sequence: Synthetic oligonucleotide
  Antisense strand to SEQ ID NO: 1408158
cuucucauucaccaacagg

SEQ ID NO: 1408160 - RNA, 19 nt, Artificial Sequence
  Description of Artificial Sequence: Synthetic oligonucleotide
  Sense strand starting at position 326 of SEQ ID NO: 1243310
guuggugaaugagaagagu

SEQ ID NO: 1408161 - RNA, 19 nt, Artificial Sequence
  Description of Artificial Sequence: Synthetic oligonucleotide
  Antisense strand to SEQ ID NO: 1408160
acucuucucauucaccaac

SEQ ID NO: 1408162 - RNA, 19 nt, Artificial Sequence
  Description of Artificial Sequence: Synthetic oligonucleotide
  Sense strand starting at position 479 of SEQ ID NO: 1243310
guccuuauuaguuagguga

SEQ ID NO: 1408163 - RNA, 19 nt, Artificial Sequence
  Description of Artificial Sequence: Synthetic oligonucleotide
  Antisense strand to SEQ ID NO: 1408162
ucaccuaacuaauaaggac

SEQ ID NO: 1408164 - RNA, 19 nt, Artificial Sequence
  Description of Artificial Sequence: Synthetic oligonucleotide
  Sense strand starting at position 482 of SEQ ID NO: 1243310
cuuauuaguuaggugacua

SEQ ID NO: 1408165 - RNA, 19 nt, Artificial Sequence
  Description of Artificial Sequence: Synthetic oligonucleotide
  Antisense strand to SEQ ID NO: 1408164
uagucaccuaacuaauaag

SEQ ID NO: 1408166 - RNA, 19 nt, Artificial Sequence
  Description of Artificial Sequence: Synthetic oligonucleotide
  Sense strand starting at position 486 of SEQ ID NO: 1243310
uuaguuaggugacuauauc

SEQ ID NO: 1408167 - RNA, 19 nt, Artificial Sequence
  Description of Artificial Sequence: Synthetic oligonucleotide
  Antisense strand to SEQ ID NO: 1408166
gauauagucaccuaacuaa

SEQ ID NO: 1408168 - RNA, 19 nt, Artificial Sequence
  Description of Artificial Sequence: Synthetic oligonucleotide
  Sense strand starting at position 487 of SEQ ID NO: 1243310
uaguuaggugacuauaucu

SEQ ID NO: 1408169 - RNA, 19 nt, Artificial Sequence
  Description of Artificial Sequence: Synthetic oligonucleotide
  Antisense strand to SEQ ID NO: 1408168
agauauagucaccuaacua

SEQ ID NO: 1408170 - RNA, 19 nt, Artificial Sequence
  Description of Artificial Sequence: Synthetic oligonucleotide
  Sense strand starting at position 494 of SEQ ID NO: 1243310
gugacuauaucuuacugag

SEQ ID NO: 1408171 - RNA, 19 nt, Artificial Sequence
  Description of Artificial Sequence: Synthetic oligonucleotide
  Antisense strand to SEQ ID NO: 1408170
cucaguaagauauagucac

SEQ ID NO: 1408172 - RNA, 19 nt, Artificial Sequence
  Description of Artificial Sequence: Synthetic oligonucleotide
  Sense strand starting at position 525 of SEQ ID NO: 1243310
gcacgagacaguuaucuac

SEQ ID NO: 1408173 - RNA, 19 nt, Artificial Sequence
  Description of Artificial Sequence: Synthetic oligonucleotide
  Antisense strand to SEQ ID NO: 1408172
guagauaacugucucgugc

SEQ ID NO: 1408174 - RNA, 19 nt, Artificial Sequence
  Description of Artificial Sequence: Synthetic oligonucleotide
  Sense strand starting at position 527 of SEQ ID NO: 1243310
acgagacaguuaucuaccu

SEQ ID NO: 1408175 - RNA, 19 nt, Artificial Sequence
  Description of Artificial Sequence: Synthetic oligonucleotide
  Antisense strand to SEQ ID NO: 1408174
agguagauaacugucucgu

SEQ ID NO: 1408176 - RNA, 19 nt, Artificial Sequence
  Description of Artificial Sequence: Synthetic oligonucleotide
  Sense strand starting at position 532 of SEQ ID NO: 1243310
acaguuaucuaccugugaa

SEQ ID NO: 1408177 - RNA, 19 nt, Artificial Sequence
  Description of Artificial Sequence: Synthetic oligonucleotide
  Antisense strand to SEQ ID NO: 1408176
uucacagguagauaacugu

SEQ ID NO: 1408178 - RNA, 19 nt, Artificial Sequence
  Description of Artificial Sequence: Synthetic oligonucleotide
  Sense strand starting at position 535 of SEQ ID NO: 1243310
guuaucuaccugugaacca

SEQ ID NO: 1408179 - RNA, 19 nt, Artificial Sequence
  Description of Artificial Sequence: Synthetic oligonucleotide
  Antisense strand to SEQ ID NO: 1408178
ugguucacagguagauaac

SEQ ID NO: 1408180 - RNA, 19 nt, Artificial Sequence
  Description of Artificial Sequence: Synthetic oligonucleotide
  Sense strand starting at position 629 of SEQ ID NO: 1243310
ccuacaaggucuuucuaga

SEQ ID NO: 1408181 - RNA, 19 nt, Artificial Sequence
  Description of Artificial Sequence: Synthetic oligonucleotide
  Antisense strand to SEQ ID NO: 1408180
ucuagaaagaccuuguagg

SEQ ID NO: 1408182 - RNA, 19 nt, Artificial Sequence
  Description of Artificial Sequence: Synthetic oligonucleotide
  Sense strand starting at position 721 of SEQ ID NO: 1243310
ugccauguccauuaagguu

SEQ ID NO: 1408183 - RNA, 19 nt, Artificial Sequence
  Description of Artificial Sequence: Synthetic oligonucleotide
  Antisense strand to SEQ ID NO: 1408182
aaccuuaauggacauggca

SEQ ID NO: 1408184 - RNA, 19 nt, Artificial Sequence
  Description of Artificial Sequence: Synthetic oligonucleotide
  Sense strand starting at position 733 of SEQ ID NO: 1243310
uaagguuaucucugcggaa

SEQ ID NO: 1408185 - RNA, 19 nt, Artificial Sequence
  Description of Artificial Sequence: Synthetic oligonucleotide
  Antisense strand to SEQ ID NO: 1408184
uuccgcagagauaaccuua

SEQ ID NO: 1408186 - RNA, 19 nt, Artificial Sequence
  Description of Artificial Sequence: Synthetic oligonucleotide
  Sense strand starting at position 734 of SEQ ID NO: 1243310
aagguuaucucugcggaaa

SEQ ID NO: 1408187 - RNA, 19 nt, Artificial Sequence
  Description of Artificial Sequence: Synthetic oligonucleotide
  Antisense strand to SEQ ID NO: 1408186
uuuccgcagagauaaccuu

SEQ ID NO: 1408188 - RNA, 19 nt, Artificial Sequence
  Description of Artificial Sequence: Synthetic oligonucleotide
  Sense strand starting at position 735 of SEQ ID NO: 1243310
agguuaucucugcggaaac

SEQ ID NO: 1408189 - RNA, 19 nt, Artificial Sequence
  Description of Artificial Sequence: Synthetic oligonucleotide
  Antisense strand to SEQ ID NO: 1408188
guuuccgcagagauaaccu

SEQ ID NO: 1408190 - RNA, 19 nt, Artificial Sequence
  Description of Artificial Sequence: Synthetic oligonucleotide
  Sense strand starting at position 833 of SEQ ID NO: 1243310
accggugucacugauaaag

SEQ ID NO: 1408191 - RNA, 19 nt, Artificial Sequence
  Description of Artificial Sequence: Synthetic oligonucleotide
  Antisense strand to SEQ ID NO: 1408190
cuuuaucagugacaccggu

SEQ ID NO: 1408192 - RNA, 19 nt, Artificial Sequence
  Description of Artificial Sequence: Synthetic oligonucleotide
  Sense strand starting at position 896 of SEQ ID NO: 1243310
cguguacucacagaacugu

SEQ ID NO: 1408193 - RNA, 19 nt, Artificial Sequence
  Description of Artificial Sequence: Synthetic oligonucleotide
  Antisense strand to SEQ ID NO: 1408192
acaguucugugaguacacg

SEQ ID NO: 1408194 - RNA, 19 nt, Artificial Sequence
  Description of Artificial Sequence: Synthetic oligonucleotide
  Sense strand starting at position 1211 of SEQ ID NO: 1243310
ggagaaugucaucacgcga

SEQ ID NO: 1408195 - RNA, 19 nt, Artificial Sequence
  Description of Artificial Sequence: Synthetic oligonucleotide
  Antisense strand to SEQ ID NO: 1408194
ucgcgugaugacauucucc

SEQ ID NO: 1408196 - RNA, 19 nt, Artificial Sequence
  Description of Artificial Sequence: Synthetic oligonucleotide
  Sense strand starting at position 1426 of SEQ ID NO: 1243310
uuacgucugguggagagaa

SEQ ID NO: 1408197 - RNA, 19 nt, Artificial Sequence
  Description of Artificial Sequence: Synthetic oligonucleotide
  Antisense strand to SEQ ID NO: 1408196
uucucuccaccagacguaa

SEQ ID NO: 1408198 - RNA, 19 nt, Artificial Sequence
  Description of Artificial Sequence: Synthetic oligonucleotide
  Sense strand starting at position 1989 of SEQ ID NO: 1243310
caaugcacucugggaugau

SEQ ID NO: 1408199 - RNA, 19 nt, Artificial Sequence
  Description of Artificial Sequence: Synthetic oligonucleotide
  Antisense strand to SEQ ID NO: 1408198
aucaucccagagugcauug

SEQ ID NO: 1408200 - RNA, 19 nt, Artificial Sequence
  Description of Artificial Sequence: Synthetic oligonucleotide
  Sense strand starting at position 1990 of SEQ ID NO: 1243310
aaugcacucugggaugaua

SEQ ID NO: 1408201 - RNA, 19 nt, Artificial Sequence
  Description of Artificial Sequence: Synthetic oligonucleotide
  Antisense strand to SEQ ID NO: 1408200
uaucaucccagagugcauu

SEQ ID NO: 1408202 - RNA, 19 nt, Artificial Sequence
  Description of Artificial Sequence: Synthetic oligonucleotide
  Sense strand starting at position 2117 of SEQ ID NO: 1243310
acauguugccgcugagaau

SEQ ID NO: 1408203 - RNA, 19 nt, Artificial Sequence
  Description of Artificial Sequence: Synthetic oligonucleotide
  Antisense strand to SEQ ID NO: 1408202
auucucagcggcaacaugu

SEQ ID NO: 1408204 - RNA, 19 nt, Artificial Sequence
  Description of Artificial Sequence: Synthetic oligonucleotide
  Sense strand starting at position 2153 of SEQ ID NO: 1243310
auuccugggcccugaguaa

SEQ ID NO: 1408205 - RNA, 19 nt, Artificial Sequence
  Description of Artificial Sequence: Synthetic oligonucleotide
  Antisense strand to SEQ ID NO: 1408204
uuacucagggcccaggaau

SEQ ID NO: 1408206 - RNA, 19 nt, Artificial Sequence
  Description of Artificial Sequence: Synthetic oligonucleotide
  Sense strand starting at position 2298 of SEQ ID NO: 1243310
gggcgacgcccgaggaauu

SEQ ID NO: 1408207 - RNA, 19 nt, Artificial Sequence
  Description of Artificial Sequence: Synthetic oligonucleotide
  Antisense strand to SEQ ID NO: 1408206
aauuccucgggcgucgccc

SEQ ID NO: 1408208 - RNA, 19 nt, Artificial Sequence
  Description of Artificial Sequence: Synthetic oligonucleotide
  Sense strand starting at position 2409 of SEQ ID NO: 1243310
ugucguuccagcguuuauu

SEQ ID NO: 1408209 - RNA, 19 nt, Artificial Sequence
  Description of Artificial Sequence: Synthetic oligonucleotide
  Antisense strand to SEQ ID NO: 1408208
aauaaacgcuggaacgaca

SEQ ID NO: 1408210 - RNA, 19 nt, Artificial Sequence
  Description of Artificial Sequence: Synthetic oligonucleotide
  Sense strand starting at position 2420 of SEQ ID NO: 1243310
cguuuauucuccucccauc

SEQ ID NO: 1408211 - RNA, 19 nt, Artificial Sequence
  Description of Artificial Sequence: Synthetic oligonucleotide
  Antisense strand to SEQ ID NO: 1408210
gaugggaggagaauaaacg

SEQ ID NO: 1408212 - RNA, 19 nt, Artificial Sequence
  Description of Artificial Sequence: Synthetic oligonucleotide
  Sense strand starting at position 2691 of SEQ ID NO: 1243310
aggugacuucucuaagguc

SEQ ID NO: 1408213 - RNA, 19 nt, Artificial Sequence
  Description of Artificial Sequence: Synthetic oligonucleotide
  Antisense strand to SEQ ID NO: 1408212
gaccuuagagaagucaccu

SEQ ID NO: 1408214 - RNA, 19 nt, Artificial Sequence
  Description of Artificial Sequence: Synthetic oligonucleotide
  Sense strand starting at position 2789 of SEQ ID NO: 1243310
agccaucucuucucuagua

SEQ ID NO: 1408215 - RNA, 19 nt, Artificial Sequence
  Description of Artificial Sequence: Synthetic oligonucleotide
  Antisense strand to SEQ ID NO: 1408214
uacuagagaagagauggcu

SEQ ID NO: 1408216 - RNA, 19 nt, Artificial Sequence
  Description of Artificial Sequence: Synthetic oligonucleotide
  Sense strand starting at position 2790 of SEQ ID NO: 1243310
gccaucucuucucuaguau

SEQ ID NO: 1408217 - RNA, 19 nt, Artificial Sequence
  Description of Artificial Sequence: Synthetic oligonucleotide
  Antisense strand to SEQ ID NO: 1408216
auacuagagaagagauggc

SEQ ID NO: 1408218 - RNA, 19 nt, Artificial Sequence
  Description of Artificial Sequence: Synthetic oligonucleotide
  Sense strand starting at position 2802 of SEQ ID NO: 1243310
cuaguauaagucugugaag

SEQ ID NO: 1408219 - RNA, 19 nt, Artificial Sequence
  Description of Artificial Sequence: Synthetic oligonucleotide
  Antisense strand to SEQ ID NO: 1408218
cuucacagacuuauacuag

SEQ ID NO: 1408220 - RNA, 19 nt, Artificial Sequence
  Description of Artificial Sequence: Synthetic oligonucleotide
  Sense strand starting at position 2831 of SEQ ID NO: 1243310
ucuuacugcuaccuggaaa

SEQ ID NO: 1408221 - RNA, 19 nt, Artificial Sequence
  Description of Artificial Sequence: Synthetic oligonucleotide
  Antisense strand to SEQ ID NO: 1408220
uuuccagguagcaguaaga

SEQ ID NO: 1408222 - RNA, 19 nt, Artificial Sequence
  Description of Artificial Sequence: Synthetic oligonucleotide
  Sense strand starting at position 3278 of SEQ ID NO: 1243310
gcggaucagccgaggucaa

SEQ ID NO: 1408223 - RNA, 19 nt, Artificial Sequence
  Description of Artificial Sequence: Synthetic oligonucleotide
  Antisense strand to SEQ ID NO: 1408222
uugaccucggcugauccgc

SEQ ID NO: 1408224 - RNA, 19 nt, Artificial Sequence
  Description of Artificial Sequence: Synthetic oligonucleotide
  Sense strand starting at position 3304 of SEQ ID NO: 1243310
agaucacccuggcuaagau

SEQ ID NO: 1408225 - RNA, 19 nt, Artificial Sequence
  Description of Artificial Sequence: Synthetic oligonucleotide
  Antisense strand to SEQ ID NO: 1408224
aucuuagccagggugaucu

SEQ ID NO: 1408226 - RNA, 19 nt, Artificial Sequence
  Description of Artificial Sequence: Synthetic oligonucleotide
  Sense strand starting at position 3676 of SEQ ID NO: 1243310
uguguacaccuguaauccu

SEQ ID NO: 1408227 - RNA, 19 nt, Artificial Sequence
  Description of Artificial Sequence: Synthetic oligonucleotide
  Antisense strand to SEQ ID NO: 1408226
aggauuacagguguacaca

SEQ ID NO: 1408228 - RNA, 19 nt, Artificial Sequence
  Description of Artificial Sequence: Synthetic oligonucleotide
  Sense strand starting at position 3693 of SEQ ID NO: 1243310
cuagcuacuccagagagua

SEQ ID NO: 1408229 - RNA, 19 nt, Artificial Sequence
  Description of Artificial Sequence: Synthetic oligonucleotide
  Antisense strand to SEQ ID NO: 1408228
uacucucuggaguagcuag

SEQ ID NO: 1408230 - RNA, 19 nt, Artificial Sequence
  Description of Artificial Sequence: Synthetic oligonucleotide
  Sense strand starting at position 3793 of SEQ ID NO: 1243310
gaguuaagccuccgucuca

SEQ ID NO: 1408231 - RNA, 19 nt, Artificial Sequence
  Description of Artificial Sequence: Synthetic oligonucleotide
  Antisense strand to SEQ ID NO: 1408230
ugagacggaggcuuaacuc

SEQ ID NO: 1408232 - RNA, 19 nt, Artificial Sequence
  Description of Artificial Sequence: Synthetic oligonucleotide
  Sense strand starting at position 3794 of SEQ ID NO: 1243310
aguuaagccuccgucucaa

SEQ ID NO: 1408233 - RNA, 19 nt, Artificial Sequence
  Description of Artificial Sequence: Synthetic oligonucleotide
  Antisense strand to SEQ ID NO: 1408232
uugagacggaggcuuaacu

SEQ ID NO: 1408234 - RNA, 19 nt, Artificial Sequence
  Description of Artificial Sequence: Synthetic oligonucleotide
  Sense strand starting at position 141 of SEQ ID NO: 1243311
uggcuucaugguugcaaga

SEQ ID NO: 1408235 - RNA, 19 nt, Artificial Sequence
  Description of Artificial Sequence: Synthetic oligonucleotide
  Antisense strand to SEQ ID NO: 1408234
ucuugcaaccaugaagcca

SEQ ID NO: 1408236 - RNA, 19 nt, Artificial Sequence
  Description of Artificial Sequence: Synthetic oligonucleotide
  Sense strand starting at position 284 of SEQ ID NO: 1243311
ucgucugaagccuggauuu

SEQ ID NO: 1408237 - RNA, 19 nt, Artificial Sequence
  Description of Artificial Sequence: Synthetic oligonucleotide
  Antisense strand to SEQ ID NO: 1408236
aaauccaggcuucagacga

SEQ ID NO: 1408238 - RNA, 19 nt, Artificial Sequence
  Description of Artificial Sequence: Synthetic oligonucleotide
  Sense strand starting at position 377 of SEQ ID NO: 1243311
ccuguuggugaaugagaag

SEQ ID NO: 1408239 - RNA, 19 nt, Artificial Sequence
  Description of Artificial Sequence: Synthetic oligonucleotide
  Antisense strand to SEQ ID NO: 1408238
cuucucauucaccaacagg

SEQ ID NO: 1408240 - RNA, 19 nt, Artificial Sequence
  Description of Artificial Sequence: Synthetic oligonucleotide
  Sense strand starting at position 380 of SEQ ID NO: 1243311
guuggugaaugagaagagu

SEQ ID NO: 1408241 - RNA, 19 nt, Artificial Sequence
  Description of Artificial Sequence: Synthetic oligonucleotide
  Antisense strand to SEQ ID NO: 1408240
acucuucucauucaccaac

SEQ ID NO: 1408242 - RNA, 19 nt, Artificial Sequence
  Description of Artificial Sequence: Synthetic oligonucleotide
  Sense strand starting at position 533 of SEQ ID NO: 1243311
guccuuauuaguuagguga

SEQ ID NO: 1408243 - RNA, 19 nt, Artificial Sequence
  Description of Artificial Sequence: Synthetic oligonucleotide
  Antisense strand to SEQ ID NO: 1408242
ucaccuaacuaauaaggac

SEQ ID NO: 1408244 - RNA, 19 nt, Artificial Sequence
  Description of Artificial Sequence: Synthetic oligonucleotide
  Sense strand starting at position 536 of SEQ ID NO: 1243311
cuuauuaguuaggugacua

SEQ ID NO: 1408245 - RNA, 19 nt, Artificial Sequence
  Description of Artificial Sequence: Synthetic oligonucleotide
  Antisense strand to SEQ ID NO: 1408244
uagucaccuaacuaauaag

SEQ ID NO: 1408246 - RNA, 19 nt, Artificial Sequence
  Description of Artificial Sequence: Synthetic oligonucleotide
  Sense strand starting at position 540 of SEQ ID NO: 1243311
uuaguuaggugacuauauc

SEQ ID NO: 1408247 - RNA, 19 nt, Artificial Sequence
  Description of Artificial Sequence: Synthetic oligonucleotide
  Antisense strand to SEQ ID NO: 1408246
gauauagucaccuaacuaa

SEQ ID NO: 1408248 - RNA, 19 nt, Artificial Sequence
  Description of Artificial Sequence: Synthetic oligonucleotide
  Sense strand starting at position 541 of SEQ ID NO: 1243311
uaguuaggugacuauaucu

SEQ ID NO: 1408249 - RNA, 19 nt, Artificial Sequence
  Description of Artificial Sequence: Synthetic oligonucleotide
  Antisense strand to SEQ ID NO: 1408248
agauauagucaccuaacua

SEQ ID NO: 1408250 - RNA, 19 nt, Artificial Sequence
  Description of Artificial Sequence: Synthetic oligonucleotide
  Sense strand starting at position 548 of SEQ ID NO: 1243311
gugacuauaucuuacugag

SEQ ID NO: 1408251 - RNA, 19 nt, Artificial Sequence
  Description of Artificial Sequence: Synthetic oligonucleotide
  Antisense strand to SEQ ID NO: 1408250
cucaguaagauauagucac

SEQ ID NO: 1408252 - RNA, 19 nt, Artificial Sequence
  Description of Artificial Sequence: Synthetic oligonucleotide
  Sense strand starting at position 579 of SEQ ID NO: 1243311
gcacgagacaguuaucuac

SEQ ID NO: 1408253 - RNA, 19 nt, Artificial Sequence
  Description of Artificial Sequence: Synthetic oligonucleotide
  Antisense strand to SEQ ID NO: 1408252
guagauaacugucucgugc

SEQ ID NO: 1408254 - RNA, 19 nt, Artificial Sequence
  Description of Artificial Sequence: Synthetic oligonucleotide
  Sense strand starting at position 581 of SEQ ID NO: 1243311
acgagacaguuaucuaccu

SEQ ID NO: 1408255 - RNA, 19 nt, Artificial Sequence
  Description of Artificial Sequence: Synthetic oligonucleotide
  Antisense strand to SEQ ID NO: 1408254
agguagauaacugucucgu

SEQ ID NO: 1408256 - RNA, 19 nt, Artificial Sequence
  Description of Artificial Sequence: Synthetic oligonucleotide
  Sense strand starting at position 586 of SEQ ID NO: 1243311
acaguuaucuaccugugaa

SEQ ID NO: 1408257 - RNA, 19 nt, Artificial Sequence
  Description of Artificial Sequence: Synthetic oligonucleotide
  Antisense strand to SEQ ID NO: 1408256
uucacagguagauaacugu

SEQ ID NO: 1408258 - RNA, 19 nt, Artificial Sequence
  Description of Artificial Sequence: Synthetic oligonucleotide
  Sense strand starting at position 589 of SEQ ID NO: 1243311
guuaucuaccugugaacca

SEQ ID NO: 1408259 - RNA, 19 nt, Artificial Sequence
  Description of Artificial Sequence: Synthetic oligonucleotide
  Antisense strand to SEQ ID NO: 1408258
ugguucacagguagauaac

SEQ ID NO: 1408260 - RNA, 19 nt, Artificial Sequence
  Description of Artificial Sequence: Synthetic oligonucleotide
  Sense strand starting at position 683 of SEQ ID NO: 1243311
ccuacaaggucuuucuaga

SEQ ID NO: 1408261 - RNA, 19 nt, Artificial Sequence
  Description of Artificial Sequence: Synthetic oligonucleotide
  Antisense strand to SEQ ID NO: 1408260
ucuagaaagaccuuguagg

SEQ ID NO: 1408262 - RNA, 19 nt, Artificial Sequence
  Description of Artificial Sequence: Synthetic oligonucleotide
  Sense strand starting at position 775 of SEQ ID NO: 1243311
ugccauguccauuaagguu

SEQ ID NO: 1408263 - RNA, 19 nt, Artificial Sequence
  Description of Artificial Sequence: Synthetic oligonucleotide
  Antisense strand to SEQ ID NO: 1408262
aaccuuaauggacauggca

SEQ ID NO: 1408264 - RNA, 19 nt, Artificial Sequence
  Description of Artificial Sequence: Synthetic oligonucleotide
  Sense strand starting at position 787 of SEQ ID NO: 1243311
uaagguuaucucugcggaa

SEQ ID NO: 1408265 - RNA, 19 nt, Artificial Sequence
  Description of Artificial Sequence: Synthetic oligonucleotide
  Antisense strand to SEQ ID NO: 1408264
uuccgcagagauaaccuua

SEQ ID NO: 1408266 - RNA, 19 nt, Artificial Sequence
  Description of Artificial Sequence: Synthetic oligonucleotide
  Sense strand starting at position 788 of SEQ ID NO: 1243311
aagguuaucucugcggaaa

SEQ ID NO: 1408267 - RNA, 19 nt, Artificial Sequence
  Description of Artificial Sequence: Synthetic oligonucleotide
  Antisense strand to SEQ ID NO: 1408266
uuuccgcagagauaaccuu

SEQ ID NO: 1408268 - RNA, 19 nt, Artificial Sequence
  Description of Artificial Sequence: Synthetic oligonucleotide
  Sense strand starting at position 789 of SEQ ID NO: 1243311
agguuaucucugcggaaac

SEQ ID NO: 1408269 - RNA, 19 nt, Artificial Sequence
  Description of Artificial Sequence: Synthetic oligonucleotide
  Antisense strand to SEQ ID NO: 1408268
guuuccgcagagauaaccu

SEQ ID NO: 1408270 - RNA, 19 nt, Artificial Sequence
  Description of Artificial Sequence: Synthetic oligonucleotide
  Sense strand starting at position 887 of SEQ ID NO: 1243311
accggugucacugauaaag

SEQ ID NO: 1408271 - RNA, 19 nt, Artificial Sequence
  Description of Artificial Sequence: Synthetic oligonucleotide
  Antisense strand to SEQ ID NO: 1408270
cuuuaucagugacaccggu

SEQ ID NO: 1408272 - RNA, 19 nt, Artificial Sequence
  Description of Artificial Sequence: Synthetic oligonucleotide
  Sense strand starting at position 950 of SEQ ID NO: 1243311
cguguacucacagaacugu

SEQ ID NO: 1408273 - RNA, 19 nt, Artificial Sequence
  Description of Artificial Sequence: Synthetic oligonucleotide
  Antisense strand to SEQ ID NO: 1408272
acaguucugugaguacacg

SEQ ID NO: 1408274 - RNA, 19 nt, Artificial Sequence
  Description of Artificial Sequence: Synthetic oligonucleotide
  Sense strand starting at position 1265 of SEQ ID NO: 1243311
ggagaaugucaucacgcga

SEQ ID NO: 1408275 - RNA, 19 nt, Artificial Sequence
  Description of Artificial Sequence: Synthetic oligonucleotide
  Antisense strand to SEQ ID NO: 1408274
ucgcgugaugacauucucc

SEQ ID NO: 1408276 - RNA, 19 nt, Artificial Sequence
  Description of Artificial Sequence: Synthetic oligonucleotide
  Sense strand starting at position 1480 of SEQ ID NO: 1243311
uuacgucugguggagagaa

SEQ ID NO: 1408277 - RNA, 19 nt, Artificial Sequence
  Description of Artificial Sequence: Synthetic oligonucleotide
  Antisense strand to SEQ ID NO: 1408276
uucucuccaccagacguaa

SEQ ID NO: 1408278 - RNA, 19 nt, Artificial Sequence
  Description of Artificial Sequence: Synthetic oligonucleotide
  Sense strand starting at position 2043 of SEQ ID NO: 1243311
caaugcacucugggaugau

SEQ ID NO: 1408279 - RNA, 19 nt, Artificial Sequence
  Description of Artificial Sequence: Synthetic oligonucleotide
  Antisense strand to SEQ ID NO: 1408278
aucaucccagagugcauug

SEQ ID NO: 1408280 - RNA, 19 nt, Artificial Sequence
  Description of Artificial Sequence: Synthetic oligonucleotide
  Sense strand starting at position 2044 of SEQ ID NO: 1243311
aaugcacucugggaugaua

SEQ ID NO: 1408281 - RNA, 19 nt, Artificial Sequence
  Description of Artificial Sequence: Synthetic oligonucleotide
  Antisense strand to SEQ ID NO: 1408280
uaucaucccagagugcauu

SEQ ID NO: 1408282 - RNA, 19 nt, Artificial Sequence
  Description of Artificial Sequence: Synthetic oligonucleotide
  Sense strand starting at position 2171 of SEQ ID NO: 1243311
acauguugccgcugagaau

SEQ ID NO: 1408283 - RNA, 19 nt, Artificial Sequence
  Description of Artificial Sequence: Synthetic oligonucleotide
  Antisense strand to SEQ ID NO: 1408282
auucucagcggcaacaugu

SEQ ID NO: 1408284 - RNA, 19 nt, Artificial Sequence
  Description of Artificial Sequence: Synthetic oligonucleotide
  Sense strand starting at position 2207 of SEQ ID NO: 1243311
auuccugggcccugaguaa

SEQ ID NO: 1408285 - RNA, 19 nt, Artificial Sequence
  Description of Artificial Sequence: Synthetic oligonucleotide
  Antisense strand to SEQ ID NO: 1408284
uuacucagggcccaggaau

SEQ ID NO: 1408286 - RNA, 19 nt, Artificial Sequence
  Description of Artificial Sequence: Synthetic oligonucleotide
  Sense strand starting at position 2352 of SEQ ID NO: 1243311
gggcgacgcccgaggaauu

SEQ ID NO: 1408287 - RNA, 19 nt, Artificial Sequence
  Description of Artificial Sequence: Synthetic oligonucleotide
  Antisense strand to SEQ ID NO: 1408286
aauuccucgggcgucgccc

SEQ ID NO: 1408288 - RNA, 19 nt, Artificial Sequence
  Description of Artificial Sequence: Synthetic oligonucleotide
  Sense strand starting at position 2463 of SEQ ID NO: 1243311
ugucguuccagcguuuauu

SEQ ID NO: 1408289 - RNA, 19 nt, Artificial Sequence
  Description of Artificial Sequence: Synthetic oligonucleotide
  Antisense strand to SEQ ID NO: 1408288
aauaaacgcuggaacgaca

SEQ ID NO: 1408290 - RNA, 19 nt, Artificial Sequence
  Description of Artificial Sequence: Synthetic oligonucleotide
  Sense strand starting at position 2474 of SEQ ID NO: 1243311
cguuuauucuccucccauc

SEQ ID NO: 1408291 - RNA, 19 nt, Artificial Sequence
  Description of Artificial Sequence: Synthetic oligonucleotide
  Antisense strand to SEQ ID NO: 1408290
gaugggaggagaauaaacg

SEQ ID NO: 1408292 - RNA, 19 nt, Artificial Sequence
  Description of Artificial Sequence: Synthetic oligonucleotide
  Sense strand starting at position 2745 of SEQ ID NO: 1243311
aggugacuucucuaagguc

SEQ ID NO: 1408293 - RNA, 19 nt, Artificial Sequence
  Description of Artificial Sequence: Synthetic oligonucleotide
  Antisense strand to SEQ ID NO: 1408292
gaccuuagagaagucaccu

SEQ ID NO: 1408294 - RNA, 19 nt, Artificial Sequence
  Description of Artificial Sequence: Synthetic oligonucleotide
  Sense strand starting at position 2843 of SEQ ID NO: 1243311
agccaucucuucucuagua

SEQ ID NO: 1408295 - RNA, 19 nt, Artificial Sequence
  Description of Artificial Sequence: Synthetic oligonucleotide
  Antisense strand to SEQ ID NO: 1408294
uacuagagaagagauggcu

SEQ ID NO: 1408296 - RNA, 19 nt, Artificial Sequence
  Description of Artificial Sequence: Synthetic oligonucleotide
  Sense strand starting at position 2844 of SEQ ID NO: 1243311
gccaucucuucucuaguau

SEQ ID NO: 1408297 - RNA, 19 nt, Artificial Sequence
  Description of Artificial Sequence: Synthetic oligonucleotide
  Antisense strand to SEQ ID NO: 1408296
auacuagagaagagauggc

SEQ ID NO: 1408298 - RNA, 19 nt, Artificial Sequence
  Description of Artificial Sequence: Synthetic oligonucleotide
  Sense strand starting at position 2856 of SEQ ID NO: 1243311
cuaguauaagucugugaag

SEQ ID NO: 1408299 - RNA, 19 nt, Artificial Sequence
  Description of Artificial Sequence: Synthetic oligonucleotide
  Antisense strand to SEQ ID NO: 1408298
cuucacagacuuauacuag

SEQ ID NO: 1408300 - RNA, 19 nt, Artificial Sequence
  Description of Artificial Sequence: Synthetic oligonucleotide
  Sense strand starting at position 2885 of SEQ ID NO: 1243311
ucuuacugcuaccuggaaa

SEQ ID NO: 1408301 - RNA, 19 nt, Artificial Sequence
  Description of Artificial Sequence: Synthetic oligonucleotide
  Antisense strand to SEQ ID NO: 1408300
uuuccagguagcaguaaga

SEQ ID NO: 1408302 - RNA, 19 nt, Artificial Sequence
  Description of Artificial Sequence: Synthetic oligonucleotide
  Sense strand starting at position 3332 of SEQ ID NO: 1243311
gcggaucagccgaggucaa

SEQ ID NO: 1408303 - RNA, 19 nt, Artificial Sequence
  Description of Artificial Sequence: Synthetic oligonucleotide
  Antisense strand to SEQ ID NO: 1408302
uugaccucggcugauccgc

SEQ ID NO: 1408304 - RNA, 19 nt, Artificial Sequence
  Description of Artificial Sequence: Synthetic oligonucleotide
  Sense strand starting at position 3358 of SEQ ID NO: 1243311
agaucacccuggcuaagau

SEQ ID NO: 1408305 - RNA, 19 nt, Artificial Sequence
  Description of Artificial Sequence: Synthetic oligonucleotide
  Antisense strand to SEQ ID NO: 1408304
aucuuagccagggugaucu

SEQ ID NO: 1408306 - RNA, 19 nt, Artificial Sequence
  Description of Artificial Sequence: Synthetic oligonucleotide
  Sense strand starting at position 3730 of SEQ ID NO: 1243311
uguguacaccuguaauccu

SEQ ID NO: 1408307 - RNA, 19 nt, Artificial Sequence
  Description of Artificial Sequence: Synthetic oligonucleotide
  Antisense strand to SEQ ID NO: 1408306
aggauuacagguguacaca

SEQ ID NO: 1408308 - RNA, 19 nt, Artificial Sequence
  Description of Artificial Sequence: Synthetic oligonucleotide
  Sense strand starting at position 3747 of SEQ ID NO: 1243311
cuagcuacuccagagagua

SEQ ID NO: 1408309 - RNA, 19 nt, Artificial Sequence
  Description of Artificial Sequence: Synthetic oligonucleotide
  Antisense strand to SEQ ID NO: 1408308
uacucucuggaguagcuag

SEQ ID NO: 1408310 - RNA, 19 nt, Artificial Sequence
  Description of Artificial Sequence: Synthetic oligonucleotide
  Sense strand starting at position 3847 of SEQ ID NO: 1243311
gaguuaagccuccgucuca

SEQ ID NO: 1408311 - RNA, 19 nt, Artificial Sequence
  Description of Artificial Sequence: Synthetic oligonucleotide
  Antisense strand to SEQ ID NO: 1408310
ugagacggaggcuuaacuc

SEQ ID NO: 1408312 - RNA, 19 nt, Artificial Sequence
  Description of Artificial Sequence: Synthetic oligonucleotide
  Sense strand starting at position 3848 of SEQ ID NO: 1243311
aguuaagccuccgucucaa

SEQ ID NO: 1408313 - RNA, 19 nt, Artificial Sequence
  Description of Artificial Sequence: Synthetic oligonucleotide
  Antisense strand to SEQ ID NO: 1408312
uugagacggaggcuuaacu

SEQ ID NO: 1408314 - RNA, 19 nt, Artificial Sequence
  Description of Artificial Sequence: Synthetic oligonucleotide
  Sense strand starting at position 190 of SEQ ID NO: 1243312
gcucaccaguccuuguaga

SEQ ID NO: 1408315 - RNA, 19 nt, Artificial Sequence
  Description of Artificial Sequence: Synthetic oligonucleotide
  Antisense strand to SEQ ID NO: 1408314
ucuacaaggacuggugagc

SEQ ID NO: 1408316 - RNA, 19 nt, Artificial Sequence
  Description of Artificial Sequence: Synthetic oligonucleotide
  Sense strand starting at position 191 of SEQ ID NO: 1243312
cucaccaguccuuguagaa

SEQ ID NO: 1408317 - RNA, 19 nt, Artificial Sequence
  Description of Artificial Sequence: Synthetic oligonucleotide
  Antisense strand to SEQ ID NO: 1408316
uucuacaaggacuggugag

SEQ ID NO: 1408318 - RNA, 19 nt, Artificial Sequence
  Description of Artificial Sequence: Synthetic oligonucleotide
  Sense strand starting at position 219 of SEQ ID NO: 1243312
gcacucaucacugaggugu

SEQ ID NO: 1408319 - RNA, 19 nt, Artificial Sequence
  Description of Artificial Sequence: Synthetic oligonucleotide
  Antisense strand to SEQ ID NO: 1408318
acaccucagugaugagugc

SEQ ID NO: 1408320 - RNA, 19 nt, Artificial Sequence
  Description of Artificial Sequence: Synthetic oligonucleotide
  Sense strand starting at position 230 of SEQ ID NO: 1243312
ugagguguucugcaaagau

SEQ ID NO: 1408321 - RNA, 19 nt, Artificial Sequence
  Description of Artificial Sequence: Synthetic oligonucleotide
  Antisense strand to SEQ ID NO: 1408320
aucuuugcagaacaccuca

SEQ ID NO: 1408322 - RNA, 19 nt, Artificial Sequence
  Description of Artificial Sequence: Synthetic oligonucleotide
  Sense strand starting at position 239 of SEQ ID NO: 1243312
cugcaaagauggucuugaa

SEQ ID NO: 1408323 - RNA, 19 nt, Artificial Sequence
  Description of Artificial Sequence: Synthetic oligonucleotide
  Antisense strand to SEQ ID NO: 1408322
uucaagaccaucuuugcag

SEQ ID NO: 1408324 - RNA, 19 nt, Artificial Sequence
  Description of Artificial Sequence: Synthetic oligonucleotide
  Sense strand starting at position 242 of SEQ ID NO: 1243312
caaagauggucuugaagcu

SEQ ID NO: 1408325 - RNA, 19 nt, Artificial Sequence
  Description of Artificial Sequence: Synthetic oligonucleotide
  Antisense strand to SEQ ID NO: 1408324
agcuucaagaccaucuuug

SEQ ID NO: 1408326 - RNA, 19 nt, Artificial Sequence
  Description of Artificial Sequence: Synthetic oligonucleotide
  Sense strand starting at position 355 of SEQ ID NO: 1243312
uuggaaauuucuggaugag

SEQ ID NO: 1408327 - RNA, 19 nt, Artificial Sequence
  Description of Artificial Sequence: Synthetic oligonucleotide
  Antisense strand to SEQ ID NO: 1408326
cucauccagaaauuuccaa

SEQ ID NO: 1408328 - RNA, 19 nt, Artificial Sequence
  Description of Artificial Sequence: Synthetic oligonucleotide
  Sense strand starting at position 510 of SEQ ID NO: 1243312
augagcauuuguuauucua

SEQ ID NO: 1408329 - RNA, 19 nt, Artificial Sequence
  Description of Artificial Sequence: Synthetic oligonucleotide
  Antisense strand to SEQ ID NO: 1408328
uagaauaacaaaugcucau

SEQ ID NO: 1408330 - RNA, 19 nt, Artificial Sequence
  Description of Artificial Sequence: Synthetic oligonucleotide
  Sense strand starting at position 863 of SEQ ID NO: 1243312
uugugaaucuacgauuaaa

SEQ ID NO: 1408331 - RNA, 19 nt, Artificial Sequence
  Description of Artificial Sequence: Synthetic oligonucleotide
  Antisense strand to SEQ ID NO: 1408330
uuuaaucguagauucacaa

SEQ ID NO: 1408332 - RNA, 19 nt, Artificial Sequence
  Description of Artificial Sequence: Synthetic oligonucleotide
  Sense strand starting at position 899 of SEQ ID NO: 1243312
uauacauaggcguacauau

SEQ ID NO: 1408333 - RNA, 19 nt, Artificial Sequence
  Description of Artificial Sequence: Synthetic oligonucleotide
  Antisense strand to SEQ ID NO: 1408332
auauguacgccuauguaua

SEQ ID NO: 1408334 - RNA, 19 nt, Artificial Sequence
  Description of Artificial Sequence: Synthetic oligonucleotide
  Sense strand starting at position 906 of SEQ ID NO: 1243312
aggcguacauaugaaauaa

SEQ ID NO: 1408335 - RNA, 19 nt, Artificial Sequence
  Description of Artificial Sequence: Synthetic oligonucleotide
  Antisense strand to SEQ ID NO: 1408334
uuauuucauauguacgccu

SEQ ID NO: 1408336 - RNA, 19 nt, Artificial Sequence
  Description of Artificial Sequence: Synthetic oligonucleotide
  Sense strand starting at position 916 of SEQ ID NO: 1243312
augaaauaaugguacauga

SEQ ID NO: 1408337 - RNA, 19 nt, Artificial Sequence
  Description of Artificial Sequence: Synthetic oligonucleotide
  Antisense strand to SEQ ID NO: 1408336
ucauguaccauuauuucau

SEQ ID NO: 1408338 - RNA, 19 nt, Artificial Sequence
  Description of Artificial Sequence: Synthetic oligonucleotide
  Sense strand starting at position 959 of SEQ ID NO: 1243312
ugcagauguccuggcaggu

SEQ ID NO: 1408339 - RNA, 19 nt, Artificial Sequence
  Description of Artificial Sequence: Synthetic oligonucleotide
  Antisense strand to SEQ ID NO: 1408338
accugccaggacaucugca

SEQ ID NO: 1408340 - RNA, 19 nt, Artificial Sequence
  Description of Artificial Sequence: Synthetic oligonucleotide
  Sense strand starting at position 1205 of SEQ ID NO: 1243312
gcgugaguucuggcuccga

SEQ ID NO: 1408341 - RNA, 19 nt, Artificial Sequence
  Description of Artificial Sequence: Synthetic oligonucleotide
  Antisense strand to SEQ ID NO: 1408340
ucggagccagaacucacgc

SEQ ID NO: 1408342 - RNA, 19 nt, Artificial Sequence
  Description of Artificial Sequence: Synthetic oligonucleotide
  Sense strand starting at position 1209 of SEQ ID NO: 1243312
gaguucuggcuccgagcau

SEQ ID NO: 1408343 - RNA, 19 nt, Artificial Sequence
  Description of Artificial Sequence: Synthetic oligonucleotide
  Antisense strand to SEQ ID NO: 1408342
augcucggagccagaacuc

SEQ ID NO: 1408344 - RNA, 19 nt, Artificial Sequence
  Description of Artificial Sequence: Synthetic oligonucleotide
  Sense strand starting at position 1311 of SEQ ID NO: 1243312
gggucaugcccgccuugua

SEQ ID NO: 1408345 - RNA, 19 nt, Artificial Sequence
  Description of Artificial Sequence: Synthetic oligonucleotide
  Antisense strand to SEQ ID NO: 1408344
uacaaggcgggcaugaccc

SEQ ID NO: 1408346 - RNA, 19 nt, Artificial Sequence
  Description of Artificial Sequence: Synthetic oligonucleotide
  Sense strand starting at position 1503 of SEQ ID NO: 1243312
gggugucccuggugguaga

SEQ ID NO: 1408347 - RNA, 19 nt, Artificial Sequence
  Description of Artificial Sequence: Synthetic oligonucleotide
  Antisense strand to SEQ ID NO: 1408346
ucuaccaccagggacaccc

SEQ ID NO: 1408348 - RNA, 19 nt, Artificial Sequence
  Description of Artificial Sequence: Synthetic oligonucleotide
  Sense strand starting at position 2031 of SEQ ID NO: 1243312
gcugccaguucccagauua

SEQ ID NO: 1408349 - RNA, 19 nt, Artificial Sequence
  Description of Artificial Sequence: Synthetic oligonucleotide
  Antisense strand to SEQ ID NO: 1408348
uaaucugggaacuggcagc

SEQ ID NO: 1408350 - RNA, 19 nt, Artificial Sequence
  Description of Artificial Sequence: Synthetic oligonucleotide
  Sense strand starting at position 2332 of SEQ ID NO: 1243312
cugggagacagcuggauaa

SEQ ID NO: 1408351 - RNA, 19 nt, Artificial Sequence
  Description of Artificial Sequence: Synthetic oligonucleotide
  Antisense strand to SEQ ID NO: 1408350
uuauccagcugucucccag

SEQ ID NO: 1408352 - RNA, 19 nt, Artificial Sequence
  Description of Artificial Sequence: Synthetic oligonucleotide
  Sense strand starting at position 2424 of SEQ ID NO: 1243312
gugcuuccagauugagauc

SEQ ID NO: 1408353 - RNA, 19 nt, Artificial Sequence
  Description of Artificial Sequence: Synthetic oligonucleotide
  Antisense strand to SEQ ID NO: 1408352
gaucucaaucuggaagcac

SEQ ID NO: 1408354 - RNA, 19 nt, Artificial Sequence
  Description of Artificial Sequence: Synthetic oligonucleotide
  Sense strand starting at position 2433 of SEQ ID NO: 1243312
gauugagaucccuggcuga

SEQ ID NO: 1408355 - RNA, 19 nt, Artificial Sequence
  Description of Artificial Sequence: Synthetic oligonucleotide
  Antisense strand to SEQ ID NO: 1408354
ucagccagggaucucaauc

SEQ ID NO: 1408356 - RNA, 19 nt, Artificial Sequence
  Description of Artificial Sequence: Synthetic oligonucleotide
  Sense strand starting at position 2825 of SEQ ID NO: 1243312
agaucugacuccugucauu

SEQ ID NO: 1408357 - RNA, 19 nt, Artificial Sequence
  Description of Artificial Sequence: Synthetic oligonucleotide
  Antisense strand to SEQ ID NO: 1408356
aaugacaggagucagaucu

SEQ ID NO: 1408358 - RNA, 19 nt, Artificial Sequence
  Description of Artificial Sequence: Synthetic oligonucleotide
  Sense strand starting at position 3158 of SEQ ID NO: 1243312
cgcgccuggccuuauuuaa

SEQ ID NO: 1408359 - RNA, 19 nt, Artificial Sequence
  Description of Artificial Sequence: Synthetic oligonucleotide
  Antisense strand to SEQ ID NO: 1408358
uuaaauaaggccaggcgcg

SEQ ID NO: 1408360 - RNA, 19 nt, Artificial Sequence
  Description of Artificial Sequence: Synthetic oligonucleotide
  Sense strand starting at position 3219 of SEQ ID NO: 1243312
gugugaucauaccucacuu

SEQ ID NO: 1408361 - RNA, 19 nt, Artificial Sequence
  Description of Artificial Sequence: Synthetic oligonucleotide
  Antisense strand to SEQ ID NO: 1408360
aagugagguaugaucacac

SEQ ID NO: 1408362 - RNA, 19 nt, Artificial Sequence
  Description of Artificial Sequence: Synthetic oligonucleotide
  Sense strand starting at position 3293 of SEQ ID NO: 1243312
uuaaaugugucuuguugua

SEQ ID NO: 1408363 - RNA, 19 nt, Artificial Sequence
  Description of Artificial Sequence: Synthetic oligonucleotide
  Antisense strand to SEQ ID NO: 1408362
uacaacaagacacauuuaa

SEQ ID NO: 1408364 - RNA, 19 nt, Artificial Sequence
  Description of Artificial Sequence: Synthetic oligonucleotide
  Sense strand starting at position 3295 of SEQ ID NO: 1243312
aaaugugucuuguuguaga

SEQ ID NO: 1408365 - RNA, 19 nt, Artificial Sequence
  Description of Artificial Sequence: Synthetic oligonucleotide
  Antisense strand to SEQ ID NO: 1408364
ucuacaacaagacacauuu

SEQ ID NO: 1408366 - RNA, 19 nt, Artificial Sequence
  Description of Artificial Sequence: Synthetic oligonucleotide
  Sense strand starting at position 3541 of SEQ ID NO: 1243312
aauguaguggcacaguaau

SEQ ID NO: 1408367 - RNA, 19 nt, Artificial Sequence
  Description of Artificial Sequence: Synthetic oligonucleotide
  Antisense strand to SEQ ID NO: 1408366
auuacugugccacuacauu

SEQ ID NO: 1408368 - RNA, 19 nt, Artificial Sequence
  Description of Artificial Sequence: Synthetic oligonucleotide
  Sense strand starting at position 3810 of SEQ ID NO: 1243312
aagauucuaugguuguaaa

SEQ ID NO: 1408369 - RNA, 19 nt, Artificial Sequence
  Description of Artificial Sequence: Synthetic oligonucleotide
  Antisense strand to SEQ ID NO: 1408368
uuuacaaccauagaaucuu

SEQ ID NO: 1408370 - RNA, 19 nt, Artificial Sequence
  Description of Artificial Sequence: Synthetic oligonucleotide
  Sense strand starting at position 3811 of SEQ ID NO: 1243312
agauucuaugguuguaaag

SEQ ID NO: 1408371 - RNA, 19 nt, Artificial Sequence
  Description of Artificial Sequence: Synthetic oligonucleotide
  Antisense strand to SEQ ID NO: 1408370
cuuuacaaccauagaaucu

SEQ ID NO: 1408372 - RNA, 19 nt, Artificial Sequence
  Description of Artificial Sequence: Synthetic oligonucleotide
  Sense strand starting at position 3813 of SEQ ID NO: 1243312
auucuaugguuguaaaguu

SEQ ID NO: 1408373 - RNA, 19 nt, Artificial Sequence
  Description of Artificial Sequence: Synthetic oligonucleotide
  Antisense strand to SEQ ID NO: 1408372
aacuuuacaaccauagaau

SEQ ID NO: 1408374 - RNA, 19 nt, Artificial Sequence
  Description of Artificial Sequence: Synthetic oligonucleotide
  Sense strand starting at position 87 of SEQ ID NO: 1243313
gugccaaagaagugcaaua

SEQ ID NO: 1408375 - RNA, 19 nt, Artificial Sequence
  Description of Artificial Sequence: Synthetic oligonucleotide
  Antisense strand to SEQ ID NO: 1408374
uauugcacuucuuuggcac

SEQ ID NO: 1408376 - RNA, 19 nt, Artificial Sequence
  Description of Artificial Sequence: Synthetic oligonucleotide
  Sense strand starting at position 89 of SEQ ID NO: 1243313
gccaaagaagugcaauaau

SEQ ID NO: 1408377 - RNA, 19 nt, Artificial Sequence
  Description of Artificial Sequence: Synthetic oligonucleotide
  Antisense strand to SEQ ID NO: 1408376
auuauugcacuucuuuggc

SEQ ID NO: 1408378 - RNA, 19 nt, Artificial Sequence
  Description of Artificial Sequence: Synthetic oligonucleotide
  Sense strand starting at position 120 of SEQ ID NO: 1243313
cucaaagagcucugagaag

SEQ ID NO: 1408379 - RNA, 19 nt, Artificial Sequence
  Description of Artificial Sequence: Synthetic oligonucleotide
  Antisense strand to SEQ ID NO: 1408378
cuucucagagcucuuugag

SEQ ID NO: 1408380 - RNA, 19 nt, Artificial Sequence
  Description of Artificial Sequence: Synthetic oligonucleotide
  Sense strand starting at position 131 of SEQ ID NO: 1243313
cugagaagaucucaagagu

SEQ ID NO: 1408381 - RNA, 19 nt, Artificial Sequence
  Description of Artificial Sequence: Synthetic oligonucleotide
  Antisense strand to SEQ ID NO: 1408380
acucuugagaucuucucag

SEQ ID NO: 1408382 - RNA, 19 nt, Artificial Sequence
  Description of Artificial Sequence: Synthetic oligonucleotide
  Sense strand starting at position 386 of SEQ ID NO: 1243313
ucgaaaugagcucaggagu

SEQ ID NO: 1408383 - RNA, 19 nt, Artificial Sequence
  Description of Artificial Sequence: Synthetic oligonucleotide
  Antisense strand to SEQ ID NO: 1408382
acuccugagcucauuucga

SEQ ID NO: 1408384 - RNA, 19 nt, Artificial Sequence
  Description of Artificial Sequence: Synthetic oligonucleotide
  Sense strand starting at position 463 of SEQ ID NO: 1243313
gcaguccuacucuaaguga

SEQ ID NO: 1408385 - RNA, 19 nt, Artificial Sequence
  Description of Artificial Sequence: Synthetic oligonucleotide
  Antisense strand to SEQ ID NO: 1408384
ucacuuagaguaggacugc

SEQ ID NO: 1408386 - RNA, 19 nt, Artificial Sequence
  Description of Artificial Sequence: Synthetic oligonucleotide
  Sense strand starting at position 535 of SEQ ID NO: 1243313
uucguucucagguaugaca

SEQ ID NO: 1408387 - RNA, 19 nt, Artificial Sequence
  Description of Artificial Sequence: Synthetic oligonucleotide
  Antisense strand to SEQ ID NO: 1408386
ugucauaccugagaacgaa

SEQ ID NO: 1408388 - RNA, 19 nt, Artificial Sequence
  Description of Artificial Sequence: Synthetic oligonucleotide
  Sense strand starting at position 537 of SEQ ID NO: 1243313
cguucucagguaugacaga

SEQ ID NO: 1408389 - RNA, 19 nt, Artificial Sequence
  Description of Artificial Sequence: Synthetic oligonucleotide
  Antisense strand to SEQ ID NO: 1408388
ucugucauaccugagaacg

SEQ ID NO: 1408390 - RNA, 19 nt, Artificial Sequence
  Description of Artificial Sequence: Synthetic oligonucleotide
  Sense strand starting at position 590 of SEQ ID NO: 1243313
acugauuucuuagagaguc

SEQ ID NO: 1408391 - RNA, 19 nt, Artificial Sequence
  Description of Artificial Sequence: Synthetic oligonucleotide
  Antisense strand to SEQ ID NO: 1408390
gacucucuaagaaaucagu

SEQ ID NO: 1408392 - RNA, 19 nt, Artificial Sequence
  Description of Artificial Sequence: Synthetic oligonucleotide
  Sense strand starting at position 600 of SEQ ID NO: 1243313
uagagagucucacaugaaa

SEQ ID NO: 1408393 - RNA, 19 nt, Artificial Sequence
  Description of Artificial Sequence: Synthetic oligonucleotide
  Antisense strand to SEQ ID NO: 1408392
uuucaugugagacucucua

SEQ ID NO: 1408394 - RNA, 19 nt, Artificial Sequence
  Description of Artificial Sequence: Synthetic oligonucleotide
  Sense strand starting at position 971 of SEQ ID NO: 1243313
acagguuaucgggacguca

SEQ ID NO: 1408395 - RNA, 19 nt, Artificial Sequence
  Description of Artificial Sequence: Synthetic oligonucleotide
  Antisense strand to SEQ ID NO: 1408394
ugacgucccgauaaccugu

SEQ ID NO: 1408396 - RNA, 19 nt, Artificial Sequence
  Description of Artificial Sequence: Synthetic oligonucleotide
  Sense strand starting at position 1145 of SEQ ID NO: 1243313
ucggguauagucgaucagu

SEQ ID NO: 1408397 - RNA, 19 nt, Artificial Sequence
  Description of Artificial Sequence: Synthetic oligonucleotide
  Antisense strand to SEQ ID NO: 1408396
acugaucgacuauacccga

SEQ ID NO: 1408398 - RNA, 19 nt, Artificial Sequence
  Description of Artificial Sequence: Synthetic oligonucleotide
  Sense strand starting at position 1146 of SEQ ID NO: 1243313
cggguauagucgaucagug

SEQ ID NO: 1408399 - RNA, 19 nt, Artificial Sequence
  Description of Artificial Sequence: Synthetic oligonucleotide
  Antisense strand to SEQ ID NO: 1408398
cacugaucgacuauacccg

SEQ ID NO: 1408400 - RNA, 19 nt, Artificial Sequence
  Description of Artificial Sequence: Synthetic oligonucleotide
  Sense strand starting at position 1148 of SEQ ID NO: 1243313
gguauagucgaucagugau

SEQ ID NO: 1408401 - RNA, 19 nt, Artificial Sequence
  Description of Artificial Sequence: Synthetic oligonucleotide
  Antisense strand to SEQ ID NO: 1408400
aucacugaucgacuauacc

SEQ ID NO: 1408402 - RNA, 19 nt, Artificial Sequence
  Description of Artificial Sequence: Synthetic oligonucleotide
  Sense strand starting at position 1154 of SEQ ID NO: 1243313
gucgaucagugauucagaa

SEQ ID NO: 1408403 - RNA, 19 nt, Artificial Sequence
  Description of Artificial Sequence: Synthetic oligonucleotide
  Antisense strand to SEQ ID NO: 1408402
uucugaaucacugaucgac

SEQ ID NO: 1408404 - RNA, 19 nt, Artificial Sequence
  Description of Artificial Sequence: Synthetic oligonucleotide
  Sense strand starting at position 1177 of SEQ ID NO: 1243313
agcagaguaucaucggcaa

SEQ ID NO: 1408405 - RNA, 19 nt, Artificial Sequence
  Description of Artificial Sequence: Synthetic oligonucleotide
  Antisense strand to SEQ ID NO: 1408404
uugccgaugauacucugcu

SEQ ID NO: 1408406 - RNA, 19 nt, Artificial Sequence
  Description of Artificial Sequence: Synthetic oligonucleotide
  Sense strand starting at position 1180 of SEQ ID NO: 1243313
agaguaucaucggcaacau

SEQ ID NO: 1408407 - RNA, 19 nt, Artificial Sequence
  Description of Artificial Sequence: Synthetic oligonucleotide
  Antisense strand to SEQ ID NO: 1408406
auguugccgaugauacucu

SEQ ID NO: 1408408 - RNA, 19 nt, Artificial Sequence
  Description of Artificial Sequence: Synthetic oligonucleotide
  Sense strand starting at position 1181 of SEQ ID NO: 1243313
gaguaucaucggcaacauu

SEQ ID NO: 1408409 - RNA, 19 nt, Artificial Sequence
  Description of Artificial Sequence: Synthetic oligonucleotide
  Antisense strand to SEQ ID NO: 1408408
aauguugccgaugauacuc

SEQ ID NO: 1408410 - RNA, 19 nt, Artificial Sequence
  Description of Artificial Sequence: Synthetic oligonucleotide
  Sense strand starting at position 1360 of SEQ ID NO: 1243313
uuuacaugcuugucagacu

SEQ ID NO: 1408411 - RNA, 19 nt, Artificial Sequence
  Description of Artificial Sequence: Synthetic oligonucleotide
  Antisense strand to SEQ ID NO: 1408410
agucugacaagcauguaaa

SEQ ID NO: 1408412 - RNA, 19 nt, Artificial Sequence
  Description of Artificial Sequence: Synthetic oligonucleotide
  Sense strand starting at position 1376 of SEQ ID NO: 1243313
acuggacucucuucuaaug

SEQ ID NO: 1408413 - RNA, 19 nt, Artificial Sequence
  Description of Artificial Sequence: Synthetic oligonucleotide
  Antisense strand to SEQ ID NO: 1408412
cauuagaagagaguccagu

SEQ ID NO: 1408414 - RNA, 19 nt, Artificial Sequence
  Description of Artificial Sequence: Synthetic oligonucleotide
  Sense strand starting at position 1384 of SEQ ID NO: 1243313
cucuucuaaugggcaagaa

SEQ ID NO: 1408415 - RNA, 19 nt, Artificial Sequence
  Description of Artificial Sequence: Synthetic oligonucleotide
  Antisense strand to SEQ ID NO: 1408414
uucuugcccauuagaagag

SEQ ID NO: 1408416 - RNA, 19 nt, Artificial Sequence
  Description of Artificial Sequence: Synthetic oligonucleotide
  Sense strand starting at position 1932 of SEQ ID NO: 1243313
auggcagacggaugaaauu

SEQ ID NO: 1408417 - RNA, 19 nt, Artificial Sequence
  Description of Artificial Sequence: Synthetic oligonucleotide
  Antisense strand to SEQ ID NO: 1408416
aauuucauccgucugccau

SEQ ID NO: 1408418 - RNA, 19 nt, Artificial Sequence
  Description of Artificial Sequence: Synthetic oligonucleotide
  Sense strand starting at position 2038 of SEQ ID NO: 1243313
gagagcuaucgcgagacuu

SEQ ID NO: 1408419 - RNA, 19 nt, Artificial Sequence
  Description of Artificial Sequence: Synthetic oligonucleotide
  Antisense strand to SEQ ID NO: 1408418
aagucucgcgauagcucuc

SEQ ID NO: 1408420 - RNA, 19 nt, Artificial Sequence
  Description of Artificial Sequence: Synthetic oligonucleotide
  Sense strand starting at position 2040 of SEQ ID NO: 1243313
gagcuaucgcgagacuuuc

SEQ ID NO: 1408421 - RNA, 19 nt, Artificial Sequence
  Description of Artificial Sequence: Synthetic oligonucleotide
  Antisense strand to SEQ ID NO: 1408420
gaaagucucgcgauagcuc

SEQ ID NO: 1408422 - RNA, 19 nt, Artificial Sequence
  Description of Artificial Sequence: Synthetic oligonucleotide
  Sense strand starting at position 2418 of SEQ ID NO: 1243313
uggcgaagauguucuugau

SEQ ID NO: 1408423 - RNA, 19 nt, Artificial Sequence
  Description of Artificial Sequence: Synthetic oligonucleotide
  Antisense strand to SEQ ID NO: 1408422
aucaagaacaucuucgcca

SEQ ID NO: 1408424 - RNA, 19 nt, Artificial Sequence
  Description of Artificial Sequence: Synthetic oligonucleotide
  Sense strand starting at position 3001 of SEQ ID NO: 1243313
cugcucauucguugcauuu

SEQ ID NO: 1408425 - RNA, 19 nt, Artificial Sequence
  Description of Artificial Sequence: Synthetic oligonucleotide
  Antisense strand to SEQ ID NO: 1408424
aaaugcaacgaaugagcag

SEQ ID NO: 1408426 - RNA, 19 nt, Artificial Sequence
  Description of Artificial Sequence: Synthetic oligonucleotide
  Sense strand starting at position 3030 of SEQ ID NO: 1243313
cuagcaugguaccuggaua

SEQ ID NO: 1408427 - RNA, 19 nt, Artificial Sequence
  Description of Artificial Sequence: Synthetic oligonucleotide
  Antisense strand to SEQ ID NO: 1408426
uauccagguaccaugcuag

SEQ ID NO: 1408428 - RNA, 19 nt, Artificial Sequence
  Description of Artificial Sequence: Synthetic oligonucleotide
  Sense strand starting at position 3042 of SEQ ID NO: 1243313
cuggauauuugcuaaauaa

SEQ ID NO: 1408429 - RNA, 19 nt, Artificial Sequence
  Description of Artificial Sequence: Synthetic oligonucleotide
  Antisense strand to SEQ ID NO: 1408428
uuauuuagcaaauauccag

SEQ ID NO: 1408430 - RNA, 19 nt, Artificial Sequence
  Description of Artificial Sequence: Synthetic oligonucleotide
  Sense strand starting at position 3317 of SEQ ID NO: 1243313
uaaagaaagugagacauga

SEQ ID NO: 1408431 - RNA, 19 nt, Artificial Sequence
  Description of Artificial Sequence: Synthetic oligonucleotide
  Antisense strand to SEQ ID NO: 1408430
ucaugucucacuuucuuua

SEQ ID NO: 1408432 - RNA, 19 nt, Artificial Sequence
  Description of Artificial Sequence: Synthetic oligonucleotide
  Sense strand starting at position 3414 of SEQ ID NO: 1243313
guaguuaaucaguagaaua

SEQ ID NO: 1408433 - RNA, 19 nt, Artificial Sequence
  Description of Artificial Sequence: Synthetic oligonucleotide
  Antisense strand to SEQ ID NO: 1408432
uauucuacugauuaacuac

SEQ ID NO: 1408434 - RNA, 19 nt, Artificial Sequence
  Description of Artificial Sequence: Synthetic oligonucleotide
  Sense strand starting at position 3620 of SEQ ID NO: 1243313
gguacaacaucagugcaau

SEQ ID NO: 1408435 - RNA, 19 nt, Artificial Sequence
  Description of Artificial Sequence: Synthetic oligonucleotide
  Antisense strand to SEQ ID NO: 1408434
auugcacugauguuguacc

SEQ ID NO: 1408436 - RNA, 19 nt, Artificial Sequence
  Description of Artificial Sequence: Synthetic oligonucleotide
  Sense strand starting at position 3621 of SEQ ID NO: 1243313
guacaacaucagugcaaua

SEQ ID NO: 1408437 - RNA, 19 nt, Artificial Sequence
  Description of Artificial Sequence: Synthetic oligonucleotide
  Antisense strand to SEQ ID NO: 1408436
uauugcacugauguuguac

SEQ ID NO: 1408438 - RNA, 19 nt, Artificial Sequence
  Description of Artificial Sequence: Synthetic oligonucleotide
  Sense strand starting at position 3658 of SEQ ID NO: 1243313
acagcuaguuaaucaguuu

SEQ ID NO: 1408439 - RNA, 19 nt, Artificial Sequence
  Description of Artificial Sequence: Synthetic oligonucleotide
  Antisense strand to SEQ ID NO: 1408438
aaacugauuaacuagcugu

SEQ ID NO: 1408440 - RNA, 19 nt, Artificial Sequence
  Description of Artificial Sequence: Synthetic oligonucleotide
  Sense strand starting at position 3661 of SEQ ID NO: 1243313
gcuaguuaaucaguuuaag

SEQ ID NO: 1408441 - RNA, 19 nt, Artificial Sequence
  Description of Artificial Sequence: Synthetic oligonucleotide
  Antisense strand to SEQ ID NO: 1408440
cuuaaacugauuaacuagc

SEQ ID NO: 1408442 - RNA, 19 nt, Artificial Sequence
  Description of Artificial Sequence: Synthetic oligonucleotide
  Sense strand starting at position 3676 of SEQ ID NO: 1243313
uaagaauuguucccgucag

SEQ ID NO: 1408443 - RNA, 19 nt, Artificial Sequence
  Description of Artificial Sequence: Synthetic oligonucleotide
  Antisense strand to SEQ ID NO: 1408442
cugacgggaacaauucuua

SEQ ID NO: 1408444 - RNA, 19 nt, Artificial Sequence
  Description of Artificial Sequence: Synthetic oligonucleotide
  Sense strand starting at position 3750 of SEQ ID NO: 1243313
ucuagcuaccaagaaguua

SEQ ID NO: 1408445 - RNA, 19 nt, Artificial Sequence
  Description of Artificial Sequence: Synthetic oligonucleotide
  Antisense strand to SEQ ID NO: 1408444
uaacuucuugguagcuaga

SEQ ID NO: 1408446 - RNA, 19 nt, Artificial Sequence
  Description of Artificial Sequence: Synthetic oligonucleotide
  Sense strand starting at position 3782 of SEQ ID NO: 1243313
gaagcuuuccaaggaguua

SEQ ID NO: 1408447 - RNA, 19 nt, Artificial Sequence
  Description of Artificial Sequence: Synthetic oligonucleotide
  Antisense strand to SEQ ID NO: 1408446
uaacuccuuggaaagcuuc

SEQ ID NO: 1408448 - RNA, 19 nt, Artificial Sequence
  Description of Artificial Sequence: Synthetic oligonucleotide
  Sense strand starting at position 3798 of SEQ ID NO: 1243313
uuaugaaaucuuuguagac

SEQ ID NO: 1408449 - RNA, 19 nt, Artificial Sequence
  Description of Artificial Sequence: Synthetic oligonucleotide
  Antisense strand to SEQ ID NO: 1408448
gucuacaaagauuucauaa

SEQ ID NO: 1408450 - RNA, 19 nt, Artificial Sequence
  Description of Artificial Sequence: Synthetic oligonucleotide
  Sense strand starting at position 3902 of SEQ ID NO: 1243313
acaccaguguagucacuau

SEQ ID NO: 1408451 - RNA, 19 nt, Artificial Sequence
  Description of Artificial Sequence: Synthetic oligonucleotide
  Antisense strand to SEQ ID NO: 1408450
auagugacuacacuggugu

SEQ ID NO: 1408452 - RNA, 19 nt, Artificial Sequence
  Description of Artificial Sequence: Synthetic oligonucleotide
  Sense strand starting at position 3949 of SEQ ID NO: 1243313
uggucaguauuaccauaaa

SEQ ID NO: 1408453 - RNA, 19 nt, Artificial Sequence
  Description of Artificial Sequence: Synthetic oligonucleotide
  Antisense strand to SEQ ID NO: 1408452
uuuaugguaauacugacca

SEQ ID NO: 1408454 - RNA, 19 nt, Artificial Sequence
  Description of Artificial Sequence: Synthetic oligonucleotide
  Sense strand starting at position 73 of SEQ ID NO: 1243314
gcaacaaaugccugcgaaa

SEQ ID NO: 1408455 - RNA, 19 nt, Artificial Sequence
  Description of Artificial Sequence: Synthetic oligonucleotide
  Antisense strand to SEQ ID NO: 1408454
uuucgcaggcauuuguugc

SEQ ID NO: 1408456 - RNA, 19 nt, Artificial Sequence
  Description of Artificial Sequence: Synthetic oligonucleotide
  Sense strand starting at position 862 of SEQ ID NO: 1243314
uuuggaagcuuguauguaa

SEQ ID NO: 1408457 - RNA, 19 nt, Artificial Sequence
  Description of Artificial Sequence: Synthetic oligonucleotide
  Antisense strand to SEQ ID NO: 1408456
uuacauacaagcuuccaaa

SEQ ID NO: 1408458 - RNA, 19 nt, Artificial Sequence
  Description of Artificial Sequence: Synthetic oligonucleotide
  Sense strand starting at position 865 of SEQ ID NO: 1243314
ggaagcuuguauguaaggu

SEQ ID NO: 1408459 - RNA, 19 nt, Artificial Sequence
  Description of Artificial Sequence: Synthetic oligonucleotide
  Antisense strand to SEQ ID NO: 1408458
accuuacauacaagcuucc

SEQ ID NO: 1408460 - RNA, 19 nt, Artificial Sequence
  Description of Artificial Sequence: Synthetic oligonucleotide
  Sense strand starting at position 866 of SEQ ID NO: 1243314
gaagcuuguauguaagguu

SEQ ID NO: 1408461 - RNA, 19 nt, Artificial Sequence
  Description of Artificial Sequence: Synthetic oligonucleotide
  Antisense strand to SEQ ID NO: 1408460
aaccuuacauacaagcuuc

SEQ ID NO: 1408462 - RNA, 19 nt, Artificial Sequence
  Description of Artificial Sequence: Synthetic oligonucleotide
  Sense strand starting at position 927 of SEQ ID NO: 1243314
uuucucuuguuuggugaga

SEQ ID NO: 1408463 - RNA, 19 nt, Artificial Sequence
  Description of Artificial Sequence: Synthetic oligonucleotide
  Antisense strand to SEQ ID NO: 1408462
ucucaccaaacaagagaaa

SEQ ID NO: 1408464 - RNA, 19 nt, Artificial Sequence
  Description of Artificial Sequence: Synthetic oligonucleotide
  Sense strand starting at position 928 of SEQ ID NO: 1243314
uucucuuguuuggugagau

SEQ ID NO: 1408465 - RNA, 19 nt, Artificial Sequence
  Description of Artificial Sequence: Synthetic oligonucleotide
  Antisense strand to SEQ ID NO: 1408464
aucucaccaaacaagagaa

SEQ ID NO: 1408466 - RNA, 19 nt, Artificial Sequence
  Description of Artificial Sequence: Synthetic oligonucleotide
  Sense strand starting at position 929 of SEQ ID NO: 1243314
ucucuuguuuggugagaug

SEQ ID NO: 1408467 - RNA, 19 nt, Artificial Sequence
  Description of Artificial Sequence: Synthetic oligonucleotide
  Antisense strand to SEQ ID NO: 1408466
caucucaccaaacaagaga

SEQ ID NO: 1408468 - RNA, 19 nt, Artificial Sequence
  Description of Artificial Sequence: Synthetic oligonucleotide
  Sense strand starting at position 1023 of SEQ ID NO: 1243314
acgcucacaugacaaauau

SEQ ID NO: 1408469 - RNA, 19 nt, Artificial Sequence
  Description of Artificial Sequence: Synthetic oligonucleotide
  Antisense strand to SEQ ID NO: 1408468
auauuugucaugugagcgu

SEQ ID NO: 1408470 - RNA, 19 nt, Artificial Sequence
  Description of Artificial Sequence: Synthetic oligonucleotide
  Sense strand starting at position 1206 of SEQ ID NO: 1243314
aaaugaauucgcugcgaau

SEQ ID NO: 1408471 - RNA, 19 nt, Artificial Sequence
  Description of Artificial Sequence: Synthetic oligonucleotide
  Antisense strand to SEQ ID NO: 1408470
auucgcagcgaauucauuu

SEQ ID NO: 1408472 - RNA, 19 nt, Artificial Sequence
  Description of Artificial Sequence: Synthetic oligonucleotide
  Sense strand starting at position 1208 of SEQ ID NO: 1243314
augaauucgcugcgaaugu

SEQ ID NO: 1408473 - RNA, 19 nt, Artificial Sequence
  Description of Artificial Sequence: Synthetic oligonucleotide
  Antisense strand to SEQ ID NO: 1408472
acauucgcagcgaauucau

SEQ ID NO: 1408474 - RNA, 19 nt, Artificial Sequence
  Description of Artificial Sequence: Synthetic oligonucleotide
  Sense strand starting at position 1225 of SEQ ID NO: 1243314
gugggaagaugcgcugaaa

SEQ ID NO: 1408475 - RNA, 19 nt, Artificial Sequence
  Description of Artificial Sequence: Synthetic oligonucleotide
  Antisense strand to SEQ ID NO: 1408474
uuucagcgcaucuucccac

SEQ ID NO: 1408476 - RNA, 19 nt, Artificial Sequence
  Description of Artificial Sequence: Synthetic oligonucleotide
  Sense strand starting at position 1257 of SEQ ID NO: 1243314
ucuggcuucgcucagguau

SEQ ID NO: 1408477 - RNA, 19 nt, Artificial Sequence
  Description of Artificial Sequence: Synthetic oligonucleotide
  Antisense strand to SEQ ID NO: 1408476
auaccugagcgaagccaga

SEQ ID NO: 1408478 - RNA, 19 nt, Artificial Sequence
  Description of Artificial Sequence: Synthetic oligonucleotide
  Sense strand starting at position 1350 of SEQ ID NO: 1243314
ggcccuuuaaugcgaguca

SEQ ID NO: 1408479 - RNA, 19 nt, Artificial Sequence
  Description of Artificial Sequence: Synthetic oligonucleotide
  Antisense strand to SEQ ID NO: 1408478
ugacucgcauuaaagggcc

SEQ ID NO: 1408480 - RNA, 19 nt, Artificial Sequence
  Description of Artificial Sequence: Synthetic oligonucleotide
  Sense strand starting at position 1351 of SEQ ID NO: 1243314
gcccuuuaaugcgagucaa

SEQ ID NO: 1408481 - RNA, 19 nt, Artificial Sequence
  Description of Artificial Sequence: Synthetic oligonucleotide
  Antisense strand to SEQ ID NO: 1408480
uugacucgcauuaaagggc

SEQ ID NO: 1408482 - RNA, 19 nt, Artificial Sequence
  Description of Artificial Sequence: Synthetic oligonucleotide
  Sense strand starting at position 1359 of SEQ ID NO: 1243314
augcgagucaauggcagau

SEQ ID NO: 1408483 - RNA, 19 nt, Artificial Sequence
  Description of Artificial Sequence: Synthetic oligonucleotide
  Antisense strand to SEQ ID NO: 1408482
aucugccauugacucgcau

SEQ ID NO: 1408484 - RNA, 19 nt, Artificial Sequence
  Description of Artificial Sequence: Synthetic oligonucleotide
  Sense strand starting at position 1363 of SEQ ID NO: 1243314
gagucaauggcagaugcua

SEQ ID NO: 1408485 - RNA, 19 nt, Artificial Sequence
  Description of Artificial Sequence: Synthetic oligonucleotide
  Antisense strand to SEQ ID NO: 1408484
uagcaucugccauugacuc

SEQ ID NO: 1408486 - RNA, 19 nt, Artificial Sequence
  Description of Artificial Sequence: Synthetic oligonucleotide
  Sense strand starting at position 1365 of SEQ ID NO: 1243314
gucaauggcagaugcuaau

SEQ ID NO: 1408487 - RNA, 19 nt, Artificial Sequence
  Description of Artificial Sequence: Synthetic oligonucleotide
  Antisense strand to SEQ ID NO: 1408486
auuagcaucugccauugac

SEQ ID NO: 1408488 - RNA, 19 nt, Artificial Sequence
  Description of Artificial Sequence: Synthetic oligonucleotide
  Sense strand starting at position 1792 of SEQ ID NO: 1243314
uccgccauuugcugggaaa

SEQ ID NO: 1408489 - RNA, 19 nt, Artificial Sequence
  Description of Artificial Sequence: Synthetic oligonucleotide
  Antisense strand to SEQ ID NO: 1408488
uuucccagcaaauggcgga

SEQ ID NO: 1408490 - RNA, 19 nt, Artificial Sequence
  Description of Artificial Sequence: Synthetic oligonucleotide
  Sense strand starting at position 2565 of SEQ ID NO: 1243314
guucuuucuccgcaggaca

SEQ ID NO: 1408491 - RNA, 19 nt, Artificial Sequence
  Description of Artificial Sequence: Synthetic oligonucleotide
  Antisense strand to SEQ ID NO: 1408490
uguccugcggagaaagaac

SEQ ID NO: 1408492 - RNA, 19 nt, Artificial Sequence
  Description of Artificial Sequence: Synthetic oligonucleotide
  Sense strand starting at position 2770 of SEQ ID NO: 1243314
cgagaugccuccucuucuu

SEQ ID NO: 1408493 - RNA, 19 nt, Artificial Sequence
  Description of Artificial Sequence: Synthetic oligonucleotide
  Antisense strand to SEQ ID NO: 1408492
aagaagaggaggcaucucg

SEQ ID NO: 1408494 - RNA, 19 nt, Artificial Sequence
  Description of Artificial Sequence: Synthetic oligonucleotide
  Sense strand starting at position 2823 of SEQ ID NO: 1243314
guuggcaggugauguguaa

SEQ ID NO: 1408495 - RNA, 19 nt, Artificial Sequence
  Description of Artificial Sequence: Synthetic oligonucleotide
  Antisense strand to SEQ ID NO: 1408494
uuacacaucaccugccaac

SEQ ID NO: 1408496 - RNA, 19 nt, Artificial Sequence
  Description of Artificial Sequence: Synthetic oligonucleotide
  Sense strand starting at position 2876 of SEQ ID NO: 1243314
cgaacagucuuguggccau

SEQ ID NO: 1408497 - RNA, 19 nt, Artificial Sequence
  Description of Artificial Sequence: Synthetic oligonucleotide
  Antisense strand to SEQ ID NO: 1408496
auggccacaagacuguucg

SEQ ID NO: 1408498 - RNA, 19 nt, Artificial Sequence
  Description of Artificial Sequence: Synthetic oligonucleotide
  Sense strand starting at position 2895 of SEQ ID NO: 1243314
gcgcaucucaagugaacua

SEQ ID NO: 1408499 - RNA, 19 nt, Artificial Sequence
  Description of Artificial Sequence: Synthetic oligonucleotide
  Antisense strand to SEQ ID NO: 1408498
uaguucacuugagaugcgc

SEQ ID NO: 1408500 - RNA, 19 nt, Artificial Sequence
  Description of Artificial Sequence: Synthetic oligonucleotide
  Sense strand starting at position 3137 of SEQ ID NO: 1243314
gcagguuacccgggaguuu

SEQ ID NO: 1408501 - RNA, 19 nt, Artificial Sequence
  Description of Artificial Sequence: Synthetic oligonucleotide
  Antisense strand to SEQ ID NO: 1408500
aaacucccggguaaccugc

SEQ ID NO: 1408502 - RNA, 19 nt, Artificial Sequence
  Description of Artificial Sequence: Synthetic oligonucleotide
  Sense strand starting at position 3138 of SEQ ID NO: 1243314
cagguuacccgggaguuua

SEQ ID NO: 1408503 - RNA, 19 nt, Artificial Sequence
  Description of Artificial Sequence: Synthetic oligonucleotide
  Antisense strand to SEQ ID NO: 1408502
uaaacucccggguaaccug

SEQ ID NO: 1408504 - RNA, 19 nt, Artificial Sequence
  Description of Artificial Sequence: Synthetic oligonucleotide
  Sense strand starting at position 3171 of SEQ ID NO: 1243314
ggagcuagcaccugaguau

SEQ ID NO: 1408505 - RNA, 19 nt, Artificial Sequence
  Description of Artificial Sequence: Synthetic oligonucleotide
  Antisense strand to SEQ ID NO: 1408504
auacucaggugcuagcucc

SEQ ID NO: 1408506 - RNA, 19 nt, Artificial Sequence
  Description of Artificial Sequence: Synthetic oligonucleotide
  Sense strand starting at position 3180 of SEQ ID NO: 1243314
accugaguaucagauccua

SEQ ID NO: 1408507 - RNA, 19 nt, Artificial Sequence
  Description of Artificial Sequence: Synthetic oligonucleotide
  Antisense strand to SEQ ID NO: 1408506
uaggaucugauacucaggu

SEQ ID NO: 1408508 - RNA, 19 nt, Artificial Sequence
  Description of Artificial Sequence: Synthetic oligonucleotide
  Sense strand starting at position 3185 of SEQ ID NO: 1243314
aguaucagauccuaaguga

SEQ ID NO: 1408509 - RNA, 19 nt, Artificial Sequence
  Description of Artificial Sequence: Synthetic oligonucleotide
  Antisense strand to SEQ ID NO: 1408508
ucacuuaggaucugauacu

SEQ ID NO: 1408510 - RNA, 19 nt, Artificial Sequence
  Description of Artificial Sequence: Synthetic oligonucleotide
  Sense strand starting at position 3262 of SEQ ID NO: 1243314
gccgcaguauuggagagaa

SEQ ID NO: 1408511 - RNA, 19 nt, Artificial Sequence
  Description of Artificial Sequence: Synthetic oligonucleotide
  Antisense strand to SEQ ID NO: 1408510
uucucuccaauacugcggc

SEQ ID NO: 1408512 - RNA, 19 nt, Artificial Sequence
  Description of Artificial Sequence: Synthetic oligonucleotide
  Sense strand starting at position 3264 of SEQ ID NO: 1243314
cgcaguauuggagagaaga

SEQ ID NO: 1408513 - RNA, 19 nt, Artificial Sequence
  Description of Artificial Sequence: Synthetic oligonucleotide
  Antisense strand to SEQ ID NO: 1408512
ucuucucuccaauacugcg

SEQ ID NO: 1408514 - RNA, 19 nt, Artificial Sequence
  Description of Artificial Sequence: Synthetic oligonucleotide
  Sense strand starting at position 3284 of SEQ ID NO: 1243314
gguggcaaucccugugauc

SEQ ID NO: 1408515 - RNA, 19 nt, Artificial Sequence
  Description of Artificial Sequence: Synthetic oligonucleotide
  Antisense strand to SEQ ID NO: 1408514
gaucacagggauugccacc

SEQ ID NO: 1408516 - RNA, 19 nt, Artificial Sequence
  Description of Artificial Sequence: Synthetic oligonucleotide
  Sense strand starting at position 3325 of SEQ ID NO: 1243314
gagacagcuccaugaagcu

SEQ ID NO: 1408517 - RNA, 19 nt, Artificial Sequence
  Description of Artificial Sequence: Synthetic oligonucleotide
  Antisense strand to SEQ ID NO: 1408516
agcuucauggagcugucuc

SEQ ID NO: 1408518 - RNA, 19 nt, Artificial Sequence
  Description of Artificial Sequence: Synthetic oligonucleotide
  Sense strand starting at position 3334 of SEQ ID NO: 1243314
ccaugaagcuugguucuga

SEQ ID NO: 1408519 - RNA, 19 nt, Artificial Sequence
  Description of Artificial Sequence: Synthetic oligonucleotide
  Antisense strand to SEQ ID NO: 1408518
ucagaaccaagcuucaugg

SEQ ID NO: 1408520 - RNA, 19 nt, Artificial Sequence
  Description of Artificial Sequence: Synthetic oligonucleotide
  Sense strand starting at position 3338 of SEQ ID NO: 1243314
gaagcuugguucugaccca

SEQ ID NO: 1408521 - RNA, 19 nt, Artificial Sequence
  Description of Artificial Sequence: Synthetic oligonucleotide
  Antisense strand to SEQ ID NO: 1408520
ugggucagaaccaagcuuc

SEQ ID NO: 1408522 - RNA, 19 nt, Artificial Sequence
  Description of Artificial Sequence: Synthetic oligonucleotide
  Sense strand starting at position 3407 of SEQ ID NO: 1243314
agaccuaucucaggucaag

SEQ ID NO: 1408523 - RNA, 19 nt, Artificial Sequence
  Description of Artificial Sequence: Synthetic oligonucleotide
  Antisense strand to SEQ ID NO: 1408522
cuugaccugagauaggucu

SEQ ID NO: 1408524 - RNA, 19 nt, Artificial Sequence
  Description of Artificial Sequence: Synthetic oligonucleotide
  Sense strand starting at position 3662 of SEQ ID NO: 1243314
guucgaacuccugaccuua

SEQ ID NO: 1408525 - RNA, 19 nt, Artificial Sequence
  Description of Artificial Sequence: Synthetic oligonucleotide
  Antisense strand to SEQ ID NO: 1408524
uaaggucaggaguucgaac

SEQ ID NO: 1408526 - RNA, 19 nt, Artificial Sequence
  Description of Artificial Sequence: Synthetic oligonucleotide
  Sense strand starting at position 3951 of SEQ ID NO: 1243314
cuggcuugagcuggacaau

SEQ ID NO: 1408527 - RNA, 19 nt, Artificial Sequence
  Description of Artificial Sequence: Synthetic oligonucleotide
  Antisense strand to SEQ ID NO: 1408526
auuguccagcucaagccag

SEQ ID NO: 1408528 - RNA, 19 nt, Artificial Sequence
  Description of Artificial Sequence: Synthetic oligonucleotide
  Sense strand starting at position 3966 of SEQ ID NO: 1243314
caaugcuauugugauguca

SEQ ID NO: 1408529 - RNA, 19 nt, Artificial Sequence
  Description of Artificial Sequence: Synthetic oligonucleotide
  Antisense strand to SEQ ID NO: 1408528
ugacaucacaauagcauug

SEQ ID NO: 1408530 - RNA, 19 nt, Artificial Sequence
  Description of Artificial Sequence: Synthetic oligonucleotide
  Sense strand starting at position 139 of SEQ ID NO: 1243315
gagugaggaugacaguauu

SEQ ID NO: 1408531 - RNA, 19 nt, Artificial Sequence
  Description of Artificial Sequence: Synthetic oligonucleotide
  Antisense strand to SEQ ID NO: 1408530
aauacugucauccucacuc

SEQ ID NO: 1408532 - RNA, 19 nt, Artificial Sequence
  Description of Artificial Sequence: Synthetic oligonucleotide
  Sense strand starting at position 149 of SEQ ID NO: 1243315
gacaguauuuaggacagaa

SEQ ID NO: 1408533 - RNA, 19 nt, Artificial Sequence
  Description of Artificial Sequence: Synthetic oligonucleotide
  Antisense strand to SEQ ID NO: 1408532
uucuguccuaaauacuguc

SEQ ID NO: 1408534 - RNA, 19 nt, Artificial Sequence
  Description of Artificial Sequence: Synthetic oligonucleotide
  Sense strand starting at position 164 of SEQ ID NO: 1243315
agaagauuguguucagguc

SEQ ID NO: 1408535 - RNA, 19 nt, Artificial Sequence
  Description of Artificial Sequence: Synthetic oligonucleotide
  Antisense strand to SEQ ID NO: 1408534
gaccugaacacaaucuucu

SEQ ID NO: 1408536 - RNA, 19 nt, Artificial Sequence
  Description of Artificial Sequence: Synthetic oligonucleotide
  Sense strand starting at position 209 of SEQ ID NO: 1243315
ggugcucgguccuggagaa

SEQ ID NO: 1408537 - RNA, 19 nt, Artificial Sequence
  Description of Artificial Sequence: Synthetic oligonucleotide
  Antisense strand to SEQ ID NO: 1408536
uucuccaggaccgagcacc

SEQ ID NO: 1408538 - RNA, 19 nt, Artificial Sequence
  Description of Artificial Sequence: Synthetic oligonucleotide
  Sense strand starting at position 210 of SEQ ID NO: 1243315
gugcucgguccuggagaau

SEQ ID NO: 1408539 - RNA, 19 nt, Artificial Sequence
  Description of Artificial Sequence: Synthetic oligonucleotide
  Antisense strand to SEQ ID NO: 1408538
auucuccaggaccgagcac

SEQ ID NO: 1408540 - RNA, 19 nt, Artificial Sequence
  Description of Artificial Sequence: Synthetic oligonucleotide
  Sense strand starting at position 213 of SEQ ID NO: 1243315
cucgguccuggagaaucua

SEQ ID NO: 1408541 - RNA, 19 nt, Artificial Sequence
  Description of Artificial Sequence: Synthetic oligonucleotide
  Antisense strand to SEQ ID NO: 1408540
uagauucuccaggaccgag

SEQ ID NO: 1408542 - RNA, 19 nt, Artificial Sequence
  Description of Artificial Sequence: Synthetic oligonucleotide
  Sense strand starting at position 273 of SEQ ID NO: 1243315
gacccugugucaggugaga

SEQ ID NO: 1408543 - RNA, 19 nt, Artificial Sequence
  Description of Artificial Sequence: Synthetic oligonucleotide
  Antisense strand to SEQ ID NO: 1408542
ucucaccugacacaggguc

SEQ ID NO: 1408544 - RNA, 19 nt, Artificial Sequence
  Description of Artificial Sequence: Synthetic oligonucleotide
  Sense strand starting at position 275 of SEQ ID NO: 1243315
cccugugucaggugagaag

SEQ ID NO: 1408545 - RNA, 19 nt, Artificial Sequence
  Description of Artificial Sequence: Synthetic oligonucleotide
  Antisense strand to SEQ ID NO: 1408544
cuucucaccugacacaggg

SEQ ID NO: 1408546 - RNA, 19 nt, Artificial Sequence
  Description of Artificial Sequence: Synthetic oligonucleotide
  Sense strand starting at position 507 of SEQ ID NO: 1243315
ccacgagaucugugaggcu

SEQ ID NO: 1408547 - RNA, 19 nt, Artificial Sequence
  Description of Artificial Sequence: Synthetic oligonucleotide
  Antisense strand to SEQ ID NO: 1408546
agccucacagaucucgugg

SEQ ID NO: 1408548 - RNA, 19 nt, Artificial Sequence
  Description of Artificial Sequence: Synthetic oligonucleotide
  Sense strand starting at position 807 of SEQ ID NO: 1243315
gggagaaucgcacgcaguu

SEQ ID NO: 1408549 - RNA, 19 nt, Artificial Sequence
  Description of Artificial Sequence: Synthetic oligonucleotide
  Antisense strand to SEQ ID NO: 1408548
aacugcgugcgauucuccc

SEQ ID NO: 1408550 - RNA, 19 nt, Artificial Sequence
  Description of Artificial Sequence: Synthetic oligonucleotide
  Sense strand starting at position 951 of SEQ ID NO: 1243315
caggacugaccaggucuua

SEQ ID NO: 1408551 - RNA, 19 nt, Artificial Sequence
  Description of Artificial Sequence: Synthetic oligonucleotide
  Antisense strand to SEQ ID NO: 1408550
uaagaccuggucaguccug

SEQ ID NO: 1408552 - RNA, 19 nt, Artificial Sequence
  Description of Artificial Sequence: Synthetic oligonucleotide
  Sense strand starting at position 956 of SEQ ID NO: 1243315
cugaccaggucuuaccaau

SEQ ID NO: 1408553 - RNA, 19 nt, Artificial Sequence
  Description of Artificial Sequence: Synthetic oligonucleotide
  Antisense strand to SEQ ID NO: 1408552
auugguaagaccuggucag

SEQ ID NO: 1408554 - RNA, 19 nt, Artificial Sequence
  Description of Artificial Sequence: Synthetic oligonucleotide
  Sense strand starting at position 1588 of SEQ ID NO: 1243315
ugaccuaagccuggagaaa

SEQ ID NO: 1408555 - RNA, 19 nt, Artificial Sequence
  Description of Artificial Sequence: Synthetic oligonucleotide
  Antisense strand to SEQ ID NO: 1408554
uuucuccaggcuuagguca

SEQ ID NO: 1408556 - RNA, 19 nt, Artificial Sequence
  Description of Artificial Sequence: Synthetic oligonucleotide
  Sense strand starting at position 2976 of SEQ ID NO: 1243315
ggguguguggcuuggacau

SEQ ID NO: 1408557 - RNA, 19 nt, Artificial Sequence
  Description of Artificial Sequence: Synthetic oligonucleotide
  Antisense strand to SEQ ID NO: 1408556
auguccaagccacacaccc

SEQ ID NO: 1408558 - RNA, 19 nt, Artificial Sequence
  Description of Artificial Sequence: Synthetic oligonucleotide
  Sense strand starting at position 3007 of SEQ ID NO: 1243315
ccaucuguccagugggacu

SEQ ID NO: 1408559 - RNA, 19 nt, Artificial Sequence
  Description of Artificial Sequence: Synthetic oligonucleotide
  Antisense strand to SEQ ID NO: 1408558
agucccacuggacagaugg

SEQ ID NO: 1408560 - RNA, 19 nt, Artificial Sequence
  Description of Artificial Sequence: Synthetic oligonucleotide
  Sense strand starting at position 3737 of SEQ ID NO: 1243315
acgugaauccugugaccua

SEQ ID NO: 1408561 - RNA, 19 nt, Artificial Sequence
  Description of Artificial Sequence: Synthetic oligonucleotide
  Antisense strand to SEQ ID NO: 1408560
uaggucacaggauucacgu

SEQ ID NO: 1408562 - RNA, 19 nt, Artificial Sequence
  Description of Artificial Sequence: Synthetic oligonucleotide
  Sense strand starting at position 3738 of SEQ ID NO: 1243315
cgugaauccugugaccuag

SEQ ID NO: 1408563 - RNA, 19 nt, Artificial Sequence
  Description of Artificial Sequence: Synthetic oligonucleotide
  Antisense strand to SEQ ID NO: 1408562
cuaggucacaggauucacg

SEQ ID NO: 1408564 - RNA, 19 nt, Artificial Sequence
  Description of Artificial Sequence: Synthetic oligonucleotide
  Sense strand starting at position 16 of SEQ ID NO: 1243316
ucuuguugcccacgaggau

SEQ ID NO: 1408565 - RNA, 19 nt, Artificial Sequence
  Description of Artificial Sequence: Synthetic oligonucleotide
  Antisense strand to SEQ ID NO: 1408564
auccucgugggcaacaaga

SEQ ID NO: 1408566 - RNA, 19 nt, Artificial Sequence
  Description of Artificial Sequence: Synthetic oligonucleotide
  Sense strand starting at position 103 of SEQ ID NO: 1243316
ugcccuuguccgucacuga

SEQ ID NO: 1408567 - RNA, 19 nt, Artificial Sequence
  Description of Artificial Sequence: Synthetic oligonucleotide
  Antisense strand to SEQ ID NO: 1408566
ucagugacggacaagggca

SEQ ID NO: 1408568 - RNA, 19 nt, Artificial Sequence
  Description of Artificial Sequence: Synthetic oligonucleotide
  Sense strand starting at position 106 of SEQ ID NO: 1243316
ccuuguccgucacugagua

SEQ ID NO: 1408569 - RNA, 19 nt, Artificial Sequence
  Description of Artificial Sequence: Synthetic oligonucleotide
  Antisense strand to SEQ ID NO: 1408568
uacucagugacggacaagg

SEQ ID NO: 1408570 - RNA, 19 nt, Artificial Sequence
  Description of Artificial Sequence: Synthetic oligonucleotide
  Sense strand starting at position 321 of SEQ ID NO: 1243316
ugucguagaccaugaguga

SEQ ID NO: 1408571 - RNA, 19 nt, Artificial Sequence
  Description of Artificial Sequence: Synthetic oligonucleotide
  Antisense strand to SEQ ID NO: 1408570
ucacucauggucuacgaca

SEQ ID NO: 1408572 - RNA, 19 nt, Artificial Sequence
  Description of Artificial Sequence: Synthetic oligonucleotide
  Sense strand starting at position 322 of SEQ ID NO: 1243316
gucguagaccaugagugau

SEQ ID NO: 1408573 - RNA, 19 nt, Artificial Sequence
  Description of Artificial Sequence: Synthetic oligonucleotide
  Antisense strand to SEQ ID NO: 1408572
aucacucauggucuacgac

SEQ ID NO: 1408574 - RNA, 19 nt, Artificial Sequence
  Description of Artificial Sequence: Synthetic oligonucleotide
  Sense strand starting at position 368 of SEQ ID NO: 1243316
cgaucauaggugugcccua

SEQ ID NO: 1408575 - RNA, 19 nt, Artificial Sequence
  Description of Artificial Sequence: Synthetic oligonucleotide
  Antisense strand to SEQ ID NO: 1408574
uagggcacaccuaugaucg

SEQ ID NO: 1408576 - RNA, 19 nt, Artificial Sequence
  Description of Artificial Sequence: Synthetic oligonucleotide
  Sense strand starting at position 408 of SEQ ID NO: 1243316
uuaccagcugguugucaaa

SEQ ID NO: 1408577 - RNA, 19 nt, Artificial Sequence
  Description of Artificial Sequence: Synthetic oligonucleotide
  Antisense strand to SEQ ID NO: 1408576
uuugacaaccagcugguaa

SEQ ID NO: 1408578 - RNA, 19 nt, Artificial Sequence
  Description of Artificial Sequence: Synthetic oligonucleotide
  Sense strand starting at position 615 of SEQ ID NO: 1243316
gggcuccucucuuagaaau

SEQ ID NO: 1408579 - RNA, 19 nt, Artificial Sequence
  Description of Artificial Sequence: Synthetic oligonucleotide
  Antisense strand to SEQ ID NO: 1408578
auuucuaagagaggagccc

SEQ ID NO: 1408580 - RNA, 19 nt, Artificial Sequence
  Description of Artificial Sequence: Synthetic oligonucleotide
  Sense strand starting at position 627 of SEQ ID NO: 1243316
uagaaaucccucugguuag

SEQ ID NO: 1408581 - RNA, 19 nt, Artificial Sequence
  Description of Artificial Sequence: Synthetic oligonucleotide
  Antisense strand to SEQ ID NO: 1408580
cuaaccagagggauuucua

SEQ ID NO: 1408582 - RNA, 19 nt, Artificial Sequence
  Description of Artificial Sequence: Synthetic oligonucleotide
  Sense strand starting at position 628 of SEQ ID NO: 1243316
agaaaucccucugguuaga

SEQ ID NO: 1408583 - RNA, 19 nt, Artificial Sequence
  Description of Artificial Sequence: Synthetic oligonucleotide
  Antisense strand to SEQ ID NO: 1408582
ucuaaccagagggauuucu

SEQ ID NO: 1408584 - RNA, 19 nt, Artificial Sequence
  Description of Artificial Sequence: Synthetic oligonucleotide
  Sense strand starting at position 641 of SEQ ID NO: 1243316
guuagaaacucugaccugu

SEQ ID NO: 1408585 - RNA, 19 nt, Artificial Sequence
  Description of Artificial Sequence: Synthetic oligonucleotide
  Antisense strand to SEQ ID NO: 1408584
acaggucagaguuucuaac

SEQ ID NO: 1408586 - RNA, 19 nt, Artificial Sequence
  Description of Artificial Sequence: Synthetic oligonucleotide
  Sense strand starting at position 802 of SEQ ID NO: 1243316
uagguagaggcaugauucu

SEQ ID NO: 1408587 - RNA, 19 nt, Artificial Sequence
  Description of Artificial Sequence: Synthetic oligonucleotide
  Antisense strand to SEQ ID NO: 1408586
agaaucaugccucuaccua

SEQ ID NO: 1408588 - RNA, 19 nt, Artificial Sequence
  Description of Artificial Sequence: Synthetic oligonucleotide
  Sense strand starting at position 817 of SEQ ID NO: 1243316
uucugaaagcgccaauaga

SEQ ID NO: 1408589 - RNA, 19 nt, Artificial Sequence
  Description of Artificial Sequence: Synthetic oligonucleotide
  Antisense strand to SEQ ID NO: 1408588
ucuauuggcgcuuucagaa

SEQ ID NO: 1408590 - RNA, 19 nt, Artificial Sequence
  Description of Artificial Sequence: Synthetic oligonucleotide
  Sense strand starting at position 1177 of SEQ ID NO: 1243316
acuauaauuccacgguauu

SEQ ID NO: 1408591 - RNA, 19 nt, Artificial Sequence
  Description of Artificial Sequence: Synthetic oligonucleotide
  Antisense strand to SEQ ID NO: 1408590
aauaccguggaauuauagu

SEQ ID NO: 1408592 - RNA, 19 nt, Artificial Sequence
  Description of Artificial Sequence: Synthetic oligonucleotide
  Sense strand starting at position 2169 of SEQ ID NO: 1243316
agcgguagcugucugggaa

SEQ ID NO: 1408593 - RNA, 19 nt, Artificial Sequence
  Description of Artificial Sequence: Synthetic oligonucleotide
  Antisense strand to SEQ ID NO: 1408592
uucccagacagcuaccgcu

SEQ ID NO: 1408594 - RNA, 19 nt, Artificial Sequence
  Description of Artificial Sequence: Synthetic oligonucleotide
  Sense strand starting at position 2170 of SEQ ID NO: 1243316
gcgguagcugucugggaau

SEQ ID NO: 1408595 - RNA, 19 nt, Artificial Sequence
  Description of Artificial Sequence: Synthetic oligonucleotide
  Antisense strand to SEQ ID NO: 1408594
auucccagacagcuaccgc

SEQ ID NO: 1408596 - RNA, 19 nt, Artificial Sequence
  Description of Artificial Sequence: Synthetic oligonucleotide
  Sense strand starting at position 2172 of SEQ ID NO: 1243316
gguagcugucugggaauag

SEQ ID NO: 1408597 - RNA, 19 nt, Artificial Sequence
  Description of Artificial Sequence: Synthetic oligonucleotide
  Antisense strand to SEQ ID NO: 1408596
cuauucccagacagcuacc

SEQ ID NO: 1408598 - RNA, 19 nt, Artificial Sequence
  Description of Artificial Sequence: Synthetic oligonucleotide
  Sense strand starting at position 2317 of SEQ ID NO: 1243316
gcaacugcccucuggagaa

SEQ ID NO: 1408599 - RNA, 19 nt, Artificial Sequence
  Description of Artificial Sequence: Synthetic oligonucleotide
  Antisense strand to SEQ ID NO: 1408598
uucuccagagggcaguugc

SEQ ID NO: 1408600 - RNA, 19 nt, Artificial Sequence
  Description of Artificial Sequence: Synthetic oligonucleotide
  Sense strand starting at position 2473 of SEQ ID NO: 1243316
ucaggucugagcuagaauu

SEQ ID NO: 1408601 - RNA, 19 nt, Artificial Sequence
  Description of Artificial Sequence: Synthetic oligonucleotide
  Antisense strand to SEQ ID NO: 1408600
aauucuagcucagaccuga

SEQ ID NO: 1408602 - RNA, 19 nt, Artificial Sequence
  Description of Artificial Sequence: Synthetic oligonucleotide
  Sense strand starting at position 2532 of SEQ ID NO: 1243316
ccauccuggaguugaagau

SEQ ID NO: 1408603 - RNA, 19 nt, Artificial Sequence
  Description of Artificial Sequence: Synthetic oligonucleotide
  Antisense strand to SEQ ID NO: 1408602
aucuucaacuccaggaugg

SEQ ID NO: 1408604 - RNA, 19 nt, Artificial Sequence
  Description of Artificial Sequence: Synthetic oligonucleotide
  Sense strand starting at position 2541 of SEQ ID NO: 1243316
aguugaagauucucccuaa

SEQ ID NO: 1408605 - RNA, 19 nt, Artificial Sequence
  Description of Artificial Sequence: Synthetic oligonucleotide
  Antisense strand to SEQ ID NO: 1408604
uuagggagaaucuucaacu

SEQ ID NO: 1408606 - RNA, 19 nt, Artificial Sequence
  Description of Artificial Sequence: Synthetic oligonucleotide
  Sense strand starting at position 2542 of SEQ ID NO: 1243316
guugaagauucucccuaau

SEQ ID NO: 1408607 - RNA, 19 nt, Artificial Sequence
  Description of Artificial Sequence: Synthetic oligonucleotide
  Antisense strand to SEQ ID NO: 1408606
auuagggagaaucuucaac

SEQ ID NO: 1408608 - RNA, 19 nt, Artificial Sequence
  Description of Artificial Sequence: Synthetic oligonucleotide
  Sense strand starting at position 2648 of SEQ ID NO: 1243316
cagaguugcagguggagau

SEQ ID NO: 1408609 - RNA, 19 nt, Artificial Sequence
  Description of Artificial Sequence: Synthetic oligonucleotide
  Antisense strand to SEQ ID NO: 1408608
aucuccaccugcaacucug

SEQ ID NO: 1408610 - RNA, 19 nt, Artificial Sequence
  Description of Artificial Sequence: Synthetic oligonucleotide
  Sense strand starting at position 2658 of SEQ ID NO: 1243316
gguggagaugccugcuuga

SEQ ID NO: 1408611 - RNA, 19 nt, Artificial Sequence
  Description of Artificial Sequence: Synthetic oligonucleotide
  Antisense strand to SEQ ID NO: 1408610
ucaagcaggcaucuccacc

SEQ ID NO: 1408612 - RNA, 19 nt, Artificial Sequence
  Description of Artificial Sequence: Synthetic oligonucleotide
  Sense strand starting at position 2819 of SEQ ID NO: 1243316
ugguuauucugcuccugga

SEQ ID NO: 1408613 - RNA, 19 nt, Artificial Sequence
  Description of Artificial Sequence: Synthetic oligonucleotide
  Antisense strand to SEQ ID NO: 1408612
uccaggagcagaauaacca

SEQ ID NO: 1408614 - RNA, 19 nt, Artificial Sequence
  Description of Artificial Sequence: Synthetic oligonucleotide
  Sense strand starting at position 2838 of SEQ ID NO: 1243316
cuggaaguugcccagaguu

SEQ ID NO: 1408615 - RNA, 19 nt, Artificial Sequence
  Description of Artificial Sequence: Synthetic oligonucleotide
  Antisense strand to SEQ ID NO: 1408614
aacucugggcaacuuccag

SEQ ID NO: 1408616 - RNA, 19 nt, Artificial Sequence
  Description of Artificial Sequence: Synthetic oligonucleotide
  Sense strand starting at position 2900 of SEQ ID NO: 1243316
gccacuucgagucgucaag

SEQ ID NO: 1408617 - RNA, 19 nt, Artificial Sequence
  Description of Artificial Sequence: Synthetic oligonucleotide
  Antisense strand to SEQ ID NO: 1408616
cuugacgacucgaaguggc

SEQ ID NO: 1408618 - RNA, 19 nt, Artificial Sequence
  Description of Artificial Sequence: Synthetic oligonucleotide
  Sense strand starting at position 2902 of SEQ ID NO: 1243316
cacuucgagucgucaaggu

SEQ ID NO: 1408619 - RNA, 19 nt, Artificial Sequence
  Description of Artificial Sequence: Synthetic oligonucleotide
  Antisense strand to SEQ ID NO: 1408618
accuugacgacucgaagug

SEQ ID NO: 1408620 - RNA, 19 nt, Artificial Sequence
  Description of Artificial Sequence: Synthetic oligonucleotide
  Sense strand starting at position 3017 of SEQ ID NO: 1243316
ggguguggucaaggcauga

SEQ ID NO: 1408621 - RNA, 19 nt, Artificial Sequence
  Description of Artificial Sequence: Synthetic oligonucleotide
  Antisense strand to SEQ ID NO: 1408620
ucaugccuugaccacaccc

SEQ ID NO: 1408622 - RNA, 19 nt, Artificial Sequence
  Description of Artificial Sequence: Synthetic oligonucleotide
  Sense strand starting at position 3028 of SEQ ID NO: 1243316
aggcaugaggagugucuua

SEQ ID NO: 1408623 - RNA, 19 nt, Artificial Sequence
  Description of Artificial Sequence: Synthetic oligonucleotide
  Antisense strand to SEQ ID NO: 1408622
uaagacacuccucaugccu

SEQ ID NO: 1408624 - RNA, 19 nt, Artificial Sequence
  Description of Artificial Sequence: Synthetic oligonucleotide
  Sense strand starting at position 3041 of SEQ ID NO: 1243316
gucuuagcucccugcucau

SEQ ID NO: 1408625 - RNA, 19 nt, Artificial Sequence
  Description of Artificial Sequence: Synthetic oligonucleotide
  Antisense strand to SEQ ID NO: 1408624
augagcagggagcuaagac

SEQ ID NO: 1408626 - RNA, 19 nt, Artificial Sequence
  Description of Artificial Sequence: Synthetic oligonucleotide
  Sense strand starting at position 3115 of SEQ ID NO: 1243316
cugcuaucagacugugaca

SEQ ID NO: 1408627 - RNA, 19 nt, Artificial Sequence
  Description of Artificial Sequence: Synthetic oligonucleotide
  Antisense strand to SEQ ID NO: 1408626
ugucacagucugauagcag

SEQ ID NO: 1408628 - RNA, 19 nt, Artificial Sequence
  Description of Artificial Sequence: Synthetic oligonucleotide
  Sense strand starting at position 3128 of SEQ ID NO: 1243316
gugacaucugauugugaca

SEQ ID NO: 1408629 - RNA, 19 nt, Artificial Sequence
  Description of Artificial Sequence: Synthetic oligonucleotide
  Antisense strand to SEQ ID NO: 1408628
ugucacaaucagaugucac

SEQ ID NO: 1408630 - RNA, 19 nt, Artificial Sequence
  Description of Artificial Sequence: Synthetic oligonucleotide
  Sense strand starting at position 3130 of SEQ ID NO: 1243316
gacaucugauugugacaag

SEQ ID NO: 1408631 - RNA, 19 nt, Artificial Sequence
  Description of Artificial Sequence: Synthetic oligonucleotide
  Antisense strand to SEQ ID NO: 1408630
cuugucacaaucagauguc

SEQ ID NO: 1408632 - RNA, 19 nt, Artificial Sequence
  Description of Artificial Sequence: Synthetic oligonucleotide
  Sense strand starting at position 3131 of SEQ ID NO: 1243316
acaucugauugugacaagu

SEQ ID NO: 1408633 - RNA, 19 nt, Artificial Sequence
  Description of Artificial Sequence: Synthetic oligonucleotide
  Antisense strand to SEQ ID NO: 1408632
acuugucacaaucagaugu

SEQ ID NO: 1408634 - RNA, 19 nt, Artificial Sequence
  Description of Artificial Sequence: Synthetic oligonucleotide
  Sense strand starting at position 3218 of SEQ ID NO: 1243316
ugugguagguugucaugga

SEQ ID NO: 1408635 - RNA, 19 nt, Artificial Sequence
  Description of Artificial Sequence: Synthetic oligonucleotide
  Antisense strand to SEQ ID NO: 1408634
uccaugacaaccuaccaca

SEQ ID NO: 1408636 - RNA, 19 nt, Artificial Sequence
  Description of Artificial Sequence: Synthetic oligonucleotide
  Sense strand starting at position 3263 of SEQ ID NO: 1243316
gcaucaguuuccuuggcaa

SEQ ID NO: 1408637 - RNA, 19 nt, Artificial Sequence
  Description of Artificial Sequence: Synthetic oligonucleotide
  Antisense strand to SEQ ID NO: 1408636
uugccaaggaaacugaugc

SEQ ID NO: 1408638 - RNA, 19 nt, Artificial Sequence
  Description of Artificial Sequence: Synthetic oligonucleotide
  Sense strand starting at position 3285 of SEQ ID NO: 1243316
cuaagaaggccuuggauug

SEQ ID NO: 1408639 - RNA, 19 nt, Artificial Sequence
  Description of Artificial Sequence: Synthetic oligonucleotide
  Antisense strand to SEQ ID NO: 1408638
caauccaaggccuucuuag

SEQ ID NO: 1408640 - RNA, 19 nt, Artificial Sequence
  Description of Artificial Sequence: Synthetic oligonucleotide
  Sense strand starting at position 3308 of SEQ ID NO: 1243316
gggccuggcucgguaagau

SEQ ID NO: 1408641 - RNA, 19 nt, Artificial Sequence
  Description of Artificial Sequence: Synthetic oligonucleotide
  Antisense strand to SEQ ID NO: 1408640
aucuuaccgagccaggccc

SEQ ID NO: 1408642 - RNA, 19 nt, Artificial Sequence
  Description of Artificial Sequence: Synthetic oligonucleotide
  Sense strand starting at position 3925 of SEQ ID NO: 1243316
ggaauaaacugaggcuaga

SEQ ID NO: 1408643 - RNA, 19 nt, Artificial Sequence
  Description of Artificial Sequence: Synthetic oligonucleotide
  Antisense strand to SEQ ID NO: 1408642
ucuagccucaguuuauucc

SEQ ID NO: 1408644 - RNA, 19 nt, Artificial Sequence
  Description of Artificial Sequence: Synthetic oligonucleotide
  Sense strand starting at position 120 of SEQ ID NO: 1243317
auaguuguauucugaccua

SEQ ID NO: 1408645 - RNA, 19 nt, Artificial Sequence
  Description of Artificial Sequence: Synthetic oligonucleotide
  Antisense strand to SEQ ID NO: 1408644
uaggucagaauacaacuau

SEQ ID NO: 1408646 - RNA, 19 nt, Artificial Sequence
  Description of Artificial Sequence: Synthetic oligonucleotide
  Sense strand starting at position 123 of SEQ ID NO: 1243317
guuguauucugaccuaacc

SEQ ID NO: 1408647 - RNA, 19 nt, Artificial Sequence
  Description of Artificial Sequence: Synthetic oligonucleotide
  Antisense strand to SEQ ID NO: 1408646
gguuaggucagaauacaac

SEQ ID NO: 1408648 - RNA, 19 nt, Artificial Sequence
  Description of Artificial Sequence: Synthetic oligonucleotide
  Sense strand starting at position 490 of SEQ ID NO: 1243317
caguguggucuuuaagauc

SEQ ID NO: 1408649 - RNA, 19 nt, Artificial Sequence
  Description of Artificial Sequence: Synthetic oligonucleotide
  Antisense strand to SEQ ID NO: 1408648
gaucuuaaagaccacacug

SEQ ID NO: 1408650 - RNA, 19 nt, Artificial Sequence
  Description of Artificial Sequence: Synthetic oligonucleotide
  Sense strand starting at position 493 of SEQ ID NO: 1243317
uguggucuuuaagauccua

SEQ ID NO: 1408651 - RNA, 19 nt, Artificial Sequence
  Description of Artificial Sequence: Synthetic oligonucleotide
  Antisense strand to SEQ ID NO: 1408650
uaggaucuuaaagaccaca

SEQ ID NO: 1408652 - RNA, 19 nt, Artificial Sequence
  Description of Artificial Sequence: Synthetic oligonucleotide
  Sense strand starting at position 728 of SEQ ID NO: 1243317
gugugaucuuggcuuaacu

SEQ ID NO: 1408653 - RNA, 19 nt, Artificial Sequence
  Description of Artificial Sequence: Synthetic oligonucleotide
  Antisense strand to SEQ ID NO: 1408652
aguuaagccaagaucacac

SEQ ID NO: 1408654 - RNA, 19 nt, Artificial Sequence
  Description of Artificial Sequence: Synthetic oligonucleotide
  Sense strand starting at position 855 of SEQ ID NO: 1243317
agacgagguuucgcacguu

SEQ ID NO: 1408655 - RNA, 19 nt, Artificial Sequence
  Description of Artificial Sequence: Synthetic oligonucleotide
  Antisense strand to SEQ ID NO: 1408654
aacgugcgaaaccucgucu

SEQ ID NO: 1408656 - RNA, 19 nt, Artificial Sequence
  Description of Artificial Sequence: Synthetic oligonucleotide
  Sense strand starting at position 1095 of SEQ ID NO: 1243317
ucguuuauuuauuggccua

SEQ ID NO: 1408657 - RNA, 19 nt, Artificial Sequence
  Description of Artificial Sequence: Synthetic oligonucleotide
  Antisense strand to SEQ ID NO: 1408656
uaggccaauaaauaaacga

SEQ ID NO: 1408658 - RNA, 19 nt, Artificial Sequence
  Description of Artificial Sequence: Synthetic oligonucleotide
  Sense strand starting at position 1206 of SEQ ID NO: 1243317
uaagcaggagcucgauaau

SEQ ID NO: 1408659 - RNA, 19 nt, Artificial Sequence
  Description of Artificial Sequence: Synthetic oligonucleotide
  Antisense strand to SEQ ID NO: 1408658
auuaucgagcuccugcuua

SEQ ID NO: 1408660 - RNA, 19 nt, Artificial Sequence
  Description of Artificial Sequence: Synthetic oligonucleotide
  Sense strand starting at position 1209 of SEQ ID NO: 1243317
gcaggagcucgauaauuau

SEQ ID NO: 1408661 - RNA, 19 nt, Artificial Sequence
  Description of Artificial Sequence: Synthetic oligonucleotide
  Antisense strand to SEQ ID NO: 1408660
auaauuaucgagcuccugc

SEQ ID NO: 1408662 - RNA, 19 nt, Artificial Sequence
  Description of Artificial Sequence: Synthetic oligonucleotide
  Sense strand starting at position 1212 of SEQ ID NO: 1243317
ggagcucgauaauuauuau

SEQ ID NO: 1408663 - RNA, 19 nt, Artificial Sequence
  Description of Artificial Sequence: Synthetic oligonucleotide
  Antisense strand to SEQ ID NO: 1408662
auaauaauuaucgagcucc

SEQ ID NO: 1408664 - RNA, 19 nt, Artificial Sequence
  Description of Artificial Sequence: Synthetic oligonucleotide
  Sense strand starting at position 1215 of SEQ ID NO: 1243317
gcucgauaauuauuaugaa

SEQ ID NO: 1408665 - RNA, 19 nt, Artificial Sequence
  Description of Artificial Sequence: Synthetic oligonucleotide
  Antisense strand to SEQ ID NO: 1408664
uucauaauaauuaucgagc

SEQ ID NO: 1408666 - RNA, 19 nt, Artificial Sequence
  Description of Artificial Sequence: Synthetic oligonucleotide
  Sense strand starting at position 1230 of SEQ ID NO: 1243317
ugaaucauauuacgcuaau

SEQ ID NO: 1408667 - RNA, 19 nt, Artificial Sequence
  Description of Artificial Sequence: Synthetic oligonucleotide
  Antisense strand to SEQ ID NO: 1408666
auuagcguaauaugauuca

SEQ ID NO: 1408668 - RNA, 19 nt, Artificial Sequence
  Description of Artificial Sequence: Synthetic oligonucleotide
  Sense strand starting at position 1448 of SEQ ID NO: 1243317
ugacgacguucggcugaua

SEQ ID NO: 1408669 - RNA, 19 nt, Artificial Sequence
  Description of Artificial Sequence: Synthetic oligonucleotide
  Antisense strand to SEQ ID NO: 1408668
uaucagccgaacgucguca

SEQ ID NO: 1408670 - RNA, 19 nt, Artificial Sequence
  Description of Artificial Sequence: Synthetic oligonucleotide
  Sense strand starting at position 1714 of SEQ ID NO: 1243317
ccaugagcuuugucccaca

SEQ ID NO: 1408671 - RNA, 19 nt, Artificial Sequence
  Description of Artificial Sequence: Synthetic oligonucleotide
  Antisense strand to SEQ ID NO: 1408670
ugugggacaaagcucaugg

SEQ ID NO: 1408672 - RNA, 19 nt, Artificial Sequence
  Description of Artificial Sequence: Synthetic oligonucleotide
  Sense strand starting at position 1765 of SEQ ID NO: 1243317
gagcuuucgucccagauac

SEQ ID NO: 1408673 - RNA, 19 nt, Artificial Sequence
  Description of Artificial Sequence: Synthetic oligonucleotide
  Antisense strand to SEQ ID NO: 1408672
guaucugggacgaaagcuc

SEQ ID NO: 1408674 - RNA, 19 nt, Artificial Sequence
  Description of Artificial Sequence: Synthetic oligonucleotide
  Sense strand starting at position 1829 of SEQ ID NO: 1243317
gcuucuuaacugcagagga

SEQ ID NO: 1408675 - RNA, 19 nt, Artificial Sequence
  Description of Artificial Sequence: Synthetic oligonucleotide
  Antisense strand to SEQ ID NO: 1408674
uccucugcaguuaagaagc

SEQ ID NO: 1408676 - RNA, 19 nt, Artificial Sequence
  Description of Artificial Sequence: Synthetic oligonucleotide
  Sense strand starting at position 2067 of SEQ ID NO: 1243317
ccucguucuacuuggagga

SEQ ID NO: 1408677 - RNA, 19 nt, Artificial Sequence
  Description of Artificial Sequence: Synthetic oligonucleotide
  Antisense strand to SEQ ID NO: 1408676
uccuccaaguagaacgagg

SEQ ID NO: 1408678 - RNA, 19 nt, Artificial Sequence
  Description of Artificial Sequence: Synthetic oligonucleotide
  Sense strand starting at position 2462 of SEQ ID NO: 1243317
gagaguuacgaagaggugu

SEQ ID NO: 1408679 - RNA, 19 nt, Artificial Sequence
  Description of Artificial Sequence: Synthetic oligonucleotide
  Antisense strand to SEQ ID NO: 1408678
acaccucuucguaacucuc

SEQ ID NO: 1408680 - RNA, 19 nt, Artificial Sequence
  Description of Artificial Sequence: Synthetic oligonucleotide
  Sense strand starting at position 2464 of SEQ ID NO: 1243317
gaguuacgaagagguguua

SEQ ID NO: 1408681 - RNA, 19 nt, Artificial Sequence
  Description of Artificial Sequence: Synthetic oligonucleotide
  Antisense strand to SEQ ID NO: 1408680
uaacaccucuucguaacuc

SEQ ID NO: 1408682 - RNA, 19 nt, Artificial Sequence
  Description of Artificial Sequence: Synthetic oligonucleotide
  Sense strand starting at position 2860 of SEQ ID NO: 1243317
gcguuccaagcauaggaaa

SEQ ID NO: 1408683 - RNA, 19 nt, Artificial Sequence
  Description of Artificial Sequence: Synthetic oligonucleotide
  Antisense strand to SEQ ID NO: 1408682
uuuccuaugcuuggaacgc

SEQ ID NO: 1408684 - RNA, 19 nt, Artificial Sequence
  Description of Artificial Sequence: Synthetic oligonucleotide
  Sense strand starting at position 14 of SEQ ID NO: 1243318
uuuaauagucucuguacaa

SEQ ID NO: 1408685 - RNA, 19 nt, Artificial Sequence
  Description of Artificial Sequence: Synthetic oligonucleotide
  Antisense strand to SEQ ID NO: 1408684
uuguacagagacuauuaaa

SEQ ID NO: 1408686 - RNA, 19 nt, Artificial Sequence
  Description of Artificial Sequence: Synthetic oligonucleotide
  Sense strand starting at position 15 of SEQ ID NO: 1243318
uuaauagucucuguacaaa

SEQ ID NO: 1408687 - RNA, 19 nt, Artificial Sequence
  Description of Artificial Sequence: Synthetic oligonucleotide
  Antisense strand to SEQ ID NO: 1408686
uuuguacagagacuauuaa

SEQ ID NO: 1408688 - RNA, 19 nt, Artificial Sequence
  Description of Artificial Sequence: Synthetic oligonucleotide
  Sense strand starting at position 60 of SEQ ID NO: 1243318
uuugcuugacauggaaaga

SEQ ID NO: 1408689 - RNA, 19 nt, Artificial Sequence
  Description of Artificial Sequence: Synthetic oligonucleotide
  Antisense strand to SEQ ID NO: 1408688
ucuuuccaugucaagcaaa

SEQ ID NO: 1408690 - RNA, 19 nt, Artificial Sequence
  Description of Artificial Sequence: Synthetic oligonucleotide
  Sense strand starting at position 165 of SEQ ID NO: 1243318
aacagaccugauuacguua

SEQ ID NO: 1408691 - RNA, 19 nt, Artificial Sequence
  Description of Artificial Sequence: Synthetic oligonucleotide
  Antisense strand to SEQ ID NO: 1408690
uaacguaaucaggucuguu

SEQ ID NO: 1408692 - RNA, 19 nt, Artificial Sequence
  Description of Artificial Sequence: Synthetic oligonucleotide
  Sense strand starting at position 170 of SEQ ID NO: 1243318
accugauuacguuagcugu

SEQ ID NO: 1408693 - RNA, 19 nt, Artificial Sequence
  Description of Artificial Sequence: Synthetic oligonucleotide
  Antisense strand to SEQ ID NO: 1408692
acagcuaacguaaucaggu

SEQ ID NO: 1408694 - RNA, 19 nt, Artificial Sequence
  Description of Artificial Sequence: Synthetic oligonucleotide
  Sense strand starting at position 238 of SEQ ID NO: 1243318
ucugaauuucuacgguucu

SEQ ID NO: 1408695 - RNA, 19 nt, Artificial Sequence
  Description of Artificial Sequence: Synthetic oligonucleotide
  Antisense strand to SEQ ID NO: 1408694
agaaccguagaaauucaga

SEQ ID NO: 1408696 - RNA, 19 nt, Artificial Sequence
  Description of Artificial Sequence: Synthetic oligonucleotide
  Sense strand starting at position 325 of SEQ ID NO: 1243318
ggagacaucuccgcucacu

SEQ ID NO: 1408697 - RNA, 19 nt, Artificial Sequence
  Description of Artificial Sequence: Synthetic oligonucleotide
  Antisense strand to SEQ ID NO: 1408696
agugagcggagaugucucc

SEQ ID NO: 1408698 - RNA, 19 nt, Artificial Sequence
  Description of Artificial Sequence: Synthetic oligonucleotide
  Sense strand starting at position 532 of SEQ ID NO: 1243318
acaucaagccucuaugguu

SEQ ID NO: 1408699 - RNA, 19 nt, Artificial Sequence
  Description of Artificial Sequence: Synthetic oligonucleotide
  Antisense strand to SEQ ID NO: 1408698
aaccauagaggcuugaugu

SEQ ID NO: 1408700 - RNA, 19 nt, Artificial Sequence
  Description of Artificial Sequence: Synthetic oligonucleotide
  Sense strand starting at position 611 of SEQ ID NO: 1243318
auuaguaaccaugaugcaa

SEQ ID NO: 1408701 - RNA, 19 nt, Artificial Sequence
  Description of Artificial Sequence: Synthetic oligonucleotide
  Antisense strand to SEQ ID NO: 1408700
uugcaucaugguuacuaau

SEQ ID NO: 1408702 - RNA, 19 nt, Artificial Sequence
  Description of Artificial Sequence: Synthetic oligonucleotide
  Sense strand starting at position 619 of SEQ ID NO: 1243318
ccaugaugcaauuguucga

SEQ ID NO: 1408703 - RNA, 19 nt, Artificial Sequence
  Description of Artificial Sequence: Synthetic oligonucleotide
  Antisense strand to SEQ ID NO: 1408702
ucgaacaauugcaucaugg

SEQ ID NO: 1408704 - RNA, 19 nt, Artificial Sequence
  Description of Artificial Sequence: Synthetic oligonucleotide
  Sense strand starting at position 703 of SEQ ID NO: 1243318
cucaguucuuuacuuggaa

SEQ ID NO: 1408705 - RNA, 19 nt, Artificial Sequence
  Description of Artificial Sequence: Synthetic oligonucleotide
  Antisense strand to SEQ ID NO: 1408704
uuccaaguaaagaacugag

SEQ ID NO: 1408706 - RNA, 19 nt, Artificial Sequence
  Description of Artificial Sequence: Synthetic oligonucleotide
  Sense strand starting at position 704 of SEQ ID NO: 1243318
ucaguucuuuacuuggaau

SEQ ID NO: 1408707 - RNA, 19 nt, Artificial Sequence
  Description of Artificial Sequence: Synthetic oligonucleotide
  Antisense strand to SEQ ID NO: 1408706
auuccaaguaaagaacuga

SEQ ID NO: 1408708 - RNA, 19 nt, Artificial Sequence
  Description of Artificial Sequence: Synthetic oligonucleotide
  Sense strand starting at position 795 of SEQ ID NO: 1243318
cuugcaaugcgucaagaga

SEQ ID NO: 1408709 - RNA, 19 nt, Artificial Sequence
  Description of Artificial Sequence: Synthetic oligonucleotide
  Antisense strand to SEQ ID NO: 1408708
ucucuugacgcauugcaag

SEQ ID NO: 1408710 - RNA, 19 nt, Artificial Sequence
  Description of Artificial Sequence: Synthetic oligonucleotide
  Sense strand starting at position 814 of SEQ ID NO: 1243318
gcguccacugccuuucuaa

SEQ ID NO: 1408711 - RNA, 19 nt, Artificial Sequence
  Description of Artificial Sequence: Synthetic oligonucleotide
  Antisense strand to SEQ ID NO: 1408710
uuagaaaggcaguggacgc

SEQ ID NO: 1408712 - RNA, 19 nt, Artificial Sequence
  Description of Artificial Sequence: Synthetic oligonucleotide
  Sense strand starting at position 971 of SEQ ID NO: 1243318
ggguaaccuccauaaccgu

SEQ ID NO: 1408713 - RNA, 19 nt, Artificial Sequence
  Description of Artificial Sequence: Synthetic oligonucleotide
  Antisense strand to SEQ ID NO: 1408712
acgguuauggagguuaccc

SEQ ID NO: 1408714 - RNA, 19 nt, Artificial Sequence
  Description of Artificial Sequence: Synthetic oligonucleotide
  Sense strand starting at position 1060 of SEQ ID NO: 1243318
uccaguacugugugcagaa

SEQ ID NO: 1408715 - RNA, 19 nt, Artificial Sequence
  Description of Artificial Sequence: Synthetic oligonucleotide
  Antisense strand to SEQ ID NO: 1408714
uucugcacacaguacugga

SEQ ID NO: 1408716 - RNA, 19 nt, Artificial Sequence
  Description of Artificial Sequence: Synthetic oligonucleotide
  Sense strand starting at position 1092 of SEQ ID NO: 1243318
acuuaaagagauugggcua

SEQ ID NO: 1408717 - RNA, 19 nt, Artificial Sequence
  Description of Artificial Sequence: Synthetic oligonucleotide
  Antisense strand to SEQ ID NO: 1408716
uagcccaaucucuuuaagu

SEQ ID NO: 1408718 - RNA, 19 nt, Artificial Sequence
  Description of Artificial Sequence: Synthetic oligonucleotide
  Sense strand starting at position 1182 of SEQ ID NO: 1243318
uuuagcauuuacugagaac

SEQ ID NO: 1408719 - RNA, 19 nt, Artificial Sequence
  Description of Artificial Sequence: Synthetic oligonucleotide
  Antisense strand to SEQ ID NO: 1408718
guucucaguaaaugcuaaa

SEQ ID NO: 1408720 - RNA, 19 nt, Artificial Sequence
  Description of Artificial Sequence: Synthetic oligonucleotide
  Sense strand starting at position 1193 of SEQ ID NO: 1243318
cugagaacuccuggcaauu

SEQ ID NO: 1408721 - RNA, 19 nt, Artificial Sequence
  Description of Artificial Sequence: Synthetic oligonucleotide
  Antisense strand to SEQ ID NO: 1408720
aauugccaggaguucucag

SEQ ID NO: 1408722 - RNA, 19 nt, Artificial Sequence
  Description of Artificial Sequence: Synthetic oligonucleotide
  Sense strand starting at position 1575 of SEQ ID NO: 1243318
aggucuaucucaucuagcu

SEQ ID NO: 1408723 - RNA, 19 nt, Artificial Sequence
  Description of Artificial Sequence: Synthetic oligonucleotide
  Antisense strand to SEQ ID NO: 1408722
agcuagaugagauagaccu

SEQ ID NO: 1408724 - RNA, 19 nt, Artificial Sequence
  Description of Artificial Sequence: Synthetic oligonucleotide
  Sense strand starting at position 2029 of SEQ ID NO: 1243318
gagccucugugcgucauuu

SEQ ID NO: 1408725 - RNA, 19 nt, Artificial Sequence
  Description of Artificial Sequence: Synthetic oligonucleotide
  Antisense strand to SEQ ID NO: 1408724
aaaugacgcacagaggcuc

SEQ ID NO: 1408726 - RNA, 19 nt, Artificial Sequence
  Description of Artificial Sequence: Synthetic oligonucleotide
  Sense strand starting at position 2039 of SEQ ID NO: 1243318
gcgucauuuccgggagagc

SEQ ID NO: 1408727 - RNA, 19 nt, Artificial Sequence
  Description of Artificial Sequence: Synthetic oligonucleotide
  Antisense strand to SEQ ID NO: 1408726
gcucucccggaaaugacgc

SEQ ID NO: 1408728 - RNA, 19 nt, Artificial Sequence
  Description of Artificial Sequence: Synthetic oligonucleotide
  Sense strand starting at position 2093 of SEQ ID NO: 1243318
agaaucccuucuuugagga

SEQ ID NO: 1408729 - RNA, 19 nt, Artificial Sequence
  Description of Artificial Sequence: Synthetic oligonucleotide
  Antisense strand to SEQ ID NO: 1408728
uccucaaagaagggauucu

SEQ ID NO: 1408730 - RNA, 19 nt, Artificial Sequence
  Description of Artificial Sequence: Synthetic oligonucleotide
  Sense strand starting at position 2446 of SEQ ID NO: 1243318
gaaagaugagucugggcca

SEQ ID NO: 1408731 - RNA, 19 nt, Artificial Sequence
  Description of Artificial Sequence: Synthetic oligonucleotide
  Antisense strand to SEQ ID NO: 1408730
uggcccagacucaucuuuc

SEQ ID NO: 1408732 - RNA, 19 nt, Artificial Sequence
  Description of Artificial Sequence: Synthetic oligonucleotide
  Sense strand starting at position 2601 of SEQ ID NO: 1243318
ggagaccaguccgugcaua

SEQ ID NO: 1408733 - RNA, 19 nt, Artificial Sequence
  Description of Artificial Sequence: Synthetic oligonucleotide
  Antisense strand to SEQ ID NO: 1408732
uaugcacggacuggucucc

SEQ ID NO: 1408734 - RNA, 19 nt, Artificial Sequence
  Description of Artificial Sequence: Synthetic oligonucleotide
  Sense strand starting at position 2781 of SEQ ID NO: 1243318
gagaccuugucgcuaaaca

SEQ ID NO: 1408735 - RNA, 19 nt, Artificial Sequence
  Description of Artificial Sequence: Synthetic oligonucleotide
  Antisense strand to SEQ ID NO: 1408734
uguuuagcgacaaggucuc

SEQ ID NO: 1408736 - RNA, 19 nt, Artificial Sequence
  Description of Artificial Sequence: Synthetic oligonucleotide
  Sense strand starting at position 2782 of SEQ ID NO: 1243318
agaccuugucgcuaaacaa

SEQ ID NO: 1408737 - RNA, 19 nt, Artificial Sequence
  Description of Artificial Sequence: Synthetic oligonucleotide
  Antisense strand to SEQ ID NO: 1408736
uuguuuagcgacaaggucu

SEQ ID NO: 1408738 - RNA, 19 nt, Artificial Sequence
  Description of Artificial Sequence: Synthetic oligonucleotide
  Sense strand starting at position 2970 of SEQ ID NO: 1243318
cucguaaugcuuuaaggaa

SEQ ID NO: 1408739 - RNA, 19 nt, Artificial Sequence
  Description of Artificial Sequence: Synthetic oligonucleotide
  Antisense strand to SEQ ID NO: 1408738
uuccuuaaagcauuacgag

SEQ ID NO: 1408740 - RNA, 19 nt, Artificial Sequence
  Description of Artificial Sequence: Synthetic oligonucleotide
  Sense strand starting at position 2997 of SEQ ID NO: 1243318
auucguguugggcuguauu

SEQ ID NO: 1408741 - RNA, 19 nt, Artificial Sequence
  Description of Artificial Sequence: Synthetic oligonucleotide
  Antisense strand to SEQ ID NO: 1408740
aauacagcccaacacgaau

SEQ ID NO: 1408742 - RNA, 19 nt, Artificial Sequence
  Description of Artificial Sequence: Synthetic oligonucleotide
  Sense strand starting at position 2999 of SEQ ID NO: 1243318
ucguguugggcuguauuca

SEQ ID NO: 1408743 - RNA, 19 nt, Artificial Sequence
  Description of Artificial Sequence: Synthetic oligonucleotide
  Antisense strand to SEQ ID NO: 1408742
ugaauacagcccaacacga

SEQ ID NO: 1408744 - RNA, 19 nt, Artificial Sequence
  Description of Artificial Sequence: Synthetic oligonucleotide
  Sense strand starting at position 3054 of SEQ ID NO: 1243318
aggacagguuugcuuugua

SEQ ID NO: 1408745 - RNA, 19 nt, Artificial Sequence
  Description of Artificial Sequence: Synthetic oligonucleotide
  Antisense strand to SEQ ID NO: 1408744
uacaaagcaaaccuguccu

SEQ ID NO: 1408746 - RNA, 19 nt, Artificial Sequence
  Description of Artificial Sequence: Synthetic oligonucleotide
  Sense strand starting at position 3113 of SEQ ID NO: 1243318
uuaccagugucuccuggaa

SEQ ID NO: 1408747 - RNA, 19 nt, Artificial Sequence
  Description of Artificial Sequence: Synthetic oligonucleotide
  Antisense strand to SEQ ID NO: 1408746
uuccaggagacacugguaa

SEQ ID NO: 1408748 - RNA, 19 nt, Artificial Sequence
  Description of Artificial Sequence: Synthetic oligonucleotide
  Sense strand starting at position 3117 of SEQ ID NO: 1243318
cagugucuccuggaaccuu

SEQ ID NO: 1408749 - RNA, 19 nt, Artificial Sequence
  Description of Artificial Sequence: Synthetic oligonucleotide
  Antisense strand to SEQ ID NO: 1408748
aagguuccaggagacacug

SEQ ID NO: 1408750 - RNA, 19 nt, Artificial Sequence
  Description of Artificial Sequence: Synthetic oligonucleotide
  Sense strand starting at position 3138 of SEQ ID NO: 1243318
agagauguucuaggcaugu

SEQ ID NO: 1408751 - RNA, 19 nt, Artificial Sequence
  Description of Artificial Sequence: Synthetic oligonucleotide
  Antisense strand to SEQ ID NO: 1408750
acaugccuagaacaucucu

SEQ ID NO: 1408752 - RNA, 19 nt, Artificial Sequence
  Description of Artificial Sequence: Synthetic oligonucleotide
  Sense strand starting at position 3140 of SEQ ID NO: 1243318
agauguucuaggcauguuu

SEQ ID NO: 1408753 - RNA, 19 nt, Artificial Sequence
  Description of Artificial Sequence: Synthetic oligonucleotide
  Antisense strand to SEQ ID NO: 1408752
aaacaugccuagaacaucu

SEQ ID NO: 1408754 - RNA, 19 nt, Artificial Sequence
  Description of Artificial Sequence: Synthetic oligonucleotide
  Sense strand starting at position 3159 of SEQ ID NO: 1243318
aggagauacuucuccuuuc

SEQ ID NO: 1408755 - RNA, 19 nt, Artificial Sequence
  Description of Artificial Sequence: Synthetic oligonucleotide
  Antisense strand to SEQ ID NO: 1408754
gaaaggagaaguaucuccu

SEQ ID NO: 1408756 - RNA, 19 nt, Artificial Sequence
  Description of Artificial Sequence: Synthetic oligonucleotide
  Sense strand starting at position 3160 of SEQ ID NO: 1243318
ggagauacuucuccuuucu

SEQ ID NO: 1408757 - RNA, 19 nt, Artificial Sequence
  Description of Artificial Sequence: Synthetic oligonucleotide
  Antisense strand to SEQ ID NO: 1408756
agaaaggagaaguaucucc

SEQ ID NO: 1408758 - RNA, 19 nt, Artificial Sequence
  Description of Artificial Sequence: Synthetic oligonucleotide
  Sense strand starting at position 3178 of SEQ ID NO: 1243318
ucuuguuggauggguuuaa

SEQ ID NO: 1408759 - RNA, 19 nt, Artificial Sequence
  Description of Artificial Sequence: Synthetic oligonucleotide
  Antisense strand to SEQ ID NO: 1408758
uuaaacccauccaacaaga

SEQ ID NO: 1408760 - RNA, 19 nt, Artificial Sequence
  Description of Artificial Sequence: Synthetic oligonucleotide
  Sense strand starting at position 3179 of SEQ ID NO: 1243318
cuuguuggauggguuuaau

SEQ ID NO: 1408761 - RNA, 19 nt, Artificial Sequence
  Description of Artificial Sequence: Synthetic oligonucleotide
  Antisense strand to SEQ ID NO: 1408760
auuaaacccauccaacaag

SEQ ID NO: 1408762 - RNA, 19 nt, Artificial Sequence
  Description of Artificial Sequence: Synthetic oligonucleotide
  Sense strand starting at position 3182 of SEQ ID NO: 1243318
guuggauggguuuaauuaa

SEQ ID NO: 1408763 - RNA, 19 nt, Artificial Sequence
  Description of Artificial Sequence: Synthetic oligonucleotide
  Antisense strand to SEQ ID NO: 1408762
uuaauuaaacccauccaac

SEQ ID NO: 1408764 - RNA, 19 nt, Artificial Sequence
  Description of Artificial Sequence: Synthetic oligonucleotide
  Sense strand starting at position 62 of SEQ ID NO: 1243319
ggacacaagucucuuacaa

SEQ ID NO: 1408765 - RNA, 19 nt, Artificial Sequence
  Description of Artificial Sequence: Synthetic oligonucleotide
  Antisense strand to SEQ ID NO: 1408764
uuguaagagacuugugucc

SEQ ID NO: 1408766 - RNA, 19 nt, Artificial Sequence
  Description of Artificial Sequence: Synthetic oligonucleotide
  Sense strand starting at position 232 of SEQ ID NO: 1243319
cauaguauucguggaggaa

SEQ ID NO: 1408767 - RNA, 19 nt, Artificial Sequence
  Description of Artificial Sequence: Synthetic oligonucleotide
  Antisense strand to SEQ ID NO: 1408766
uuccuccacgaauacuaug

SEQ ID NO: 1408768 - RNA, 19 nt, Artificial Sequence
  Description of Artificial Sequence: Synthetic oligonucleotide
  Sense strand starting at position 233 of SEQ ID NO: 1243319
auaguauucguggaggaaa

SEQ ID NO: 1408769 - RNA, 19 nt, Artificial Sequence
  Description of Artificial Sequence: Synthetic oligonucleotide
  Antisense strand to SEQ ID NO: 1408768
uuuccuccacgaauacuau

SEQ ID NO: 1408770 - RNA, 19 nt, Artificial Sequence
  Description of Artificial Sequence: Synthetic oligonucleotide
  Sense strand starting at position 349 of SEQ ID NO: 1243319
ggagguuuacaauguugag

SEQ ID NO: 1408771 - RNA, 19 nt, Artificial Sequence
  Description of Artificial Sequence: Synthetic oligonucleotide
  Antisense strand to SEQ ID NO: 1408770
cucaacauuguaaaccucc

SEQ ID NO: 1408772 - RNA, 19 nt, Artificial Sequence
  Description of Artificial Sequence: Synthetic oligonucleotide
  Sense strand starting at position 353 of SEQ ID NO: 1243319
guuuacaauguugagauca

SEQ ID NO: 1408773 - RNA, 19 nt, Artificial Sequence
  Description of Artificial Sequence: Synthetic oligonucleotide
  Antisense strand to SEQ ID NO: 1408772
ugaucucaacauuguaaac

SEQ ID NO: 1408774 - RNA, 19 nt, Artificial Sequence
  Description of Artificial Sequence: Synthetic oligonucleotide
  Sense strand starting at position 369 of SEQ ID NO: 1243319
ucaaauuacuuagaggaaa

SEQ ID NO: 1408775 - RNA, 19 nt, Artificial Sequence
  Description of Artificial Sequence: Synthetic oligonucleotide
  Antisense strand to SEQ ID NO: 1408774
uuuccucuaaguaauuuga

SEQ ID NO: 1408776 - RNA, 19 nt, Artificial Sequence
  Description of Artificial Sequence: Synthetic oligonucleotide
  Sense strand starting at position 527 of SEQ ID NO: 1243319
guuugaaaccauggguuua

SEQ ID NO: 1408777 - RNA, 19 nt, Artificial Sequence
  Description of Artificial Sequence: Synthetic oligonucleotide
  Antisense strand to SEQ ID NO: 1408776
uaaacccaugguuucaaac

SEQ ID NO: 1408778 - RNA, 19 nt, Artificial Sequence
  Description of Artificial Sequence: Synthetic oligonucleotide
  Sense strand starting at position 529 of SEQ ID NO: 1243319
uugaaaccauggguuuaga

SEQ ID NO: 1408779 - RNA, 19 nt, Artificial Sequence
  Description of Artificial Sequence: Synthetic oligonucleotide
  Antisense strand to SEQ ID NO: 1408778
ucuaaacccaugguuucaa

SEQ ID NO: 1408780 - RNA, 19 nt, Artificial Sequence
  Description of Artificial Sequence: Synthetic oligonucleotide
  Sense strand starting at position 620 of SEQ ID NO: 1243319
acagacaacgacuguauua

SEQ ID NO: 1408781 - RNA, 19 nt, Artificial Sequence
  Description of Artificial Sequence: Synthetic oligonucleotide
  Antisense strand to SEQ ID NO: 1408780
uaauacagucguugucugu

SEQ ID NO: 1408782 - RNA, 19 nt, Artificial Sequence
  Description of Artificial Sequence: Synthetic oligonucleotide
  Sense strand starting at position 806 of SEQ ID NO: 1243319
gagguuaagucacuccacu

SEQ ID NO: 1408783 - RNA, 19 nt, Artificial Sequence
  Description of Artificial Sequence: Synthetic oligonucleotide
  Antisense strand to SEQ ID NO: 1408782
aguggagugacuuaaccuc

SEQ ID NO: 1408784 - RNA, 19 nt, Artificial Sequence
  Description of Artificial Sequence: Synthetic oligonucleotide
  Sense strand starting at position 864 of SEQ ID NO: 1243319
cgggauucuacucagucga

SEQ ID NO: 1408785 - RNA, 19 nt, Artificial Sequence
  Description of Artificial Sequence: Synthetic oligonucleotide
  Antisense strand to SEQ ID NO: 1408784
ucgacugaguagaaucccg

SEQ ID NO: 1408786 - RNA, 19 nt, Artificial Sequence
  Description of Artificial Sequence: Synthetic oligonucleotide
  Sense strand starting at position 866 of SEQ ID NO: 1243319
ggauucuacucagucgaua

SEQ ID NO: 1408787 - RNA, 19 nt, Artificial Sequence
  Description of Artificial Sequence: Synthetic oligonucleotide
  Antisense strand to SEQ ID NO: 1408786
uaucgacugaguagaaucc

SEQ ID NO: 1408788 - RNA, 19 nt, Artificial Sequence
  Description of Artificial Sequence: Synthetic oligonucleotide
  Sense strand starting at position 869 of SEQ ID NO: 1243319
uucuacucagucgauaaca

SEQ ID NO: 1408789 - RNA, 19 nt, Artificial Sequence
  Description of Artificial Sequence: Synthetic oligonucleotide
  Antisense strand to SEQ ID NO: 1408788
uguuaucgacugaguagaa

SEQ ID NO: 1408790 - RNA, 19 nt, Artificial Sequence
  Description of Artificial Sequence: Synthetic oligonucleotide
  Sense strand starting at position 871 of SEQ ID NO: 1243319
cuacucagucgauaacaga

SEQ ID NO: 1408791 - RNA, 19 nt, Artificial Sequence
  Description of Artificial Sequence: Synthetic oligonucleotide
  Antisense strand to SEQ ID NO: 1408790
ucuguuaucgacugaguag

SEQ ID NO: 1408792 - RNA, 19 nt, Artificial Sequence
  Description of Artificial Sequence: Synthetic oligonucleotide
  Sense strand starting at position 1131 of SEQ ID NO: 1243319
ggauccugugucugggaca

SEQ ID NO: 1408793 - RNA, 19 nt, Artificial Sequence
  Description of Artificial Sequence: Synthetic oligonucleotide
  Antisense strand to SEQ ID NO: 1408792
ugucccagacacaggaucc

SEQ ID NO: 1408794 - RNA, 19 nt, Artificial Sequence
  Description of Artificial Sequence: Synthetic oligonucleotide
  Sense strand starting at position 1144 of SEQ ID NO: 1243319
gggacaccuggucgaucua

SEQ ID NO: 1408795 - RNA, 19 nt, Artificial Sequence
  Description of Artificial Sequence: Synthetic oligonucleotide
  Antisense strand to SEQ ID NO: 1408794
uagaucgaccagguguccc

SEQ ID NO: 1408796 - RNA, 19 nt, Artificial Sequence
  Description of Artificial Sequence: Synthetic oligonucleotide
  Sense strand starting at position 1225 of SEQ ID NO: 1243319
ggaggugucuucuucccau

SEQ ID NO: 1408797 - RNA, 19 nt, Artificial Sequence
  Description of Artificial Sequence: Synthetic oligonucleotide
  Antisense strand to SEQ ID NO: 1408796
augggaagaagacaccucc

SEQ ID NO: 1408798 - RNA, 19 nt, Artificial Sequence
  Description of Artificial Sequence: Synthetic oligonucleotide
  Sense strand starting at position 1239 of SEQ ID NO: 1243319
cccaucaccgcccagaaau

SEQ ID NO: 1408799 - RNA, 19 nt, Artificial Sequence
  Description of Artificial Sequence: Synthetic oligonucleotide
  Antisense strand to SEQ ID NO: 1408798
auuucugggcggugauggg

SEQ ID NO: 1408800 - RNA, 19 nt, Artificial Sequence
  Description of Artificial Sequence: Synthetic oligonucleotide
  Sense strand starting at position 1307 of SEQ ID NO: 1243319
aggacauuccgcuaguucu

SEQ ID NO: 1408801 - RNA, 19 nt, Artificial Sequence
  Description of Artificial Sequence: Synthetic oligonucleotide
  Antisense strand to SEQ ID NO: 1408800
agaacuagcggaauguccu

SEQ ID NO: 1408802 - RNA, 19 nt, Artificial Sequence
  Description of Artificial Sequence: Synthetic oligonucleotide
  Sense strand starting at position 2171 of SEQ ID NO: 1243319
gcgugaauggcccaaucaa

SEQ ID NO: 1408803 - RNA, 19 nt, Artificial Sequence
  Description of Artificial Sequence: Synthetic oligonucleotide
  Antisense strand to SEQ ID NO: 1408802
uugauugggccauucacgc

SEQ ID NO: 1408804 - RNA, 19 nt, Artificial Sequence
  Description of Artificial Sequence: Synthetic oligonucleotide
  Sense strand starting at position 2555 of SEQ ID NO: 1243319
agcuuccuuacggaagaga

SEQ ID NO: 1408805 - RNA, 19 nt, Artificial Sequence
  Description of Artificial Sequence: Synthetic oligonucleotide
  Antisense strand to SEQ ID NO: 1408804
ucucuuccguaaggaagcu

SEQ ID NO: 1408806 - RNA, 19 nt, Artificial Sequence
  Description of Artificial Sequence: Synthetic oligonucleotide
  Sense strand starting at position 2837 of SEQ ID NO: 1243319
ggaacagguccagguuacu

SEQ ID NO: 1408807 - RNA, 19 nt, Artificial Sequence
  Description of Artificial Sequence: Synthetic oligonucleotide
  Antisense strand to SEQ ID NO: 1408806
aguaaccuggaccuguucc

SEQ ID NO: 1408808 - RNA, 19 nt, Artificial Sequence
  Description of Artificial Sequence: Synthetic oligonucleotide
  Sense strand starting at position 2846 of SEQ ID NO: 1243319
ccagguuacucacucggau

SEQ ID NO: 1408809 - RNA, 19 nt, Artificial Sequence
  Description of Artificial Sequence: Synthetic oligonucleotide
  Antisense strand to SEQ ID NO: 1408808
auccgagugaguaaccugg

SEQ ID NO: 1408810 - RNA, 19 nt, Artificial Sequence
  Description of Artificial Sequence: Synthetic oligonucleotide
  Sense strand starting at position 2923 of SEQ ID NO: 1243319
cauuuauugugugccaugu

SEQ ID NO: 1408811 - RNA, 19 nt, Artificial Sequence
  Description of Artificial Sequence: Synthetic oligonucleotide
  Antisense strand to SEQ ID NO: 1408810
acauggcacacaauaaaug

SEQ ID NO: 1408812 - RNA, 19 nt, Artificial Sequence
  Description of Artificial Sequence: Synthetic oligonucleotide
  Sense strand starting at position 2948 of SEQ ID NO: 1243319
ugcugugccaagcgaauuu

SEQ ID NO: 1408813 - RNA, 19 nt, Artificial Sequence
  Description of Artificial Sequence: Synthetic oligonucleotide
  Antisense strand to SEQ ID NO: 1408812
aaauucgcuuggcacagca

SEQ ID NO: 1408814 - RNA, 19 nt, Artificial Sequence
  Description of Artificial Sequence: Synthetic oligonucleotide
  Sense strand starting at position 3104 of SEQ ID NO: 1243319
cguagucgugguucuuuaa

SEQ ID NO: 1408815 - RNA, 19 nt, Artificial Sequence
  Description of Artificial Sequence: Synthetic oligonucleotide
  Antisense strand to SEQ ID NO: 1408814
uuaaagaaccacgacuacg

SEQ ID NO: 1408816 - RNA, 19 nt, Artificial Sequence
  Description of Artificial Sequence: Synthetic oligonucleotide
  Sense strand starting at position 3116 of SEQ ID NO: 1243319
ucuuuaauguuaguggaaa

SEQ ID NO: 1408817 - RNA, 19 nt, Artificial Sequence
  Description of Artificial Sequence: Synthetic oligonucleotide
  Antisense strand to SEQ ID NO: 1408816
uuuccacuaacauuaaaga

SEQ ID NO: 1408818 - RNA, 19 nt, Artificial Sequence
  Description of Artificial Sequence: Synthetic oligonucleotide
  Sense strand starting at position 3238 of SEQ ID NO: 1243319
gagccuggugaucggaauu

SEQ ID NO: 1408819 - RNA, 19 nt, Artificial Sequence
  Description of Artificial Sequence: Synthetic oligonucleotide
  Antisense strand to SEQ ID NO: 1408818
aauuccgaucaccaggcuc

SEQ ID NO: 1408820 - RNA, 19 nt, Artificial Sequence
  Description of Artificial Sequence: Synthetic oligonucleotide
  Sense strand starting at position 3271 of SEQ ID NO: 1243319
gccuaccaccugugacaua

SEQ ID NO: 1408821 - RNA, 19 nt, Artificial Sequence
  Description of Artificial Sequence: Synthetic oligonucleotide
  Antisense strand to SEQ ID NO: 1408820
uaugucacaggugguaggc

SEQ ID NO: 1408822 - RNA, 19 nt, Artificial Sequence
  Description of Artificial Sequence: Synthetic oligonucleotide
  Sense strand starting at position 3302 of SEQ ID NO: 1243319
ucaucaguuauuuggugua

SEQ ID NO: 1408823 - RNA, 19 nt, Artificial Sequence
  Description of Artificial Sequence: Synthetic oligonucleotide
  Antisense strand to SEQ ID NO: 1408822
uacaccaaauaacugauga

SEQ ID NO: 1408824 - RNA, 19 nt, Artificial Sequence
  Description of Artificial Sequence: Synthetic oligonucleotide
  Sense strand starting at position 3304 of SEQ ID NO: 1243319
aucaguuauuugguguauu

SEQ ID NO: 1408825 - RNA, 19 nt, Artificial Sequence
  Description of Artificial Sequence: Synthetic oligonucleotide
  Antisense strand to SEQ ID NO: 1408824
aauacaccaaauaacugau

SEQ ID NO: 1408826 - RNA, 19 nt, Artificial Sequence
  Description of Artificial Sequence: Synthetic oligonucleotide
  Sense strand starting at position 3446 of SEQ ID NO: 1243319
uuagaugaccugcgaacaa

SEQ ID NO: 1408827 - RNA, 19 nt, Artificial Sequence
  Description of Artificial Sequence: Synthetic oligonucleotide
  Antisense strand to SEQ ID NO: 1408826
uuguucgcaggucaucuaa

SEQ ID NO: 1408828 - RNA, 19 nt, Artificial Sequence
  Description of Artificial Sequence: Synthetic oligonucleotide
  Sense strand starting at position 3457 of SEQ ID NO: 1243319
gcgaacaauuuguaaggau

SEQ ID NO: 1408829 - RNA, 19 nt, Artificial Sequence
  Description of Artificial Sequence: Synthetic oligonucleotide
  Antisense strand to SEQ ID NO: 1408828
auccuuacaaauuguucgc

SEQ ID NO: 1408830 - RNA, 19 nt, Artificial Sequence
  Description of Artificial Sequence: Synthetic oligonucleotide
  Sense strand starting at position 3465 of SEQ ID NO: 1243319
uuuguaaggaucugaaagu

SEQ ID NO: 1408831 - RNA, 19 nt, Artificial Sequence
  Description of Artificial Sequence: Synthetic oligonucleotide
  Antisense strand to SEQ ID NO: 1408830
acuuucagauccuuacaaa

SEQ ID NO: 1408832 - RNA, 19 nt, Artificial Sequence
  Description of Artificial Sequence: Synthetic oligonucleotide
  Sense strand starting at position 3494 of SEQ ID NO: 1243319
cgauuaucuuucucaacug

SEQ ID NO: 1408833 - RNA, 19 nt, Artificial Sequence
  Description of Artificial Sequence: Synthetic oligonucleotide
  Antisense strand to SEQ ID NO: 1408832
caguugagaaagauaaucg

SEQ ID NO: 1408834 - RNA, 19 nt, Artificial Sequence
  Description of Artificial Sequence: Synthetic oligonucleotide
  Sense strand starting at position 3622 of SEQ ID NO: 1243319
uggugaugcuugguuagaa

SEQ ID NO: 1408835 - RNA, 19 nt, Artificial Sequence
  Description of Artificial Sequence: Synthetic oligonucleotide
  Antisense strand to SEQ ID NO: 1408834
uucuaaccaagcaucacca

SEQ ID NO: 1408836 - RNA, 19 nt, Artificial Sequence
  Description of Artificial Sequence: Synthetic oligonucleotide
  Sense strand starting at position 3623 of SEQ ID NO: 1243319
ggugaugcuugguuagaau

SEQ ID NO: 1408837 - RNA, 19 nt, Artificial Sequence
  Description of Artificial Sequence: Synthetic oligonucleotide
  Antisense strand to SEQ ID NO: 1408836
auucuaaccaagcaucacc

SEQ ID NO: 1408838 - RNA, 19 nt, Artificial Sequence
  Description of Artificial Sequence: Synthetic oligonucleotide
  Sense strand starting at position 3714 of SEQ ID NO: 1243319
ucagucauaguguaauuau

SEQ ID NO: 1408839 - RNA, 19 nt, Artificial Sequence
  Description of Artificial Sequence: Synthetic oligonucleotide
  Antisense strand to SEQ ID NO: 1408838
auaauuacacuaugacuga

SEQ ID NO: 1408840 - RNA, 19 nt, Artificial Sequence
  Description of Artificial Sequence: Synthetic oligonucleotide
  Sense strand starting at position 3919 of SEQ ID NO: 1243319
guauuuccacuaugcucua

SEQ ID NO: 1408841 - RNA, 19 nt, Artificial Sequence
  Description of Artificial Sequence: Synthetic oligonucleotide
  Antisense strand to SEQ ID NO: 1408840
uagagcauaguggaaauac

SEQ ID NO: 1408842 - RNA, 19 nt, Artificial Sequence
  Description of Artificial Sequence: Synthetic oligonucleotide
  Sense strand starting at position 3924 of SEQ ID NO: 1243319
uccacuaugcucuauggaa

SEQ ID NO: 1408843 - RNA, 19 nt, Artificial Sequence
  Description of Artificial Sequence: Synthetic oligonucleotide
  Antisense strand to SEQ ID NO: 1408842
uuccauagagcauagugga

SEQ ID NO: 1408844 - RNA, 19 nt, Artificial Sequence
  Description of Artificial Sequence: Synthetic oligonucleotide
  Sense strand starting at position 38 of SEQ ID NO: 1243320
agguaaccuugaguuaugu

SEQ ID NO: 1408845 - RNA, 19 nt, Artificial Sequence
  Description of Artificial Sequence: Synthetic oligonucleotide
  Antisense strand to SEQ ID NO: 1408844
acauaacucaagguuaccu

SEQ ID NO: 1408846 - RNA, 19 nt, Artificial Sequence
  Description of Artificial Sequence: Synthetic oligonucleotide
  Sense strand starting at position 40 of SEQ ID NO: 1243320
guaaccuugaguuauguca

SEQ ID NO: 1408847 - RNA, 19 nt, Artificial Sequence
  Description of Artificial Sequence: Synthetic oligonucleotide
  Antisense strand to SEQ ID NO: 1408846
ugacauaacucaagguuac

SEQ ID NO: 1408848 - RNA, 19 nt, Artificial Sequence
  Description of Artificial Sequence: Synthetic oligonucleotide
  Sense strand starting at position 48 of SEQ ID NO: 1243320
gaguuaugucaugaacuuu

SEQ ID NO: 1408849 - RNA, 19 nt, Artificial Sequence
  Description of Artificial Sequence: Synthetic oligonucleotide
  Antisense strand to SEQ ID NO: 1408848
aaaguucaugacauaacuc

SEQ ID NO: 1408850 - RNA, 19 nt, Artificial Sequence
  Description of Artificial Sequence: Synthetic oligonucleotide
  Sense strand starting at position 147 of SEQ ID NO: 1243320
aggauuacuuguguacuaa

SEQ ID NO: 1408851 - RNA, 19 nt, Artificial Sequence
  Description of Artificial Sequence: Synthetic oligonucleotide
  Antisense strand to SEQ ID NO: 1408850
uuaguacacaaguaauccu

SEQ ID NO: 1408852 - RNA, 19 nt, Artificial Sequence
  Description of Artificial Sequence: Synthetic oligonucleotide
  Sense strand starting at position 148 of SEQ ID NO: 1243320
ggauuacuuguguacuaau

SEQ ID NO: 1408853 - RNA, 19 nt, Artificial Sequence
  Description of Artificial Sequence: Synthetic oligonucleotide
  Antisense strand to SEQ ID NO: 1408852
auuaguacacaaguaaucc

SEQ ID NO: 1408854 - RNA, 19 nt, Artificial Sequence
  Description of Artificial Sequence: Synthetic oligonucleotide
  Sense strand starting at position 357 of SEQ ID NO: 1243320
acaguuuacugcuucuuua

SEQ ID NO: 1408855 - RNA, 19 nt, Artificial Sequence
  Description of Artificial Sequence: Synthetic oligonucleotide
  Antisense strand to SEQ ID NO: 1408854
uaaagaagcaguaaacugu

SEQ ID NO: 1408856 - RNA, 19 nt, Artificial Sequence
  Description of Artificial Sequence: Synthetic oligonucleotide
  Sense strand starting at position 360 of SEQ ID NO: 1243320
guuuacugcuucuuuagga

SEQ ID NO: 1408857 - RNA, 19 nt, Artificial Sequence
  Description of Artificial Sequence: Synthetic oligonucleotide
  Antisense strand to SEQ ID NO: 1408856
uccuaaagaagcaguaaac

SEQ ID NO: 1408858 - RNA, 19 nt, Artificial Sequence
  Description of Artificial Sequence: Synthetic oligonucleotide
  Sense strand starting at position 367 of SEQ ID NO: 1243320
gcuucuuuaggacaaugua

SEQ ID NO: 1408859 - RNA, 19 nt, Artificial Sequence
  Description of Artificial Sequence: Synthetic oligonucleotide
  Antisense strand to SEQ ID NO: 1408858
uacauuguccuaaagaagc

SEQ ID NO: 1408860 - RNA, 19 nt, Artificial Sequence
  Description of Artificial Sequence: Synthetic oligonucleotide
  Sense strand starting at position 464 of SEQ ID NO: 1243320
uugauugaguuacuuaacu

SEQ ID NO: 1408861 - RNA, 19 nt, Artificial Sequence
  Description of Artificial Sequence: Synthetic oligonucleotide
  Antisense strand to SEQ ID NO: 1408860
aguuaaguaacucaaucaa

SEQ ID NO: 1408862 - RNA, 19 nt, Artificial Sequence
  Description of Artificial Sequence: Synthetic oligonucleotide
  Sense strand starting at position 567 of SEQ ID NO: 1243320
auugcuuuaugagaagacu

SEQ ID NO: 1408863 - RNA, 19 nt, Artificial Sequence
  Description of Artificial Sequence: Synthetic oligonucleotide
  Antisense strand to SEQ ID NO: 1408862
agucuucucauaaagcaau

SEQ ID NO: 1408864 - RNA, 19 nt, Artificial Sequence
  Description of Artificial Sequence: Synthetic oligonucleotide
  Sense strand starting at position 635 of SEQ ID NO: 1243320
cgcaucauuucuccucgaa

SEQ ID NO: 1408865 - RNA, 19 nt, Artificial Sequence
  Description of Artificial Sequence: Synthetic oligonucleotide
  Antisense strand to SEQ ID NO: 1408864
uucgaggagaaaugaugcg

SEQ ID NO: 1408866 - RNA, 19 nt, Artificial Sequence
  Description of Artificial Sequence: Synthetic oligonucleotide
  Sense strand starting at position 718 of SEQ ID NO: 1243320
gcucucuuaucucuaguuu

SEQ ID NO: 1408867 - RNA, 19 nt, Artificial Sequence
  Description of Artificial Sequence: Synthetic oligonucleotide
  Antisense strand to SEQ ID NO: 1408866
aaacuagagauaagagagc

SEQ ID NO: 1408868 - RNA, 19 nt, Artificial Sequence
  Description of Artificial Sequence: Synthetic oligonucleotide
  Sense strand starting at position 722 of SEQ ID NO: 1243320
ucuuaucucuaguuugcuu

SEQ ID NO: 1408869 - RNA, 19 nt, Artificial Sequence
  Description of Artificial Sequence: Synthetic oligonucleotide
  Antisense strand to SEQ ID NO: 1408868
aagcaaacuagagauaaga

SEQ ID NO: 1408870 - RNA, 19 nt, Artificial Sequence
  Description of Artificial Sequence: Synthetic oligonucleotide
  Sense strand starting at position 803 of SEQ ID NO: 1243320
aggaaagaugagugugacu

SEQ ID NO: 1408871 - RNA, 19 nt, Artificial Sequence
  Description of Artificial Sequence: Synthetic oligonucleotide
  Antisense strand to SEQ ID NO: 1408870
agucacacucaucuuuccu

SEQ ID NO: 1408872 - RNA, 19 nt, Artificial Sequence
  Description of Artificial Sequence: Synthetic oligonucleotide
  Sense strand starting at position 1173 of SEQ ID NO: 1243320
gaggcaggccucugggaaa

SEQ ID NO: 1408873 - RNA, 19 nt, Artificial Sequence
  Description of Artificial Sequence: Synthetic oligonucleotide
  Antisense strand to SEQ ID NO: 1408872
uuucccagaggccugccuc

SEQ ID NO: 1408874 - RNA, 19 nt, Artificial Sequence
  Description of Artificial Sequence: Synthetic oligonucleotide
  Sense strand starting at position 1633 of SEQ ID NO: 1243320
gucgccuccaucggagaaa

SEQ ID NO: 1408875 - RNA, 19 nt, Artificial Sequence
  Description of Artificial Sequence: Synthetic oligonucleotide
  Antisense strand to SEQ ID NO: 1408874
uuucuccgauggaggcgac

SEQ ID NO: 1408876 - RNA, 19 nt, Artificial Sequence
  Description of Artificial Sequence: Synthetic oligonucleotide
  Sense strand starting at position 1810 of SEQ ID NO: 1243320
gcaaguguugugggaagag

SEQ ID NO: 1408877 - RNA, 19 nt, Artificial Sequence
  Description of Artificial Sequence: Synthetic oligonucleotide
  Antisense strand to SEQ ID NO: 1408876
cucuucccacaacacuugc

SEQ ID NO: 1408878 - RNA, 19 nt, Artificial Sequence
  Description of Artificial Sequence: Synthetic oligonucleotide
  Sense strand starting at position 1821 of SEQ ID NO: 1243320
gggaagagaugcggagaua

SEQ ID NO: 1408879 - RNA, 19 nt, Artificial Sequence
  Description of Artificial Sequence: Synthetic oligonucleotide
  Antisense strand to SEQ ID NO: 1408878
uaucuccgcaucucuuccc

SEQ ID NO: 1408880 - RNA, 19 nt, Artificial Sequence
  Description of Artificial Sequence: Synthetic oligonucleotide
  Sense strand starting at position 2349 of SEQ ID NO: 1243320
gggagaugugcucgcuuuc

SEQ ID NO: 1408881 - RNA, 19 nt, Artificial Sequence
  Description of Artificial Sequence: Synthetic oligonucleotide
  Antisense strand to SEQ ID NO: 1408880
gaaagcgagcacaucuccc

SEQ ID NO: 1408882 - RNA, 19 nt, Artificial Sequence
  Description of Artificial Sequence: Synthetic oligonucleotide
  Sense strand starting at position 2637 of SEQ ID NO: 1243320
cgcgacaugcuggcucaaa

SEQ ID NO: 1408883 - RNA, 19 nt, Artificial Sequence
  Description of Artificial Sequence: Synthetic oligonucleotide
  Antisense strand to SEQ ID NO: 1408882
uuugagccagcaugucgcg

SEQ ID NO: 1408884 - RNA, 19 nt, Artificial Sequence
  Description of Artificial Sequence: Synthetic oligonucleotide
  Sense strand starting at position 2794 of SEQ ID NO: 1243320
cgcgcauguguccugcuau

SEQ ID NO: 1408885 - RNA, 19 nt, Artificial Sequence
  Description of Artificial Sequence: Synthetic oligonucleotide
  Antisense strand to SEQ ID NO: 1408884
auagcaggacacaugcgcg

SEQ ID NO: 1408886 - RNA, 19 nt, Artificial Sequence
  Description of Artificial Sequence: Synthetic oligonucleotide
  Sense strand starting at position 2800 of SEQ ID NO: 1243320
uguguccugcuauaauuau

SEQ ID NO: 1408887 - RNA, 19 nt, Artificial Sequence
  Description of Artificial Sequence: Synthetic oligonucleotide
  Antisense strand to SEQ ID NO: 1408886
auaauuauagcaggacaca

SEQ ID NO: 1408888 - RNA, 19 nt, Artificial Sequence
  Description of Artificial Sequence: Synthetic oligonucleotide
  Sense strand starting at position 2830 of SEQ ID NO: 1243320
augcauugcgauuaaucau

SEQ ID NO: 1408889 - RNA, 19 nt, Artificial Sequence
  Description of Artificial Sequence: Synthetic oligonucleotide
  Antisense strand to SEQ ID NO: 1408888
augauuaaucgcaaugcau

SEQ ID NO: 1408890 - RNA, 19 nt, Artificial Sequence
  Description of Artificial Sequence: Synthetic oligonucleotide
  Sense strand starting at position 2854 of SEQ ID NO: 1243320
ggcucuuugaaaggcgauu

SEQ ID NO: 1408891 - RNA, 19 nt, Artificial Sequence
  Description of Artificial Sequence: Synthetic oligonucleotide
  Antisense strand to SEQ ID NO: 1408890
aaucgccuuucaaagagcc

SEQ ID NO: 1408892 - RNA, 19 nt, Artificial Sequence
  Description of Artificial Sequence: Synthetic oligonucleotide
  Sense strand starting at position 2896 of SEQ ID NO: 1243320
acccgcucgccuuaaucaa

SEQ ID NO: 1408893 - RNA, 19 nt, Artificial Sequence
  Description of Artificial Sequence: Synthetic oligonucleotide
  Antisense strand to SEQ ID NO: 1408892
uugauuaaggcgagcgggu

SEQ ID NO: 1408894 - RNA, 19 nt, Artificial Sequence
  Description of Artificial Sequence: Synthetic oligonucleotide
  Sense strand starting at position 2907 of SEQ ID NO: 1243320
uuaaucaauuaguucguga

SEQ ID NO: 1408895 - RNA, 19 nt, Artificial Sequence
  Description of Artificial Sequence: Synthetic oligonucleotide
  Antisense strand to SEQ ID NO: 1408894
ucacgaacuaauugauuaa

SEQ ID NO: 1408896 - RNA, 19 nt, Artificial Sequence
  Description of Artificial Sequence: Synthetic oligonucleotide
  Sense strand starting at position 2909 of SEQ ID NO: 1243320
aaucaauuaguucgugauu

SEQ ID NO: 1408897 - RNA, 19 nt, Artificial Sequence
  Description of Artificial Sequence: Synthetic oligonucleotide
  Antisense strand to SEQ ID NO: 1408896
aaucacgaacuaauugauu

SEQ ID NO: 1408898 - RNA, 19 nt, Artificial Sequence
  Description of Artificial Sequence: Synthetic oligonucleotide
  Sense strand starting at position 2910 of SEQ ID NO: 1243320
aucaauuaguucgugauuu

SEQ ID NO: 1408899 - RNA, 19 nt, Artificial Sequence
  Description of Artificial Sequence: Synthetic oligonucleotide
  Antisense strand to SEQ ID NO: 1408898
aaaucacgaacuaauugau

SEQ ID NO: 1408900 - RNA, 19 nt, Artificial Sequence
  Description of Artificial Sequence: Synthetic oligonucleotide
  Sense strand starting at position 2911 of SEQ ID NO: 1243320
ucaauuaguucgugauuug

SEQ ID NO: 1408901 - RNA, 19 nt, Artificial Sequence
  Description of Artificial Sequence: Synthetic oligonucleotide
  Antisense strand to SEQ ID NO: 1408900
caaaucacgaacuaauuga

SEQ ID NO: 1408902 - RNA, 19 nt, Artificial Sequence
  Description of Artificial Sequence: Synthetic oligonucleotide
  Sense strand starting at position 2918 of SEQ ID NO: 1243320
guucgugauuugcugcaga

SEQ ID NO: 1408903 - RNA, 19 nt, Artificial Sequence
  Description of Artificial Sequence: Synthetic oligonucleotide
  Antisense strand to SEQ ID NO: 1408902
ucugcagcaaaucacgaac

SEQ ID NO: 1408904 - RNA, 19 nt, Artificial Sequence
  Description of Artificial Sequence: Synthetic oligonucleotide
  Sense strand starting at position 3349 of SEQ ID NO: 1243320
ucccguuucgugaguguuu

SEQ ID NO: 1408905 - RNA, 19 nt, Artificial Sequence
  Description of Artificial Sequence: Synthetic oligonucleotide
  Antisense strand to SEQ ID NO: 1408904
aaacacucacgaaacggga

SEQ ID NO: 1408906 - RNA, 19 nt, Artificial Sequence
  Description of Artificial Sequence: Synthetic oligonucleotide
  Sense strand starting at position 3352 of SEQ ID NO: 1243320
cguuucgugaguguuucuu

SEQ ID NO: 1408907 - RNA, 19 nt, Artificial Sequence
  Description of Artificial Sequence: Synthetic oligonucleotide
  Antisense strand to SEQ ID NO: 1408906
aagaaacacucacgaaacg

SEQ ID NO: 1408908 - RNA, 19 nt, Artificial Sequence
  Description of Artificial Sequence: Synthetic oligonucleotide
  Sense strand starting at position 3360 of SEQ ID NO: 1243320
gaguguuucuucguuucuu

SEQ ID NO: 1408909 - RNA, 19 nt, Artificial Sequence
  Description of Artificial Sequence: Synthetic oligonucleotide
  Antisense strand to SEQ ID NO: 1408908
aagaaacgaagaaacacuc

SEQ ID NO: 1408910 - RNA, 19 nt, Artificial Sequence
  Description of Artificial Sequence: Synthetic oligonucleotide
  Sense strand starting at position 3361 of SEQ ID NO: 1243320
aguguuucuucguuucuuu

SEQ ID NO: 1408911 - RNA, 19 nt, Artificial Sequence
  Description of Artificial Sequence: Synthetic oligonucleotide
  Antisense strand to SEQ ID NO: 1408910
aaagaaacgaagaaacacu

SEQ ID NO: 1408912 - RNA, 19 nt, Artificial Sequence
  Description of Artificial Sequence: Synthetic oligonucleotide
  Sense strand starting at position 3362 of SEQ ID NO: 1243320
guguuucuucguuucuuua

SEQ ID NO: 1408913 - RNA, 19 nt, Artificial Sequence
  Description of Artificial Sequence: Synthetic oligonucleotide
  Antisense strand to SEQ ID NO: 1408912
uaaagaaacgaagaaacac

SEQ ID NO: 1408914 - RNA, 19 nt, Artificial Sequence
  Description of Artificial Sequence: Synthetic oligonucleotide
  Sense strand starting at position 3365 of SEQ ID NO: 1243320
uuucuucguuucuuuaaga

SEQ ID NO: 1408915 - RNA, 19 nt, Artificial Sequence
  Description of Artificial Sequence: Synthetic oligonucleotide
  Antisense strand to SEQ ID NO: 1408914
ucuuaaagaaacgaagaaa

SEQ ID NO: 1408916 - RNA, 19 nt, Artificial Sequence
  Description of Artificial Sequence: Synthetic oligonucleotide
  Sense strand starting at position 3692 of SEQ ID NO: 1243320
uuucucuaccucggacauu

SEQ ID NO: 1408917 - RNA, 19 nt, Artificial Sequence
  Description of Artificial Sequence: Synthetic oligonucleotide
  Antisense strand to SEQ ID NO: 1408916
aauguccgagguagagaaa

SEQ ID NO: 1408918 - RNA, 19 nt, Artificial Sequence
  Description of Artificial Sequence: Synthetic oligonucleotide
  Sense strand starting at position 3703 of SEQ ID NO: 1243320
cggacauucccaggacaau

SEQ ID NO: 1408919 - RNA, 19 nt, Artificial Sequence
  Description of Artificial Sequence: Synthetic oligonucleotide
  Antisense strand to SEQ ID NO: 1408918
auuguccugggaauguccg

SEQ ID NO: 1408920 - RNA, 19 nt, Artificial Sequence
  Description of Artificial Sequence: Synthetic oligonucleotide
  Sense strand starting at position 3716 of SEQ ID NO: 1243320
gacaauuagggcugaaguu

SEQ ID NO: 1408921 - RNA, 19 nt, Artificial Sequence
  Description of Artificial Sequence: Synthetic oligonucleotide
  Antisense strand to SEQ ID NO: 1408920
aacuucagcccuaauuguc

SEQ ID NO: 1408922 - RNA, 19 nt, Artificial Sequence
  Description of Artificial Sequence: Synthetic oligonucleotide
  Sense strand starting at position 3717 of SEQ ID NO: 1243320
acaauuagggcugaaguuu

SEQ ID NO: 1408923 - RNA, 19 nt, Artificial Sequence
  Description of Artificial Sequence: Synthetic oligonucleotide
  Antisense strand to SEQ ID NO: 1408922
aaacuucagcccuaauugu

SEQ ID NO: 1408924 - RNA, 19 nt, Artificial Sequence
  Description of Artificial Sequence: Synthetic oligonucleotide
  Sense strand starting at position 43 of SEQ ID NO: 1243321
gcucucuuaucucuaguuu

SEQ ID NO: 1408925 - RNA, 19 nt, Artificial Sequence
  Description of Artificial Sequence: Synthetic oligonucleotide
  Antisense strand to SEQ ID NO: 1408924
aaacuagagauaagagagc

SEQ ID NO: 1408926 - RNA, 19 nt, Artificial Sequence
  Description of Artificial Sequence: Synthetic oligonucleotide
  Sense strand starting at position 47 of SEQ ID NO: 1243321
ucuuaucucuaguuugcuu

SEQ ID NO: 1408927 - RNA, 19 nt, Artificial Sequence
  Description of Artificial Sequence: Synthetic oligonucleotide
  Antisense strand to SEQ ID NO: 1408926
aagcaaacuagagauaaga

SEQ ID NO: 1408928 - RNA, 19 nt, Artificial Sequence
  Description of Artificial Sequence: Synthetic oligonucleotide
  Sense strand starting at position 128 of SEQ ID NO: 1243321
aggaaagaugagugugacu

SEQ ID NO: 1408929 - RNA, 19 nt, Artificial Sequence
  Description of Artificial Sequence: Synthetic oligonucleotide
  Antisense strand to SEQ ID NO: 1408928
agucacacucaucuuuccu

SEQ ID NO: 1408930 - RNA, 19 nt, Artificial Sequence
  Description of Artificial Sequence: Synthetic oligonucleotide
  Sense strand starting at position 498 of SEQ ID NO: 1243321
gaggcaggccucugggaaa

SEQ ID NO: 1408931 - RNA, 19 nt, Artificial Sequence
  Description of Artificial Sequence: Synthetic oligonucleotide
  Antisense strand to SEQ ID NO: 1408930
uuucccagaggccugccuc

SEQ ID NO: 1408932 - RNA, 19 nt, Artificial Sequence
  Description of Artificial Sequence: Synthetic oligonucleotide
  Sense strand starting at position 680 of SEQ ID NO: 1243321
cgccgagauugcuccuugu

SEQ ID NO: 1408933 - RNA, 19 nt, Artificial Sequence
  Description of Artificial Sequence: Synthetic oligonucleotide
  Antisense strand to SEQ ID NO: 1408932
acaaggagcaaucucggcg

SEQ ID NO: 1408934 - RNA, 19 nt, Artificial Sequence
  Description of Artificial Sequence: Synthetic oligonucleotide
  Sense strand starting at position 684 of SEQ ID NO: 1243321
gagauugcuccuugugcgu

SEQ ID NO: 1408935 - RNA, 19 nt, Artificial Sequence
  Description of Artificial Sequence: Synthetic oligonucleotide
  Antisense strand to SEQ ID NO: 1408934
acgcacaaggagcaaucuc

SEQ ID NO: 1408936 - RNA, 19 nt, Artificial Sequence
  Description of Artificial Sequence: Synthetic oligonucleotide
  Sense strand starting at position 958 of SEQ ID NO: 1243321
gucgccuccaucggagaaa

SEQ ID NO: 1408937 - RNA, 19 nt, Artificial Sequence
  Description of Artificial Sequence: Synthetic oligonucleotide
  Antisense strand to SEQ ID NO: 1408936
uuucuccgauggaggcgac

SEQ ID NO: 1408938 - RNA, 19 nt, Artificial Sequence
  Description of Artificial Sequence: Synthetic oligonucleotide
  Sense strand starting at position 1135 of SEQ ID NO: 1243321
gcaaguguugugggaagag

SEQ ID NO: 1408939 - RNA, 19 nt, Artificial Sequence
  Description of Artificial Sequence: Synthetic oligonucleotide
  Antisense strand to SEQ ID NO: 1408938
cucuucccacaacacuugc

SEQ ID NO: 1408940 - RNA, 19 nt, Artificial Sequence
  Description of Artificial Sequence: Synthetic oligonucleotide
  Sense strand starting at position 1146 of SEQ ID NO: 1243321
gggaagagaugcggagaua

SEQ ID NO: 1408941 - RNA, 19 nt, Artificial Sequence
  Description of Artificial Sequence: Synthetic oligonucleotide
  Antisense strand to SEQ ID NO: 1408940
uaucuccgcaucucuuccc

SEQ ID NO: 1408942 - RNA, 19 nt, Artificial Sequence
  Description of Artificial Sequence: Synthetic oligonucleotide
  Sense strand starting at position 1661 of SEQ ID NO: 1243321
gaaagauccugccgggaga

SEQ ID NO: 1408943 - RNA, 19 nt, Artificial Sequence
  Description of Artificial Sequence: Synthetic oligonucleotide
  Antisense strand to SEQ ID NO: 1408942
ucucccggcaggaucuuuc

SEQ ID NO: 1408944 - RNA, 19 nt, Artificial Sequence
  Description of Artificial Sequence: Synthetic oligonucleotide
  Sense strand starting at position 1674 of SEQ ID NO: 1243321
gggagaugugcucgcuuuc

SEQ ID NO: 1408945 - RNA, 19 nt, Artificial Sequence
  Description of Artificial Sequence: Synthetic oligonucleotide
  Antisense strand to SEQ ID NO: 1408944
gaaagcgagcacaucuccc

SEQ ID NO: 1408946 - RNA, 19 nt, Artificial Sequence
  Description of Artificial Sequence: Synthetic oligonucleotide
  Sense strand starting at position 1951 of SEQ ID NO: 1243321
cuugcuuccuccgcgacau

SEQ ID NO: 1408947 - RNA, 19 nt, Artificial Sequence
  Description of Artificial Sequence: Synthetic oligonucleotide
  Antisense strand to SEQ ID NO: 1408946
augucgcggaggaagcaag

SEQ ID NO: 1408948 - RNA, 19 nt, Artificial Sequence
  Description of Artificial Sequence: Synthetic oligonucleotide
  Sense strand starting at position 1962 of SEQ ID NO: 1243321
cgcgacaugcuggcucaaa

SEQ ID NO: 1408949 - RNA, 19 nt, Artificial Sequence
  Description of Artificial Sequence: Synthetic oligonucleotide
  Antisense strand to SEQ ID NO: 1408948
uuugagccagcaugucgcg

SEQ ID NO: 1408950 - RNA, 19 nt, Artificial Sequence
  Description of Artificial Sequence: Synthetic oligonucleotide
  Sense strand starting at position 2119 of SEQ ID NO: 1243321
cgcgcauguguccugcuau

SEQ ID NO: 1408951 - RNA, 19 nt, Artificial Sequence
  Description of Artificial Sequence: Synthetic oligonucleotide
  Antisense strand to SEQ ID NO: 1408950
auagcaggacacaugcgcg

SEQ ID NO: 1408952 - RNA, 19 nt, Artificial Sequence
  Description of Artificial Sequence: Synthetic oligonucleotide
  Sense strand starting at position 2125 of SEQ ID NO: 1243321
uguguccugcuauaauuau

SEQ ID NO: 1408953 - RNA, 19 nt, Artificial Sequence
  Description of Artificial Sequence: Synthetic oligonucleotide
  Antisense strand to SEQ ID NO: 1408952
auaauuauagcaggacaca

SEQ ID NO: 1408954 - RNA, 19 nt, Artificial Sequence
  Description of Artificial Sequence: Synthetic oligonucleotide
  Sense strand starting at position 2155 of SEQ ID NO: 1243321
augcauugcgauuaaucau

SEQ ID NO: 1408955 - RNA, 19 nt, Artificial Sequence
  Description of Artificial Sequence: Synthetic oligonucleotide
  Antisense strand to SEQ ID NO: 1408954
augauuaaucgcaaugcau

SEQ ID NO: 1408956 - RNA, 19 nt, Artificial Sequence
  Description of Artificial Sequence: Synthetic oligonucleotide
  Sense strand starting at position 2179 of SEQ ID NO: 1243321
ggcucuuugaaaggcgauu

SEQ ID NO: 1408957 - RNA, 19 nt, Artificial Sequence
  Description of Artificial Sequence: Synthetic oligonucleotide
  Antisense strand to SEQ ID NO: 1408956
aaucgccuuucaaagagcc

SEQ ID NO: 1408958 - RNA, 19 nt, Artificial Sequence
  Description of Artificial Sequence: Synthetic oligonucleotide
  Sense strand starting at position 2221 of SEQ ID NO: 1243321
acccgcucgccuuaaucaa

SEQ ID NO: 1408959 - RNA, 19 nt, Artificial Sequence
  Description of Artificial Sequence: Synthetic oligonucleotide
  Antisense strand to SEQ ID NO: 1408958
uugauuaaggcgagcgggu

SEQ ID NO: 1408960 - RNA, 19 nt, Artificial Sequence
  Description of Artificial Sequence: Synthetic oligonucleotide
  Sense strand starting at position 2232 of SEQ ID NO: 1243321
uuaaucaauuaguucguga

SEQ ID NO: 1408961 - RNA, 19 nt, Artificial Sequence
  Description of Artificial Sequence: Synthetic oligonucleotide
  Antisense strand to SEQ ID NO: 1408960
ucacgaacuaauugauuaa

SEQ ID NO: 1408962 - RNA, 19 nt, Artificial Sequence
  Description of Artificial Sequence: Synthetic oligonucleotide
  Sense strand starting at position 2234 of SEQ ID NO: 1243321
aaucaauuaguucgugauu

SEQ ID NO: 1408963 - RNA, 19 nt, Artificial Sequence
  Description of Artificial Sequence: Synthetic oligonucleotide
  Antisense strand to SEQ ID NO: 1408962
aaucacgaacuaauugauu

SEQ ID NO: 1408964 - RNA, 19 nt, Artificial Sequence
  Description of Artificial Sequence: Synthetic oligonucleotide
  Sense strand starting at position 2235 of SEQ ID NO: 1243321
aucaauuaguucgugauuu

SEQ ID NO: 1408965 - RNA, 19 nt, Artificial Sequence
  Description of Artificial Sequence: Synthetic oligonucleotide
  Antisense strand to SEQ ID NO: 1408964
aaaucacgaacuaauugau

SEQ ID NO: 1408966 - RNA, 19 nt, Artificial Sequence
  Description of Artificial Sequence: Synthetic oligonucleotide
  Sense strand starting at position 2236 of SEQ ID NO: 1243321
ucaauuaguucgugauuug

SEQ ID NO: 1408967 - RNA, 19 nt, Artificial Sequence
  Description of Artificial Sequence: Synthetic oligonucleotide
  Antisense strand to SEQ ID NO: 1408966
caaaucacgaacuaauuga

SEQ ID NO: 1408968 - RNA, 19 nt, Artificial Sequence
  Description of Artificial Sequence: Synthetic oligonucleotide
  Sense strand starting at position 2243 of SEQ ID NO: 1243321
guucgugauuugcugcaga

SEQ ID NO: 1408969 - RNA, 19 nt, Artificial Sequence
  Description of Artificial Sequence: Synthetic oligonucleotide
  Antisense strand to SEQ ID NO: 1408968
ucugcagcaaaucacgaac

SEQ ID NO: 1408970 - RNA, 19 nt, Artificial Sequence
  Description of Artificial Sequence: Synthetic oligonucleotide
  Sense strand starting at position 2673 of SEQ ID NO: 1243321
gucccguuucgugaguguu

SEQ ID NO: 1408971 - RNA, 19 nt, Artificial Sequence
  Description of Artificial Sequence: Synthetic oligonucleotide
  Antisense strand to SEQ ID NO: 1408970
aacacucacgaaacgggac

SEQ ID NO: 1408972 - RNA, 19 nt, Artificial Sequence
  Description of Artificial Sequence: Synthetic oligonucleotide
  Sense strand starting at position 2674 of SEQ ID NO: 1243321
ucccguuucgugaguguuu

SEQ ID NO: 1408973 - RNA, 19 nt, Artificial Sequence
  Description of Artificial Sequence: Synthetic oligonucleotide
  Antisense strand to SEQ ID NO: 1408972
aaacacucacgaaacggga

SEQ ID NO: 1408974 - RNA, 19 nt, Artificial Sequence
  Description of Artificial Sequence: Synthetic oligonucleotide
  Sense strand starting at position 2677 of SEQ ID NO: 1243321
cguuucgugaguguuucuu

SEQ ID NO: 1408975 - RNA, 19 nt, Artificial Sequence
  Description of Artificial Sequence: Synthetic oligonucleotide
  Antisense strand to SEQ ID NO: 1408974
aagaaacacucacgaaacg

SEQ ID NO: 1408976 - RNA, 19 nt, Artificial Sequence
  Description of Artificial Sequence: Synthetic oligonucleotide
  Sense strand starting at position 2683 of SEQ ID NO: 1243321
gugaguguuucuucguuuc

SEQ ID NO: 1408977 - RNA, 19 nt, Artificial Sequence
  Description of Artificial Sequence: Synthetic oligonucleotide
  Antisense strand to SEQ ID NO: 1408976
gaaacgaagaaacacucac

SEQ ID NO: 1408978 - RNA, 19 nt, Artificial Sequence
  Description of Artificial Sequence: Synthetic oligonucleotide
  Sense strand starting at position 2685 of SEQ ID NO: 1243321
gaguguuucuucguuucuu

SEQ ID NO: 1408979 - RNA, 19 nt, Artificial Sequence
  Description of Artificial Sequence: Synthetic oligonucleotide
  Antisense strand to SEQ ID NO: 1408978
aagaaacgaagaaacacuc

SEQ ID NO: 1408980 - RNA, 19 nt, Artificial Sequence
  Description of Artificial Sequence: Synthetic oligonucleotide
  Sense strand starting at position 2686 of SEQ ID NO: 1243321
aguguuucuucguuucuuu

SEQ ID NO: 1408981 - RNA, 19 nt, Artificial Sequence
  Description of Artificial Sequence: Synthetic oligonucleotide
  Antisense strand to SEQ ID NO: 1408980
aaagaaacgaagaaacacu

SEQ ID NO: 1408982 - RNA, 19 nt, Artificial Sequence
  Description of Artificial Sequence: Synthetic oligonucleotide
  Sense strand starting at position 2687 of SEQ ID NO: 1243321
guguuucuucguuucuuua

SEQ ID NO: 1408983 - RNA, 19 nt, Artificial Sequence
  Description of Artificial Sequence: Synthetic oligonucleotide
  Antisense strand to SEQ ID NO: 1408982
uaaagaaacgaagaaacac

SEQ ID NO: 1408984 - RNA, 19 nt, Artificial Sequence
  Description of Artificial Sequence: Synthetic oligonucleotide
  Sense strand starting at position 2690 of SEQ ID NO: 1243321
uuucuucguuucuuuaaga

SEQ ID NO: 1408985 - RNA, 19 nt, Artificial Sequence
  Description of Artificial Sequence: Synthetic oligonucleotide
  Antisense strand to SEQ ID NO: 1408984
ucuuaaagaaacgaagaaa

SEQ ID NO: 1408986 - RNA, 19 nt, Artificial Sequence
  Description of Artificial Sequence: Synthetic oligonucleotide
  Sense strand starting at position 3017 of SEQ ID NO: 1243321
uuucucuaccucggacauu

SEQ ID NO: 1408987 - RNA, 19 nt, Artificial Sequence
  Description of Artificial Sequence: Synthetic oligonucleotide
  Antisense strand to SEQ ID NO: 1408986
aauguccgagguagagaaa

SEQ ID NO: 1408988 - RNA, 19 nt, Artificial Sequence
  Description of Artificial Sequence: Synthetic oligonucleotide
  Sense strand starting at position 3028 of SEQ ID NO: 1243321
cggacauucccaggacaau

SEQ ID NO: 1408989 - RNA, 19 nt, Artificial Sequence
  Description of Artificial Sequence: Synthetic oligonucleotide
  Antisense strand to SEQ ID NO: 1408988
auuguccugggaauguccg

SEQ ID NO: 1408990 - RNA, 19 nt, Artificial Sequence
  Description of Artificial Sequence: Synthetic oligonucleotide
  Sense strand starting at position 3041 of SEQ ID NO: 1243321
gacaauuagggcugaaguu

SEQ ID NO: 1408991 - RNA, 19 nt, Artificial Sequence
  Description of Artificial Sequence: Synthetic oligonucleotide
  Antisense strand to SEQ ID NO: 1408990
aacuucagcccuaauuguc

SEQ ID NO: 1408992 - RNA, 19 nt, Artificial Sequence
  Description of Artificial Sequence: Synthetic oligonucleotide
  Sense strand starting at position 3042 of SEQ ID NO: 1243321
acaauuagggcugaaguuu

SEQ ID NO: 1408993 - RNA, 19 nt, Artificial Sequence
  Description of Artificial Sequence: Synthetic oligonucleotide
  Antisense strand to SEQ ID NO: 1408992
aaacuucagcccuaauugu

SEQ ID NO: 1408994 - RNA, 19 nt, Artificial Sequence
  Description of Artificial Sequence: Synthetic oligonucleotide
  Sense strand starting at position 3715 of SEQ ID NO: 1243321
gcuccaagguucucgaagu

SEQ ID NO: 1408995 - RNA, 19 nt, Artificial Sequence
  Description of Artificial Sequence: Synthetic oligonucleotide
  Antisense strand to SEQ ID NO: 1408994
acuucgagaaccuuggagc

SEQ ID NO: 1408996 - RNA, 19 nt, Artificial Sequence
  Description of Artificial Sequence: Synthetic oligonucleotide
  Sense strand starting at position 3730 of SEQ ID NO: 1243321
aagucuugcgcccgaagga

SEQ ID NO: 1408997 - RNA, 19 nt, Artificial Sequence
  Description of Artificial Sequence: Synthetic oligonucleotide
  Antisense strand to SEQ ID NO: 1408996
uccuucgggcgcaagacuu

SEQ ID NO: 1408998 - RNA, 19 nt, Artificial Sequence
  Description of Artificial Sequence: Synthetic oligonucleotide
  Sense strand starting at position 3757 of SEQ ID NO: 1243321
aacuaaacuucggcugagu

SEQ ID NO: 1408999 - RNA, 19 nt, Artificial Sequence
  Description of Artificial Sequence: Synthetic oligonucleotide
  Antisense strand to SEQ ID NO: 1408998
acucagccgaaguuuaguu

SEQ ID NO: 1409000 - RNA, 19 nt, Artificial Sequence
  Description of Artificial Sequence: Synthetic oligonucleotide
  Sense strand starting at position 3759 of SEQ ID NO: 1243321
cuaaacuucggcugaguaa

SEQ ID NO: 1409001 - RNA, 19 nt, Artificial Sequence
  Description of Artificial Sequence: Synthetic oligonucleotide
  Antisense strand to SEQ ID NO: 1409000
uuacucagccgaaguuuag

SEQ ID NO: 1409002 - RNA, 19 nt, Artificial Sequence
  Description of Artificial Sequence: Synthetic oligonucleotide
  Sense strand starting at position 3760 of SEQ ID NO: 1243321
uaaacuucggcugaguaau

SEQ ID NO: 1409003 - RNA, 19 nt, Artificial Sequence
  Description of Artificial Sequence: Synthetic oligonucleotide
  Antisense strand to SEQ ID NO: 1409002
auuacucagccgaaguuua

SEQ ID NO: 1409004 - RNA, 19 nt, Artificial Sequence
  Description of Artificial Sequence: Synthetic oligonucleotide
  Sense strand starting at position 34 of SEQ ID NO: 1243322
agacauuggcgacagguuu

SEQ ID NO: 1409005 - RNA, 19 nt, Artificial Sequence
  Description of Artificial Sequence: Synthetic oligonucleotide
  Antisense strand to SEQ ID NO: 1409004
aaaccugucgccaaugucu

SEQ ID NO: 1409006 - RNA, 19 nt, Artificial Sequence
  Description of Artificial Sequence: Synthetic oligonucleotide
  Sense strand starting at position 40 of SEQ ID NO: 1243322
uggcgacagguuuguugaa

SEQ ID NO: 1409007 - RNA, 19 nt, Artificial Sequence
  Description of Artificial Sequence: Synthetic oligonucleotide
  Antisense strand to SEQ ID NO: 1409006
uucaacaaaccugucgcca

SEQ ID NO: 1409008 - RNA, 19 nt, Artificial Sequence
  Description of Artificial Sequence: Synthetic oligonucleotide
  Sense strand starting at position 41 of SEQ ID NO: 1243322
ggcgacagguuuguugaau

SEQ ID NO: 1409009 - RNA, 19 nt, Artificial Sequence
  Description of Artificial Sequence: Synthetic oligonucleotide
  Antisense strand to SEQ ID NO: 1409008
auucaacaaaccugucgcc

SEQ ID NO: 1409010 - RNA, 19 nt, Artificial Sequence
  Description of Artificial Sequence: Synthetic oligonucleotide
  Sense strand starting at position 42 of SEQ ID NO: 1243322
gcgacagguuuguugaaug

SEQ ID NO: 1409011 - RNA, 19 nt, Artificial Sequence
  Description of Artificial Sequence: Synthetic oligonucleotide
  Antisense strand to SEQ ID NO: 1409010
cauucaacaaaccugucgc

SEQ ID NO: 1409012 - RNA, 19 nt, Artificial Sequence
  Description of Artificial Sequence: Synthetic oligonucleotide
  Sense strand starting at position 59 of SEQ ID NO: 1243322
ugaauaagugaaggagcua

SEQ ID NO: 1409013 - RNA, 19 nt, Artificial Sequence
  Description of Artificial Sequence: Synthetic oligonucleotide
  Antisense strand to SEQ ID NO: 1409012
uagcuccuucacuuauuca

SEQ ID NO: 1409014 - RNA, 19 nt, Artificial Sequence
  Description of Artificial Sequence: Synthetic oligonucleotide
  Sense strand starting at position 209 of SEQ ID NO: 1243322
cagaguguguucuuuccau

SEQ ID NO: 1409015 - RNA, 19 nt, Artificial Sequence
  Description of Artificial Sequence: Synthetic oligonucleotide
  Antisense strand to SEQ ID NO: 1409014
auggaaagaacacacucug

SEQ ID NO: 1409016 - RNA, 19 nt, Artificial Sequence
  Description of Artificial Sequence: Synthetic oligonucleotide
  Sense strand starting at position 359 of SEQ ID NO: 1243322
guguguaccaccuggaaag

SEQ ID NO: 1409017 - RNA, 19 nt, Artificial Sequence
  Description of Artificial Sequence: Synthetic oligonucleotide
  Antisense strand to SEQ ID NO: 1409016
cuuuccaggugguacacac

SEQ ID NO: 1409018 - RNA, 19 nt, Artificial Sequence
  Description of Artificial Sequence: Synthetic oligonucleotide
  Sense strand starting at position 381 of SEQ ID NO: 1243322
cagugagacccuggaauug

SEQ ID NO: 1409019 - RNA, 19 nt, Artificial Sequence
  Description of Artificial Sequence: Synthetic oligonucleotide
  Antisense strand to SEQ ID NO: 1409018
caauuccagggucucacug

SEQ ID NO: 1409020 - RNA, 19 nt, Artificial Sequence
  Description of Artificial Sequence: Synthetic oligonucleotide
  Sense strand starting at position 403 of SEQ ID NO: 1243322
cuugguugucugggacaca

SEQ ID NO: 1409021 - RNA, 19 nt, Artificial Sequence
  Description of Artificial Sequence: Synthetic oligonucleotide
  Antisense strand to SEQ ID NO: 1409020
ugugucccagacaaccaag

SEQ ID NO: 1409022 - RNA, 19 nt, Artificial Sequence
  Description of Artificial Sequence: Synthetic oligonucleotide
  Sense strand starting at position 423 of SEQ ID NO: 1243322
ugagccaacccuugguuua

SEQ ID NO: 1409023 - RNA, 19 nt, Artificial Sequence
  Description of Artificial Sequence: Synthetic oligonucleotide
  Antisense strand to SEQ ID NO: 1409022
uaaaccaaggguuggcuca

SEQ ID NO: 1409024 - RNA, 19 nt, Artificial Sequence
  Description of Artificial Sequence: Synthetic oligonucleotide
  Sense strand starting at position 424 of SEQ ID NO: 1243322
gagccaacccuugguuuaa

SEQ ID NO: 1409025 - RNA, 19 nt, Artificial Sequence
  Description of Artificial Sequence: Synthetic oligonucleotide
  Antisense strand to SEQ ID NO: 1409024
uuaaaccaaggguuggcuc

SEQ ID NO: 1409026 - RNA, 19 nt, Artificial Sequence
  Description of Artificial Sequence: Synthetic oligonucleotide
  Sense strand starting at position 436 of SEQ ID NO: 1243322
gguuuaaccuggguguucu

SEQ ID NO: 1409027 - RNA, 19 nt, Artificial Sequence
  Description of Artificial Sequence: Synthetic oligonucleotide
  Antisense strand to SEQ ID NO: 1409026
agaacacccagguuaaacc

SEQ ID NO: 1409028 - RNA, 19 nt, Artificial Sequence
  Description of Artificial Sequence: Synthetic oligonucleotide
  Sense strand starting at position 444 of SEQ ID NO: 1243322
cuggguguucuccagguua

SEQ ID NO: 1409029 - RNA, 19 nt, Artificial Sequence
  Description of Artificial Sequence: Synthetic oligonucleotide
  Antisense strand to SEQ ID NO: 1409028
uaaccuggagaacacccag

SEQ ID NO: 1409030 - RNA, 19 nt, Artificial Sequence
  Description of Artificial Sequence: Synthetic oligonucleotide
  Sense strand starting at position 446 of SEQ ID NO: 1243322
ggguguucuccagguuagg

SEQ ID NO: 1409031 - RNA, 19 nt, Artificial Sequence
  Description of Artificial Sequence: Synthetic oligonucleotide
  Antisense strand to SEQ ID NO: 1409030
ccuaaccuggagaacaccc

SEQ ID NO: 1409032 - RNA, 19 nt, Artificial Sequence
  Description of Artificial Sequence: Synthetic oligonucleotide
  Sense strand starting at position 484 of SEQ ID NO: 1243322
gguugcugucccugggaca

SEQ ID NO: 1409033 - RNA, 19 nt, Artificial Sequence
  Description of Artificial Sequence: Synthetic oligonucleotide
  Antisense strand to SEQ ID NO: 1409032
ugucccagggacagcaacc

SEQ ID NO: 1409034 - RNA, 19 nt, Artificial Sequence
  Description of Artificial Sequence: Synthetic oligonucleotide
  Sense strand starting at position 485 of SEQ ID NO: 1243322
guugcugucccugggacaa

SEQ ID NO: 1409035 - RNA, 19 nt, Artificial Sequence
  Description of Artificial Sequence: Synthetic oligonucleotide
  Antisense strand to SEQ ID NO: 1409034
uugucccagggacagcaac

SEQ ID NO: 1409036 - RNA, 19 nt, Artificial Sequence
  Description of Artificial Sequence: Synthetic oligonucleotide
  Sense strand starting at position 517 of SEQ ID NO: 1243322
ggugcccugaccugaaaua

SEQ ID NO: 1409037 - RNA, 19 nt, Artificial Sequence
  Description of Artificial Sequence: Synthetic oligonucleotide
  Antisense strand to SEQ ID NO: 1409036
uauuucaggucagggcacc

SEQ ID NO: 1409038 - RNA, 19 nt, Artificial Sequence
  Description of Artificial Sequence: Synthetic oligonucleotide
  Sense strand starting at position 616 of SEQ ID NO: 1243322
gggaguacaaaguaugguu

SEQ ID NO: 1409039 - RNA, 19 nt, Artificial Sequence
  Description of Artificial Sequence: Synthetic oligonucleotide
  Antisense strand to SEQ ID NO: 1409038
aaccauacuuuguacuccc

SEQ ID NO: 1409040 - RNA, 19 nt, Artificial Sequence
  Description of Artificial Sequence: Synthetic oligonucleotide
  Sense strand starting at position 618 of SEQ ID NO: 1243322
gaguacaaaguaugguuua

SEQ ID NO: 1409041 - RNA, 19 nt, Artificial Sequence
  Description of Artificial Sequence: Synthetic oligonucleotide
  Antisense strand to SEQ ID NO: 1409040
uaaaccauacuuuguacuc

SEQ ID NO: 1409042 - RNA, 19 nt, Artificial Sequence
  Description of Artificial Sequence: Synthetic oligonucleotide
  Sense strand starting at position 623 of SEQ ID NO: 1243322
caaaguaugguuuagguaa

SEQ ID NO: 1409043 - RNA, 19 nt, Artificial Sequence
  Description of Artificial Sequence: Synthetic oligonucleotide
  Antisense strand to SEQ ID NO: 1409042
uuaccuaaaccauacuuug

SEQ ID NO: 1409044 - RNA, 19 nt, Artificial Sequence
  Description of Artificial Sequence: Synthetic oligonucleotide
  Sense strand starting at position 2418 of SEQ ID NO: 1243322
guguguuugaaggagggaa

SEQ ID NO: 1409045 - RNA, 19 nt, Artificial Sequence
  Description of Artificial Sequence: Synthetic oligonucleotide
  Antisense strand to SEQ ID NO: 1409044
uucccuccuucaaacacac

SEQ ID NO: 1409046 - RNA, 19 nt, Artificial Sequence
  Description of Artificial Sequence: Synthetic oligonucleotide
  Sense strand starting at position 2446 of SEQ ID NO: 1243322
agguucugcauucggauau

SEQ ID NO: 1409047 - RNA, 19 nt, Artificial Sequence
  Description of Artificial Sequence: Synthetic oligonucleotide
  Antisense strand to SEQ ID NO: 1409046
auauccgaaugcagaaccu

SEQ ID NO: 1409048 - RNA, 19 nt, Artificial Sequence
  Description of Artificial Sequence: Synthetic oligonucleotide
  Sense strand starting at position 2450 of SEQ ID NO: 1243322
ucugcauucggauaugcau

SEQ ID NO: 1409049 - RNA, 19 nt, Artificial Sequence
  Description of Artificial Sequence: Synthetic oligonucleotide
  Antisense strand to SEQ ID NO: 1409048
augcauauccgaaugcaga

SEQ ID NO: 1409050 - RNA, 19 nt, Artificial Sequence
  Description of Artificial Sequence: Synthetic oligonucleotide
  Sense strand starting at position 2558 of SEQ ID NO: 1243322
ccuauuuccagcgagacgu

SEQ ID NO: 1409051 - RNA, 19 nt, Artificial Sequence
  Description of Artificial Sequence: Synthetic oligonucleotide
  Antisense strand to SEQ ID NO: 1409050
acgucucgcuggaaauagg

SEQ ID NO: 1409052 - RNA, 19 nt, Artificial Sequence
  Description of Artificial Sequence: Synthetic oligonucleotide
  Sense strand starting at position 2676 of SEQ ID NO: 1243322
ggcagugacuaguccagga

SEQ ID NO: 1409053 - RNA, 19 nt, Artificial Sequence
  Description of Artificial Sequence: Synthetic oligonucleotide
  Antisense strand to SEQ ID NO: 1409052
uccuggacuagucacugcc

SEQ ID NO: 1409054 - RNA, 19 nt, Artificial Sequence
  Description of Artificial Sequence: Synthetic oligonucleotide
  Sense strand starting at position 2678 of SEQ ID NO: 1243322
cagugacuaguccaggagu

SEQ ID NO: 1409055 - RNA, 19 nt, Artificial Sequence
  Description of Artificial Sequence: Synthetic oligonucleotide
  Antisense strand to SEQ ID NO: 1409054
acuccuggacuagucacug

SEQ ID NO: 1409056 - RNA, 19 nt, Artificial Sequence
  Description of Artificial Sequence: Synthetic oligonucleotide
  Sense strand starting at position 2706 of SEQ ID NO: 1243322
aggaacugcucgccggaua

SEQ ID NO: 1409057 - RNA, 19 nt, Artificial Sequence
  Description of Artificial Sequence: Synthetic oligonucleotide
  Antisense strand to SEQ ID NO: 1409056
uauccggcgagcaguuccu

SEQ ID NO: 1409058 - RNA, 19 nt, Artificial Sequence
  Description of Artificial Sequence: Synthetic oligonucleotide
  Sense strand starting at position 2709 of SEQ ID NO: 1243322
aacugcucgccggauagaa

SEQ ID NO: 1409059 - RNA, 19 nt, Artificial Sequence
  Description of Artificial Sequence: Synthetic oligonucleotide
  Antisense strand to SEQ ID NO: 1409058
uucuauccggcgagcaguu

SEQ ID NO: 1409060 - RNA, 19 nt, Artificial Sequence
  Description of Artificial Sequence: Synthetic oligonucleotide
  Sense strand starting at position 2761 of SEQ ID NO: 1243322
agguguaagggauguugca

SEQ ID NO: 1409061 - RNA, 19 nt, Artificial Sequence
  Description of Artificial Sequence: Synthetic oligonucleotide
  Antisense strand to SEQ ID NO: 1409060
ugcaacaucccuuacaccu

SEQ ID NO: 1409062 - RNA, 19 nt, Artificial Sequence
  Description of Artificial Sequence: Synthetic oligonucleotide
  Sense strand starting at position 2776 of SEQ ID NO: 1243322
ugcauugucuguuugauaa

SEQ ID NO: 1409063 - RNA, 19 nt, Artificial Sequence
  Description of Artificial Sequence: Synthetic oligonucleotide
  Antisense strand to SEQ ID NO: 1409062
uuaucaaacagacaaugca

SEQ ID NO: 1409064 - RNA, 19 nt, Artificial Sequence
  Description of Artificial Sequence: Synthetic oligonucleotide
  Sense strand starting at position 2783 of SEQ ID NO: 1243322
ucuguuugauaaccggaaa

SEQ ID NO: 1409065 - RNA, 19 nt, Artificial Sequence
  Description of Artificial Sequence: Synthetic oligonucleotide
  Antisense strand to SEQ ID NO: 1409064
uuuccgguuaucaaacaga

SEQ ID NO: 1409066 - RNA, 19 nt, Artificial Sequence
  Description of Artificial Sequence: Synthetic oligonucleotide
  Sense strand starting at position 2784 of SEQ ID NO: 1243322
cuguuugauaaccggaaau

SEQ ID NO: 1409067 - RNA, 19 nt, Artificial Sequence
  Description of Artificial Sequence: Synthetic oligonucleotide
  Antisense strand to SEQ ID NO: 1409066
auuuccgguuaucaaacag

SEQ ID NO: 1409068 - RNA, 19 nt, Artificial Sequence
  Description of Artificial Sequence: Synthetic oligonucleotide
  Sense strand starting at position 2797 of SEQ ID NO: 1243322
ggaaauugguggccuggau

SEQ ID NO: 1409069 - RNA, 19 nt, Artificial Sequence
  Description of Artificial Sequence: Synthetic oligonucleotide
  Antisense strand to SEQ ID NO: 1409068
auccaggccaccaauuucc

SEQ ID NO: 1409070 - RNA, 19 nt, Artificial Sequence
  Description of Artificial Sequence: Synthetic oligonucleotide
  Sense strand starting at position 2892 of SEQ ID NO: 1243322
cucacucuuucccuaguga

SEQ ID NO: 1409071 - RNA, 19 nt, Artificial Sequence
  Description of Artificial Sequence: Synthetic oligonucleotide
  Antisense strand to SEQ ID NO: 1409070
ucacuagggaaagagugag

SEQ ID NO: 1409072 - RNA, 19 nt, Artificial Sequence
  Description of Artificial Sequence: Synthetic oligonucleotide
  Sense strand starting at position 3491 of SEQ ID NO: 1243322
ucgcauguaaagugauaga

SEQ ID NO: 1409073 - RNA, 19 nt, Artificial Sequence
  Description of Artificial Sequence: Synthetic oligonucleotide
  Antisense strand to SEQ ID NO: 1409072
ucuaucacuuuacaugcga

SEQ ID NO: 1409074 - RNA, 19 nt, Artificial Sequence
  Description of Artificial Sequence: Synthetic oligonucleotide
  Sense strand starting at position 3494 of SEQ ID NO: 1243322
cauguaaagugauagagag

SEQ ID NO: 1409075 - RNA, 19 nt, Artificial Sequence
  Description of Artificial Sequence: Synthetic oligonucleotide
  Antisense strand to SEQ ID NO: 1409074
cucucuaucacuuuacaug

SEQ ID NO: 1409076 - RNA, 19 nt, Artificial Sequence
  Description of Artificial Sequence: Synthetic oligonucleotide
  Sense strand starting at position 3547 of SEQ ID NO: 1243322
ugugcguggcuggaugaua

SEQ ID NO: 1409077 - RNA, 19 nt, Artificial Sequence
  Description of Artificial Sequence: Synthetic oligonucleotide
  Antisense strand to SEQ ID NO: 1409076
uaucauccagccacgcaca

SEQ ID NO: 1409078 - RNA, 19 nt, Artificial Sequence
  Description of Artificial Sequence: Synthetic oligonucleotide
  Sense strand starting at position 3548 of SEQ ID NO: 1243322
gugcguggcuggaugauau

SEQ ID NO: 1409079 - RNA, 19 nt, Artificial Sequence
  Description of Artificial Sequence: Synthetic oligonucleotide
  Antisense strand to SEQ ID NO: 1409078
auaucauccagccacgcac

SEQ ID NO: 1409080 - RNA, 19 nt, Artificial Sequence
  Description of Artificial Sequence: Synthetic oligonucleotide
  Sense strand starting at position 3696 of SEQ ID NO: 1243322
guuggcaaccucuaccauu

SEQ ID NO: 1409081 - RNA, 19 nt, Artificial Sequence
  Description of Artificial Sequence: Synthetic oligonucleotide
  Antisense strand to SEQ ID NO: 1409080
aaugguagagguugccaac

SEQ ID NO: 1409082 - RNA, 19 nt, Artificial Sequence
  Description of Artificial Sequence: Synthetic oligonucleotide
  Sense strand starting at position 3748 of SEQ ID NO: 1243322
uccugccucugucuagauu

SEQ ID NO: 1409083 - RNA, 19 nt, Artificial Sequence
  Description of Artificial Sequence: Synthetic oligonucleotide
  Antisense strand to SEQ ID NO: 1409082
aaucuagacagaggcagga

SEQ ID NO: 1409084 - RNA, 19 nt, Artificial Sequence
  Description of Artificial Sequence: Synthetic oligonucleotide
  Sense strand starting at position 83 of SEQ ID NO: 1243323
cugugaaguuaguuuagga

SEQ ID NO: 1409085 - RNA, 19 nt, Artificial Sequence
  Description of Artificial Sequence: Synthetic oligonucleotide
  Antisense strand to SEQ ID NO: 1409084
uccuaaacuaacuucacag

SEQ ID NO: 1409086 - RNA, 19 nt, Artificial Sequence
  Description of Artificial Sequence: Synthetic oligonucleotide
  Sense strand starting at position 241 of SEQ ID NO: 1243323
auaaauaagcuggguuuau

SEQ ID NO: 1409087 - RNA, 19 nt, Artificial Sequence
  Description of Artificial Sequence: Synthetic oligonucleotide
  Antisense strand to SEQ ID NO: 1409086
auaaacccagcuuauuuau

SEQ ID NO: 1409088 - RNA, 19 nt, Artificial Sequence
  Description of Artificial Sequence: Synthetic oligonucleotide
  Sense strand starting at position 242 of SEQ ID NO: 1243323
uaaauaagcuggguuuaua

SEQ ID NO: 1409089 - RNA, 19 nt, Artificial Sequence
  Description of Artificial Sequence: Synthetic oligonucleotide
  Antisense strand to SEQ ID NO: 1409088
uauaaacccagcuuauuua

SEQ ID NO: 1409090 - RNA, 19 nt, Artificial Sequence
  Description of Artificial Sequence: Synthetic oligonucleotide
  Sense strand starting at position 665 of SEQ ID NO: 1243323
uuucuauggcucuguauau

SEQ ID NO: 1409091 - RNA, 19 nt, Artificial Sequence
  Description of Artificial Sequence: Synthetic oligonucleotide
  Antisense strand to SEQ ID NO: 1409090
auauacagagccauagaaa

SEQ ID NO: 1409092 - RNA, 19 nt, Artificial Sequence
  Description of Artificial Sequence: Synthetic oligonucleotide
  Sense strand starting at position 666 of SEQ ID NO: 1243323
uucuauggcucuguauaua

SEQ ID NO: 1409093 - RNA, 19 nt, Artificial Sequence
  Description of Artificial Sequence: Synthetic oligonucleotide
  Antisense strand to SEQ ID NO: 1409092
uauauacagagccauagaa

SEQ ID NO: 1409094 - RNA, 19 nt, Artificial Sequence
  Description of Artificial Sequence: Synthetic oligonucleotide
  Sense strand starting at position 669 of SEQ ID NO: 1243323
uauggcucuguauauauga

SEQ ID NO: 1409095 - RNA, 19 nt, Artificial Sequence
  Description of Artificial Sequence: Synthetic oligonucleotide
  Antisense strand to SEQ ID NO: 1409094
ucauauauacagagccaua

SEQ ID NO: 1409096 - RNA, 19 nt, Artificial Sequence
  Description of Artificial Sequence: Synthetic oligonucleotide
  Sense strand starting at position 677 of SEQ ID NO: 1243323
uguauauaugacuguguag

SEQ ID NO: 1409097 - RNA, 19 nt, Artificial Sequence
  Description of Artificial Sequence: Synthetic oligonucleotide
  Antisense strand to SEQ ID NO: 1409096
cuacacagucauauauaca

SEQ ID NO: 1409098 - RNA, 19 nt, Artificial Sequence
  Description of Artificial Sequence: Synthetic oligonucleotide
  Sense strand starting at position 679 of SEQ ID NO: 1243323
uauauaugacuguguaggu

SEQ ID NO: 1409099 - RNA, 19 nt, Artificial Sequence
  Description of Artificial Sequence: Synthetic oligonucleotide
  Antisense strand to SEQ ID NO: 1409098
accuacacagucauauaua

SEQ ID NO: 1409100 - RNA, 19 nt, Artificial Sequence
  Description of Artificial Sequence: Synthetic oligonucleotide
  Sense strand starting at position 700 of SEQ ID NO: 1243323
gggaaagggucuagaagga

SEQ ID NO: 1409101 - RNA, 19 nt, Artificial Sequence
  Description of Artificial Sequence: Synthetic oligonucleotide
  Antisense strand to SEQ ID NO: 1409100
uccuucuagacccuuuccc

SEQ ID NO: 1409102 - RNA, 19 nt, Artificial Sequence
  Description of Artificial Sequence: Synthetic oligonucleotide
  Sense strand starting at position 730 of SEQ ID NO: 1243323
uuaugaagguguuuaccuu

SEQ ID NO: 1409103 - RNA, 19 nt, Artificial Sequence
  Description of Artificial Sequence: Synthetic oligonucleotide
  Antisense strand to SEQ ID NO: 1409102
aagguaaacaccuucauaa

SEQ ID NO: 1409104 - RNA, 19 nt, Artificial Sequence
  Description of Artificial Sequence: Synthetic oligonucleotide
  Sense strand starting at position 790 of SEQ ID NO: 1243323
aagaauggaucccuguguu

SEQ ID NO: 1409105 - RNA, 19 nt, Artificial Sequence
  Description of Artificial Sequence: Synthetic oligonucleotide
  Antisense strand to SEQ ID NO: 1409104
aacacagggauccauucuu

SEQ ID NO: 1409106 - RNA, 19 nt, Artificial Sequence
  Description of Artificial Sequence: Synthetic oligonucleotide
  Sense strand starting at position 800 of SEQ ID NO: 1243323
cccuguguucugcauggaa

SEQ ID NO: 1409107 - RNA, 19 nt, Artificial Sequence
  Description of Artificial Sequence: Synthetic oligonucleotide
  Antisense strand to SEQ ID NO: 1409106
uuccaugcagaacacaggg

SEQ ID NO: 1409108 - RNA, 19 nt, Artificial Sequence
  Description of Artificial Sequence: Synthetic oligonucleotide
  Sense strand starting at position 802 of SEQ ID NO: 1243323
cuguguucugcauggaauu

SEQ ID NO: 1409109 - RNA, 19 nt, Artificial Sequence
  Description of Artificial Sequence: Synthetic oligonucleotide
  Antisense strand to SEQ ID NO: 1409108
aauuccaugcagaacacag

SEQ ID NO: 1409110 - RNA, 19 nt, Artificial Sequence
  Description of Artificial Sequence: Synthetic oligonucleotide
  Sense strand starting at position 803 of SEQ ID NO: 1243323
uguguucugcauggaauua

SEQ ID NO: 1409111 - RNA, 19 nt, Artificial Sequence
  Description of Artificial Sequence: Synthetic oligonucleotide
  Antisense strand to SEQ ID NO: 1409110
uaauuccaugcagaacaca

SEQ ID NO: 1409112 - RNA, 19 nt, Artificial Sequence
  Description of Artificial Sequence: Synthetic oligonucleotide
  Sense strand starting at position 858 of SEQ ID NO: 1243323
gaugcugggaucugagaca

SEQ ID NO: 1409113 - RNA, 19 nt, Artificial Sequence
  Description of Artificial Sequence: Synthetic oligonucleotide
  Antisense strand to SEQ ID NO: 1409112
ugucucagaucccagcauc

SEQ ID NO: 1409114 - RNA, 19 nt, Artificial Sequence
  Description of Artificial Sequence: Synthetic oligonucleotide
  Sense strand starting at position 1076 of SEQ ID NO: 1243323
gagugagaaugucccugua

SEQ ID NO: 1409115 - RNA, 19 nt, Artificial Sequence
  Description of Artificial Sequence: Synthetic oligonucleotide
  Antisense strand to SEQ ID NO: 1409114
uacagggacauucucacuc

SEQ ID NO: 1409116 - RNA, 19 nt, Artificial Sequence
  Description of Artificial Sequence: Synthetic oligonucleotide
  Sense strand starting at position 1078 of SEQ ID NO: 1243323
gugagaaugucccuguacu

SEQ ID NO: 1409117 - RNA, 19 nt, Artificial Sequence
  Description of Artificial Sequence: Synthetic oligonucleotide
  Antisense strand to SEQ ID NO: 1409116
aguacagggacauucucac

SEQ ID NO: 1409118 - RNA, 19 nt, Artificial Sequence
  Description of Artificial Sequence: Synthetic oligonucleotide
  Sense strand starting at position 1079 of SEQ ID NO: 1243323
ugagaaugucccuguacua

SEQ ID NO: 1409119 - RNA, 19 nt, Artificial Sequence
  Description of Artificial Sequence: Synthetic oligonucleotide
  Antisense strand to SEQ ID NO: 1409118
uaguacagggacauucuca

SEQ ID NO: 1409120 - RNA, 19 nt, Artificial Sequence
  Description of Artificial Sequence: Synthetic oligonucleotide
  Sense strand starting at position 1135 of SEQ ID NO: 1243323
auaugacauuguccagaca

SEQ ID NO: 1409121 - RNA, 19 nt, Artificial Sequence
  Description of Artificial Sequence: Synthetic oligonucleotide
  Antisense strand to SEQ ID NO: 1409120
ugucuggacaaugucauau

SEQ ID NO: 1409122 - RNA, 19 nt, Artificial Sequence
  Description of Artificial Sequence: Synthetic oligonucleotide
  Sense strand starting at position 1167 of SEQ ID NO: 1243323
ugagaauccucagcgcaga

SEQ ID NO: 1409123 - RNA, 19 nt, Artificial Sequence
  Description of Artificial Sequence: Synthetic oligonucleotide
  Antisense strand to SEQ ID NO: 1409122
ucugcgcugaggauucuca

SEQ ID NO: 1409124 - RNA, 19 nt, Artificial Sequence
  Description of Artificial Sequence: Synthetic oligonucleotide
  Sense strand starting at position 1415 of SEQ ID NO: 1243323
ugcccugugagcgaaguua

SEQ ID NO: 1409125 - RNA, 19 nt, Artificial Sequence
  Description of Artificial Sequence: Synthetic oligonucleotide
  Antisense strand to SEQ ID NO: 1409124
uaacuucgcucacagggca

SEQ ID NO: 1409126 - RNA, 19 nt, Artificial Sequence
  Description of Artificial Sequence: Synthetic oligonucleotide
  Sense strand starting at position 1475 of SEQ ID NO: 1243323
guagaaagcgcucucgagu

SEQ ID NO: 1409127 - RNA, 19 nt, Artificial Sequence
  Description of Artificial Sequence: Synthetic oligonucleotide
  Antisense strand to SEQ ID NO: 1409126
acucgagagcgcuuucuac

SEQ ID NO: 1409128 - RNA, 19 nt, Artificial Sequence
  Description of Artificial Sequence: Synthetic oligonucleotide
  Sense strand starting at position 1481 of SEQ ID NO: 1243323
agcgcucucgaguuucauu

SEQ ID NO: 1409129 - RNA, 19 nt, Artificial Sequence
  Description of Artificial Sequence: Synthetic oligonucleotide
  Antisense strand to SEQ ID NO: 1409128
aaugaaacucgagagcgcu

SEQ ID NO: 1409130 - RNA, 19 nt, Artificial Sequence
  Description of Artificial Sequence: Synthetic oligonucleotide
  Sense strand starting at position 2201 of SEQ ID NO: 1243323
ccacgaauauguccacaga

SEQ ID NO: 1409131 - RNA, 19 nt, Artificial Sequence
  Description of Artificial Sequence: Synthetic oligonucleotide
  Antisense strand to SEQ ID NO: 1409130
ucuguggacauauucgugg

SEQ ID NO: 1409132 - RNA, 19 nt, Artificial Sequence
  Description of Artificial Sequence: Synthetic oligonucleotide
  Sense strand starting at position 2380 of SEQ ID NO: 1243323
cacaguguccucugggcaa

SEQ ID NO: 1409133 - RNA, 19 nt, Artificial Sequence
  Description of Artificial Sequence: Synthetic oligonucleotide
  Antisense strand to SEQ ID NO: 1409132
uugcccagaggacacugug

SEQ ID NO: 1409134 - RNA, 19 nt, Artificial Sequence
  Description of Artificial Sequence: Synthetic oligonucleotide
  Sense strand starting at position 2393 of SEQ ID NO: 1243323
gggcaaguuggugacuuua

SEQ ID NO: 1409135 - RNA, 19 nt, Artificial Sequence
  Description of Artificial Sequence: Synthetic oligonucleotide
  Antisense strand to SEQ ID NO: 1409134
uaaagucaccaacuugccc

SEQ ID NO: 1409136 - RNA, 19 nt, Artificial Sequence
  Description of Artificial Sequence: Synthetic oligonucleotide
  Sense strand starting at position 2510 of SEQ ID NO: 1243323
agguccuaucuuugcauua

SEQ ID NO: 1409137 - RNA, 19 nt, Artificial Sequence
  Description of Artificial Sequence: Synthetic oligonucleotide
  Antisense strand to SEQ ID NO: 1409136
uaaugcaaagauaggaccu

SEQ ID NO: 1409138 - RNA, 19 nt, Artificial Sequence
  Description of Artificial Sequence: Synthetic oligonucleotide
  Sense strand starting at position 2623 of SEQ ID NO: 1243323
ugcgcauuuccucgaaucu

SEQ ID NO: 1409139 - RNA, 19 nt, Artificial Sequence
  Description of Artificial Sequence: Synthetic oligonucleotide
  Antisense strand to SEQ ID NO: 1409138
agauucgaggaaaugcgca

SEQ ID NO: 1409140 - RNA, 19 nt, Artificial Sequence
  Description of Artificial Sequence: Synthetic oligonucleotide
  Sense strand starting at position 2624 of SEQ ID NO: 1243323
gcgcauuuccucgaaucuu

SEQ ID NO: 1409141 - RNA, 19 nt, Artificial Sequence
  Description of Artificial Sequence: Synthetic oligonucleotide
  Antisense strand to SEQ ID NO: 1409140
aagauucgaggaaaugcgc

SEQ ID NO: 1409142 - RNA, 19 nt, Artificial Sequence
  Description of Artificial Sequence: Synthetic oligonucleotide
  Sense strand starting at position 2722 of SEQ ID NO: 1243323
acacuuaguuuccuguaua

SEQ ID NO: 1409143 - RNA, 19 nt, Artificial Sequence
  Description of Artificial Sequence: Synthetic oligonucleotide
  Antisense strand to SEQ ID NO: 1409142
uauacaggaaacuaagugu

SEQ ID NO: 1409144 - RNA, 19 nt, Artificial Sequence
  Description of Artificial Sequence: Synthetic oligonucleotide
  Sense strand starting at position 2742 of SEQ ID NO: 1243323
uucuccauagauugucuua

SEQ ID NO: 1409145 - RNA, 19 nt, Artificial Sequence
  Description of Artificial Sequence: Synthetic oligonucleotide
  Antisense strand to SEQ ID NO: 1409144
uaagacaaucuauggagaa

SEQ ID NO: 1409146 - RNA, 19 nt, Artificial Sequence
  Description of Artificial Sequence: Synthetic oligonucleotide
  Sense strand starting at position 2745 of SEQ ID NO: 1243323
uccauagauugucuuaaug

SEQ ID NO: 1409147 - RNA, 19 nt, Artificial Sequence
  Description of Artificial Sequence: Synthetic oligonucleotide
  Antisense strand to SEQ ID NO: 1409146
cauuaagacaaucuaugga

SEQ ID NO: 1409148 - RNA, 19 nt, Artificial Sequence
  Description of Artificial Sequence: Synthetic oligonucleotide
  Sense strand starting at position 3234 of SEQ ID NO: 1243323
uuuguuuauguggaauaca

SEQ ID NO: 1409149 - RNA, 19 nt, Artificial Sequence
  Description of Artificial Sequence: Synthetic oligonucleotide
  Antisense strand to SEQ ID NO: 1409148
uguauuccacauaaacaaa

SEQ ID NO: 1409150 - RNA, 19 nt, Artificial Sequence
  Description of Artificial Sequence: Synthetic oligonucleotide
  Sense strand starting at position 3565 of SEQ ID NO: 1243323
acugcuuccggcuaauuaa

SEQ ID NO: 1409151 - RNA, 19 nt, Artificial Sequence
  Description of Artificial Sequence: Synthetic oligonucleotide
  Antisense strand to SEQ ID NO: 1409150
uuaauuagccggaagcagu

SEQ ID NO: 1409152 - RNA, 19 nt, Artificial Sequence
  Description of Artificial Sequence: Synthetic oligonucleotide
  Sense strand starting at position 3780 of SEQ ID NO: 1243323
cucuuuaaugcuuggcuua

SEQ ID NO: 1409153 - RNA, 19 nt, Artificial Sequence
  Description of Artificial Sequence: Synthetic oligonucleotide
  Antisense strand to SEQ ID NO: 1409152
uaagccaagcauuaaagag

SEQ ID NO: 1409154 - RNA, 19 nt, Artificial Sequence
  Description of Artificial Sequence: Synthetic oligonucleotide
  Sense strand starting at position 3781 of SEQ ID NO: 1243323
ucuuuaaugcuuggcuuaa

SEQ ID NO: 1409155 - RNA, 19 nt, Artificial Sequence
  Description of Artificial Sequence: Synthetic oligonucleotide
  Antisense strand to SEQ ID NO: 1409154
uuaagccaagcauuaaaga

SEQ ID NO: 1409156 - RNA, 19 nt, Artificial Sequence
  Description of Artificial Sequence: Synthetic oligonucleotide
  Sense strand starting at position 3783 of SEQ ID NO: 1243323
uuuaaugcuuggcuuaaua

SEQ ID NO: 1409157 - RNA, 19 nt, Artificial Sequence
  Description of Artificial Sequence: Synthetic oligonucleotide
  Antisense strand to SEQ ID NO: 1409156
uauuaagccaagcauuaaa

SEQ ID NO: 1409158 - RNA, 19 nt, Artificial Sequence
  Description of Artificial Sequence: Synthetic oligonucleotide
  Sense strand starting at position 3806 of SEQ ID NO: 1243323
acagcuggauucucguauu

SEQ ID NO: 1409159 - RNA, 19 nt, Artificial Sequence
  Description of Artificial Sequence: Synthetic oligonucleotide
  Antisense strand to SEQ ID NO: 1409158
aauacgagaauccagcugu

SEQ ID NO: 1409160 - RNA, 19 nt, Artificial Sequence
  Description of Artificial Sequence: Synthetic oligonucleotide
  Sense strand starting at position 3820 of SEQ ID NO: 1243323
guauucagucggcugcaau

SEQ ID NO: 1409161 - RNA, 19 nt, Artificial Sequence
  Description of Artificial Sequence: Synthetic oligonucleotide
  Antisense strand to SEQ ID NO: 1409160
auugcagccgacugaauac

SEQ ID NO: 1409162 - RNA, 19 nt, Artificial Sequence
  Description of Artificial Sequence: Synthetic oligonucleotide
  Sense strand starting at position 3849 of SEQ ID NO: 1243323
aguugaaguaaaugaagua

SEQ ID NO: 1409163 - RNA, 19 nt, Artificial Sequence
  Description of Artificial Sequence: Synthetic oligonucleotide
  Antisense strand to SEQ ID NO: 1409162
uacuucauuuacuucaacu

SEQ ID NO: 1409164 - RNA, 19 nt, Artificial Sequence
  Description of Artificial Sequence: Synthetic oligonucleotide
  Sense strand starting at position 97 of SEQ ID NO: 1243324
aggugagauguccagagca

SEQ ID NO: 1409165 - RNA, 19 nt, Artificial Sequence
  Description of Artificial Sequence: Synthetic oligonucleotide
  Antisense strand to SEQ ID NO: 1409164
ugcucuggacaucucaccu

SEQ ID NO: 1409166 - RNA, 19 nt, Artificial Sequence
  Description of Artificial Sequence: Synthetic oligonucleotide
  Sense strand starting at position 135 of SEQ ID NO: 1243324
uccauagauugauaugauu

SEQ ID NO: 1409167 - RNA, 19 nt, Artificial Sequence
  Description of Artificial Sequence: Synthetic oligonucleotide
  Antisense strand to SEQ ID NO: 1409166
aaucauaucaaucuaugga

SEQ ID NO: 1409168 - RNA, 19 nt, Artificial Sequence
  Description of Artificial Sequence: Synthetic oligonucleotide
  Sense strand starting at position 185 of SEQ ID NO: 1243324
gcuaguagccucugggcaa

SEQ ID NO: 1409169 - RNA, 19 nt, Artificial Sequence
  Description of Artificial Sequence: Synthetic oligonucleotide
  Antisense strand to SEQ ID NO: 1409168
uugcccagaggcuacuagc

SEQ ID NO: 1409170 - RNA, 19 nt, Artificial Sequence
  Description of Artificial Sequence: Synthetic oligonucleotide
  Sense strand starting at position 378 of SEQ ID NO: 1243324
gcagcccuccucugugaau

SEQ ID NO: 1409171 - RNA, 19 nt, Artificial Sequence
  Description of Artificial Sequence: Synthetic oligonucleotide
  Antisense strand to SEQ ID NO: 1409170
auucacagaggagggcugc

SEQ ID NO: 1409172 - RNA, 19 nt, Artificial Sequence
  Description of Artificial Sequence: Synthetic oligonucleotide
  Sense strand starting at position 497 of SEQ ID NO: 1243324
aucagucgacaaugucaga

SEQ ID NO: 1409173 - RNA, 19 nt, Artificial Sequence
  Description of Artificial Sequence: Synthetic oligonucleotide
  Antisense strand to SEQ ID NO: 1409172
ucugacauugucgacugau

SEQ ID NO: 1409174 - RNA, 19 nt, Artificial Sequence
  Description of Artificial Sequence: Synthetic oligonucleotide
  Sense strand starting at position 542 of SEQ ID NO: 1243324
ugaucuugcucuuugcaaa

SEQ ID NO: 1409175 - RNA, 19 nt, Artificial Sequence
  Description of Artificial Sequence: Synthetic oligonucleotide
  Antisense strand to SEQ ID NO: 1409174
uuugcaaagagcaagauca

SEQ ID NO: 1409176 - RNA, 19 nt, Artificial Sequence
  Description of Artificial Sequence: Synthetic oligonucleotide
  Sense strand starting at position 610 of SEQ ID NO: 1243324
gacuguagcuaccauuaga

SEQ ID NO: 1409177 - RNA, 19 nt, Artificial Sequence
  Description of Artificial Sequence: Synthetic oligonucleotide
  Antisense strand to SEQ ID NO: 1409176
ucuaaugguagcuacaguc

SEQ ID NO: 1409178 - RNA, 19 nt, Artificial Sequence
  Description of Artificial Sequence: Synthetic oligonucleotide
  Sense strand starting at position 613 of SEQ ID NO: 1243324
uguagcuaccauuagauua

SEQ ID NO: 1409179 - RNA, 19 nt, Artificial Sequence
  Description of Artificial Sequence: Synthetic oligonucleotide
  Antisense strand to SEQ ID NO: 1409178
uaaucuaaugguagcuaca

SEQ ID NO: 1409180 - RNA, 19 nt, Artificial Sequence
  Description of Artificial Sequence: Synthetic oligonucleotide
  Sense strand starting at position 646 of SEQ ID NO: 1243324
augugauacccuuggugga

SEQ ID NO: 1409181 - RNA, 19 nt, Artificial Sequence
  Description of Artificial Sequence: Synthetic oligonucleotide
  Antisense strand to SEQ ID NO: 1409180
uccaccaaggguaucacau

SEQ ID NO: 1409182 - RNA, 19 nt, Artificial Sequence
  Description of Artificial Sequence: Synthetic oligonucleotide
  Sense strand starting at position 647 of SEQ ID NO: 1243324
ugugauacccuugguggaa

SEQ ID NO: 1409183 - RNA, 19 nt, Artificial Sequence
  Description of Artificial Sequence: Synthetic oligonucleotide
  Antisense strand to SEQ ID NO: 1409182
uuccaccaaggguaucaca

SEQ ID NO: 1409184 - RNA, 19 nt, Artificial Sequence
  Description of Artificial Sequence: Synthetic oligonucleotide
  Sense strand starting at position 734 of SEQ ID NO: 1243324
acgauaaucgucugaggua

SEQ ID NO: 1409185 - RNA, 19 nt, Artificial Sequence
  Description of Artificial Sequence: Synthetic oligonucleotide
  Antisense strand to SEQ ID NO: 1409184
uaccucagacgauuaucgu

SEQ ID NO: 1409186 - RNA, 19 nt, Artificial Sequence
  Description of Artificial Sequence: Synthetic oligonucleotide
  Sense strand starting at position 739 of SEQ ID NO: 1243324
aaucgucugagguagguau

SEQ ID NO: 1409187 - RNA, 19 nt, Artificial Sequence
  Description of Artificial Sequence: Synthetic oligonucleotide
  Antisense strand to SEQ ID NO: 1409186
auaccuaccucagacgauu

SEQ ID NO: 1409188 - RNA, 19 nt, Artificial Sequence
  Description of Artificial Sequence: Synthetic oligonucleotide
  Sense strand starting at position 743 of SEQ ID NO: 1243324
gucugagguagguaucaca

SEQ ID NO: 1409189 - RNA, 19 nt, Artificial Sequence
  Description of Artificial Sequence: Synthetic oligonucleotide
  Antisense strand to SEQ ID NO: 1409188
ugugauaccuaccucagac

SEQ ID NO: 1409190 - RNA, 19 nt, Artificial Sequence
  Description of Artificial Sequence: Synthetic oligonucleotide
  Sense strand starting at position 1020 of SEQ ID NO: 1243324
aguuauaugaggugcuauu

SEQ ID NO: 1409191 - RNA, 19 nt, Artificial Sequence
  Description of Artificial Sequence: Synthetic oligonucleotide
  Antisense strand to SEQ ID NO: 1409190
aauagcaccucauauaacu

SEQ ID NO: 1409192 - RNA, 19 nt, Artificial Sequence
  Description of Artificial Sequence: Synthetic oligonucleotide
  Sense strand starting at position 1030 of SEQ ID NO: 1243324
ggugcuauuacuuggccca

SEQ ID NO: 1409193 - RNA, 19 nt, Artificial Sequence
  Description of Artificial Sequence: Synthetic oligonucleotide
  Antisense strand to SEQ ID NO: 1409192
ugggccaaguaauagcacc

SEQ ID NO: 1409194 - RNA, 19 nt, Artificial Sequence
  Description of Artificial Sequence: Synthetic oligonucleotide
  Sense strand starting at position 1031 of SEQ ID NO: 1243324
gugcuauuacuuggcccau

SEQ ID NO: 1409195 - RNA, 19 nt, Artificial Sequence
  Description of Artificial Sequence: Synthetic oligonucleotide
  Antisense strand to SEQ ID NO: 1409194
augggccaaguaauagcac

SEQ ID NO: 1409196 - RNA, 19 nt, Artificial Sequence
  Description of Artificial Sequence: Synthetic oligonucleotide
  Sense strand starting at position 1032 of SEQ ID NO: 1243324
ugcuauuacuuggcccauu

SEQ ID NO: 1409197 - RNA, 19 nt, Artificial Sequence
  Description of Artificial Sequence: Synthetic oligonucleotide
  Antisense strand to SEQ ID NO: 1409196
aaugggccaaguaauagca

SEQ ID NO: 1409198 - RNA, 19 nt, Artificial Sequence
  Description of Artificial Sequence: Synthetic oligonucleotide
  Sense strand starting at position 1033 of SEQ ID NO: 1243324
gcuauuacuuggcccauuu

SEQ ID NO: 1409199 - RNA, 19 nt, Artificial Sequence
  Description of Artificial Sequence: Synthetic oligonucleotide
  Antisense strand to SEQ ID NO: 1409198
aaaugggccaaguaauagc

SEQ ID NO: 1409200 - RNA, 19 nt, Artificial Sequence
  Description of Artificial Sequence: Synthetic oligonucleotide
  Sense strand starting at position 1285 of SEQ ID NO: 1243324
cggagaguucccgaucagu

SEQ ID NO: 1409201 - RNA, 19 nt, Artificial Sequence
  Description of Artificial Sequence: Synthetic oligonucleotide
  Antisense strand to SEQ ID NO: 1409200
acugaucgggaacucuccg

SEQ ID NO: 1409202 - RNA, 19 nt, Artificial Sequence
  Description of Artificial Sequence: Synthetic oligonucleotide
  Sense strand starting at position 1316 of SEQ ID NO: 1243324
gggcgaguccugugcagaa

SEQ ID NO: 1409203 - RNA, 19 nt, Artificial Sequence
  Description of Artificial Sequence: Synthetic oligonucleotide
  Antisense strand to SEQ ID NO: 1409202
uucugcacaggacucgccc

SEQ ID NO: 1409204 - RNA, 19 nt, Artificial Sequence
  Description of Artificial Sequence: Synthetic oligonucleotide
  Sense strand starting at position 1318 of SEQ ID NO: 1243324
gcgaguccugugcagaaau

SEQ ID NO: 1409205 - RNA, 19 nt, Artificial Sequence
  Description of Artificial Sequence: Synthetic oligonucleotide
  Antisense strand to SEQ ID NO: 1409204
auuucugcacaggacucgc

SEQ ID NO: 1409206 - RNA, 19 nt, Artificial Sequence
  Description of Artificial Sequence: Synthetic oligonucleotide
  Sense strand starting at position 1320 of SEQ ID NO: 1243324
gaguccugugcagaaauca

SEQ ID NO: 1409207 - RNA, 19 nt, Artificial Sequence
  Description of Artificial Sequence: Synthetic oligonucleotide
  Antisense strand to SEQ ID NO: 1409206
ugauuucugcacaggacuc

SEQ ID NO: 1409208 - RNA, 19 nt, Artificial Sequence
  Description of Artificial Sequence: Synthetic oligonucleotide
  Sense strand starting at position 1541 of SEQ ID NO: 1243324
agcauuccagaggguagaa

SEQ ID NO: 1409209 - RNA, 19 nt, Artificial Sequence
  Description of Artificial Sequence: Synthetic oligonucleotide
  Antisense strand to SEQ ID NO: 1409208
uucuacccucuggaaugcu

SEQ ID NO: 1409210 - RNA, 19 nt, Artificial Sequence
  Description of Artificial Sequence: Synthetic oligonucleotide
  Sense strand starting at position 2688 of SEQ ID NO: 1243324
ccaccaugcccggauuaau

SEQ ID NO: 1409211 - RNA, 19 nt, Artificial Sequence
  Description of Artificial Sequence: Synthetic oligonucleotide
  Antisense strand to SEQ ID NO: 1409210
auuaauccgggcauggugg

SEQ ID NO: 1409212 - RNA, 19 nt, Artificial Sequence
  Description of Artificial Sequence: Synthetic oligonucleotide
  Sense strand starting at position 3408 of SEQ ID NO: 1243324
aggaaaggaucuguucuua

SEQ ID NO: 1409213 - RNA, 19 nt, Artificial Sequence
  Description of Artificial Sequence: Synthetic oligonucleotide
  Antisense strand to SEQ ID NO: 1409212
uaagaacagauccuuuccu

SEQ ID NO: 1409214 - RNA, 19 nt, Artificial Sequence
  Description of Artificial Sequence: Synthetic oligonucleotide
  Sense strand starting at position 3427 of SEQ ID NO: 1243324
ccuagagcuucucagauuu

SEQ ID NO: 1409215 - RNA, 19 nt, Artificial Sequence
  Description of Artificial Sequence: Synthetic oligonucleotide
  Antisense strand to SEQ ID NO: 1409214
aaaucugagaagcucuagg

SEQ ID NO: 1409216 - RNA, 19 nt, Artificial Sequence
  Description of Artificial Sequence: Synthetic oligonucleotide
  Sense strand starting at position 3429 of SEQ ID NO: 1243324
uagagcuucucagauuuga

SEQ ID NO: 1409217 - RNA, 19 nt, Artificial Sequence
  Description of Artificial Sequence: Synthetic oligonucleotide
  Antisense strand to SEQ ID NO: 1409216
ucaaaucugagaagcucua

SEQ ID NO: 1409218 - RNA, 19 nt, Artificial Sequence
  Description of Artificial Sequence: Synthetic oligonucleotide
  Sense strand starting at position 3440 of SEQ ID NO: 1243324
agauuugaaugugguuaca

SEQ ID NO: 1409219 - RNA, 19 nt, Artificial Sequence
  Description of Artificial Sequence: Synthetic oligonucleotide
  Antisense strand to SEQ ID NO: 1409218
uguaaccacauucaaaucu

SEQ ID NO: 1409220 - RNA, 19 nt, Artificial Sequence
  Description of Artificial Sequence: Synthetic oligonucleotide
  Sense strand starting at position 3443 of SEQ ID NO: 1243324
uuugaaugugguuacaauc

SEQ ID NO: 1409221 - RNA, 19 nt, Artificial Sequence
  Description of Artificial Sequence: Synthetic oligonucleotide
  Antisense strand to SEQ ID NO: 1409220
gauuguaaccacauucaaa

SEQ ID NO: 1409222 - RNA, 19 nt, Artificial Sequence
  Description of Artificial Sequence: Synthetic oligonucleotide
  Sense strand starting at position 3482 of SEQ ID NO: 1243324
ugcagauucugacucgaua

SEQ ID NO: 1409223 - RNA, 19 nt, Artificial Sequence
  Description of Artificial Sequence: Synthetic oligonucleotide
  Antisense strand to SEQ ID NO: 1409222
uaucgagucagaaucugca

SEQ ID NO: 1409224 - RNA, 19 nt, Artificial Sequence
  Description of Artificial Sequence: Synthetic oligonucleotide
  Sense strand starting at position 3505 of SEQ ID NO: 1243324
uggagugggucuuaagagu

SEQ ID NO: 1409225 - RNA, 19 nt, Artificial Sequence
  Description of Artificial Sequence: Synthetic oligonucleotide
  Antisense strand to SEQ ID NO: 1409224
acucuuaagacccacucca

SEQ ID NO: 1409226 - RNA, 19 nt, Artificial Sequence
  Description of Artificial Sequence: Synthetic oligonucleotide
  Sense strand starting at position 3514 of SEQ ID NO: 1243324
ucuuaagaguccgaauuuc

SEQ ID NO: 1409227 - RNA, 19 nt, Artificial Sequence
  Description of Artificial Sequence: Synthetic oligonucleotide
  Antisense strand to SEQ ID NO: 1409226
gaaauucggacucuuaaga

SEQ ID NO: 1409228 - RNA, 19 nt, Artificial Sequence
  Description of Artificial Sequence: Synthetic oligonucleotide
  Sense strand starting at position 3529 of SEQ ID NO: 1243324
uuuccaaauuccuaggaga

SEQ ID NO: 1409229 - RNA, 19 nt, Artificial Sequence
  Description of Artificial Sequence: Synthetic oligonucleotide
  Antisense strand to SEQ ID NO: 1409228
ucuccuaggaauuuggaaa

SEQ ID NO: 1409230 - RNA, 19 nt, Artificial Sequence
  Description of Artificial Sequence: Synthetic oligonucleotide
  Sense strand starting at position 3570 of SEQ ID NO: 1243324
gcgguuugcccagguggau

SEQ ID NO: 1409231 - RNA, 19 nt, Artificial Sequence
  Description of Artificial Sequence: Synthetic oligonucleotide
  Antisense strand to SEQ ID NO: 1409230
auccaccugggcaaaccgc

SEQ ID NO: 1409232 - RNA, 19 nt, Artificial Sequence
  Description of Artificial Sequence: Synthetic oligonucleotide
  Sense strand starting at position 3596 of SEQ ID NO: 1243324
gguccagcauuauuggaga

SEQ ID NO: 1409233 - RNA, 19 nt, Artificial Sequence
  Description of Artificial Sequence: Synthetic oligonucleotide
  Antisense strand to SEQ ID NO: 1409232
ucuccaauaaugcuggacc

SEQ ID NO: 1409234 - RNA, 19 nt, Artificial Sequence
  Description of Artificial Sequence: Synthetic oligonucleotide
  Sense strand starting at position 3599 of SEQ ID NO: 1243324
ccagcauuauuggagagaa

SEQ ID NO: 1409235 - RNA, 19 nt, Artificial Sequence
  Description of Artificial Sequence: Synthetic oligonucleotide
  Antisense strand to SEQ ID NO: 1409234
uucucuccaauaaugcugg

SEQ ID NO: 1409236 - RNA, 19 nt, Artificial Sequence
  Description of Artificial Sequence: Synthetic oligonucleotide
  Sense strand starting at position 3712 of SEQ ID NO: 1243324
cccaaauaagcauggcuaa

SEQ ID NO: 1409237 - RNA, 19 nt, Artificial Sequence
  Description of Artificial Sequence: Synthetic oligonucleotide
  Antisense strand to SEQ ID NO: 1409236
uuagccaugcuuauuuggg

SEQ ID NO: 1409238 - RNA, 19 nt, Artificial Sequence
  Description of Artificial Sequence: Synthetic oligonucleotide
  Sense strand starting at position 3724 of SEQ ID NO: 1243324
uggcuaacaguuugguuau

SEQ ID NO: 1409239 - RNA, 19 nt, Artificial Sequence
  Description of Artificial Sequence: Synthetic oligonucleotide
  Antisense strand to SEQ ID NO: 1409238
auaaccaaacuguuagcca

SEQ ID NO: 1409240 - RNA, 19 nt, Artificial Sequence
  Description of Artificial Sequence: Synthetic oligonucleotide
  Sense strand starting at position 3726 of SEQ ID NO: 1243324
gcuaacaguuugguuauua

SEQ ID NO: 1409241 - RNA, 19 nt, Artificial Sequence
  Description of Artificial Sequence: Synthetic oligonucleotide
  Antisense strand to SEQ ID NO: 1409240
uaauaaccaaacuguuagc

SEQ ID NO: 1409242 - RNA, 19 nt, Artificial Sequence
  Description of Artificial Sequence: Synthetic oligonucleotide
  Sense strand starting at position 3727 of SEQ ID NO: 1243324
cuaacaguuugguuauuau

SEQ ID NO: 1409243 - RNA, 19 nt, Artificial Sequence
  Description of Artificial Sequence: Synthetic oligonucleotide
  Antisense strand to SEQ ID NO: 1409242
auaauaaccaaacuguuag

SEQ ID NO: 1409244 - RNA, 19 nt, Artificial Sequence
  Description of Artificial Sequence: Synthetic oligonucleotide
  Sense strand starting at position 544 of SEQ ID NO: 1243325
agacguaagaugugacuuu

SEQ ID NO: 1409245 - RNA, 19 nt, Artificial Sequence
  Description of Artificial Sequence: Synthetic oligonucleotide
  Antisense strand to SEQ ID NO: 1409244
aaagucacaucuuacgucu

SEQ ID NO: 1409246 - RNA, 19 nt, Artificial Sequence
  Description of Artificial Sequence: Synthetic oligonucleotide
  Sense strand starting at position 688 of SEQ ID NO: 1243325
uggauuaauacagguaguu

SEQ ID NO: 1409247 - RNA, 19 nt, Artificial Sequence
  Description of Artificial Sequence: Synthetic oligonucleotide
  Antisense strand to SEQ ID NO: 1409246
aacuaccuguauuaaucca

SEQ ID NO: 1409248 - RNA, 19 nt, Artificial Sequence
  Description of Artificial Sequence: Synthetic oligonucleotide
  Sense strand starting at position 703 of SEQ ID NO: 1243325
aguuuaaagguuuagcauu
